(19) United States
(12) Patent Application Publication
(10) Pub. No.: US 2024/0254659 A1
(43) Pub. Date: Aug. 1, 2024

(54) SYSTEMS AND METHODS FOR REGULATING TARGET GENES

(71) Applicant: Epicrispr Biotechnologies, Inc., South San Francisco, CA (US)

(72) Inventors: Daniel O. Hart, Oakland, CA (US); Lei S. Qi, Palo Alto, CA (US); Timothy Daley, San Francisco, CA (US); Thomas Blair Gainous, Oakland, CA (US); Giovanni Carosso, San Francisco, CA (US); Tengyu Ko, Redwood City, CA (US); Robin W. Yeo, San Francisco, CA (US); Christopher Darryl Still, II, South San Francisco, CA (US)

(21) Appl. No.: 18/417,827

(22) Filed: Jan. 19, 2024

Related U.S. Application Data
(63) Continuation of application No. PCT/US2022/073920, filed on Jul. 20, 2022.
(60) Provisional application No. 63/223,842, filed on Jul. 20, 2021.

(51) Int. Cl. C40B 30/06; C12N 9/22; C12N 15/113

(52) U.S. Cl. CPC C40B 30/06; C12N 9/22; C12N 15/113; C12N 2310/20

(57) ABSTRACT

The disclosure provides compositions, methods, and systems for modulating expression of target genes (e.g., target endogenous genes). Complexes of the disclosure can be useful for bringing one or more heterologous gene effectors into close proximity with a target gene or target gene regulatory sequence, thereby facilitating modulation of an expression or activity level of the target gene. The disclosure provides, for example, compositions, systems, and methods for high throughput screens to identify heterologous gene effector domains and complexes of the effector domains with guide moieties to modulate expression of particular target gene(s). The disclosure also provides complexes identified by systems disclosed herein that can be employed for other purposes, such as research or as therapeutics.

### CROSS REFERENCE

[0001] This application is a continuation application of International Patent Application No. PCT/US2022/073920, filed Jul. 20, 2022, which claims the benefit of U.S. Provisional Application No. 63/223,842, filed Jul. 20, 2021, each of which is incorporated herein by reference in its entirety.

### SEQUENCE LISTING

[0002] The instant application is being filed along with a Sequence Listing in electronic format. The Sequence Listing is provided as a file entitled 55176-715_301_SL.xml and is 60,526,592 bytes in size. The information in the electronic format of the Sequence Listing is herein incorporated by reference in its entirety.

### BACKGROUND

[0003] Complex networks regulate gene expression, underpinning survival, growth, differentiation, and various physiological functions of cells. In some cases, one or more specific genes can be turned on or turned off to effect such regulation in the cells. In some cases, aberrant expression of particular genes contributes to many diseases and conditions. Aberrant expression of a gene of interest can be abnormally increased expression level of the gene, abnormally decreased expression level of the gene, abnormally prolonged duration of expression of the gene, or abnormally shortened duration of expression of the gene.

### SUMMARY

[0004] Agents that are capable of modulating expression of specific genes in a desirable way can have therapeutic benefit, but many strategies that are currently employed fail to elicit effects that are robust, persistent, and/or reversible. In addition, only a selected few gene effectors have been explored and utilized to regulate a wide variety of target genes. Thus, various aspects of the present disclosure provide systems, methods, and compositions comprising one or more gene effectors that can be tailor-made for regulating a specific target gene (e.g., upregulating expression, downregulating expression, prolonging or shortening duration of expression, etc.).

[0005] Disclosed herein, in some aspects, is a method, comprising: (a) contacting a population of cells with a library of complexes, wherein an individual complex of the library comprises: (i) a heterologous gene effector that is different from heterologous gene effectors in other complexes of the library; and (ii) a guide nucleic acid sequence that exhibits 100% sequence identity to guide nucleic acid sequences in the other complexes of the library, wherein the heterologous gene effector and the guide nucleic acid molecule form the individual complex that exhibits specific binding to a target endogenous gene in the population of cells, and wherein the library comprises at least 25 different complexes; (b) upon the contacting, sorting the population of cells based on a change in expression or activity level of the target endogenous gene in the population of cells; and (c) identifying one or more lead heterologous gene effectors of the library that effect the change.

[0006] Disclosed herein, in some aspects, is a method, comprising: (a) contacting a population of cells with a library of complexes, wherein an individual complex of the library comprises: (i) a heterologous gene effector that is different from heterologous gene effectors in other complexes of the library; and (ii) a guide nucleic acid sequence that exhibits 100% sequence identity to guide nucleic acid sequences in the other complexes of the library, wherein the heterologous gene effector and the guide nucleic acid sequence form the individual complex that exhibits specific binding to a target endogenous gene in the population of cells, and wherein the heterologous gene effector comprises a viral gene effector; (b) upon the contacting, sorting the population of cells based on a change in expression or activity level of the target endogenous gene in the population of cells; and (c) identifying one or more lead heterologous gene effectors of the library that effect the change.

[0007] In some embodiments, the viral gene effector is derived from a human virus selected from the group consisting of Adenoviridae, Arenaviridae, Bornaviridae, Coronaviridae, Filoviridae, Flaviviridae, Hepadnaviridae, Herpesviridae, Orthomyxoviridae, Papillomaviridae, Paramyxoviridae, Parvoviridae, Peribunyaviridae, Phenuiviridae, Pneumoviridae, Polyomaviridae, Poxviridae, Retroviridae, and Rhabdoviridae. In some embodiments, the viral gene effector is derived from a human-bat shared virus selected from the group consisting of Flaviviridae, Lyssaviridae, Filoviridae, Paramyxoviridae, Orthomyxoviridae, Coronaviridae, Reoviridae, Togaviridae, Phenuviridae, and Hantaviridae. In some embodiments, the viral gene effector is derived from a virus selected from the group consisting of Archaea-tropic virus, Siphoviridae, podoviridae, Mimiviridae, Nimaviridae, Ligamenvirales, Globuloviridae, Fuselloviridae, Bicaudaviridae, Satellite virus, Iridoviridae, Turriviridae, Caudovirales, Phycodnaviridae and Myoviridae. In some embodiments, the library comprises at least 30, 50, 100, 200, 500, 1,000, 2,000, 5,000, or 10,000 different complexes. In some embodiments, the guide nucleic acid sequence comprises between about 10 and about 30 nucleotides, between about 15 and about 25 nucleotides, or about 15 nucleotides. In some embodiments, the individual complex further comprises a heterologous endonuclease. In some embodiments, the heterologous endonuclease of the individual complex exhibits 100% sequence identity to heterologous endonucleases of the other complexes. In some embodiments, the heterologous gene effector and the heterologous endonuclease are fused to each other. In some embodiments, the heterologous gene effector and the heterologous endonuclease are non-covalently coupled to each other. In some embodiments, the heterologous endonuclease is a Cas protein. In some embodiments, the Cas protein lacks nucleic acid cleavage activity. In some embodiments, the guide nucleic acid sequence is a part of a guide RNA molecule. In some embodiments, the heterologous gene effector comprises a heterologous transcriptional regulator. In some embodiments, the heterologous gene effector comprises a heterologous chromatin regulator. In some embodiments, the change is enhanced expression or activity level of the target endogenous gene. In some embodiments, the change is reduced expression or activity level of the target endogenous gene. In some embodiments, the heterologous gene effector exhibits at least about 80%, at least about 85%, at least about 90%, at least about 95%, at least about 99%, or 100% sequence identity to any one of SEQ ID NOs: 16-16154 or any one of SEQ ID NOs: 16-13605. In some embodiments, the heterologous gene effector exhibits at least about 80%, at least about 85%, at least about 90%, at least about 95%, at least about 99%, or 100% sequence identity to any one of SEQ ID NOs: 16155-47350 or any one of SEQ ID NOs: 16155-43953. In some embodiments, the heterologous gene effector comprises a plurality of different heterologous gene effectors, wherein a combination of the plurality of different heterologous gene effectors of the individual complex is different from combinations of heterologous gene effectors within other complexes of the library. In some embodiments, the plurality of different heterologous gene effectors is not P300, TET1, TET2, TET3, and/or HSF1. In some embodiments, at least one of the plurality of different heterologous gene effectors is not VP64, P65, Rta, VPR, AD2, CR3, ELKF1, GATA4, PRVIE, p53, SP1, MYOD, MEF2C, TAX, PPAR-gamma, MED1, MED7, MED17, MED26, MED29, TBP, GTF2H-2D, GTF2B, CBP, HSF1, MS2-p65-HSF1, MS2-TET1, NLS-dCas9-VP64, P300, p65, PRDM9, PUFa-GADD45A-TET1, R2, SunTag-scFv-sfGFP-TET1CD, TET1, TET2, TET3, VP120, VP16, VP16, VP16, VP48, VP64, VP64 or p65+/−HSF1 or MyoD1, and/or VPR (Vp64+p65+Rta). In some embodiments, at least one of the plurality of different heterologous gene effectors is not KRAB, Mad mSIN3 interaction domain (SID), ERF repressor domain (ERD), cat3a, last 301 amino acids of Dnmt3a Isoform 1, dCas9-KRAB-MeCP2, DNMT3A, DNMT3A, DNMT3A, DNMT3A R887E-DNMT3L, DNMT3A-DNMT3L, DNMT3B, EZH2, HDAC, KRAB-DNMT3A, KRAB-DNMT3A-DNMT3L, KRAB-DNMT3L, LSD1, M.SssI, MQ1, MQ1 Q147E, SID4×, and/or SuntTag-DNMT3A. In some embodiments, the heterologous gene effector is not P300, TET1, TET2, TET3, and/or HSF1. In some embodiments, the heterologous gene effector is not VP64, P65, Rta, VPR, AD2, CR3, ELKF1, GATA4, PRVIE, p53, SP1, MYOD, MEF2C, TAX, PPAR-gamma, MED1, MED7, MED17, MED26, MED29, TBP, GTF2H-2D, GTF2B, CBP, HSF1, MS2-p65-HSF1, MS2-TET1, NLS-dCas9-VP64, P300, p65, PRDM9, PUFa-GADD45A-TET1, R2, SunTag-scFv-sfGFP-TET1CD, TET1, TET2, TET3, VP120, VP16, VP16, VP16, VP48, VP64, VP64 or p65+/−HSF1 or MyoD1, and/or VPR (Vp64+p65+Rta). In some embodiments, the heterologous gene effector is not KRAB, Mad mSIN3 interaction domain (SID), ERF repressor domain (ERD), cat3a, last 301 amino acids of Dnmt3a Isoform 1, dCas9-KRAB-MeCP2, DNMT3A, DNMT3A, DNMT3A, DNMT3A R887E-DNMT3L, DNMT3A-DNMT3L, DNMT3B, EZH2, HDAC, KRAB-DNMT3A, KRAB-DNMT3A-DNMT3L, KRAB-DNMT3L, LSD1, M.SssI, MQ1, MQ1 Q147E, SID4×, and/or SuntTag-DNMT3A. In some embodiments, the one or more lead heterologous gene effectors is at most 1 heterologous gene effector, at most 2 heterologous gene effectors, at most 5 heterologous gene effectors, at most 10 heterologous gene effectors, at most 15 heterologous gene effectors, at most 20 heterologous gene effectors, or at most 50 heterologous gene effectors. In some embodiments, a degree of the change in the expression or the activity level of the target endogenous gene effected by the one or more lead heterologous gene effectors is greater than that by a control by at least 2-fold. In some embodiments, the degree is greater than that by the control by at least 5-fold, 10-fold, 20-fold, 50-fold, or 100-fold. In some embodiments, the control is a population of cells without the library of complexes. In some embodiments, the control is a population of cells contacted by a control heterologous gene effector. In some embodiments, the control heterologous gene effector is P300, TET1, TET2, TET3, and/or HSF1. In some embodiments, the control heterologous gene effector is VP64, P65, Rta, VPR, AD2, CR3, ELKF1, GATA4, PRVIE, p53, SP1, MYOD, MEF2C, TAX, PPAR-gamma, MED1, MED7, MED17, MED26, MED29, TBP, GTF2H-2D, GTF2B, CBP, HSF1, MS2-p65-HSF1, MS2-TET1, NLS-dCas9-VP64, P300, p65, PRDM9, PUFa-GADD45A-TET1, R2, SunTag-scFv-sfGFP-TET1CD, TET1, TET2, TET3, VP120, VP16, VP16, VP16, VP48, VP64, VP64 or p65+/−HSF1 or MyoD1, and/or VPR (Vp64+p65+Rta). In some embodiments, the control heterologous gene effector is KRAB, SID, ERD, cat3a, last 301 amino acids of Dnmt3a Isoform 1, dCas9-KRAB-MeCP2, DNMT3A, DNMT3A, DNMT3A, DNMT3A R887E-DNMT3L, DNMT3A-DNMT3L, DNMT3B, EZH2, HDAC, KRAB-DNMT3A, KRAB-DNMT3A-DNMT3L, KRAB-DNMT3L, LSD1, M.SssI, MQ1, MQ1 Q147E, SID4×, and/or SuntTag-DNMT3A. In some embodiments, the method further comprises performing (a)-(c) for an additional target endogenous gene in an additional population of cells, wherein (1) the one or more lead heterologous gene effectors of the library that effects the change in expression or activity level of the target endogenous gene is different from (2) one or more lead heterologous gene effectors of the library that effects a change in expression or activity level of the additional target endogenous gene. In some embodiments, the population of cells and the additional population of cells are of the same cell types. In some embodiments, the population of cells and the additional population of cells are of different cell types. In some embodiments, the population of cells comprises mammalian cells. In some embodiments, the population of cells comprises human cells. In some embodiments, the population of cells comprises stem cells. In some embodiments, the population of cells comprises differentiated cells. In some embodiments, the target endogenous gene is a disease-associated gene. In some embodiments, the target endogenous gene is a differentiation-associated gene. In some embodiments, the target endogenous gene is an age-related gene.

[0008] Disclosed herein, in some aspects, is a system comprising the library of complexes of the method of any one of preceding embodiments.

[0009] Disclosed herein, in some aspects, is a kit comprising the library of complexes of the method of any one of preceding embodiments.

[0010] Disclosed herein, in some aspects, is a nucleic acid library encoding the heterologous gene effectors of the library of complexes of the method of any one of preceding embodiments.

[0011] Disclosed herein, in some aspects, is a nucleic acid library encoding the library of complexes of the method of any one of preceding embodiments.

[0012] Disclosed herein, in some aspects, is a population of cells collectively expressing the heterologous gene effectors of the library of complexes of the method of any one of preceding embodiments.

[0013] Disclosed herein, in some aspects, is a population of cells collectively expressing the library of complexes of the method of any one of preceding embodiments.

[0014] Disclosed herein, in some aspects, is a complex comprising a guide moiety and a heterologous gene effector, wherein the heterologous gene effector comprises an amino acid sequence with at least about 70% sequence identity to any one of SEQ ID NOs: 23631, 1102, 2057, 5543, 9066, 11948, 15646, 17629, 19860, 21015, 21166, 22149, 22707, 23639, 25430, 25555, 32678, 33890, 34047, 35737, 38138, 38780, 40913, 40985, 40986, and 42623.

[0015] In some embodiments, the amino acid sequence has at least 90% sequence identity to any one of SEQ ID NOs: 23631, 1102, 2057, 5543, 9066, 11948, 15646, 17629, 19860, 21015, 21166, 22149, 22707, 23639, 25430, 25555, 32678, 33890, 34047, 35737, 38138, 38780, 40913, 40985, 40986, and 42623. In some embodiments, the heterologous gene effector comprises the amino acid sequence of any one of SEQ ID NOs: 23631, 1102, 2057, 5543, 9066, 11948, 15646, 17629, 19860, 21015, 21166, 22149, 22707, 23639, 25430, 25555, 32678, 33890, 34047, 35737, 38138, 38780, 40913, 40985, 40986, and 42623. In some embodiments, the amino acid sequence has at least 90% sequence identity to SEQ ID NO: 23631. In some embodiments, the heterologous gene effector comprises the amino acid sequence of SEQ ID NO: 23631. In some embodiments, the amino acid sequence has at least 90% sequence identity to SEQ ID NO: 33890. In some embodiments, the heterologous gene effector comprises the amino acid sequence of SEQ ID NO: 33890. In some embodiments, the amino acid sequence has at least 90% sequence identity to SEQ ID NO: 40985. In some embodiments, the heterologous gene effector comprises the amino acid sequence of SEQ ID NO: 40985. In some embodiments, the heterologous gene effector contains less than 500 amino acids. In some embodiments, the heterologous gene effector contains less than 100 amino acids. In some embodiments, the guide moiety specifically binds to a target gene or a target gene regulatory sequence. In some embodiments, the guide moiety comprises a guide nucleic acid sequence. In some embodiments, the guide nucleic acid sequence comprises or consists of between about 10 and about 30 nucleotides. In some embodiments, the guide nucleic acid sequence is a guide RNA. In some embodiments, the guide nucleic acid sequence is a single guide RNA (sgRNA). In some embodiments, the guide moiety comprises a nuclease or a part thereof. In some embodiments, the nuclease or part thereof is a modified nuclease that has reduced nuclease activity compared to a wild-type version of the nuclease. In some embodiments, the nuclease or part thereof substantially lacks nucleic acid cleavage activity. In some embodiments, the nuclease or part thereof is a Cas protein or part thereof. In some embodiments, the nuclease or part thereof is a nuclease deactivated Cas (dCas) protein or part thereof. In some embodiments, the guide moiety and the heterologous gene effector are fused to each other, optionally via a linker. In some embodiments, the guide moiety and the heterologous gene effector are non-covalently coupled to each other.

[0016] Disclosed herein, in some aspects, is a vector comprising the heterologous gene effector of any one of the preceding embodiments. In some embodiments, the vector further comprises the guide moiety.

[0017] Disclosed herein, in some aspects, is a vector comprising the complex of any one of the preceding embodiments.

[0018] Disclosed herein, in some aspects, is a vector comprising a nucleic acid that encodes the heterologous gene effector of any one of the preceding embodiments.

[0019] In some embodiments, the vector further comprises a nucleic acid that encodes the guide moiety or a component thereof. In some embodiments, the vector is a viral vector. In some embodiments, the vector is a non-viral vector.

[0020] Disclosed herein, in some aspects, is a population of cells comprising the complex of any one of the preceding embodiments.

[0021] Disclosed herein, in some aspects, is a method of modulating expression or activity of a target gene, the method comprising contacting a population of cells that comprise the target gene with the complex or the vector of any one of the preceding embodiments.

[0022] In some embodiments, the population of cells comprises mammalian cells. In some embodiments, the population of cells comprises human cells. In some embodiments, the population of cells comprises stem cells. In some embodiments, the population of cells comprises differentiated cells. In some embodiments, the contacting is in vitro or ex vivo. In some embodiments, the contacting is in vivo.

[0023] Disclosed herein, in some aspects, is a method of treating a subject in need thereof, the method comprising administering to the subject the complex or vector of any one of the preceding embodiments, thereby modulating expression or activity of a target gene in a population of cells in the subject.

[0024] In some embodiments, the target gene is a target endogenous gene. In some embodiments, the target gene is a disease-associated gene. In some embodiments, the target gene is a differentiation-associated gene. In some embodiments, the modulating expression or activity comprises increasing expression or activity level of the target gene. In some embodiments, the modulating expression or activity comprises reducing expression or activity level of the target gene. In some embodiments, expression or activity of the target gene is increased at least 2-fold compared to a control. In some embodiments, expression or activity of the target gene is reduced at least 2-fold compared to a control. In some embodiments, the expression or activity of the target gene is modulated for a period of time that is at least 10% longer than a control. In some embodiments, the expression or activity of the target gene is modulated for at least 12 hours. In some embodiments, the expression or activity of the target gene is modulated for at least 28 days. In some embodiments, the control is the population of cells prior to the contacting. In some embodiments, the control is a population of cells not contacted with the complex. In some embodiments, the control is a population of cells contacted with a control complex.

[0025] Disclosed herein, in some aspects, is an expression vector comprising: a plurality of heterologous polynucleotide sequences, wherein each heterologous polynucleotide sequence of the plurality of heterologous polynucleotide sequences exhibits at least about 80% sequence identity to the polynucleotide sequence of any one or more of SEQ ID NOs: 49334-49341 or 49344-49352.

[0026] In some embodiments of any one of the expression vectors disclosed herein, each heterologous polynucleotide sequence exhibits at least about 80% sequence identity to SEQ ID NO: 49334. In some embodiments of any one of the expression vectors disclosed herein, each heterologous polynucleotide sequence exhibits at least about 80% sequence identity to SEQ ID NO: 49335. In some embodiments of any one of the expression vectors disclosed herein, each heterologous polynucleotide sequence exhibits at least about 80% sequence identity to SEQ ID NO: 49336. In some embodiments of any one of the expression vectors disclosed herein, each heterologous polynucleotide sequence exhibits at least about 80% sequence identity to SEQ ID NO: 49337. In some embodiments of any one of the expression vectors disclosed herein, each heterologous polynucleotide sequence exhibits at least about 80% sequence identity to SEQ ID NO: 49338. In some embodiments of any one of the expression vectors disclosed herein, each heterologous polynucleotide sequence exhibits at least about 80% sequence identity to SEQ ID NO: 49339. In some embodiments of any one of the expression vectors disclosed herein, each heterologous polynucleotide sequence exhibits at least about 80% sequence identity to SEQ ID NO: 49340. In some embodiments of any one of the expression vectors disclosed herein, each heterologous polynucleotide sequence exhibits at least about 80% sequence identity to SEQ ID NO: 49341. In some embodiments of any one of the expression vectors disclosed herein, each heterologous polynucleotide sequence exhibits at least about 80% sequence identity to SEQ ID NO: 49344. In some embodiments of any one of the expression vectors disclosed herein, each heterologous polynucleotide sequence exhibits at least about 80% sequence identity to SEQ ID NO: 49345. In some embodiments of any one of the expression vectors disclosed herein, each heterologous polynucleotide sequence exhibits at least about 80% sequence identity to SEQ ID NO: 49346. In some embodiments of any one of the expression vectors disclosed herein, each heterologous polynucleotide sequence exhibits at least about 80% sequence identity to SEQ ID NO: 49347. In some embodiments of any one of the expression vectors disclosed herein, each heterologous polynucleotide sequence exhibits at least about 80% sequence identity to SEQ ID NO: 49348. In some embodiments of any one of the expression vectors disclosed herein, each heterologous polynucleotide sequence exhibits at least about 80% sequence identity to SEQ ID NO: 49349. In some embodiments of any one of the expression vectors disclosed herein, each heterologous polynucleotide sequence exhibits at least about 80% sequence identity to SEQ ID NO: 49350. In some embodiments of any one of the expression vectors disclosed herein, each heterologous polynucleotide sequence exhibits at least about 80% sequence identity to SEQ ID NO: 49351. In some embodiments of any one of the expression vectors disclosed herein, each heterologous polynucleotide sequence exhibits at least about 80% sequence identity to SEQ ID NO: 49352.

[0027] In some embodiments of any one of the expression vectors disclosed herein, each heterologous polynucleotide sequence exhibits at least about 90% sequence identity to the polynucleotide sequence of any one of SEQ ID NOs: 49334-49341 or 49344-49352. In some embodiments of any one of the expression vectors disclosed herein, each heterologous polynucleotide sequence exhibits at least about 95% sequence identity to the polynucleotide sequence of any one of SEQ ID NOs: 49334-49341 or 49344-49352.

[0028] In some embodiments of any one of the expression vectors disclosed herein, each heterologous polynucleotide sequence comprises (i) a CRISPR target sequence and (ii) one or more CRISPR protospacer adjacent motif (PAM) sequences. In some embodiments of any one of the expression vectors disclosed herein, the CRISPR target sequence is flanked by two different CRISPR PAM sequences. In some embodiments of any one of the expression vectors disclosed herein, the one or more CRISPR PAM sequences comprises a Cas12 PAM sequence. In some embodiments of any one of the expression vectors disclosed herein, the one or more CRISPR PAM sequences comprises a Cas9 PAM sequence.

[0029] In some embodiments of any one of the expression vectors disclosed herein, the plurality comprises 4 or more heterologous polynucleotide sequences. In some embodiments of any one of the expression vectors disclosed herein, the plurality comprises 6 or more heterologous polynucleotide sequences.

[0030] In another aspect, the present disclosure provides a nucleic acid molecule comprising: a heterologous polynucleotide sequence that is a chimeric sequence comprising (i) a CRISPR target sequence and (ii) a CRISPR protospacer adjacent motif (PAM) sequence and an additional CRISPR PAM sequence that are different, wherein the CRISPR target sequence is flanked by the CRISPR PAM sequence and the additional CRISPR PAM sequence.

[0031] In some embodiments of any one of the nucleic acid molecules disclosed herein, the heterologous polynucleotide sequence is a single strand.

[0032] In some embodiments of any one of the nucleic acid molecules disclosed herein, a distance between the CRISPR PAM sequence and the additional CRISPR PAM sequence is at most about 50 nucleobases. In some embodiments of any one of the nucleic acid molecules disclosed herein, the distance is at most about 40 nucleobases. In some embodiments of any one of the nucleic acid molecules disclosed herein, the distance is at most about 35 nucleobases. In some embodiments of any one of the nucleic acid molecules disclosed herein, the distance is at most about 25 nucleobases. In some embodiments of any one of the nucleic acid molecules disclosed herein, the distance is at most about 20 nucleobases.

[0033] In some embodiments of any one of the nucleic acid molecule disclosed herein, a size of the CRISPR target sequence is at least about 10 nucleobases. In some embodiments of any one of the nucleic acid molecules disclosed herein, the size is at least about 15 nucleobases.

[0034] In some embodiments of any one of the nucleic acid molecules disclosed herein, the CRISPR PAM sequence and the additional CRISPR PAM sequence are recognized by different CRISPR types. In some embodiments of any one of the nucleic acid molecules disclosed herein, one of the CRISPR PAM sequence and the additional CRISPR PAM sequence is recognized by Cas12 or a variant thereof. In some embodiments of any one of the nucleic acid molecules disclosed herein, one of the CRISPR PAM sequence and the additional CRISPR PAM sequence is recognized by Cas9 or a variant thereof.

[0035] In some embodiments of any one of the nucleic acid molecule disclosed herein, the heterologous polynucleotide sequence is a non-coding sequence.

[0036] In some embodiments of any one of the nucleic acid molecules disclosed herein, the CRISPR target sequence exhibits at least about 80% sequence identity to SEQ ID NO: 49334.c

[0037] In another aspect, the present disclosure provides a nucleic acid molecule comprising: a plurality of heterologous polynucleotide sequences, wherein: (i) each heterologous polynucleotide sequence of the plurality of heterologous polynucleotide sequences comprises a polynucleotide sequence and an additional polynucleotide sequence that are derived from different human chromosomes; and (ii) a size of each heterologous polynucleotide sequence is at most about 50 nucleobases.

[0038] In some embodiments of any one of the nucleic acid molecules disclosed herein, the size is at most about 40 nucleobases. In some embodiments of any one of the nucleic acid molecules disclosed herein, the size is at most about 30 nucleobases. In some embodiments of any one of the nucleic acid molecules disclosed herein, the size is at most about 25 nucleobases.

[0039] In some embodiments of any one of the nucleic acid molecules disclosed herein, a size of the polynucleotide sequence is at least about 5 nucleobases. In some embodiments of any one of the nucleic acid molecules disclosed herein, a size of the additional polynucleotide sequence is at least about 5 nucleobases.

[0040] In some embodiments of any one of the nucleic acid molecules disclosed herein, a distance between a heterologous polynucleotide sequence and an additional heterologous polynucleotide sequence of the plurality is at most about 100 nucleobases.

[0041] In some embodiments of any one of the nucleic acid molecules disclosed herein, the distance is at most about 80 nucleobases. In some embodiments of any one of the nucleic acid molecules disclosed herein, the distance is at most about 60 nucleobases. In some embodiments of any one of the nucleic acid molecules disclosed herein, the distance is at most about 50 nucleobases.

[0042] In some embodiments of any one of the nucleic acid molecules disclosed herein, each of the heterologous polynucleotide sequences is a non-coding sequence.

[0043] In some embodiments of any one of the nucleic acid molecules disclosed herein, at least one of the polynucleotide sequence and the additional polynucleotide sequence is derived from a Cluster of Differentiation (CD) protein.

[0044] In some embodiments of any one of the nucleic acid molecules disclosed herein, the plurality comprises 4 or more heterologous polynucleotide sequences. In some embodiments of any one of the nucleic acid molecules disclosed herein, the plurality comprises 6 or more heterologous polynucleotide sequences.

[0045] In another aspect, the present disclosure provides an expression vector comprising any one of the nucleic acid sequences disclosed herein.

[0046] In some embodiments of any one of the expression vectors or the nucleic acid molecules disclosed herein, the expression vector or the nucleic acid molecule further comprises an Upstream Activating Sequence (UAS) that is downstream of the heterologous polynucleotide sequence or the heterologous polynucleotide sequences. In some embodiments of any one of the expression vectors or the nucleic acid molecules disclosed herein, the UAS is a non-human UAS. In some embodiments of any one of the expression vector or the nucleic acid molecule disclosed herein, the UAS is derived from yeast GAL4 promoter.

[0047] In some embodiments of any one of the expression vectors or the nucleic acid molecules disclosed herein, the expression vector or the nucleic acid molecule further comprises a promoter.

[0048] In some embodiments of any one of the expression vectors or the nucleic acid molecules disclosed herein, at least one of the plurality of heterologous polynucleotide sequences is upstream of the promoter. In some embodiments of any one of the expression vectors or the nucleic acid molecules disclosed herein, the promoter is a strong constitutive human promoter. In some embodiments of any one of the nucleic acid molecules disclosed herein, the promoter is a weak minimal viral promoter. In some embodiments of any one of the nucleic acid molecules disclosed herein, the expression vector or the nucleic acid molecule further comprises a target gene under the control of the promoter.

[0049] In another aspect, the present disclosure provides a cell comprising any one of the expression vectors or the nucleic acid sequences as disclosed herein. In some embodiments, the cell can be a mammalian cell.

[0050] In another aspect, the present disclosure provides a method of regulating expression of a target gene in a cell, the method comprising: (a) providing a vector comprising (i) any one of the nucleic acid sequences as disclosed herein, (ii) a promoter, and (ii) the target gene; and contacting the nucleic acid sequence with an actuator moiety capable of interacting with the promoter to modulate expression level of the target gene.

[0051] In some embodiments of any one of the methods disclosed herein, the actuator moiety is a complex comprising a CRISPR endonuclease and a gene effector. In some embodiments of any one of the methods disclosed herein, the gene effector is a gene activator. In some embodiments of any one of the methods disclosed herein, the gene effector is a gene repressor. In some embodiments of any one of the methods disclosed herein, the complex further comprises a guide nucleic acid molecule exhibiting specific binding to the heterologous polynucleotide sequence or the heterologous polynucleotide sequence.

### INCORPORATION BY REFERENCE

[0052] All publications, patents, and patent applications mentioned in this specification are herein incorporated by reference to the same extent as if each individual publication, patent, or patent application was specifically and individually indicated to be incorporated by reference.

### BRIEF DESCRIPTION OF THE DRAWINGS

[0053] The novel features of the disclosure are set forth with particularity in the appended claims. A better understanding of the features and advantages of the present disclosure will be obtained by reference to the following detailed description that sets forth illustrative embodiments, in which the principles of the invention are utilized, and the accompanying drawings of which:

[0054] FIG. 1 provides an overview of an illustrative effector screen design to identify human nuclear proteins that activate expression of CD45 or reduce expression of CD71.

[0055] FIG. 2 illustrates a starting vector backbone that can be used for generating a vector of the disclosure.

[0056] FIG. 3 illustrates a vector of the disclosure that encodes a dCas9 fused to a heterologous effector, with an IRES driving expression of a downstream reporter gene.

[0057] FIG. 4 shows relative baseline expression of CD45 in illustrative cell lines.

[0058] FIG. 5 shows relative baseline expression of CD71 in illustrative cell lines.

[0059] FIG. 6 shows modulation of CD45 and CD71 by complexes of the disclosure, and cell sorting based on the resulting expression profiles of CD45 and CD71. Increased expression of CD45 can be observed in experimental conditions in the activator screen (top right panel), and reduced expression of CD71 can be observed in experimental conditions in the repressor screen (bottom right panel).

[0060] FIG. 7 provides an illustrative schematic of an expression construct for a combinatorial screen of the disclosure.

[0061] FIG. 8 provides an illustrative schematic of an expression construct for the generation of cell lines stably expressing GAI-dCas9-ABI. This reagent can be used in a combinatorial screen of the disclosure.

[0062] FIG. 9 illustrates modulation of CD45 and CD71 expression by complexes of the disclosure that comprise combinations of a transcriptional regulator and a chromatin regulator associated with dCas9. The top images show an illustrative activator screen for CD45, and the bottom images show an illustrative repressor screen for CD71. The graphs on the right illustrate an increase in CD45 expression by a complex of the disclosure, and repression of CD71 expression by a complex of the disclosure.

[0063] FIG. 10 schematically shows an example structure of an expression vector for an engineered synthetic reporter (ESR). FIG. 10 discloses SEQ ID NO: 49340 (full sequence shown), which includes SEQ ID NO: 49334 (“synthetic guide target”) SEQ ID NO: 49341 (“UAS”), SEQ ID NO: 49335 (Cas12a/MINI PAM+synthetic guide target), SEQ ID NO: 49336 (synthetic guide target+SpCas9 PAM), SEQ ID NO: 49337 (synthetic guide target+SpCas9 PAM and SaCas9 PAM), SEQ ID NO: 49338 (Cas12a/mini PAM+synthetic guide target+SpCas9 PAM and SaCas9 PAM), and SEQ ID NO: 49339 (Cas12a/mini PAM+synthetic guide target+SpCas9 PAM).

[0064] FIG. 11 schematically shows an example sequence of the ESR. FIG. 11 discloses SEQ ID NO: 49344 (single ESR repeat, which includes a Cas12a/mini PAM (TTTA), heterologous guide target (SEQ ID NO: 49334), Cas9 PAM (CGG), and UAS (SEQ ID NO: 49341)); SEQ ID NO: 49345 (7× copies of the ESR repeat); SEQ ID NO: 49346 (miniCMV promoter); and SEQ ID NO: 49347 (EF 1a promoter).

[0065] FIG. 12 schematically shows an example sequence of a control reporter vector. FIG. 12 discloses SEQ ID NO: 49348 (single TRE3G repeat, which includes a Cas12a/mini PAM (TTTA), a Cas9 PAM (CCC), a Cas9 spacer (SEQ ID NO: 49349), and a CasMINI/Cas12a spacer (SEQ ID NO: 49350)); and a full TRE3GS_promoter (SEQ ID NO: 49351, which includes 7 copies of the TRE3G repeat and a modified miniCMV promoter (SEQ ID NO: 49352)).

[0066] FIG. 13 shows flow cytometry data analysis of a reporter 293T cell line engineered with the ESR encoding miniCMV-GFP (ESR121).

[0067] FIG. 14 shows flow cytometry data analysis of a reporter 293T cell line engineered with the ESR encoding EF1a-GFP (ESR221).

[0068] FIG. 15 shows flow cytometry data analysis of a reporter K562 cell line engineered with the ESR encoding miniCMV-GFP (ESR111).

[0069] FIG. 16 shows flow cytometry data analysis of a reporter K562 cell line engineered with the ESR encoding EF1a-GFP (ESR211).

[0070] FIG. 17 shows a different flow cytometry data analysis of a reporter 293T cell line engineered with the ESR encoding miniCMV-GFP (ESR121).

[0071] FIG. 18 shows a different flow cytometry data analysis of a reporter 293T cell line engineered with the ESR encoding EF1a-GFP (ESR221).

[0072] FIG. 19 shows flow cytometry data analysis of a reporter 293T cell lines engineered with the ESR encoding green fluorescent protein (GFP) (clone 1), an additional reporter 293T cell lines engineered with the ESR encoding GFP (clone 2), a control reporter 293T cell line expressing a control expression vector encoding GFP (TRE3G-GFP), and an additional control reporter 293T cell line expressing a control expression vector encoding GFP (SV40-GFP), wherein ESR-EF1a 293T clonal cell lines show a narrower distribution of GFP expression than existing reporter cells.

[0073] FIG. 20 provides an overview of an illustrative screen design to identify heterologous gene effectors that activate or reduce expression of target genes (e.g., CD45, CD71), or a GFP reporter gene.

[0074] FIG. 21A provides representative flow cytometry histograms showing high dynamic range of ESR-GFP transcriptional activation or suppression from positive control constructs VPR or KRAB, respectively.

[0075] FIG. 21B provides representative histograms showing transcriptional activation or repression of two endogenous human gene targets: lowly-expressed CD45 for activation or highly-expressed CD71 for suppression.

[0076] FIG. 22A is a volcano plot showing hits in a screen for candidate activator heterologous gene effectors using an enhanced synthetic reporter system.

[0077] FIG. 22B is a volcano plot showing hits in a screen for candidate repressor heterologous gene effectors using an enhanced synthetic reporter system.

[0078] FIG. 23A is a volcano plot showing hits in a screen for candidate activator heterologous gene effectors using an endogenous gene (CD45) in wild type K562 cells.

[0079] FIG. 23B is a volcano plot showing hits in a screen for candidate repressor heterologous gene effectors using an endogenous gene (CD71) in wild type K562 cells.

[0080] FIG. 24A shows the geometric mean of CXCR4 expression 3 and 7 days after transfection with plasmids encoding complexes that comprise heterologous gene effectors disclosed herein targeted to CXCR4 by a sgRNA.

[0081] FIG. 24B provides representative flow cytometry histograms of CXCR4-APC fluorescence at 3 d.p.t., showing relative performance of one novel activator (EPICXV.1) versus canonical activator (VPR), and one novel suppressor (EPICXV.71) versus canonical suppressor (KRAB). Modulators shown are fused to dCasMini.

[0082] FIG. 24C illustrates relative sizes (bp) of sequences encoding dCas9, dCasMini, canonical activator VPR, and fusions thereof, as compared to the novel candidate effectors disclosed herein (EPICXV).

[0083] FIG. 25A shows IFNg secretion as determined by ELISA 3 days after treatment of wildtype HEK293T cells with dCasMini-effector fusions and sgRNA targeting human IFNG.

[0084] FIG. 25B shows CD45 surface expression as determined by flow cytometry 2 days after treatment of wildtype HEK293T cells with dCasMini-effector fusions and sgRNA targeting CD45.

[0085] FIG. 25C shows CD2 surface expression as determined by flow cytometry 3 days after treatment of wildtype HEK293T cells with dCasMini-effector fusions and sgRNA targeting CD2.

[0086] FIG. 25D shows CD2 surface expression as determined by flow cytometry 5 days after treatment of wildtype HEK293T cells with dCasMini-effector fusions and sgRNA targeting CD2.

[0087] FIG. 26A shows GFP reporter expression of HEK293T cells bearing a stably integrated TRE3G promoter-driven GFP 2 days after treatment with dCasMini-effector fusions and sgRNA targeting the reporter, as determined by flow cytometry.

[0088] FIG. 26B shows GFP reporter expression of HEK293T cells bearing a stably integrated GFP synthetic reporter driven by low-expression miniCMV promoter 2 days after treatment with dCasMini-effector fusions and sgRNA targeting the reporter, as determined by flow cytometry.

[0089] FIG. 27A shows GFP reporter expression of HEK293T cells bearing a stably integrated GFP synthetic reporter driven by high-expression EF1u promoter 5 days after treatment with dCasMini-effector fusions and sgRNA targeting the reporter, as determined by flow cytometry.

[0090] FIG. 27B shows GFP reporter expression of HEK293T cells bearing a stably integrated GFP synthetic reporter driven by high-expression EF1u promoter 5 days after treatment with dCas9-effector fusions and sgRNA targeting the reporter, as determined by flow cytometry.

[0091] FIG. 28A summarizes the effect of heterologous gene effectors on expression of the endogenous gene CXCR4 3, 7, 15, and 28 days after transfection with dCasMini-effector fusions and sgRNA targeting CXCR4, as determined by flow cytometry.

[0092] FIG. 28B shows normalized CXCR4 expression values 3, 7, 15, and 28 days after transfection of HEK293T cells with plasmids encoding complexes that comprise heterologous gene effectors disclosed herein or controls targeted to CXCR4 by a sgRNA. Effectors are ranked by effect size at each time point.

[0093] FIG. 29A shows the effect of candidate heterologous gene effectors disclosed herein compared to control effectors (dashed lines) on gene expression over time. The effectors shown are fused to dCasMini.

[0094] FIG. 29B provides representative flow cytometry histograms for positive control dCas9-KAL, a construct for persistent repression comprising KRAB, DNMT3A, and DNMT3L domains fused to dCas9, showing increased repression of target gene expression over progressive time points.

[0095] FIG. 29C provides representative flow cytometry histograms comparing effectors fused to dCasMini. Negative control (dCasMini without modulator) and positive control repressors are shown as compared to a novel suppressor (EPICXV.67).

[0096] FIG. 29D shows measurements demonstrating expression of dCasMini-effector over time (as reflected by an mCherry reporter) following plasmid transfection in ESR-GFP HEK293T cells.

[0097] FIG. 29E provides bar charts comparing relative sizes (bp) of a positive control fusion (KAL) and its constituent components, as compared to the novel compact modulators presently screened (prefixed EPICXV).

[0098] FIG. 29F provides bar charts comparing relative sizes (bp) of a dCas9-KAL control for persistent suppression of gene expression, relative to the present dCasMini-EPICXV constructs tested herein.

[0099] FIG. 29G shows normalized reporter GFP fluorescence values for each experimental replicate of positive controls and selected candidate heterologous gene effectors (EPICXVs) at 77 d.p.t. for ESR-GFP cells.

[0100] FIG. 30 shows a correlation of normalized GFP fluorescence in ESR-GFP synthetic reporter cells (averaged across all time points from 3 to 77 d.p.t.; y-axis) and normalized CXCR4-APC fluorescence (averaged across all time points from 3 to 28 d.p.t.; x-axis).

### DETAILED DESCRIPTION

[0101] Gene expression underpins various physiological and pathological effects in cells and tissues, contributing to many diseases and conditions, thus agents that modulate expression of specific genes in a desirable way could have therapeutic benefit.

[0102] Developing agents that elicit, robust, persistent, and/or reversible changes in gene expression has proven challenging, however, as many candidate therapeutics achieve only modest or short lived effects, or conversely result in off-target effects. Additionally, many current approaches to gene editing and genome engineering can result in off-target effects that can be associated with undesirable toxicity profiles, and in some cases, undesirable effects can be permanent. There is thus a need for novel strategies to regulate gene expression that allow robust, persistent, and/or reversible modulation of target gene expression and activity, for example, expression of genes that impact human disease.

[0103] Molecular tools that act in an epigenetic fashion have the potential to elicit efficient, durable, and low-risk therapeutic modulation of gene expression. In some embodiments, the disclosure provides compositions and methods for identifying novel effector domains capable of efficient, effective, and persistent epigenetic modification of target gene expression. For example, provided are heterologous gene effector domains and complexes of the effector domains with guide moieties to modulate (e.g., upregulate or downregulate) expression or activity of particular target gene(s) (e.g., target endogenous gene(s)).

[0104] Combinations of heterologous gene effectors also have the potential to achieve advantageous outcomes in regulating gene expression, for example, via synergistic effects. In some embodiments, the disclosure provides compositions and methods comprising novel combinations of heterologous gene effectors, for example, combinations of effector domains that are chromatic regulators and/or transcriptional regulators from the human nuclear proteome, viral sources, and/or other types of heterologous gene effectors disclosed herein.

[0105] Context-dependent effects present an additional challenge for therapeutic modulation of gene expression and activity. For example, a strategy or transcriptional modulator that achieves a desirable effect on expression of a particular target gene (e.g., a particular target endogenous gene), cell type, subject, etc. may not achieve the desired effect for a different target gene (e.g., a different target endogenous gene), cell type, or subject. In some cases, systems and methods of the disclosure are customized to or are applicable to or are particularly suited to a specific target gene (e.g., a specific target endogenous gene), a specific cell type, a specific target disease, a specific subject, etc.

[0106] In some embodiments, the disclosure provides compositions and methods for high throughput screens to identify heterologous gene effector domains and complexes of the effector domains with guide moieties to modulate expression of particular target gene(s) (e.g., particular target endogenous gene(s)). In some embodiments, the disclosure provides complexes identified by systems disclosed herein that can be employed for other purposes, such as research or as therapeutics.

### Heterologous Gene Effectors

[0107] The disclosure provides compositions, systems, methods and methods (for example, complexes and libraries) that utilize heterologous gene effectors (e.g., gene effectors that are heterologous to a cell comprising the gene effectors and/or another component in a complex of the disclosure). Heterologous gene effectors comprise domains that are capable of, or are candidates for, modulating expression of a target gene (e.g., a target endogenous gene), for example, activating, repressing, upregulating, downregulating, or stabilizing an expression level or activity level of the gene. Heterologous gene effectors can be heterologous with respect to another component that is present in a complex, for example, a guide moiety (e.g., nuclease and/or guide nucleic acid, as disclosed herein). In some cases, heterologous gene effectors can be heterologous with respect to a host cell they are introduced to.

[0108] A heterologous gene effector can be or can comprise a sequence from any suitable source, for example, an amino acid sequence from a human protein, viral protein, or other protein as disclosed herein. A heterologous gene effector can be or can comprise a sequence from a protein that primarily localized to the nucleus, for example, a member of the human nuclear proteome. A heterologous gene effector can be or can comprise one or more natural amino acid residues. A heterologous gene effector can be or can comprise one or more synthetic amino acid residues.

[0109] A heterologous gene effector can be or can comprise a sequence from a mammalian protein. A heterologous gene effector can be or can comprise a sequence from a human protein. A heterologous gene effector can be or can comprise a sequence from a viral protein. A heterologous gene effector can be or can comprise a sequence from a non-human primate protein. A heterologous gene effector can be or can comprise a sequence from a non-human mammal protein. A heterologous gene effector can be or can comprise a sequence from a non-rodent mammal protein. A heterologous gene effector can be or can comprise a sequence from a plant protein. A heterologous gene effector can be or can comprise a sequence from a pig protein. A heterologous gene effector can be or can comprise a sequence from a lagomorph protein. A heterologous gene effector can be or can comprise a sequence from a canine protein. A heterologous gene effector can be or can comprise a sequence from an avian protein. A heterologous gene effector can be or can comprise a sequence from a reptilian protein. A heterologous gene effector can be or can comprise a sequence from a bacterial protein. A heterologous gene effector can be or can comprise a sequence from an archaeal protein.

[0110] A heterologous gene effector can be or can comprise a sequence from a chromatin regulator (CR). Chromatin regulators include functional domains from various classes of histone and DNA modifying enzymes (e.g., DNMTs, HATs, HMTs, etc.).

[0111] A heterologous gene effector can comprise two or more domains from chromatin regulators, e.g., located at a C-terminus, an N-terminus, or within a polypeptide sequence, in tandem or separate.

[0112] In some embodiments, a heterologous gene effector is one that facilitates heterochromatin formation. Non-limiting examples of proteins that can facilitate heterochromatin formation include HP1α, HP1β, KAP1, KRAB, SUV39H1, and G9a.

[0113] In some embodiments, a heterologous gene effector modulates histones through methylation. In some embodiments, a heterologous gene effector modulates histones through acetylation. In some embodiments, a heterologous gene effector modulates histones through phosphorylation. In some embodiments, a heterologous gene effector modulates histones through ADP-ribosylation. In some embodiments, a heterologous gene effector modulates histones through glycosylation. In some embodiments, a heterologous gene effector modulates histones through SUMOylation. In some embodiments, a heterologous gene effector modulates histones through ubiquitination. In some embodiments, a heterologous gene effector modulates histones by remodeling histone structure, e.g., via an ATP hydrolysis-dependent process.

[0114] In some embodiments, a heterologous gene effector facilitates spatial positioning of proteins on or near the target polynucleotide, e.g., transcriptional repressors, transcription factors, histones, etc. In some embodiments, a heterologous gene effector is useful for manipulating the spatiotemporal organization of genomic DNA and RNA components in the nucleus and/or cytoplasm, e.g., for regulating diverse cellular functions.

[0115] In some embodiments, a heterologous gene effector is from a family of related histone acetyltransferases. Non-limiting examples of histone acetyltransferases include GNAT subfamily, MYST subfamily, p300/CBP subfamily, HAT1 subfamily, GCN5, PCAF, Tip60, MOZ, MORF, MOF, HBO1, p300, CBP, HAT1, ATF-2, SRC1, and TAFII250.

[0116] In some embodiments, a heterologous gene effector is from a histone lysine methyltransferase. Non-limiting examples of histone lysine methyltransferases include EZH subfamily, Non-SET subfamily, Other SET subfamily, PRDM subfamily, SET1 subfamily, SET2 subfamily, SUV39 subfamily, SYMD subfamily, ASH1L, EHMT1, EHMT2, EZH1, EZH2, MLL, MLL2, MLL3, MLL4, MLL5, NSD1, NSD2, NSD3, PRDM1, PRDM10, PRDM11, PRDM12, PRDM13, PRDM14, PRDM15, PRDM16, PRDM2, PRDM4, PRDM5, PRDM6, PRDM7, PRDM8, PRDM9, SET1, SET1L, SET2L, SETD2, SETD3, SETD4, SETD5, SETD6, SETD7, SETD8, SETDB1, SETDB2, SETMAR, SUV39H1, SUV39H2, SUV420H1, SUV420H2, SYMD1, SYMD2, SYMD3, SYMD4, and SYMD5.

[0117] In some embodiments, a heterologous gene effector is from a component of a chromatin remodeling complex. In some embodiments, a heterologous gene effector is a component of BAF, for example, Actin, ARIDA/B, BAF155, BAF170, BAF45 A/B/C/D, BAF53 A/B, BAF57, BAF60 A/B/C, BRG1/BRM, INIl, or SS18.

[0118] In some embodiments, a heterologous gene effector is from a component of PBAF, for example, Actin, ARID2, BAF155, BAF170, BAF180, BAF45 A/B/C/D, BAF53 A/B, BAF57, BAF60 A/B/C, BRD7, BRG1, or INIl.

[0119] In some embodiments, a heterologous gene effector is from a component of an ISWI family chromatin remodeling complex, for example, ACF subfamily, RSF subfamily, CERF subfamily, CHRAC subfamily, NURF subfamily, NoRC subfamily, WICH subfamily, b-WICH subfamily, ACF1, ATPase, BPTF, CECR2, CHRAC15, CHRAC17, CSB, DEK, MYBBPlA, NM1, RBAP46/48, RHII/Gua, RSF1, SAP155, SNF2H, SNF2H/L, SNF2L, TIP5, or WSTF.

[0120] In some embodiments, a heterologous gene effector is from a component of a CHD family complex, for example, a NuRD complex, NuRD-like complex, or CHD complex. In some embodiments, a heterologous gene effector is from CHD1/2/6/7/8/9, CHD3/4, CHD5, GATAD2 A/B, GATAD2 B, HDAC1, HDAC2, HDAC2, MBD2/3, MTA1/2/3, MTA3, or RBAP46, RBAP46/48.

[0121] In some embodiments, a heterologous gene effector is from a component of an IN080 family complex, for example, from an IN080 complex, Tip60/p400 complex, SRCAP complex, AMIDA, ARP6, BAF53, BAF53, BAF53A, BRD8, DMAP1, DMAP1, EPC1/2, FLJ11730, GAS41, GAS41, IES2, IES6, ING3, IN080, IN080E, MCRS1, MRG15, MRGBP, MRGX, NFRKB, p400, RUVBL1/2, RUVBL1/2, RUVBL1/2, SRCAP, Tip60, TRRAP, UCH37, YL-1, YL-1, YY1, or ZnF-HIT1.

[0122] A heterologous gene effector can be or can comprise a sequence from a transcriptional regulator (TR). TR gene effectors include transcriptional regulatory domains from various families of transcription factors (e.g. KRAB, p65, MED, GTFs, etc.).

[0123] A heterologous gene effector can comprise a transcriptional activator domain. A heterologous gene effector can comprise can comprise two or more tandem transcriptional activation domains, e.g., located at a C-terminus, an N-terminus, or within a polypeptide sequence.

[0124] Non-limiting examples of transcriptional activation domains include GAL4, herpes simplex activation domain VP16, VP64 (a tetramer of the herpes simplex activation domain VP16), NF-KB p65 subunit, Epstein-Barr virus R transactivator (Rta). Examples of transcriptional activation domains are described in Chavez et al., Nat Methods, 2015, 12(4):326-328 and U.S. Patent App. Publ. No. 20140068797. In some embodiments, such transcriptional activation domains are used as controls in methods of the disclosure. In some embodiments, such transcriptional activation domains are used as one heterologous gene effector in a complex that comprises at least one additional heterologous gene effector (e.g., a different effector).

[0125] A heterologous gene effector can comprise a transcriptional repressor domain. A heterologous gene effector can comprise two or more transcriptional repressor domains, e.g., located at a C-terminus, an N-terminus, or within a polypeptide sequence, in tandem or separate.

[0126] Non-limiting examples of transcriptional repressor domains include the KRAB (Kruppel-associated box) domain of Koxl, the Mad mSIN3 interaction domain (SID), and ERF repressor domain (ERD). Examples of transcriptional repressor domains are described in in Chavez et al., Nat Methods, 2015, 12(4):326-328 and U.S. Patent App. Publ. No. 20140068797. In some embodiments, such transcriptional repressor domains are used as controls in methods of the disclosure. In some embodiments, such transcriptional repressor domains are used as one heterologous gene effector in a complex that comprises at least one additional heterologous gene effector (e.g., a different effector).

[0127] In some embodiments, a heterologous gene effector is from a gene product that is a transcription factor.

[0128] In some embodiments, a heterologous gene effector is from a gene product that is a hematopoietic stem cell transcription factor. Non-limiting examples of hematopoietic stem cell transcription factors include AHR, Aiolos/IKZF3, CDX4, CREB, DNMT3A, DNMT3B, EGR1, Fox03, GATA-1, GATA-2, GATA-3, Helios, HES-1, HHEX, HIF-1 alpha/HIF1A, HMGB1/HMG-1, HMGB3, Ikaros, c-Jun, LMO2, LMO4, c-Maf, MafB, MEF2C, MYB, c-Myc, NFATC2, NFIL3/E4BP4, Nrf2, p53, PITX2, PRDM16/MEL1, Prox1, PU.1/Spi-1, RUNX1/CBFA2, SALL4, SCL/Tall, Smad2, Smad2/3, Smad4, Smad7, Spi-B, STAT Activators, STAT Inhibitors, STAT3, STAT4, STAT5a, STAT6, and TSC22.

[0129] In some embodiments, a heterologous gene effector is from a gene product that is a mesenchymal stem cell transcription factor. Non-limiting examples of mesenchymal stem cell transcription factors include DUX4, DUX4/DUX4c, DUX4c, EBF-1, EBF-2, EBF-3, ETV5, FoxC2, FoxF1, GATA-4, GATA-6, HMGA2, c-Jun, MYF-5, Myocardin, MyoD, Myogenin, NFATC2, p53, Pax3, PDX-1/IPF1, PLZF, PRDM16/MEL1, RUNX2/CBFA1, Smad1, Smad3, Smad4, Smad5, Smad8, Smad9, Snail, SOX2, SOX9, SOX11, STAT Activators, STAT Inhibitors, STAT1, STAT3, TBX18, Twist-1, and Twist-2.

[0130] In some embodiments, a heterologous gene effector is from a gene product that is an embryonic stem cell transcription factor. Non-limiting examples of embryonic stem cell transcription factors include Brachyury, EOMES, FoxC2, FoxD3, FoxF1, FoxH1, Fox01/FKHR, GATA-2, GATA-3, GBX2, Goosecoid, HES-1, HNF-3 alpha/FoxAl, c-Jun, KLF2, KLF4, KLF5, c-Maf, Max, MEF2C, MIXL1, MTF2, c-Myc, Nanog, NFkB/IkB Activators, NFkB/IkB Inhibitors, NFkB1, NFkB2, Oct-3/4, Otx2, p53, Pax2, Pax6, PRDM14, Rex-1/ZFP42, SALL1, SALL4, Smad1, Smad2, Smad2/3, Smad3, Smad4, Smad5, Smad8, Snail, SOX2, SOX7, SOX15, SOX17, STAT Activators, STAT Inhibitors, STAT3, SUZ12, TBX6, TCF-3/E2A, THAP11, UTF1, WDR5, WT1, ZNF206, and ZNF281.

[0131] In some embodiments, a heterologous gene effector is from a gene product that is an induced pluripotent stem cell (iPSC) transcription factor. Non-limiting examples of iPSC transcription factors include KLF2, KLF4, c-Maf, c-Myc, Nanog, Oct-3/4, p53, SOX1, SOX2, SOX3, SOX15, SOX18, and TBX18.

[0132] In some embodiments, a heterologous gene effector is from a gene product that is an epithelial stem cell transcription factor. Non-limiting examples of epithelial stem cell transcription factors include ASCL2/Mash2, CDX2, DNMT1, ELF3, Ets-1, FoxM1, FoxNI, GATA-6, Hairless, HNF-4 alpha/NR2A1, IRF6, c-Maf, MITF, Miz-1/ZBTB17, MSX1, MSX2, MYB, c-Myc, Neurogenin-3, NFATC1, NKX3.1, Nrf2, p53, p63/TP73L, Pax2, Pax3, RUNX1/CBFA2, RUNX2/CBFA1, RUNX3/CBFA3, Smadi, Smad2, Smad2/3, Smad4, Smad5, Smad7, Smad8, Snail, SOX2, SOX9, STAT Activators, STAT Inhibitors, STAT3, SUZ12, TCF-3/E2A, and TCF7/TCF1.

[0133] In some embodiments, a heterologous gene effector is from a gene product that is a cancer stem cell transcription factor. Non-limiting examples of cancer stem cell transcription factors include Androgen R/NR3C4, AP-2 gamma, beta-Catenin, beta-Catenin Inhibitors, Brachyury, CREB, ER alpha/NR3A1, ER beta/NR3A2, FoxM1, Fox03, FRA-1, GLI-1, GLI-2, GLI-3, HIF-1 alpha/HIF1A, HIF-2 alpha/EPAS1, HMGAIB, c-Jun, JunB, KLF4, c-Maf, MCM2, MCM7, MITF, c-Myc, Nanog, NFkB/IkB Activators, NFkB/IkB Inhibitors, NFkBI, NKX3.1, Oct-3/4, p53, PRDM14, Snail, SOX2, SOX9, STAT Activators, STAT Inhibitors, STAT3, TAZ/WWTR1, TBX3, Twist-1, Twist-2, WTi, and ZEBi.

[0134] In some embodiments, a heterologous gene effector is from a gene product that is a cancer-related transcription factor. Non-limiting examples of cancer-related transcription factors include ASCL1/Mashi, ASCL2/Mash2, ATF1, ATF2, ATF4, BLIMP1/PRDM1, CDX2, CDX4, DLX5, DNMT1, E2F-1, EGR1, ELF3, Ets-1, FosB/GOS3, FoxCi, FoxC2, FoxFI, GADD153, GATA-2, HMGA2, HMGB1/HMG-1, HNF-3 alpha/FoxAl, HNF-6/ONECUT1, HSF1, ID1, ID2, JunD, KLF10, KLF12, KLF17, LMO2, MEF2C, MYCL1/L-Myc, NFkB2, Oct-1, p63/TP73L, Pax3, PITX2, Proxi, RAP80, Rex-1/ZFP42, RUNX1/CBFA2, RUNX3/CBFA3, SALL4, SCL/Tall, Sirtuin 2/SIRT2, Smad3, Smad4, Smad5, SOX11, STAT5a/b, STAT5a, STAT5b, TCF7/TCF1, TORC1, TORC2, TRIM32, TRPS1, and TSC22.

[0135] In some embodiments, a heterologous gene effector is from a gene product that is an immune cell transcription factor. Non-limiting examples of immune cell transcription factors include AP-1, Bcl6, E2A, EBF, Eomes, FoxP3, GATA3, Id2, Ikaros, IRF, IRF1, IRF2, IRF3, IRF3, IRF7, NFAT, NFkB, Pax5, PLZF, PU.1, ROR-gamma-T, STAT, STAT1, STAT2, STAT3, STAT4, STAT5, STAT5A, STAT5B, STAT6, T-bet, TCF7, and ThPOK.

[0136] In some embodiments, a heterologous gene effector is from a gene product that is a RNA polymerase related protein. In some embodiments, a heterologous gene effector is from a transcription factor with a basic domain. In some embodiments, a heterologous gene effector is from a transcription factor with a zinc-coordinated DNA binding domain. In some embodiments, a heterologous gene effector is from a transcription factor with a helix-turn-helix domain. In some embodiments, a heterologous gene effector is from a transcription factor with an alpha helical DNA binding domain. In some embodiments, a heterologous gene effector is from a transcription factor with an alpha helix exposed by beta structures. In some embodiments, a heterologous gene effector is from a transcription factor with an immunoglobulin fold. In some embodiments, a heterologous gene effector is from a transcription factor with a with a beta-Hairpin exposed by an alpha/beta-scaffold. In some embodiments, a heterologous gene effector is from a transcription factor with a beta sheet binding to DNA. In some embodiments, a heterologous gene effector is from a transcription factor with a beta barrel DNA binding domain.

[0137] In some embodiments, a heterologous gene effector is from a gene product that is a nuclear receptor, for example, a nuclear hormone receptor. Non-limiting examples of nuclear hormone receptors include those encoded by NROB1, NROB2, NR1A1, NR1A2, NR1B1, NR1B2, NR1B3, NR1C1, NR1C2, NR1C3, NR1D1, NR1D2, NR1F1, NR1F2, NR1F3, NR1H4, NR1H5, NR1H3, NR1H2, NR1Il, NR1I2, NR1I3, NR2A1, NR2A2, NR2B1, NR2B2, NR2B3, NR2C1, NR2C2, NR2E1, NR2E3, NR2F1, NR2F2, NR2F6, NR3A1, NR3A2, NR3B1, NR3B2, NR3B3, NR3C4, NR3C1, NR3C2, NR3C3, NR4A1, NR4A2, NR4A3, NR5A1, NR5A2, and NR6A1.

[0138] In some embodiments, a heterologous gene effector is from a gene product that is involved in nucleosome assembly. In some embodiments, a heterologous gene effector is from a gene product that is involved in DNA metabolism. In some embodiments, a heterologous gene effector is from a gene product that is involved in nucleotide metabolism. In some embodiments, a heterologous gene effector is from a gene product that is involved in ribosome biogenesis. In some embodiments, a heterologous gene effector is from a gene product that is involved in protein folding. In some embodiments, a heterologous gene effector is from a gene product that is involved in translation. In some embodiments, a heterologous gene effector is from a gene product that is involved in signaling. In some embodiments, a heterologous gene effector is from a gene product that is involved in proteolysis. In some embodiments, a heterologous gene effector is from a gene product that is involved in negative regulation of endopeptidase activity.

[0139] In some embodiments, a list of candidate heterologous gene effectors can be stratified by factors such as activation versus repression, target cellular pathway, evolutionary sequence constraint, binding of DNA/RNA/both, protein folding pattern, host/cell tropism, direct/indirect activity, binding promiscuity, nuclear/cytoplasmic action, and other criteria. In some embodiments, such stratifications allow design of a screen library of the disclosure that encompasses a broad spectrum of potential molecular functions, thereby increasing the likelihood for discovery of heterologous gene effectors that are suitable for purposes disclosed herein.

[0140] In some embodiments, predictive filtering techniques are applied to candidate heterologous gene effector sequences, e.g., in silico. Predictive filtering techniques can comprise, for example, identification of suitable biophysical properties for core activator domains (e.g., down to 13 bp) through experiments in yeast; the presence of acidic, bulky hydrophobic, alpha helix, and/or negative charge; the presence of motif repeats that may influence duration of effect; and PADDLE-like convolutional neural network/transformer algorithms or similar predictive techniques.

[0141] In some embodiments, a heterologous gene effector can regulate expression of a target gene that is exogenous to a host subject, for example, a pathogen target gene or an exogenous gene expressed as a result of a therapeutic intervention.

[0142] In some embodiments, a heterologous gene effector comprises, consists essentially of, or consists of a peptide sequence with at least about 70%, at least about 71%, at least about 72%, at least about 73%, at least about 74%, at least about 75%, at least about 76%, at least about 77%, at least about 78%, at least about 79%, at least about 80%, at least about 81%, at least about 82%, at least about 83%, at least about 84%, at least about 85%, at least about 86%, at least about 87%, at least about 88%, at least about 89%, at least about 90%, at least about 91%, at least about 92%, at least about 93%, at least about 94%, at least about 95%, at least about 95.5%, at least about 96%, at least about 96.5%, at least about 97%, at least about 97.5%, at least about 98%, at least about 98.5%, at least about 99%, at least about 99.1%, at least about 99.1%, at least about 99.3%, at least about 99.4%, at least about 99.5%, at least about 99.6%, at least about 99.7%, at least about 99.8%, at least about 99.9%, at least about 99.95%, at least about 99.99%, or about 100% sequence identity or sequence similarity to any one of SEQ ID NOs: 16-16154, any one of SEQ ID NOs: 16-13605, any one of SEQ ID NOs: 16155-47350, any one of SEQ ID NOs: 16155-43953, any one of SEQ ID NOs: 47351-49333, any one of SEQ ID NOs: 49353-50052, or any two or more of SEQ ID NOs: 16-49333 and 49353-50052, e.g., over the entire length.

[0143] In some embodiments, a heterologous gene effector comprises, consists essentially of, or consists of a peptide sequence with at most about 70%, at most about 71%, at most about 72%, at most about 73%, at most about 74%, at most about 75%, at most about 76%, at most about 77%, at most about 78%, at most about 79%, at most about 80%, at most about 81%, at most about 82%, at most about 83%, at most about 84%, at most about 85%, at most about 86%, at most about 87%, at most about 88%, at most about 89%, at most about 90%, at most about 91%, at most about 92%, at most about 93%, at most about 94%, at most about 95%, at most about 95.5%, at most about 96%, at most about 96.5%, at most about 97%, at most about 97.5%, at most about 98%, at most about 98.5%, at most about 99%, at most about 99.1%, at most about 99.1%, at most about 99.3%, at most about 99.4%, at most about 99.5%, at most about 99.6%, at most about 99.7%, at most about 99.8%, at most about 99.9%, at most about 99.95%, at most about 99.99%, or at most about 100% sequence identity or sequence similarity to any one of SEQ ID NOs: 16-16154, any one of SEQ ID NOs: 16-13605, any one of SEQ ID NOs: 16155-47350, any one of SEQ ID NOs: 16155-43953, any one of SEQ ID NOs: 47351-49333, any one of SEQ ID NOs: 49353-50052, or any two or more of SEQ ID NOs: 16-49333 and 49353-50052, e.g., over the entire length.

[0144] In some embodiments, a heterologous gene effector comprises, consists essentially of, or consists of a peptide sequence with about 70%, about 71%, about 72%, about 73%, about 74%, about 75%, about 76%, about 77%, about 78%, about 79%, about 80%, about 81%, about 82%, about 83%, about 84%, about 85%, about 86%, about 87%, about 88%, about 89%, about 90%, about 91%, about 92%, about 93%, about 94%, about 95%, about 95.5%, about 96%, about 96.5%, about 97%, about 97.5%, about 98%, about 98.5%, about 99%, about 99.1%, about 99.1%, about 99.3%, about 99.4%, about 99.5%, about 99.6%, about 99.7%, about 99.8%, about 99.9%, about 99.95%, about 99.99%, or about 100% sequence identity or sequence similarity to any one of SEQ ID NOs: 16-16154, any one of SEQ ID NOs: 16-13605, any one of SEQ ID NOs: 16155-47350, any one of SEQ ID NOs: 16155-43953, any one of SEQ ID NOs: 47351-49333, any one of SEQ ID NOs: 49353-50052, or any two or more of SEQ ID NOs: 16-49333 and 49353-50052, e.g., over the entire length.

[0145] In some embodiments, a heterologous gene effector comprises a peptide sequence with one or more amino acid insertions, deletions, or substitutions compared to any one of SEQ ID NOs: 16-16154, any one of SEQ ID NOs: 16-13605, any one of SEQ ID NOs: 16155-47350, any one of SEQ ID NOs: 16155-43953, any one of SEQ ID NOs: 47351-49333, any one of SEQ ID NOs: 49353-50052, or any two or more of SEQ ID NOs: 16-49333 and 49353-50052.

[0146] For example, a heterologous gene effector can comprise an amino acid sequence with at least 1, at least 2, at least 3, at least 4, at least 5, at least 6, at least 7, at least 8, at least 9, at least 10, at least 11, at least 12, at least 13, at least 14, at least 15, at least 16, at least 17, at least 18, at least 19, at least 20, at least 25, at least 30, at least 35, at least 40, at least 45, or at least 50 amino acid insertions relative to any one of SEQ ID NOs: 16-16154, any one of SEQ ID NOs: 16-13605, any one of SEQ ID NOs: 16155-47350, any one of SEQ ID NOs: 16155-43953, any one of SEQ ID NOs: 47351-49333, any one of SEQ ID NOs: 49353-50052, or any two or more of SEQ ID NOs: 16-49333 and 49353-50052.

[0147] In some embodiments, a heterologous gene effector comprises an amino acid sequence with at most 1, at most 2, at most 3, at most 4, at most 5, at most 6, at most 7, at most 8, at most 9, at most 10, at most 11, at most 12, at most 13, at most 14, at most 15, at most 16, at most 17, at most 18, at most 19, at most 20, at most 25, at most 30, at most 35, at most 40, at most 45, or at most 50 amino acid insertions relative to any amino acid sequence disclosed herein, for example, any one of SEQ ID NOs: 16-16154, any one of SEQ ID NOs: 16-13605, any one of SEQ ID NOs: 16155-47350, any one of SEQ ID NOs: 16155-43953, any one of SEQ ID NOs: 47351-49333, any one of SEQ ID NOs: 49353-50052, or any two or more of SEQ ID NOs: 16-49333 and 49353-50052.

[0148] In some embodiments, a heterologous gene effector comprises an amino acid sequence with 1, 2, 3, 4, 5, 6, 7, 8, 9, 10, 11, 12, 13, 14, 15, 16, 17, 18, 19, 20, 25, 30, 35, 40, 45, or 50 amino acid insertions relative to any one of SEQ ID NOs: 16-16154, any one of SEQ ID NOs: 16-13605, any one of SEQ ID NOs: 16155-47350, any one of SEQ ID NOs: 16155-43953, any one of SEQ ID NOs: 47351-49333, any one of SEQ ID NOs: 49353-50052, or any two or more of SEQ ID NOs: 16-49333 and 49353-50052.

[0149] The one or more insertions can be at the N-terminus, C-terminus, within the amino acid sequence, or a combination thereof. The one or more insertions can be contiguous, non-contiguous, or a combination thereof.

[0150] In some embodiments, a heterologous gene effector comprises an amino acid sequence with at least 1, at least 2, at least 3, at least 4, at least 5, at least 6, at least 7, at least 8, at least 9, at least 10, at least 11, at least 12, at least 13, at least 14, at least 15, at least 16, at least 17, at least 18, at least 19, at least 20, at least 25, at least 30, at least 35, at least 40, at least 45, or at least 50 amino acid deletions relative to any amino acid sequence disclosed herein, for example, any one of SEQ ID NOs: 16-16154, any one of SEQ ID NOs: 16-13605, any one of SEQ ID NOs: 16155-47350, any one of SEQ ID NOs: 16155-43953, any one of SEQ ID NOs: 47351-49333, any one of SEQ ID NOs: 49353-50052, or any two or more of SEQ ID NOs: 16-49333 and 49353-50052.

[0151] In some embodiments, a heterologous gene effector comprises an amino acid sequence with at most 1, at most 2, at most 3, at most 4, at most 5, at most 6, at most 7, at most 8, at most 9, at most 10, at most 11, at most 12, at most 13, at most 14, at most 15, at most 16, at most 17, at most 18, at most 19, at most 20, at most 25, at most 30, at most 35, at most 40, at most 45, or at most 50 amino acid deletions relative to any amino acid sequence disclosed herein, for example, any one of SEQ ID NOs: 16-16154, any one of SEQ ID NOs: 16-13605, any one of SEQ ID NOs: 16155-47350, any one of SEQ ID NOs: 16155-43953, any one of SEQ ID NOs: 47351-49333, any one of SEQ ID NOs: 49353-50052, or any two or more of SEQ ID NOs: 16-49333 and 49353-50052.

[0152] In some embodiments, a heterologous gene effector comprises an amino acid sequence with 1, 2, 3, 4, 5, 6, 7, 8, 9, 10, 11, 12, 13, 14, 15, 16, 17, 18, 19, 20, 25, 30, 35, 40, 45, or 50 amino acid deletions relative to any amino acid sequence disclosed herein, for example, any one of SEQ ID NOs: 16-16154, any one of SEQ ID NOs: 16-13605, any one of SEQ ID NOs: 16155-47350, any one of SEQ ID NOs: 16155-43953, any one of SEQ ID NOs: 47351-49333, any one of SEQ ID NOs: 49353-50052, or any two or more of SEQ ID NOs: 16-49333 and 49353-50052.

[0153] The one or more deletions can be at the N-terminus, C-terminus, within the amino acid sequence, or a combination thereof. The one or more deletions can be contiguous, non-contiguous, or a combination thereof.

[0154] In some embodiments, a heterologous gene effector comprises an amino acid sequence with at least 1, at least 2, at least 3, at least 4, at least 5, at least 6, at least 7, at least 8, at least 9, at least 10, at least 11, at least 12, at least 13, at least 14, at least 15, at least 16, at least 17, at least 18, at least 19, at least 20, at least 25, at least 30, at least 35, at least 40, at least 45, or at least 50 amino acid substitutions relative to any amino acid sequence disclosed herein, for example, any one of SEQ ID NOs: 16-16154, any one of SEQ ID NOs: 16-13605, any one of SEQ ID NOs: 16155-47350, any one of SEQ ID NOs: 16155-43953, any one of SEQ ID NOs: 47351-49333, any one of SEQ ID NOs: 49353-50052, or any two or more of SEQ ID NOs: 16-49333 and 49353-50052.

[0155] In some embodiments, a heterologous gene effector comprises an amino acid sequence with at most 1, at most 2, at most 3, at most 4, at most 5, at most 6, at most 7, at most 8, at most 9, at most 10, at most 11, at most 12, at most 13, at most 14, at most 15, at most 16, at most 17, at most 18, at most 19, at most 20, at most 25, at most 30, at most 35, at most 40, at most 45, or at most 50 amino acid substitutions relative to any amino acid sequence disclosed herein, for example, any one of SEQ ID NOs: 16-16154, any one of SEQ ID NOs: 16-13605, any one of SEQ ID NOs: 16155-47350, any one of SEQ ID NOs: 16155-43953, any one of SEQ ID NOs: 47351-49333, any one of SEQ ID NOs: 49353-50052, or any two or more of SEQ ID NOs: 16-49333 and 49353-50052.

[0156] In some embodiments, a heterologous gene effector comprises an amino acid sequence with 1, 2, 3, 4, 5, 6, 7, 8, 9, 10, 11, 12, 13, 14, 15, 16, 17, 18, 19, 20, 25, 30, 35, 40, 45, or 50 amino acid substitutions relative to any amino acid sequence disclosed herein, for example, any one of SEQ ID NOs: 16-16154, any one of SEQ ID NOs: 16-13605, any one of SEQ ID NOs: 16155-47350, any one of SEQ ID NOs: 16155-43953, any one of SEQ ID NOs: 47351-49333, any one of SEQ ID NOs: 49353-50052, or any two or more of SEQ ID NOs: 16-49333 and 49353-50052.

[0157] The one or more substitutions can be at the N-terminus, C-terminus, within the amino acid sequence, or a combination thereof. The one or more substitutions can be contiguous, non-contiguous, or a combination thereof. The one or more substitutions can comprise a substitution of an N-terminal methionine for a different residue, for example, Leucine.

[0158] In some embodiments a heterologous gene effector does not contain an N-terminal methionine. In some embodiments, an N-terminal methionine found in any one of SEQ ID NOs: 16-16154, 16-13605, 16155-47350, 16155-43953, 47351-49333, or 16-49333 is deleted, absent, or substituted for a different residue. For example, SEQ ID NOs: 49353-50052 provide illustrative examples of sequences in which an N-terminal methionine has been substituted for an N-terminal leucine. In some embodiments a heterologous gene effector comprises an N-terminal methionine.

[0159] The one or more substitutions can be conservative, non-conservative, or a combination thereof. A conservative amino acid substitution can be a substitution of one amino acid for another amino acid of similar biochemical properties (e.g., charge, size, and/or hydrophobicity). A non-conservative amino acid substitution can be a substitution of one amino acid for another amino acid with different biochemical properties (e.g., charge, size, and/or hydrophobicity). A conservative amino acid change can be, for example, a substitution that has minimal effect on the secondary or tertiary structure of a polypeptide.

[0160] In some embodiments, a heterologous gene effector comprises, consists essentially of, or consists of a peptide sequence with at least about 70%, at least about 75%, at least about 80%, at least about 81%, at least about 82%, at least about 83%, at least about 84%, at least about 85%, at least about 86%, at least about 87%, at least about 88%, at least about 89%, at least about 90%, at least about 91%, at least about 92%, at least about 93%, at least about 94%, at least about 95%, at least about 96%, at least about 97%, at least about 97.5%, at least about 98%, at least about 98.5%, at least about 99%, at least about 99.5%, at least about 99.9%, or about 100% sequence identity or sequence similarity to any one of SEQ ID NOs: 1102, 2057, 5543, 9066, 11948, 15646, 17629, 19860, 21015, 21166, 22149, 22707, 23631, 23639, 25430, 25555, 32678, 33890, 34047, 35737, 38138, 38780, 40913, 40985, 40986, and 42623.

[0161] In some embodiments, a heterologous gene effector comprises, consists essentially of, or consists of a peptide sequence with at least about 70%, at least about 75%, at least about 80%, at least about 81%, at least about 82%, at least about 83%, at least about 84%, at least about 85%, at least about 86%, at least about 87%, at least about 88%, at least about 89%, at least about 90%, at least about 91%, at least about 92%, at least about 93%, at least about 94%, at least about 95%, at least about 96%, at least about 97%, at least about 97.5%, at least about 98%, at least about 98.5%, at least about 99%, at least about 99.5%, at least about 99.9%, or about 100% sequence identity or sequence similarity to SEQ ID NO: 1102.

[0162] In some embodiments, a heterologous gene effector comprises, consists essentially of, or consists of a peptide sequence with at least about 70%, at least about 75%, at least about 80%, at least about 81%, at least about 82%, at least about 83%, at least about 84%, at least about 85%, at least about 86%, at least about 87%, at least about 88%, at least about 89%, at least about 90%, at least about 91%, at least about 92%, at least about 93%, at least about 94%, at least about 95%, at least about 96%, at least about 97%, at least about 97.5%, at least about 98%, at least about 98.5%, at least about 99%, at least about 99.5%, at least about 99.9%, or about 100% sequence identity or sequence similarity to SEQ ID NO: 2057.

[0163] In some embodiments, a heterologous gene effector comprises, consists essentially of, or consists of a peptide sequence with at least about 70%, at least about 75%, at least about 80%, at least about 81%, at least about 82%, at least about 83%, at least about 84%, at least about 85%, at least about 86%, at least about 87%, at least about 88%, at least about 89%, at least about 90%, at least about 91%, at least about 92%, at least about 93%, at least about 94%, at least about 95%, at least about 96%, at least about 97%, at least about 97.5%, at least about 98%, at least about 98.5%, at least about 99%, at least about 99.5%, at least about 99.9%, or about 100% sequence identity or sequence similarity to SEQ ID NO: 5543.

[0164] In some embodiments, a heterologous gene effector comprises, consists essentially of, or consists of a peptide sequence with at least about 70%, at least about 75%, at least about 80%, at least about 81%, at least about 82%, at least about 83%, at least about 84%, at least about 85%, at least about 86%, at least about 87%, at least about 88%, at least about 89%, at least about 90%, at least about 91%, at least about 92%, at least about 93%, at least about 94%, at least about 95%, at least about 96%, at least about 97%, at least about 97.5%, at least about 98%, at least about 98.5%, at least about 99%, at least about 99.5%, at least about 99.9%, or about 100% sequence identity or sequence similarity to SEQ ID NO: 9066.

[0165] In some embodiments, a heterologous gene effector comprises, consists essentially of, or consists of a peptide sequence with at least about 70%, at least about 75%, at least about 80%, at least about 81%, at least about 82%, at least about 83%, at least about 84%, at least about 85%, at least about 86%, at least about 87%, at least about 88%, at least about 89%, at least about 90%, at least about 91%, at least about 92%, at least about 93%, at least about 94%, at least about 95%, at least about 96%, at least about 97%, at least about 97.5%, at least about 98%, at least about 98.5%, at least about 99%, at least about 99.5%, at least about 99.9%, or about 100% sequence identity or sequence similarity to SEQ ID NO: 11948.

[0166] In some embodiments, a heterologous gene effector comprises, consists essentially of, or consists of a peptide sequence with at least about 70%, at least about 75%, at least about 80%, at least about 81%, at least about 82%, at least about 83%, at least about 84%, at least about 85%, at least about 86%, at least about 87%, at least about 88%, at least about 89%, at least about 90%, at least about 91%, at least about 92%, at least about 93%, at least about 94%, at least about 95%, at least about 96%, at least about 97%, at least about 97.5%, at least about 98%, at least about 98.5%, at least about 99%, at least about 99.5%, at least about 99.9%, or about 100% sequence identity or sequence similarity to SEQ ID NO: 15646.

[0167] In some embodiments, a heterologous gene effector comprises, consists essentially of, or consists of a peptide sequence with at least about 70%, at least about 75%, at least about 80%, at least about 81%, at least about 82%, at least about 83%, at least about 84%, at least about 85%, at least about 86%, at least about 87%, at least about 88%, at least about 89%, at least about 90%, at least about 91%, at least about 92%, at least about 93%, at least about 94%, at least about 95%, at least about 96%, at least about 97%, at least about 97.5%, at least about 98%, at least about 98.5%, at least about 99%, at least about 99.5%, at least about 99.9%, or about 100% sequence identity or sequence similarity to SEQ ID NO: 17629.

[0168] In some embodiments, a heterologous gene effector comprises, consists essentially of, or consists of a peptide sequence with at least about 70%, at least about 75%, at least about 80%, at least about 81%, at least about 82%, at least about 83%, at least about 84%, at least about 85%, at least about 86%, at least about 87%, at least about 88%, at least about 89%, at least about 90%, at least about 91%, at least about 92%, at least about 93%, at least about 94%, at least about 95%, at least about 96%, at least about 97%, at least about 97.5%, at least about 98%, at least about 98.5%, at least about 99%, at least about 99.5%, at least about 99.9%, or about 100% sequence identity or sequence similarity to SEQ ID NO: 19860.

[0169] In some embodiments, a heterologous gene effector comprises, consists essentially of, or consists of a peptide sequence with at least about 70%, at least about 75%, at least about 80%, at least about 81%, at least about 82%, at least about 83%, at least about 84%, at least about 85%, at least about 86%, at least about 87%, at least about 88%, at least about 89%, at least about 90%, at least about 91%, at least about 92%, at least about 93%, at least about 94%, at least about 95%, at least about 96%, at least about 97%, at least about 97.5%, at least about 98%, at least about 98.5%, at least about 99%, at least about 99.5%, at least about 99.9%, or about 100% sequence identity or sequence similarity to SEQ ID NO: 21015.

[0170] In some embodiments, a heterologous gene effector comprises, consists essentially of, or consists of a peptide sequence with at least about 70%, at least about 75%, at least about 80%, at least about 81%, at least about 82%, at least about 83%, at least about 84%, at least about 85%, at least about 86%, at least about 87%, at least about 88%, at least about 89%, at least about 90%, at least about 91%, at least about 92%, at least about 93%, at least about 94%, at least about 95%, at least about 96%, at least about 97%, at least about 97.5%, at least about 98%, at least about 98.5%, at least about 99%, at least about 99.5%, at least about 99.9%, or about 100% sequence identity or sequence similarity to SEQ ID NO: 21166.

[0171] In some embodiments, a heterologous gene effector comprises, consists essentially of, or consists of a peptide sequence with at least about 70%, at least about 75%, at least about 80%, at least about 81%, at least about 82%, at least about 83%, at least about 84%, at least about 85%, at least about 86%, at least about 87%, at least about 88%, at least about 89%, at least about 90%, at least about 91%, at least about 92%, at least about 93%, at least about 94%, at least about 95%, at least about 96%, at least about 97%, at least about 97.5%, at least about 98%, at least about 98.5%, at least about 99%, at least about 99.5%, at least about 99.9%, or about 100% sequence identity or sequence similarity to SEQ ID NO: 22149.

[0172] In some embodiments, a heterologous gene effector comprises, consists essentially of, or consists of a peptide sequence with at least about 70%, at least about 75%, at least about 80%, at least about 81%, at least about 82%, at least about 83%, at least about 84%, at least about 85%, at least about 86%, at least about 87%, at least about 88%, at least about 89%, at least about 90%, at least about 91%, at least about 92%, at least about 93%, at least about 94%, at least about 95%, at least about 96%, at least about 97%, at least about 97.5%, at least about 98%, at least about 98.5%, at least about 99%, at least about 99.5%, at least about 99.9%, or about 100% sequence identity or sequence similarity to SEQ ID NO: 22707.

[0173] In some embodiments, a heterologous gene effector comprises, consists essentially of, or consists of a peptide sequence with at least about 70%, at least about 75%, at least about 80%, at least about 81%, at least about 82%, at least about 83%, at least about 84%, at least about 85%, at least about 86%, at least about 87%, at least about 88%, at least about 89%, at least about 90%, at least about 91%, at least about 92%, at least about 93%, at least about 94%, at least about 95%, at least about 96%, at least about 97%, at least about 97.5%, at least about 98%, at least about 98.5%, at least about 99%, at least about 99.5%, at least about 99.9%, or about 100% sequence identity or sequence similarity to SEQ ID NO: 23631.

[0174] In some embodiments, a heterologous gene effector comprises, consists essentially of, or consists of a peptide sequence with at least about 70%, at least about 75%, at least about 80%, at least about 81%, at least about 82%, at least about 83%, at least about 84%, at least about 85%, at least about 86%, at least about 87%, at least about 88%, at least about 89%, at least about 90%, at least about 91%, at least about 92%, at least about 93%, at least about 94%, at least about 95%, at least about 96%, at least about 97%, at least about 97.5%, at least about 98%, at least about 98.5%, at least about 99%, at least about 99.5%, at least about 99.9%, or about 100% sequence identity or sequence similarity to SEQ ID NO: 23639.

[0175] In some embodiments, a heterologous gene effector comprises, consists essentially of, or consists of a peptide sequence with at least about 70%, at least about 75%, at least about 80%, at least about 81%, at least about 82%, at least about 83%, at least about 84%, at least about 85%, at least about 86%, at least about 87%, at least about 88%, at least about 89%, at least about 90%, at least about 91%, at least about 92%, at least about 93%, at least about 94%, at least about 95%, at least about 96%, at least about 97%, at least about 97.5%, at least about 98%, at least about 98.5%, at least about 99%, at least about 99.5%, at least about 99.9%, or about 100% sequence identity or sequence similarity to SEQ ID NO: 25430.

[0176] In some embodiments, a heterologous gene effector comprises, consists essentially of, or consists of a peptide sequence with at least about 70%, at least about 75%, at least about 80%, at least about 81%, at least about 82%, at least about 83%, at least about 84%, at least about 85%, at least about 86%, at least about 87%, at least about 88%, at least about 89%, at least about 90%, at least about 91%, at least about 92%, at least about 93%, at least about 94%, at least about 95%, at least about 96%, at least about 97%, at least about 97.5%, at least about 98%, at least about 98.5%, at least about 99%, at least about 99.5%, at least about 99.9%, or about 100% sequence identity or sequence similarity to SEQ ID NO: 25555.

[0177] In some embodiments, a heterologous gene effector comprises, consists essentially of, or consists of a peptide sequence with at least about 70%, at least about 75%, at least about 80%, at least about 81%, at least about 82%, at least about 83%, at least about 84%, at least about 85%, at least about 86%, at least about 87%, at least about 88%, at least about 89%, at least about 90%, at least about 91%, at least about 92%, at least about 93%, at least about 94%, at least about 95%, at least about 96%, at least about 97%, at least about 97.5%, at least about 98%, at least about 98.5%, at least about 99%, at least about 99.5%, at least about 99.9%, or about 100% sequence identity or sequence similarity to SEQ ID NO: 32678.

[0178] In some embodiments, a heterologous gene effector comprises, consists essentially of, or consists of a peptide sequence with at least about 70%, at least about 75%, at least about 80%, at least about 81%, at least about 82%, at least about 83%, at least about 84%, at least about 85%, at least about 86%, at least about 87%, at least about 88%, at least about 89%, at least about 90%, at least about 91%, at least about 92%, at least about 93%, at least about 94%, at least about 95%, at least about 96%, at least about 97%, at least about 97.5%, at least about 98%, at least about 98.5%, at least about 99%, at least about 99.5%, at least about 99.9%, or about 100% sequence identity or sequence similarity to SEQ ID NO: 33890.

[0179] In some embodiments, a heterologous gene effector comprises, consists essentially of, or consists of a peptide sequence with at least about 70%, at least about 75%, at least about 80%, at least about 81%, at least about 82%, at least about 83%, at least about 84%, at least about 85%, at least about 86%, at least about 87%, at least about 88%, at least about 89%, at least about 90%, at least about 91%, at least about 92%, at least about 93%, at least about 94%, at least about 95%, at least about 96%, at least about 97%, at least about 97.5%, at least about 98%, at least about 98.5%, at least about 99%, at least about 99.5%, at least about 99.9%, or about 100% sequence identity or sequence similarity to SEQ ID NO: 34047.

[0180] In some embodiments, a heterologous gene effector comprises, consists essentially of, or consists of a peptide sequence with at least about 70%, at least about 75%, at least about 80%, at least about 81%, at least about 82%, at least about 83%, at least about 84%, at least about 85%, at least about 86%, at least about 87%, at least about 88%, at least about 89%, at least about 90%, at least about 91%, at least about 92%, at least about 93%, at least about 94%, at least about 95%, at least about 96%, at least about 97%, at least about 97.5%, at least about 98%, at least about 98.5%, at least about 99%, at least about 99.5%, at least about 99.9%, or about 100% sequence identity or sequence similarity to SEQ ID NO: 35737.

[0181] In some embodiments, a heterologous gene effector comprises, consists essentially of, or consists of a peptide sequence with at least about 70%, at least about 75%, at least about 80%, at least about 81%, at least about 82%, at least about 83%, at least about 84%, at least about 85%, at least about 86%, at least about 87%, at least about 88%, at least about 89%, at least about 90%, at least about 91%, at least about 92%, at least about 93%, at least about 94%, at least about 95%, at least about 96%, at least about 97%, at least about 97.5%, at least about 98%, at least about 98.5%, at least about 99%, at least about 99.5%, at least about 99.9%, or about 100% sequence identity or sequence similarity to SEQ ID NO: 38138.

[0182] In some embodiments, a heterologous gene effector comprises, consists essentially of, or consists of a peptide sequence with at least about 70%, at least about 75%, at least about 80%, at least about 81%, at least about 82%, at least about 83%, at least about 84%, at least about 85%, at least about 86%, at least about 87%, at least about 88%, at least about 89%, at least about 90%, at least about 91%, at least about 92%, at least about 93%, at least about 94%, at least about 95%, at least about 96%, at least about 97%, at least about 97.5%, at least about 98%, at least about 98.5%, at least about 99%, at least about 99.5%, at least about 99.9%, or about 100% sequence identity or sequence similarity to SEQ ID NO: 38780.

[0183] In some embodiments, a heterologous gene effector comprises, consists essentially of, or consists of a peptide sequence with at least about 70%, at least about 75%, at least about 80%, at least about 81%, at least about 82%, at least about 83%, at least about 84%, at least about 85%, at least about 86%, at least about 87%, at least about 88%, at least about 89%, at least about 90%, at least about 91%, at least about 92%, at least about 93%, at least about 94%, at least about 95%, at least about 96%, at least about 97%, at least about 97.5%, at least about 98%, at least about 98.5%, at least about 99%, at least about 99.5%, at least about 99.9%, or about 100% sequence identity or sequence similarity to SEQ ID NO: 40913.

[0184] In some embodiments, a heterologous gene effector comprises, consists essentially of, or consists of a peptide sequence with at least about 70%, at least about 75%, at least about 80%, at least about 81%, at least about 82%, at least about 83%, at least about 84%, at least about 85%, at least about 86%, at least about 87%, at least about 88%, at least about 89%, at least about 90%, at least about 91%, at least about 92%, at least about 93%, at least about 94%, at least about 95%, at least about 96%, at least about 97%, at least about 97.5%, at least about 98%, at least about 98.5%, at least about 99%, at least about 99.5%, at least about 99.9%, or about 100% sequence identity or sequence similarity to SEQ ID NO: 40985.

[0185] In some embodiments, a heterologous gene effector comprises, consists essentially of, or consists of a peptide sequence with at least about 70%, at least about 75%, at least about 80%, at least about 81%, at least about 82%, at least about 83%, at least about 84%, at least about 85%, at least about 86%, at least about 87%, at least about 88%, at least about 89%, at least about 90%, at least about 91%, at least about 92%, at least about 93%, at least about 94%, at least about 95%, at least about 96%, at least about 97%, at least about 97.5%, at least about 98%, at least about 98.5%, at least about 99%, at least about 99.5%, at least about 99.9%, or about 100% sequence identity or sequence similarity to SEQ ID NO: 40986.

[0186] In some embodiments, a heterologous gene effector comprises, consists essentially of, or consists of a peptide sequence with at least about 70%, at least about 75%, at least about 80%, at least about 81%, at least about 82%, at least about 83%, at least about 84%, at least about 85%, at least about 86%, at least about 87%, at least about 88%, at least about 89%, at least about 90%, at least about 91%, at least about 92%, at least about 93%, at least about 94%, at least about 95%, at least about 96%, at least about 97%, at least about 97.5%, at least about 98%, at least about 98.5%, at least about 99%, at least about 99.5%, at least about 99.9%, or about 100% sequence identity or sequence similarity to SEQ ID NO: 42623.

[0187] In some embodiments, a heterologous gene effector comprises, consists essentially of, or consists of a peptide sequence with at least about 70%, at least about 75%, at least about 80%, at least about 81%, at least about 82%, at least about 83%, at least about 84%, at least about 85%, at least about 86%, at least about 87%, at least about 88%, at least about 89%, at least about 90%, at least about 91%, at least about 92%, at least about 93%, at least about 94%, at least about 95%, at least about 96%, at least about 97%, at least about 97.5%, at least about 98%, at least about 98.5%, at least about 99%, at least about 99.5%, at least about 99.9%, or about 100% sequence identity or sequence similarity to any one of SEQ ID NOs: 16, 17, 23, 26, 35, 66, 67, 71, 74, 126, 148, 159, 160, 166, 171, 172, 174, 176, 178, 185, 188, 189, 210, 225, 237, 240, 245, 253, 259, 298, 302, 308, 316, 334, 335, 360, 362, 375, 377, 394, 398, 415, 426, 460, 476, 480, 486, 515, 527, 539, 548, 565, 571, 604, 630, 643, 676, 720, 734, 746, 774, 797, 812, 833, 835, 841, 852, 871, 874, 879, 881, 927, 934, 947, 952, 967, 986, 993, 1009, 1033, 1042, 1044, 1054, 1075, 1076, 1077, 1079, 1084, 1094, 1102, 1111, 1113, 1120, 1129, 1131, 1149, 1156, 1161, 1186, 1190, 1225, 1253, 1258, 1261, 1262, 1265, 1289, 1295, 1299, 1303, 1308, 1311, 1313, 1315, 1328, 1350, 1355, 1368, 1374, 1375, 1380, 1388, 1395, 1400, 1406, 1424, 1427, 1430, 1437, 1440, 1493, 1498, 1502, 1510, 1511, 1519, 1522, 1581, 1591, 1597, 1615, 1630, 1644, 1662, 1675, 1714, 1718, 1720, 1730, 1735, 1745, 1778, 1785, 1791, 1803, 1812, 1820, 1828, 1835, 1869, 1870, 1888, 1889, 1908, 1911, 1912, 1940, 1980, 1981, 2011, 2046, 2057, 2086, 2109, 2119, 2192, 2204, 2233, 2247, 2257, 2276, 2285, 2296, 2304, 2309, 2316, 2335, 2338, 2339, 2347, 2352, 2378, 2382, 2394, 2397, 2429, 2493, 2507, 2519, 2534, 2557, 2572, 2595, 2642, 2650, 2681, 2707, 2725, 2767, 2768, 2804, 2807, 2825, 2837, 2865, 2878, 2888, 2889, 2899, 2966, 2980, 3069, 3073, 3078, 3081, 3093, 3116, 3130, 3175, 3191, 3217, 3222, 3225, 3244, 3254, 3255, 3256, 3261, 3287, 3292, 3299, 3309, 3330, 3353, 3361, 3363, 3379, 3383, 3389, 3392, 3402, 3407, 3416, 3424, 3425, 3444, 3445, 3457, 3462, 3486, 3508, 3528, 3531, 3535, 3541, 3550, 3561, 3563, 3572, 3586, 3590, 3597, 3608, 3630, 3714, 3718, 3723, 3726, 3730, 3735, 3764, 3771, 3786, 3803, 3804, 3851, 3869, 3873, 3907, 3911, 3914, 3918, 3926, 3946, 3965, 4010, 4016, 4025, 4032, 4047, 4063, 4065, 4072, 4082, 4131, 4143, 4150, 4161, 4201, 4225, 4231, 4239, 4261, 4274, 4284, 4289, 4295, 4298, 4325, 4327, 4346, 4358, 4362, 4368, 4444, 4459, 4516, 4547, 4549, 4562, 4571, 4598, 4610, 4618, 4640, 4653, 4669, 4684, 4706, 4721, 4751, 4753, 4763, 4770, 4776, 4807, 4812, 4820, 4826, 4852, 4857, 4867, 4880, 4886, 4892, 4899, 4958, 4961, 4972, 4991, 4998, 5002, 5005, 5006, 5009, 5025, 5027, 5028, 5038, 5045, 5055, 5062, 5081, 5093, 5095, 5129, 5169, 5172, 5189, 5211, 5219, 5245, 5250, 5272, 5273, 5274, 5285, 5294, 5306, 5307, 5351, 5359, 5395, 5402, 5405, 5412, 5444, 5448, 5497, 5502, 5524, 5543, 5559, 5570, 5577, 5604, 5612, 5646, 5649, 5655, 5667, 5697, 5699, 5724, 5734, 5735, 5743, 5747, 5758, 5764, 5782, 5783, 5849, 5856, 5858, 5875, 5898, 5901, 5913, 5921, 5928, 5954, 5959, 5963, 5969, 5980, 5985, 5998, 6003, 6021, 6033, 6036, 6050, 6052, 6073, 6075, 6102, 6107, 6121, 6134, 6158, 6173, 6179, 6182, 6198, 6205, 6236, 6272, 6276, 6298, 6310, 6332, 6335, 6356, 6384, 6386, 6389, 6414, 6431, 6446, 6447, 6470, 6502, 6508, 6522, 6533, 6545, 6558, 6580, 6588, 6604, 6608, 6610, 6628, 6632, 6648, 6651, 6652, 6659, 6673, 6681, 6682, 6698, 6699, 6752, 6757, 6761, 6795, 6813, 6818, 6819, 6828, 6838, 6842, 6848, 6868, 6873, 6874, 6882, 6893, 6895, 6900, 6902, 6903, 6928, 6931, 6941, 6952, 6953, 6955, 6984, 7027, 7029, 7030, 7034, 7070, 7076, 7106, 7115, 7128, 7140, 7143, 7166, 7171, 7187, 7226, 7259, 7279, 7281, 7286, 7291, 7296, 7304, 7320, 7325, 7336, 7375, 7391, 7405, 7414, 7432, 7433, 7443, 7462, 7489, 7500, 7501, 7508, 7520, 7551, 7570, 7576, 7590, 7596, 7608, 7611, 7613, 7621, 7625, 7637, 7643, 7651, 7661, 7696, 7701, 7703, 7705, 7711, 7717, 7722, 7728, 7736, 7770, 7781, 7803, 7807, 7809, 7831, 7833, 7834, 7856, 7888, 7890, 7894, 7926, 7927, 7943, 7949, 7965, 7984, 8010, 8018, 8027, 8028, 8041, 8068, 8089, 8097, 8102, 8105, 8111, 8129, 8149, 8186, 8189, 8219, 8223, 8227, 8236, 8243, 8249, 8255, 8256, 8258, 8259, 8272, 8278, 8280, 8283, 8297, 8301, 8308, 8314, 8324, 8328, 8347, 8357, 8363, 8371, 8386, 8394, 8408, 8420, 8421, 8429, 8432, 8436, 8437, 8439, 8468, 8485, 8488, 8489, 8505, 8538, 8551, 8563, 8564, 8574, 8579, 8628, 8629, 8631, 8634, 8636, 8637, 8641, 8670, 8692, 8699, 8729, 8730, 8752, 8779, 8805, 8841, 8854, 8865, 8886, 8893, 8931, 8933, 8973, 8981, 8985, 8998, 9000, 9003, 9017, 9021, 9024, 9026, 9027, 9040, 9050, 9053, 9055, 9066, 9069, 9072, 9078, 9094, 9095, 9100, 9110, 9119, 9130, 9152, 9153, 9189, 9194, 9222, 9223, 9225, 9231, 9262, 9264, 9267, 9273, 9283, 9297, 9304, 9307, 9314, 9320, 9324, 9328, 9338, 9380, 9386, 9397, 9403, 9413, 9442, 9472, 9516, 9528, 9534, 9542, 9552, 9568, 9602, 9611, 9626, 9632, 9648, 9649, 9663, 9667, 9669, 9670, 9672, 9673, 9675, 9678, 9682, 9700, 9741, 9750, 9761, 9771, 9829, 9845, 9853, 9854, 9879, 9880, 9891, 9893, 9894, 9899, 9901, 9903, 9922, 9933, 9937, 9940, 9943, 9948, 9962, 9965, 9971, 9988, 9990, 10007, 10014, 10016, 10025, 10040, 10058, 10069, 10072, 10095, 10097, 10113, 10123, 10160, 10230, 10234, 10235, 10236, 10238, 10250, 10252, 10279, 10289, 10292, 10309, 10313, 10314, 10315, 10316, 10329, 10348, 10357, 10364, 10383, 10394, 10405, 10407, 10414, 10420, 10421, 10423, 10427, 10428, 10436, 10437, 10439, 10446, 10451, 10459, 10463, 10466, 10489, 10490, 10491, 10512, 10516, 10555, 10566, 10570, 10584, 10587, 10588, 10607, 10615, 10624, 10637, 10648, 10663, 10701, 10732, 10759, 10778, 10788, 10796, 10813, 10853, 10865, 10878, 10919, 10943, 10945, 10950, 10955, 10957, 10969, 10984, 10991, 10998, 10999, 11018, 11019, 11027, 11035, 11036, 11042, 11045, 11079, 11090, 11095, 11106, 11129, 11187, 11207, 11218, 11223, 11233, 11260, 11265, 11272, 11290, 11297, 11306, 11326, 11374, 11386, 11396, 11411, 11432, 11437, 11455, 11459, 11471, 11481, 11485, 11486, 11506, 11511, 11550, 11555, 11557, 11577, 11601, 11621, 11642, 11652, 11670, 11673, 11705, 11709, 11712, 11713, 11715, 11716, 11723, 11730, 11737, 11741, 11749, 11750, 11778, 11784, 11785, 11794, 11797, 11799, 11804, 11810, 11835, 11888, 11893, 11895, 11904, 11931, 11932, 11948, 11969, 11982, 11985, 12020, 12024, 12029, 12055, 12061, 12066, 12067, 12069, 12072, 12096, 12114, 12121, 12132, 12161, 12183, 12187, 12191, 12199, 12227, 12254, 12266, 12344, 12345, 12362, 12393, 12400, 12401, 12422, 12427, 12436, 12448, 12451, 12476, 12498, 12526, 12542, 12558, 12560, 12567, 12570, 12590, 12591, 12609, 12613, 12626, 12632, 12660, 12669, 12671, 12681, 12692, 12706, 12716, 12722, 12723, 12738, 12753, 12757, 12771, 12775, 12783, 12786, 12806, 12809, 12822, 12838, 12843, 12846, 12847, 12892, 12904, 12925, 12928, 12932, 12945, 12947, 12958, 12960, 12965, 12982, 13022, 13027, 13031, 13032, 13038, 13046, 13083, 13092, 13124, 13149, 13174, 13190, 13195, 13198, 13211, 13219, 13226, 13229, 13233, 13273, 13283, 13288, 13327, 13345, 13363, 13364, 13385, 13394, 13395, 13403, 13420, 13452, 13497, 13509, 13517, 13528, 13553, 13569, 16179, 16218, 16224, 16251, 16278, 16313, 16319, 16335, 16364, 16381, 16414, 16440, 16472, 16482, 16501, 16505, 16506, 16514, 16515, 16516, 16524, 16535, 16541, 16578, 16618, 16667, 16677, 16699, 16702, 16705, 16769, 16771, 16786, 16807, 16856, 16867, 16916, 16935, 17012, 17029, 17032, 17054, 17067, 17084, 17087, 17107, 17115, 17121, 17127, 17142, 17146, 17193, 17196, 17209, 17231, 17247, 17256, 17264, 17268, 17273, 17275, 17298, 17314, 17326, 17332, 17349, 17354, 17377, 17385, 17434, 17444, 17447, 17469, 17475, 17491, 17494, 17511, 17528, 17538, 17546, 17556, 17563, 17565, 17570, 17608, 17613, 17629, 17633, 17639, 17666, 17674, 17691, 17697, 17735, 17793, 17816, 17817, 17821, 17842, 17843, 17883, 17901, 17928, 17950, 17956, 17961, 17965, 17983, 18026, 18092, 18106, 18113, 18125, 18144, 18162, 18221, 18237, 18340, 18351, 18355, 18388, 18439, 18444, 18468, 18499, 18504, 18555, 18561, 18579, 18587, 18588, 18599, 18618, 18642, 18664, 18696, 18725, 18736, 18741, 18787, 18809, 18827, 18854, 18864, 18872, 18888, 18936, 19013, 19034, 19048, 19063, 19075, 19078, 19079, 19092, 19123, 19126, 19156, 19188, 19211, 19212, 19235, 19237, 19239, 19248, 19261, 19289, 19292, 19320, 19325, 19387, 19389, 19424, 19435, 19445, 19490, 19512, 19542, 19556, 19559, 19568, 19571, 19581, 19583, 19591, 19599, 19621, 19624, 19633, 19642, 19671, 19684, 19711, 19731, 19738, 19745, 19761, 19771, 19781, 19809, 19815, 19858, 19860, 19877, 19888, 19916, 19973, 19989, 19998, 20006, 20028, 20055, 20100, 20101, 20116, 20144, 20169, 20207, 20266, 20273, 20285, 20316, 20317, 20321, 20342, 20352, 20365, 20375, 20383, 20387, 20390, 20415, 20416, 20429, 20484, 20506, 20521, 20526, 20541, 20556, 20578, 20637, 20657, 20668, 20703, 20746, 20767, 20818, 20839, 20857, 20871, 20876, 20877, 20878, 20881, 20887, 20939, 20946, 20993, 20998, 21001, 21004, 21015, 21024, 21042, 21054, 21057, 21091, 21123, 21126, 21134, 21139, 21149, 21166, 21211, 21229, 21238, 21291, 21294, 21295, 21306, 21312, 21339, 21455, 21488, 21492, 21507, 21518, 21557, 21610, 21616, 21623, 21633, 21644, 21646, 21661, 21709, 21755, 21767, 21768, 21788, 21792, 21804, 21806, 21882, 21932, 21974, 21985, 22046, 22059, 22096, 22123, 22149, 22164, 22193, 22206, 22221, 22232, 22240, 22241, 22275, 22284, 22302, 22344, 22358, 22359, 22392, 22410, 22433, 22437, 22449, 22459, 22462, 22469, 22510, 22536, 22540, 22542, 22563, 22592, 22613, 22639, 22655, 22693, 22695, 22707, 22710, 22711, 22723, 22726, 22742, 22745, 22753, 22838, 22889, 22899, 22912, 22916, 23003, 23014, 23039, 23060, 23112, 23131, 23136, 23157, 23160, 23168, 23171, 23199, 23214, 23216, 23244, 23257, 23260, 23261, 23269, 23278, 23280, 23305, 23316, 23326, 23351, 23370, 23383, 23404, 23415, 23442, 23443, 23449, 23451, 23501, 23515, 23521, 23526, 23534, 23557, 23562, 23567, 23568, 23579, 23585, 23626, 23631, 23632, 23639, 23644, 23814, 23832, 23895, 23926, 23929, 23987, 23990, 24041, 24071, 24077, 24119, 24122, 24136, 24179, 24214, 24218, 24242, 24245, 24292, 24303, 24304, 24316, 24391, 24393, 24422, 24424, 24429, 24433, 24493, 24501, 24525, 24535, 24578, 24587, 24631, 24645, 24649, 24652, 24656, 24667, 24668, 24679, 24682, 24727, 24742, 24815, 24831, 24838, 24871, 24881, 24914, 24921, 24972, 24973, 24988, 25001, 25022, 25040, 25050, 25051, 25062, 25091, 25108, 25164, 25168, 25171, 25190, 25191, 25192, 25198, 25210, 25242, 25252, 25281, 25400, 25430, 25442, 25444, 25470, 25515, 25530, 25543, 25547, 25555, 25565, 25567, 25569, 25598, 25663, 25669, 25675, 25677, 25681, 25692, 25695, 25707, 25712, 25714, 25747, 25762, 25778, 25815, 25834, 25842, 25856, 25858, 25859, 25874, 25878, 25897, 25911, 25925, 25939, 25956, 25966, 25976, 26006, 26060, 26081, 26097, 26101, 26119, 26146, 26161, 26191, 26218, 26221, 26239, 26249, 26324, 26335, 26337, 26379, 26391, 26392, 26411, 26424, 26456, 26460, 26481, 26528, 26575, 26578, 26588, 26589, 26600, 26606, 26633, 26634, 26651, 26672, 26679, 26706, 26728, 26729, 26734, 26750, 26806, 26808, 26818, 26831, 26893, 26896, 26898, 26991, 26999, 27024, 27026, 27033, 27087, 27088, 27119, 27122, 27191, 27229, 27257, 27284, 27322, 27337, 27384, 27446, 27450, 27482, 27486, 27499, 27511, 27520, 27541, 27584, 27612, 27673, 27681, 27766, 27795, 27807, 27814, 27833, 27835, 27851, 27856, 27874, 27876, 27917, 27953, 27995, 28039, 28046, 28083, 28084, 28089, 28094, 28099, 28100, 28104, 28160, 28161, 28165, 28166, 28171, 28172, 28173, 28176, 28177, 28197, 28251, 28276, 28302, 28308, 28312, 28354, 28394, 28440, 28445, 28462, 28464, 28477, 28490, 28555, 28564, 28572, 28576, 28598, 28621, 28630, 28648, 28652, 28691, 28692, 28725, 28728, 28732, 28744, 28746, 28751, 28774, 28806, 28816, 28817, 28826, 28848, 28849, 28854, 28864, 28899, 28904, 28914, 28925, 28966, 28968, 29015, 29039, 29055, 29075, 29121, 29127, 29137, 29140, 29144, 29175, 29219, 29226, 29241, 29249, 29273, 29295, 29300, 29317, 29353, 29368, 29393, 29404, 29448, 29460, 29506, 29511, 29530, 29531, 29558, 29573, 29609, 29628, 29781, 29794, 29816, 29864, 29869, 29889, 29915, 29917, 29931, 29951, 29985, 30005, 30015, 30032, 30037, 30039, 30095, 30110, 30112, 30117, 30121, 30142, 30148, 30159, 30176, 30207, 30217, 30238, 30294, 30324, 30371, 30387, 30452, 30465, 30477, 30482, 30492, 30494, 30514, 30520, 30532, 30547, 30580, 30586, 30621, 30627, 30634, 30650, 30655, 30672, 30676, 30702, 30709, 30724, 30728, 30777, 30781, 30793, 30802, 30815, 30818, 30861, 30874, 30883, 30892, 30898, 31020, 31041, 31044, 31054, 31058, 31059, 31060, 31112, 31131, 31153, 31160, 31211, 31213, 31234, 31240, 31253, 31257, 31316, 31339, 31347, 31372, 31413, 31430, 31484, 31488, 31527, 31550, 31583, 31608, 31623, 31628, 31641, 31654, 31663, 31697, 31701, 31703, 31721, 31750, 31755, 31784, 31786, 31797, 31832, 31846, 31878, 31889, 31954, 31969, 31975, 31993, 32009, 32014, 32034, 32055, 32057, 32076, 32077, 32127, 32133, 32205, 32236, 32293, 32301, 32360, 32365, 32379, 32386, 32419, 32453, 32454, 32455, 32464, 32466, 32489, 32514, 32520, 32534, 32538, 32542, 32573, 32592, 32634, 32642, 32653, 32659, 32678, 32679, 32725, 32758, 32767, 32771, 32788, 32816, 32829, 32851, 32874, 32875, 32881, 32883, 32885, 32887, 32891, 32892, 32900, 32905, 32912, 32913, 32922, 32932, 32940, 32961, 33008, 33021, 33048, 33059, 33108, 33110, 33115, 33151, 33166, 33207, 33210, 33220, 33223, 33230, 33261, 33314, 33326, 33349, 33351, 33359, 33365, 33368, 33379, 33391, 33423, 33438, 33473, 33497, 33527, 33538, 33555, 33576, 33582, 33607, 33613, 33619, 33625, 33630, 33641, 33670, 33671, 33689, 33696, 33730, 33733, 33777, 33799, 33830, 33869, 33882, 33886, 33890, 33915, 33974, 34043, 34047, 34048, 34059, 34074, 34079, 34134, 34149, 34163, 34182, 34234, 34244, 34260, 34291, 34365, 34373, 34384, 34415, 34421, 34423, 34445, 34452, 34462, 34481, 34483, 34487, 34501, 34507, 34509, 34524, 34560, 34563, 34584, 34642, 34660, 34672, 34685, 34689, 34723, 34754, 34755, 34778, 34794, 34801, 34816, 34818, 34819, 34824, 34826, 34856, 34883, 34886, 34888, 34902, 34933, 34945, 34949, 35017, 35106, 35138, 35158, 35183, 35216, 35226, 35274, 35275, 35293, 35297, 35329, 35368, 35371, 35382, 35440, 35470, 35503, 35517, 35530, 35543, 35557, 35571, 35597, 35605, 35617, 35654, 35676, 35730, 35737, 35755, 35762, 35763, 35781, 35787, 35833, 35863, 35871, 35907, 35928, 35953, 35973, 36062, 36067, 36071, 36122, 36159, 36160, 36165, 36179, 36180, 36190, 36238, 36241, 36270, 36271, 36275, 36276, 36312, 36329, 36388, 36450, 36453, 36460, 36464, 36480, 36512, 36513, 36525, 36541, 36547, 36550, 36566, 36593, 36602, 36652, 36656, 36716, 36754, 36760, 36763, 36777, 36790, 36792, 36793, 36808, 36813, 36818, 36839, 36862, 36887, 36900, 36977, 36987, 37000, 37014, 37039, 37041, 37067, 37076, 37101, 37114, 37116, 37125, 37175, 37195, 37197, 37199, 37200, 37203, 37204, 37320, 37321, 37324, 37379, 37394, 37397, 37422, 37426, 37436, 37456, 37481, 37485, 37486, 37495, 37540, 37560, 37564, 37584, 37593, 37595, 37617, 37619, 37663, 37687, 37734, 37736, 37738, 37739, 37749, 37782, 37783, 37792, 37832, 37839, 37841, 37856, 37871, 37876, 37900, 37931, 37932, 37946, 37971, 38002, 38014, 38025, 38059, 38064, 38080, 38099, 38100, 38102, 38103, 38110, 38116, 38131, 38134, 38135, 38138, 38146, 38147, 38167, 38170, 38214, 38220, 38250, 38255, 38264, 38291, 38303, 38308, 38325, 38331, 38347, 38352, 38368, 38382, 38397, 38399, 38448, 38456, 38457, 38504, 38515, 38520, 38524, 38536, 38540, 38560, 38567, 38601, 38610, 38632, 38637, 38641, 38687, 38690, 38704, 38765, 38780, 38789, 38803, 38847, 38850, 38853, 38855, 38860, 38879, 38882, 38896, 38905, 38937, 39020, 39049, 39109, 39110, 39117, 39132, 39137, 39161, 39165, 39166, 39171, 39180, 39231, 39239, 39243, 39249, 39266, 39298, 39329, 39332, 39385, 39389, 39409, 39413, 39419, 39435, 39457, 39463, 39511, 39512, 39525, 39527, 39551, 39559, 39576, 39606, 39646, 39670, 39675, 39695, 39702, 39772, 39783, 39785, 39802, 39804, 39818, 39875, 39879, 39890, 39891, 39924, 39997, 40000, 40027, 40033, 40048, 40067, 40119, 40132, 40170, 40226, 40261, 40268, 40284, 40292, 40314, 40321, 40324, 40338, 40341, 40345, 40357, 40385, 40395, 40411, 40462, 40476, 40477, 40479, 40486, 40489, 40511, 40524, 40531, 40561, 40562, 40577, 40614, 40632, 40648, 40651, 40661, 40673, 40677, 40680, 40686, 40690, 40691, 40704, 40710, 40711, 40733, 40747, 40763, 40764, 40788, 40830, 40900, 40909, 40913, 40918, 40925, 40932, 40935, 40966, 40970, 40973, 40985, 40986, 41006, 41008, 41032, 41040, 41041, 41061, 41069, 41081, 41119, 41173, 41175, 41176, 41179, 41180, 41227, 41230, 41234, 41272, 41299, 41314, 41318, 41382, 41385, 41417, 41424, 41435, 41481, 41513, 41522, 41524, 41536, 41567, 41578, 41654, 41701, 41702, 41707, 41709, 41752, 41762, 41765, 41768, 41771, 41781, 41795, 41804, 41805, 41824, 41876, 41900, 41902, 41922, 41926, 41968, 42008, 42021, 42081, 42103, 42115, 42139, 42147, 42174, 42185, 42186, 42262, 42270, 42277, 42279, 42299, 42301, 42302, 42303, 42310, 42327, 42339, 42343, 42348, 42350, 42354, 42373, 42406, 42450, 42462, 42472, 42486, 42507, 42540, 42571, 42581, 42582, 42587, 42592, 42623, 42656, 42667, 42673, 42689, 42718, 42723, 42772, 42781, 42800, 42805, 42835, 42838, 42872, 42963, 42964, 42966, 42977, 43010, 43039, 43040, 43043, 43053, 43080, 43122, 43126, 43148, 43156, 43224, 43228, 43236, 43237, 43260, 43292, 43314, 43394, 43434, 43446, 43451, 43465, 43477, 43481, 43492, 43523, 43531, 43571, 43612, 43615, 43640, 43656, 43725, 43737, 43751, 43769, 43803, 43810, 43819, 43881, 43885, 43902, 43903, 43911, 43941, 43946, 43952, 49354, 49374, 49390, 49498, 49518, 49520, 49532, 49547, 49559, 49588, 49594, 49595, 49606, 49619, 49622, 49625, 49646, 49649, 49662, 49675, 49680, 49687, 49691, 49695, 49712, 49720, 49728, 49737, 49738, 49747, 49760, 49772, 49779, 49780, 49788, 49832, 49850, 49874, 49894, 49904, 49955, 49969, 49971, and 49974.

[0188] In some embodiments, a heterologous gene effector comprises, consists essentially of, or consists of an amino acid sequence that is at most about 500, at most about 450, at most about 400, at most about 350, at most about 300, at most about 250, at most about 200, at most about 190, at most about 180, at most about 170, at most about 160, at most about 150, at most about 140, at most about 130, at most about 120, at most about 110, at most about 100, at most about 90, at most about 85, at most about 80, at most about 75, at most about 70, at most about 65, at most about 60, at most about 55, at most about 50, at most about 45, at most about 40, at most about 35, at most about 30, at most about 25, or at most about 20 amino acids in length.

[0189] In some embodiments, a heterologous gene effector comprises, consists essentially of, or consists of an amino acid sequence that is at least about 10, at least about 20, at least about 30, at least about 40, at least about 50, at least about 55, at least about 60, at least about 65, at least about 70, at least about 75, at least about 80, or at least about 85 amino acids in length.

[0190] In some embodiments, a heterologous gene effector comprises, consists essentially of, or consists of an amino acid sequence that is about 20-500, about 20-400, about 20-300, about 20-250, about 20-200, about 20-150, about 20-125, about 20-100, about 20-75, about 20-50, 50-500, about 50-400, about 50-300, about 50-250, about 50-200, about 50-150, about 50-125, about 50-100, about 50-75, about 80-500, about 80-400, about 80-300, about 80-250, about 80-200, about 80-150, about 80-125, about 80-100, or about 80-90 amino acids in length. In some embodiments, a heterologous gene effector comprises, consists essentially of, or consists of an amino acid sequence that is about 85 amino acids in length.

[0191] The degree of sequence identity between two sequences can be determined, for example, by comparing the two sequences using computer programs commonly employed for this purpose, such as global or local alignment algorithms. Non-limiting examples include BLASTp, BLASTn, Clustal W, MAFFT, Clustal Omega, AlignMe, Praline, GAP, BESTFIT, or another suitable method or algorithm. A Needleman and Wunsch global alignment algorithm can be used to align two sequences over their entire length, maximizing the number of matches and minimizes the number of gaps. Default settings can be used.

[0192] In some embodiments, a heterologous gene effector comprises two or more sequences disclosed herein, for example, two, three, four, five, six, seven, eight, nine, ten, two or more, three or more, four or more, five or more, six or more, seven or more, eight or more, nine or more, or ten or more of SEQ ID NOs: 16-49333 and 49353-50052. In some embodiments, the two or more sequences originate from or are encoded by the same DNA sequence, e.g., are encoded by adjacent stretches of nucleotides from the same source gene or genome, such as before and after a putative or predicted stop codon. In some embodiments, the two or more sequences originate from or are encoded by different DNA sequences, e.g., different genes.

[0193] In some embodiments, a heterologous gene effector is not, or does not contain a sequence from, a chromatin regulator that has been previously identified. In some embodiments, a heterologous gene effector is not, or does not contain a sequence from, a chromatin regulator that has previously been targeted to regulate expression of a gene using a guide moiety as disclosed herein. In some embodiments, a heterologous gene effector is not P300, TET1, TET2, TET3, and/or HSF1, or does not contain a sequence from P300, TET1, TET2, TET3, and/or HSF1.

[0194] In some embodiments, a heterologous gene effector is not, or does not contain a sequence from, a transcriptional activator that has been previously identified. In some embodiments, a heterologous gene effector is not, or does not contain a sequence from, a transcriptional activator that has previously been targeted to regulate expression of a gene using a guide moiety as disclosed herein. In some embodiments, a heterologous gene effector is not, or does not contain a sequence from, VP64, P65, Rta, VPR, AD2, CR3, ELKF1, GATA4, PRVIE, p53, SP1, MYOD, MEF2C, TAX, PPAR-gamma, MED1, MED7, MED17, MED26, MED29, TBP, GTF2H-2D, GTF2B, CBP, HSF1, MS2-p65-HSF1, MS2-TET1, NLS-dCas9-VP64, P300, p65, PRDM9, PUFa-GADD45A-TET1, R2, SunTag-scFv-sfGFP-TET1CD, TET1, TET2, TET3, VP120, VP16, VP16, VP16, VP48, VP64, VP64 or p65+/−HSF1 or MyoD1, and/or VPR (Vp64+p65+Rta).

[0195] In some embodiments, a heterologous gene effector is not, or does not contain a sequence from, a transcriptional repressor that has been previously identified. In some embodiments, a heterologous gene effector is not, or does not contain a sequence from, a transcriptional repressor that has previously been targeted to regulate expression of a gene using a guide moiety as disclosed herein. In some embodiments, a heterologous gene effector is not, or does not contain a sequence from KRAB, Mad mSIN3 interaction domain (SID), ERF repressor domain (ERD), cat3a, last 301 amino acids of Dnmt3a Isoform 1, dCas9-KRAB-MeCP2, DNMT3A, DNMT3A, DNMT3A, DNMT3A R887E-DNMT3L, DNMT3A-DNMT3L, DNMT3B, EZH2, HDAC, KRAB-DNMT3A, KRAB-DNMT3A-DNMT3L, KRAB-DNMT3L, LSD1, M.SssI, MQ1, MQ1 Q147E, SID4×, and/or SuntTag-DNMT3A.

[0196] Heterologous gene effectors can be drawn from literature and database sources and can be targeted to include diverse protein families.

### Viral Heterologous Gene Effectors

[0197] Disclosed herein, in some embodiments, are compositions and methods that utilize heterologous gene effectors from viral sources, e.g., viral gene effectors.

[0198] Hundreds of species of virus infect humans. Gene effector domains can be encoded by viral genomes to modulate expression of host and/or viral genes. A census of viral transcriptional regulators from 20 virus families identified 419 transcriptional regulators, of which 171 were DNA-binding (Liu, Xing, et al. “Human virus transcriptional regulators.” Cell 182.1 (2020): 24-37). Further, the majority of the vast number of viral particles estimated to exist have not been characterized, but may harbor heterologous gene effectors that could be useful when incorporated into compositions and methods of the disclosure. For example, such viral heterologous gene effectors from viral sources may comprise novel effector activity, genome organization control, and/or nucleic acid packaging functions. Viruses lacking human tropism may nonetheless produce desirable activity when employed in compositions and methods of the disclosure (for example, used in engineered complexes disclosed herein). Epidemiological studies have identified zoonotic infectious viral species with verified human-tropic activity that emerge from rich evolutionary processes in key viral reservoirs, such as bats, supporting the idea that gene effector activity can be present even in viruses that lack human tropism. Thus, in some embodiments, the disclosure includes sequence data collected from metagenomic surveys.

[0199] Transcriptional regulatory activity of viral heterologous gene effectors can comprise or affect, for example, chromatin remodeling, RNA polymerase recruitment (e.g., RNA Pol II), transcription imitation, transcription elongation, DNA replication, viral transcription, nucleic acid transport, or a combination thereof. Transcriptional regulatory activity of viral heterologous gene effectors can involve, for example, direct binding to nucleic acids (e.g., E2, ICP4, Zta, IRFs), indirect binding to nucleic acids (e.g., EBNA2, ElA), regulation of transcriptional machinery or components thereof (e.g., Tat, ElA, IE2), modification of chromatin (e.g., ElA, Hbx, Tat), or a combination thereof.

[0200] Compared to human transcriptional regulators, viral transcriptional regulators can show little sequence conservation of DNA-binding domains, exhibit higher mutation rates, and be poorly structurally defined (<12%). Defining discrete viral transcriptional regulators can require reliance on species ortholog homology, and limited DNA motif knowledge can mean that defining viral transcriptional regulator binding targets requires experimental data (ChIP, EMSA, DNase footprinting, etc).

[0201] In some embodiments, a list of candidate viral heterologous gene effectors can be stratified by factors such as activation versus repression, target cellular pathway, evolutionary sequence constraint, binding of DNA/RNA/both, protein folding pattern, host/cell tropism, direct/indirect activity, binding promiscuity, nuclear/cytoplasmic action, and other criteria. In some embodiments, such stratifications allow design of a screen library of the disclosure that encompasses a broad spectrum of potential molecular functions, thereby increasing the likelihood for novel effector discovery.

[0202] In some embodiments, compositions and methods of the disclosure utilize candidate heterologous gene effectors from validated human virus transcriptional regulators. Such transcriptional regulators can be validated by, for example, ChIP/ChIP-seq, EMSA, SELEX, reporter assays, binding assays, or crystal structures. Non limiting examples of viral families that can have validated human virus transcriptional regulators include Adenoviridae, Arenaviridae, Bornaviridae, Coronaviridae, Filoviridae, Flaviviridae, Hepadnaviridae, Herpesviridae, Orthomyxoviridae, Papillomaviridae, Paramyxoviridae, Parvoviridae, Peribunyaviridae, Phenuiviridae, Pneumoviridae, Polyomaviridae, Poxviridae, Retroviridae, and Rhabdoviridae.

[0203] In some embodiments, compositions and methods of the disclosure utilize candidate heterologous gene effectors from viruses or virus families that have been shown to be capable of zoonotic transmission to humans. The viruses can be capable of infecting, for example, mammals, birds, swine, non-human primates, rodents, ungulates, reptiles, or amphibians. Non limiting examples of viral families that have been shown to be capable of zoonotic transmission to humans include Flaviviridae, Lyssaviridae, Filoviridae, Paramyxoviridae, Orthomyxoviridae, Coronaviridae, Reoviridae, Togaviridae, Phenuviridae, Hantaviridae, Bunyaviridae, and Rhabdoviridae.

[0204] In some embodiments, compositions and methods of the disclosure utilize candidate heterologous gene effectors from viruses or virus families that can infect humans and bats. In some embodiments, sequence data for the candidate heterologous gene effectors from viruses or virus families that can infect humans and bats are obtained from a database, such as dBatVir. Non limiting examples of viral families that can infect humans and bats include Flaviviridae, Lyssaviridae, Filoviridae, Paramyxoviridae, Orthomyxoviridae, Coronaviridae, Reoviridae, Togaviridae, Phenuviridae, Hantaviridae, Bunyaviridae, and Rhabdoviridae.

[0205] In some embodiments, compositions and methods of the disclosure utilize candidate heterologous gene effectors from metagenomic virus sequences. Non-limiting examples of sources of viral metagenomic data include the human gut virome, extreme environments (e.g., high-temperature and/or high-acid ecosystems which may be enriched for optimal effector qualities, including e.g. archaea-tropic viruses (e.g., sulfolobus), oceans, geothermal vents, viruses that infect non-human species and/or are from virus families that exhibit zoonotic transmission to humans, and sources that utilize structural data (e.g., X-ray, NMR) from public databases. In some embodiments, compositions and methods of the disclosure utilize candidate heterologous gene effectors from viruses that infect archaea, bacteria, cyanobacterial, algae, plants, etc., Non-limiting examples of virus species with sequence data obtained from metagenomic sources include sulfolobus, Siphoviridae, podoviridae, myoviridae, Mimiviridae, Nimaviridae, Ligamenvirales, Globuloviridae, Fuselloviridae, Bicaudaviridae, Satellite virus, Iridoviridae, Turriviridae, Caudovirales, and Phycodnaviridae.

[0206] In some embodiments, compositions and methods of the disclosure utilize candidate heterologous gene effectors from one or more viruses from the families Abyssoviridae, Ackermannviridae, Adenoviridae, Adintoviridae, Aliusviridae, Alloherpesviridae, Alphaflexiviridae, Alphasatellitidae, Alphatetraviridae, Alvernaviridae, Amalgaviridae, Amnoonviridae, Ampullaviridae, Anelloviridae, Arenaviridae, Arteriviridae, Artoviridae, Ascoviridae, Asfarviridae, Aspiviridae, Astroviridae, Atkinsviridae, Autographiviridae, Avsunviroidae, Bacilladnaviridae, Baculoviridae, Bamaviridae, Belpaoviridae, Benyviridae, Betaflexiviridae, Bicaudaviridae, Bidnaviridae, Bimaviridae, Blumeviridae, Bornaviridae, Botourmiaviridae, Bromoviridae, Caliciviridae, Carmotetraviridae, Caulimoviridae, Chaseviridae, Chrysoviridae, Chuviridae, Circoviridae, Clavaviridae, Closteroviridae, Coronaviridae, Corticoviridae, Cremegaviridae, Crepuscuviridae, Cruliviridae, Curvulaviridae, Cystoviridae, Deltaflexiviridae, Demerecviridae, Dicistroviridae, Drexlerviridae, Duinviridae, Endomaviridae, Euroniviridae, Fiersviridae, Filoviridae, Fimoviridae, Finnlakeviridae, Flaviviridae, Fuselloviridae, Gammaflexiviridae, Geminiviridae, Genomoviridae, Globuloviridae, Gresnaviridae, Guelinviridae, Guttaviridae, Halspiviridae, Hantaviridae, Hepadnaviridae, Hepeviridae, Herelleviridae, Herpesviridae, Hypoviridae, Hytrosaviridae, Iflaviridae, Inoviridae, Iridoviridae, Kitaviridae, Kolmioviridae, Lavidaviridae, Leishbuviridae, Lipothrixviridae, Lispiviridae, Malacoherpesviridae, Mamaviridae, Marseilleviridae, Matonaviridae, Matshushitaviridae, Mayoviridae, Medioniviridae, Megabimaviridae, Mesoniviridae, Metaviridae, Metaxyviridae, Microviridae, Mimiviridae, Mitoviridae, Mononiviridae, Mymonaviridae, Myoviridae, Mypoviridae, Myriaviridae, Nairoviridae, Nanghoshaviridae, Nanhypoviridae, Nanoviridae, Narnaviridae, Natareviridae, Nimaviridae, Nodaviridae, Nudiviridae, Nyamiviridae, Olifoviridae, Orthomyxoviridae, Ovaliviridae, Papillomaviridae, Paramyxoviridae, Partitiviridae, Parvoviridae, Paulinoviridae, Peribunyaviridae, Permutotetraviridae, Phasmaviridae, Phenuiviridae, Phycodnaviridae, Picobimaviridae, Picomaviridae, Plasmaviridae, Plectroviridae, Pleolipoviridae, Pneumoviridae, Podoviridae, Polycipiviridae, Polydnaviridae, Polymycoviridae, Polyomaviridae, Portogloboviridae, Pospiviroidae, Potyviridae, Poxviridae, Pseudoviridae, Qinviridae, Quadriviridae, Redondoviridae, Reoviridae, Retroviridae, Rhabdoviridae, Roniviridae, Rountreeviridae, Rudiviridae, Salasmaviridae, Sarthroviridae, Schitoviridae, Secoviridae, Simuloviridae, Sinhaliviridae, Siphoviridae, Smacoviridae, Solemoviridae, Solinviviridae, Solspiviridae, Sphaerolipoviridae, Spiraviridae, Steitzviridae, Sunviridae, Tectiviridae, Thaspiviridae, Tobaniviridae, Togaviridae, Tolecusatellitidae, Tombusviridae, Tospoviridae, Totiviridae, Tristromaviridae, Turriviridae, Tymoviridae, Virgaviridae, Wupedeviridae, Xinmoviridae, Yueviridae, Zobellviridae, or any combination thereof.

[0207] In some embodiments, compositions and methods of the disclosure utilize candidate heterologous gene effectors from one or more viruses from the subfamilies Actantavirinae, Agantavirinae, Aglimvirinae, Alphaherpesvirinae, Alphairidovirinae, Alpharhabdovirinae, Arquatrovirinae, Avulavirinae, Azeredovirinae, Bastillevirinae, Bclasvirinae, Beephvirinae, Beijerinckvirinae, Betaherpesvirinae, Betairidovirinae, Betarhabdovirinae, Braunvirinae, Brockvirinae, Bronfenbrennervirinae, Bullavirinae, Calvusvirinae, Ceronivirinae, Chebruvirinae, Chimanivirinae, Chordopoxvirinae, Cleopatravirinae, Cobavirinae, Colwellvirinae, Comovirinae, Corkvirinae, Crocarterivirinae, Crustonivirinae, Cvivirinae, Dclasvirinae, Deejayvirinae, Denniswatsonvirinae, Densovirinae, Dolichocephalovirinae, Eekayvirinae, Emmerichvirinae, Enquatrovirinae, Entomopoxvirinae, Equarterivirinae, Ermolyevavirinae, Erskinevirinae, Eucampyvirinae, Firstpapillomavirinae, Fuhrmanvirinae, Gammaherpesvirinae, Gammarhabdovirinae, Geminialphasatellitinae, Gochnauervirinae, Gofosavirinae, Gokushovirinae, Gorgonvirinae, Guemseyvirinae, Gutmannvirinae, Hamaparvovirinae, Hendrixvirinae, Heroarterivirinae, Hexponivirinae, Humphriesvirinae, Hyporhamsavirinae, Jasinkavirinae, Krylovirinae, Langleyhallvirinae, Letovirinae, Mammantavirinae, Markadamsvirinae, Mccleskeyvirinae, Mccorquodalevirinae, Mclasvirinae, Medionivirinae, Melnykvirinae, Metaparamyxovirinae, Migulavirinae, Molineuxvirinae, Mononivirinae, Nanoalphasatellitinae, Nclasvirinae, Nefertitivirinae, Northropvirinae, Nymbaxtervirinae, Okabevirinae, Okanivirinae, Orthocoronavirinae, Orthoparamyxovirinae, Orthoretrovirinae, Ounavirinae, Parvovirinae, Pclasvirinae, Peduovirinae, Petromoalphasatellitinae, Picovirinae, Piscanivirinae, Pontosvirinae, Procedovirinae, Queuovirinae, Quinvirinae, Rakietenvirinae, Regressovirinae, Remotovirinae, Repantavirinae, Reternivirinae, Rhodovirinae, Rodepovirinae, Rogunavirinae, Rothmandenesvirinae, Rubulavirinae, Sarlesvirinae, Secondpapillomavirinae, Sedoreovirinae, Sepvirinae, Serpentovirinae, Simarterivirinae, Skryabinvirinae, Slopekvirinae, Spinareovirinae, Spounavirinae, Spumaretrovirinae, Studiervirinae, Tatarstanvirinae, Tempevirinae, Tevenvirinae, Tiamatvirinae, Torovirinae, Trabyvirinae, Trivirinae, Tunavirinae, Tunicanivirinae, Twarogvirinae, Twortvirinae, Tybeckvirinae, Variarterivirinae, Vequintavirinae, Zealarterivirinae, or any combination thereof.

[0208] In some embodiments, compositions and methods of the disclosure utilize candidate heterologous gene effectors from viruses with a high degree of documented transcriptional regulator modularity, such as, for example, the poxviridae, Herpesviridae, or Adenoviridae families. In some embodiments, heterologous gene effectors from viruses with a high degree of documented transcriptional regulator modularity can be useful in combination with other gene effectors, for example, can be more likely to facilitate combinatorial or synergistic effects on gene transcription.

[0209] Without wishing to be bound by any particular theory, viral effectors may confer advantages of compact size and novel functional properties compared to gene effectors from alternate sources.

### Guide Moieties

[0210] Compositions and methods of the disclosure can utilize guide moieties to direct a heterologous gene effector to a target gene (e.g., target endogenous gene) or a target gene regulatory sequence. A guide moiety can confer an ability to recognize and specifically bind to the target gene or the target gene regulatory sequence.

[0211] A guide moiety can comprise a guide nucleic acid. A guide moiety can comprise a nuclease and a guide nucleic acid as disclosed herein. A guide moiety can comprise a nuclease or a part thereof, for example, an endonuclease, such as a heterologous endonuclease. The nuclease can be, e.g., a DNA nuclease and/or RNA nuclease, a modified nuclease that is nuclease-deficient or has reduced nuclease activity compared to a wild-type nuclease, a derivative thereof, a variant thereof, or a fragment thereof. In some embodiments, the guide moiety has minimal nuclease activity.

[0212] Any suitable nuclease, fragment or derivative thereof can be used in a guide moiety. Suitable nucleases include, but are not limited to, CRISPR-associated (Cas) proteins or Cas nucleases including type I CRISPR-associated (Cas) polypeptides, type II CRISPR-associated (Cas) polypeptides, type III CRISPR-associated (Cas) polypeptides, type IV CRISPR-associated (Cas) polypeptides, type V CRISPR-associated (Cas) polypeptides, and type VI CRISPR-associated (Cas) polypeptides; zinc finger nucleases (ZFN); transcription activator-like effector nucleases (TALEN); meganucleases; RNA-binding proteins (RBP); CRISPR-associated RNA binding proteins; recombinases; flippases; transposases; Argonaute (Ago) proteins (e.g., prokaryotic Argonaute (pAgo), archaeal Argonaute (aAgo), and eukaryotic Argonaute (eAgo)); any derivative thereof; any variant thereof and any fragment thereof.

[0213] In some embodiments, the guide moiety comprises a DNA nuclease such as an engineered (e.g., programmable or targetable) DNA nuclease that is nuclease-deficient. In some embodiments, the guide moiety comprises a nuclease-null DNA binding protein derived from a DNA nuclease that does not induce transcriptional activation or repression of a target DNA sequence unless it is present in a complex with one or more heterologous gene effectors of the disclosure. In some embodiments, the guide moiety comprises a nuclease-null DNA binding protein derived from a DNA nuclease that can induce transcriptional activation or repression of a target DNA sequence (e.g., which can be altered or augmented by the presence of a heterologous gene effector of the disclosure).

[0214] In some embodiments, the guide moiety comprises an RNA nuclease such as an engineered (e.g., programmable or targetable) RNA nuclease. In some embodiments, the guide moiety comprises a nuclease-null RNA binding protein derived from an RNA nuclease that does not induce transcriptional activation or repression of a target RNA sequence unless it is present in a complex with one or more heterologous gene effectors of the disclosure. In some embodiments, the guide moiety comprises a nuclease-null RNA binding protein derived from a RNA nuclease that can induce transcriptional activation or repression of a target RNA sequence (e.g., which can be altered or augmented by the presence of a heterologous gene effector of the disclosure).

[0215] In some embodiments, the guide moiety comprises a nucleic acid-guided targeting system. In some embodiments, the guide moiety comprises a DNA-guided targeting system. In some embodiments, the guide moiety comprises an RNA-guided targeting system. A guide moiety can comprise and utilize, for example, a guide nucleic acid sequence that facilitates specific binding of a CRISPR-Cas system (e.g., a nuclease deficient form thereof, such as dCas9) to a target gene (e.g., target endogenous gene) or target gene regulatory sequence. Binding specificity can be determined by use of a guide nucleic acid, such as a single guide RNA (sgRNA) or a part thereof. In some embodiments, the use of different sgRNAs allows the compositions and methods of the disclosure to be used with (e.g., targeted to) different target genes (e.g., target endogenous genes) or target gene regulatory sequences.

[0216] Prokaryotic CRISPR-Cas (Clustered regularly interspaced short palindromic repeats-CRISPR associated) systems, for example, Class II CRISPR-Cas systems such as Cas9 and Cpfl, can be repurposed as a tool for regulation of gene expression, epigenome editing, and chromatin looping in compositions and methods of the disclosure. Nuclease-deactivated Cas (dCas) proteins complexed with heterologous gene effectors can allow for regulation of expression of target genes (e.g., target endogenous genes) adjacent to a site bound by the dCas.

[0217] In some embodiments, the guide moiety comprises a CRISPR-associated (Cas) protein or a Cas nuclease that functions in a non-naturally occurring CRISPR (Clustered Regularly Interspaced Short Palindromic Repeats)/Cas (CRISPR-associated) system. In bacteria, this system can provide adaptive immunity against foreign DNA.

[0218] In a wide variety of organisms including diverse mammals, animals, plants, microbes, and yeast, a CRISPR/Cas system (e.g., modified and/or unmodified) can be utilized as a genome engineering tool, or can be modified to direct specific binding of engineered proteins to target loci as disclosed herein. A CRISPR/Cas system can comprise a guide nucleic acid such as a guide RNA (gRNA) complexed with a Cas protein for targeted regulation of gene expression and/or activity or nucleic acid binding. An RNA-guided Cas protein (e.g., a Cas nuclease such as a Cas9 nuclease) can specifically bind a target polynucleotide (e.g., DNA) in a sequence-dependent manner. The Cas protein, if possessing nuclease activity, can cleave the DNA.

[0219] In some cases, the Cas protein is mutated and/or modified to yield a nuclease deficient protein or a protein with decreased nuclease activity relative to a wild-type Cas protein. A nuclease deficient protein can retain the ability to bind DNA, but may lack or have reduced nucleic acid cleavage activity.

[0220] In some embodiments, the guide moiety comprises a Cas protein that forms a complex with a guide nucleic acid, such as a guide RNA or a part thereof. In some embodiments, the guide moiety comprises a Cas protein that forms a complex with a single guide nucleic acid, such as a single guide RNA (sgRNA). In some embodiments, the guide moiety comprises a RNA-binding protein (RBP) optionally complexed with a guide nucleic acid, such as a guide RNA (e.g., sgRNA), which is able to form a complex with a Cas protein. In some embodiments, the guide moiety comprises a nuclease-null DNA binding protein derived from a DNA nuclease that can induce transcriptional activation or repression of a target DNA sequence. In some embodiments, the guide moiety comprises a nuclease-null RNA binding protein derived from a RNA.

[0221] A guide nucleic acid used in compositions and methods of the disclosure can be, for example, at least 8, at least 9, at least 10, at least 11, at least 12, at least 13, at least 14, at least 15, at least 16, at least 17, at least 18, at least 19, at least 20, at least 21, at least 22, at least 23, at least 24, at least 25, at least 26, at least 27, at least 28, at least 29, at least 30, at least 31, at least 32, at least 33, at least 34, at least 35, at least 36, at least 37, at least 38, at least 39, or at least 40 nucleotides.

[0222] In some embodiments, a guide nucleic acid used in compositions and methods of the disclosure is at most at most 10, at most 11, at most 12, at most 13, at most 14, at most 15, at most 16, at most 17, at most 18, at most 19, at most 20, at most 21, at most 22, at most 23, at most 24, at most 25, at most 26, at most 27, at most 28, at most 29, at most 30, at most 31, at most 32, at most 33, at most 34, at most 35, at most 36, at most 37, at most 38, at most 39, or at most 40 nucleotides.

[0223] In some embodiments, a guide nucleic acid used in compositions and methods of the disclosure is between about 8 and about 40 nucleotides, between about 10 and about 40 nucleotides, between about 11 and about 40 nucleotides, between about 12 and about 40 nucleotides, between about 13 and about 40 nucleotides, between about 14 and about 40 nucleotides, between about 15 and about 40 nucleotides, between about 16 and about 40 nucleotides, between about 17 and about 40 nucleotides, between about 18 and about 40 nucleotides, between about 19 and about 40 nucleotides, between about 20 and about 40 nucleotides, between about 22 and about 40 nucleotides, between about 24 and about 40 nucleotides, between about 26 and about 40 nucleotides, between about 28 and about 40 nucleotides, between about 30 and about 40 nucleotides, between about 8 and about 30 nucleotides, between about 10 and about 30 nucleotides, between about 11 and about 30 nucleotides, between about 12 and about 30 nucleotides, between about 13 and about 30 nucleotides, between about 14 and about 30 nucleotides, between about 15 and about 30 nucleotides, between about 16 and about 30 nucleotides, between about 17 and about 30 nucleotides, between about 18 and about 30 nucleotides, between about 19 and about 30 nucleotides, between about 20 and about 30 nucleotides, between about 22 and about 30 nucleotides, between about 24 and about 30 nucleotides, between about 26 and about 30 nucleotides, between about 28 and about 30 nucleotides, between about 8 and about 25 nucleotides, between about 10 and about 25 nucleotides, between about 11 and about 25 nucleotides, between about 12 and about 25 nucleotides, between about 13 and about 25 nucleotides, between about 14 and about 25 nucleotides, between about 15 and about 25 nucleotides, between about 16 and about 25 nucleotides, between about 17 and about 25 nucleotides, between about 18 and about 25 nucleotides, between about 19 and about 25 nucleotides, between about 20 and about 25 nucleotides, between about 22 and about 25 nucleotides, between about 24 and about 25 nucleotides, between about 8 and about 20 nucleotides, between about 10 and about 20 nucleotides, between about 11 and about 20 nucleotides, between about 12 and about 20 nucleotides, between about 13 and about 20 nucleotides, between about 14 and about 20 nucleotides, between about 15 and about 20 nucleotides, between about 16 and about 20 nucleotides, between about 17 and about 20 nucleotides, between about 18 and about 20 nucleotides, between about 19 and about 20 nucleotides, between about 8 and about 18 nucleotides, between about 10 and about 18 nucleotides, between about 11 and about 18 nucleotides, between about 12 and about 18 nucleotides, between about 13 and about 18 nucleotides, between about 14 and about 18 nucleotides, between about 15 and about 18 nucleotides, between about 16 and about 18 nucleotides, between about 8 and about 16 nucleotides, between about 10 and about 16 nucleotides, between about 11 and about 16 nucleotides, between about 12 and about 16 nucleotides, between about 13 and about 16 nucleotides, between about 14 and about 16 nucleotides, or between about 15 and about 16 nucleotides.

[0224] A guide nucleic acid can be a guide RNA or a part thereof.

[0225] Any suitable CRISPR/Cas system can be used. A CRISPR/Cas system can be referred to using a variety of naming systems. A CRISPR/Cas system can be a type I, a type II, a type III, a type IV, a type V, a type VI system, or any other suitable CRISPR/Cas system. A CRISPR/Cas system as used herein can be a Class 1, Class 2, or any other suitably classified CRISPR/Cas system. Class 1 or Class 2 determination can be based upon the genes encoding the effector module. Class 1 systems generally have a multi-subunit crRNA-effector complex, whereas Class 2 systems generally have a single protein, such as Cas9, Cpfl, C2cl, C2c2, C2c3 or a crRNA-effector complex. A Class 1 CRISPR/Cas system can use a complex of multiple Cas proteins to effect regulation. A Class 1 CRISPR/Cas system can comprise, for example, type I (e.g., I, IA, IB, IC, ID, IE, IF, IU), type III (e.g.,1II, IIIA, IIIB, IIIC, 1ID), and type IV (e.g., IV, IVA, IVB) CRISPR/Cas type. A Class 2 CRISPR/Cas system can use a single large Cas protein to effect regulation. A Class 2 CRISPR/Cas systems can comprise, for example, type II (e.g.,1I, IIA, IIB) and type V CRISPR/Cas type. CRISPR systems can be complementary to each other, and/or can lend functional units in trans to facilitate CRISPR locus targeting.

[0226] A guide moiety disclosed herein can comprise a nuclease, for instance, a heterologous nuclease (e.g., a Cas protein that is operatively coupled to a heterologous gene effector). The nuclease can have a length that is less than a threshold length. The threshold length can be at most about 1,000 amino acids, at most about 950 amino acids, at most about 900 amino acids, at most about 850 amino acids, at most about 800 amino acids, at most about 750 amino acids, at most about 700 amino acids, at most about 650 amino acids, at most about 600 amino acids, at most about 550 amino acids, at most about 500 amino acids, at most about 450 amino acids, at most about 400 amino acids, at most about 350 amino acids, or at most about 300 amino acids. The threshold length can be at least about 300 amino acids, at least about 350 amino acids, at least about 400 amino acids, at least about 450 amino acids, at least about 500 amino acids, at least about 550 amino acids, at least about 600 amino acids, at least about 650 amino acids, at least about 700 amino acids, at least about 750 amino acids, at least about 800 amino acids, at least about 850 amino acids, at least about 900 amino acids, at least about 950 amino acids, or at least about 1,000 amino acids.

[0227] When a guide moiety comprises a Cas protein or derivative thereof, the Cas protein or derivative thereof can be a Class 1 or a Class 2 Cas protein. A Cas protein can be a type I, type II, type III, type IV, type V Cas protein, or type VI Cas protein. A Cas protein can comprise one or more domains. Non-limiting examples of domains include, guide nucleic acid recognition and/or binding domain, nuclease domains (e.g., DNase or RNase domains, RuvC, HNH), DNA binding domain, RNA binding domain, helicase domains, protein-protein interaction domains, and dimerization domains. A guide nucleic acid recognition and/or binding domain can interact with a guide nucleic acid. A nuclease domain can comprise catalytic activity for nucleic acid cleavage. A nuclease domain can lack catalytic activity to prevent nucleic acid cleavage. A Cas protein can be a chimeric Cas protein or fragment thereof that is fused to other proteins or polypeptides. A Cas protein can be a chimera of various Cas proteins, for example, comprising domains from different Cas proteins.

[0228] Non-limiting examples of Cas proteins include c2cl, C2c2, c2c3, Cas1, Cas1B, Cas2, Cas3, Cas4, Cas5, Cas5e (CasD), Cash, Cas6e, Cas6f, Cas7, Cas8a, Cas8al, Cas8a2, Cas8b, Cas8c, Cas9 (Csn1 or Csx12), CasIO, Cas10d, CasIO, Cas12a, Cas10d, CasF, CasG, CasH, Cpfl, Csy1, Csy2, Csy3, Cse1 (CasA), Cse2 (CasB), Cse3 (CasE), Cse4 (CasC), Csc1, Csc2, Csa5, Csn2, Csm2, Csm3, Csm4, Csm5, Csm6, Cmr1, Cmr3, Cmr4, Cmr5, Cmr6, Csb1, Csb2, Csb3, Csx17, Csx14, Csx10, Csx16, CsaX, Csx3, Csx1, Csx15, Csf1, Csf2, Csf3, Csf4, Cul966, Cas13a, Cas13b, Cas13c, Cas13d, Cas13X, Cas13Y, and homologs or modified versions thereof.

[0229] In some cases, the Cas protein as disclosed herein may not and need not be Cas9 or Cas12a. The Cas protein as disclosed herein can have a smaller size as compared to Cas9 or Cas12a. The Cas protein as disclosed herein can be derived from Un1Cas12fl (or Cas14a1). For example, the Cas protein as disclosed herein can comprise an amino acid sequence that is at least about 50%, at least about 60%, at least about 70%, at least about 75% at least about 80%, at least about 85%, at least about 90%, at least about 95%, at least about 96%, at least about 97%, at least about 98%, at least about 99%, or substantially about 100% identical to the polypeptide sequence of SEQ ID NO: 49342. In another example, the Cas protein as disclosed herein can comprise an amino acid sequence that is at least about 50%, at least about 60%, at least about 70%, at least about 75% at least about 80%, at least about 85%, at least about 90%, at least about 95%, at least about 96%, at least about 97%, at least about 98%, at least about 99%, or substantially about 100% identical to the polypeptide sequence of SEQ ID NO: 49343. As disclosed herein, SEQ ID NO: 49342 encodes the polypeptide sequence of Un1Cas12fl (or Cas14a1). As disclosed herein, SEQ ID NO: 49343 encodes an engineered variant of Un1Cas12fl with reduced nuclease activity. In some embodiments, Un1Cas12fl or a derivative thereof, such as an engineered variant of Un1Cas12fl with reduced nuclease activity, can be referred to as CasMini or dCasMini.

TABLE 1
illustrative Cas sequences

| SEQ ID | | |
|---|---|---|
| NO: | Description | Sequence |
| 49342 | Un1Cas12f1 | MAKNTITKTLKLRIVRPYNSAEVEKIVADEKNNREKIALEKNK |
| | | DKVKEACSKHLKVAAYCTTQVERNACLFCKARKLDDKFYQK |
| | | LRGQFPDAVFWQEISEIFRQLQKQAAEIYNQSLIELYYEIFIKGK |
| | | GIANASSVEHYLSDVCYTRAAELFKNAAIASGLRSKIKSNFRLK |
| | | ELKNMKSGLPTTKSDNFPIPLVKQKGGQYTGFEISNHNSDFIIKI |
| | | PFGRWQVKKEIDKYRPWEKFDFEQVQKSPKPISLLLSTQRRKR |
| | | NKGWSKDEGTEAEIKKVMNGDYQTSYIEVKRGSKIGEKSAW |
| | | MLNLSIDVPKIDKGVDPSIIGGIDVGVKSPLVCAINNAFSRYSIS |
| | | DNDLFHFNKKMFARRRILLKKNRHKRAGHGAKNKLKPITILTE |
| | | KSERFRKKLIERWACEIADFFIKNKVGTVQMENLESMKRKEDS |
| | | YFNIRLRGFWPYAEMQNKIEFKLKQYGIEIRKVAPNNTSKTCS |
| | | KCGHLNNYFNFEYRKKNKFPHFKCEKCNFKENADYNAALNIS |
| | | NPKLKSTKEEP |
| 49343 | deactivated | MAKNTITKTLKLRIVRPYNSAEVEKIVADEKNNREKIALEKNK |
| | nuclease | DKVKEACSKHLKVAAYCTTQVERNACLFCKARKLDDKFYQK |
| | variant of | LRGQFPDAVFWQEISEIFRQLQKQAAEIYNQSLIELYYEIFIKGK |
| | Un1Cas12f1 | GIANASSVEHYLSRVCYRRAAELFKNAAIASGLRSKIKSNFRLK |
| | | ELKNMKSGLPTTKSDNFPIPLVKQKGGQYTGFEISNHNSDFIIKI |
| | | PFGRWQVKKEIDKYRPWEKFDFEQVQKSPKPISLLLSTQRRKR |
| | | NKGWSKDEGTEAEIKKVMNGDYQTSYIEVKRGSKICEKSAW |
| | | MLNLSIDVPKIDKGVDPSIIGGIAVGVRSPLVCAINNAFSRYSIS |
| | | DNDLFHFNKKMFARRRILLKKNRHKRAGHGAKNKLKPITILTE |
| | | KSERFRKKLIERWACEIADFFIKNKVGTVQMENLESMKRKEDS |
| | | YFNIRLRGFWPYAEMQNKIEFKLKQYGIEIRKVAPNNTSKTCS |
| | | KCGHLNNYFNFEYRKKNKFPHFKCEKCNFKENAAYNAALNIS |
| | | NPKLKSTKERP |

[0230] A Cas protein or fragment or derivative thereof can be from any suitable organism. Non-limiting examples include Streptococcus pyogenes, Streptococcus thermophilus, Streptococcus sp., Staphylococcus aureus, Nocardiopsis dassonvillei, Streptomyces pristinae spiralis, Streptomyces viridochromo genes, Streptomyces viridochromogenes, Streptosporangium roseum, Streptosporangium roseum, AlicyclobacHlus acidocaldarius, Bacillus pseudomycoides, Bacillus selenitireducens, Exiguobacterium sibiricum, Lactobacillus delbrueckii, Lactobacillus salivarius, Microscilla marina, Burkholderiales bacterium, Polaromonas nap hthalenivorans, Polaromonas sp., Crocosphaera watsonii, Cyanothece sp., Microcystis aeruginosa, Pseudomonas aeruginosa, Synechococcus sp., Acetohalobium arabaticum, Ammonifex degensii, Caldicelulosiruptor becscii, Candidatus Desulforudis, Clostridium botulinum, Clostridium difficile, Finegoldia magna, Natranaerobius thermophilus, Pelotomaculum thermopropionicum, Acidithiobacillus caldus, Acidithiobacillus ferrooxidans, Allochromatium vinosum, Marinobacter sp., Nitrosococcus halophilus, Nitrosococcus watsoni, Pseudoalteromonas haloplanktis, Ktedonobacter racemifer, Methanohalobium evestigatum, Anabaena variabilis, Nodularia spumigena, Nostoc sp., Arthrospira maxima, Arthrospira platensis, Arthrospira sp., Lyngbya sp., Microcoleus chthonoplastes, Oscillatoria sp., Petrotoga mobilis, Thermosipho africanus, Acaryochloris marina, Leptotrichia shahii, and Francisella novicida. In some aspects, the organism is Streptococcus pyogenes (S. pyogenes). In some aspects, the organism is Staphylococcus aureus (S. aureus). In some aspects, the organism is Streptococcus thermophilus (S. thermophilus).

[0231] A Cas protein can be derived from a variety of bacterial species including, but not limited to, Veillonella atypical, Fusobacterium nucleatum, Filifactor alocis, Solobacterium moorei, Coprococcus catus, Treponema denticola, Peptoniphilus duerdenii, Catenibacterium mitsuokai, Streptococcus mutans, Listeria innocua, Staphylococcus pseudintermedius, Acidaminococcus intestine, Olsenella uli, Oenococcus kitaharae, Bifidobacterium bifidum, Lactobacillus rhamnosus, Lactobacillus gasseri, Finegoldia magna, Mycoplasma mobile, Mycoplasma gallisepticum, Mycoplasma ovipneumoniae, Mycoplasma canis, Mycoplasma synoviae, Eubacterium rectale, Streptococcus thermophilus, Eubacterium dolichum, Lactobacillus coryniformis subsp. Torquens, Ilyobacter polytropus, Ruminococcus albus, Akkermansia muciniphila, Acidothermus cellulolyticus, Bifidobacterium longum, Bifidobacterium dentium, Corynebacterium diphtheria, Elusimicrobium minutum, Nitratifractorsalsuginis, Sphaerochaeta globus, Fibrobacter succinogenes subsp. Succinogenes, Bacteroides fragilis, Capnocytophaga ochracea, Rhodopseudomonas palustris, Prevotella micans, Prevotella ruminicola, Flavobacterium columnare, Aminomonas paucivorans, Rhodospirillum rubrum, Candidatus Puniceispirillum marinum, Verminephrobacter eiseniae, Ralstonia syzygii, Dinoroseobacter shibae, Azospirillum, Nitrobacter hamburgensis, Bradyrhizobium, Wolinellasuccinogenes, Campylobacter jejuni subsp. Jejuni, Helicobacter mustelae, Bacillus cereus, Acidovorax ebreus, Clostridium perfringens, Parvibaculum lavamentivorans, Roseburia intestinalis, Neisseria meningitidis, Pasteurella multocida subsp. Multocida, Sutterella wadsworthensis, proteobacterium, Legionella pneumophila, Parasutterella excrementihominis, Wolinella succinogenes, and Francisella novicida.

[0232] A Cas protein as used herein can be a wildtype or a modified form of a Cas protein. A Cas protein can be an active variant, inactive variant, or fragment of a wild type or modified Cas protein. A Cas protein can comprise an amino acid change such as a deletion, insertion, substitution, variant, mutation, fusion, chimera, or any combination thereof relative to a wild-type version of the Cas protein. A Cas protein can be a polypeptide with at least about 5%, at least about 10%, at least about 20%, at least about 30%, at least about 40%, at least about 50%, at least about 60%, at least about 70%, at least about 80%, at least about 90%, at least about 91%, at least about 92%, at least about 93%, at least about 94%, at least about 95%, at least about 96%, at least about 97%, at least about 98%, at least about 99%, or 100% sequence identity or sequence similarity to a wild type Cas protein. A Cas protein can be a polypeptide with at most about 5%, at most about 10%, at most about 20%, at most about 30%, at most about 40%, at most about 50%, at most about 60%, at most about 70%, at most about 80%, at most about 90%, or at most about 100% sequence identity and/or sequence similarity to a wild type exemplary Cas protein. Variants or fragments can comprise at least about 5%, at least about 10%, at least about 20%, at least about 30%, at least about 40%, at least about 50%, at least about 60%, at least about 70%, at least about 80%, at least about 90%, at least about 91%, at least about 92%, at least about 93%, at least about 94%, at least about 95%, at least about 96%, at least about 97%, at least about 98%, at least about 99%, or 100% sequence identity or sequence similarity to a wild type or modified Cas protein or a portion thereof. Variants or fragments can be targeted to a nucleic acid locus in complex with a guide nucleic acid while lacking nucleic acid cleavage activity.

[0233] A Cas protein can comprise one or more nuclease domains, such as DNase domains. For example, a Cas9 protein can comprise a RuvC-like nuclease domain and/or an HNH-like 20 nuclease domain. The in a nuclease active form of Cas9, RuvC and HNH domains can each cut a different strand of double-stranded DNA to make a double-stranded break in the DNA. A Cas protein can comprise only one nuclease domain (e.g., Cpfl comprises RuvC domain but lacks HNH domain). In some embodiments, nuclease domains are absent. In some embodiments, nuclease domains are present but inactive or have reduced or minimal activity. In some embodiments, nuclease domains are present and active.

[0234] One or a plurality of the nuclease domains (e.g., RuvC, HNH) of a Cas protein can be deleted or mutated so that they are no longer functional or comprise reduced nuclease activity. For example, in a Cas protein comprising at least two nuclease domains (e.g., Cas9), if one of the nuclease domains is deleted or mutated, the resulting Cas protein, known as a nickase, can generate a single-strand break at a CRISPR RNA (crRNA) recognition sequence within a double-stranded DNA but not a double-strand break. Such a nickase can cleave the complementary strand or the non-complementary strand, but may not cleave both. If all of the nuclease domains of a Cas protein (e.g., both RuvC and HNH nuclease domains in a Cas9 protein; RuvC nuclease domain in a Cpfl protein) are deleted or mutated, the resulting Cas protein can have a reduced or no ability to cleave both strands of a double-stranded DNA. An example of a mutation that can convert a Cas9 protein into a nickase is a D10A (aspartate to alanine at position 10 of Cas9) mutation in the RuvC domain of Cas9 from S. pyogenes. H939A (histidine to alanine at amino acid position 839) or H840A (histidine to alanine at amino acid position 840) in the HNH domain of Cas9 from S. pyogenes can convert the Cas9 into a nickase. An example of a mutation that can convert a Cas9 protein into a dead Cas9 is a D10A (aspartate to alanine at position 10 of Cas9) mutation in the RuvC domain and H939A (histidine to alanine at amino acid position 839) or H840A (histidine to alanine at amino acid position 840) in the HNH domain of Cas9 from S. pyogenes.

[0235] A nuclease dead Cas protein can comprise one or more mutations relative to a wild-type version of the protein. The mutation can result in no more than 90%, no more than 80%, no more than 70%, no more than 60%, no more than 50%, no more than 40%, no more than 30%, no more than 20%, no more than 10%, no more than 5%, or no more than 1% of the nucleic acid-cleaving activity in one or more of the plurality of nucleic acid-cleaving domains of the wild-type Cas protein. The mutation can result in one or more of the plurality of nucleic acid-cleaving domains retaining the ability to cleave the complementary strand of the target nucleic acid but reducing its ability to cleave the non-complementary strand of the target nucleic acid. The mutation can result in one or more of the plurality of nucleic acid-cleaving domains retaining the ability to cleave the non-complementary strand of the target nucleic acid but reducing its ability to cleave the complementary strand of the target nucleic acid. The mutation can result in one or more of the plurality of nucleic acid-cleaving domains lacking the ability to cleave the complementary strand and the non-complementary strand of the target nucleic acid. The residues to be mutated in a nuclease domain can correspond to one or more catalytic residues of the nuclease. For example, residues in the wild type exemplary S. pyogenes Cas9 polypeptide such as Asp10, His840, Asn854 and Asn856 can be mutated to inactivate one or more of the plurality of nucleic acid-cleaving domains (e.g., nuclease domains). The residues to be mutated in a nuclease domain of a Cas protein can correspond to residues Asp10, His840, Asn854 and Asn856 in the wild type S. pyogenes Cas9 polypeptide, for example, as determined by sequence and/or structural alignment.

[0236] As non-limiting examples, residues D10, G12, G17, E762, H840, N854, N863, H982, H983, A984, D986, and/or A987 (or the corresponding mutations of any of the Cas proteins) can be mutated. For example, e.g., D 10A, G12A, G17A, E762A, H840A, N854A, N863A, H982A, H983A, A984A, and/or D986A. Mutations other than alanine substitutions can be suitable.

[0237] A D10A mutation can be combined with one or more of H840A, N854A, or N856A mutations to produce a Cas9 protein substantially lacking DNA cleavage activity (e.g., a dead Cas9 protein). A H840A mutation can be combined with one or more of D10A, N854A, or N856A mutations to produce a site-directed polypeptide substantially lacking DNA cleavage activity. An N854A mutation can be combined with one or more of H840A, D10A, or N856A mutations to produce a site-directed polypeptide substantially lacking DNA cleavage activity. A N856A mutation can be combined with one or more of H840A, N854A, or D10A mutations to produce a site-directed polypeptide substantially lacking DNA cleavage activity.

[0238] In some embodiments, a Cas protein is a Class 2 Cas protein. In some embodiments, a Cas protein is a type II Cas protein. In some embodiments, the Cas protein is a Cas9 protein, a modified version of a Cas9 protein, or derived from a Cas9 protein. For example, a Cas9 protein lacking cleavage activity. In some embodiments, the Cas9 protein is a Cas9 protein from S. pyogenes (e.g., SwissProt accession number Q99ZW2). In some embodiments, the Cas9 protein is a Cas9 from S. aureus (e.g., SwissProt accession number J7RUA5). In some embodiments, the Cas9 protein is a modified version of a Cas9 protein from S. pyogenes or S. Aureus. In some embodiments, the Cas9 protein is derived from a Cas9 protein from S. pyogenes or S. Aureus. For example, a S. pyogenes or S. Aureus Cas9 protein lacking cleavage activity.

[0239] In some embodiments, Cas9 can generally refer to a polypeptide with at least about 5%, at least about 10%, at least about 20%, at least about 30%, at least about 40%, at least about 50%, at least about 60%, at least about 70%, at least about 80%, at least about 90%, or about 100% sequence identity and/or sequence similarity to a wild type exemplary Cas9 polypeptide (e.g., Cas9 from S. pyogenes). In some embodiments, Cas9 can refer to a polypeptide with at most about 5%, at most about 10%, at most about 20%, at most about 30%, at most about 40%, at most about 50%, at most about 60%, at most about 70%, at most about 80%, at most about 90%, or about 100% sequence identity and/or sequence similarity to a wild type Cas9 polypeptide (e.g., from S. pyogenes). Cas9 can refer to the wildtype or a modified form of the Cas9 protein that can comprise an amino acid change such as a deletion, insertion, substitution, variant, mutation, fusion, chimera, or any combination thereof.

[0240] A Cas protein can comprise an amino acid sequence having at least about 5%, at least about 10%, at least about 20%, at least about 30%, at least about 40%, at least about 50%, at least about 60%, at least about 70%, at least about 80%, at least about 90%, at least about 91%, at least about 92%, at least about 93%, at least about 94%, at least about 95%, at least about 96%, at least about 97%, at least about 98%, at least about 99%, or 100% sequence identity or sequence similarity to a nuclease domain (e.g., RuvC domain, HNH domain) of a wild-type Cas protein.

[0241] A Cas protein, variant or derivative thereof can be modified to enhance regulation of gene expression by compositions and methods of the disclosure, e.g., as part of a complex disclosed herein. A Cas protein can be modified to increase or decrease nucleic acid binding affinity, nucleic acid binding specificity, enzymatic activity, and/or binding to other factors, such as heterodimerization or oligomerization domains and induce ligands. Cas proteins can also be modified to change any other activity or property of the protein, such as stability. For example, one or more nuclease domains of the Cas protein can be modified, deleted, or inactivated, or a Cas protein can be truncated to remove domains that are not essential for the desired function of the protein or complex. A Cas protein can be modified to modulate (e.g., enhance or reduce) the activity of the Cas protein for regulating gene expression by a complex of the disclosure that comprises a heterologous gene effector.

[0242] For example, a Cas protein can be coupled (e.g., fused, covalently coupled, or non-covalently coupled) to a heterologous gene effector (e.g., an epigenetic modification domain, a transcriptional activation domain, and/or a transcriptional repressor domain). A Cas protein can be coupled (e.g., fused, covalently coupled, or non-covalently coupled) to an oligomerization or dimerization domain as disclosed herein (e.g., a heterodimerization domain). A Cas protein can be coupled (e.g., fused, covalently coupled, or non-covalently coupled) to a heterologous polypeptide that provides increased or decreased stability. A Cas protein can be coupled (e.g., fused, covalently coupled, or non-covalently coupled) to a sequence that can facilitate degradation of the Cas protein or a complex containing the Cas protein, for example, a degron, such as an inducible degron (e.g., auxin inducible).

[0243] A Cas protein can be coupled (e.g., fused, covalently coupled, or non-covalently coupled) to any suitable number of partners, for example, at least one, at least two, at least three, at least four, or at least five, at least six, at least seven, or at least 8 partners. In some embodiments, a Cas protein of the disclosure is coupled (e.g., fused, covalently coupled, or non-covalently coupled) to at most two, at most three, at most four, at most five, at most six, at most seven, at most eight, or at most ten partners. In some embodiments, a Cas protein of the disclosure is coupled (e.g., fused, covalently coupled, or non-covalently coupled) to 1-5, 1-4, 1-3, 1-2, 2-5, 2-4, 2-3, 3-5, 3-4, or 4-5 partners. In some embodiments, a Cas protein of the disclosure is coupled (e.g., fused, covalently coupled, or non-covalently coupled) to one partner. In some embodiments, a Cas protein of the disclosure is coupled (e.g., fused, covalently coupled, or non-covalently coupled) to two partners. In some embodiments, a Cas protein of the disclosure is coupled (e.g., fused, covalently coupled, or non-covalently coupled) to three partners. In some embodiments, a Cas protein of the disclosure is coupled (e.g., fused, covalently coupled, or non-covalently coupled) to four partners. In some embodiments, a Cas protein of the disclosure is coupled (e.g., fused, covalently coupled, or non-covalently coupled) to five partners. In some embodiments, a Cas protein of the disclosure is coupled (e.g., fused, covalently coupled, or non-covalently coupled) to six partners.

[0244] A Cas protein can be a fusion protein. The fused domain or heterologous polypeptide (e.g., heterologous gene effector) can be located at the N-terminus, the C-terminus, or internally within the Cas protein.

[0245] A Cas protein can be provided in any form. For example, a Cas protein can be provided in the form of a protein, such as a Cas protein alone or complexed with a guide nucleic acid as a ribonucleoprotein. A Cas protein can be provided in a complex, for example, complexed with a guide nucleic acid and/or one or more heterologous gene effectors of the disclosure. A Cas protein can be provided in the form of a nucleic acid encoding the Cas protein, such as an RNA (e.g., messenger RNA (mRNA)), or DNA. The nucleic acid encoding the Cas protein can be codon optimized for efficient translation into protein in a particular cell or organism.

[0246] Nucleic acids encoding Cas proteins, fragments, or derivatives thereof can be stably integrated in the genome of a cell. Nucleic acids encoding Cas proteins can be operably linked to a promoter, for example, a promoter that is constitutively or inducibly active in the cell. Nucleic acids encoding Cas proteins can be operably linked to a promoter in an expression construct. Expression constructs can include any nucleic acid constructs capable of directing expression of a gene or other nucleic acid sequence of interest (e.g., a Cas gene) and which can transfer such a nucleic acid sequence of interest to a target cell.

[0247] In some embodiments, a Cas protein, variant or derivative thereof is a nuclease dead Cas (dCas) protein. A dead Cas protein can be a protein that lacks nucleic acid cleavage activity.

[0248] A Cas protein can comprise a modified form of a wild type Cas protein. The modified form of the wild type Cas protein can comprise an amino acid change (e.g., deletion, insertion, or substitution) that reduces the nucleic acid-cleaving activity of the Cas protein. For example, the modified form of the Cas protein can have no more than 90%, no more than 80%, no more than 70%, no more than 60%, no more than 50%, no more than 40%, no more than 30%, no more than 20%, no more than 10%, no more than 5%, or no more than 1% of the nucleic acid-cleaving activity of the wild-type Cas protein (e.g., Cas9 from S. pyogenes). The modified form of Cas protein can have no substantial nucleic acid-cleaving activity. When a Cas protein is a modified form that has no substantial nucleic acid-cleaving activity, it can be referred to as enzymatically inactive, “deactivated” and/or “dead” (abbreviated by “d”). A dead Cas protein (e.g., dCas, dCas9) can bind to a target polynucleotide but may not cleave or minimally cleaves the target polynucleotide. In some aspects, a dead Cas protein is a dead Cas9 protein.

[0249] A dCas9 polypeptide can associate with a single guide RNA (sgRNA) to activate or repress transcription of a target gene (e.g., target endogenous gene), for example, in combination with heterologous gene effector(s) disclosed herein. sgRNAs can be introduced into cells expressing the Cas or guide moiety component of the disclosure. In some cases, such cells can contain one or more different sgRNAs that target the same target gene (e.g., target endogenous gene) or target gene regulatory sequence. In other cases, the sgRNAs target different nucleic acids in the cell (e.g., different target genes, different target gene regulatory sequences, or different sequences within the same target gene or target gene regulatory sequence).

[0250] Enzymatically inactive can refer to a nuclease that can bind to a nucleic acid sequence in a polynucleotide in a sequence-specific manner, but will not cleave a target polynucleotide or will cleave it at a substantially reduced frequency. An enzymatically inactive guide moiety can comprise an enzymatically inactive domain (e.g. nuclease domain). Enzymatically inactive can refer to no activity. Enzymatically inactive can refer to substantially no activity. Enzymatically inactive can refer to essentially no activity. Enzymatically inactive can refer to an activity no more than 1%, no more than 2%, no more than 3%, no more than 4%, no more than 5%, no more than 6%, no more than 7%, no more than 8%, no more than 9%, or no more than 10% activity compared to a comparable wild-type activity (e.g., nucleic acid cleaving activity, wild-type Cas9 activity).

[0251] In some embodiments, the guide moiety does not contain a nucleic acid-guided targeting system. For example, guide moieties can include proteins that bind to a target gene (e.g., target endogenous gene) or target gene regulatory sequence based on protein structural features, such as certain nucleases disclosed herein.

[0252] In some embodiments, a guide moiety comprises a zinc finger nuclease (ZFN) or a variant, fragment, or derivative thereof. ZFN can refer to a fusion between a cleavage domain, such as a cleavage domain of Fokl, and at least one zinc finger motif (e.g., at least 2, at least 3, at least 4, or at least 5 zinc finger motifs) which can bind polynucleotides such as DNA and RNA. In some embodiments, a ZFN is used in a targeting moiety of the disclosure to bind a polynucleotide (e.g., target gene or target gene regulatory sequence), but the ZFN does not cleave or substantially does not cleave the polynucleotide, e.g., a nuclease dead ZFN. A ZFN or a variant, fragment, or derivative thereof can be fused to or associated with one of more heterologous gene effectors to form a complex of the disclosure.

[0253] The heterodimerization at certain positions in a polynucleotide of two individual ZFNs in certain orientation and spacing can lead to cleavage of the polynucleotide in nuclease-active ZFN. For example, a ZFN binding to DNA can induce a double-strand break in the DNA. In order to allow two cleavage domains to dimerize and cleave DNA, two individual ZFNs can bind opposite strands of DNA with their C-termini at a certain distance apart. In some cases, linker sequences between the zinc finger domain and the cleavage domain can require the 5′ edge of each binding site to be separated by about 5-7 base pairs. In some cases, a cleavage domain is fused to the C-terminus of each zinc finger domain.

[0254] In some embodiments, the cleavage domain of a guide moiety comprising a ZFN comprises a modified form of a wild type cleavage domain. The modified form of the cleavage domain can comprise an amino acid change (e.g., deletion, insertion, or substitution) that reduces the nucleic acid-cleaving activity of the cleavage domain. For example, the modified form of the cleavage domain can have no more than 90%, no more than 80%, no more than 70%, no more than 60%, no more than 50%, no more than 40%, no more than 30%, no more than 20%, no more than 10%, no more than 5%, or no more than 1% of the nucleic acid-cleaving activity of the corresponding wild-type cleavage domain. The modified form of the cleavage domain can have no substantial nucleic acid-cleaving activity. In some embodiments, the cleavage domain is enzymatically inactive.

[0255] In some embodiments, a guide moiety comprises a “TALEN” or “TAL-effector nuclease” or a variant, fragment, or derivative thereof. TALENs refer to engineered transcription activator-like effector nucleases that generally contain a central domain of DNA-binding tandem repeats and a cleavage domain. TALENs can be produced by fusing a TAL effector DNA binding domain to a DNA cleavage domain. In some cases, a DNA-binding tandem repeat comprises 33-35 amino acids in length and contains two hypervariable amino acid residues at positions 12 and 13 that can recognize at least one specific DNA base pair. A transcription activator-like effector (TALE) protein can be fused to a nuclease such as a wild-type or mutated Fok1 endonuclease or the catalytic domain of Fokl. In some embodiments, a TALEN is used in a targeting moiety of the disclosure to bind a polynucleotide (e.g., target gene or target gene regulatory sequence), but the TALEN does not cleave or substantially does not cleave the polynucleotide, e.g., a nuclease dead TALEN. A TALEN or a variant, fragment, or derivative thereof can be fused to or associated with one of more heterologous gene effectors to form a complex of the disclosure.

[0256] In some embodiments, a TALEN is engineered for reduced nuclease activity. In some embodiments, the nuclease domain of a TALEN comprises a modified form of a wild type nuclease domain. The modified form of the nuclease domain can comprise an amino acid change (e.g., deletion, insertion, or substitution) that reduces the nucleic acid-cleaving activity of the nuclease domain. For example, the modified form of the nuclease domain can have no more than 90%, no more than 80%, no more than 70%, no more than 60%, no more than 50%, no more than 40%, no more than 30%, no more than 20%, no more than 10%, no more than 5%, or no more than 1% of the nucleic acid-cleaving activity of the wild-type nuclease domain. The modified form of the nuclease domain can have no substantial nucleic acid-cleaving activity. In some embodiments, the nuclease domain is enzymatically inactive. A TALEN or a variant, fragment, or derivative thereof can be fused to or associated with one of more heterologous gene effectors to form a complex of the disclosure.

[0257] Several mutations to Fok1 have been made for its use in TALENs, which, for example, improve cleavage specificity or activity. Such TALENs can be engineered to bind any desired DNA sequence. TALENs can be used to generate gene modifications (e.g., nucleic acid sequence editing) by creating a double-strand break in a target DNA sequence, which in turn, undergoes NHEJ or HDR.

[0258] A TALE or a variant, fragment, or derivative thereof can be fused to or associated with one of more heterologous gene effectors to form a complex of the disclosure. In some embodiments, the transcription activator-like effector (TALE) protein is fused to a heterologous gene effector and does not comprise a nuclease. In some embodiments, a TALEN does not cleave or substantially does not cleave the polynucleotide, e.g., a nuclease dead TALE. A TALE or a variant, fragment, or derivative thereof can be fused to or associated with one of more heterologous gene effectors to form a complex of the disclosure.

[0259] In some embodiments, the complex of the transcription activator-like effector (TALE) protein and the heterologous gene effector is designed to function as a transcriptional activator. In some embodiments, the complex of the transcription activator-like effector (TALE) protein and the heterologous gene effector is designed to function as a transcriptional repressor. For example, the DNA-binding domain of the transcription activator-like effector (TALE) protein can be fused (e.g., linked) to one or more heterologous gene effectors that comprise transcriptional activation domains, or to one or more heterologous gene effectors that comprise transcriptional repression domains.

[0260] In some embodiments, a guide moiety comprises a meganuclease. Meganucleases generally refer to rare-cutting endonucleases or homing endonucleases that can be highly sequence specific. Meganucleases can recognize DNA target sites ranging from at least 12 base pairs in length, e.g., from 12 to 40 base pairs, 12 to 50 base pairs, or 12 to 60 base pairs in length. Meganucleases can be modular DNA-binding nucleases such as any fusion protein comprising at least one catalytic domain of an endonuclease and at least one DNA binding domain or protein specifying a nucleic acid target sequence. The DNA-binding domain can contain at least one motif that recognizes single- or double-stranded DNA. A nuclease-active meganuclease can generate a double-stranded break. In some embodiments, a meganuclease is used in a targeting moiety of the disclosure to bind a polynucleotide (e.g., target gene or target gene regulatory sequence), but the meganuclease does not cleave or substantially does not cleave the polynucleotide, e.g., a nuclease dead meganuclease. A meganuclease or a variant, fragment, or derivative thereof can be fused to or associated with one of more heterologous gene effectors to form a complex of the disclosure.

[0261] The meganuclease can be monomeric or dimeric. In some embodiments, the meganuclease is naturally-occurring (found in nature) or wild-type, and in other instances, the meganuclease is non-natural, artificial, engineered, synthetic, rationally designed, or man-made. In some embodiments, the meganuclease of the present disclosure includes an I-CreI meganuclease, I-CeuI meganuclease, I-Msol meganuclease, I-SceI meganuclease, variants thereof, derivatives thereof, and fragments thereof.

[0262] In some embodiments, the nuclease domain of a meganuclease comprises a modified form of a wild type nuclease domain. The modified form of the nuclease domain can comprise an amino acid change (e.g., deletion, insertion, or substitution) that reduces or eliminates the nucleic acid-cleaving activity of the nuclease domain. For example, the modified form of the nuclease domain can have no more than 90%, no more than 80%, no more than 70%, no more than 60%, no more than 50%, no more than 40%, no more than 30%, no more than 20%, no more than 10%, no more than 5%, or no more than 1% of the nucleic acid-cleaving activity of the wild-type nuclease domain. The modified form of the nuclease domain can have no substantial nucleic acid-cleaving activity. In some embodiments, the nuclease domain is enzymatically inactive. In some embodiments, a meganuclease can bind DNA but cannot cleave the DNA. In some embodiments, a nuclease-inactive meganuclease is fused to or associated with one or more heterologous gene effectors to generate a complex of the disclosure.

[0263] In some embodiments, the guide moiety can regulate expression and/or activity of a target gene (e.g., target endogenous gene). In some embodiments, the guide moiety can edit the sequence of a nucleic acid (e.g., a gene and/or gene product). A nuclease-active Cas protein can edit a nucleic acid sequence by generating a double-stranded break or single-stranded break in a target polynucleotide.

[0264] In some embodiments, a guide moiety comprising a nuclease can generate a double-strand break in a target polynucleotide, such as DNA. A double-strand break in DNA can result in DNA break repair which allows for the introduction of gene modification(s) (e.g., nucleic acid editing). In some embodiments, a nuclease induces site-specific single-strand DNA breaks or nicks, thus resulting in HDR.

[0265] A double-strand break in DNA can result in DNA break repair which allows for the introduction of gene modification(s) (e.g., nucleic acid editing). DNA break repair can occur via non-homologous end joining (NHEJ) or homology-directed repair (HDR). In HDR, a donor DNA repair template or template polynucleotide that contains homology arms flanking sites of the target DNA can be provided.

[0266] In some embodiments, a guide moiety or complex comprising a nuclease does not generate a double-strand break in a target polynucleotide, such as DNA.

### Complexes

[0267] Disclosed herein, in some aspects, are complexes that comprise a heterologous gene effector and a guide moiety, for example, a guide nucleic acid and/or a nuclease, such as an endonuclease that lacks or substantially lacks cleavage activity.

[0268] Complexes of the disclosure can be useful, for example, for bringing one or more heterologous gene effectors into close proximity with a target gene (e.g., target endogenous gene) or target gene regulatory sequence, thereby facilitating modulation of an expression or activity level of the target gene.

[0269] In some embodiments, a complex of the disclosure binds to DNA, e.g., genomic DNA. In some embodiments, a complex of the disclosure binds to RNA, e.g., mRNA, microRNA, siRNA, or non-coding RNA. In some embodiments, a complex of the disclosure binds to DNA and RNA.

[0270] In some embodiments, a complex can modulate (e.g., increase or decrease) expression and/or activity of a target gene (e.g., target endogenous gene) by physical obstruction of a polynucleotide sequence (e.g., a promoter, enhancer, repressor, operator, or silencer, insulator, cis-regulatory element, trans-regulatory element, epigenetic modification (e.g., DNA methylation) site, coding sequence).

[0271] In some embodiments, a complex can modulate (e.g., increase or decrease) expression and/or activity of a target gene (e.g., target endogenous gene) by recruitment of additional factors effective to suppress or enhance expression of the target gene.

[0272] In some embodiments, complexes of the disclosure are used for introducing epigenetic modifications to a target gene (e.g., target endogenous gene) or target gene regulatory sequence (e.g., promoter, enhancer, silencer, insulator, cis-regulatory element, trans-regulatory element, or epigenetic modification (e.g., DNA methylation) site). In some embodiments, complexes of the disclosure are used for producing three-dimensional structures, topologically associating domains, or genomic boundaries comprising a target gene or target gene regulatory sequence (e.g., distal or proximal gene from the target gene).

[0273] In some cases, regulation of a target gene (e.g., a target endogenous gene) by a complex as disclosed herein, such as a complex comprising one or more heterologous gene effectors and a guide nucleic acid, may utilize an endogenous target gene regulatory sequence (e.g., promoter, enhancer, repressor, silencer, insulator, cis-regulatory element, trans-regulatory element, epigenetic modification (e.g., DNA methylation) site, etc.) operatively coupled to the target gene. Thus, such regulation of the target gene by the complex may not and need not involve an exogenous, synthetic, and/or heterologous regulatory sequence, such as a promoter, enhancer, repressor, silencer, insulator, cis-regulatory element, trans-regulatory element, epigenetic modification (e.g., DNA methylation) site, etc. that is heterologous with respect to the subject or the host cell. In some embodiments, regulation of the target gene by the complex does not involve use of an engineered inducible system, repressible system, and/or reporter system. In some embodiments, regulation of the target gene by the complex does not involve use of an exogenous, engineered, or synthetic regulatory element, for example, does not involve a response element that is modulated by tetracycline or analogs thereof. In some embodiments, regulation of the target gene by the complex does not involve use of a transactivator or reverse transactivator that functions as part of an engineered inducible system, repressible system, and/or reporter system. In some embodiments, regulation of the target gene by the complex does not involve a Tet off or tTA-dependent system, or a component thereof. In some embodiments, regulation of the target gene by the complex does not involve a Tet On or rtTA-dependent system, or a component thereof.

[0274] In some cases, a complex disclosed herein (e.g., a complex comprising one or more heterologous gene effectors and a guide nucleic acid) may be capable of regulating a target gene (e.g., a target endogenous gene) without any further control by a modulating agent, such as an agent that directly or indirectly allows the complex to increase or reduce expression of the target gene. In some embodiments, the complex is capable of regulating the target gene without involvement of a transactivating agent, a reverse transactivating agent, a small molecule, a drug, a chemical inducer of dimerization or multimerization, an additional inducing agent, an additional repressing agent, or any combination thereof. For example, upon introducing the individual complex to the host cell (e.g., expressing and/or transfecting each individual component of the individual complex to the host cell), such introduction may be sufficient to allow the individual complex to regulate expression or activity of the target gene.

[0275] In some embodiments, a complex comprises a heterologous gene effector and a guide moiety. In some embodiments, a complex comprises one heterologous gene effector and one guide moiety. In some embodiments, a complex comprises two heterologous gene effectors and one guide moiety. In some embodiments, a complex comprises three or more heterologous gene effectors and one guide moiety.

[0276] In some embodiments, a complex comprises a heterologous gene effector and a guide nucleic acid. In some embodiments, a complex comprises one heterologous gene effector and one guide nucleic acid. In some embodiments, a complex comprises two heterologous gene effectors and one guide nucleic acid. In some embodiments, a complex comprises three or more heterologous gene effectors and one guide nucleic acid.

[0277] In some embodiments, a complex comprises a heterologous gene effector and a nuclease (e.g., a guide moiety that comprises a nuclease, such as a heterologous endonuclease). A combination of the nuclease and the heterologous gene effector can be a chimeric fusion polypeptide comprising the nuclease and the heterologous gene effector. In some embodiments, the nuclease and the heterologous gene effector are not part of a chimeric fusion polypeptide, e.g., are not present in the same polypeptide chain. The combination of the nuclease and the heterologous gene effector can have a length that is less than a threshold length. In some embodiments, the combined length of the heterologous gene effector and the nuclease is at most about 1,200 amino acids, at most about 1,100 amino acids, at most about 1,000 amino acids, at most about 950 amino acids, at most about 900 amino acids, at most about 850 amino acids, at most about 800 amino acids, at most about 750 amino acids, at most about 700 amino acids, at most about 650 amino acids, at most about 600 amino acids, at most about 550 amino acids, at most about 500 amino acids, at most about 450 amino acids, at most about 400 amino acids, at most about 350 amino acids, or at most about 300 amino acids. In some embodiments, the combined length of the heterologous gene effector and the nuclease is at least about 300 amino acids, at least about 350 amino acids, at least about 400 amino acids, at least about 450 amino acids, at least about 500 amino acids, at least about 550 amino acids, at least about 600 amino acids, at least about 650 amino acids, at least about 700 amino acids, at least about 750 amino acids, at least about 800 amino acids, at least about 850 amino acids, at least about 900 amino acids, at least about 950 amino acids, at least about 1,000 amino acids, at least about 1,100 amino acids, or at least about 1,200 amino acids.

[0278] A complex disclosed herein can comprise (i) a guide moiety (for example, a nuclease or part thereof, such as a nuclease deactivated Cas, e.g., a nuclease deactivated Cas9, Cas12a, or Un1Cas12f1, optionally with a guide nucleic acid sequence), and (ii) a heterologous gene effector, wherein the heterologous gene effector comprises, consists essentially of, or consists of a peptide sequence with at least about 70%, at least about 75%, at least about 80%, at least about 81%, at least about 82%, at least about 83%, at least about 84%, at least about 85%, at least about 86%, at least about 87%, at least about 88%, at least about 89%, at least about 90%, at least about 91%, at least about 92%, at least about 93%, at least about 94%, at least about 95%, at least about 96%, at least about 97%, at least about 97.5%, at least about 98%, at least about 98.5%, at least about 99%, at least about 99.5%, at least about 99.9%, or about 100% sequence identity or sequence similarity to any one of SEQ ID NOs: 16-16154, any one of SEQ ID NOs: 16-13605, any one of SEQ ID NOs: 16155-47350, any one of SEQ ID NOs: 16155-43953, any one of SEQ ID NOs: 47351-49333, any one of SEQ ID NOs: 49353-50052, or any two or more of SEQ ID NOs: 16-49333 and 49353-50052, e.g., over the entire length.

[0279] In some embodiments, a complex disclosed herein comprises (i) a guide moiety (for example, a guide nucleic acid sequence and/or a nuclease or part thereof, such as a nuclease deactivated Cas, e.g., a nuclease deactivated Cas9, Cas12a, or Un1Cas12fl), and (ii) a heterologous gene effector, wherein the heterologous gene effector comprises, consists essentially of, or consists of a peptide sequence with at least about 70%, at least about 75%, at least about 80%, at least about 81%, at least about 82%, at least about 83%, at least about 84%, at least about 85%, at least about 86%, at least about 87%, at least about 88%, at least about 89%, at least about 90%, at least about 91%, at least about 92%, at least about 93%, at least about 94%, at least about 95%, at least about 96%, at least about 97%, at least about 97.5%, at least about 98%, at least about 98.5%, at least about 99%, at least about 99.5%, at least about 99.9%, or about 100% sequence identity or sequence similarity to any one of SEQ ID NOs: 1102, 2057, 5543, 9066, 11948, 15646, 17629, 19860, 21015, 21166, 22149, 22707, 23631, 23639, 25430, 25555, 32678, 33890, 34047, 35737, 38138, 38780, 40913, 40985, 40986, and 42623.

[0280] Two components present in a complex can be covalently linked, for example, present in a fusion protein, or cross-linked, e.g., treated with a crosslinking agent, or joined by a peptide or non-peptide linker as disclosed herein.

[0281] In some embodiments, two components present in a complex are part of the same fusion protein. Components can optionally be joined by a linker, such as a peptide linker or a non-peptide linker.

[0282] In some embodiments, a guide moiety or a part thereof (e.g., nuclease, such as dCas9) is joined to a heterologous gene effector by a linker. In some embodiments the guide moiety or part thereof is further joined to a second heterologous gene effector by a second linker that is the same or different. In some embodiments, a guide moiety or a part thereof (e.g., nuclease, such as dCas9) is fused to a heterologous gene effector without a linker.

[0283] In some embodiments, a guide moiety or a part thereof (e.g., nuclease, such as dCas9) is joined to an oligomerization domain or dimerization (e.g., heterodimerization) domain by a linker. In some embodiments the guide moiety or part thereof is further joined to a second oligomerization domain or dimerization (e.g., heterodimerization) domain by a second linker that is the same or different. In some embodiments, a guide moiety or a part thereof (e.g., nuclease, such as dCas9) is fused to a second oligomerization domain or dimerization (e.g., heterodimerization) domain without a linker.

[0284] In some embodiments, heterologous gene effector is joined to a second heterologous gene effector by a linker. In some embodiments the heterologous gene effector is further joined to a third heterologous gene effector by a second linker that is the same or different. In some embodiments, a heterologous gene effector is fused to a second heterologous gene effector without a linker.

[0285] In some embodiments, heterologous gene effector is joined to an oligomerization domain or dimerization (e.g., heterodimerization) domain by a linker. In some embodiments the heterologous gene effector is further joined to a second oligomerization domain or dimerization (e.g., heterodimerization) domain by a second linker that is the same or different. In some embodiments, a heterologous gene effector is fused to a second oligomerization domain or dimerization (e.g., heterodimerization) domain without a linker.

[0286] Any suitable linker can be used. A flexible linker can have a sequence containing stretches of glycine and serine residues. The small size of the glycine and serine residues provides flexibility and allows for mobility of the connected functional domains. The incorporation of serine or threonine can maintain the stability of the linker in aqueous solutions by forming hydrogen bonds with the water molecules, thereby reducing unfavorable interactions between the linker and protein moieties. Flexible linkers can also contain additional amino acids such as threonine and alanine to maintain flexibility, as well as polar amino acids such as lysine and glutamine to improve solubility. A rigid linker can have, for example, an alpha helix-structure. An alpha-helical rigid linker can act as a spacer between protein domains. Non-limiting examples of linkers include the sequences in TABLE 2, and repeats thereof, for example, 1, 2, 3, 4, 5, 6, 7, 8, 9, or 10 repeats. SEQ ID NOs: 1-6 provide flexible linkers or subunits thereof. SEQ ID NOs: 7-10 provide rigid linkers or subunits thereof.

TABLE 2

| SEQ ID NO: | Sequence |
|---|---|
| 1 | GGGGS |
| 2 | GGGS |
| 3 | GG |
| 4 | KESGSVSSEQLAQFRSLD |
| 5 | EGKSSGSGSESKST |
| 6 | GSAGSAAGSGEF |
| 7 | EAAAK |
| 8 | EAAAR |
| 9 | PAPAP |
| 10 | AEAAAKEAAAKA |

[0287] A linker sequence can be, for example, 1, 2, 3, 4, 5, 6, 7, 8, 9, 10, 11, 12, 13, 14, 15, 16, 17, 18, 19, 20, 21, 22, 23, 24, 25, 26, 27, 28, 29, 30, 31, 32, 33, 34, 35, 36, 37, 38, 39, 40, 41, 42, 43, 44, 45, 46, 47, 48, 49, or 50 amino acid residues in length.

[0288] In some embodiments, a linker is at least 1, at least 2, at least 3, at least 5, at least 7, at least 9, at least 11, at least 13, at least 15, or at least 20 amino acids. In some embodiments, a linker is at most 5, at most 7, at most 9, at most 11, at most 13, at most 15, at most 20, at most 25, at most 30, at most 40, or at most 50 amino acids.

[0289] In some embodiments, non-peptide linkers are used. A non-peptide linker can be, for example a chemical linker. Two parts of a complex of the disclosure can be connected by a chemical linker. Each chemical linker of the disclosure can be alkylene, alkenylene, alkynylene, heteroalkylene, cycloalkylene, heterocycloalkylene, arylene, or heteroarylene, any of which is optionally substituted. In some embodiments, a chemical linker of the disclosure can be an ester, ether, amide, thioether, or polyethylenegly col (PEG). In some embodiments, a linker can reverse the order of the amino acids sequence in a compound, for example, so that the amino acid sequences linked by the linked are head-to-head, rather than head-to-tail. Non-limiting examples of such linkers include diesters of dicarboxylic acids, such as oxalyl diester, malonyl diester, succinyl diester, glutaryl diester, adipyl diester, pimetyl diester, fumaryl diester, maleyl diester, phthalyl diester, isophthalyl diester, and terephthalyl diester. Non-limiting examples of such linkers include diamides of dicarboxylic acids, such as oxalyl diamide, malonyl diamide, succinyl diamide, glutaryl diamide, adipyl diamide, pimetyl diamide, fumaryl diamide, maleyl diamide, phthalyl diamide, isophthalyl diamide, and terephthalyl diamide. Non-limiting examples of such linkers include diamides of diamino linkers, such as ethylene diamine, 1,2-di(methylamino)ethane, 1,3-diaminopropane, 1,3-di(methylamino)propane, 1,4-di(methylamino)butane, 1,5-di(methylamino)pentane, 1,6-di(methylamino)hexane, and pipyrizine. Non-limiting examples of optional substituents include hydroxyl groups, sulfhydryl groups, halogens, amino groups, nitro groups, nitroso groups, cyano groups, azido groups, sulfoxide groups, sulfone groups, sulfonamide groups, carboxyl groups, carboxaldehyde groups, imine groups, alkyl groups, halo-alkyl groups, alkenyl groups, halo-alkenyl groups, alkynyl groups, halo-alkynyl groups, alkoxy groups, aryl groups, aryloxy groups, aralkyl groups, arylalkoxy groups, heterocyclyl groups, acyl groups, acyloxy groups, carbamate groups, amide groups, ureido groups, epoxy groups, and ester groups.

[0290] Two components present in a complex can be non-covalently coupled, for example, by ionic bonds, hydrogen bonds, interactions mediated by oligomerization or dimerization domains disclosed herein, etc.

[0291] In some embodiments, a guide moiety or a part thereof (e.g., nuclease, such as dCas9) is joined to a heterologous gene effector by non-covalent coupling. In some embodiments the guide moiety or part thereof is further joined to a second heterologous gene effector by non-covalent coupling. In some embodiments the guide moiety or part thereof is joined to a first heterologous gene effector covalently (e.g., as a fusion protein, optionally with a linker), and the guide moiety or part thereof is further joined to a second heterologous gene effector by non-covalent coupling.

[0292] In some embodiments, a guide moiety or a part thereof (e.g., nuclease, such as dCas9) is joined to an oligomerization domain or dimerization (e.g., heterodimerization) domain by non-covalent coupling. In some embodiments the guide moiety or part thereof is further joined to a second oligomerization domain or dimerization (e.g., heterodimerization) domain by non-covalent coupling. In some embodiments, a guide moiety or a part thereof (e.g., nuclease, such as dCas9) is fused to a first oligomerization domain or dimerization (e.g., heterodimerization) domain by covalent coupling (e.g., fused, optionally by a linker) and is joined to a second oligomerization domain or dimerization (e.g., heterodimerization) domain by non-covalent coupling.

[0293] In some embodiments, a first component of a guide moiety (e.g., a guide nucleic acid) is joined to a second component of the guide moiety (e.g., nuclease) non-covalently. In some embodiments, a first component of a guide moiety (e.g., a guide nucleic acid) is joined to a second component of the guide moiety (e.g., nuclease) covalently.

[0294] Any combination of covalent and non-covalent coupling can be used in a complex of the disclosure, for example, one or more heterologous gene effectors can be fused to a guide moiety non-covalently, and one or more oligomerization domains can be bound to a component of the complex (e.g., nuclease) covalently.

[0295] In some embodiments, a polypeptide providing increased or decreased stability is fused to or otherwise associated with a component of a complex of the disclosure, e.g., a guide moiety or a heterologous gene effector. The fused polypeptide can be located at the N-terminus, the C-terminus, or internally within the fusion protein.

[0296] In some embodiments, one or more components of a complex of the disclosure is fused to a domain that directs desirable sub-cellular localization, for example, a nuclear localization signal or a protein for targeting to the inner nuclear membrane, outer nuclear membrane, Cajal body, nuclear speckle, nuclear pore complex, PML body, nucleolus, P granule, GW body, stress granule, sponge body, endoplasmic reticulum, mitochondria, etc.

[0297] In some embodiments, a complex of the disclosure comprises a first protein linked to a first oligomerization (e.g., dimerization) domain, and a second protein linked to a second oligomerization (e.g., dimerization) domain. In some embodiments, an oligomerization domain or a dimerization domain can comprise a peptide interaction domain, for example, systems utilizing sgRNA2.0, SAM, SunTag, RAB, FLAG-biotin, or inducible oligomerization (e.g., dimerization) systems disclosed herein.

[0298] Complexes comprising combinations of heterologous gene effectors

[0299] Disclosed herein, in some embodiments, are complexes that comprise two or more heterologous gene effectors, and systems and methods for identifying the same.

[0300] In some embodiments, recruitment of two or more heterologous gene effectors to a locus of interest as disclosed herein can result in superior modulation of transcription compared to either heterologous gene effector alone, for example, more potent and/or persistent modulation of target gene (e.g., target endogenous gene) expression.

[0301] In some embodiments, recruitment of two or more heterologous gene effectors to a locus of interest as disclosed herein in a complex of the disclosure can result in superior modulation of transcription compared to recruitment of the combination of heterologous gene effectors separately, i.e., not present in a complex of the disclosure. The superior modulation of transcription can comprise, for example, more potent and/or persistent modulation of target gene (e.g., target endogenous gene) expression (e.g., activation or repression).

[0302] In some embodiments, assay systems of the disclosure, for example, high throughput screens, are used to identify combinations of heterologous gene effectors that are suitable for achieving a desired result, for example, increased expression of a target gene (e.g., target endogenous gene) or set of genes, reduced expression of a target gene or set of genes, increased expression above a certain threshold, decreased expression below a certain threshold, persistence of expression above or below a desired threshold for a desirable amount of time, etc.

[0303] A combination of heterologous gene effectors that are present in a complex of the disclosure and/or are recruited to a locus that regulates expression of a target gene (e.g., target endogenous gene) can be a combination of factors that do not interact in normal in vivo contexts (for example, due to cell type source, organism, tissue specific expression, localization to a given sub-cellular compartment or organelle, co-factor, structural, or complex requirements, etc.), but nonetheless mediate desirable epigenetic and/or transcriptional effects when orthogonally recruited to a target locus of interest, for example in a complex of the disclosure.

[0304] In some embodiments, a combination of heterologous gene effectors that are present in a complex of the disclosure are from different sources, for example, from any two or more of a human protein, a viral protein, a mammalian protein, a protein that primarily localizes to the nucleus, a chromatin regulator, a factor that facilitates heterochromatin formation, a factor that modulates histones through methylation, a factor that modulates histones through acetylation, a factor that modulates histones through phosphorylation, a factor that modulates histones through ADP-ribosylation, a factor that modulates histones through glycosylation, a factor that modulates histones through SUMOylation, a factor that modulates histones through ubiquitination, a factor that modulates histones by remodeling histone structure, e.g., via an ATP hydrolysis-dependent process, a histone acetyltransferase, a histone lysine methyltransferase, a component of a chromatin remodeling complex, a transcriptional regulator, a transcriptional activator, a transcriptional repressor domain, a transcription factor, a mesenchymal stem cell transcription factor, an embryonic stem cell transcription factor, an induced pluripotent stem cell (iPSC) transcription factor, an epithelial stem cell transcription factor, a cancer stem cell transcription factor, a cancer-related transcription factor, an immune cell transcription factor, a nuclear receptor, a nuclear hormone receptor, a validated human virus transcriptional regulator, a factor from a genome of a virus (e.g., from a virus family, subfamily, genus, species etc. disclosed herein), a factor from a genome of a virus that is capable of zoonotic transmission to humans, a factor from a shared human/bat virus, a factor from a viral genome from a metagenomic survey, a factor from a virus found in the human gut, a factor from a virus found in extreme environments, a factor from a virus or protein class with a high degree of documented transcriptional regulator modularity, or another source disclosed herein.

[0305] In some embodiments, a combination of heterologous gene effectors that are present in a complex of the disclosure are from the same or similar sources, for example, two or more heterologous gene effectors each of which contains a sequence from a human protein, a viral protein, a mammalian protein, a protein that primarily localizes to the nucleus, a chromatin regulator, a factor that facilitates heterochromatin formation, a factor that modulates histones through methylation, a factor that modulates histones through acetylation, a factor that modulates histones through phosphorylation, a factor that modulates histones through ADP-ribosylation, a factor that modulates histones through glycosylation, a factor that modulates histones through SUMOylation, a factor that modulates histones through ubiquitination, a factor that modulates histones by remodeling histone structure, e.g., via an ATP hydrolysis-dependent process, a histone acetyltransferase, a histone lysine methyltransferase, a component of a chromatin remodeling complex, a transcriptional regulator, a transcriptional activator, a transcriptional repressor domain, a transcription factor, a mesenchymal stem cell transcription factor, an embryonic stem cell transcription factor, an induced pluripotent stem cell (iPSC) transcription factor, an epithelial stem cell transcription factor, a cancer stem cell transcription factor, a cancer-related transcription factor, an immune cell transcription factor, a nuclear receptor, a nuclear hormone receptor, a validated human virus transcriptional regulator, a factor from a genome of a virus (e.g., from a virus family, subfamily, genus, species etc. disclosed herein), a factor from a genome of a virus that is capable of zoonotic transmission to humans, a factor from a shared human/bat virus, a factor from a viral genome from a metagenomic survey, a factor from a virus found in the human gut, a factor from a virus found in extreme environments, a factor from a virus or protein class with a high degree of documented transcriptional regulator modularity, or another source disclosed herein.

[0306] In some embodiments, a complex comprises two or more heterologous gene effectors that are from the same or similar sources and two or more heterologous gene effectors that are from different sources.

[0307] Two heterologous gene effectors that are present in a complex of the disclosure can be covalently linked to the complex, for example, present in a fusion protein, or treated with a crosslinking agent, etc. in any manner as disclosed elsewhere herein.

[0308] Two heterologous gene effectors that are present in a complex of the disclosure can be non-covalently associated to the complex, for example, by ionic bonds, hydrogen bonds, using an inducible and/or reversible system, etc. in any manner as disclosed elsewhere herein.

[0309] Two heterologous gene effectors that are present in a complex of the disclosure can be associated with the complex by using an inducible system. In some embodiments, the inducible system is reversible, e.g., upon withdrawal of the inducing agent, or upon treating with a dissociating agent.

[0310] Inducible systems for associating complex components can comprise fusing dimerization, oligomerization, or multimerization domains to the proteins to be associated. In some embodiments, the dimerization, oligomerization, or multimerization domains are fused to the N-terminus of the protein to be associated. In some embodiments, the dimerization, oligomerization, or multimerization domains are fused to the C-terminus of the protein to be associated. In some embodiments, the dimerization, oligomerization, or multimerization domains are fused to the N-terminus and the C-terminus of the protein to be associated (e.g., the same or different dimerization, oligomerization, or multimerization domains at the N-terminus and the C-terminus). In some embodiments, the dimerization, oligomerization, or multimerization domains are added in-frame within the amino acid sequence of a protein to be associated.

[0311] An inducible system for associating complex components can be a chemically-inducible system. Non-limiting examples of chemically-inducible systems include small molecule inducible systems, systems based on tetracycline or doxycycline, systems based on ponasterone A, abscisic acid (ABA)-inducible ABI-PYL1, gibberellin (GA)-inducible GID1-GAI, rapamycin-inducible FKBP-FRB, a TMP-Htag induced HaloTag/DHFR dimerization system, a dimerization system using an enzyme-catalyzed reaction, and systems utilizing a combination of the inducible components.

[0312] An inducible system for associating complex components can be a light-inducible system (e.g., an optogenetic system). Non-limiting examples of light-inducible systems include phytochrome-based red light-inducible PHYB-PIF, cryptochrome-based blue light-inducible CRY2 PHR-CIBN, light oxygen voltage-based blue-light-inducible FKF1-GI, pMAG, nMAG, BphS, and systems utilizing a combination of the inducible components.

[0313] In some embodiments, components of a complex of the disclosure are associated using inducible and reversible heterodimeric protein pairs from Arabidopsis thaliana (PYL1-ABI and GID1-GAI). Fusing heterodimerization domains from this system to each of two separately-expressed polypeptides allows for association of the polypeptides upon treatment with an inducing agent (the plant hormones ABA and GA).

[0314] For example, by fusing one protein from a heterodimeric pair to a guide moiety (e.g., dCas9) and the other to a heterologous gene effector, recruitment of the effector to the guide moiety can be achieved by addition of the appropriate plant hormone. Recruitment of a second heterologous gene effector can similarly be achieved by fusing one protein from a second heterodimeric pair to the guide moiety and the other to the second heterologous gene effector. In some embodiments, the same system an alternative inducible system is used to associate components in a complex that does not contain two or more different heterologous gene effectors, for example, to reversibly induce complex formation between one heterologous gene effector and a nuclease.

[0315] In some embodiments, components of an inducible system can be transiently or permanently expressed in cells of the disclosure. For example, cells can be transduced to transiently or stably express a guide moiety (e.g., dCas9) with fusions of heterodimerization domains from GAI and ABI.

[0316] In some embodiments, compositions and methods of the disclosure utilize candidate heterologous gene effectors with a high degree of documented transcriptional regulator modularity. In some embodiments, heterologous gene effectors with a high degree of documented transcriptional regulator modularity can be useful in combination with other gene effectors, for example, can be more likely to facilitate combinatorial or synergistic effects on gene transcription. This system allows, for example, orthogonal recruitment of candidate effector domains to test thousands of possible combinations in an unbiased manner. The inducibility and reversibility of the system allows the persistence of observed effects on transcriptional activation or repression to be evaluated. Aspects of the system (for example, that allow AND, OR, NAND, and NOR logic operators and a diametric regulator that activates gene expression with one inducer and represses with another) are described in Gao et al., “Complex transcriptional modulation with orthogonal and inducible dCas9 regulators.” Nature methods 13.12 (2016): 1043-1049.

[0317] In some embodiments, a complex comprises a combination of a chromatin regulator and a transcriptional regulator. In some embodiments, a complex comprises a combination of a first chromatin regulator and a second chromatin regulator. In some embodiments, a complex comprises a combination of a first transcriptional regulator and a second transcriptional regulator.

[0318] In some embodiments, a complex comprises a combination of at least one chromatin regulator and at least one transcriptional regulator. In some embodiments, a complex comprises a combination of a first chromatin regulator and at least a second chromatin regulator. In some embodiments, a complex comprises a combination of a first transcriptional regulator and at least a second transcriptional regulator.

[0319] In some embodiments, a complex comprises a combination of a chromatin regulator with two transcriptional regulators. In some embodiments, a complex comprises a combination of a transcriptional regulator with two chromatin regulators. In some embodiments, a complex comprises a combination of three chromatin regulators. In some embodiments, a complex comprises a combination of three transcriptional regulators.

[0320] In some embodiments, a complex comprises a combination of at least one chromatin regulator with at least two transcriptional regulators. In some embodiments, a complex comprises a combination of at least one transcriptional regulator with at least two chromatin regulators. In some embodiments, a complex comprises a combination of at least three chromatin regulators. In some embodiments, a complex comprises a combination of at least three transcriptional regulators.

[0321] A complex of the disclosure can comprise any suitable number of heterologous gene effectors, for example, at least one, at least two, at least three, at least four, or at least five. In some embodiments, a complex of the disclosure comprises at most two, at most three, at most four, or at most five heterologous gene effectors. In some embodiments, a complex of the disclosure comprises 1-5, 1-4, 1-3, 1-2, 2-5, 2-4, 2-3, 3-5, 3-4, or 4-5 heterologous gene effectors. In some embodiments, a complex of the disclosure comprises at most one, at most two, at most three, at most four, at most five, at most six, at most seven, at most eight, at most nine, or at most ten heterologous gene effectors. In some embodiments, a complex of the disclosure comprises one, two, three, four, five, six, seven, eight, nine, or ten heterologous gene effectors. In some embodiments, a complex of the disclosure comprises one heterologous gene effector. In some embodiments, a complex of the disclosure comprises two heterologous gene effectors. In some embodiments, a complex of the disclosure comprises three heterologous gene effectors.

[0322] In some embodiments two heterologous gene effectors are present in a complex of the disclosure and/or are recruited to a locus that regulates expression of a target gene (e.g., target endogenous gene). In some embodiments three heterologous gene effectors are present in a complex of the disclosure and/or are recruited to a locus that regulates expression of a target gene (e.g., target endogenous gene). In some embodiments four heterologous gene effectors are present in a complex of the disclosure and/or are recruited to a locus that regulates expression of a target gene (e.g., target endogenous gene). In some embodiments five heterologous gene effectors are present in a complex of the disclosure and/or are recruited to a locus that regulates expression of a target gene (e.g., target endogenous gene).

[0323] When two or more heterologous gene effectors are present in a complex of the disclosure and/or are recruited to a locus that regulates expression of a target gene (e.g., target endogenous gene), the heterologous gene effectors can be the same or different. In some embodiments, two heterologous gene effectors that are present in a complex of the disclosure and/or are recruited to a locus that regulates expression of a target gene are different to each other (e.g., from derived from different proteins of origin). In some embodiments, three heterologous gene effectors that are present in a complex of the disclosure and/or are recruited to a locus that regulates expression of a target gene are different to each other (e.g., from derived from different proteins of origin).

[0324] In some embodiments, a complex of the disclosure comprises at least one heterologous gene effector that is not or does not contain a sequence from P300, TET1, TET2, TET3, and/or HSF1.

[0325] In some embodiments, a complex of the disclosure comprises at least one heterologous gene effector that is not or does not contain a sequence from VP64, P65, Rta, VPR, AD2, CR3, ELKF1, GATA4, PRVIE, p53, SP1, MYOD, MEF2C, TAX, PPAR-gamma, MED1, MED7, MED17, MED26, MED29, TBP, GTF2H-2D, GTF2B, CBP, HSF1, MS2-p65-HSF1, MS2-TET1, NLS-dCas9-VP64, P300, p65, PRDM9, PUFa-GADD45A-TET1, R2, SunTag-scFv-sfGFP-TET1CD, TET1, TET2, TET3, VP120, VP16, VP16, VP16, VP48, VP64, VP64 or p65 +/−HSF1 or MyoD1, and/or VPR (Vp64+p65+Rta).

[0326] In some embodiments, a complex of the disclosure comprises at least one heterologous gene effector that is not or does not contain a sequence from KRAB, Mad mSIN3 interaction domain (SID), ERF repressor domain (ERD), cat3a, last 301 amino acids of Dnmt3a Isoform 1, dCas9-KRAB-MeCP2, DNMT3A, DNMT3A, DNMT3A, DNMT3A R887E-DNMT3L, DNMT3A-DNMT3L, DNMT3B, EZH2, HDAC, KRAB-DNMT3A, KRAB-DNMT3A-DNMT3L, KRAB-DNMT3L, LSD1, M.SssI, MQ1, MQ1 Q147E, SID4×, and/or SuntTag-DNMT3A.

### Target Genes

[0327] The disclosure provides compositions, methods, and systems for modulating expression of target genes (e.g., target endogenous genes). For example, disclosed herein are complexes that comprise a guide moiety and one or more heterologous gene effectors that can increase or decrease an activity or expression level of a target gene.

[0328] In some embodiments, a target gene or regulatory sequence thereof is endogenous to a subject, for example, present in the subject's genome. In some embodiments, a target gene or regulatory sequence thereof is not part of an engineered reporter system.

[0329] In some embodiments, a target gene is exogenous to a host subject, for example, a pathogen target gene or an exogenous gene expressed as a result of a therapeutic intervention, such as a gene therapy and/or cell therapy. In some embodiments, a target gene is an exogenous reporter gene, such as a reporter gene disclosed herein (e.g., a fluorescent protein). In some embodiments, a target gene is an exogenous synthetic gene.

[0330] In some embodiments, a complex of the disclosure can increase expression of a target gene (e.g., upon introducing the complex into a cell or population of cells). In some embodiments, an expression level is an RNA expression level can be measured by, for example, RNAseq, qPCR, microarray, gene array, FISH, etc. In some embodiments, an expression level is a protein expression level can be measured by, for example, Western Blot, ELISA, multiplex immunoassay, mass spectrometry, NMR, proteomics, flow cytometry, mass cytometry, etc.

[0331] In some embodiments, a complex of the disclosure can increase expression of a target gene (e.g., upon introducing the complex into a cell or population of cells) by at least 10%, at least 20%, at least 30%, at least 40%, at least 50%, at least 60%, at least 70%, at least 80%, at least 90%, at least 2-fold, at least 3 fold, at least 4 fold, at least 5 fold, at least 6 fold, at least 7 fold, at least 8 fold, at least 9 fold, at least 10 fold, at least 11 fold, at least 12 fold, at least 13 fold, at least 14, at least 15 fold, at least 20 fold, at least 30 fold, at least 40 fold, at least 50 fold, at least 60 fold, at least 70 fold, at least 80 fold, at least 90 fold, at least 100 fold, at least 150 fold, at least 200 fold, at least 250 fold, at least 300 fold, at least 350 fold, at least 400 fold, at least 500 fold, at least 600 fold, at least 700 fold, at least 800 fold, at least 900 fold, at least 1000 fold, at least 1500 fold, at least 2000 fold, or at least 3000 fold.

[0332] In some embodiments, a complex of the disclosure can increase expression of a target gene (e.g., upon introducing the complex into a cell or population of cells) at most 50%, at most 60%, at most 70%, at most 80%, at most 90%, at most 2-fold, at most 3 fold, at most 4 fold, at most 5 fold, at most 6 fold, at most 7 fold, at most 8 fold, at most 9 fold, at most 10 fold, at most 11 fold, at most 12 fold, at most 13 fold, at most 14, at most 15 fold, at most 20 fold, at most 30 fold, at most 40 fold, at most 50 fold, at most 60 fold, at most 70 fold, at most 80 fold, at most 90 fold, at most 100 fold, at most 150 fold, at most 200 fold, at most 250 fold, at most 300 fold, at most 350 fold, at most 400 fold, at most 500 fold, at most 600 fold, at most 700 fold, at most 800 fold, at most 900 fold, at most 1000 fold, at most 1500 fold, at most 2000 fold, at most 3000 fold, at most 5000 fold, or at most 10000 fold.

[0333] In some embodiments, a complex of the disclosure can increase expression of a target gene (e.g., upon introducing the complex into a cell or population of cells) about 10%, about 20%, about 30%, about 40%, about 50%, about 60%, about 70%, about 80%, about 90%, about 2-fold, about 3 fold, about 4 fold, about 5 fold, about 6 fold, about 7 fold, about 8 fold, about 9 fold, about 10 fold, about 11 fold, about 12 fold, about 13 fold, about 14, about 15 fold, about 20 fold, about 30 fold, about 40 fold, about 50 fold, about 60 fold, about 70 fold, about 80 fold, about 90 fold, about 100 fold, about 150 fold, about 200 fold, about 250 fold, about 300 fold, about 350 fold, about 400 fold, about 500 fold, about 600 fold, about 700 fold, about 800 fold, about 900 fold, about 1000 fold, about 1500 fold, about 2000 fold, about 3000 fold, about 5000 fold, or about 10000 fold.

[0334] In some embodiments, a complex of the disclosure can increase an expression level of a target gene (e.g., upon introducing the complex into a cell or population of cells) from below a limit of detection to a detectable level.

[0335] In some embodiments, a complex of the disclosure can reduce expression of a target gene (e.g., upon introducing the complex into a cell or population of cells) by at least 10%, at least 20%, at least 30%, at least 40%, at least 50%, at least 60%, at least 70%, at least 80%, at least 90%, at least 2-fold, at least 3 fold, at least 4 fold, at least 5 fold, at least 6 fold, at least 7 fold, at least 8 fold, at least 9 fold, at least 10 fold, at least 11 fold, at least 12 fold, at least 13 fold, at least 14, at least 15 fold, at least 20 fold, at least 30 fold, at least 40 fold, at least 50 fold, at least 60 fold, at least 70 fold, at least 80 fold, at least 90 fold, at least 100 fold, at least 150 fold, at least 200 fold, at least 250 fold, at least 300 fold, at least 350 fold, at least 400 fold, at least 500 fold, at least 600 fold, at least 700 fold, at least 800 fold, at least 900 fold, at least 1000 fold, at least 1500 fold, at least 2000 fold, or at least 3000 fold.

[0336] In some embodiments, a complex of the disclosure can reduce expression of a target gene (e.g., upon introducing the complex into a cell or population of cells) at most 50%, at most 60%, at most 70%, at most 80%, at most 90%, at most 2-fold, at most 3 fold, at most 4 fold, at most 5 fold, at most 6 fold, at most 7 fold, at most 8 fold, at most 9 fold, at most 10 fold, at most 11 fold, at most 12 fold, at most 13 fold, at most 14, at most 15 fold, at most 20 fold, at most 30 fold, at most 40 fold, at most 50 fold, at most 60 fold, at most 70 fold, at most 80 fold, at most 90 fold, at most 100 fold, at most 150 fold, at most 200 fold, at most 250 fold, at most 300 fold, at most 350 fold, at most 400 fold, at most 500 fold, at most 600 fold, at most 700 fold, at most 800 fold, at most 900 fold, at most 1000 fold, at most 1500 fold, at most 2000 fold, at most 3000 fold, at most 5000 fold, or at most 10000 fold.

[0337] In some embodiments, a complex of the disclosure can reduce expression of a target gene (e.g., upon introducing the complex into a cell or population of cells) about 10%, about 20%, about 30%, about 40%, about 50%, about 60%, about 70%, about 80%, about 90%, about 2-fold, about 3 fold, about 4 fold, about 5 fold, about 6 fold, about 7 fold, about 8 fold, about 9 fold, about 10 fold, about 11 fold, about 12 fold, about 13 fold, about 14, about 15 fold, about 20 fold, about 30 fold, about 40 fold, about 50 fold, about 60 fold, about 70 fold, about 80 fold, about 90 fold, about 100 fold, about 150 fold, about 200 fold, about 250 fold, about 300 fold, about 350 fold, about 400 fold, about 500 fold, about 600 fold, about 700 fold, about 800 fold, about 900 fold, about 1000 fold, about 1500 fold, about 2000 fold, about 3000 fold, about 5000 fold, or about 10000 fold.

[0338] In some embodiments, a complex of the disclosure can reduce an expression level of a target gene (e.g., upon introducing the complex into a cell or population of cells) from a detectable level to below a limit of detection.

[0339] In some embodiments, the degree in change of expression is relative to before introducing the complex into the cell or population of cells. In some embodiments, the degree in change of expression is relative to a corresponding control cell or population of cells that are not treated with the complex. In some embodiments, the degree in change of expression is relative to a corresponding control cell or population of cells that are treated with an alternative complex or gene expression regulator, for example, a complex comprising an alternative heterologous gene effector or combination thereof, or a different agent that modulates expression of the target gene. In some embodiments, the degree in change of expression is relative to a corresponding cell or population thereof that is treated with a control agent comprising a heterologous gene effector that is from P300, TET1, TET2, TET3, HSF1, VP64, P65, Rta, VPR, AD2, CR3, ELKF1, GATA4, PRVIE, p53, SP1, MYOD, MEF2C, TAX, PPAR-gamma, MED1, MED7, MED17, MED26, MED29, TBP, GTF2H-2D, GTF2B, CBP, HSF1, MS2-p65-HSF1, MS2-TET1, NLS-dCas9-VP64, P300, p65, PRDM9, PUFa-GADD45A-TET1, R2, SunTag-scFv-sfGFP-TET1CD, TET1, TET2, TET3, VP120, VP16, VP16, VP16, VP48, VP64, VP64 or p65+/−HSF1 or MyoD1, and/or VPR (Vp64+p65+Rta), KRAB, Mad mSIN3 interaction domain (SID), ERF repressor domain (ERD), cat3a, last 301 amino acids of Dnmt3a Isoform 1, dCas9-KRAB-MeCP2, DNMT3A, DNMT3A, DNMT3A, DNMT3A R887E-DNMT3L, DNMT3A-DNMT3L, DNMT3B, EZH2, HDAC, KRAB-DNMT3A, KRAB-DNMT3A-DNMT3L, KRAB-DNMT3L, LSD1, M.SssI, MQ1, MQ1 Q147E, SID4×, and/or SuntTag-DNMT3A.

[0340] In some embodiments, the degree in change of expression is relative to a corresponding cell or population thereof that is treated with a control agent comprising a heterologous gene effector that is from VPR. In some embodiments, the degree in change of expression is relative to a corresponding cell or population thereof that is treated with a control agent comprising a heterologous gene effector that is from KRAB. In some embodiments, the degree in change of expression is relative to a corresponding cell or population thereof that is treated with a control agent comprising a heterologous gene effector that is from VP64. In some embodiments, the degree in change of expression is relative to a corresponding cell or population thereof that is treated with a control agent comprising a heterologous gene effector that is from Rta. In some embodiments, the degree in change of expression is relative to a corresponding cell or population thereof that is treated with a control agent comprising a heterologous gene effector that is from p65. In some embodiments, the degree in change of expression is relative to a corresponding cell or population thereof that is treated with a control agent comprising a heterologous gene effector that is KAL.

[0341] In some embodiments, a complex of the disclosure can increase an activity level of a target gene (e.g., upon introducing the complex into a cell or population of cells). An activity level can be determined by a suitable functional assay for the target gene in question depending on the functional characteristics of the target gene. For example, an activity level of a target gene that is a mitogen could be determined by measuring cell proliferation; an activity level of a target gene that induces apoptosis could be measured by an annexin V assay or other suitable cell death assay; an activity level of an anti-inflammatory cytokine could be measured by an LPS-induced cytokine release assay.

[0342] In some embodiments, a complex of the disclosure can increase an activity level of a target gene (e.g., upon introducing the complex into a cell or population of cells) by at least 10%, at least 20%, at least 30%, at least 40%, at least 50%, at least 60%, at least 70%, at least 80%, at least 90%, at least 2-fold, at least 3 fold, at least 4 fold, at least 5 fold, at least 6 fold, at least 7 fold, at least 8 fold, at least 9 fold, at least 10 fold, at least 11 fold, at least 12 fold, at least 13 fold, at least 14, at least 15 fold, at least 20 fold, at least 30 fold, at least 40 fold, at least 50 fold, at least 60 fold, at least 70 fold, at least 80 fold, at least 90 fold, at least 100 fold, at least 150 fold, at least 200 fold, at least 250 fold, at least 300 fold, at least 350 fold, at least 400 fold, at least 500 fold, at least 600 fold, at least 700 fold, at least 800 fold, at least 900 fold, at least 1000 fold, at least 1500 fold, at least 2000 fold, or at least 3000 fold.

[0343] In some embodiments, a complex of the disclosure can increase an activity level of a target gene (e.g., upon introducing the complex into a cell or population of cells) at most 50%, at most 60%, at most 70%, at most 80%, at most 90%, at most 2-fold, at most 3 fold, at most 4 fold, at most 5 fold, at most 6 fold, at most 7 fold, at most 8 fold, at most 9 fold, at most 10 fold, at most 11 fold, at most 12 fold, at most 13 fold, at most 14, at most 15 fold, at most 20 fold, at most 30 fold, at most 40 fold, at most 50 fold, at most 60 fold, at most 70 fold, at most 80 fold, at most 90 fold, at most 100 fold, at most 150 fold, at most 200 fold, at most 250 fold, at most 300 fold, at most 350 fold, at most 400 fold, at most 500 fold, at most 600 fold, at most 700 fold, at most 800 fold, at most 900 fold, at most 1000 fold, at most 1500 fold, at most 2000 fold, at most 3000 fold, at most 5000 fold, or at most 10000 fold.

[0344] In some embodiments, a complex of the disclosure can increase an activity level of a target gene (e.g., upon introducing the complex into a cell or population of cells) about 10%, about 20%, about 30%, about 40%, about 50%, about 60%, about 70%, about 80%, about 90%, about 2-fold, about 3 fold, about 4 fold, about 5 fold, about 6 fold, about 7 fold, about 8 fold, about 9 fold, about 10 fold, about 11 fold, about 12 fold, about 13 fold, about 14, about 15 fold, about 20 fold, about 30 fold, about 40 fold, about 50 fold, about 60 fold, about 70 fold, about 80 fold, about 90 fold, about 100 fold, about 150 fold, about 200 fold, about 250 fold, about 300 fold, about 350 fold, about 400 fold, about 500 fold, about 600 fold, about 700 fold, about 800 fold, about 900 fold, about 1000 fold, about 1500 fold, about 2000 fold, about 3000 fold, about 5000 fold, or about 10000 fold.

[0345] In some embodiments, a complex of the disclosure can increase an activity level of a target gene (e.g., upon introducing the complex into a cell or population of cells) from below a limit of detection to a detectable level.

[0346] In some embodiments, a complex of the disclosure can reduce an activity level of a target gene (e.g., upon introducing the complex into a cell or population of cells) by at least 10%, at least 20%, at least 30%, at least 40%, at least 50%, at least 60%, at least 70%, at least 80%, at least 90%, at least 2-fold, at least 3 fold, at least 4 fold, at least 5 fold, at least 6 fold, at least 7 fold, at least 8 fold, at least 9 fold, at least 10 fold, at least 11 fold, at least 12 fold, at least 13 fold, at least 14, at least 15 fold, at least 20 fold, at least 30 fold, at least 40 fold, at least 50 fold, at least 60 fold, at least 70 fold, at least 80 fold, at least 90 fold, at least 100 fold, at least 150 fold, at least 200 fold, at least 250 fold, at least 300 fold, at least 350 fold, at least 400 fold, at least 500 fold, at least 600 fold, at least 700 fold, at least 800 fold, at least 900 fold, at least 1000 fold, at least 1500 fold, at least 2000 fold, or at least 3000 fold.

[0347] In some embodiments, a complex of the disclosure can reduce an activity level of a target gene (e.g., upon introducing the complex into a cell or population of cells) at most 50%, at most 60%, at most 70%, at most 80%, at most 90%, at most 2-fold, at most 3 fold, at most 4 fold, at most 5 fold, at most 6 fold, at most 7 fold, at most 8 fold, at most 9 fold, at most 10 fold, at most 11 fold, at most 12 fold, at most 13 fold, at most 14, at most 15 fold, at most 20 fold, at most 30 fold, at most 40 fold, at most 50 fold, at most 60 fold, at most 70 fold, at most 80 fold, at most 90 fold, at most 100 fold, at most 150 fold, at most 200 fold, at most 250 fold, at most 300 fold, at most 350 fold, at most 400 fold, at most 500 fold, at most 600 fold, at most 700 fold, at most 800 fold, at most 900 fold, at most 1000 fold, at most 1500 fold, at most 2000 fold, at most 3000 fold, at most 5000 fold, or at most 10000 fold.

[0348] In some embodiments, a complex of the disclosure can reduce an activity level of a target gene (e.g., upon introducing the complex into a cell or population of cells) about 10%, about 20%, about 30%, about 40%, about 50%, about 60%, about 70%, about 80%, about 90%, about 2-fold, about 3 fold, about 4 fold, about 5 fold, about 6 fold, about 7 fold, about 8 fold, about 9 fold, about 10 fold, about 11 fold, about 12 fold, about 13 fold, about 14, about 15 fold, about 20 fold, about 30 fold, about 40 fold, about 50 fold, about 60 fold, about 70 fold, about 80 fold, about 90 fold, about 100 fold, about 150 fold, about 200 fold, about 250 fold, about 300 fold, about 350 fold, about 400 fold, about 500 fold, about 600 fold, about 700 fold, about 800 fold, about 900 fold, about 1000 fold, about 1500 fold, about 2000 fold, about 3000 fold, about 5000 fold, or about 10000 fold.

[0349] In some embodiments, a complex of the disclosure can reduce an activity level of a target gene (e.g., upon introducing the complex into a cell or population of cells) from a detectable level to below a limit of detection.

[0350] In some embodiments, the degree in change of an activity level is relative to before introducing the complex into the cell or population of cells. In some embodiments, the degree in change of an activity level is relative to a corresponding control cell or population of cells that are not treated with the complex. In some embodiments, the degree in change of an activity level is relative to a corresponding control cell or population of cells that are treated with an alternative complex or gene expression regulator, for example, a complex comprising an alternative heterologous gene effector or combination thereof, or a different agent that modulates an activity level of the target gene (e.g., target endogenous gene). In some embodiments, the degree in change of an activity level is relative to a corresponding cell or population thereof that is treated with a control agent comprising a heterologous gene effector that is from P300, TET1, TET2, TET3, HSF1, VP64, P65, Rta, VPR, AD2, CR3, ELKF1, GATA4, PRVIE, p53, SP1, MYOD, MEF2C, TAX, PPAR-gamma, MED1, MED7, MED17, MED26, MED29, TBP, GTF2H-2D, GTF2B, CBP, HSF1, MS2-p65-HSF1, MS2-TET1, NLS-dCas9-VP64, P300, p65, PRDM9, PUFa-GADD45A-TET1, R2, SunTag-scFv-sfGFP-TET1CD, TET1, TET2, TET3, VP120, VP16, VP16, VP16, VP48, VP64, VP64 or p65+/−HSF1 or MyoD1, and/or VPR (Vp64+p65+Rta), KRAB, Mad mSIN3 interaction domain (SID), ERF repressor domain (ERD), cat3a, last 301 amino acids of Dnmt3a Isoform 1, dCas9-KRAB-MeCP2, DNMT3A, DNMT3A, DNMT3A, DNMT3A R887E-DNMT3L, DNMT3A-DNMT3L, DNMT3B, EZH2, HDAC, KRAB-DNMT3A, KRAB-DNMT3A-DNMT3L, KRAB-DNMT3L, LSD1, M.SssI, MQ1, MQ1 Q147E, SID4×, and/or SuntTag-DNMT3A.

[0351] In some embodiments, the degree in change of activity level is relative to a corresponding cell or population thereof that is treated with a control agent comprising a heterologous gene effector that is from VPR. In some embodiments, the degree in change of activity level is relative to a corresponding cell or population thereof that is treated with a control agent comprising a heterologous gene effector that is from KRAB. In some embodiments, the degree in change of activity level is relative to a corresponding cell or population thereof that is treated with a control agent comprising a heterologous gene effector that is from VP64. In some embodiments, the degree in change of activity level is relative to a corresponding cell or population thereof that is treated with a control agent comprising a heterologous gene effector that is from Rta. In some embodiments, the degree in change of activity level is relative to a corresponding cell or population thereof that is treated with a control agent comprising a heterologous gene effector that is from p65. In some embodiments, the degree in change of activity level is relative to a corresponding cell or population thereof that is treated with a control agent comprising a heterologous gene effector that is KAL.

[0352] Complexes of the disclosure can, in some cases, elicit changes in expression and/or activity level of a target gene (e.g., target endogenous gene) that persists for longer than can be achieved with alternative compositions and methods. In some embodiments, persistent modulation of gene expression is advantageous as compared to transient modulation.

[0353] In some embodiments, a complex of the disclosure can increase expression and/or activity level of a target gene (e.g., target endogenous gene) to above a certain threshold for a period of time that is at least 10%, at least 20%, at least 30%, at least 40%, at least 50%, at least 60%, at least 70%, at least 80%, at least 90%, at least 2-fold, at least 3 fold, at least 4 fold, at least 5 fold, at least 6 fold, at least 7 fold, at least 8 fold, at least 9 fold, at least 10 fold, at least 20 fold, at least 50 fold, or at least 100 fold longer than a control.

[0354] In some embodiments, a complex of the disclosure can reduce expression and/or activity level of a target gene (e.g., target endogenous gene) to below a certain threshold for a period of time that is at least 10%, at least 20%, at least 30%, at least 40%, at least 50%, at least 60%, at least 70%, at least 80%, at least 90%, at least 2-fold, at least 3 fold, at least 4 fold, at least 5 fold, at least 6 fold, at least 7 fold, at least 8 fold, at least 9 fold, at least 10 fold, at least 20 fold, at least 50 fold, or at least 100 fold longer than a control.

[0355] In some embodiments, transient modulation of gene expression is advantageous as compared to persistent modulation, for example, where persistent over-expression or under-expression would lead to toxicity or off-target effects. Complexes of the disclosure can, in some cases, elicit changes in expression and/or activity level of a target gene (e.g., target endogenous gene) that persists for shorter periods of time than can be achieved with alternative compositions and methods.

[0356] In some embodiments, a complex of the disclosure can increase expression and/or activity level of a target gene (e.g., target endogenous gene) to above a certain threshold for at least 10%, at least 20%, at least 30%, at least 40%, at least 50%, at least 60%, at least 70%, at least 80%, at least 90%, at least 2-fold, at least 3 fold, at least 4 fold, at least 5 fold, at least 6 fold, at least 7 fold, at least 8 fold, at least 9 fold, at least 10 fold, at least 20 fold, at least 50 fold, or at least 100 fold less time than a control.

[0357] In some embodiments, a complex of the disclosure can reduce expression and/or activity level of a target gene (e.g., target endogenous gene) to below a certain threshold for at least 10%, at least 20%, at least 30%, at least 40%, at least 50%, at least 60%, at least 70%, at least 80%, at least 90%, at least 2-fold, at least 3 fold, at least 4 fold, at least 5 fold, at least 6 fold, at least 7 fold, at least 8 fold, at least 9 fold, at least 10 fold, at least 20 fold, at least 50 fold, or at least 100 fold less time than a control.

[0358] A control for an amount of time that expression and/or activity level is modulated can be, for example, a corresponding control cell or population of cells that are treated with an alternative complex or gene expression regulator, for example, a complex comprising an alternative heterologous gene effector or combination thereof, or a different agent that modulates an activity level of the target gene (e.g., target endogenous gene). In some embodiments, the persistence in change of an expression and/or activity level is relative to a corresponding cell or population thereof that is treated with a control agent comprising a heterologous gene effector that is from P300, TET1, TET2, TET3, HSF1, VP64, P65, Rta, VPR, AD2, CR3, ELKF1, GATA4, PRVIE, p53, SP1, MYOD, MEF2C, TAX, PPAR-gamma, MED1, MED7, MED17, MED26, MED29, TBP, GTF2H-2D, GTF2B, CBP, HSF1, MS2-p65-HSF1, MS2-TET1, NLS-dCas9-VP64, P300, p65, PRDM9, PUFa-GADD45A-TET1, R2, SunTag-scFv-sfGFP-TET1CD, TET1, TET2, TET3, VP120, VP16, VP16, VP16, VP48, VP64, VP64 or p65+/−HSF1 or MyoD1, and/or VPR (Vp64+p65+Rta), KRAB, Mad mSIN3 interaction domain (SID), ERF repressor domain (ERD), cat3a, last 301 amino acids of Dnmt3a Isoform 1, dCas9-KRAB-MeCP2, DNMT3A, DNMT3A, DNMT3A, DNMT3A R887E-DNMT3L, DNMT3A-DNMT3L, DNMT3B, EZH2, HDAC, KRAB-DNMT3A, KRAB-DNMT3A-DNMT3L, KRAB-DNMT3L, LSD1, M.SssI, MQ1, MQ1 Q147E, SID4×, and/or SuntTag-DNMT3A.

[0359] In some embodiments, the persistence in change of an expression and/or activity level is relative to a corresponding cell or population thereof that is treated with a control agent comprising a heterologous gene effector that is from VPR. In some embodiments, the persistence in change of an expression and/or activity level is relative to a corresponding cell or population thereof that is treated with a control agent comprising a heterologous gene effector that is from KRAB. In some embodiments, the persistence in change of an expression and/or activity level is relative to a corresponding cell or population thereof that is treated with a control agent comprising a heterologous gene effector that is from VP64. In some embodiments, the persistence in change of an expression and/or activity level is relative to a corresponding cell or population thereof that is treated with a control agent comprising a heterologous gene effector that is from Rta. In some embodiments, the persistence in change of an expression and/or activity level is relative to a corresponding cell or population thereof that is treated with a control agent comprising a heterologous gene effector that is from p65. In some embodiments, the persistence in change of an expression and/or activity level is relative to a corresponding cell or population thereof that is treated with a control agent comprising a heterologous gene effector that is KAL.

[0360] In some embodiments, a complex of the disclosure can increase expression and/or activity level of a target gene (e.g., target endogenous gene) to above a certain threshold for at least 1 hour, at least 2 hours, at least 3 hours, at least 4 hours, at least 5 hours, at least 6 hours, at least 7 hours, at least 8 hours, at least 9 hours, at least 10 hours, at least 12 hours, at least 14 hours, at least 18 hours, at least 20 hours, at least 1 day, at least 2 days, at least 3 days, at least 4 days, at least 5 days, at least 6 days, at least 7 days, at least 8 days, at least 9 days, at least 10 days, at least 14 days, at least 21 days, at least 28 days, at least 5 weeks, at least 6 weeks, at least 7 weeks, at least 8 weeks, at least 9 weeks, at least 10 weeks, at least 12 weeks, at least 14 weeks, at least 18 weeks, at least 20 weeks, or at least 26 weeks. The threshold can be, for example, a baseline level observed prior to treatment with the complex or in a corresponding population of cells not treated with the complex.

[0361] In some embodiments, a complex of the disclosure can reduce expression and/or activity level of a target gene (e.g., target endogenous gene) to below a certain threshold for at least 1 hour, at least 2 hours, at least 3 hours, at least 4 hours, at least 5 hours, at least 6 hours, at least 7 hours, at least 8 hours, at least 9 hours, at least 10 hours, at least 12 hours, at least 14 hours, at least 18 hours, at least 20 hours, at least 1 day, at least 2 days, at least 3 days, at least 4 days, at least 5 days, at least 6 days, at least 7 days, at least 8 days, at least 9 days, at least 10 days, at least 14 days, at least 21 days, at least 28 days, at least 5 weeks, at least 6 weeks, at least 7 weeks, at least 8 weeks, at least 9 weeks, at least 10 weeks, at least 12 weeks, at least 14 weeks, at least 18 weeks, at least 20 weeks, or at least 26 weeks. The threshold can be, for example, a baseline level observed prior to treatment with the complex or in a corresponding population of cells not treated with the complex.

[0362] In some embodiments, a complex of the disclosure can increase expression and/or activity level of a target gene (e.g., target endogenous gene) to above a certain threshold for at most 1 hour, at most 2 hours, at most 3 hours, at most 4 hours, at most 5 hours, at most 6 hours, at most 7 hours, at most 8 hours, at most 9 hours, at most 10 hours, at most 12 hours, at most 14 hours, at most 18 hours, at most 20 hours, at most 1 day, at most 2 days, at most 3 days, at most 4 days, at most 5 days, at most 6 days, at most 7 days, at most 8 days, at most 9 days, at most 10 days, at most 14 days, at most 21 days, at most 28 days, at most 5 weeks, at most 6 weeks, at most 7 weeks, at most 8 weeks, at most 9 weeks, at most 10 weeks, at most 12 weeks, at most 14 weeks, at most 18 weeks, at most 20 weeks, or at most 26 weeks. The threshold can be, for example, a baseline level observed prior to treatment with the complex or in a corresponding population of cells not treated with the complex.

[0363] In some embodiments, a complex of the disclosure can reduce expression and/or activity level of a target gene (e.g., target endogenous gene) to below a certain threshold for at most 1 hour, at most 2 hours, at most 3 hours, at most 4 hours, at most 5 hours, at most 6 hours, at most 7 hours, at most 8 hours, at most 9 hours, at most 10 hours, at most 12 hours, at most 14 hours, at most 18 hours, at most 20 hours, at most 1 day, at most 2 days, at most 3 days, at most 4 days, at most 5 days, at most 6 days, at most 7 days, at most 8 days, at most 9 days, at most 10 days, at most 14 days, at most 21 days, at most 28 days, at most 5 weeks, at most 6 weeks, at most 7 weeks, at most 8 weeks, at most 9 weeks, at most 10 weeks, at most 12 weeks, at most 14 weeks, at most 18 weeks, at most 20 weeks, or at most 26 weeks. The threshold can be, for example, a baseline level observed prior to treatment with the complex or in a corresponding population of cells not treated with the complex.

[0364] In some embodiments, a complex of the disclosure can increase expression and/or activity level of a target gene (e.g., target endogenous gene) to above a certain threshold for about 1 hour, about 2 hours, about 3 hours, about 4 hours, about 5 hours, about 6 hours, about 7 hours, about 8 hours, about 9 hours, about 10 hours, about 12 hours, about 14 hours, about 18 hours, about 20 hours, about 1 day, about 2 days, about 3 days, about 4 days, about 5 days, about 6 days, about 7 days, about 8 days, about 9 days, about 10 days, about 14 days, about 21 days, about 28 days, about 5 weeks, about 6 weeks, about 7 weeks, about 8 weeks, about 9 weeks, about 10 weeks, about 12 weeks, about 14 weeks, about 18 weeks, about 20 weeks, or about 26 weeks. The threshold can be, for example, a baseline level observed prior to treatment with the complex or in a corresponding population of cells not treated with the complex.

[0365] In some embodiments, a complex of the disclosure can reduce expression and/or activity level of a target gene (e.g., target endogenous gene) to below a certain threshold for about 1 hour, about 2 hours, about 3 hours, about 4 hours, about 5 hours, about 6 hours, about 7 hours, about 8 hours, about 9 hours, about 10 hours, about 12 hours, about 14 hours, about 18 hours, about 20 hours, about 1 day, about 2 days, about 3 days, about 4 days, about 5 days, about 6 days, about 7 days, about 8 days, about 9 days, about 10 days, about 14 days, about 21 days, about 28 days, about 5 weeks, about 6 weeks, about 7 weeks, about 8 weeks, about 9 weeks, about 10 weeks, about 12 weeks, about 14 weeks, about 18 weeks, about 20 weeks, or about 26 weeks. The threshold can be, for example, a baseline level observed prior to treatment with the complex or in a corresponding population of cells not treated with the complex.

[0366] The target gene (e.g., target endogenous gene) or regulatory sequence thereof can be any suitable gene or regulatory sequence thereof that is present in a cell, such as a stem cell, hematopoietic cell, an immune cell, or other cell type disclosed herein.

[0367] The target gene (e.g., target endogenous gene) can be a gene involved in immune cell regulation. In some embodiments, the target gene (e.g., target endogenous gene) is associated with cancer. The target gene associated with cancer can be a cell cycle gene, cell response gene, apoptosis gene, or phagocytosis gene.

[0368] In some embodiments, the term target gene (e.g., target endogenous gene) can also include target gene regulatory sequences, for example, promoters, enhancers, repressors, silencers, insulators, cis-regulatory elements, trans-regulatory elements, epigenetic modification (e.g., DNA methylation) sites, etc. that can influence an expression or activity level of the target gene, for example, upon binding of a complex, heterologous gene effector, and/or other factors to the regulatory sequence. Target gene regulatory sequences can be physically located outside of the transcriptional unit or open reading frame that encodes a product of the target gene.

[0369] A target gene regulatory sequence can be an endogenous regulatory sequence, for example, an endogenous promoter, endogenous enhancer, endogenous repressor, endogenous silencer, endogenous insulator, endogenous cis-regulatory element, endogenous trans-regulatory element, endogenous epigenetic modification (e.g., DNA methylation) site, etc., that is operatively coupled to the target gene (e.g., target endogenous gene). In some embodiments, a target gene regulatory sequence does not contain a component of an engineered or synthetic reporter system. In some embodiments, a target gene regulatory sequence does not function as part of an engineered reporter system. In some embodiments, a target gene regulatory sequence does not contain an exogenous, engineered, or synthetic regulatory element, for example, does not contain a response element that is modulated by tetracycline or analogs thereof. In some embodiments, a target gene regulatory sequence does not contain a response element that is modulated by an exogenous, engineered, or synthetic factor, for example, a does not contain a response element that is modulated by a transactivator or reverse transactivator. In some embodiments, a target gene regulatory sequence does not contain an element that is responsive to a transactivator or reverse transactivator that functions as part of an engineered inducible system, repressible system, and/or reporter system. In some embodiments, a target gene regulatory sequence is not a component of a Tet off or tTA-dependent system. In some embodiments, a target gene regulatory sequence is not a component of a Tet On or rtTA-dependent system.

[0370] In some embodiments, a target gene regulatory sequence does not contain a nucleotide sequence that is exogenous to the subject or host cell. In some embodiments, a target gene regulatory sequence does not contain an engineered or artificially generated or introduced nucleotide sequence.

[0371] In some embodiments, a complex or a heterologous gene effector identified by methods of the disclosure effects a desirable change that is specific to a particular target gene (e.g., target endogenous gene). In some embodiments, a complex or a heterologous gene effector identified by methods of the disclosure effects a desirable change that is applicable to two or more target genes (e.g., target endogenous genes). In some embodiments, a complex or a heterologous gene effector identified by methods of the disclosure effects a desirable change that is applicable to three or more target genes (e.g., target endogenous genes). In some embodiments, a complex or a heterologous gene effector identified by methods of the disclosure effects a desirable change that is applicable to a class of target genes (e.g., target endogenous genes), for example, genes with overlapping functional roles, that function in the same pathway, or are responsive to similar endogenous stimuli. In some embodiments, a complex or a heterologous gene effector identified by methods of the disclosure effects a desirable change that is broadly applicable to a wide variety of target genes (e.g., target endogenous genes), for example, elicits an expression level that is above or below a certain threshold for multiple target genes when present in a complex with a suitable guide moiety to direct binding to the target gene or a regulatory sequence thereof.

[0372] In some embodiments, a target gene (e.g., target endogenous gene) is a gene that is over-expressed or under-expressed in a disease or condition. In some embodiments, a target gene is a gene that is over-expressed or under-expressed in a heritable genetic disease.

[0373] In some embodiments, a target gene (e.g., target endogenous gene) is a gene that is over-expressed or under-expressed in an autoimmune disease. In some embodiments, a target gene is a gene that is over-expressed or under-expressed in Acute disseminated encephalomyelitis, Acute motor axonal neuropathy, Addison's disease, Adiposis dolorosa, Adult-onset Still's disease, Alopecia areata, Ankylosing Spondylitis, Anti-Glomerular Basement Membrane nephritis, Anti-neutrophil cytoplasmic antibody-associated vasculitis, Anti-N-Methyl-D-Aspartate Receptor Encephalitis, Antiphospholipid syndrome, Antisynthetase syndrome, Aplastic anemia, Autoimmune Angioedema, Autoimmune Encephalitis, Autoimmune enteropathy, Autoimmune hemolytic anemia, Autoimmune hepatitis, Autoimmune inner ear disease, Autoimmune lymphoproliferative syndrome, Autoimmune neutropenia, Autoimmune oophoritis, Autoimmune orchitis, Autoimmune pancreatitis, Autoimmune polyendocrine syndrome, Autoimmune polyendocrine syndrome type 2, Autoimmune polyendocrine syndrome type 3, Autoimmune progesterone dermatitis, Autoimmune retinopathy, Autoimmune thrombocytopenic purpura, Autoimmune thyroiditis, Autoimmune urticaria, Autoimmune uveitis, Balo concentric sclerosis, Behget's disease, Bickerstaffs encephalitis, Bullous pemphigoid, Celiac disease, Chronic fatigue syndrome, Chronic inflammatory demyelinating polyneuropathy, Churg-Strauss syndrome, Cicatricial pemphigoid, Cogan syndrome, Cold agglutinin disease, Complex regional pain syndrome, CREST syndrome, Crohn's disease, Dermatitis herpetiformis, Dermatomyositis, Diabetes mellitus type 1, Discoid lupus erythematosus, Endometriosis, Enthesitis, Enthesitis-related arthritis, Eosinophilic esophagitis, Eosinophilic fasciitis, Epidermolysis bullosa acquisita, Erythema nodosum, Essential mixed cryoglobulinemia, Evans syndrome, Felty syndrome, Fibromyalgia, Gastritis, Gestational pemphigoid, Giant cell arteritis, Goodpasture syndrome, Graves' disease, Graves ophthalmopathy, Guillain-Barre syndrome, Hashimoto's Encephalopathy, Hashimoto Thyroiditis, Henoch-Schonlein purpura, Hidradenitis suppurativa, Idiopathic dilated cardiomyopathy, Idiopathic inflammatory demyelinating diseases, IgA nephropathy, IgG4-related systemic disease, Inclusion body myositis, Inflamatory Bowel Disease (IBD), Intermediate uveitis, Interstitial cystitis, Juvenile Arthritis, Kawasaki's disease, Lambert-Eaton myasthenic syndrome, Leukocytoclastic vasculitis, Lichen planus, Lichen sclerosus, Ligneous conjunctivitis, Linear IgA disease, Lupus nephritis, Lupus vasculitis, Lyme disease, Meniere's disease, Microscopic colitis, Microscopic polyangiitis, Mixed connective tissue disease, Mooren's ulcer, Morphea, Mucha-Habermann disease, Multiple sclerosis, Myasthenia gravis, Myocarditis, Myositis, Neuromyelitis optica, Neuromyotonia, Opsoclonus myoclonus syndrome, Optic neuritis, Ord's thyroiditis, Palindromic rheumatism, Paraneoplastic cerebellar degeneration, Parry Romberg syndrome, Parsonage-Turner syndrome, Pediatric Autoimmune Neuropsychiatric Disorder Associated with Streptococcus, Pemphigus vulgaris, Pernicious anemia, Pityriasis lichenoides et varioliformis acuta, POEMS syndrome, Polyarteritis nodosa, Polymyalgia rheumatica, Polymyositis, Postmyocardial infarction syndrome, Postpericardiotomy syndrome, Primary biliary cirrhosis, Primary immunodeficiency, Primary sclerosing cholangitis, Progressive inflammatory neuropathy, Psoriasis, Psoriatic arthritis, Pure red cell aplasia, Pyoderma gangrenosum, Raynaud's phenomenon, Reactive arthritis, Relapsing polychondritis, Restless leg syndrome, Retroperitoneal fibrosis, Rheumatic fever, Rheumatoid arthritis, Rheumatoid vasculitis, Sarcoidosis, Schnitzler syndrome, Scleroderma, Sjogren's syndrome, Stiff person syndrome, Subacute bacterial endocarditis, Susac's syndrome, Sydenham chorea, Sympathetic ophthalmia, Systemic Lupus Erythematosus, Systemic scleroderma, Thrombocytopenia, Tolosa-Hunt syndrome, Transverse myelitis, Ulcerative colitis, Undifferentiated connective tissue disease, Urticaria, Urticarial vasculitis, Vasculitis, or Vitiligo.

[0374] In some embodiments, a target gene (e.g., target endogenous gene) is a gene that is over-expressed or under-expressed in a cancer, for example, acute leukemia, astrocytomas, biliary cancer (cholangiocarcinoma), bone cancer, breast cancer, brain stem glioma, bronchioloalveolar cell lung cancer, cancer of the adrenal gland, cancer of the anal region, cancer of the bladder, cancer of the endocrine system, cancer of the esophagus, cancer of the head or neck, cancer of the kidney, cancer of the parathyroid gland, cancer of the penis, cancer of the pleural/peritoneal membranes, cancer of the salivary gland, cancer of the small intestine, cancer of the thyroid gland, cancer of the ureter, cancer of the urethra, carcinoma of the cervix, carcinoma of the endometrium, carcinoma of the fallopian tubes, carcinoma of the renal pelvis, carcinoma of the vagina, carcinoma of the vulva, cervical cancer, chronic leukemia, colon cancer, colorectal cancer, cutaneous melanoma, ependymoma, epidermoid tumors, Ewings sarcoma, gastric cancer, glioblastoma, glioblastoma multiforme, glioma, hematologic malignancies, hepatocellular (liver) carcinoma, hepatoma, Hodgkin's Disease, intraocular melanoma, Kaposi sarcoma, lung cancer, lymphomas, medulloblastoma, melanoma, meningioma, mesothelioma, multiple myeloma, muscle cancer, neoplasms of the central nervous system (CNS), neuronal cancer, small cell lung cancer, non-small cell lung cancer, osteosarcoma, ovarian cancer, pancreatic cancer, pediatric malignancies, pituitary adenoma, prostate cancer, rectal cancer, renal cell carcinoma, sarcoma of soft tissue, schwanoma, skin cancer, spinal axis tumors, squamous cell carcinomas, stomach cancer, synovial sarcoma, testicular cancer, uterine cancer, or tumors and their metastases, including refractory versions of any of the above cancers, or a combination thereof.

[0375] In some embodiments, a target gene (e.g., target endogenous gene) is a differentiation-associated gene, for example, SSEA1, SSEA3/4, SSEA5, TRA1-60/81, TRAl-85, TRA2-54, GCTM-2, TG343, TG30, CD9, CD29, CD133/prominin, CD140a, CD56, CD73, CD90, CD105, OCT4, NANOG, SOX2, CD30, CD50, AHR, Aiolos/IKZF3, CDX4, CREB, DNMT3A, DNMT3B, EGR1, Fox03, GATA-1, GATA-2, GATA-3, Helios, HES-1, HHEX, HIF-1 alpha/HIF1A, HMGB1/HMG-1, HMGB3, Ikaros, c-Jun, LMO2, LMO4, c-Maf, MafB, MEF2C, MYB, c-Myc, NFATC2, NFIL3/E4BP4, Nrf2, p53, PITX2, PRDM16/MEL1, Prox1, PU.1/Spi-1, RUNX1/CBFA2, SALL4, SCL/Tall, Smad2, Smad2/3, Smad4, Smad7, Spi-B, STAT Activators, STAT Inhibitors, STAT3, STAT4, STAT5a, STAT6, TSC22, DUX4, DUX4/DUX4c, DUX4c, EBF-1, EBF-2, EBF-3, ETV5, FoxC2, FoxF1, GATA-4, GATA-6, HMGA2, c-Jun, MYF-5, Myocardin, MyoD, Myogenin, NFATC2, p53, Pax3, PDX-1/IPF1, PLZF, PRDM16/MEL1, RUNX2/CBFA1, Smad1, Smad3, Smad4, Smad5, Smad8, Smad9, Snail, SOX2, SOX9, SOX11, STAT Activators, STAT Inhibitors, STAT1, STAT3, TBX18, Twist-1, Twist-2, Brachyury, EOMES, FoxC2, FoxD3, FoxF1, FoxH1, Fox01/FKHR, GATA-2, GATA-3, GBX2, Goosecoid, HES-1, HNF-3 alpha/FoxAl, c-Jun, KLF2, KLF4, KLF5, c-Maf, Max, MEF2C, MIXL1, MTF2, c-Myc, Nanog, NFkB/IkB Activators, NFkB/IkB Inhibitors, NFkB1, NFkB2, Oct-3/4, Otx2, p53, Pax2, Pax6, PRDM14, Rex-1/ZFP42, SALL1, SALL4, Smadi, Smad2, Smad2/3, Smad3, Smad4, Smad5, Smad8, Snail, SOX2, SOX7, SOX15, SOX17, STAT Activators, STAT Inhibitors, STAT3, SUZ12, TBX6, TCF-3/E2A, THAP11, UTF1, WDR5, WT1, ZNF206, ZNF281, KLF2, KLF4, c-Maf, c-Myc, Nanog, Oct-3/4, p53, SOX1, SOX2, SOX3, SOX15, SOX18, TBX18, ASCL2/Mash2, CDX2, DNMT1, ELF3, Ets-1, FoxM1, FoxN1, GATA-6, Hairless, HNF-4 alpha/NR2A1, IRF6, c-Maf, MITF, Miz-1/ZBTB17, MSX1, MSX2, MYB, c-Myc, Neurogenin-3, NFATC1, NKX3.1, Nrf2, p53, p63/TP73L, Pax2, Pax3, RUNX1/CBFA2, RUNX2/CBFA1, RUNX3/CBFA3, Smadi, Smad2, Smad2/3, Smad4, Smad5, Smad7, Smad8, Snail, SOX2, SOX9, STAT Activators, STAT Inhibitors, STAT3, SUZ12, TCF-3/E2A, TCF7/TCF1, Androgen R/NR3C4, AP-2 gamma, beta-Catenin, beta-Catenin Inhibitors, Brachyury, CREB, ER alpha/NR3A1, ER beta/NR3A2, FoxM1, Fox03, FRA-1, GLI-1, GLI-2, GLI-3, HIF-1 alpha/HIF1A, HIF-2 alpha/EPAS1, HMGA1B, c-Jun, JunB, KLF4, c-Maf, MCM2, MCM7, MITF, c-Myc, Nanog, NFkB/IkB Activators, NFkB/IkB Inhibitors, NFkB1, NKX3.1, Oct-3/4, p53, PRDM14, Snail, SOX2, SOX9, STAT Activators, STAT Inhibitors, STAT3, TAZ/WWTR1, TBX3, Twist-1, Twist-2, WTi, or ZEBi.

[0376] In some embodiments, a heterologous gene effector is from a gene product that is a hematopoietic stem cell transcription factor. In some embodiments, a target gene is a mesenchymal stem cell transcription factor. In some embodiments, a target gene is an embryonic stem cell transcription factor. In some embodiments, a target gene is an induced pluripotent stem cell (iPSC) transcription factor. In some embodiments, a target gene is an epithelial stem cell transcription factor. In some embodiments, a target gene is a cancer stem cell transcription factor.

[0377] In some embodiments, a target gene is an age-related gene. In some embodiments, a target gene is a senescence-associated protein. In some embodiments, a target gene is a drug target.

[0378] In some embodiments, a target gene (e.g., target endogenous gene) is a cancer-related gene. Non-limiting examples of cancer-related genes include A1CF, ABIl, ABL1, ABL2, ACKR3, ACSL3, ACSL6, ACVR1, ACVR2A, AFDN, AFF1, AFF3, AFF4, AKAP9, AKT1, AKT2, AKT3, ALDH2, ALK, AMERI, ANK1, APC, APOBEC3B, AR, ARAF, ARHGAP26, ARHGAP5, ARHGEF10, ARHGEF10L, ARHGEF12, ARID1A, ARID1B, ARID2, ARNT, ASPSCR1, ASXL1, ASXL2, ATF1, ATIC, ATM, ATP1A1, ATP2B3, ATR, ATRX, AXIN1, AXIN2, B2M, BAP1, BARD1, BAX, BAZ1A, BCL10, BCL11A, BCL11B, BCL2, BCL2L12, BCL3, BCL6, BCL7A, BCL9, BCL9L, BCLAF1, BCOR, BCORL1, BCR, BIRC3, BIRC6, BLM, BMP5, BMPR1A, BRAF, BRCA1, BRCA2, BRD3, BRD4, BRIP1, BTG1, BTK, BUB1B, C15orf65, CACNAID, CALR, CAMTA1, CANT1, CARD11, CARS, CASP3, CASP8, CASP9, CBFA2T3, CBFB, CBL, CBLB, CBLC, CCDC6, CCNB1IP1, CCNC, CCND1, CCND2, CCND3, CCNE1, CCR4, CCR7, CD209, CD274, CD28, CD74, CD79A, CD79B, CDC73, CDH1, CDH10, CDH11, CDH17, CDK12, CDK4, CDK6, CDKN1A, CDKN1B, CDKN2A, CDKN2C, CDX2, CEBPA, CEP89, CHCHD7, CHD2, CHD4, CHEK2, CHIC2, CHST11, CIC, CIITA, CLIP1, CLP1, CLTC, CLTCL1, CNBD1, CNBP, CNOT3, CNTNAP2, CNTRL, COL1A1, COL2A1, COL3A1, COX6C, CPEB3, CREB1, CREB3L1, CREB3L2, CREBBP, CRLF2, CRNKL1, CRTC1, CRTC3, CSF1R, CSF3R, CSMD3, CTCF, CTNNA2, CTNNB1, CTNND1, CTNND2, CUL3, CUX1, CXCR4, CYLD, CYP2C8, CYSLTR2, DAXX, DCAF12L2, DCC, DCTN1, DDB2, DDIT3, DDR2, DDX10, DDX3X, DDX5, DDX6, DEK, DGCR8, DICERI, DNAJB1, DNM2, DNMT3A, DROSHA, DUX4L1, EBF1, ECT2L, EED, EGFR, EIFIAX, EIF3E, EIF4A2, ELF3, ELF4, ELK4, ELL, ELN, EML4, EP300, EPAS1, EPHA3, EPHA7, EPS15, ERBB2, ERBB3, ERBB4, ERC1, ERCC2, ERCC3, ERCC4, ERCC5, ERG, ESRI, ETNK1, ETV1, ETV4, ETV5, ETV6, EWSR1, EXT1, EXT2, EZH2, EZR, FAM131B, FAM135B, FAM47C, FANCA, FANCC, FANCD2, FANCE, FANCF, FANCG, FAS, FAT1, FAT3, FAT4, FBLN2, FBXO11, FBXW7, FCGR2B, FCRL4, FEN1, FES, FEV, FGFR1, FGFR10P, FGFR2, FGFR3, FGFR4, FH, FHIT, FIP1L1, FKBP9, FLCN, FLIl, FLNA, FLT3, FLT4, FNBP1, FOXA1, FOXL2, FOXO1, FOXO3, FOXO4, FOXP1, FOXR1, FSTL3, FUBP1, FUS, GAS7, GATA1, GATA2, GATA3, GLIl, GMPS, GNA11, GNAQ, GNAS, GOLGA5, GOPC, GPC3, GPC5, GPHN, GRIN2A, GRM3, H3F3A, H3F3B, HERPUD1, HEY1, HIF1A, HIP1, HIST1H3B, HIST1H4I, HLA-A, HLF, HMGA1, HMGA2, HMGN2P46, HNF1A, HNRNPA2B1, HOOK3, HOXA11, HOXA13, HOXA9, HOXC11, HOXC13, HOXD11, HOXD13, HRAS, HSP90AA1, HSP90AB1, ID3, IDH1, IDH2, IGF2BP2, IGH, IGK, IGL, IKBKB, IKZF1, IL2, IL21R, IL6ST, IL7R, IRF4, IRS4, ISX, ITGAV, ITK, JAK1, JAK2, JAK3, JAZF1, JUN, KAT6A, KAT6B, KAT7, KCNJ5, KDM5A, KDM5C, KDM6A, KDR, KDSR, KEAP1, KIAA1549, KIF5B, KIT, KLF4, KLF6, KLK2, KMT2A, KMT2C, KMT2D, KNL1, KNSTRN, KRAS, KTN1, LARP4B, LASP1, LATS1, LATS2, LCK, LCP1, LEF1, LEPROTLI, LHFPL6, LIFR, LMNA, LMO1, LMO2, LPP, LRIG3, LRP1B, LSM14A, LYL1, LZTR1, MACC1, MAF, MAFB, MALATI, MALT1, MAML2, MAP2K1, MAP2K2, MAP2K4, MAP3K1, MAP3K13, MAPK1, MAX, MB21D2, MDM2, MDM4, MDS2, MECOM, MED12, MEN1, MET, MGMT, MITF, MLF1, MLH1, MLLT1, MLLT10, MLLT11, MLLT3, MLLT6, MN1, MNX1, MPL, MRTFA, MSH2, MSH6, MS12, MSN, MTCP1, MTOR, MUC1, MUC16, MUC4, MUTYH, MYB, MYC, MYCL, MYCN, MYD88, MYH11, MYH9, MYO5A, MYOD1, N4BP2, NAB2, NACA, NBEA, NBN, NCKIPSD, NCOA1, NCOA2, NCOA4, NCOR1, NCOR2, NDRG1, NF1, NF2, NFATC2, NFE2L2, NFIB, NFKB2, NFKBIE, NIN, NKX2-1, NONO, NOTCHI, NOTCH2, NPM1, NR4A3, NRAS, NRG1, NSD1, NSD2, NSD3, NT5C2, NTHL1, NTRK1, NTRK3, NUMA1, NUP214, NUP98, NUTM1, NUTM2B, NUTM2D, OLIG2, OMD, P2RY8, PABPC1, PAFAH1B2, PALB2, PATZ1, PAX3, PAX5, PAX7, PAX8, PBRM1, PBX1, PCBP1, PCM1, PDCD1LG2, PDE4DIP, PDGFB, PDGFRA, PDGFRB, PERI, PHF6, PHOX2B, PICALM, PIK3CA, PIK3CB, PIK3R1, PIM1, PLAGI, PLCG1, PML, PMS1, PMS2, POLD1, POLE, POLG, POLQ, POT1, POU2AF1, POU5F1, PPARG, PPFIBP1, PPM1D, PPP2R1A, PPP6C, PRCC, PRDM1, PRDM16, PRDM2, PREX2, PRF1, PRKACA, PRKAR1A, PRKCB, PRPF40B, PRRX1, PSIP1, PTCH1, PTEN, PTK6, PTPN11, PTPN13, PTPN6, PTPRB, PTPRC, PTPRD, PTPRK, PTPRT, PWWP2A, QK1, RABEP1, RAC1, RAD17, RAD21, RAD51B, RAF1, RALGDS, RANBP2, RAP1GDS1, RARA, RB1, RBM10, RBM15, RECQL4, REL, RET, RFWD3, RGPD3, RGS7, RHOA, RHOH, RMI2, RNF213, RNF43, ROBO2, ROS1, RPL10, RPL22, RPL5, RPN1, RSPO2, RSPO3, RUNX1, RUNX1T1, S100A7, SALL4, SBDS, SDC4, SDHA, SDHAF2, SDHB, SDHC, SDHD, 44444, 44445, 44448, SET, SETBP1, SETD1B, SETD2, SETDB1, SF3B1, SFPQ, SFRP4, SGK1, SH2B3, SH3GL1, SHTN1, SIRPA, SIX1, SIX2, SK1, SLC34A2, SLC45A3, SMAD2, SMAD3, SMAD4, SMARCA4, SMARCB1, SMARCD1, SMARCEl, SMC1A, SMO, SND1, SNX29, SOCS1, SOX2, SOX21, SPECC1, SPEN, SPOP, SRC, SRGAP3, SRSF2, SRSF3, SS18, SS18L1, SSX1, SSX2, SSX4, STAG1, STAG2, STAT3, STAT5B, STAT6, STIL, STK11, STRN, SUFU, SUZ12, SYK, TAF15, TAL1, TAL2, TBL1XR1, TBX3, TCEA1, TCF12, TCF3, TCF7L2, TCL1A, TEC, TENT5C, TERT, TET1, TET2, TFE3, TFEB, TFG, TFPT, TFRC, TGFBR2, THRAP3, TLX1, TLX3, TMEM127, TMPRSS2, TNC, TNFAIP3, TNFRSF14, TNFRSF17, TOP1, TP53, TP63, TPM3, TPM4, TPR, TRA, TRAF7, TRB, TRD, TRIM24, TRIM27, TRIM33, TRIP11, TRRAP, TSC1, TSC2, TSHR, U2AF1, UBR5, USP44, USP6, USP8, VAV1, VHL, VTI1A, WAS, WDCP, WIF1, WNK2, WRN, WT1, WWTR1, XPA, XPC, XPO1, YWHAE, ZBTB16, ZCCHC8, ZEB1, ZFHX3, ZMYM2, ZMYM3, ZNF331, ZNF384, ZNF429, ZNF479, ZNF521, ZNRF3, and ZRSR2.

[0379] In some embodiments, a target gene (e.g., target endogenous gene) is an immune cell-related gene, for example, a cytokine, cytokine receptor, chemokine, chemokine receptor, co-inhibitory immune receptor, co-stimulatory immune receptor, immune cell transcription factor, etc.

[0380] In some embodiments, a target gene (e.g., target endogenous gene) is a cytokine, for example, 4-1BBL, APRIL, CD153, CD154, CD178, CD70, G-CSF, GITRL, GM-CSF, IFN-α, IFN-0, IFN-γ, IL-1RA, IL-la, IL-1, IL-2, IL-3, IL-4, IL-5, IL-6, IL-7, IL-9, IL-10, IL-11, IL-12, IL-13, IL-14, IL-15, IL-16, IL-17, IL-18, IL-20, IL-23, LIF, LIGHT, LT-0, M-CSF, MSP, OSM, OX40L, SCF, TALL-1, TGF-0, TGF-01, TGF-02, TGF-03, TNF-α, TNF-0, TRAIL, TRANCE, or TWEAK.

[0381] In some embodiments, a target gene (e.g., target endogenous gene) is a cytokine receptor, for example, A common gamma chain receptor, a common beta chain receptor, an interferon receptor, a TNF family receptor, a TGF-B receptor, Apo3, BCMA, CD114, CD115, CD116, CD117, CD118, CD120, CD120a, CD120b, CD121, CD121a, CD121b, CD122, CD123, CD124, CD126, CD127, CD130, CD131, CD132, CD212, CD213, CD213al, CD213a13, CD213a2, CD25, CD27, CD30, CD4, CD40, CD95 (Fas), CDwl19, CDwl21b, CDwl25, CDwl31, CDwl36, CDwl37 (41BB), CDw210, CDw217, GITR, HVEM, IL-11R, IL-11Ra, IL-14R, IL-15R, IL-15Ra, IL-18R, IL-18Ra, IL-18RO, IL-20R, IL-20Ra, IL-20RO, IL-9R, LIFR, LTOR, OPG, OSMR, OX40, RANK, TACI, TGF-OR1, TGF-OR2, TGF-OR3, TRAILRI, TRAILR2, TRAILR3, or TRAILR4.

[0382] In some embodiments, a target gene (e.g., target endogenous gene) is a chemokine, for example, ACT-2, AMAC-a, ATAC, ATAC, BLC, CCL1, CCL11, CCL13, CCL14, CCL15, CCL16, CCL17, CCL18, CCL19, CCL2, CCL20, CCL21, CCL22, CCL23, CCL24, CCL25, CCL26, CCL27, CCL3, CCL4, CCL5, CCL7, CCL8, CKb-6, CKb-8, CTACK, CX3CL1, CXCL1, CXCL10, CXCL11, CXCL12, CXCL13, CXCL14, CXCL2, CXCL3, CXCL4, CXCL5, CXCL6, CXCL7, CXCL8, CXCL9, DC-CK1, ELC, ENA-78, eotaxin, eotaxin-2, eotaxin-3, Eskine, exodus-1, exodus-2, exodus-3, fractalkine, GCP-2, GROa, GROb, GROg, HCC-i, HCC-2, HCC-4, 1-309, IL-8, ILC, IP-10, I-TAC, LAG-1, LARC, LCC-1, LD78u, LEC, Lkn-1, LMC, lymphoactin, lymphoactin b, MCAF, MCP-1, MCP-2, MCP-3, MCP-4, MDC, MDNCF, MGSA-a, MGSA-b, MGSA-g, Mig, MIP-1d, MIP-1a, MIP-10, MIP-2a, MIP-2b, MIP-3, MIP-3u, MIP-33, MIP-4, MIP-4a, MIP-5, MPIF-i, MPIF-2, NAF, NAP-1, NAP-2, oncostatin, PARC, PF4, PPBP, RANTES, SCM-la, SCM-lb, SDF-1α/β—, SLC, STCP-1, TARC, TECK, XCL1, or XCL2.

[0383] In some embodiments, a target gene (e.g., target endogenous gene) is a chemokine receptor, for example, CCRI, CCR2, CCR3, CCR4, CCR5, CCR6, CCR7, CCR8, CCR9, CCR10, CX3CR1, CXCR1, CXCR2, CXCR3, CXCR4, CXCR5, XCRI, or XCR1.

[0384] In some embodiments, a target gene (e.g., target endogenous gene) is an activating NK receptor, for example, CD100 (SEMA4D), CD16 (FcgRIIIA), CD160 (BY55), CD244 (2B4, SLAMF4), CD27, CD94—NKG2C, CD94—NKG2E, CD94-NKG2H, CD96, CRTAM, DAP12, DNAM1 (CD226), KIR2DL4, KIR2DS1, KIR2DS2, KIR2DS3, KIR2DS4, KIR2DS5, KIR3DS1, Ly49, NCR, NKG2D (KLRK1, CD314), NKp30 (NCR3), NKp44 (NCR2), NKp46 (NCR1), NKp80 (KLRF1, CLEC5C), NTB-A (SLAMF6), PSGL1, or SLAMF7 (CRACC, CS1, CD319).

[0385] In some embodiments, a target gene (e.g., target endogenous gene) is an inhibitory NK receptor, for example, CD161 (NKR-PiA, NK1.1), CD94-NKG2A, CD96, CEACAM1, KIR2DL1, KIR2DL2, KIR2DL3, KIR2DL4, KIR2DL5A, KIR2DL5B, KIR3DL1, KIR3DL2, KIR3DL3, KLRG1, LAIR1, LIR1 (ILT2, LILRB1), Ly49a, Ly49b, NKR-P1A (KLRB1), SIGLEC-10, SIGLEC-11, SIGLEC-14, SIGLEC-16, SIGLEC-3 (CD33), SIGLEC-5 (CD170), SIGLEC-6 (CD327), SIGLEC-7 (CD328), SIGLEC-8, SIGLEC-9 (CD329), SIGLEC-E, SIGLEC-F, SIGLEC-G, SIGLEC-H, or TIGIT.

[0386] In some embodiments, a target gene (e.g., target endogenous gene) is a co-inhibitory immune receptor, for example, 2B4, B7-1, BTLA, CD160, CTLA-4, DR6, Fas, LAG3, LAIR1, Ly108, PD-1, PD-L1, PD1H, TIGIT, TIM1, TIM2, or TIM3.

[0387] In some embodiments, a target gene (e.g., target endogenous gene) is co-stimulatory immune receptor, for example, 2B4, 4-1BB, CD2, CD4, CD8, CD21, CD27, CD28, CD30, CD40, CD84, CD226, CD355, CRACC, DcR3, DR3, GITR, HVEM, ICOS, Ly9, Ly108, LIGHT, LTOR, OX40, SLAM, TIM1, or TIM2.

[0388] In some embodiments, a target gene (e.g., target endogenous gene) is itself a gene effector, such as any of the gene effectors disclosed herein (e.g., a transcription factor disclosed herein).

[0389] In some embodiments, a target gene (e.g., target endogenous gene) is an immune cell transcription factor, for example, AP-1, Bcl6, E2A, EBF, Eomes, FoxP3, GATA3, Id2, Ikaros, IRF, IRF1, IRF2, IRF3, IRF3, IRF7, NFAT, NFkB, Pax5, PLZF, PU.1, ROR-gamma-T, STAT, STAT1, STAT2, STAT3, STAT4, STAT5, STAT5A, STAT5B, STAT6, T-bet, TCF7, or ThPOK.

[0390] In some embodiments, a target gene is a kinase, for example, a tyrosine kinase, or serine/threonine kinase. In some embodiments, a target gene is a phosphatase, for example, a tyrosine phosphatase, or serine/threonine phosphatase.

[0391] In some embodiments, a target gene is a receptor. In some embodiments, a target gene is an ion channel. In some embodiments, a target gene is a GPCR. In some embodiments, a target gene is a receptor tyrosine kinase. In some embodiments, a target gene is a ribosomal protein. In some embodiments, a target gene is a membrane protein. In some embodiments, a target gene is a cytoplasmic protein. In some embodiments, a target gene is a nuclear protein. In some embodiments, a target gene is a mitochondrial protein. In some embodiments, a target gene is a ubiquitin ligase. In some embodiments, a target gene is a methyltransferase. In some embodiments, a target gene is a glycosyltransferase. In some embodiments, a target gene is a hydrolase.

[0392] In some embodiments, CD45 is a target gene used in compositions and methods of the disclosure (e.g., for gene expression activation screens). In some embodiments, CD45 is not used as a target gene. Compositions and methods disclosed herein to identify complexes that modulate CD45 expression can similarly be modified and adapted to other target genes (e.g., target endogenous genes), including those disclosed herein.

[0393] In some embodiments, CD71 is a target gene used in compositions and methods of the disclosure (e.g., for gene expression reduction screens). In some embodiments, CD71 is not used as a target gene. Compositions and methods disclosed herein to identify complexes that modulate CD71 expression can similarly be modified and adapted to other target genes (e.g., target endogenous genes), including those disclosed herein.

### Libraries

[0394] Disclosed herein, in some aspects, are libraries of complexes. Libraries of the disclosure can be useful in screening assays to identify heterologous gene effectors, combinations thereof, and complexes containing the same that elicit desirable changes in expression and/or activity levels of target genes (e.g., target endogenous genes). Libraries of the disclosure can be assayed using methods disclosed herein in various cell types from various sources to identify heterologous gene effectors, combinations thereof, and complexes containing the same that are capable of eliciting the desirable changes in expression and/or activity levels of target gene(s) (e.g., target endogenous gene(s)) in the cell type of interest, for example, in cells from a certain subject, a particular tissue or lineage, a subject with a given disease or condition, etc.

[0395] Complexes that are members of a library can share a common attribute, such as sharing the same guide moiety, guide nucleic acid, source of heterologous gene effectors that are present in the library, class of target genes, etc. In some embodiments, where a library comprises complexes with two or more heterologous gene effectors per complex, one of the heterologous gene effectors can share a common attribute with other members of the library, while the other may not share a common attribute. In some embodiments, where a library comprises complexes with two or more heterologous gene effectors per complex, one of the heterologous gene effectors can share a first common attribute with other members of the library, and the second heterologous gene effector can share a second common attribute with other members of the library. In some embodiments, a library is designed without a common attribute amongst heterologous gene effectors, e.g., an unbiased library.

[0396] In some embodiments, a library of complexes comprises heterologous gene effectors from human sources. In some embodiments, a library of complexes comprises heterologous gene effectors from viral sources. In some embodiments, a library of complexes comprises heterologous gene effectors from other sources disclosed herein.

[0397] In some embodiments, a library of complexes comprises heterologous gene effectors from a particular source, for example, each of the heterologous gene effectors can be derived from a human protein, a viral protein, a mammalian protein, a protein that primarily localizes to the nucleus, a chromatin regulator, a factor that facilitates heterochromatin formation, a factor that modulates histones through methylation, a factor that modulates histones through acetylation, a factor that modulates histones through phosphorylation, a factor that modulates histones through ADP-ribosylation, a factor that modulates histones through glycosylation, a factor that modulates histones through SUMOylation, a factor that modulates histones through ubiquitination, a factor that modulates histones by remodeling histone structure, e.g., via an ATP hydrolysis-dependent process, a histone acetyltransferase, a histone lysine methyltransferase, a component of a chromatin remodeling complex, a transcriptional regulator, a transcriptional activator, a transcriptional repressor domain, a transcription factor, a mesenchymal stem cell transcription factor, an embryonic stem cell transcription factor, an induced pluripotent stem cell (iPSC) transcription factor, an epithelial stem cell transcription factor, a cancer stem cell transcription factor, a cancer-related transcription factor, an immune cell transcription factor, a nuclear receptor, a nuclear hormone receptor, a validated human virus transcriptional regulator, a factor from a genome of a virus (e.g., from a virus family, subfamily, genus, species etc. disclosed herein), a factor from a genome of a virus that is capable of zoonotic transmission to humans, a factor from a shared human/bat virus, a factor from a viral genome from a metagenomic survey, a factor from a virus found in the human gut, a factor from a virus found in extreme environments, a factor from a virus or protein class with a high degree of documented transcriptional regulator modularity, or another source disclosed herein.

[0398] In some embodiments, a library of complexes comprises heterologous gene effectors from a combination of sources from, e.g., any two or more of a human protein, a viral protein, a mammalian protein, a protein that primarily localizes to the nucleus, a chromatin regulator, a factor that facilitates heterochromatin formation, a factor that modulates histones through methylation, a factor that modulates histones through acetylation, a factor that modulates histones through phosphorylation, a factor that modulates histones through ADP-ribosylation, a factor that modulates histones through glycosylation, a factor that modulates histones through SUMOylation, a factor that modulates histones through ubiquitination, a factor that modulates histones by remodeling histone structure, e.g., via an ATP hydrolysis-dependent process, a histone acetyltransferase, a histone lysine methyltransferase, a component of a chromatin remodeling complex, a transcriptional regulator, a transcriptional activator, a transcriptional repressor domain, a transcription factor, a mesenchymal stem cell transcription factor, an embryonic stem cell transcription factor, an induced pluripotent stem cell (iPSC) transcription factor, an epithelial stem cell transcription factor, a cancer stem cell transcription factor, a cancer-related transcription factor, an immune cell transcription factor, a nuclear receptor, a nuclear hormone receptor, a validated human virus transcriptional regulator, a factor from a genome of a virus (e.g., from a virus family, subfamily, genus, species etc. disclosed herein), a factor from a genome of a virus that is capable of zoonotic transmission to humans, a factor from a shared human/bat virus, a factor from a viral genome from a metagenomic survey, a factor from a virus found in the human gut, a factor from a virus found in extreme environments, a factor from a virus or protein class with a high degree of documented transcriptional regulator modularity, or another source disclosed herein.

[0399] In some embodiments, a library of complexes comprises heterologous gene effectors from a particular subcellular localization, for example, factors that are capable of localizing or primarily localize to the nucleus of cells.

[0400] In some embodiments, an individual complex of a library comprises (i) a heterologous gene effector that is different from heterologous gene effectors in other complexes of the library; and (ii) a guide nucleic acid sequence that exhibits 100% sequence identity to guide nucleic acid sequences in the other complexes of the library.

[0401] In some embodiments, different individual complexes of a library comprise guide nucleic acids with at least 80%, at least 81%, at least 82%, at least 83%, at least 84%, at least 85%, at least 86%, at least 87%, at least 88%, at least 89%, at least 90%, at least 91%, at least 92%, at least 93%, at least 94%, at least 95%, at least 96%, at least 97%, at least 98%, at least 99%, or 100% sequence identity to guide nucleic acid sequences in the other complexes of the library. In some cases, even if the guide nucleic acid molecules (e.g., sgRNAs) in the library disclosed herein do not exhibit 100% sequence identity to each other (e.g., between about 80% and 99% sequence identity among each other), the guide nucleic acid molecules may be capable of binding and complexing with the same target gene (e.g., the same target polynucleotide sequence, such as the same genomic sequence).

[0402] In some embodiments, an individual complexes of a library comprises (i) a heterologous gene effector that is different to heterologous gene effectors present in other individual complexes in the library; (ii) a guide moiety (e.g., comprising a guide nucleic acid sequence) that is similar to or the same as other individual complexes in the library, for example, the same for all individual complexes in the library. In some embodiments, the guide moiety comprises a nuclease as disclosed herein, for example, an endonuclease that is heterologous with respect to the gene effector. The nuclease can be a nuclease-deficient or nuclease-dead nuclease of the disclosure. The nuclease can exhibit 100% sequence identity to heterologous nuclease of other complexes (e.g., all other complexes) in the library.

[0403] In some embodiments, an individual complexes of a library comprises (i) a first heterologous gene effector that is different to heterologous gene effectors present in other individual complexes in the library; (ii) a second heterologous gene effector that is the same as heterologous gene effectors present in other individual complexes in the library; and (iii) a guide moiety that is the same as other individual complexes in the library, for example, the same for all individual complexes in the library. The guide moiety can be or can comprise a guide nucleic acid that exhibits 100% identity to other (e.g., all) other individual complexes in the library. The guide moiety can comprise a nuclease (e.g., a heterologous endonuclease) that exhibits 100% sequence identity to heterologous nuclease of other complexes (e.g., all other complexes) in the library.

[0404] In some embodiments, an individual complexes of a library comprises (i) a first heterologous gene effector that is different to heterologous gene effectors present in other individual complexes in the library; (ii) a second heterologous gene effector that is the same as heterologous gene effectors present in other individual complexes in the library; (iii) a third heterologous gene effector that is the same as heterologous gene effectors present in other individual complexes in the library; and (iv) a guide moiety that is the same as other individual complexes in the library, for example, the same for all individual complexes in the library. The guide moiety can be or can comprise a guide nucleic acid that exhibits 100% identity to other (e.g., all other individual complexes) in the library. The guide moiety can comprise a nuclease (e.g., a heterologous endonuclease) that exhibits 100% sequence identity to heterologous nuclease of other complexes (e.g., all other complexes) in the library.

[0405] In some embodiments, an individual complexes of a library comprises (i) a first heterologous gene effector that is different to heterologous gene effectors present in other individual complexes in the library; (ii) a second heterologous gene effector that is different to heterologous gene effectors present in other individual complexes in the library; (iii) a third heterologous gene effector that is the same as heterologous gene effectors present in other individual complexes in the library; and (iv) a guide moiety that is the same as other individual complexes in the library, for example, the same for all individual complexes in the library. The guide moiety can be or can comprise a guide nucleic acid that exhibits 100% identity to other (e.g., all other individual complexes) in the library. The guide moiety can comprise a nuclease (e.g., a heterologous endonuclease) that exhibits 100% sequence identity to heterologous nuclease of other complexes (e.g., all other complexes) in the library.

[0406] In some embodiments, an individual complexes of a library comprises (i) a first heterologous gene effector that is different to heterologous gene effectors present in other individual complexes in the library; (ii) a second heterologous gene effector that is different to heterologous gene effectors present in other individual complexes in the library and the same as yet other individual complexes in the library; (iii) a third heterologous gene effector that is the same as heterologous gene effectors present in other individual complexes in the library; and (iv) a guide moiety that is the same as other individual complexes in the library, for example, the same for all individual complexes in the library. The guide moiety can be or can comprise a guide nucleic acid that exhibits 100% identity to other (e.g., all other) individual complexes in the library). The guide moiety can comprise a nuclease (e.g., a heterologous endonuclease) that exhibits 100% sequence identity to heterologous nuclease of other complexes (e.g., all other complexes) in the library.

[0407] In some embodiments, an individual complexes of a library comprises (i) a first heterologous gene effector that is different to heterologous gene effectors present in other individual complexes in the library; (ii) a second heterologous gene effector that is different to heterologous gene effectors present in other individual complexes in the library and the same as yet other individual complexes in the library; (iii) a third heterologous gene effector that is different to heterologous gene effectors present in other individual complexes in the library; and (iv) a guide moiety that is the same as other individual complexes in the library, for example, the same for all individual complexes in the library. The guide moiety can be or can comprise a guide nucleic acid that exhibits 100% identity to other (e.g., all other) individual complexes in the library). The guide moiety can comprise a nuclease (e.g., a heterologous endonuclease) that exhibits 100% sequence identity to heterologous nuclease of other complexes (e.g., all other complexes) in the library.

[0408] In some embodiments, an individual complexes of a library comprises (i) a heterologous gene effector that is different to heterologous gene effectors present in other individual complexes in the library; and (ii) a guide moiety (e.g., comprising a guide nucleic acid sequence) that is different to other individual complexes in the library. The guide moiety can comprise a guide nucleic acid sequence that is different to guide sequences present in other individual complexes in the library. The guide moiety can comprise a nuclease (e.g., a heterologous endonuclease) that exhibits 100% sequence identity to heterologous nuclease of other complexes (e.g., all other complexes) in the library. The guide moiety can comprise a nuclease (e.g., a heterologous endonuclease) that is different to other individual complexes in the library.

[0409] In some embodiments, individual complexes of a library (e.g., that comprise different heterologous gene effectors) specifically bind to the same target gene (e.g., target endogenous gene) or target gene regulatory sequence. In some embodiments, individual complexes of a library (e.g., that comprise the same and/or different heterologous gene effectors) specifically bind to different parts (e.g., subsequences) of a target gene or target gene regulatory sequence. In some embodiments, individual complexes of a library (e.g., that comprise the same and/or different heterologous gene effectors) specifically bind to different target gene regulatory sequences, each of which is capable of regulating expression of the same gene. In some embodiments, individual complexes of a library (e.g., that comprise the same and/or different heterologous gene effectors) specifically bind to different target genes (e.g., target endogenous genes) or target gene regulatory sequences.

[0410] A library of the disclosure can comprise, consist essentially of, or consist of any suitable number of different complexes for the intended purpose of the library. In some embodiments, “different complexes”, “individual complexes”, or “different individual complexes” can refer to members of the library that differ in composition from each other, for example, comprise different heterologous gene effectors (or combinations of heterologous gene effectors) compared to each other. In such cases multiple copies of the “different complexes”, “individual complexes”, or “different individual complexes” can be present in the library, and multiple copies of the same complex are not “different complexes”, “individual complexes”, or “different individual complexes”. For example, in a library can comprise 5 different complexes, each of which contains a different heterologous gene effector, and 100 copies of each complex can be present in the library, resulting in a library with 500 molecular complexes but only 5 “different complexes”.

[0411] In some embodiments, a library of the disclosure comprises at least 5, at least 10, at least 15, at least 20, at least 25, at least 30, at least 35, at least 40, at least 45, at least 50, at least 60, at least 70, at least 80, at least 90, at least 100, at least 110, at least 120, at least 130, at least 140, at least 150, at least 160, at least 170, at least 180, at least 190, at least 200, at least 250, at least 300, at least 350, at least 400, at least 450, at least 500, at least 550, at least 600, at least 650, at least 700, at least 750, at least 800, at least 850, at least 900, at least 950, at least 1000, at least 1100, at least 1200, at least 1300, at least 1400, at least 1500, at least 1600, at least 1700, at least 1800, at least 1900, at least 2000, at least 2500, at least 3000, at least 3500, at least 4000, at least 4500, at least 5000, at least 5500, at least 6000, at least 6500, at least 7000, at least 7500, at least 8000, at least 8500, at least 9000, at least 9500, at least 10000, at least 10500, at least 11000, at least 11500, at least 12000, at least 12500, at least 13000, at least 13500, at least 14000, at least 14500, at least 15000, at least 15500, at least 16000, at least 16500, at least 17000, at least 17500, at least 18000, at least 18500, at least 19000, at least 19500, at least 20000, at least 20500, at least 21000, at least 21500, at least 22000, at least 22500, at least 23000, at least 23500, at least 24000, at least 24500, at least 25000, at least 25500, at least 26000, at least 26500, at least 27000, at least 27500, at least 28000, at least 28500, at least 29000, at least 29500, at least 30000, at least 35000, at least 40000, at least 45000, at least 50000, at least 60000, at least 70000, at least 80000, at least 90000, or at least 100000 different complexes.

[0412] In some embodiments, a library of the disclosure comprises at least 25 different complexes. In some embodiments, a library of the disclosure comprises at least 100 different complexes. In some embodiments, a library of the disclosure comprises at least 500 different complexes. In some embodiments, a library of the disclosure comprises at least 1000 different complexes. In some embodiments, a library of the disclosure comprises at least 15000 different complexes. In some embodiments, a library of the disclosure comprises at least 25000 different complexes.

[0413] In some embodiments, a library of the disclosure comprises at most 5, at most 10, at most 15, at most 20, at most 25, at most 30, at most 35, at most 40, at most 45, at most 50, at most 60, at most 70, at most 80, at most 90, at most 100, at most 110, at most 120, at most 130, at most 140, at most 150, at most 160, at most 170, at most 180, at most 190, at most 200, at most 250, at most 300, at most 350, at most 400, at most 450, at most 500, at most 550, at most 600, at most 650, at most 700, at most 750, at most 800, at most 850, at most 900, at most 950, at most 1000, at most 1100, at most 1200, at most 1300, at most 1400, at most 1500, at most 1600, at most 1700, at most 1800, at most 1900, at most 2000, at most 2500, at most 3000, at most 3500, at most 4000, at most 4500, at most 5000, at most 5500, at most 6000, at most 6500, at most 7000, at most 7500, at most 8000, at most 8500, at most 9000, at most 9500, at most 10000, at most 10500, at most 11000, at most 11500, at most 12000, at most 12500, at most 13000, at most 13500, at most 14000, at most 14500, at most 15000, at most 15500, at most 16000, at most 16500, at most 17000, at most 17500, at most 18000, at most 18500, at most 19000, at most 19500, at most 20000, at most 20500, at most 21000, at most 21500, at most 22000, at most 22500, at most 23000, at most 23500, at most 24000, at most 24500, at most 25000, at most 25500, at most 26000, at most 26500, at most 27000, at most 27500, at most 28000, at most 28500, at most 29000, at most 29500, at most 30000, at most 35000, at most 40000, at most 45000, at most 50000, at most 60000, at most 70000, at most 80000, at most 90000, or at most 100000 different complexes.

[0414] In some embodiments, a library of the disclosure comprises at most 100000 different complexes. In some embodiments, a library of the disclosure comprises at most 50000 different complexes. In some embodiments, a library of the disclosure comprises at most 30000 different complexes. In some embodiments, a library of the disclosure comprises at most 20000 different complexes.

[0415] In some embodiments, a library of the disclosure comprises at least 25 different complexes and at most 100, at most 110, at most 120, at most 130, at most 140, at most 150, at most 160, at most 170, at most 180, at most 190, at most 200, at most 250, at most 300, at most 350, at most 400, at most 450, at most 500, at most 550, at most 600, at most 650, at most 700, at most 750, at most 800, at most 850, at most 900, at most 950, at most 1000, at most 1100, at most 1200, at most 1300, at most 1400, at most 1500, at most 1600, at most 1700, at most 1800, at most 1900, at most 2000, at most 2500, at most 3000, at most 3500, at most 4000, at most 4500, at most 5000, at most 5500, at most 6000, at most 6500, at most 7000, at most 7500, at most 8000, at most 8500, at most 9000, at most 9500, at most 10000, at most 10500, at most 11000, at most 11500, at most 12000, at most 12500, at most 13000, at most 13500, at most 14000, at most 14500, at most 15000, at most 15500, at most 16000, at most 16500, at most 17000, at most 17500, at most 18000, at most 18500, at most 19000, at most 19500, at most 20000, at most 20500, at most 21000, at most 21500, at most 22000, at most 22500, at most 23000, at most 23500, at most 24000, at most 24500, at most 25000, at most 25500, at most 26000, at most 26500, at most 27000, at most 27500, at most 28000, at most 28500, at most 29000, at most 29500, at most 30000, at most 35000, at most 40000, at most 45000, at most 50000, at most 60000, at most 70000, at most 80000, at most 90000, or at most 100000 different complexes.

[0416] In some embodiments, a library of the disclosure comprises at least 100 different complexes and at most 100, at most 110, at most 120, at most 130, at most 140, at most 150, at most 160, at most 170, at most 180, at most 190, at most 200, at most 250, at most 300, at most 350, at most 400, at most 450, at most 500, at most 550, at most 600, at most 650, at most 700, at most 750, at most 800, at most 850, at most 900, at most 950, at most 1000, at most 1100, at most 1200, at most 1300, at most 1400, at most 1500, at most 1600, at most 1700, at most 1800, at most 1900, at most 2000, at most 2500, at most 3000, at most 3500, at most 4000, at most 4500, at most 5000, at most 5500, at most 6000, at most 6500, at most 7000, at most 7500, at most 8000, at most 8500, at most 9000, at most 9500, at most 10000, at most 10500, at most 11000, at most 11500, at most 12000, at most 12500, at most 13000, at most 13500, at most 14000, at most 14500, at most 15000, at most 15500, at most 16000, at most 16500, at most 17000, at most 17500, at most 18000, at most 18500, at most 19000, at most 19500, at most 20000, at most 20500, at most 21000, at most 21500, at most 22000, at most 22500, at most 23000, at most 23500, at most 24000, at most 24500, at most 25000, at most 25500, at most 26000, at most 26500, at most 27000, at most 27500, at most 28000, at most 28500, at most 29000, at most 29500, at most 30000, at most 35000, at most 40000, at most 45000, at most 50000, at most 60000, at most 70000, at most 80000, at most 90000, or at most 100000 different complexes.

[0417] In some embodiments, a library of the disclosure comprises at least 500 different complexes and at most 100, at most 110, at most 120, at most 130, at most 140, at most 150, at most 160, at most 170, at most 180, at most 190, at most 200, at most 250, at most 300, at most 350, at most 400, at most 450, at most 500, at most 550, at most 600, at most 650, at most 700, at most 750, at most 800, at most 850, at most 900, at most 950, at most 1000, at most 1100, at most 1200, at most 1300, at most 1400, at most 1500, at most 1600, at most 1700, at most 1800, at most 1900, at most 2000, at most 2500, at most 3000, at most 3500, at most 4000, at most 4500, at most 5000, at most 5500, at most 6000, at most 6500, at most 7000, at most 7500, at most 8000, at most 8500, at most 9000, at most 9500, at most 10000, at most 10500, at most 11000, at most 11500, at most 12000, at most 12500, at most 13000, at most 13500, at most 14000, at most 14500, at most 15000, at most 15500, at most 16000, at most 16500, at most 17000, at most 17500, at most 18000, at most 18500, at most 19000, at most 19500, at most 20000, at most 20500, at most 21000, at most 21500, at most 22000, at most 22500, at most 23000, at most 23500, at most 24000, at most 24500, at most 25000, at most 25500, at most 26000, at most 26500, at most 27000, at most 27500, at most 28000, at most 28500, at most 29000, at most 29500, at most 30000, at most 35000, at most 40000, at most 45000, at most 50000, at most 60000, at most 70000, at most 80000, at most 90000, or at most 100000 different complexes.

[0418] In some embodiments, a library of the disclosure comprises at least 1000 different complexes and at most 100, at most 110, at most 120, at most 130, at most 140, at most 150, at most 160, at most 170, at most 180, at most 190, at most 200, at most 250, at most 300, at most 350, at most 400, at most 450, at most 500, at most 550, at most 600, at most 650, at most 700, at most 750, at most 800, at most 850, at most 900, at most 950, at most 1000, at most 1100, at most 1200, at most 1300, at most 1400, at most 1500, at most 1600, at most 1700, at most 1800, at most 1900, at most 2000, at most 2500, at most 3000, at most 3500, at most 4000, at most 4500, at most 5000, at most 5500, at most 6000, at most 6500, at most 7000, at most 7500, at most 8000, at most 8500, at most 9000, at most 9500, at most 10000, at most 10500, at most 11000, at most 11500, at most 12000, at most 12500, at most 13000, at most 13500, at most 14000, at most 14500, at most 15000, at most 15500, at most 16000, at most 16500, at most 17000, at most 17500, at most 18000, at most 18500, at most 19000, at most 19500, at most 20000, at most 20500, at most 21000, at most 21500, at most 22000, at most 22500, at most 23000, at most 23500, at most 24000, at most 24500, at most 25000, at most 25500, at most 26000, at most 26500, at most 27000, at most 27500, at most 28000, at most 28500, at most 29000, at most 29500, at most 30000, at most 35000, at most 40000, at most 45000, at most 50000, at most 60000, at most 70000, at most 80000, at most 90000, or at most 100000 different complexes.

[0419] In some embodiments, a library of the disclosure comprises at least 5000 different complexes and at most 100, at most 110, at most 120, at most 130, at most 140, at most 150, at most 160, at most 170, at most 180, at most 190, at most 200, at most 250, at most 300, at most 350, at most 400, at most 450, at most 500, at most 550, at most 600, at most 650, at most 700, at most 750, at most 800, at most 850, at most 900, at most 950, at most 1000, at most 1100, at most 1200, at most 1300, at most 1400, at most 1500, at most 1600, at most 1700, at most 1800, at most 1900, at most 2000, at most 2500, at most 3000, at most 3500, at most 4000, at most 4500, at most 5000, at most 5500, at most 6000, at most 6500, at most 7000, at most 7500, at most 8000, at most 8500, at most 9000, at most 9500, at most 10000, at most 10500, at most 11000, at most 11500, at most 12000, at most 12500, at most 13000, at most 13500, at most 14000, at most 14500, at most 15000, at most 15500, at most 16000, at most 16500, at most 17000, at most 17500, at most 18000, at most 18500, at most 19000, at most 19500, at most 20000, at most 20500, at most 21000, at most 21500, at most 22000, at most 22500, at most 23000, at most 23500, at most 24000, at most 24500, at most 25000, at most 25500, at most 26000, at most 26500, at most 27000, at most 27500, at most 28000, at most 28500, at most 29000, at most 29500, at most 30000, at most 35000, at most 40000, at most 45000, at most 50000, at most 60000, at most 70000, at most 80000, at most 90000, or at most 100000 different complexes.

[0420] In some embodiments, a library of the disclosure comprises at least 10000 different complexes and at most 100, at most 110, at most 120, at most 130, at most 140, at most 150, at most 160, at most 170, at most 180, at most 190, at most 200, at most 250, at most 300, at most 350, at most 400, at most 450, at most 500, at most 550, at most 600, at most 650, at most 700, at most 750, at most 800, at most 850, at most 900, at most 950, at most 1000, at most 1100, at most 1200, at most 1300, at most 1400, at most 1500, at most 1600, at most 1700, at most 1800, at most 1900, at most 2000, at most 2500, at most 3000, at most 3500, at most 4000, at most 4500, at most 5000, at most 5500, at most 6000, at most 6500, at most 7000, at most 7500, at most 8000, at most 8500, at most 9000, at most 9500, at most 10000, at most 10500, at most 11000, at most 11500, at most 12000, at most 12500, at most 13000, at most 13500, at most 14000, at most 14500, at most 15000, at most 15500, at most 16000, at most 16500, at most 17000, at most 17500, at most 18000, at most 18500, at most 19000, at most 19500, at most 20000, at most 20500, at most 21000, at most 21500, at most 22000, at most 22500, at most 23000, at most 23500, at most 24000, at most 24500, at most 25000, at most 25500, at most 26000, at most 26500, at most 27000, at most 27500, at most 28000, at most 28500, at most 29000, at most 29500, at most 30000, at most 35000, at most 40000, at most 45000, at most 50000, at most 60000, at most 70000, at most 80000, at most 90000, or at most 100000 different complexes.

[0421] In some embodiments, a library of the disclosure comprises about 5, about 10, about 15, about 20, about 25, about 30, about 35, about 40, about 45, about 50, about 60, about 70, about 80, about 90, about 100, about 110, about 120, about 130, about 140, about 150, about 160, about 170, about 180, about 190, about 200, about 250, about 300, about 350, about 400, about 450, about 500, about 550, about 600, about 650, about 700, about 750, about 800, about 850, about 900, about 950, about 1000, about 1100, about 1200, about 1300, about 1400, about 1500, about 1600, about 1700, about 1800, about 1900, about 2000, about 2500, about 3000, about 3500, about 4000, about 4500, about 5000, about 5500, about 6000, about 6500, about 7000, about 7500, about 8000, about 8500, about 9000, about 9500, about 10000, about 10500, about 11000, about 11500, about 12000, about 12500, about 13000, about 13500, about 14000, about 14500, about 15000, about 15500, about 16000, about 16500, about 17000, about 17500, about 18000, about 18500, about 19000, about 19500, about 20000, about 20500, about 21000, about 21500, about 22000, about 22500, about 23000, about 23500, about 24000, about 24500, about 25000, about 25500, about 26000, about 26500, about 27000, about 27500, about 28000, about 28500, about 29000, about 29500, about 30000, about 35000, about 40000, about 45000, about 50000, about 60000, about 70000, about 80000, about 90000, or about 100000 different complexes.

[0422] In some embodiments, a library of the disclosure comprises about 10000 different complexes. In some embodiments, a library of the disclosure comprises about 16000 different complexes. In some embodiments, a library of the disclosure comprises about 28000 different complexes.

### Cells

[0423] Compositions, methods, and systems of the disclosure can be applied to cells of various types, and populations thereof. For example, a complex of the disclosure can be used to elicit changes in the expression or activity level of a target gene (e.g., target endogenous gene) in cells of a particular type, or populations thereof. Methods of the disclosure can be used to identify complexes that are capable of eliciting changes in the expression or activity of target genes (e.g., target endogenous genes) in cells of a particular type, or populations thereof.

[0424] In some embodiments, a complex or a heterologous gene effector identified by methods of the disclosure effects a desirable change in expression of a target gene (e.g., target endogenous gene) that is specific to a particular cell type. In some embodiments, a complex or a heterologous gene effector identified by methods of the disclosure effects a desirable change in expression of a target gene (e.g., target endogenous gene) that is applicable to two or more cell types. In some embodiments, a complex or a heterologous gene effector identified by methods of the disclosure effects a desirable change in expression of a target gene (e.g., target endogenous gene) that is applicable to three or more cell types. In some embodiments, a complex or a heterologous gene effector identified by methods of the disclosure effects a desirable change in expression of a target gene (e.g., target endogenous gene) that is applicable to a class of cell types, for example, cell types with overlapping functional roles, that are present in similar tissues, or that are from the same or similar differentiation lineages, e.g., stem cells, immune cells, T cells, T effector cells, etc. In some embodiments, a complex or a heterologous gene effector identified by methods of the disclosure effects a desirable change in expression of a target gene (e.g., target endogenous gene) that is broadly applicable to a wide variety of cell types, for example, elicits an expression level of a target gene that is above or below a certain threshold for multiple target cell types when introduced to the cells using suitable methods.

[0425] In some embodiments, a composition, complex, system, or method of the disclosure is used to effect a change in the expression or activity level of a target gene in a primary cell. In some embodiments, a composition, complex, system, or method of the disclosure is used to effect a change in the expression or activity level of a target gene in a cell line. In some embodiments, a composition, complex, system, or method of the disclosure is used to effect a change in the expression or activity level of a target gene in an immortalized cell.

[0426] In some embodiments, a composition, complex, system, or method of the disclosure is used to effect a change in the expression or activity level of a target gene (e.g., target endogenous gene) in a mammalian cell, for example, a human cell, non-human primate cell, non-rodent mammal cell, non-human mammal cell, swine cell, lagomorph cell, canine cell, etc. In some embodiments, a composition, complex, system, or method of the disclosure is used to effect a change in the expression or activity level of a target gene in a plant cell, an avian cell, a reptilian cell, a bacterial cell, or an archaeal cell.

[0427] A composition, complex, system, or method of the disclosure can be used to effect a change in the expression or activity level of a target gene (e.g., target endogenous gene) in a human cell.

[0428] A composition, complex, system, or method of the disclosure can be used to effect a change in the expression or activity level of a target gene (e.g., target endogenous gene) in a stem cell.

[0429] A composition, complex, system, or method of the disclosure can be used to effect a change in the expression or activity level of a target gene (e.g., target endogenous gene) in a differentiated cell.

[0430] A composition, complex, system, or method of the disclosure can be used to effect a change in the expression or activity level of a target gene (e.g., target endogenous gene) in a disease-associated cell.

[0431] A composition, complex, system, or method of the disclosure can be used to effect a change in the expression or activity level of a target gene (e.g., target endogenous gene) in a cancer cell.

[0432] A composition, complex, system, or method of the disclosure can be used to effect a change in the expression or activity level of a target gene (e.g., target endogenous gene) in a non-cancer cell.

[0433] A composition, complex, system, or method of the disclosure can be used to effect a change in the expression or activity level of a target gene (e.g., target endogenous gene) in a lymphoid cell, such as a B cell, a T cell (Cytotoxic T cell, Natural Killer T cell, Regulatory T cell, T helper cell), Natural killer cell, cytokine induced killer (CIK) cells (see e.g. US20080241194); myeloid cells, such as granulocytes (Basophil granulocyte, Eosinophil granulocyte, Neutrophil granulocyte/Hypersegmented neutrophil), Monocyte/Macrophage, Red blood cell, Reticulocyte, Mast cell, Thrombocyte/Megakaryocyte, Dendritic cell; cells from the endocrine system, including thyroid (Thyroid epithelial cell, Parafollicular cell), parathyroid (Parathyroid chief cell, Oxyphil cell), adrenal (Chromaffin cell), pineal (Pinealocyte) cells; cells of the nervous system, including glial cells (Astrocyte, Microglia), Magnocellular neurosecretory cell, Stellate cell, Boettcher cell, and pituitary (Gonadotrope, Corticotrope, Thyrotrope, Somatotrope, Lactotroph); cells of the Respiratory system, including Pneumocyte (Type I pneumocyte, Type II pneumocyte), Clara cell, Goblet cell, Dust cell; cells of the circulatory system, including Myocardiocyte, Pericyte; cells of the digestive system, including stomach (Gastric chief cell, Parietal cell), Goblet cell, Paneth cell, G cells, D cells, ECL cells, I cells, K cells, S cells; enteroendocrine cells, including enterochromaffm cell, APUD cell, liver cells (e.g., Hepatocyte, or Kupffer cell), Cartilage/bone/muscle; bone cells, including Osteoblast, Osteocyte, Osteoclast, teeth cells, (Cementoblast, Ameloblast); cartilage cells, including Chondroblast, Chondrocyte; skin cells, including Trichocyte, Keratinocyte, Melanocyte (Nevus cell); muscle cells, including Myocyte; urinary system cells, including Podocyte, Juxtaglomerular cell, Intraglomerular mesangial cell/Extraglomerular mesangial cell, Kidney proximal tubule brush border cell, Macula densa cell; reproductive system cells, including Spermatozoon, Sertoli cell, Leydig cell, Ovum; and other cells, including Adipocyte, Fibroblast, Tendon cell, Epidermal keratinocyte, Epidermal basal cell, Keratinocyte of fingernails and toenails, Nail bed basal cell, Medullary hair shaft cell, Cortical hair shaft cell, Cuticular hair shaft cell, Cuticular hair root sheath cell, Hair root sheath cell of Huxley's layer, Hair root sheath cell of Henle's layer, External hair root sheath cell, Hair matrix cell, Wet stratified barrier epithelial cells, Surface epithelial cell of stratified squamous epithelium of cornea, tongue, oral cavity, esophagus, anal canal, distal urethra and vagina, basal cell of epithelia of cornea, tongue, oral cavity, esophagus, anal canal, distal urethra and vagina, Urinary epithelium cell, Exocrine secretory epithelial cells, Salivary gland mucous cell, Salivary gland serous cell, Von Ebner's gland cell in tongue, Mammary gland cell, Lacrimal gland cell, Ceruminous gland cell in ear, Eccrine sweat gland dark cell, Eccrine sweat gland clear cell. Apocrine sweat gland cell, Gland of Moll cell in eyelid, Sebaceous gland cell, Bowman's gland cell in nose, Brunner's gland cell in duodenum, Seminal vesicle cell, Prostate gland cell, Bulbourethral gland cell, Bartholin's gland cell, Gland of Littre cell, Uterus endometrium cell, Isolated goblet cell of respiratory and digestive tracts, Stomach lining mucous cell, Gastric gland zymogenic cell, Gastric gland oxyntic cell, Pancreatic acinar cell, Paneth cell of small intestine, Type II pneumocyte of lung, Clara cell of lung, Hormone secreting cells, Anterior pituitary cells, Somatotropes, Lactotropes, Thyrotropes, Gonadotropes, Corticotropes, Intermediate pituitary cell, Magnocellular neurosecretory cells, Gut and respiratory tract cells, Thyroid gland cells, thyroid epithelial cell, parafollicular cell, Parathyroid gland cells, Parathyroid chief cell, Oxyphil cell, Adrenal gland cells, chromaffin cells, Ley dig cell of testes, Theca interna cell of ovarian follicle, Corpus luteum cell of ruptured ovarian follicle, Granulosa lutein cells, Theca lutein cells, Juxtaglomerular cell, Macula densa cell of kidney, Metabolism and storage cells, Barrier function cells (e.g., Lung, Gut, Exocrine Glands and Urogenital Tract), Kidney, Type I pneumocyte, Pancreatic duct cell (centroacinar cell), Nonstriated duct cell (of sweat gland, salivary gland, mammary gland, etc.), Duct cell (of seminal vesicle, prostate gland, etc.), Epithelial cells lining closed internal body cavities, Ciliated cells with propulsive function, Extracellular matrix secretion cells, Contractile cells; Skeletal muscle cells, stem cell, Heart muscle cells, Blood and immune system cells, Erythrocyte, Megakaryocyte, Monocyte, Connective tissue macrophage (various types), Epidermal Langerhans cell, Osteoclast, Dendritic cell, Microglial cell, Neutrophil granulocyte, Eosinophil granulocyte, Basophil granulocyte, Mast cell, Helper T cell, Suppressor T cell, Cytotoxic T cell, Natural Killer T cell, B cell, Natural killer cell, Reticulocyte, Stem cells and committed progenitors for the blood and immune system (various types), Pluripotent stem cells, Totipotent stem cells, Induced pluripotent stem cells, adult stem cells, Sensory transducer cells, neurons, Autonomic neuron cells, Sense organ and peripheral neuron supporting cells, Central nervous system neurons and glial cells, Lens cells, Pigment cells, Melanocyte, Retinal pigmented epithelial cell, Germ cells, Oogonium/Oocyte, Spermatid, Spermatocyte, Spermatogonium cell, Spermatozoon, Nurse cells, Ovarian follicle cell, Sertoli cell, Thymus epithelial cell, Interstitial cells, Interstitial kidney cells, common myeloid progenitors, common lymphoid progenitors, and stem cells that are differentiated into or are to be differentiated into any cell type disclosed herein.

[0434] A composition, complex, system, or method of the disclosure can be used to effect a change in the expression or activity level of a target gene (e.g., target endogenous gene) in a stem cell, for example, an isolated stem cell (e.g., an ESC) or an induced stem cell (e.g., an iPSC).

[0435] A composition, complex, system, or method of the disclosure can be used to effect a change in the expression or activity level of a target gene (e.g., target endogenous gene) in a hematopoietic stem cell, for example, a hematopoietic stem cell from a subject, for example, from bone marrow, or peripheral blood (e.g., a mobilized peripheral blood apheresis product, for example, mobilized by administration of GCSF, GM-CSF, mozobil, or a combination thereof).

[0436] In some cases, pluripotency of stem cells (e.g., ESCs or iPSCs) can be determined, in part, by assessing pluripotency characteristics of the cells. Pluripotency characteristics can include, but are not limited to: pluripotent stem cell morphology; the potential for unlimited self-renewal; expression of pluripotent stem cell markers including, but not limited to SSEA1, SSEA3/4, SSEA5, TRA1-60/81, TRA1-85, TRA2-54, GCTM-2, TG343, TG30, CD9, CD29, CD133/prominin, CD140a, CD56, CD73, CD90, CD105, OCT4, NANOG, SOX2, CD30 and/or CD50; ability to differentiate to all three somatic lineages (ectoderm, mesoderm and endoderm); ability to form teratomas comprising the three somatic lineages; and/or (vi) formation of embryoid bodies comprising cells from the three somatic lineages.

[0437] A composition, complex, system, or method of the disclosure can be used to effect a change in the expression or activity level of a target gene (e.g., target endogenous gene) in an immune cell, for example, lymphocytes, T cells, CD4+T cells, CD8+T cells, alpha-beta T cells, gamma-delta T cells, T regulatory cells (Tregs), cytotoxic T lymphocytes, Th1 cells, Th2 cells, Th17 cells, Th9 cells, naive T cells, memory T cells, effector T cells, effector-memory T cells (TEM), central memory T cells (TCM), resident memory T cells (TRM), follicular helper T cells (TFH), Natural killer T cells (NKTs), tumor-infiltrating lymphocytes (TILs), Natural killer cells (NKs), Innate Lymphoid Cells (ILCs), ILC1 cells, ILC2 cells, ILC3 cells, lymphoid tissue inducer (LTi) cells, B cells, B1 cells, Bla cells, B1b cells, B2 cells, plasma cells, B regulatory cells, memory B cells, marginal zone B cells, follicular B cells, germinal center B cells, antigen presenting cells (APCs), monocytes, macrophages, M1 macrophages, M2 macrophages, tissue-associated macrophages, dendritic cells, plasmacytoid dendritic cells, neutrophils, mast cells, basophils, eosinophils, common myeloid progenitors, common lymphoid progenitors, or any combination thereof.

[0438] A composition, complex, system, or method of the disclosure can be used to effect a change in the expression or activity level of an engineered cell that is used to manufacture a biologic, for example, an antibody or other protein-based therapeutic.

### Assay Systems, Subjects, and Illustrative Applications

[0439] Assay systems of the disclosure allow for a systematic and large scale survey of heterologous gene effectors, combinations thereof, complexes comprising the heterologous gene effector(s), and libraries of the same, for example, to identify one or more lead heterologous gene effectors or complexes that elicits a desirable change in an expression or activity level of a target gene (e.g., target endogenous gene).

[0440] In some embodiments, compositions and methods of the disclosure can be used to identify one or more lead heterologous gene effectors of a library that effect a desirable change, for example, increased expression of a target gene (e.g., target endogenous gene) above a certain threshold, or decreased expression of a target gene to below a certain threshold.

[0441] In some embodiments, a heterologous gene effector identified by methods of the disclosure (e.g., any one of SEQ ID NOs: 16-16154, any one of SEQ ID NOs: 16-13605, any one of SEQ ID NOs: 16155-47350, any one of SEQ ID NOs: 16155-43953, any one of SEQ ID NOs: 47351-49333, any one of SEQ ID NOs: 49353-50052, or any two or more of SEQ ID NOs: 16-49333 and 49353-50052, or another sequence) is modified to comprise one or more amino acid insertions, deletions, or substitutions, and the impact of the mutation(s) on the change in expression elicited in the target gene is evaluated. Such a strategy can be used, for example, to refine the activity of the heterologous gene effector or to identify a heterologous gene effector sequence with improved properties compared to the initially identified sequence. In some embodiments, methods of the disclosure comprise identifying one or more lead heterologous gene effectors, mutating one or more amino acid residues of the heterologous gene effector (e.g., with one or more deletions, insertions, and/or substitutions, to arrive at a degree of sequence identity or sequence similarity to the original sequence as disclosed herein), and testing the impact of the one or more amino acid mutations on the change in expression of the target gene elicited by the heterologous gene effector. In some embodiments, the disclosure provides a heterologous gene effector that comprises one or more amino acid insertions, deletions, or substitutions relative to any one of SEQ ID NOs: 16-16154, any one of SEQ ID NOs: 16-13605, any one of SEQ ID NOs: 16155-47350, any one of SEQ ID NOs: 16155-43953, any one of SEQ ID NOs: 47351-49333, any one of SEQ ID NOs: 49353-50052, or any two or more of SEQ ID NOs: 16-49333 and 49353-50052.

[0442] In some embodiments, compositions and methods of the disclosure can be used to identify a combination of two or more heterologous gene effectors (e.g., that are present in the same complex) that effect a desirable change, for example, increased expression of a target gene (e.g., target endogenous gene) above a certain threshold, or decreased expression of a target gene to below a certain threshold.

[0443] In some embodiments, compositions and methods of the disclosure can be used to identify a combination of three or more heterologous gene effectors (e.g., that are present in the same complex) that effect a desirable change, for example, increased expression of a target gene (e.g., target endogenous gene) above a certain threshold, or decreased expression of a target gene (e.g., target endogenous gene) to below a certain threshold.

[0444] In some embodiments, an assay system is unbiased by design. In some embodiments, an assay system is targeted by design.

[0445] Complexes comprising the heterologous gene effector(s) can be delivered to cells using any suitable method.

[0446] In some embodiments, complexes comprising the heterologous gene effector(s) are delivered as nucleic acids that encode one or more components of the complex using any suitable method, for example, electroporation or use of suitable vectors such as viral vectors, liposomal vector, microparticles, nanoparticles, dendrimers, etc. In some embodiments, one or more components of a complex are delivered in a manner that results in transient expression, for example, transient transfection. In some embodiments, one or more components of a complex are delivered in a manner that results in persistent expression, for example, lentiviral transduction, genomic integration using nuclease systems disclosed herein, etc. Components of complexes can be delivered using separate vectors/methods or the same vector. In some embodiments, one or more components are delivered in a manner that results in persistent expression, for example, using lentiviral transduction, and one or more other components are delivered in a manner that results in transient expression.

[0447] In some embodiments, complexes comprising the heterologous gene effector(s) are delivered as proteins or ribonucleoproteins, for example, using a suitable vector, such as a liposomal vector, nanoparticle, viral vector, non-viral vector, etc.

[0448] Optionally, cells that express adequate levels of one or more components of a system or complex of the disclosure (e.g., guide moiety, guide nucleic acid, nuclease, heterologous gene effector, components of an inducible system, etc) can be enriched, e.g., by use of selectable markers (e.g., resistance or susceptibility genes) or by cell sorting, for example, based on expression of the component or based on expression of a reporter gene that is co-expressed with the component.

[0449] Expression or activity level of a target gene (e.g., target endogenous gene) can be measured any suitable amount of time after delivery of a complex or component of a complex to cells. In some embodiments, expression or activity level of a target gene is measured at least 1 hour, at least 2 hours, at least 3 hours, at least 4 hours, at least 5 hours, at least 6 hours, at least 7 hours, at least 8 hours, at least 9 hours, at least 10 hours, at least 12 hours, at least 14 hours, at least 18 hours, at least 20 hours, at least 1 day, at least 2 days, at least 3 days, at least 4 days, at least 5 days, at least 6 days, at least 7 days, at least 8 days, at least 9 days, at least 10 days, at least 14 days, at least 21 days, at least 28 days, at least 5 weeks, at least 6 weeks, at least 7 weeks, at least 8 weeks, at least 9 weeks, at least 10 weeks, at least 12 weeks, at least 14 weeks, at least 18 weeks, at least 20 weeks, or at least 26 weeks after delivery of the complex or component of a complex to the cells.

[0450] In some embodiments, expression or activity level of a target gene (e.g., target endogenous gene) is measured at most 1 hour, at most 2 hours, at most 3 hours, at most 4 hours, at most 5 hours, at most 6 hours, at most 7 hours, at most 8 hours, at most 9 hours, at most 10 hours, at most 12 hours, at most 14 hours, at most 18 hours, at most 20 hours, at most 1 day, at most 2 days, at most 3 days, at most 4 days, at most 5 days, at most 6 days, at most 7 days, at most 8 days, at most 9 days, at most 10 days, at most 14 days, at most 21 days, at most 28 days, at most 5 weeks, at most 6 weeks, at most 7 weeks, at most 8 weeks, at most 9 weeks, at most 10 weeks, at most 12 weeks, at most 14 weeks, at most 18 weeks, at most 20 weeks, or at most 26 weeks after delivery of the complex or component of a complex to the cells.

[0451] In some embodiments, expression or activity level of a target gene (e.g., target endogenous gene) is measured about 1 hour, about 2 hours, about 3 hours, about 4 hours, about 5 hours, about 6 hours, about 7 hours, about 8 hours, about 9 hours, about 10 hours, about 12 hours, about 14 hours, about 18 hours, about 20 hours, about 1 day, about 2 days, about 3 days, about 4 days, about 5 days, about 6 days, about 7 days, about 8 days, about 9 days, about 10 days, about 14 days, about 21 days, about 28 days, about 5 weeks, about 6 weeks, about 7 weeks, about 8 weeks, about 9 weeks, about 10 weeks, about 12 weeks, about 14 weeks, about 18 weeks, about 20 weeks, or about 26 weeks after delivery of the complex or component of a complex to the cells.

[0452] In some embodiments, an expression level is a protein expression level can be measured by, for example, Western Blot, ELISA, multiplex immunoassay, mass spectrometry, NMR, proteomics, flow cytometry, mass cytometry, etc.

[0453] In some embodiments, a complex of the disclosure can increase expression of a target gene (e.g., upon introducing the complex into a cell or population of cells). In some embodiments, an expression level is an RNA expression level can be measured by, for example, RNAseq, qPCR, microarray, gene array, FISH, etc.

[0454] Cells that express high or low levels of a target gene (e.g., target endogenous gene) can optionally be enriched by sorting, for example, using fluorescent activated cell sorting, magnetic activated cell sorting, or a combination thereof. Cells having high or low activity levels of a target gene can be identified using functional assays.

[0455] One or more lead heterologous gene effectors or complexes that elicits a desirable change in an expression or activity level of a target gene (e.g., target endogenous gene) can be identified based on the use of unique molecular identifiers (e.g., barcodes) that are designed to correspond to specific heterologous gene effectors, combinations thereof, complexes, etc.

[0456] Unique molecular identifiers can be short sequences used to uniquely tag distinct constructs, e.g., each heterologous gene effector can be associated with a unique molecular identifier in a pre-determined manner, and the information can be stored to allow mapping of an unique molecular identifier to a specific heterologous gene effector, e.g., when the unique molecular identifier is found by sequencing. The unique molecular identifier can be synthesized together with the coding sequence for the heterologous gene effector as disclosed herein, e.g., for cloning into a vector, such as a lentiviral vector, an expression plasmid, a sequence to be integrated into the genome, etc. A unique molecular identifier can be any suitable length, for example, about 8-30, about 8-25, about 8-20, about 8-15, about 10-30, about 10-25, about 10-20, about 10-15 nucleotides in length. A unique molecular identifier can be about 12 nucleotides in length.

[0457] In some embodiments, a single unique molecular identifier is used to tag and identify a heterologous gene effector. In some embodiments, two or more unique molecular identifiers are used to identify a heterologous gene effector, for example, one sequence can be used that is shared between heterologous gene effectors that are derived from the same source protein, class of proteins, or sub-library, and a second unique molecular identifier is used to distinguish between the distinct sequences, e.g., tiled segments of the protein that are encoded by different members of a library. In some embodiments, one set of unique molecular identifiers is used to identify heterologous gene effectors, and a separate set of unique molecular identifiers is used to uniquely tag molecules generated while processing a sample for sequencing, e.g., for deduplication.

[0458] Unique molecular identifiers can be rationally designed in silico. Methods of designing unique molecular identifiers can comprise, for example, criteria for minimum pairwise Hamming distance between unique molecular identifiers, a maximum homopolymer length, lower and upper GC content limits, blacklisted sequences (e.g., based on contents of a library and/or genome), a Markov chain model, and/or hyper-parameter optimization by grid search.

[0459] In some embodiments, assay systems of the disclosure can be iterated, for example, for strong binary combinations of effectors, screens can be performed to identify ternary complexes. In this scenario, stable cell lines could be generated with GA1-dCas-binary effector, and GID1-tagged individual effectors could be introduced.

[0460] In some embodiments, a polypeptide that is part of a complex of the disclosure (e.g., a heterologous gene effector, guide moiety, fusion protein etc.) is fused to a tag, such as a purification tag or epitope tag. Examples of tags include glutathione-S-transferase (GST), chitin binding protein (CBP), maltose binding protein, thioredoxin (TRX), poly(NANP), tandem affinity purification (TAP) tag, myc, AcV5, AU1, AUS, E, ECS, E2, FLAG, hemagglutinin (HA), nus, Softag 1, Softag 3, Strep, SBP, Glu-Glu, HSV, KT3, S, SI, T7, V5, VSV-G, histidine (His), biotin carboxyl carrier protein (BCCP), and calmodulin.

[0461] In some embodiments, a polypeptide that is part of a complex of the disclosure (e.g., a heterologous gene effector, guide moiety, nuclease, fusion protein etc.) is fused to a degron to allow for temporal control of dCas9-effector expression, for example, a mini auxin-inducible degron (mAID; Yesbolatova et al., Nature Communications 2020). In some embodiments, a reporter cell line is generated. The cell line can be engineered to express OsTIRI. TIR (transport inhibitor 1 protein) is a subunit of a ubiquitin ligase complex from Oryza saliva that interacts with the AID in the presence of auxin. This interaction facilitates the ubiquitination and degradation of the AID-tagged protein, allowing the dCas9-effector to be degraded upon treating with auxin. An OsTIRI expression construct can be integrated into a safe harbor site (e.g., AAVS1) for consistent expression levels in screening assays. The OsTIRlconstruct can also be also modified to express a guide RNA that will target the dCas9 to a genomic locus (e.g., promoter) of interest in a given screening assay, or the guide RNA can be introduced separately.

[0462] In some embodiments, a polypeptide that is part of a complex of the disclosure (e.g., a heterologous gene effector, guide moiety, fusion protein etc.) is fused to a reporter gene, such as a fluorescent or luminescent protein. In some embodiments, a polypeptide that is part of a complex of the disclosure (e.g., a heterologous gene effector or guide moiety) is co-expressed with a reporter gene, e.g., co-expressed from an expression construct separated by an IRES. Non-limiting examples of reporter genes include green fluorescent proteins (e.g., GFP, GFP-2, tagGFP, turboGFP, eGFP, Emerald, Azami Green, Monomeric Azami Green, CopGFP, AceGFP, ZsGreenl), yellow fluorescent proteins (e.g., YFP, eYFP, Citrine, Venus, YPet, PhiYFP, ZsYellowl), blue fluorescent proteins (e.g. eBFP, eBFP2, Azurite, mKalamal, GFPuv, Sapphire, T-sapphire), cyan fluorescent proteins (e.g. eCFP, Cerulean, CyPet, AmCyanl, Midoriishi-Cyan), red fluorescent proteins (mKate, mKate2, mPlum, DsRed monomer, mCherry, mRFP1, DsRed-Express, DsRed2, DsRed-Monomer, HcRed-Tandem, HcRedl, AsRed2, eqFP611, mRaspberry, mStrawberry, Jred), orange fluorescent proteins (mOrange, mKO, Kusabira-Orange, Monomeric Kusabira-Orange, mTangerine, tdTomato), and any other suitable fluorescent protein.

[0463] In some embodiments, a complex or a heterologous gene effector identified by methods of the disclosure effects a desirable change in expression of a target gene (e.g., target endogenous gene) that is specific to a particular subject. In some embodiments, a complex or a heterologous gene effector identified by methods of the disclosure effects a desirable change in expression of a target gene that is applicable to two or more subjects. In some embodiments, a complex or a heterologous gene effector identified by methods of the disclosure effects a desirable change in expression of a target gene that is applicable to a class of subjects, for example, mammalian subjects, human subjects, male subjects, female subjects, subjects in a given age range, subjects with a similar disease or condition (e.g., having a disease with a genetic basis and/or a disease that is impacted by an expression level of one or more endogenous genes, including target genes or genes with related or opposing functions). In some embodiments, a complex or a heterologous gene effector identified by methods of the disclosure effects a desirable change in expression of a target gene that is broadly applicable to a wide variety subjects, for example, elicits an expression level of a target gene that is above or below a certain threshold for multiple subjects when introduced to the subject's cells using suitable methods.

[0464] In some embodiments, compositions and methods of the disclosure can be used to establish inducible and reversible disease models to understand disease mechanism.

[0465] In some embodiments, compositions and methods of the disclosure can be used to identify and/or test potential therapeutic agents or therapeutic agents for diseases that comprise aberrant expression of one or more particular genes.

[0466] In some embodiments, compositions and methods of the disclosure can be used to control cell differentiation by modulating expression of key drivers of cell fate and lineage commitment, for example, to induce differentiation into a particular cell type or de-differentiation into a cell type that is capable of differentiation down multiple pathways, such as a stem cell.

[0467] The disclosure further encompasses nucleic acids encoding any one or more of the elements disclosed herein, for example, heterologous gene effector(s), guide moieties, guide nucleic acids, complexes, oligomerization (e.g., heterodimerization) domains, combinations thereof, and libraries comprising multiples of the same.

[0468] The disclosure further encompasses kits comprising one or more of the elements disclosed herein, for example, heterologous gene effector(s), guide moieties, guide nucleic acids, complexes, oligomerization (e.g., heterodimerization) domains, combinations thereof, and libraries comprising multiples of the same, and nucleic acids encoding the same. Kits can further comprise, for example, instructions for use.

### Reporter Expression Vector

[0469] The disclosure provides a reporter expression vector that can be utilized, for example, in assay systems and methods disclosed herein. The reporter expression vector can be used, for example, in an engineered synthetic reporter (ESR) system or cell line described herein.

[0470] In some embodiments, the present disclosure provides an expression vector (e.g., a heterologous expression vector) comprising at least one polynucleotide sequence (e.g., one or more heterologous polynucleotide sequences) that can be targeted by any of the heterologous gene effector and/or the guide nucleic acid sequence (e.g., a complex comprising (i) a Cas protein coupled to a transcriptional/chromatin regulator and (ii) a guide RNA). The at least one polynucleotide sequence can be operatively coupled to a target gene (e.g., disposed upstream and adjacent to regulatory sequence, such as a promoter of the target gene), such that targeting of the at least one polynucleotide sequence by any of the heterologous gene effector and/or the guide nucleic acid sequence can modulate expression of the target gene. The at least one polynucleotide sequence can be a synthetic sequence that is not normally present in a cell (e.g., a mammalian cell), such to minimize (e.g., avoid) off-target effect(s), such as when screening for heterologous gene effector domain(s) and complex(es) thereof that exhibit desirable properties for modulating expression of the target gene. Thus, additional aspects of the present disclosure provide various embodiments of such expression vector, cells comprising thereof, and methods of use thereof.

[0471] The expression vector can comprise a heterologous polynucleotide sequence (e.g., a single heterologous polynucleotide sequence). Alternatively or additionally, the expression vector can comprise a plurality of heterologous polynucleotide sequences. The expression vector can comprise at least or up to about 2 heterologous polynucleotide sequences, at least or up to about 3 heterologous polynucleotide sequences, at least or up to about 4 heterologous polynucleotide sequences, at least or up to about 5 heterologous polynucleotide sequences, at least or up to about 6 heterologous polynucleotide sequences, at least or up to about 7 heterologous polynucleotide sequences, at least or up to about 8 heterologous polynucleotide sequences, at least or up to about 9 heterologous polynucleotide sequences, at least or up to about 10 heterologous polynucleotide sequences, at least or up to about 15 heterologous polynucleotide sequences, at least or up to about 20 heterologous polynucleotide sequences, at least or up to about 30 heterologous polynucleotide sequences, at least or up to about 40 heterologous polynucleotide sequences, or at least or up to about 50 heterologous polynucleotide sequences.

[0472] Each of the plurality of heterologous polynucleotide sequences of the expression vector can be substantially the same. In some embodiments, at least some of (e.g., each of) the plurality of heterologous polynucleotide sequences can be different from each other (e.g., by at least or up to about 1 nucleobase, at least or up to about 2 nucleobases, at least or up to about 3 nucleobases, at least or up to about 4 nucleobases, at least or up to about 5 nucleobases, 6 nucleobases, at least or up to about 7 nucleobases, at least or up to about 8 nucleobases, at least or up to about 9 nucleobases, or at least or up to about 10 nucleobases, etc.).

[0473] At least two (e.g., each) of the plurality of heterologous polynucleotide sequences of the expression vector can be directly adjacent to each other (e.g., not separated by any other nucleobase). Alternatively, at least two (e.g., each) of the plurality of heterologous polynucleotide sequences of the expression vector can be separated by a spacer, such as one or more nucleobases (e.g., at least or up to about 1 nucleobase, at least or up to about 2 nucleobases, at least or up to about 3 nucleobases, at least or up to about 4 nucleobases, at least or up to about 5 nucleobases, at least or up to about 6 nucleobases, at least or up to about 7 nucleobases, at least or up to about 8 nucleobases, at least or up to about 9 nucleobases, at least or up to about 10 nucleobases, at least or up to about 15 nucleobases, at least or up to about 20 nucleobases, at least or up to about 30 nucleobases, at least or up to about 40 nucleobases, at least or up to about 50 nucleobases, at least or up to about 60 nucleobases, at least or up to about 70 nucleobases, at least or up to about 80 nucleobases, at least or up to about 90 nucleobases, or at least or up to about 100 nucleobases, etc.).

[0474] A heterologous polynucleotide sequence of the expression vector, as disclosed herein, can comprise (i) an endonuclease target sequence (e.g., a CRISPR/Cas protein target sequence) and/or (ii) one or more CRISPR protospacer adjacent motif (PAM) sequences. The heterologous polynucleotide sequence can comprise a single PAM sequence. Alternatively, the heterologous polynucleotide sequence can comprise a plurality of PAM sequences (e.g., at least or up to about 2 PAM sequences, at least or up to about 3 PAM sequences, at least or up to about 4 PAM sequences, at least or up to about 5 PAM sequences, at least or up to about 6 PAM sequences, at least or up to about 7 PAM sequences, at least or up to about 8 PAM sequences, at least or up to about 9 PAM sequences, or at least or up to about 10 PAM sequences). The plurality of PAM sequences can be identical. In some embodiments, two or more of the plurality of PAM sequences can be different, e.g., a first PAM sequence can be for a first type of CRISPR/Cas protein (e.g., Cas9, such as SpCas9 and/or SaCas9) and a second PAM sequence can be for a second type of CRISPR/Cas protein (e.g., Cas12a). At least two of the plurality of PAM sequences may not overlap with each other (e.g., Cas12a PAM and Cas9 PAM). Alternatively, some of the plurality of PAM sequences may overlap with each other (e.g., SpCas9 PAM and SaCas9 PAM).

[0475] A distance between two PAM sequences as disclosed herein can be at least or up to about 1 nucleobase, at least or up to about 5 nucleobases, at least or up to about 10 nucleobases, at least or up to about 15 nucleobases, at least or up to about 20 nucleobases, at least or up to about 25 nucleobases, at least or up to about 30 nucleobases, at least or up to about 35 nucleobases, at least or up to about 40 nucleobases, at least or up to about 45 nucleobases, at least or up to about 50 nucleobases, at least or up to about 55 nucleobases, at least or up to about 60 nucleobases, at least or up to about 70 nucleobases, at least or up to about 80 nucleobases, at least or up to about 90 nucleobases, or at least or up to about 100 nucleobases. In some cases, at least two PAM sequences can be disposed on an end (e.g., the 5′ end or the 3′ end) of the heterologous polynucleotide sequence. At least two PAM sequences can be disposed on opposite ends of the heterologous polynucleotide sequence (e.g., the heterologous polynucleotide sequence can be flanked by two different PAM sequences).

[0476] The endonuclease target sequence (e.g., targeted by a guide RNA molecule of a Cas/guide RNA complex) of the heterologous polynucleotide sequence, as disclosed herein, can be at least or up to about 10 nucleobases, at last or up to about 15 nucleobases, at last or up to about 20 nucleobases, at last or up to about 25 nucleobases, at last or up to about 30 nucleobases, at last or up to about 35 nucleobases, at last or up to about 40 nucleobases, at last or up to about 45 nucleobases, at last or up to about 50 nucleobases, at last or up to about 60 nucleobases, at last or up to about 70 nucleobases, at last or up to about 80 nucleobases, at last or up to about 90 nucleobases, or at last or up to about 100 nucleobases.

[0477] The endonuclease target sequence (e.g., targeted by a guide RNA molecule of a Cas/guide RNA complex) of the heterologous polynucleotide sequence, as disclosed herein, can comprise a plurality of polynucleotide sequences that are derived from different sources. Non-limiting examples of the different sources can be an exon and an intron of the same gene, different genes, different chromosomes (e.g., different human chromosomes), etc. Different chromosomes can be from chromosome 1, chromosome 2, chromosome 3, chromosome 4, chromosome 5, chromosome 6, chromosome 7, chromosome 8, chromosome 9, chromosome 10, chromosome 11, chromosome 12, chromosome 13, chromosome 14, chromosome 15, chromosome 16, chromosome 17, chromosome 18, chromosome 19, chromosome 20, chromosome 21, chromosome 22, chromosome X, and/or chromosome Y. In some examples, a polynucleotide sequence of the plurality of polynucleotide sequences can be derived from a gene encoding Cluster of Differentiation (CD) protein, such as CD1a, CD2, CD3, CD4, CD5, CD7, CD8, CD10, CD15, CD20, CD23, CD30, CD31, CD33, CD34, CD42b, CD43, CD45, CD45 RO, CD56, CD57, CD61, CD68, CD71, CD79a, CD99, CD103, CD117, CD138, CD163, etc.

[0478] The plurality of polynucleotide sequences can comprise at least or up to about 2 polynucleotide sequences, at least or up to about 3 polynucleotide sequences, at least or up to about 4 polynucleotide sequences, at least or up to about 5 polynucleotide sequences, at least or up to about 6 polynucleotide sequences, at least or up to about 7 polynucleotide sequences, at least or up to about 8 polynucleotide sequences, at least or up to about 9 polynucleotide sequences, or at least or up to about 10 polynucleotide sequences. Sizes (e.g., lengths) of the plurality of polynucleotide sequences can be the same. Alternatively, the sizes of the plurality of polynucleotide sequences can be different. Sizes of two polynucleotide sequences of the plurality of polynucleotide sequences can be different by at least or up to about 2 polynucleotides, at least or up to about 3 polynucleotides, at least or up to about 4 polynucleotides, at least or up to about 5 polynucleotides, at least or up to about 6 polynucleotides, at least or up to about 7 polynucleotides, at least or up to about 8 polynucleotides, at least or up to about 9 polynucleotides, or at least or up to about 10 polynucleotides.

[0479] The expression vector as disclosed herein can comprise an Upstream Activating Sequence (UAS) that is downstream of one or more heterologous polynucleotide sequence (e.g., each heterologous polynucleotide sequence) as disclosed herein. The UAS can be a non-human UAS. The UAS can be derived from a promoter (e.g., GAL4 promoter). Non-limiting examples of such promoter can include U6, H1, CYC1, HIS3, GAL1, GAL4, GAL10, ADH1, PGK, PHO5, GAPDH, T7, CMV, SV40 and EF1a. The UAS can be upstream of, for example, a promoter, and/or a target gene for which expression is to be regulated by the reporter expression vector, such as a reporter gene.

[0480] The expression vector as disclosed herein can comprise a promoter. In some cases, one or more heterologous polynucleotide sequences can be upstream of the promoter. In some cases, one or more heterologous polynucleotide sequences can be downstream of the promoter. In some cases, the promoter can be a strong constitutive promoter (e.g., EF1a). In some cases, the promoter can be a weak minimal viral promoter (e.g., CMV). The promoter can control expression of a target gene, e.g., the target gene can be under regulatory control of the promoter.

[0481] A heterologous polynucleotide sequence of the expression vector, as disclosed herein, can exhibit at least or up to about 70%, at least or up to about 75%, at least or up to about 80%, at least or up to about 85%, at least or up to about 90%, at least or up to about 91%, at least or up to about 92%, at least or up to about 93%, at least or up to about 94%, at least or up to about 95%, at least or up to about 96%, at least or up to about 97%, at least or up to about 98%, at least or up to about 99, or substantially about 100% sequence identity or sequence similarity to any one or more of SEQ ID NOs: 49334-49341 or 49344-49352, as provided in TABLE 3. A heterologous polynucleotide sequence of the expression vector, as disclosed herein, can be joined or operatively coupled to a promoter that exhibits at least or up to about 70%, at least or up to about 75%, at least or up to about 80%, at least or up to about 85%, at least or up to about 90%, at least or up to about 91%, at least or up to about 92%, at least or up to about 93%, at least or up to about 94%, at least or up to about 95%, at least or up to about 96%, at least or up to about 97%, at least or up to about 98%, at least or up to about 99, or substantially about 100% sequence identity or sequence similarity to any one of SEQ ID NOs: 49346, 49347, 49351, or 49352.

TABLE 3

| SEQ | | |
|---|---|---|
| ID | | |
| NO: | Description | Sequence |
| 49334 | Heterologous | GTTGTTCTAAACGCTCTGAG |
| | guide target | |
| 49335 | Cas12a PAM- | tttaGTTGTTCTAAACGCTCTGAG |
| | heterologous | |
| | guide target | |
| 49336 | Heterologous | GTTGTTCTAAACGCTCTGAGcgg |
| | guide target- | |
| | SpCas9 PAM | |
| 49337 | Heterologous | GTTGTTCTAAACGCTCTGAGcggag |
| | guide target- | |
| | SpCas9 PAM- | |
| | SaCas9 PAM | |
| 49338 | Cas12a PAM- | tttaGTTGTTCTAAACGCTCTGAGcggag |
| | heterologous | |
| | guide target- | |
| | SpCas9 PAM- | |
| | SaCas9 PAM | |
| 49339 | Guide RNA | tttaGTTGTTCTAAACGCTCTGAGcgg |
| | targeting | |
| | sequence | |
| 49340 | Guide RNA | tttaGTTGTTCTAAACGCTCTGAGcggagtactgtcctccg |
| | targeting | |
| | sequence with | |
| | UAS | |
| 49341 | UAS | Cggagtactgtcctccg |
| 49344 | Single ESR | GATCCTTTAGTTGTTCTAAACGCTCTGAGCGGAGTACTG |
| | repeat | TCCTCCGAGA |
| 49345 | 7 copies of ESR | GATCCTTTAGTTGTTCTAAACGCTCTGAGCGGAGTACTG |
| | | TCCTCCGAGAGATCCTTTAGTTGTTCTAAACGCTCTGAG |
| | | CGGAGTACTGTCCTCCGAGAGATCCTTTAGTTGTTCTAA |
| | | ACGCTCTGAGCGGAGTACTGTCCTCCGAGAGATCCTTTA |
| | | GTTGTTCTAAACGCTCTGAGCGGAGTACTGTCCTCCGAG |
| | | AGATCCTTTAGTTGTTCTAAACGCTCTGAGCGGAGTACT |
| | | GTCCTCCGAGAGATCCTTTAGTTGTTCTAAACGCTCTGA |
| | | GCGGAGTACTGTCCTCCGAGAGATCCTTTAGTTGTTCTA |
| | | AACGCTCTGAGCGGAGTACTGTCCTCCGAGAGATCCAT |
| | | TAGGCGGCCGCGTGGATAACCGTATTACCGCCATGCAT |
| 49346 | miniCMV | GTAGGCGTGTACGGTGGGAGGTCTATATAAGCAGAGCT |
| | promoter | |
| 49347 | EF1a promoter | GTGCCCGTCAGTGGGCAGAGCGCACATCGCCCACAGTC |
| | | CCCGAGAAGTTGGGGGGAGGGGTCGGCAATTGAACCG |
| | | GTGCCTAGAGAAGGTGGCGCGGGGTAAACTGGGAAAG |
| | | TGATGTCGTGTACTGGCTCCGCCTTTTTCCCGAGGGTGG |
| | | GGGAGAACCGTATATAAGTGCAGTAGTCGCCGTGAACG |
| | | TTCTTTTTCGCAACGGGTTTGCCGCCAGAACACAGGTAA |
| | | GTGCCGTGTGTGGTTCCCGCGGGCCTGGCCTCTTTACGG |
| | | GTTATGGCCCTTGCGTGCCTTGAATTACTTCCACCTGGC |
| | | TGCAGTACGTGATTCTTGATCCCGAGCTTCGGGTTGGAA |
| | | GTGGGTGGGAGAGTTCGAGGCCTTGCGCTTAAGGAGCC |
| | | CCTTCGCCTCGTGCTTGAGTTGAGGCCTGGCCTGGGCGC |
| | | TGGGGCCGCCGCGTGCGAATCTGGTGGCACCTTCGCGC |
| | | CTGTCTCGCTGCTTTCGATAAGTCTCTAGCCATTTAAAA |
| | | TTTTTGATGACCTGCTGCGACGCTTTTTTTCTGGCAAGA |
| | | TAGTCTTGTAAATGCGGGCCAAGATCTGCACACTGGTA |
| | | TTTCGGTTTTTGGGGCCGCGGGCGGCGACGGGGCCCGT |
| | | GCGTCCCAGCGCACATGTTCGGCGAGGCGGGGCCTGCG |
| | | AGCGCGGCCACCGAGAATCGGACGGGGGTAGTCTCAAG |
| | | CTGGCCGGCCTGCTCTGGTGCCTGGCCTCGCGCCGCCGT |
| | | GTATCGCCCCGCCCTGGGCGGCAAGGCTGGCCCGGTCG |
| | | GCACCAGTTGCGTGAGCGGAAAGATGGCCGCTTCCCGG |
| | | CCCTGCTGCAGGGAGCTCAAAATGGAGGACGCGGCGCT |
| | | CGGGAGAGCGGGCGGGTGAGTCACCCACACAAAGGAA |
| | | AAGGGCCTTTCCGTCCTCAGCCGTCGCTTCATGTGACTC |
| | | CACGGAGTACCGGGCGCCGTCCAGGCACCTCGATTAGT |
| | | TCTCGcGCTTTTGGAGTACGTCGTCTTTAGGTTGGGGGG |
| | | AGGGGTTTTATGCGATGGAGTTTCCCCACACTGAGTGG |
| | | GTGGAGACTGAAGTTAGGCCAGCTTGGCACTTGATGTA |
| | | ATTCTCCTTGGAATTTGCCCTTTTTGAGTTTGGATCTTGG |
| | | TTCATT |
| 49348 | Single TRE3G | GAGTTTACTCCCTATCAGTGATAGAGAACGTATGAA |
| | repeat | |
| 49349 | Cas9 spacer | TATCAGTGATAGAGAACGTA |
| 49350 | CasMINI/Cas12a | CTCCCTATCAGTGATAGAGAACG |
| | spacer | |
| 49351 | TRE3GS | GAGTTTACTCCCTATCAGTGATAGAGAACGTATGAAGA |
| | promoter | GTTTACTCCCTATCAGTGATAGAGAACGTATGCAGACTT |
| | | TACTCCCTATCAGTGATAGAGAACGTATAAGGAGTTTA |
| | | CTCCCTATCAGTGATAGAGAACGTATGACCAGTTTACTC |
| | | CCTATCAGTGATAGAGAACGTATCTACAGTTTACTCCCT |
| | | ATCAGTGATAGAGAACGTATATCCAGTTTACTCCCTATC |
| | | AGTGATAGAGAACGTATAAGCTTTGCTTATGTAAACCA |
| | | GGGCGCCTATAAAAGAGTGCTGATTTTTTGAGTAAACTT |
| | | CAATTCCACAACACTTTTGTCTTATACCAACTTTCCGTA |
| | | CCACTTCCTACCCTCGTAAA |
| 49352 | modified | CTTTGCTTATGTAAACCAGGGCGCCTATAAAAGAGTGC |
| | miniCMV | T |
| | promoter | |

[0482] Another aspect of the present disclosure provides cells (e.g., reporter cell lines) comprising any of the expression vectors disclosed herein, methods of producing the cells, and methods of using the cells to, for example, screen for identifying one or more lead heterologous gene effectors of the library as disclosed herein. The expression vector can be integrated into one or more chromosomes (e.g., nuclear chromosomes) of the cells. Alternatively, the expression vector may not be integrated into a chromosome (e.g., may be achromosomal).

[0483] A population of cells comprising the expression vector (e.g., see FIG. 11) disclosed herein can exhibit a narrower distribution of target gene-positive cells as compared to a control population of cells comprising a control expression vector (e.g., see FIG. 12), by at least or up to about 1 percent (%), at least or up to about 2%, at least or up to about 5%, at least or up to about 10%, at least or up to about 15%, at least or up to about 20%, at least or up to about 30%, at least or up to about 40%, at least or up to about 50%, at least or up to about 60%, at least or up to about 70%, at least or up to about 80%, at least or up to about 90%, at least or up to about 95%, at least or up to about 100%, at least or up to about 0.1-fold, at least or up to about 0.2-fold, at least or up to about 0.5-fold, at least or up to about 1-fold, at least or up to about 1.5-fold, at least or up to about 2-fold, at least or up to about 3-fold, at least or up to about 4-fold, at least or up to about 5-fold, or at least or up to about 10-fold (see FIG. 19). The distribution can be, for example, a range, interquartile range, or range of the from about the 5th to 95th percentile of fluorescence intensities for expression of a reporter gene by cells in a population as determined by flow cytometry.

### EXAMPLES

[0484] The following examples are given for the purpose of illustrating various embodiments of the disclosure and are not meant to limit the present disclosure in any fashion. The present examples, along with the methods described herein are presently representative of preferred embodiments, are exemplary, and are not intended as limitations on the scope of the disclosure.

### Example 1: Human Epigenetic Effector Screen

[0485] This example describes identification and characterization of novel gene effectors (e.g., domains that modulate gene expression) from the human nuclear proteome.

[0486] A high throughput screen is conducted utilizing a library of complexes that contain a nuclease-dead Cas9 (dCas9) and a heterologous gene effector candidate peptide sequence. Each heterologous gene effector candidate peptide sequence is fused to dCas9, recruited to target gene regulatory sequences (e.g., promoters) in human cells, and the effect on target gene expression determined. An overview of an illustrative effector screen design is provided in FIG. 1.

### Library Design

[0487] The heterologous gene effector candidate peptide sequences are designed to cover protein sequences from the human nuclear proteome. An analysis of human proteins experimentally determined to be localized (e.g., exclusively localized) to the nucleus (ProteinAtlas.org) is conducted, resulting in a shortlist of 549 proteins. The heterologous gene effector candidate peptide sequences are generated from synthetic DNA oligonucleotides 300 nucleotides in length, of which 255 nucleotides are target specific. The 5′ and 3′ ends of each oligo contains sequences complementary to the destination vector (p-dCas9), with the 3′ 15 nucleotide overlap comprising part of the Illumina Read 1 Primer. The oligonucleotides also contain unique molecular identifiers (e.g., “barcodes”) for each heterologous gene effector candidate peptide sequence. This design allows for cloning of the library using NEB HiFi cloning, and for downstream generation of Illumina Hiseq-compatible NGS libraries. For each target gene, oligos are designed such that they are tiled across the coding nucleotide sequence of the gene from 5′ to 3′, with overlaps of 129 nucleotides.

[0488] In total 16139 oligos are designed in this initial effector library, including positive and negative controls. The following provides an illustrative example of an oligonucleotide of this example, annotated as follows:

vector overlap 1 (SEQ ID NO: 11)-target sequence (SEQ ID
NO: 12)-[stop codon; SEQ ID NO: 13]-unique molecular identifier (SEQ ID NO: 14)-
vector overlap 2 (SEQ ID NO: 15; (Illumina Read 1 partial):
GCAGTGGTGGACATAATGTCTATGCCAGAACATGTTTTAACGAGTGAATCC
ATGCATGTGTGTGACATTGGACATGTTGAACATATGGTGCATGATAGTGTAGTGGAA
GCAGAAATCATTACTGATCCTCTGACGAGTGACATAGTTTCAGAAGAAGTATTGGTA
GCAGACTGTGCCCCTGAAGCAGTCATAGATGCCAGCGGGATCTCAGTGGACCAGCA
AGATAATGACAAAGCCAGCTGTGAGGACTACCTAATGATTTCGTTGGAT[TAG]AGG
GGTTCACTATACGTTACTGGCCGA

[0489] Oligos used in libraries of the disclosure can utilize a similar format to associate a unique molecular identifier to each target sequence, and to provide vector overlap sequences for cloning.

[0490] Library cloning

[0491] The oligonucleotides are obtained at a yield of >0.2 fmol per oligo (e.g., several hundred nanograms of lyophilized DNA). The oligos are resuspended in 10 mM Tris pH 8.0 to a stock concentration of 20ng/μL. Stock solutions can be maintained at −20° C.

[0492] PCR is conducted to convert ssDNA to dsDNA, ready for NEBuilder HiFi cloning. A KAPA HiFi HotStart PCR Kit (Catalog #KK2502) is used, with approximately 12-14 cycles.

[0493] Table 4 provides illustrative PCR reaction components for library amplification. 400 μL reactions are split amount 8 PCR tubes, with 50 μL each.

| | | Final |
|---|---|---|
| Component | Volume | concentration |
| Library Amp F primer at 100 μM | 2 μl | 0.5 μM |
| Library Amp R primer at 100 μM | 2 μl | 0.5 μM |
| Twist oligo pool at 4 ng/μl | 20 μl | 0.2 ng/μl |
| dH2O | 176 μl | — |
| Q5 Hot Start 2× Master Mix | 200 μl | 1× |

[0494] Table 5 provides illustrative PCR conditions.

| Temperature | Time | Cycles |
|---|---|---|
| 98° C. | 30 s | 1× |
| 98° C. | 10 s | 12-14× |
| 59° C. | 30 s | |
| 72° C. | 20 s | |
| 72° C. | 2 m | 1× |

[0495] PCR products are cleaned up via column purification.

[0496] The overlapping sequences present at the 5′ and 3′ ends of each oligo permits cloning into the destination vector (e.g., via NEB HiFi).

[0497] A destination vector (p-dCas9) is generated by modifying a lentiviral backbone based on pSLQ6604. The destination vector is designed to allow fusion of the heterologous gene effector to the C-terminus of dCas9 via a short flexible GS linker. The destination vector is generated by direct synthesis (e.g., GenScript) or by assembly (e.g., HiFI PCR assembly using three synthetic gBlock fragments from IDT, with subsequent ligation into EcoRI NotI-linearized pSLQ6604).

[0498] The starting destination vector, illustrated in FIG. 2, is linearized (e.g., via digestion with EcoRI (high fidelity) and NotI (high fidelity) restriction enzymes. An insert sequence generated from the three synthetic gBlock fragments is inserted via HiFi assembly to generate p-dCas9, as illustrated in FIG. 3.

[0499] The p-dCas9 destination vector is linearized (e.g., via digestion with MluI (high fidelity)), and an insert encoding the heterologous gene effector sequence is added into the vector using HiFi assembly, with a ratio of insert to vector of approximately 10:1.

[0500] Illustrative activator screens

[0501] The library is used to identify heterologous gene effectors that activate or increase expression of target genes. For each screen, a suitable cell type/cell line and target gene or target gene regulatory sequence is selected. A guide RNA is used to direct the dCas9-effector to a regulatory sequence (e.g., promoter) of the endogenous gene. The guide RNA can be a validated guide RNA. The library includes positive control oligonucleotides (e.g., tiled across the P300, TET1, TET2, TET3, and HSF1 genes).

[0502] Target genes encoding cell surface proteins that are expressed at low levels in a given cell type can be used. For example, cell lines that express low levels of CD45 are illustrated in FIG. 4.

[0503] In one iteration, K562 cells are used, with CD45 as a target gene. K562 cells express low levels of CD45. A guide RNA is used to direct the dCas9-effector to a regulatory sequence (e.g., promoter) of CD45.

[0504] In one iteration, K562 cells are used, with CDB1 as a target gene. K562 cells express low levels of CDB1. A guide RNA is used to direct the dCas9-effector to a regulatory sequence (e.g., promoter) of CDB1.

[0505] Cells are transduced with vectors (e.g., lentiviral particles) to induce expression of complexes of the library. A multiplicity of infection is selected such that no more than one candidate heterologous gene effector is expressed in a transduced cell. Transduced cells are sorted based on reporter gene (e.g., mCherry) expression to minimize the number of background cells in the screen that do not express a dCas9-effector. Cells are then transduced with vectors (e.g., lentiviral particles at a high multiplicity of infection) to induce expression of the guide RNAs specific to the screen (e.g., guide RNA targeting a CD45 promoter). Transduced cells are maintained for up to about five days in culture.

[0506] Cells that express higher levels of the target gene can be identified, for example, by sorting cells based on expression of the target gene (e.g., via fluorescent activated cell sorting and/or magnetic activated cell sorting).

[0507] Genomic DNA is extracted from the cells, and the integrated effector cassette is isolated by PCR, and used to generate libraries for HiSeq single end barcode sequencing. Gene effectors are identified that increase expression of the target gene.

[0508] The approach can also be adapted to screen combinations of heterologous gene effectors.

### Illustrative Repressor Screens

[0509] The library is used to identify heterologous gene effectors that reduce expression of target genes. For each screen, a suitable cell type/cell line and target gene or target gene regulatory sequence is selected. A guide RNA is used to direct the dCas9-effector to a regulatory sequence (e.g., promoter) of the endogenous gene. The guide RNA can be a validated guide RNA.

[0510] Target genes encoding cell surface proteins that are expressed at relatively high levels in a given cell type can be used. For example, cell lines that express high levels of the transferrin receptor CD71 are illustrated in FIG. 5.

[0511] In one iteration, K562 cells are used, with CD71 as a target gene. K562 cells express relatively high levels of CD71. A guide RNA is used to direct the dCas9-effector to a regulatory sequence (e.g., promoter) of CD71. The guide RNA can be encoded by, for example, GGACGCGCTAGTGTGAGTGC or CGATATCCCGACGCTCTGAG.

[0512] Cells are transduced with vectors (e.g., lentiviral particles) to induce expression of complexes of the library. A multiplicity of infection is selected such that no more than one candidate heterologous gene effector is expressed in a transduced cell. Transduced cells are sorted based on reporter gene (e.g., mCherry) expression to minimize the number of background cells in the screen that do not express a dCas9-effector. Cells are then transduced with vectors (e.g., lentiviral particles at a high multiplicity of infection) to induce expression of the guide RNAs specific to the screen (e.g., guide RNA targeting a CD71 promoter). Transduced cells are maintained for up to about five days in culture.

[0513] Cells that express lower levels of the target gene can be identified, for example, by sorting cells based on expression of the target gene (e.g., via fluorescent activated cell sorting and/or magnetic activated cell sorting).

[0514] Genomic DNA is extracted from the cells, and the integrated effector cassette is isolated by PCR, and used to generate libraries for HiSeq single end barcode sequencing. Gene effectors are identified that reduce expression of the target gene.

[0515] The approach can also be adapted to screen combinations of heterologous gene effectors.

### Example 2: Pilot Experiment Demonstrating Activation and Repression of Gene Expression by Complexes of the Disclosure

[0516] This example describes a pilot experiment demonstrating the ability of complexes of the disclosure to activate and repress expression of target genes, and the ability to detect upregulation and downregulation of target genes using methods of the disclosure.

[0517] A library of complexes that each contain a nuclease-dead Cas9 (dCas9) and a heterologous gene effector candidate peptide sequence was generated using methods described in Example 1. Synthetic DNA nucleotides encoding each heterologous gene effector and containing 5′ and 3′ cloning sequences were generated and cloned into the destination vector p-dCas9. A library of candidate effectors was pooled for the pilot screens. The library includes candidate transcriptional activators and candidate transcriptional repressors, including from genes that have been identified as modulating transcriptional activity (e.g., P300, TET1, TET2, TET3, HDAC3, HSF1 and ZIM3, MeCp2, DNMT3L, DNMT3a, DNMT3b, G9a, and EZH2).

[0518] A K562 cell line was used to test the impact of the complexes on gene expression. Cells were transduced with constructs encoding the candidate effectors to induce expression of complexes of the library. Cells were also transduced with lentiviral vectors to induce stable expression of guide RNAs to direct the dCas9-effectors to (i) a regulatory sequence of CD45 (activator screen, experimental condition), (ii) a regulatory sequence of CD71 (repressor screen, experimental condition), or (iii) GAL4 (controls). The transduced cells were sorted based on reporter gene expression to enrich for cells that express both the guide RNA and a dCas9-effector.

[0519] Transduced cells were maintained for up to about five days in culture, and expression of CD45 or CD71 was quantified via flow cytometry. Increased expression of CD45 was observed in experimental conditions in the activator screen (FIG. 6, top right panel), and reduced expression of CD71 was observed in experimental conditions in the repressor screen (FIG. 6, bottom right panel).

### Example 3: Viral Epigenetic Effector Screen Design

[0520] Heterologous gene effector candidate peptide sequences are designed to cover protein sequences from the viral genomes. Candidate sequences are selected based on:
[0521] (i) viral transcriptional regulators that have been experimentally validated by ChIP/ChIP-seq, EMSA, SELEX, reporter assays, binding assays, and/or crystal structures. Experimentally validated viral transcriptional regulators can represent viruses from, for example, any one or more of the families Adenoviridae, Arenaviridae, Bornaviridae, Coronaviridae, Filoviridae, Flaviviridae, Hepadnaviridae, Herpesviridae, Orthomyxoviridae, Papillomaviridae, Paramyxoviridae, Parvoviridae, Peribunyaviridae, Phenuiviridae, Pneumoviridae, Polyomaviridae, Poxviridae, Retroviridae, and Rhabdoviridae. Transcriptional regulators can be included from Liu et al., Human virus transcriptional regulators. Cell, 182(1), pp.22-37.
[0522] (ii) viral transcriptional regulators from human-bat shared viruses and viral proteins, such as viral families with documented zoonotic transmission from bats and/or viruses that have been demonstrated to function in human cells. Viral transcriptional regulators from human-bat shared viruses and viral proteins can represent viruses from, for example, any one or more of Flaviviridae, Lyssaviridae, Filoviridae, Paramyxoviridae, Orthomyxoviridae, Coronaviridae, Reoviridae, Togaviridae, Phenuviridae, and Hantaviridae. Sequences from Adenoviridae and poxviridae can be included, for example, due to a high degree of transcriptional regulator modularity in these viruses. Sequences can be obtained manually from the dBatVir database.
[0523] (iii) metagenomic virus genomes and viral proteins. Sequences can be obtained from, for example, data from studies evaluating the gut virome; genomes of Siphoviridae, podoviridae, and myoviridae that are abundant in human gut, contain transcriptional regulators, and occur in acidic environments; viral sequences detected in oceans; viral sequences detected in geothermal vents; sources that utilize structural data (e.g., X-ray, NMR) from public databases; records of archaea-tropic viruses (e.g., sulfolobus) from extreme environments (e.g., high-acid, high-temperature environments) that may be enriched for effectors with desirable properties such as acidic residues and persistent function due to evolutionary pressures favoring vertical versus horizontal transmission; and sequences manually obtained from public sources (e.g., NCBI).

[0524] Predictive filtering techniques can be applied to candidate sequences, for example, based on identification of suitable biophysical properties for core activator domains (e.g., down to 13 bp) through experiments in yeast; the presence of acidic, bulky hydrophobic, alpha helix, and/or negative charge; the presence of motif repeats that may influence duration of effect; and PADDLE-like convolutional neural network/transformer algorithms or similar predictive techniques.

### Example 4: Viral Epigenetic Effector Screen

[0525] This example describes identification and characterization of novel gene effectors (e.g., domains that modulate expression of human genes) from viral genomes.

[0526] A high throughput screen is conducted utilizing a library of complexes that each contain a nuclease-dead Cas9 (dCas9) and a heterologous gene effector candidate peptide sequence from a viral genome. The heterologous gene effector candidate peptide sequences (e.g., identified as in example 3) are fused to dCas9, recruited to target gene regulatory sequences (e.g., promoters) in human cells, and the effect on target gene expression determined (e.g., using techniques described for the human nuclear proteome screen in example 1).

[0527] 27799 oligos are designed targeting approximately 3500 genes, plus approximately 3000 controls. Positive and negative controls are used as disclosed in Example 1. Viral transcriptional regulators with published experimental data are used as a benchmark for assay performance, and known activities are manually organized to guide data analysis.

[0528] Gene effectors are identified that enhance or reduce expression of the target gene.

[0529] The approach can also be adapted to screen combinations of heterologous gene effectors.

### Example 5: Combinatorial Epigenetic Effector Screen

[0530] This example describes identification and characterization of novel combinations of gene effectors that modulate gene expression.

[0531] A high throughput screen is conducted utilizing a library of complexes that contain a nuclease-dead Cas9 (dCas9) complexed with combinations of heterologous gene effector candidate peptide sequences. The screen is designed to allow a systematic and large scale survey of combinations of gene effectors (e.g., genetic/epigenetic factors) in human cells.

[0532] In a first approach, chromatin regulators (CRs) and transcriptional regulators (TRs) from diverse protein families are drawn from literature and databases. Combinations of the CRs and TRs are screened to identify novel combinations of factors that modulate (e.g., increase or reduce) expression of target genes. The screen allows identification of combinations of factors that may not interact in their in vivo contexts (e.g., due to cell type specificity, cofactor or complex requirements, etc.) but could nevertheless mediate epigenetic and/or transcriptional effects when orthogonally recruited to a locus of interest.

[0533] CR gene effectors include functional domains from various classes of histone and DNA modifying enzymes (e.g., DNMTs, HATs, HMTs, etc.). These are primarily of human origin, but may also include factors derived from plants or other species. The CR library is in the order of ˜100 candidate gene effectors.

[0534] TR gene effectors include transcriptional regulatory domains from various families of TFs (e.g. KRAB, p65, MED, GTFs, etc.). Similar to the CR library, these domains will include primarily human sequences, and similarly in the order of ˜100 factors, providing approximately 10,000 unique combinations of CR+TR.

[0535] In a second approach, gene effectors identified in examples 1-3 are screened. The approach allows identification of novel effector domains whose activity can be augmented when deployed in combination with each other or with other effector domains (e.g., effector domains from literature). Paired libraries are generated comprising effectors from the initial screens that achieve activation or repression above a certain threshold, as well as other activators and repressors. These libraries are then tested in a pairwise fashion to identify combinations of effectors exhibit desirable (e.g., synergistic) activity.

[0536] An inducible system is used that facilitates orthogonal recruitment of candidate effector domains and allows thousands of possible combinations to be tested in a targeted or an unbiased manner. The inducibility and reversibility of the system also allows the persistence of observed effects on transcriptional activation or repression to be evaluated.

[0537] The system utilizes inducible heterodimeric protein pairs derived from Arabidopsis thaliana (PYL1-ABI and GID1-GAI). By fusing one protein from each heterodimeric pair to dCas9 and the cognate proteins to effector domains, effector recruitment to dCas9 is achieved by addition of the inducer molecules (the plant hormones ABA and GA). Up to 80 amino acid gene effectors are fused to the heterodimerization domains.

[0538] Each library element contains a unique molecular identifier (barcode), and the unique molecular identifiers are arranged in a way such that pair-end Illumina sequencing will deconvolute the combinations present in cells that pass selection thresholds. DNA encoding the up to 80 amino acid gene effector fragments and unique molecular identifiers is obtained in the form of approximately 300 nucleotide oligonucleotides. Lentiviral expression plasmids are generated, with single plasmids having a CR gene effector and a TR gene effector in-frame with GID1 and PYL1, respectively. An illustrative schematic of an expression construct for the combinatorial screen is provided in FIG. 7.

[0539] For compatibility with the screens described in examples 1-3, the same loci are targeted (CD45 for activation, CD71 for repression). A stable K562 cell line expressing GAI-dCas9-ABI is generated, for example, using the expression construct illustrated in FIG. 8.

[0540] The combinatorial libraries are transduced as lentiviral particles into K562 cells stably expressing GAI-dCas9-ABI. Transduced cells are exposed to ABA and GA at concentrations experimentally determined to induce the recruitment of PYL— and GID1—tagged candidate effector domains. The assembled complex of gene effectors and dCas9 is allowed to remain associated with the target gene locus (CD71 in repressor, and CD45 in activator screens) for up to 5 days before the withdrawal of the inducing hormones.

[0541] The activity of effector combinations is determined by sorting and collection of the desired population of cells at 5 day intervals post-induction for up to 30 days. The identities of candidate combinations is then determined by sequencing the unique molecular identifiers from DNA extracted from isolated cells at the indicated times.

[0542] FIG. 9 illustrates modulation of CD45 and CD71 expression by complexes of the disclosure that comprise combinations of a transcriptional regulator and a chromatin regulator associated with dCas9. The top images show an illustrative activator screen for CD45, and the bottom images show an illustrative repressor screen for CD71. The graphs on the right illustrate repression of CD71 expression by a complex of the disclosure, and an increase in CD45 expression.

[0543] Combinations of gene effectors are identified that increase or repress expression of genes of interest.

[0544] Further iterations of the screen can be conducted with additional candidate gene effectors, and/or to identify ternary complexes. For example, stable lines of K562 cells can be generated with GA1-dCas-binary effector, and GID1-tagged individual effectors can be introduced.

### Example 6: Therapeutic Applications of the Systems and Methods Disclosed Herein

[0545] The systems and methods disclosed herein can be used, for example, to identify a novel gene effector complex. The novel gene effector complex can comprise a novel gene effector and/or a novel combination of a plurality of gene effectors. The novel gene effector identified, as disclosed herein, can be unique for a specific target gene, a specific cell type, a specific target disease, a specific subject, etc.

a. Same Cell Type, and Different Target Genes

[0546] The library of complexes, as disclosed herein, can be used to identify a novel gene effector complex for different target genes from the same cell type. Within the same cell type, a first novel gene effector complex identified to regulate (e.g., optimally upregulate or downregulate) expression or activity level of a first gene may be different than a second novel gene effector complex identified to regulate (e.g., optimally upregulate or downregulate) expression or activity level of a second gene (that is different than the first gene).

[0547] For example, within the same stem cell type, a first novel gene effector complex identified to optimally enhance expression or activity level of telomerase for inducing rejuvenation of the stem cell may be different than a second novel gene effector complex identified to optimally enhance expression or activity level of a transforming growth factor for tissue repair/regeneration.

b. Different Cell Types, and Same Target Gene

[0548] The library of complexes, as disclosed herein, can be used to identify novel gene effector complex for the same target gene but in different cell types. Even if the same target gene is utilized for the screening, a first novel gene effector complex identified to regulate (e.g., optimally upregulate or downregulate) expression or activity level of the target gene in a first cell type may be different than a second novel gene effector complex identified to regulate (e.g., optimally upregulate or downregulate) expression or activity level of the same target gene in a second cell type.

[0549] For example, given the same target gene, a first novel gene effector complex identified to optimally enhance expression or activity level of a gene encoding telomerase for inducing rejuvenation of a stem cell may be different than a second novel gene effector complex identified to optimally enhance expression or activity level of the same gene encoding the telomerase for inducing rejuvenation of a more differentiated cell (e.g., a skin cell, a muscle cell, a neuron, etc.).

[0550] In a different example, given the same target gene, a first novel gene effector complex identified to optimally enhance expression or activity level of a gene encoding telomerase for inducing rejuvenation of a first type of differentiated cell (e.g., a skin cell) may be different than a second novel gene effector complex identified to optimally enhance expression or activity level of the same gene encoding the telomerase for inducing rejuvenation of a second type of differentiated cell (e.g., a muscle cell).

c. Different Cell Types, and Different Target Genes

[0551] The library of complexes, as disclosed herein, can be used to identify novel gene effector complex for different target genes in different cell types. A first novel gene effector complex identified to regulate (e.g., optimally upregulate or downregulate) expression or activity level of a first target gene in a first cell type may be different than a second novel gene effector complex identified to regulate (e.g., optimally upregulate or downregulate) expression or activity level of a second target gene in a second cell type.

[0552] For example, a first novel gene effector complex identified to optimally enhance expression or activity level of a first gene encoding myoblast determination protein 1 (MyoD) in a muscle stem cell (or a muscle satellite cell) for inducing myogenesis may be different than a second novel gene effector complex identified to optimally enhance expression or activity level of a second gene encoding Runt-related transcription factor 2 (RUNX2) for inducing osteogenesis in a mesenchymal stem cell (MSC).

### d Different Subjects, and Same Target Gene

[0553] The library of complexes, as disclosed herein, can be used to identify novel gene effector complex for the same target gene, in the same target cell type, but from different target cell source. In some cases, the target cells of the same type may be from different subjects. The different subjects may be different by, for example, gender, age, condition (e.g., disease state), etc. A first novel gene effector complex identified to regulate (e.g., optimally upregulate or downregulate) expression or activity level of a target gene in a cell type from a first subject may be different than a second novel gene effector complex identified to regulate (e.g., optimally upregulate or downregulate) expression or activity level of the same target gene in the same cell type from a second subject that is different from the first subject.

[0554] For example, given the same target gene, a first novel gene effector complex identified to optimally enhance expression or activity level of a gene encoding telomerase for inducing rejuvenation of a stem cell type from a female subject may be different than a second novel gene effector complex identified to optimally enhance expression or activity level of the same gene encoding the telomerase in the same stem cell type from a male subject.

### Example 7: Design for Engineered Synthetic Reporter (ESR)

[0555] FIG. 10 schematically demonstrates an example structure of an expression vector for an ESR. The expression vector can comprise a plurality of copies (e.g., 7 copies) of a heterologous polynucleotide sequence. Each heterologous polynucleotide sequence can comprise a synthetic guide target (e.g., targetable by a guide RNA, such as SEQ ID NO: 49334), a plurality of CRISPR PAM sequences (e.g., Cas12a PAM sequence such as “TTTA”, SpCas9 PAM sequence such as “CGG”, SaCas9 PAM sequence such as “CGGAG”, and/or an Upstream Activating Sequence (UAS) sequence, and some of these components may overlap with each other (e.g., may share one or more common nucleobases, such as a common polynucleotide sequence). The UAS (e.g., upstream of a promoter) can be targeted by a transcription activator, and such targeting can be sufficient to regulate (e.g., enhance) expression of a target gene under the control of the promoter.

[0556] The synthetic guide target can comprise a polynucleotide sequence and an additional polynucleotide sequence from two different sources (e.g., a polynucleotide sequence (e.g., 10 nucleobase length) from a guide target of human CD45 (chr1) and an additional polynucleotide sequence (e.g., 10 nucleobase length) from a guide target of human CD71 (chr3)).

[0557] The UAS can be from yeast GAL4 promoter (e.g., bound by GAL4 protein in yeast). The UAS may not exhibit or affect any function in mammalian cells (e.g., human cells), thus minimizing side effects or off target effects of having the expression vector in the mammalian cells.

[0558] The plurality of copies of the heterologous polynucleotide sequence can be upstream of a gene, such as a target gene (e.g., a gene and its promoter sequence). The target gene can encode a protein naturally present in the cell. The target gene can encode a protein that can be naturally occurring in the cell. Alternatively, the target gene can encode a protein that is not naturally occurring in the cell (e.g., a reporter protein, for instance a fluorescent protein, such as green fluorescent protein (GFP)). The target gene can be under the control of a promoter, such as strong constitutive human promoter (EF1a) or a weak minimal viral promoter (e.g., miniCMV).

[0559] In some examples, a population of ESR cells comprising the expression vector can be treated with a library of different heterologous gene effectors and a guide nucleic acid sequence against the synthetic guide target, and change in the expression level of the target gene can be measured to screen for lead heterologous gene effectors (e.g., repressors for an expression vector comprising a strong constitutive human promoter, or activators for an expression vector comprising a weak minimal viral promoter).

[0560] FIG. 11 schematically shows an example sequence of the ESR. FIG. 12 schematically shows an example sequence of a control reporter vector. In some cases, the spacing between each synthetic guide target sequence in the ESR can be different from that in the control reporter vector. For example, the spacing between each synthetic guide target sequence in the ESR can be longer than that in the control reporter vector.

### Example 8: Generation of Reporter Cell Lines Comprising the ESR

[0561] Various cells of different types can be engineered to comprise the ESR (e.g., as demonstrated in Example 7), to generate various types of reporter cell lines, e.g., that can be used in screening for heterologous gene effector domain(s) and complex(es) thereof that exhibit desirable properties for modulating target gene expression.

[0562] K562 cells can be engineered with ESR comprising miniCMV-GFP (ESRI 11), to screen for novel gene activators. K562 cells can be engineered with ESR comprising EF1a-GFP (ESR211), to screen for gene repressors. 293T cells can be engineered with ESR comprising miniCMV-GFP (ESR121), for validation of gene activators. 293T cells can be engineered with ESR comprising EF1a-GFP (ESR221), for validation of gene repressors.

[0563] FIG. 13 shows flow cytometry data analysis of a reporter 293T cell line engineered with the ESR encoding miniCMV-GFP (ESR121), either (i) untransfected, (ii) transfected with dCas9 and a guide RNA against the ESR vector (dCas9+sgT), (iii) transfected with dCas9-VPR activator and a guide RNA against the ESR vector (dCas9-VPR+sgT), or (iv) transfected with dCas9-VPR activator and a non-targeting control guide RNA against the ESR vector (dCas9-VPR+sgNT). FIG. 14 shows flow cytometry data analysis of a reporter 293T cell line engineered with the ESR encoding EF1a-GFP (ESR221), either (i) untransfected, (ii) transfected with dCas9 and a guide RNA against the ESR vector (dCas9-empty), (iii) transfected with dCas9-KRAB repressor and a guide RNA against the ESR vector (dCas9-KRAB), or (iv) transfected with dCas9-KRAB-DNMT3L repressor and a guide RNA against the ESR vector (dCas9-KL). Based on FIG. 13 and FIG. 14, 293T ESR cells exhibit potent activation or repression following dCas9-VPR or dCas9-KRAB transfection.

[0564] FIG. 15 shows flow cytometry data analysis of a reporter K562 cell line engineered with the ESR encoding miniCMV-GFP (ESR111), either (i) untransfected or (ii) transfected with dCas9-VPR and a guide RNA against the ESR vector (dCas9-VPR). FIG. 16 shows flow cytometry data analysis of a reporter K562 cell line engineered with the ESR encoding EF1a-GFP (ESR211), either untransfected and measured on day 3 (untransfected D3), untransfected and measured on day 14 (untransfected D14), transfected with dCas9-KRAB and a guide RNA against the ESR vector and measured on day 3 (dCas9-KRAB D3), transfected with dCas9-KRAB and a guide RNA against the ESR vector and measured on day 4 (dCas9-KRAB D4), transfected with dCas9-KRAB and a guide RNA against the ESR vector and measured on day 5 (dCas9-KRAB D5), transfected with dCas9-KRAB and a guide RNA against the ESR vector and measured on day 6 (dCas9-KRAB D6), transfected with dCas9-KRAB and a guide RNA against the ESR vector and measured on day 10 (dCas9-KRAB D10), or transfected with dCas9-KRAB and a guide RNA against the ESR vector and measured on day 14 (dCas9-KRAB D14). Based on FIG. 15 and FIG. 16, K562 ESR cells exhibit potent activation or repression following dCas9-VPR or dCas9-KRAB mRNA transfection.

[0565] FIG. 17 shows flow cytometry data analysis of a reporter 293T cell line engineered with the ESR encoding miniCMV-GFP (ESR121), either (i) transfected with dCasMINI and a guide RNA against the ESR vector (dCasMINI+sg20), (ii) transfected with dCasMINI-VPR and the guide RNA against the ESR vector (dCasMINI-VPR+sg20), (iii) transfected with dCasMINI and a different guide RNA against the ESR vector (dCasMINI+sg23), (iv) transfected with dCasMINI-VPR and the different guide RNA against the ESR vector (dCasMINI-VPR+sg23), or (v) transfected with dCasMINI-VPR and a control non-specific guide RNA sequence (dCasMINI-VPR+sgNT). FIG. 18 shows flow cytometry data analysis of a reporter 293T cell line engineered with the ESR encoding EF1a-GFP (ESR221), either (i) transfected with dCasMINI and a guide RNA against the ESR vector (dCasMINI+sgT), (ii) transfected with dCasMINI-KRAB and a guide RNA against the ESR vector (dCasMINI-KRAB+sgT), or (iii) transfected with dCasMINI-KRAB and a control non-specific guide RNA sequence (dCasMINI-KRAB+sgNT). Based on FIG. 17 and FIG. 18, 293T ESR cells is strongly repressed by dCasMini-KRAB, but activation by dCasMINI-VPR is less robust.

### Example 9: Effector library screen

[0566] A custom DNA oligo library encoding>46,000 candidate heterologous gene effectors (each 255 bp), paired to unique 12mer DNA unique molecular identifiers (e.g., barcodes) and cloning homology arms, was cloned into dCas9 lentiviral expression plasmid. The candidate heterologous gene effectors encoded included each of SEQ ID NOs: 16-47350 and 49353-50052, which includes candidate heterologous gene effectors derived from human proteins (e.g., SEQ ID NOs: 16-13605, identified as described in Example 1), control effectors (e.g., SEQ ID NOs: 13606-16154), candidate heterologous gene effectors derived from viral proteins (e.g., SEQ ID NOs: 16155-43953, identified as described in examples 3 & 4), and additional control effectors (e.g., SEQ ID NOs: 43954-47350). Additional peptide sequences encoded downstream of putative stop codons within the 255 bp sequences are provided in SEQ ID NOs: 47351-49333.

[0567] In parallel, custom GFP reporters (engineered synthetic reporter (ESR)-GFP) were generated by placing 7 copies of a unique guide RNA targeting sequence (tttaGTTGTTCTAAACGCTCTGAGegg, SEQ ID NO: 49339; CasMini and Cas9 PAM sequences indicated in bold and underlined text, respectively) upstream of a minimal CMV promoter driving GFP to test for activators, or a constitutive human EF1a promoter driving GFP to test for repressors (e.g., as described in Example 7 and FIG. 10). These reporter plasmids were packaged into lentivirus and transduced into K562 cells. Following puromycin selection for transduced cells, individual cells were isolated by limiting dilution. After clonal expansion, several clones of each reporter cell line were tested by transfection of canonical modulators and favorable clones were selected for downstream experiments.

[0568] sgRNA-BFP expression cassettes targeting ESR-GFP, CD45, or CD71 were individually transduced into ESR-GFP or WT K562 cells followed by FACS for BFP+ cells. The dCas9-candidate effector library was packaged into lentivirus and delivered into K562 cells expressing the appropriate sgRNAs. Transduced cells were enriched by blasticidin selection, followed by fluorescence-activated cell sorting (FACSAria) to separate populations of interest (GFP-ON cells for activation and GFP-OFF cells for repression) at 10 days post-transduction. Sorted populations of interest were further enriched by culturing for 6 additional days and subjected to 4-way gated FACS separation into discrete bins based on GFP fluorescence intensity. Genomic DNA was extracted from each discrete bin, as well as bulk GFP-ON and GFP-OFF cells, then processed in parallel into next-generation sequencing (NGS) libraries and sequenced to identify barcodes present in each sample (Illumina Next-Seq, 1×75 bp). The workflow is summarized in FIG. 20.

### Screen Using Engineered Synthetic Reporter (ESR) System

[0569] The library of candidate heterologous gene effectors was screened in ESR-GFP reporter K562 cells. The ESR-GFP reporters exhibited high dynamic range in response to activation with control dCas9-VPR and repression in response to control dCas9-KRAB (FIG. 21A).

[0570] Read count matrices for each library were generated based on alignment of sequenced barcodes corresponding to heterologous gene effectors. All subsequent data analysis was performed using R version 4.1.0.

[0571] For the activation screen, technical replicates for GFP-OFF libraries were collapsed (counts per barcode were summed) resulting in two GFP-OFF replicates. For the GFP-ON conditions, one GFP-ON library was collected at 10 days post-transduction and another was built in silico by taking the weighted sum of all GFP-ON gates (collected after a further 6 days of enrichment). DESEQ2 (version 1.32.0) was used to identify statistically significant activator elements that were enriched in the two GFP-ON libraries compared to the two GFP-OFF libraries. A volcano plot showing hits in the activator screen is provided in FIG. 22A.

[0572] For the repressor screen, technical replicates for GFP-ON libraries were collapsed (counts per barcode were summed) resulting in two GFP-ON replicates. For the GFP-OFF conditions, one GFP-OFF was library collected at 10 days post-transduction and another that was built in silico by taking the weighted sum of all GFP-OFF gates (collected after a further 6 days of enrichment). DESEQ2 (version 1.32.0) was used to identify statistically significant suppressor elements that were enriched in the two GFP-OFF libraries compared to the two GFP-ON libraries. A volcano plot showing hits in the repressor screen is provided in FIG. 22B.

### Screen Using Endogenous Targets

[0573] The library of candidate heterologous gene effectors was screened in wild type K562 cells stably expressing sgRNAs against two endogenous human gene targets: lowly-expressed CD45 to screen for activation, or highly-expressed CD71 to screen for repression (FIG. 21B). Transduced cells were enriched by FACS, then stained with respective fluorophore-conjugated antibodies prior to 4-way gated FACS binning followed NGS library preparation and sequencing as above.

[0574] Read count matrices for each library were generated based on alignment of sequenced barcodes corresponding to heterologous gene effectors. All subsequent data analysis was performed using R version 4.1.0. For the activation screen (CD45), two replicates of the lowest GFP gate (GFP-OFF) were compared to two replicates of the highest GFP gate (GFP-ON) to identify novel activators. Any barcodes that had zero read counts in all conditions were removed, and then DESEQ2 (version 1.32.0) was used to identify statistically significant activator elements that were enriched in the two GFP-ON libraries compared to the two GFP-OFF libraries. A volcano plot showing hits in the activator screen is provided in FIG. 23A. The analysis for the repressor screen (CD71) was identical except that statistically significant repressor elements were identified that were enriched in the two GFP-OFF libraries compared to the two GFP-ON libraries. A volcano plot showing hits in the repressor screen is provided in FIG. 23B.

### Example 10: Arrayed-Format Heterologous Gene Effector Validations at an Endogenous Human Gene Locus

[0575] The top ˜200 candidate heterologous gene effectors identified in the screens of Example 9 ranked by false discovery rate (FDR) were individually re-synthesized and cloned into dCasMini expression plasmid for experimental validation by transient plasmid transfection in arrayed 96-well plate format. Wild-type HEK293T cells were seeded in 96-well plates at a density of 20,000 cells per well. 16 hours after seeding, cells were co-transfected with uniform masses of plasmids expressing sgRNA and candidate effector complex (effector-dCasMini fusion) in arrayed format such that each well received a different single candidate effector construct to be tested, but the same targeting sgRNA (sgCXCR4) across all wells. Each well received 100ng of effector-encoding plasmid and 50ng sgRNA plasmid, and experiments were performed in technical triplicate. Negative controls were dCas9 and dCasMini expression plasmids without any effector fusion, co-transfected with targeting and non-targeting sgRNA plasmids. Positive controls were dCas9 and dCasMini fusions to canonical transcriptional modulators: KRAB for repressor controls and p65, Rta, VP64, and VPR for activation controls.

[0576] At 3 and 7 days post-transfection (d.p.t.), cells were stained with CXCR4-APC conjugated antibody (BioLegend) and analyzed by flow cytometry (Cytoflex LX) to monitor CXCR4 protein expression, with analysis gates (FlowJo) to ensure measurements of live, singlet, and double-transfected cells to verify both effector and sgRNA plasmid expression via mCherry and BFP fluorescence, respectively. Geometric mean of APC fluorescence for each modulator was normalized against that of negative controls and reported as fold-change relative to negative controls.

[0577] The impact of a number of candidate effectors on gene expression was shown to positively correlate between two independent experiments and between time points (FIG. 24A; the x-axis indicates normalized fluorescence at 3 d.p.t. (first of two independent experiments, each performed in triplicate), and the y-axis indicates normalized fluorescence measured in a second independent experiment (performed in triplicate). Data points represent dCasMini-modulator fusions unless indicated (dCas9). Candidate effectors are labelled with prefixes beginning with “EPIC” e.g., “EPICXV”, “EPIC9V”, “EPICXH”, or “EPIC9H” etc., followed by a numerical designation. Effectors were identified that resulted in upregulation of CXCR4 expression on day 3 and/or day 7 (e.g., EPICXV.1, SEQ ID NO: 23631; EPICXV.8, SEQ ID NO: 35737; EPICXV.3, SEQ ID NO: 23639); EPICXV.16, SEQ ID NO: 17629; or EPICXV.13, SEQ ID NO: 38138; or downregulation of CXCR4 expression on day 3 and/or day 7 (e.g., EPICXV.55, SEQ ID NO: 19860; EPICXV.66, SEQ ID NO: 40986; EPICXV.71, SEQ ID NO: 33890). These candidate effectors altered expression of the target gene to comparable or superior degree compared to control activators or suppressors (FIG. 24B, representative flow cytometry histograms at 3 d.p.t. for fusions of candidate heterologous gene effectors to dCasMini). The candidate effectors induced the observed changes in target gene expression despite being considerably smaller than the control effectors (FIG. 24C).

### Example 11: Gene Expression Modulation at Endogenous Loci

[0578] This example demonstrates the effect of candidate heterologous gene effectors fused to dCasMini on expression of endogenous target genes.

[0579] Wildtype HEK293T cells were seeded and transiently transfected as in Example 10 with plasmids expressing candidate effector-dCasMini fusion and sgRNA targeting promoters of human IFNG, CD45, or CD2.

[0580] At 72 hours post-transfection, supernatants of cells transfected with sgRNA targeting IFNG were collected to monitor IFNG protein expression by ELISA, after verifying both effector and sgRNA plasmid expression via mCherry and BFP fluorescence, respectively, by fluorescence microscopy (EVOS FL). Interferon gamma ELISA protein concentration for each effector was normalized against that of negative controls and reported as fold-change relative to negative controls. A range of effects on interferon gamma production was observed (FIG. 25A).

[0581] At 2 days post-transfection, cells transfected with sgRNA targeting CD45 were stained with APC-conjugated anti-CD45 antibody (BioLegend) and analyzed by flow cytometry (Cytoflex LX), with analysis gates (FlowJo) to ensure measurements of live, singlet, and double-transfected cells to verify both effector and sgRNA plasmid expression via mCherry and BFP fluorescence, respectively. Geometric mean of APC fluorescence for each effector was normalized against that of negative controls and reported as fold-change relative to negative controls. A range of effects on CD45 expression was observed (FIG. 25B).

[0582] At 3 and 5 days post-transfection with sgRNA targeting CD2, were stained with APC-conjugated anti-CD2 antibody (BioLegend) and analyzed by flow cytometry (Cytoflex LX), with analysis gates (FlowJo) to ensure measurements of live, singlet, and double-transfected cells to verify both effector and sgRNA plasmid expression via mCherry and BFP fluorescence, respectively. Geometric mean of APC fluorescence for each effector was normalized against that of negative controls and reported as fold-change relative to negative controls. A range of effects on CD2 expression was observed (FIGS. 25C and 25D).

### Example 12: Gene Expression Modulation in Reporter Cells

[0583] HEK293T cells bearing a stably integrated TRE3G promoter-driven GFP reporter were seeded and transiently transfected as in Example 10 with plasmids expressing candidate effector-dCasMini fusions and sgRNA targeting the synthetic TET promoter. 48 hours post-transfection, cells were analyzed by flow cytometry (Cytoflex LX) to monitor GFP expression, with analysis gates (FlowJo) to ensure measurements of live, singlet, and double-transfected cells to verify both effector and sgRNA plasmid expression via mCherry and BFP fluorescence, respectively. Geometric mean of GFP fluorescence for each effector was normalized against that of negative controls and reported as fold-change relative to negative controls. A range of effects on reporter expression was observed (FIG. 26A).

[0584] HEK293T cells bearing a stably integrated GFP synthetic reporter driven by low-expression miniCMV promoter (cell line ESR121) were seeded, transiently transfected as in Example 10 with plasmids expressing candidate effector-dCasMini fusions and sgRNA targeting the reporter, and analyzed as above 2 days post-transfection to measure transcriptional activation by dCasMini-effector fusions. A range of effects on reporter expression was observed (FIG. 26B).

### Example 13: Repression of Gene Expression in Reporter Cells

[0585] Effectors with repression activity identified from the library of candidate effectors derived from human peptide sequences were tested individually as fusions to dCasMini. HEK293T cells bearing a stably integrated GFP synthetic reporter driven by high-expression EFlu promoter (cell line ESR221) were seeded, transiently transfected as in Example 10 with plasmids expressing candidate effector-dCasMini or —dCas9 fusions and sgRNA targeting the reporter, and analyzed at 5 days post-transfection to measure transcriptional repression by dCasMini-effector fusions. Illustrative candidate effector domains EPICXH.6 (SEQ ID NO: 9066) and EPICXH.1 (SEQ ID NO: 1102) showed strong repression of reporter expression (FIG. 27A).
[0586] Additional candidate human repressor domains were tested as fusions to dCas9. HEK293T cells bearing a stably integrated GFP synthetic reporter driven by high-expression EFlu promoter (cell line ESR221) were seeded, transiently transfected, and analyzed as above at 5 days post-transfection to measure transcriptional suppression. Illustrative effector domains EPIC9H.1 (SEQ ID NO: 1102), EPIC9H.2 (SEQ ID NO: 5543), EPIC9H.3 (SEQ ID NO: 2057), EPIC9H.4 (SEQ ID NO: 15646), EPIC9H.5 (SEQ ID NO: 11948), and EPIC9H.6 (SEQ ID NO: 9066) showed strong repression of reporter expression (FIG. 27B).

### Example 14: Durability of Transcriptional Effects at Endogenous CXCR4 Locus

[0587] Wild-type HEK293T cells were transfected with plasmids expressing sgRNA targeting CXCR4 and candidate effector complex (effector-dCasMini fusion). Transfected cells were serially analyzed for transcriptional modulation of CXCR4 as in Example 10 on day 3, 7, 15, and 28 post-transfection (FIG. 28A, control effectors KRAB, VP64, and VPR, are depicted as clear circles and novel effectors are shown as dark circles representing the mean of replicates for each individual modulator). Normalized fluorescence values for selected individual novel modulators relative to positive controls at each time point are shown in FIG. 28B, with modulators ranked by effect size at each time point. Candidate heterologous gene effectors showing interesting activity included EPICXV.1 (SEQ ID NO: 23631), EPICXV.95 (SEQ ID NO: 40913), EPICXV.92 (SEQ ID NO: 22707), EPICXV.90 (SEQ ID NO: 42623), EPICXV.65 (SEQ ID NO: 22149), EPICXV.80 (SEQ ID NO: 25430), EPICXV.43 (SEQ ID NO: 34047), EPICXV.58 (SEQ ID NO: 21166), EPICXV.69 (SEQ ID NO: 25555), EPICXV.67 (SEQ ID NO: 40985), EPICXV.79 (SEQ ID NO: 38780), and EPICXV.71 (SEQ ID NO: 33890). A number of candidate effectors exhibited interesting activity, including strong upregulation of CXCR4 expression by EPICXV.1, which was observed at every time point.

### Example 15: Durability of Transcriptional Effects

[0588] HEK293T cells bearing a stably integrated GFP synthetic reporter driven by high-expression EFlu promoter were seeded, transiently transfected, with plasmids expressing candidate effector-dCasMini fusions and sgRNA targeting the reporter, and analyzed serially up to 77 days post-transfection. Durable repression of gene expression was observed for several candidate heterologous gene effectors, including EPICXV.67 (SEQ ID NO: 40985) (FIG. 29A, positive control suppression effectors are indicated as dashed lines, while novel modulators are solid lines.

[0589] Reporter gene expression is shown over time in FIG. 29B for a positive control dCas9-KAL (a construct for persistent suppression comprising KRAB, DNMT3A, and DNMT3L domains fused to dCas9), demonstrating increased repression of GFP over progressive time points. Representative histograms for a negative control, positive controls, and a candidate heterologous gene effector (EPICXV.97) are provided in FIG. 29C, showing the candidate effector shows a strong and durable effect on gene expression.

[0590] Longitudinal measurements of expression of an mCherry reporter, indicative of expression of the heterologous gene effector, showed that expression of the effector drops precipitously after 6-9 d.p.t. and remains undetectable throughout subsequent time points, suggesting that any transcriptional effects observed beyond 9 d.p.t. are not attributable to maintained expression of the effector (FIG. 29D). The strong and durable effects on gene expression were observed despite the small size of the effector domain (encoded by a 255 nucleotide coding sequence) as compared to domains in control effectors (FIG. 29E) and fusion proteins (FIG. 29F).

[0591] Data collected on day 77 post-transfection showed that a number of candidate heterologous gene effectors showed varying degrees of repression of target gene expression that endured to this time point (FIG. 29G). Effectors exhibiting durable effects on expression included EPICXV.67 (SEQ ID NO: 40985), EPICXV.92 (SEQ ID NO: 22707), EPICXV.90 (SEQ ID NO: 42623), EPICXV.95 (SEQ ID NO: 40913), EPICXV.80 (SEQ ID NO: 25430), EPICXV.58 (SEQ ID NO: 21166), EPICXV.43 (SEQ ID NO: 34047), EPICXH.1 (SEQ ID NO: 1102), EPICXV.79 (SEQ ID NO: 38780), EPICXV.71 (SEQ ID NO: 33890), and EPICXV.69 (SEQ ID NO: 25555).

### Example 16: Comparison of Endogenous and Synthetic Reporter Data

[0592] Data collected for heterologous gene effectors was compared for effects on expression of endogenous gene CXCR4 and ESR-GFP synthetic reporter cells (FIG. 30; identified effectors include EPICXV.81 (SEQ ID NO: 21015), EPICXV.87 (SEQ ID NO: 32678), and other effectors described herein). A correlation can be observed between normalized GFP fluorescence in ESR-GFP synthetic reporter cells (averaged across all time points from 3 to 77 d.p.t.; y-axis) and normalized CXCR4-APC fluorescence (averaged across all time points from 3 to 28 d.p.t.; x-axis).

1. (canceled)

2. A method, comprising:
(a) contacting a population of cells with a library of complexes, wherein an individual complex of the library comprises:
(i) a heterologous gene effector that is different from heterologous gene effectors in other complexes of the library; and
(ii) a guide nucleic acid sequence that exhibits 100% sequence identity to guide nucleic acid sequences in the other complexes of the library,
wherein the heterologous gene effector and the guide nucleic acid sequence form the individual complex that exhibits specific binding to a target endogenous gene in the population of cells, and
wherein the heterologous gene effector comprises a viral gene effector;
(b) upon the contacting, sorting the population of cells based on a change in expression or activity level of the target endogenous gene in the population of cells; and
(c) identifying one or more lead heterologous gene effectors of the library that effect the change.

3-51. (canceled)

52. A complex comprising a guide moiety and a heterologous gene effector, wherein the heterologous gene effector comprises an amino acid sequence with at least about 70% sequence identity to any one of SEQ ID NOs: 23631, 1102, 2057, 5543, 9066, 11948, 15646, 17629, 19860, 21015, 21166, 22149, 22707, 23639, 25430, 25555, 32678, 33890, 34047, 35737, 38138, 38780, 40913, 40985, 40986, or 42623.

53. (canceled)

54. The complex of claim 52, wherein the heterologous gene effector comprises the amino acid sequence of any one of SEQ ID NOs: 23631, 1102, 2057, 5543, 9066, 11948, 15646, 17629, 19860, 21015, 21166, 22149, 22707, 23639, 25430, 25555, 32678, 33890, 34047, 35737, 38138, 38780, 40913, 40985, 40986, or 42623.

55. The complex of claim 52, wherein the amino acid sequence has at least 90% sequence identity to SEQ ID NO: 23631.

56. (canceled)

57. The complex of claim 52, wherein the amino acid sequence has at least 90% sequence identity to SEQ ID NO: 33890.

58. (canceled)

59. The complex of claim 52, wherein the amino acid sequence has at least 90% sequence identity to SEQ ID NO: 40985.

60. (canceled)

61. The complex of claim 52, wherein the heterologous gene effector contains less than 500 amino acids.

62. (canceled)

63. (canceled)

64. The complex of claim 52, wherein the guide moiety comprises a guide nucleic acid sequence.

65. The complex of claim 64, wherein the guide nucleic acid sequence comprises between about 10 and about 30 nucleotides.

66. The complex of claim 64, wherein the guide nucleic acid sequence is a guide RNA.

67. (canceled)

68. The complex of claim 52, wherein the guide moiety comprises a nuclease or a part thereof.

69-71. (canceled)

72. The complex of claim 68, wherein the nuclease or part thereof is a nuclease deactivated Cas (dCas) protein or part thereof.

73. The complex of claim 52, the guide moiety and the heterologous gene effector are fused to each other.

74. The complex of claim 52, wherein the guide moiety and the heterologous gene effector are non-covalently coupled to each other.

75. (canceled)

76. (canceled)

77. A vector comprising the complex of claim 52.

78. A vector comprising a nucleic acid that encodes the heterologous gene effector of claim 52.

79. The vector of claim 78, wherein the vector further comprises a nucleic acid that encodes the guide moiety or a component thereof.

80. (canceled)

81. (canceled)

82. A population of cells comprising the complex of claim 52.

83. A method of modulating expression or activity of a target gene, the method comprising contacting a population of cells that comprise the target gene with the complex of claim 52.

84-89. (canceled)

90. A method of treating a subject in need thereof, the method comprising administering to the subject the complex of claim 52, thereby modulating expression or activity of a target gene in a population of cells in the subject.

91-103. (canceled)

104. An expression vector comprising: a plurality of heterologous polynucleotide sequences, wherein each heterologous polynucleotide sequence of said plurality of heterologous polynucleotide sequences exhibits at least about 80% sequence identity to the polynucleotide sequence of any one of SEQ ID NOs: 49334-49338.

105. A nucleic acid molecule comprising:
a heterologous polynucleotide sequence is a chimeric sequence comprising (i) a CRISPR target sequence and (ii) a CRISPR protospacer adjacent motif (PAM) sequence and an additional CRISPR PAM sequence that are different,
wherein said CRISPR target sequence is flanked by said CRISPR PAM sequence and said additional CRISPR PAM sequence.

106. A nucleic acid molecule comprising:
a plurality of heterologous polynucleotide sequences, wherein:
(i) each heterologous polynucleotide sequence of said plurality of heterologous polynucleotide sequences comprises a polynucleotide sequence and an additional polynucleotide sequence that are derived from different human chromosomes; and
(ii) a size of said each heterologous polynucleotide sequence is at most about 50 nucleobases.

The application's sequence listing, which the Patent Office published only in electronic form, follows.

SEQUENCE LISTING (50032 sequences)

SEQ ID NO: 1 - protein, 5 aa, synthetic construct
  REGION 1..5: note = Description of Artificial Sequence: Syntheticpeptide
GGGGS

SEQ ID NO: 2 - protein, 4 aa, synthetic construct
  REGION 1..4: note = Description of Artificial Sequence: Syntheticpeptide
GGGS

SEQ ID NO: 3 - skipped

SEQ ID NO: 4 - protein, 18 aa, synthetic construct
  REGION 1..18: note = Description of Artificial Sequence: Syntheticpeptide
KESGSVSSEQLAQFRSLD

SEQ ID NO: 5 - protein, 14 aa, synthetic construct
  REGION 1..14: note = Description of Artificial Sequence: Syntheticpeptide
EGKSSGSGSESKST

SEQ ID NO: 6 - protein, 12 aa, synthetic construct
  REGION 1..12: note = Description of Artificial Sequence: Syntheticpeptide
GSAGSAAGSGEF

SEQ ID NO: 7 - protein, 5 aa, synthetic construct
  REGION 1..5: note = Description of Artificial Sequence: Syntheticpeptide
EAAAK

SEQ ID NO: 8 - protein, 5 aa, synthetic construct
  REGION 1..5: note = Description of Artificial Sequence: Syntheticpeptide
EAAAR

SEQ ID NO: 9 - protein, 5 aa, synthetic construct
  REGION 1..5: note = Description of Artificial Sequence: Syntheticpeptide
PAPAP

SEQ ID NO: 10 - protein, 12 aa, synthetic construct
  REGION 1..12: note = Description of Artificial Sequence: Syntheticpeptide
AEAAAKEAAAKA

SEQ ID NO: 11 - DNA, 15 bp, synthetic construct
  misc_feature 1..15: note = Description of Artificial Sequence: Syntheticoligonucleotide
  source 1..15: mol_type = other DNA
gcagtggtggacata

SEQ ID NO: 12 - DNA, 255 bp, Homo sapiens
  source 1..255: mol_type = unassigned DNA
atgtctatgccagaacatgttttaacgagtgaatccatgcatgtgtgtgacattggacatgttgaacatatggtgcatgatagtgtagtggaagcagaaatcattactgatcctctgacgagtgacatagtttcagaagaagtattggtagcagactgtgcccctgaagcagtcatagatgccagcgggatctcagtggaccagcaagataatgacaaagccagctgtgaggactacctaatgatttcgttggat

SEQ ID NO: 13 - skipped

SEQ ID NO: 14 - DNA, 12 bp, synthetic construct
  misc_feature 1..12: note = Description of Artificial Sequence: Syntheticoligonucleotide
  source 1..12: mol_type = other DNA
aggggttcacta

SEQ ID NO: 15 - DNA, 15 bp, synthetic construct
  misc_feature 1..15: note = Description of Artificial Sequence: Syntheticoligonucleotide
  source 1..15: mol_type = other DNA
tacgttactggccga

SEQ ID NO: 16 - protein, 85 aa, Homo sapiens
DEDEFELQPQEPNSFFDGIGADATHMDGDQIVVEIQEAVFVSNIVDSDITVHNFVPDDPDSVVIQDVVEDVVIEEDVQCSDILEE

SEQ ID NO: 17 - protein, 85 aa, Homo sapiens
ADVSENVIIPEQVLDSDVTEEVSLPHCTVPDDVLASDITSTSMSMPEHVLTSESMHVCDIGHVEHMVHDSVVEAEIITDPLTSDI

SEQ ID NO: 18 - protein, 85 aa, Homo sapiens
VSEEVLVADCAPEAVIDASGISVDQQDNDKASCEDYLMISLDDAGKIEHDGSTGVTIDAESEMDPCKVDSTCPEVIKVYIFKADP

SEQ ID NO: 19 - protein, 85 aa, Homo sapiens
GEDDLGGTVDIVESEPENDHGVELLDQNSSIRVPREKMVYMTVNDSQQEDEDLNVAEIADEVYMEVIVGEEDAAVAAAAAAVHEQ

SEQ ID NO: 20 - protein, 85 aa, Homo sapiens
QIDEDEMKTFVPIAWAAAYGNNSDGIENRNGTASALLHIDESAGLGRLAKQKPKKKRRPDSRQYQTAIIIGPDGHPLTVYPCMIC

SEQ ID NO: 21 - protein, 85 aa, Homo sapiens
GKKFKSRGFLKRHMKNHPEHLAKKKYHCTDCDYTTNKKISLHNHLESHKLTSKAEKAIECDECGKHFSHAGALFTHKMVHKEKGA

SEQ ID NO: 22 - protein, 85 aa, Homo sapiens
NKMHKCKFCEYETAEQGLLNRHLLAVHSKNFPHICVECGKGFRHPSELRKHMRIHTGEKPYQCQYCEYRSADSSNLKTHIKTKHS

SEQ ID NO: 23 - protein, 85 aa, Homo sapiens
KEMPFKCDICLLTFSDTKEVQQHTLVHQESKTHQCLHCDHKSSNSSDLKRHVISVHTKDYPHKCEMCEKGFHRPSELKKHVAVHK

SEQ ID NO: 24 - protein, 85 aa, Homo sapiens
GKKMHQCRHCDFKIADPFVLSRHILSVHTKDLPFRCKRCRKGFRQQNELKKHMKTHSGRKVYQCEYCEYSTTDASGFKRHVISIH

SEQ ID NO: 25 - protein, 84 aa, Homo sapiens
KRCRKGFRQQNELKKHMKTHSGRKVYQCEYCEYSTTDASGFKRHVISIHTKDYPHRCEYCKKGFRRPSEKNQHIMRHHKEVGLP

SEQ ID NO: 26 - protein, 85 aa, Homo sapiens
NIVDSDITVHNFVPDDPDSVVIQDVVEDVVIEEDVQCSDILEEADVSENVIIPEQVLDSDVTEEVSLPHCTVPDDVLASDITSTS

SEQ ID NO: 27 - protein, 85 aa, Homo sapiens
MSMPEHVLTSESMHVCDIGHVEHMVHDSVVEAEIITDPLTSDIVSEEVLVADCAPEAVIDASGISVDQQDNDKASCEDYLMISLD

SEQ ID NO: 28 - protein, 85 aa, Homo sapiens
DAGKIEHDGSTGVTIDAESEMDPCKVDSTCPEVIKVYIFKADPGEDDLGGTVDIVESEPENDHGVELLDQNSSIRVPREKMVYMT

SEQ ID NO: 29 - protein, 85 aa, Homo sapiens
VNDSQQEDEDLNVAEIADEVYMEVIVGEEDAAVAAAAAAVHEQQIDEDEMKTFVPIAWAAAYGNNSDGIENRNGTASALLHIDES

SEQ ID NO: 30 - protein, 85 aa, Homo sapiens
AGLGRLAKQKPKKKRRPDSRQYQTAIIIGPDGHPLTVYPCMICGKKFKSRGFLKRHMKNHPEHLAKKKYHCTDCDYTTNKKISLH

SEQ ID NO: 31 - protein, 85 aa, Homo sapiens
NHLESHKLTSKAEKAIECDECGKHFSHAGALFTHKMVHKEKGANKMHKCKFCEYETAEQGLLNRHLLAVHSKNFPHICVECGKGF

SEQ ID NO: 32 - protein, 85 aa, Homo sapiens
RHPSELRKHMRIHTGEKPYQCQYCEYRSADSSNLKTHIKTKHSKEMPFKCDICLLTFSDTKEVQQHTLVHQESKTHQCLHCDHKS

SEQ ID NO: 33 - protein, 85 aa, Homo sapiens
SNSSDLKRHVISVHTKDYPHKCEMCEKGFHRPSELKKHVAVHKGKKMHQCRHCDFKIADPFVLSRHILSVHTKDLPFRCKRCRKG

SEQ ID NO: 34 - protein, 85 aa, Homo sapiens
AEVPEDYDSGPDEDGELEPERPELPGLHKLYENAEPDTMAKADSKLPAEIYQEPQPETEEEDFKEGEPDSAKNVQLKPGGTSQEG

SEQ ID NO: 35 - protein, 85 aa, Homo sapiens
IAKESKRDVPSETEPGIHQEVKSETSREMGEFFKDLEAPMDETHKESDLEPPEEAKPNVTEDVFLESAMETDPDPVPPTETMSEV

SEQ ID NO: 36 - protein, 85 aa, Homo sapiens
SGATVRERNLELLEEETEPGVPEESLRVQHEETGLEPPEQTKQDFPSEKLGESLEETDLQPPKMTKPETPEETQRESTEKKRTEP

SEQ ID NO: 37 - protein, 85 aa, Homo sapiens
PEQARLEFLEKEPRKSSEEAGLEPPEETQPEVPEEMQRKATEEKGTELPERTKPDFPDHKPRKSTDENVPEPLEEIKLEFPEEES

SEQ ID NO: 38 - protein, 85 aa, Homo sapiens
RKTNEETILEQSEMMKPESPEEIRKSNEKKNPQPPEETGPVLPQEINPQVEEKTQTKPTEKILELPDETKPRETHVEFSKEDRPE

SEQ ID NO: 39 - protein, 85 aa, Homo sapiens
PIKSKYSVGNDELEHREPKRGKLSLSDKFRKEYYALGSLRESEESIGTHYEFLQPLQKLLNVSEECSYSDPSESQTELSEFVHEK

SEQ ID NO: 40 - protein, 85 aa, Homo sapiens
EVVDLSQELKERVSEDDETQPEKGTELQFEHLNWDPEEVAEWISQLGFPQYKECFITNFISGRKLIHVNCSNLPQMGITNFEDMK

SEQ ID NO: 41 - protein, 84 aa, Homo sapiens
NFEDMKAISRHTQELLEIEEPLFKRSISLPYRDIIGLYLEQKGHTGIKSDSLTLSEFVKAAGLQDYAPEITAPEENEELPCTEP

SEQ ID NO: 42 - protein, 85 aa, Homo sapiens
DSKLPAEIYQEPQPETEEEDFKEGEPDSAKNVQLKPGGTSQEGIAKESKRDVPSETEPGIHQEVKSETSREMGEFFKDLEAPMDE

SEQ ID NO: 43 - protein, 85 aa, Homo sapiens
THKESDLEPPEEAKPNVTEDVFLESAMETDPDPVPPTETMSEVSGATVRERNLELLEEETEPGVPEESLRVQHEETGLEPPEQTK

SEQ ID NO: 44 - protein, 85 aa, Homo sapiens
QDFPSEKLGESLEETDLQPPKMTKPETPEETQRESTEKKRTEPPEQARLEFLEKEPRKSSEEAGLEPPEETQPEVPEEMQRKATE

SEQ ID NO: 45 - protein, 85 aa, Homo sapiens
EKGTELPERTKPDFPDHKPRKSTDENVPEPLEEIKLEFPEEESRKTNEETILEQSEMMKPESPEEIRKSNEKKNPQPPEETGPVL

SEQ ID NO: 46 - protein, 85 aa, Homo sapiens
PQEINPQVEEKTQTKPTEKILELPDETKPRETHVEFSKEDRPEPIKSKYSVGNDELEHREPKRGKLSLSDKFRKEYYALGSLRES

SEQ ID NO: 47 - protein, 85 aa, Homo sapiens
EESIGTHYEFLQPLQKLLNVSEECSYSDPSESQTELSEFVHEKEVVDLSQELKERVSEDDETQPEKGTELQFEHLNWDPEEVAEW

SEQ ID NO: 48 - protein, 85 aa, Homo sapiens
ISQLGFPQYKECFITNFISGRKLIHVNCSNLPQMGITNFEDMKAISRHTQELLEIEEPLFKRSISLPYRDIIGLYLEQKGHTGIK

SEQ ID NO: 49 - protein, 85 aa, Homo sapiens
TAREHSPRHGARARAMQRASTIDVAADMLGLSLAGNIQDPDEPILEFSLACSELHTPSLDRKPNSFVAVSVTTPPQAFWTKHAQT

SEQ ID NO: 50 - protein, 85 aa, Homo sapiens
EIIEGTNNPIFLSSIAFFQDSLINQMTQVKLSVYDVKDRSQGTMYLLGSGTFIVKDLLQDRHHRLHLTLRSAESDRVGNITVIGW

SEQ ID NO: 51 - protein, 85 aa, Homo sapiens
QMEEKSDQRPPVTRSVDTVNGRMVLPVDESLTEALGIRSKYASLRKDTLLKSVFGGAICRMYRFPTTDGNHLRILEQMAESVLSL

SEQ ID NO: 52 - protein, 85 aa, Homo sapiens
HVPRQFVKLLLEEDAARVCELEELGELSPCWESLRRQIVTQYQTIILTYQENLTDLHQYRGPSFKASSLKADKKLEFVPTNLHIQ

SEQ ID NO: 53 - protein, 85 aa, Homo sapiens
RMRVQDDGGSDQNYDIVTIGAPAAHCQGFKSGGLRKKLHKFEETKKHFEECCTSSGCQSIIYIPQDVVRAKEIIAQINTLKTQVS

SEQ ID NO: 54 - protein, 85 aa, Homo sapiens
YYAERLSRAAKDRSATGLERTLAILADKTRQLVTVCDCKLLANSIHGLNAARPDYIASKASPTSTEEEQVMLRNDQDTLMARWTG

SEQ ID NO: 55 - protein, 85 aa, Homo sapiens
RNSRSSLQVDWHEEEWEKVWLNVDKSLECIIQRVDKLLQKERLHGEGCEDVFPCAGSCTSKKGNPDSHAYWIRPEDPFCDVPSSP

SEQ ID NO: 56 - protein, 85 aa, Homo sapiens
CPSTMPSTACHPHLTTHCSPPPEESSPGEWSEALYPLLTTLTDCVAMMSDKAKKAMVFLLMQDSAPTIATYLSLQYRRDVVFCQT

SEQ ID NO: 57 - protein, 85 aa, Homo sapiens
MTALICGFIIKLRNCLHDDGFLRQLYTIGLLAQFESLLSTYGEELAMLEDMSLGIMDLRNVTFKVTQATSSASADMLPVITGNRD

SEQ ID NO: 58 - protein, 85 aa, Homo sapiens
GFNVRVPLPGPLFDALPREIQSGMLLRVQPVLFNVGINEQQTLAERFGDTSLQEVINVESLVRLNSYFEQFKEVLPEDCLPRSRS

SEQ ID NO: 59 - protein, 85 aa, Homo sapiens
QTCLPELLRFLGQNVHARKNKNVDILWQAAEICRRLNGVRFTSCKSAKDRTAMSVTLEQCLILQHEHGMAPQVFTQALECMRSEG

SEQ ID NO: 60 - protein, 84 aa, Homo sapiens
SCKSAKDRTAMSVTLEQCLILQHEHGMAPQVFTQALECMRSEGCRRENTMKNVGSRKYAFNSLQLKAFPKHYRPPEGTYGKVET

SEQ ID NO: 61 - protein, 85 aa, Homo sapiens
PILEFSLACSELHTPSLDRKPNSFVAVSVTTPPQAFWTKHAQTEIIEGTNNPIFLSSIAFFQDSLINQMTQVKLSVYDVKDRSQG

SEQ ID NO: 62 - protein, 85 aa, Homo sapiens
TMYLLGSGTFIVKDLLQDRHHRLHLTLRSAESDRVGNITVIGWQMEEKSDQRPPVTRSVDTVNGRMVLPVDESLTEALGIRSKYA

SEQ ID NO: 63 - protein, 85 aa, Homo sapiens
SLRKDTLLKSVFGGAICRMYRFPTTDGNHLRILEQMAESVLSLHVPRQFVKLLLEEDAARVCELEELGELSPCWESLRRQIVTQY

SEQ ID NO: 64 - protein, 85 aa, Homo sapiens
QTIILTYQENLTDLHQYRGPSFKASSLKADKKLEFVPTNLHIQRMRVQDDGGSDQNYDIVTIGAPAAHCQGFKSGGLRKKLHKFE

SEQ ID NO: 65 - protein, 85 aa, Homo sapiens
ETKKHFEECCTSSGCQSIIYIPQDVVRAKEIIAQINTLKTQVSYYAERLSRAAKDRSATGLERTLAILADKTRQLVTVCDCKLLA

SEQ ID NO: 66 - protein, 85 aa, Homo sapiens
NSIHGLNAARPDYIASKASPTSTEEEQVMLRNDQDTLMARWTGRNSRSSLQVDWHEEEWEKVWLNVDKSLECIIQRVDKLLQKER

SEQ ID NO: 67 - protein, 85 aa, Homo sapiens
MHGEGCEDVFPCAGSCTSKKGNPDSHAYWIRPEDPFCDVPSSPCPSTMPSTACHPHLTTHCSPPPEESSPGEWSEALYPLLTTLT

SEQ ID NO: 68 - protein, 85 aa, Homo sapiens
DCVAMMSDKAKKAMVFLLMQDSAPTIATYLSLQYRRDVVFCQTLTALICGFIIKLRNCLHDDGFLRQLYTIGLLAQFESLLSTYG

SEQ ID NO: 69 - protein, 85 aa, Homo sapiens
EELAMLEDMSLGIMDLRNVTFKVTQATSSASADMLPVITGNRDGFNVRVPLPGPLFDALPREIQSGMLLRVQPVLFNVGINEQQT

SEQ ID NO: 70 - protein, 85 aa, Homo sapiens
MAERFGDTSLQEVINVESLVRLNSYFEQFKEVLPEDCLPRSRSQTCLPELLRFLGQNVHARKNKNVDILWQAAEICRRLNGVRFT

SEQ ID NO: 71 - protein, 85 aa, Homo sapiens
HKHQHCCKCPECYEVTRLAALRRLEPPGYGDWQVPDPYGPGGGNGASAGYGGYSSQTLPSQAGATPTPRTKAKLIPTGRDVGPVP

SEQ ID NO: 72 - protein, 85 aa, Homo sapiens
PKPVPGKSTPKLNGSGPSWWPECTCTNRDWYEQARPAPLLVNPETLKHSLSVNGSDGMFKYEEIVLERGNSGLGFSIAGGIDNPH

SEQ ID NO: 73 - protein, 85 aa, Homo sapiens
VPDDPGIFITKIIPGGAAAMDGRLGVNDCVLRVNEVDVSEVVHSRAVEALKEAGPVVRLVVRRRQPPPETIMEVNLLKGPKGLGF

SEQ ID NO: 74 - protein, 85 aa, Homo sapiens
SIAGGIGNQHIPGDNSIYITKIIEGGAAQKDGRLQIGDRLLAVNNTNLQDVRHEEAVASLKNTSDMVYLKVAKPGSLHLNDMYAP

SEQ ID NO: 75 - protein, 85 aa, Homo sapiens
PDYASTFTALADNHISHNSSLGYLGAVESKVSYPAPPQVPPTRYSPIPRHMLAEEDFTREPRKIILHKGSTGLGFNIVGGEDGEG

SEQ ID NO: 76 - protein, 85 aa, Homo sapiens
IFVSFILAGGPADLSGELRRGDRILSVNGVNLRNATHEQAAAALKRAGQSVTIVAQYRPEEYSRFESKIHDLREQMMNSSMSSGS

SEQ ID NO: 77 - protein, 85 aa, Homo sapiens
GSLRTSEKRSLYVRALFDYDRTRDSCLPSQGLSFSYGDILHVINASDDEWWQARLVTPHGESEQIGVIPSKKRVEKKERARLKTV

SEQ ID NO: 78 - protein, 85 aa, Homo sapiens
KFHARTGMIESNRDFPGLSDDYYGAKNLKGVTSNTSDSESSSKGQEDAILSYEPVTRQEIHYARPVIILGPMKDRVNDDLISEFP

SEQ ID NO: 79 - protein, 85 aa, Homo sapiens
HKFGSCVPHTTRPRRDNEVDGQDYHFVVSREQMEKDIQDNKFIEAGQFNDNLYGTSIQSVRAVAERGKHCILDVSGNAIKRLQQA

SEQ ID NO: 80 - protein, 84 aa, Homo sapiens
AQLYPIAIFIKPKSIEALMEMNRRQTYEQANKIYDKAMKLEQEFGEYFTAIVQGDSLEEIYNKIKQIIEDQSGHYIWVPSPEKL

SEQ ID NO: 81 - protein, 85 aa, Homo sapiens
GNGASAGYGGYSSQTLPSQAGATPTPRTKAKLIPTGRDVGPVPPKPVPGKSTPKLNGSGPSWWPECTCTNRDWYEQARPAPLLVN

SEQ ID NO: 82 - protein, 85 aa, Homo sapiens
PETLKHSLSVNGSDGMFKYEEIVLERGNSGLGFSIAGGIDNPHVPDDPGIFITKIIPGGAAAMDGRLGVNDCVLRVNEVDVSEVV

SEQ ID NO: 83 - protein, 85 aa, Homo sapiens
HSRAVEALKEAGPVVRLVVRRRQPPPETIMEVNLLKGPKGLGFSIAGGIGNQHIPGDNSIYITKIIEGGAAQKDGRLQIGDRLLA

SEQ ID NO: 84 - protein, 85 aa, Homo sapiens
VNNTNLQDVRHEEAVASLKNTSDMVYLKVAKPGSLHLNDMYAPPDYASTFTALADNHISHNSSLGYLGAVESKVSYPAPPQVPPT

SEQ ID NO: 85 - protein, 85 aa, Homo sapiens
RYSPIPRHMLAEEDFTREPRKIILHKGSTGLGFNIVGGEDGEGIFVSFILAGGPADLSGELRRGDRILSVNGVNLRNATHEQAAA

SEQ ID NO: 86 - protein, 85 aa, Homo sapiens
ALKRAGQSVTIVAQYRPEEYSRFESKIHDLREQMMNSSMSSGSGSLRTSEKRSLYVRALFDYDRTRDSCLPSQGLSFSYGDILHV

SEQ ID NO: 87 - protein, 85 aa, Homo sapiens
INASDDEWWQARLVTPHGESEQIGVIPSKKRVEKKERARLKTVKFHARTGMIESNRDFPGLSDDYYGAKNLKGVTSNTSDSESSS

SEQ ID NO: 88 - protein, 85 aa, Homo sapiens
KGQEDAILSYEPVTRQEIHYARPVIILGPMKDRVNDDLISEFPHKFGSCVPHTTRPRRDNEVDGQDYHFVVSREQMEKDIQDNKF

SEQ ID NO: 89 - protein, 85 aa, Homo sapiens
IEAGQFNDNLYGTSIQSVRAVAERGKHCILDVSGNAIKRLQQAQLYPIAIFIKPKSIEALMEMNRRQTYEQANKIYDKAMKLEQE

SEQ ID NO: 90 - protein, 85 aa, Homo sapiens
PPLWALLALGCLRFGSAVNLQPQLASVTFATNNPTLTTVALEKPLCMFDSKEALTGTHEVYLYVLVDSAISRNASVQDSTNTPLG

SEQ ID NO: 91 - protein, 85 aa, Homo sapiens
STFLQTEGGRTGPYKAVAFDLIPCSDLPSLDAIGDVSKASQILNAYLVRVGANGTCLWDPNFQGLCNAPLSAATEYRFKYVLVNM

SEQ ID NO: 92 - protein, 85 aa, Homo sapiens
STGLVEDQTLWSDPIRTNQLTPYSTIDTWPGRRSGGMIVITSILGSLPFFLLVGFAGAIALSLVDMGSSDGETTHDSQITQEAVP

SEQ ID NO: 93 - protein, 84 aa, Homo sapiens
RSGGMIVITSILGSLPFFLLVGFAGAIALSLVDMGSSDGETTHDSQITQEAVPKSLGASESSYTSVNRGPPLDRAEVYSSKLQD

SEQ ID NO: 94 - protein, 85 aa, Homo sapiens
KPLCMFDSKEALTGTHEVYLYVLVDSAISRNASVQDSTNTPLGSTFLQTEGGRTGPYKAVAFDLIPCSDLPSLDAIGDVSKASQI

SEQ ID NO: 95 - protein, 85 aa, Homo sapiens
MNAYLVRVGANGTCLWDPNFQGLCNAPLSAATEYRFKYVLVNMSTGLVEDQTLWSDPIRTNQLTPYSTIDTWPGRRSGGMIVITS

SEQ ID NO: 96 - protein, 85 aa, Homo sapiens
GCDGGTIPKRHELVKGPKKVEKIWHLKNGKEWCSLHSEGKNKNGKEWDMEYDVDKDAELVAQWNYCTLSQEILRRPIVACELGRL

SEQ ID NO: 97 - protein, 85 aa, Homo sapiens
YNKDAVIEFLLDKSAEKALGKAASHIKSIKNVTELKLSDNPAWEGDKGNTKGDKHDDLQRARFICPVVGLEMNGRHRFCFLRCCG

SEQ ID NO: 98 - protein, 85 aa, Homo sapiens
CVFSERALKEIKAEVCHTCGAAFQEDDVIMLNGTKEDVDVLKTRMEERRLRAKLEKKTKKPKAAESVSKPDVSEEAPGPSKVKTG

SEQ ID NO: 99 - protein, 84 aa, Homo sapiens
VKTGKPEEASLDSREKKTNLAPKSTAMNESSSGKAGKPPCGATKRSIADSEESEAYKSLFTTHSSAKRSKEESAHWVTHTSYCF

SEQ ID NO: 100 - protein, 85 aa, Homo sapiens
NGKEWDMEYDVDKDAELVAQWNYCTLSQEILRRPIVACELGRLYNKDAVIEFLLDKSAEKALGKAASHIKSIKNVTELKLSDNPA

SEQ ID NO: 101 - protein, 85 aa, Homo sapiens
WEGDKGNTKGDKHDDLQRARFICPVVGLEMNGRHRFCFLRCCGCVFSERALKEIKAEVCHTCGAAFQEDDVIMLNGTKEDVDVLK

SEQ ID NO: 102 - protein, 85 aa, Homo sapiens
TRMEERRLRAKLEKKTKKPKAAESVSKPDVSEEAPGPSKVKTGKPEEASLDSREKKTNLAPKSTAMNESSSGKAGKPPCGATKRS

SEQ ID NO: 103 - protein, 85 aa, Homo sapiens
AEAASGAGGTSLEGERGKRPPPEGEPAAPASGVLDKLFGKRLLQAGRYLVSHKAWMKTVPTENCDVLMTFPDTTDDHTLLWLLNH

SEQ ID NO: 104 - protein, 85 aa, Homo sapiens
IRVGIPELIVQVRHHRHTRAYAFFVTATYESLLRGADELGLRKAVKAEFGGGTRGFSCEEDFIYENVESELRFFTSQERQSIIRF

SEQ ID NO: 105 - protein, 85 aa, Homo sapiens
WLQNLRAKQGEALHNVRFLEDQPIIPELAARGIIQQVFPVHEQRILNRLMKSWVQAVCENQPLDDICDYFGVKIAMYFAWLGFYT

SEQ ID NO: 106 - protein, 85 aa, Homo sapiens
SAMVYPAVFGSVLYTFTEADQTSRDVSCVVFALFNVIWSTLFLEEWKRRGAELAYKWGTLDSPGEAVEEPRPQFRGVRRISPITR

SEQ ID NO: 107 - protein, 85 aa, Homo sapiens
AEEFYYPPWKRLLFQLLVSLPLCLACLVCVFLLMLGCFQLQELVLSVKGLPRLARFLPKVMLALLVSVSAEGYKKLAIWLNDMEN

SEQ ID NO: 108 - protein, 85 aa, Homo sapiens
YRLESAYEKHLIIKVVLFQFVNSYLSLFYIGFYLKDMERLKEMLATLLITRQFLQNVREVLQPHLYRRLGRGELGLRAVWELARA

SEQ ID NO: 109 - protein, 85 aa, Homo sapiens
MLGLLSLRRPAPRRLEPQADEGGGGGSGGGGRRCLSGGCGAPEEEEEAALVERRRAGEGGEEGDGPPGGKEEDEDDEEEEDEEEE

SEQ ID NO: 110 - protein, 85 aa, Homo sapiens
EDEEEGEEGGLLDCGLRLKKVSFAERGAGRRRPGPSPEALLEEGSPTMVEKGLEPGVFTLAEEDDEAEGAPGSPEREPPAILFRR

SEQ ID NO: 111 - protein, 85 aa, Homo sapiens
AGGEGRDQGPDGGPDPEPGSNSDSTRRQRRQNRSSWIDPPEEEHSPQLTQAELESCMKKYEDTFQDYQEMFVQFGYVVLFSSAFP

SEQ ID NO: 112 - protein, 85 aa, Homo sapiens
MAALCALVNNLIEIRSDAFKLCTGLQRPFGQRVESIGQWQKVMEAMGVLAIVVNCYLIGQCGQLQRLFPWLSPEAAIVSVVVLEH

SEQ ID NO: 113 - protein, 85 aa, Homo sapiens
FALLLKYLIHVAIPDIPGWVAEEMAKLEYQRREAFKRHERQAQHRYQQQQRRRREEEERQRHAEHHARREHDSGGREEARAEGSG

SEQ ID NO: 114 - protein, 85 aa, Homo sapiens
MDPATSSEKASAKAKGSTAGGHGPERPKRPGSLLAPNNVMKLKQIIPLQGKFLSSGATSSLAAAGAGATTRPPPAQSPTGSDTRL

SEQ ID NO: 115 - protein, 85 aa, Homo sapiens
PAFLSFKFLKSPETRRDSERSHSPPKAFHAGKLFPFGGTRAEPGSNGAGGQARPDGTPSSGSSRVQRSGPVDEALAEELEAPRPE

SEQ ID NO: 116 - protein, 85 aa, Homo sapiens
EEGSGTALAPVGAPALRTRRSRSPAPPPPMPLPRPPTPPAGCWQWDGPWGCGGEGAAPRQALAAAECPPCAMAGPPPAPQPLPGD

SEQ ID NO: 117 - protein, 84 aa, Homo sapiens
WQWDGPWGCGGEGAAPRQALAAAECPPCAMAGPPPAPQPLPGDASFYSLPPPPLPPTSDPLETPAPSPSPSPSPQAVCWPSGWH

SEQ ID NO: 118 - protein, 85 aa, Homo sapiens
MQAGRYLVSHKAWMKTVPTENCDVLMTFPDTTDDHTLLWLLNHIRVGIPELIVQVRHHRHTRAYAFFVTATYESLLRGADELGLR

SEQ ID NO: 119 - protein, 85 aa, Homo sapiens
KAVKAEFGGGTRGFSCEEDFIYENVESELRFFTSQERQSIIRFWLQNLRAKQGEALHNVRFLEDQPIIPELAARGIIQQVFPVHE

SEQ ID NO: 120 - protein, 85 aa, Homo sapiens
QRILNRLMKSWVQAVCENQPLDDICDYFGVKIAMYFAWLGFYTSAMVYPAVFGSVLYTFTEADQTSRDVSCVVFALFNVIWSTLF

SEQ ID NO: 121 - protein, 85 aa, Homo sapiens
LEEWKRRGAELAYKWGTLDSPGEAVEEPRPQFRGVRRISPITRAEEFYYPPWKRLLFQLLVSLPLCLACLVCVFLLMLGCFQLQE

SEQ ID NO: 122 - protein, 85 aa, Homo sapiens
MVLSVKGLPRLARFLPKVMLALLVSVSAEGYKKLAIWLNDMENYRLESAYEKHLIIKVVLFQFVNSYLSLFYIGFYLKDMERLKE

SEQ ID NO: 123 - protein, 85 aa, Homo sapiens
MLATLLITRQFLQNVREVLQPHLYRRLGRGELGLRAVWELARALLGLLSLRRPAPRRLEPQADEGGGGGSGGGGRRCLSGGCGAP

SEQ ID NO: 124 - protein, 85 aa, Homo sapiens
EEEEEAALVERRRAGEGGEEGDGPPGGKEEDEDDEEEEDEEEEEDEEEGEEGGLLDCGLRLKKVSFAERGAGRRRPGPSPEALLE

SEQ ID NO: 125 - protein, 85 aa, Homo sapiens
EGSPTMVEKGLEPGVFTLAEEDDEAEGAPGSPEREPPAILFRRAGGEGRDQGPDGGPDPEPGSNSDSTRRQRRQNRSSWIDPPEE

SEQ ID NO: 126 - protein, 85 aa, Homo sapiens
EHSPQLTQAELESCMKKYEDTFQDYQEMFVQFGYVVLFSSAFPLAALCALVNNLIEIRSDAFKLCTGLQRPFGQRVESIGQWQKV

SEQ ID NO: 127 - protein, 85 aa, Homo sapiens
MEAMGVLAIVVNCYLIGQCGQLQRLFPWLSPEAAIVSVVVLEHFALLLKYLIHVAIPDIPGWVAEEMAKLEYQRREAFKRHERQA

SEQ ID NO: 128 - protein, 85 aa, Homo sapiens
QHRYQQQQRRRREEEERQRHAEHHARREHDSGGREEARAEGSGLDPATSSEKASAKAKGSTAGGHGPERPKRPGSLLAPNNVMKL

SEQ ID NO: 129 - protein, 85 aa, Homo sapiens
KQIIPLQGKFLSSGATSSLAAAGAGATTRPPPAQSPTGSDTRLPAFLSFKFLKSPETRRDSERSHSPPKAFHAGKLFPFGGTRAE

SEQ ID NO: 130 - protein, 85 aa, Homo sapiens
PGSNGAGGQARPDGTPSSGSSRVQRSGPVDEALAEELEAPRPEEEGSGTALAPVGAPALRTRRSRSPAPPPPMPLPRPPTPPAGC

SEQ ID NO: 131 - protein, 85 aa, Homo sapiens
SSKQEIMSDQRFRRVAKDPRFWEMPEKDRKVKIDKRFRAMFHDKKFKLNYAVDKRGRPISHSTTEDLKRFYDLSDSDSNLSGEDS

SEQ ID NO: 132 - protein, 85 aa, Homo sapiens
KALSQKKIKKKKTQTKKEIDSKNLVEKKKETKKANHKGSENKTDLDNSIGIKKMKTSCKFKIDSNISPKKDSKEFTQKNKKEKKN

SEQ ID NO: 133 - protein, 85 aa, Homo sapiens
IVQHTTDSSLEEKQRTLDSGTSEIVKSPRIECSKTRREMQSVVQLIMTRDSDGYENSTDGEMCDKDALEEDSESVSEIGSDEESE

SEQ ID NO: 134 - protein, 85 aa, Homo sapiens
NEITSVGRASGDDDGSEDDEEEDEDEEEDEDEDSEDDDKSDSGPDLARGKGNIETSSEDEDDTADLFPEESGFEHAWRELDKDAP

SEQ ID NO: 135 - protein, 85 aa, Homo sapiens
RADEITRRLAVCNMDWDRLKAKDLLALFNSFKPKGGVIFSVKIYPSEFGKERMKEEQVQGPVELLSIPEDAPEKDWTSREKLRDY

SEQ ID NO: 136 - protein, 85 aa, Homo sapiens
QFKRLKYYYAVVDCDSPETASKIYEDCDGLEFESSCSFIDLRFIPDDITFDDEPKDVASEVNLTAYKPKYFTSAAMGTSTVEITW

SEQ ID NO: 137 - protein, 85 aa, Homo sapiens
DETDHERITMLNRKFKKEELLDMDFQAYLASSSEDEEEIEEELQGDDGVNVEEDGKTKKSQKDDEEQIAKYRQLLQVIQEKEKKG

SEQ ID NO: 138 - protein, 85 aa, Homo sapiens
KENDMEMEIKWVPGLKESAEEMVKNKLEGKDKLTPWEQFLEKKKEKKRLKRKQKALAEEASEEELPSDVDLNDPYFAEEVKQIGI

SEQ ID NO: 139 - protein, 85 aa, Homo sapiens
NKKSVKSAKDGTSPEEEIEIERQKAEMALLMMDEDEDSKKHFNYNKIVEHQNLSKKKKKQLMKKKELIEDDFEVNVNDARFQAMY

SEQ ID NO: 140 - protein, 85 aa, Homo sapiens
TSHLFNLDPSDPNFKKTKAMEKILEEKARQRERKEQELTQAIKKKESEIEKESQRKSIDPALSMLIKSIKTKTEQFQARKKQKVK

SEQ ID NO: 141 - protein, 84 aa, Homo sapiens
SHLFNLDPSDPNFKKTKAMEKILEEKARQRERKEQELTQAIKKKESEIEKESQRKSIDPALSMLIKSIKTKTEQFQARKKQKVK

SEQ ID NO: 142 - protein, 85 aa, Homo sapiens
DKKFKLNYAVDKRGRPISHSTTEDLKRFYDLSDSDSNLSGEDSKALSQKKIKKKKTQTKKEIDSKNLVEKKKETKKANHKGSENK

SEQ ID NO: 143 - protein, 85 aa, Homo sapiens
TDLDNSIGIKKMKTSCKFKIDSNISPKKDSKEFTQKNKKEKKNIVQHTTDSSLEEKQRTLDSGTSEIVKSPRIECSKTRREMQSV

SEQ ID NO: 144 - protein, 85 aa, Homo sapiens
VQLIMTRDSDGYENSTDGEMCDKDALEEDSESVSEIGSDEESENEITSVGRASGDDDGSEDDEEEDEDEEEDEDEDSEDDDKSDS

SEQ ID NO: 145 - protein, 85 aa, Homo sapiens
GPDLARGKGNIETSSEDEDDTADLFPEESGFEHAWRELDKDAPRADEITRRLAVCNMDWDRLKAKDLLALFNSFKPKGGVIFSVK

SEQ ID NO: 146 - protein, 85 aa, Homo sapiens
IYPSEFGKERMKEEQVQGPVELLSIPEDAPEKDWTSREKLRDYQFKRLKYYYAVVDCDSPETASKIYEDCDGLEFESSCSFIDLR

SEQ ID NO: 147 - protein, 85 aa, Homo sapiens
FIPDDITFDDEPKDVASEVNLTAYKPKYFTSAAMGTSTVEITWDETDHERITMLNRKFKKEELLDMDFQAYLASSSEDEEEIEEE

SEQ ID NO: 148 - protein, 85 aa, Homo sapiens
LQGDDGVNVEEDGKTKKSQKDDEEQIAKYRQLLQVIQEKEKKGKENDMEMEIKWVPGLKESAEEMVKNKLEGKDKLTPWEQFLEK

SEQ ID NO: 149 - protein, 85 aa, Homo sapiens
KKEKKRLKRKQKALAEEASEEELPSDVDLNDPYFAEEVKQIGINKKSVKSAKDGTSPEEEIEIERQKAEMALLMMDEDEDSKKHF

SEQ ID NO: 150 - protein, 85 aa, Homo sapiens
NYNKIVEHQNLSKKKKKQLMKKKELIEDDFEVNVNDARFQAMYTSHLFNLDPSDPNFKKTKAMEKILEEKARQRERKEQELTQAI

SEQ ID NO: 151 - protein, 85 aa, Homo sapiens
YPSNKKKKVWREEKERLLKMTLEERRKEYLRDYIPLNSILSWKEEMKGKGQNDEENTQETSQVKKSLTEKVSLYRGDITLLEVDA

SEQ ID NO: 152 - protein, 85 aa, Homo sapiens
IVNAANASLLGGGGVDGCIHRAAGPCLLAECRNLNGCDTGHAKITCGYDLPAKYVIHTVGPIARGHINGSHKEDLANCYKSSLKL

SEQ ID NO: 153 - protein, 85 aa, Homo sapiens
VKENNIRSVAFPCISTGIYGFPNEPAAVIALNTIKEWLAKNHHEVDRIIFCVFLEVDFKIYKKKMNEFFSVDDNNEEEEDVEMKE

SEQ ID NO: 154 - protein, 85 aa, Homo sapiens
DSDENGPEEKQSVEEMEEQSQDADGVNTVTVPGPASEEAVEDCKDEDFAKDENITKGGEVTDHSVRDQDHPDGQENDSTKNEIKI

SEQ ID NO: 155 - protein, 84 aa, Homo sapiens
ETESQSSYMETEELSSNQEDAVIVEQPEVIPLTEDQEEKEGEKAPGEDTPRMPGKSEGSSDLENTPGPDAGAQDEAKEQRNGTK

SEQ ID NO: 156 - protein, 85 aa, Homo sapiens
KEEMKGKGQNDEENTQETSQVKKSLTEKVSLYRGDITLLEVDAIVNAANASLLGGGGVDGCIHRAAGPCLLAECRNLNGCDTGHA

SEQ ID NO: 157 - protein, 85 aa, Homo sapiens
KITCGYDLPAKYVIHTVGPIARGHINGSHKEDLANCYKSSLKLVKENNIRSVAFPCISTGIYGFPNEPAAVIALNTIKEWLAKNH

SEQ ID NO: 158 - protein, 85 aa, Homo sapiens
HEVDRIIFCVFLEVDFKIYKKKMNEFFSVDDNNEEEEDVEMKEDSDENGPEEKQSVEEMEEQSQDADGVNTVTVPGPASEEAVED

SEQ ID NO: 159 - protein, 85 aa, Homo sapiens
CKDEDFAKDENITKGGEVTDHSVRDQDHPDGQENDSTKNEIKIETESQSSYMETEELSSNQEDAVIVEQPEVIPLTEDQEEKEGE

SEQ ID NO: 160 - protein, 85 aa, Homo sapiens
DRRNDYGYRVPLFQGPLPPPGSLGLPFPPDIQTETTEEDSVLLMHTLLAATKDSLAMDPPVVNRPKKSKTKKAPIKTITKAAPAA

SEQ ID NO: 161 - protein, 85 aa, Homo sapiens
PPVPAANEIATNKPKITWQALNLPVITQISQALPTTEVTNTQASSVTAQPKKANKMKRVTAKAAQGSQSPTGHEGGTIQLKSPLQ

SEQ ID NO: 162 - protein, 85 aa, Homo sapiens
VLKLPVISQNIHAPIANESASSQALITSIKPKKASKAKKAANKAIASATEVSLAATATHTATTQGQITNETASIHTTAASIRTKK

SEQ ID NO: 163 - protein, 85 aa, Homo sapiens
ASKARKTIAKVINTDTEHIEALNVTDAATRQIEASVVAIRPKKSKGKKAASRGPNSVSEISEAPLATQIVTNQALAATLRVKRGS

SEQ ID NO: 164 - protein, 85 aa, Homo sapiens
RARKAATKARATESQTPNADQGAQAKIASAQTNVSALETQVAAAVQALADDYLAQLSLEPTTRTRGKRNRKSKHLNGDERSGSNY

SEQ ID NO: 165 - protein, 85 aa, Homo sapiens
RRIPWGRRPAPPRDVAILQERANKLVKYLLVKDQTKIPIKRSDMLRDVIQEYDEYFPEIIERASYTLEKMFRVNLKEIDKQSSLY

SEQ ID NO: 166 - protein, 85 aa, Homo sapiens
ILISTQESSAGILGTTKDTPKLGLLMVILSVIFMNGNKASEAVIWEVLRKLGLRPGVRHSLFGEVRKLITDEFVKQKYLEYKRVP

SEQ ID NO: 167 - protein, 85 aa, Homo sapiens
NSRPPEYEFFWGLRSYHETSKMKVLKFACRVQKKDPKDWAVQYREAVEMEVQAAAVAVAEAEARAEARAQMGIGEEAVAGPWNWD

SEQ ID NO: 168 - protein, 85 aa, Homo sapiens
DMDIDCLTREELGDDAQAWSRFSFEIEARAQENADASTNVNFSRGASTRAGFSDGASISFNGAPSSSGGFSGGPGITFGVAPSTS

SEQ ID NO: 169 - protein, 85 aa, Homo sapiens
ASFSNTASISFGGTLSTSSSFSSAASISFGCAHSTSTSFSSEASISFGGMPCTSASFSGGVSSSFSGPLSTSATFSGGASSGFGG

SEQ ID NO: 170 - protein, 85 aa, Homo sapiens
TLSTTAGFSGVLSTSTSFGSAPTTSTVFSSALSTSTGFGGILSTSVCFGGSPSSSGSFGGTLSTSICFGGSPCTSTGFGGTLSTS

SEQ ID NO: 171 - protein, 85 aa, Homo sapiens
VSFGGSSSTSANFGGTLSTSICFDGSPSTGAGFGGALNTSASFGSVLNTSTGFGGAMSTSADFGGTLSTSVCFGGSPGTSVSFGS

SEQ ID NO: 172 - protein, 85 aa, Homo sapiens
ALNTNAGYGGAVSTNTDFGGTLSTSVCFGGSPSTSAGFGGALNTNASFGCAVSTSASFSGAVSTSACFSGAPITNPGFGGAFSTS

SEQ ID NO: 173 - protein, 85 aa, Homo sapiens
AGFGGALSTAADFGGTPSNSIGFGAAPSTSVSFGGAHGTSLCFGGAPSTSLCFGSASNTNLCFGGPPSTSACFSGATSPSFCDGP

SEQ ID NO: 174 - protein, 85 aa, Homo sapiens
STSTGFSFGNGLSTNAGFGGGLNTSAGFGGGLGTSAGFSGGLSTSSGFDGGLGTSAGFGGGPGTSTGFGGGLGTSAGFSGGLGTS

SEQ ID NO: 175 - protein, 85 aa, Homo sapiens
AGFGGGLVTSDGFGGGLGTNASFGSTLGTSAGFSGGLSTSDGFGSRPNASFDRGLSTIIGFGSGSNTSTGFTGEPSTSTGFSSGP

SEQ ID NO: 176 - protein, 84 aa, Homo sapiens
TGEPSTSTGFSSGPSSIVGFSGGPSTGVGFCSGPSTSGFSGGPSTGAGFGGGPNTGAGFGGGPSTSAGFGSGAASLGACGFSYG

SEQ ID NO: 177 - protein, 85 aa, Homo sapiens
MMHTLLAATKDSLAMDPPVVNRPKKSKTKKAPIKTITKAAPAAPPVPAANEIATNKPKITWQALNLPVITQISQALPTTEVTNTQ

SEQ ID NO: 178 - protein, 85 aa, Homo sapiens
ASSVTAQPKKANKMKRVTAKAAQGSQSPTGHEGGTIQLKSPLQVLKLPVISQNIHAPIANESASSQALITSIKPKKASKAKKAAN

SEQ ID NO: 179 - protein, 85 aa, Homo sapiens
KAIASATEVSLAATATHTATTQGQITNETASIHTTAASIRTKKASKARKTIAKVINTDTEHIEALNVTDAATRQIEASVVAIRPK

SEQ ID NO: 180 - protein, 85 aa, Homo sapiens
KSKGKKAASRGPNSVSEISEAPLATQIVTNQALAATLRVKRGSRARKAATKARATESQTPNADQGAQAKIASAQTNVSALETQVA

SEQ ID NO: 181 - protein, 85 aa, Homo sapiens
AAVQALADDYLAQLSLEPTTRTRGKRNRKSKHLNGDERSGSNYRRIPWGRRPAPPRDVAILQERANKLVKYLLVKDQTKIPIKRS

SEQ ID NO: 182 - protein, 85 aa, Homo sapiens
DMLRDVIQEYDEYFPEIIERASYTLEKMFRVNLKEIDKQSSLYILISTQESSAGILGTTKDTPKLGLLMVILSVIFMNGNKASEA

SEQ ID NO: 183 - protein, 85 aa, Homo sapiens
VIWEVLRKLGLRPGVRHSLFGEVRKLITDEFVKQKYLEYKRVPNSRPPEYEFFWGLRSYHETSKMKVLKFACRVQKKDPKDWAVQ

SEQ ID NO: 184 - protein, 85 aa, Homo sapiens
YREAVEMEVQAAAVAVAEAEARAEARAQMGIGEEAVAGPWNWDDMDIDCLTREELGDDAQAWSRFSFEIEARAQENADASTNVNF

SEQ ID NO: 185 - protein, 85 aa, Homo sapiens
SRGASTRAGFSDGASISFNGAPSSSGGFSGGPGITFGVAPSTSASFSNTASISFGGTLSTSSSFSSAASISFGCAHSTSTSFSSE

SEQ ID NO: 186 - protein, 85 aa, Homo sapiens
ASISFGGMPCTSASFSGGVSSSFSGPLSTSATFSGGASSGFGGTLSTTAGFSGVLSTSTSFGSAPTTSTVFSSALSTSTGFGGIL

SEQ ID NO: 187 - protein, 85 aa, Homo sapiens
STSVCFGGSPSSSGSFGGTLSTSICFGGSPCTSTGFGGTLSTSVSFGGSSSTSANFGGTLSTSICFDGSPSTGAGFGGALNTSAS

SEQ ID NO: 188 - protein, 85 aa, Homo sapiens
FGSVLNTSTGFGGAMSTSADFGGTLSTSVCFGGSPGTSVSFGSALNTNAGYGGAVSTNTDFGGTLSTSVCFGGSPSTSAGFGGAL

SEQ ID NO: 189 - protein, 85 aa, Homo sapiens
NTNASFGCAVSTSASFSGAVSTSACFSGAPITNPGFGGAFSTSAGFGGALSTAADFGGTPSNSIGFGAAPSTSVSFGGAHGTSLC

SEQ ID NO: 190 - protein, 85 aa, Homo sapiens
FGGAPSTSLCFGSASNTNLCFGGPPSTSACFSGATSPSFCDGPSTSTGFSFGNGLSTNAGFGGGLNTSAGFGGGLGTSAGFSGGL

SEQ ID NO: 191 - protein, 85 aa, Homo sapiens
STSSGFDGGLGTSAGFGGGPGTSTGFGGGLGTSAGFSGGLGTSAGFGGGLVTSDGFGGGLGTNASFGSTLGTSAGFSGGLSTSDG

SEQ ID NO: 192 - protein, 85 aa, Homo sapiens
FGSRPNASFDRGLSTIIGFGSGSNTSTGFTGEPSTSTGFSSGPSSIVGFSGGPSTGVGFCSGPSTSGFSGGPSTGAGFGGGPNTG

SEQ ID NO: 193 - protein, 85 aa, Homo sapiens
AVTLDKDAYYRRVKRLYSNWRKGEDEYANVDAIVVSVGVDEEIVYAKSTALQTWLFGYELTDTIMVFCDDKIIFMASKKKVEFLK

SEQ ID NO: 194 - protein, 85 aa, Homo sapiens
QIANTKGNENANGAPAITLLIREKNESNKSSFDKMIEAIKESKNGKKIGVFSKDKFPGEFMKSWNDCLNKEGFDKIDISAVVAYT

SEQ ID NO: 195 - protein, 85 aa, Homo sapiens
IAVKEDGELNLMKKAASITSEVFNKFFKERVMEIVDADEKVRHSKLAESVEKAIEEKKYLAGADPSTVEMCYPPIIQSGGNYNLK

SEQ ID NO: 196 - protein, 85 aa, Homo sapiens
FSVVSDKNHMHFGAITCAMGIRFKSYCSNLVRTLMVDPSQEVQENYNFLLQLQEELLKELRHGVKICDVYNAVMDVVKKQKPELL

SEQ ID NO: 197 - protein, 85 aa, Homo sapiens
NKITKNLGFGMGIEFREGSLVINSKNQYKLKKGMVFSINLGFSDLTNKEGKKPEEKTYALFIGDTVLVDEDGPATVLTSVKKKVK

SEQ ID NO: 198 - protein, 85 aa, Homo sapiens
NVGIFLKNEDEEEEEEEKDEAEDLLGRGSRAALLTERTRNEMTAEEKRRAHQKELAAQLNEEAKRRLTEQKGEQQIQKARKSNVS

SEQ ID NO: 199 - protein, 85 aa, Homo sapiens
YKNPSLMPKEPHIREMKIYIDKKYETVIMPVFGIATPFHIATIKNISMSVEGDYTYLRINFYCPGSALGRNEGNIFPNPEATFVK

SEQ ID NO: 200 - protein, 85 aa, Homo sapiens
EITYRASNIKAPGEQTVPALNLQNAFRIIKEVQKRYKTREAEEKEKEGIVKQDSLVINLNRSNPKLKDLYIRPNIAQKRMQGSLE

SEQ ID NO: 201 - protein, 85 aa, Homo sapiens
AHVNGFRFTSVRGDKVDILYNNIKHALFQPCDGEMIIVLHFHLKNAIMFGKKRHTDVQFYTEVGEITTDLGKHQHMHDRDDLYAE

SEQ ID NO: 202 - protein, 85 aa, Homo sapiens
QMEREMRHKLKTAFKNFIEKVEALTKEELEFEVPFRDLGFNGAPYRSTCLLQPTSSALVNATEWPPFVVTLDEVELIHFERVQFH

SEQ ID NO: 203 - protein, 85 aa, Homo sapiens
MKNFDMVIVYKDYSKKVTMINAIPVASLDPIKEWLNSCDLKYTEGVQSLNWTKIMKTIVDDPEGFFEQGGWSFLEPEGEGSDAEE

SEQ ID NO: 204 - protein, 85 aa, Homo sapiens
GDSESEIEDETFNPSEDDYEEEEEDSDEDYSSEAEESDYSKESLGSEEESGKDWDELEEEARKADRESRYEEEEEQSRSMSRKRK

SEQ ID NO: 205 - protein, 84 aa, Homo sapiens
EDYSSEAEESDYSKESLGSEEESGKDWDELEEEARKADRESRYEEEEEQSRSMSRKRKASVHSSGRGSNRGSRHSSAPPKKKRK

SEQ ID NO: 206 - protein, 85 aa, Homo sapiens
IVYAKSTALQTWLFGYELTDTIMVFCDDKIIFMASKKKVEFLKQIANTKGNENANGAPAITLLIREKNESNKSSFDKMIEAIKES

SEQ ID NO: 207 - protein, 85 aa, Homo sapiens
KNGKKIGVFSKDKFPGEFMKSWNDCLNKEGFDKIDISAVVAYTIAVKEDGELNLMKKAASITSEVFNKFFKERVMEIVDADEKVR

SEQ ID NO: 208 - protein, 85 aa, Homo sapiens
HSKLAESVEKAIEEKKYLAGADPSTVEMCYPPIIQSGGNYNLKFSVVSDKNHMHFGAITCAMGIRFKSYCSNLVRTLMVDPSQEV

SEQ ID NO: 209 - protein, 85 aa, Homo sapiens
QENYNFLLQLQEELLKELRHGVKICDVYNAVMDVVKKQKPELLNKITKNLGFGMGIEFREGSLVINSKNQYKLKKGMVFSINLGF

SEQ ID NO: 210 - protein, 85 aa, Homo sapiens
SDLTNKEGKKPEEKTYALFIGDTVLVDEDGPATVLTSVKKKVKNVGIFLKNEDEEEEEEEKDEAEDLLGRGSRAALLTERTRNEM

SEQ ID NO: 211 - protein, 85 aa, Homo sapiens
TAEEKRRAHQKELAAQLNEEAKRRLTEQKGEQQIQKARKSNVSYKNPSLMPKEPHIREMKIYIDKKYETVIMPVFGIATPFHIAT

SEQ ID NO: 212 - protein, 85 aa, Homo sapiens
IKNISMSVEGDYTYLRINFYCPGSALGRNEGNIFPNPEATFVKEITYRASNIKAPGEQTVPALNLQNAFRIIKEVQKRYKTREAE

SEQ ID NO: 213 - protein, 85 aa, Homo sapiens
EKEKEGIVKQDSLVINLNRSNPKLKDLYIRPNIAQKRMQGSLEAHVNGFRFTSVRGDKVDILYNNIKHALFQPCDGEMIIVLHFH

SEQ ID NO: 214 - protein, 85 aa, Homo sapiens
LKNAIMFGKKRHTDVQFYTEVGEITTDLGKHQHMHDRDDLYAEQMEREMRHKLKTAFKNFIEKVEALTKEELEFEVPFRDLGFNG

SEQ ID NO: 215 - protein, 85 aa, Homo sapiens
APYRSTCLLQPTSSALVNATEWPPFVVTLDEVELIHFERVQFHLKNFDMVIVYKDYSKKVTMINAIPVASLDPIKEWLNSCDLKY

SEQ ID NO: 216 - protein, 85 aa, Homo sapiens
TEGVQSLNWTKIMKTIVDDPEGFFEQGGWSFLEPEGEGSDAEEGDSESEIEDETFNPSEDDYEEEEEDSDEDYSSEAEESDYSKE

SEQ ID NO: 217 - protein, 85 aa, Homo sapiens
VQLAPAAAMDEVTFRSDTVLSDVHLYTPNHRHLMVRLNSVGQPVFLSQFKLLWSQDSWTDSGAKGGSHRDVHTKEPPSAETGSTG

SEQ ID NO: 218 - protein, 85 aa, Homo sapiens
SPPGSGHGNEGFSLQAGTDTTGQEVAEAQLDEDGDLDVVRRPRAASDSNPAGPLRDKVHPMILAQEEDDVLGEEAQGSPHDIIRI

SEQ ID NO: 219 - protein, 84 aa, Homo sapiens
MDVVRRPRAASDSNPAGPLRDKVHPMILAQEEDDVLGEEAQGSPHDIIRIGVAGRPAPGRLHPVPTGPLPRMYSAGARGRHGAR

SEQ ID NO: 220 - protein, 85 aa, Homo sapiens
PVFLSQFKLLWSQDSWTDSGAKGGSHRDVHTKEPPSAETGSTGSPPGSGHGNEGFSLQAGTDTTGQEVAEAQLDEDGDLDVVRRP

SEQ ID NO: 221 - protein, 85 aa, Homo sapiens
ASDLESSLTSIDWLPQLTLRATIEKLGSASQAGPPGSSRKCSPGSPTDPNATLSKDEAAVHQDGKPRYSYATLITYAINSSPAKK

SEQ ID NO: 222 - protein, 85 aa, Homo sapiens
MTLSEIYRWICDNFPYYKNAGIGWKNSIRHNLSLNKCFRKVPRPRDDPGKGSYWTIDTCPDISRKRRHPPDDDLSQDSPEQEASK

SEQ ID NO: 223 - protein, 85 aa, Homo sapiens
SPRGGVAGSGEASLPPEGNPQMSLQSPTSIASYSQGTGSVDGGAVAAGASGRESAEGPPPLYNTNHDFKFSYSEINFQDLSWSFR

SEQ ID NO: 224 - protein, 85 aa, Homo sapiens
NLYKSMLEKSSSSSQHGFSSLLGDIPPSNNYYMYQQQQPPPPQQQQQQQQPPQPPPQQSQPQQQQAPAQGPSAVGGAPPLHTPST

SEQ ID NO: 225 - protein, 85 aa, Homo sapiens
DGCTPPGGKQAGAEGYGPPPVMAMHPPPLQHGGYHPHQHHPHSHPAQQPPPPQPQAQGQAPINNTGFAFPSDWCSNIDSLKESFK

SEQ ID NO: 226 - protein, 85 aa, Homo sapiens
MVNRLNWSSIEQSQFSELMESLRQAEQKNWTLDQHHIANLCDSLNHFLTQTGHVPPQGGTHRPPAPARIADSCALTSGKQESAMS

SEQ ID NO: 227 - protein, 84 aa, Homo sapiens
APARIADSCALTSGKQESAMSQVNSYGHPQAPHLYPGPSPMYPIPTQDSAGYNRPAHHMVPRPSVPPPGANEEIPDDFDWDLIT

SEQ ID NO: 228 - protein, 85 aa, Homo sapiens
PGSPTDPNATLSKDEAAVHQDGKPRYSYATLITYAINSSPAKKMTLSEIYRWICDNFPYYKNAGIGWKNSIRHNLSLNKCFRKVP

SEQ ID NO: 229 - protein, 85 aa, Homo sapiens
RPRDDPGKGSYWTIDTCPDISRKRRHPPDDDLSQDSPEQEASKSPRGGVAGSGEASLPPEGNPQMSLQSPTSIASYSQGTGSVDG

SEQ ID NO: 230 - protein, 85 aa, Homo sapiens
GAVAAGASGRESAEGPPPLYNTNHDFKFSYSEINFQDLSWSFRNLYKSMLEKSSSSSQHGFSSLLGDIPPSNNYYMYQQQQPPPP

SEQ ID NO: 231 - protein, 85 aa, Homo sapiens
QQQQQQQQPPQPPPQQSQPQQQQAPAQGPSAVGGAPPLHTPSTDGCTPPGGKQAGAEGYGPPPVMAMHPPPLQHGGYHPHQHHPH

SEQ ID NO: 232 - protein, 85 aa, Homo sapiens
SHPAQQPPPPQPQAQGQAPINNTGFAFPSDWCSNIDSLKESFKMVNRLNWSSIEQSQFSELMESLRQAEQKNWTLDQHHIANLCD

SEQ ID NO: 233 - protein, 85 aa, Homo sapiens
SLNHFLTQTGHVPPQGGTHRPPAPARIADSCALTSGKQESAMSQVNSYGHPQAPHLYPGPSPMYPIPTQDSAGYNRPAHHMVPRP

SEQ ID NO: 234 - protein, 85 aa, Homo sapiens
GTPPGLQTDCEALLSRFQETDSVRFEDFTELWRNMKFGTIFCGRMRNLEKNMFTKEALALAWRYFLPPYTFQIRVGALYLLYGLY

SEQ ID NO: 235 - protein, 85 aa, Homo sapiens
NTQLCQPKQKIRVALKDWDEVLKFQQDLVNAQHFDAAYIFRKLRLDRAFHFTAMPKLLSYRMKKKIHRAEVTEEFKDPSDRVMKL

SEQ ID NO: 236 - protein, 85 aa, Homo sapiens
ITSDVLEEMLNVHDHYQNMKHVISVDKSKPDKALSLIKDDFFDNIKNIVLEHQQWHKDRKNPSLKSKTNDGEEKMEGNSQETERC

SEQ ID NO: 237 - protein, 85 aa, Homo sapiens
ERAESLAKIKSKAFSVVIQASKSRRHRQVKLDSSDSDSASGQGQVKATRKKEKKERLKPAGRKMSLRNKGNVQNIHKEDKPLSLS

SEQ ID NO: 238 - protein, 84 aa, Homo sapiens
VKLDSSDSDSASGQGQVKATRKKEKKERLKPAGRKMSLRNKGNVQNIHKEDKPLSLSMPVITEEEENESLSGTEFTASKKRRKH

SEQ ID NO: 239 - protein, 85 aa, Homo sapiens
GRMRNLEKNMFTKEALALAWRYFLPPYTFQIRVGALYLLYGLYNTQLCQPKQKIRVALKDWDEVLKFQQDLVNAQHFDAAYIFRK

SEQ ID NO: 240 - protein, 85 aa, Homo sapiens
LRLDRAFHFTAMPKLLSYRMKKKIHRAEVTEEFKDPSDRVMKLITSDVLEEMLNVHDHYQNMKHVISVDKSKPDKALSLIKDDFF

SEQ ID NO: 241 - protein, 85 aa, Homo sapiens
DNIKNIVLEHQQWHKDRKNPSLKSKTNDGEEKMEGNSQETERCERAESLAKIKSKAFSVVIQASKSRRHRQVKLDSSDSDSASGQ

SEQ ID NO: 242 - protein, 85 aa, Homo sapiens
SEIQGTVEFSVELHKFYNVDLFQRGYYQIRVTLKVSSRIPHRLSASIAGQTESSSLHSACVHDSTVHSRVFQILYRNEEVPINDA

SEQ ID NO: 243 - protein, 85 aa, Homo sapiens
SRVFQILYRNEEVPINDAVVFRVHLLLGGERMEDALSEVDFQLKVDLHFTDSEQQLRDVAGAPMVSSRTLGLHFHPRNGLHHQVP

SEQ ID NO: 244 - protein, 85 aa, Homo sapiens
MSASIAGQTESSSLHSACVHDSTVHSRVFQILYRNEEVPINDAVVFRVHLLLGGERMEDALSEVDFQLKVDLHFTDSEQQLRDVA

SEQ ID NO: 245 - protein, 85 aa, Homo sapiens
DADSDVALDILITNVVCVFRTRCHLNLRKIALEGANVIYKRDVGKVLMKLRKPRITATIWSSGKIICTGATSEEEAKFGARRLAR

SEQ ID NO: 246 - protein, 85 aa, Homo sapiens
SLQKLGFQVIFTDFKVVNVLAVCNMPFEIRLPEFTKNNRPHASYEPELHPAVCYRIKSLRATLQIFSTGSITVTGPNVKAVATAV

SEQ ID NO: 247 - protein, 84 aa, Homo sapiens
VNVLAVCNMPFEIRLPEFTKNNRPHASYEPELHPAVCYRIKSLRATLQIFSTGSITVTGPNVKAVATAVEQIYPFVFESRKEIL

SEQ ID NO: 248 - protein, 85 aa, Homo sapiens
VGKVLMKLRKPRITATIWSSGKIICTGATSEEEAKFGARRLARSLQKLGFQVIFTDFKVVNVLAVCNMPFEIRLPEFTKNNRPHA

SEQ ID NO: 249 - protein, 85 aa, Homo sapiens
DTPLRRSRRLGGLRPESPESLTSVSRTRRALVEFESNPEETREPGSPPSVQRAGLGSPERPPKTSPGSPRLQQGAGLESPQGQPE

SEQ ID NO: 250 - protein, 85 aa, Homo sapiens
PGAASPQRQQDLHLESPQRQPEYSPESPRCQPKPSEEAPKCSQDQGVLASELAQNKEELTPGAPQHQLPPVPGSPEPYPGQQAPG

SEQ ID NO: 251 - protein, 85 aa, Homo sapiens
PEPSQPLLELTPRAPGSPRGQHEPSKPPPAGETVTGGFGAKKRKGSSSQAPASKKLNKEELPVIPKGKPKSGRVWKDRSKKRFSQ

SEQ ID NO: 252 - protein, 85 aa, Homo sapiens
MLQDKPLRTSWQRKMKERQERKLAKDFARHLEEEKERRRQEKKQRRAENLKRRLENERKAEVVQVIRNPAKLKRAKKKQLRSIEK

SEQ ID NO: 253 - protein, 84 aa, Homo sapiens
RKLAKDFARHLEEEKERRRQEKKQRRAENLKRRLENERKAEVVQVIRNPAKLKRAKKKQLRSIEKRDTLALLQKQPPQQPAAKI

SEQ ID NO: 254 - protein, 85 aa, Homo sapiens
EPGSPPSVQRAGLGSPERPPKTSPGSPRLQQGAGLESPQGQPEPGAASPQRQQDLHLESPQRQPEYSPESPRCQPKPSEEAPKCS

SEQ ID NO: 255 - protein, 85 aa, Homo sapiens
QDQGVLASELAQNKEELTPGAPQHQLPPVPGSPEPYPGQQAPGPEPSQPLLELTPRAPGSPRGQHEPSKPPPAGETVTGGFGAKK

SEQ ID NO: 256 - protein, 85 aa, Homo sapiens
RKGSSSQAPASKKLNKEELPVIPKGKPKSGRVWKDRSKKRFSQMLQDKPLRTSWQRKMKERQERKLAKDFARHLEEEKERRRQEK

SEQ ID NO: 257 - protein, 85 aa, Homo sapiens
SKLWRRGSTSGAMEAPEPGEALELSLAGAHGHGVHKKKHKKHKKKHKKKHHQEEDAGPTQPSPAKPQLKLKIKLGGQVLGTKSVP

SEQ ID NO: 258 - protein, 85 aa, Homo sapiens
TFTVIPEGPRSPSPLMVVDNEEEPMEGVPLEQYRAWLDEDSNLSPSPLRDLSGGLGGQEEEEEQRWLDALEKGELDDNGDLKKEI

SEQ ID NO: 259 - protein, 85 aa, Homo sapiens
NERLLTARQRALLQKARSQPSPMLPLPVAEGCPPPALTEEMLLKREERARKRRLQAARRAEEHKNQTIERLTKTAATSGRGGRGG

SEQ ID NO: 260 - protein, 85 aa, Homo sapiens
ARGERRGGRAAAPAPMVRYCSGAQGSTLSFPPGVPAPTAVSQRPSPSGPPPRCSVPGCPHPRRYACSRTGQALCSLQCYRINLQM

SEQ ID NO: 261 - protein, 84 aa, Homo sapiens
VRYCSGAQGSTLSFPPGVPAPTAVSQRPSPSGPPPRCSVPGCPHPRRYACSRTGQALCSLQCYRINLQMRLGGPEGPGSPLLAT

SEQ ID NO: 262 - protein, 85 aa, Homo sapiens
KKKHKKKHHQEEDAGPTQPSPAKPQLKLKIKLGGQVLGTKSVPTFTVIPEGPRSPSPLMVVDNEEEPMEGVPLEQYRAWLDEDSN

SEQ ID NO: 263 - protein, 85 aa, Homo sapiens
LSPSPLRDLSGGLGGQEEEEEQRWLDALEKGELDDNGDLKKEINERLLTARQRALLQKARSQPSPMLPLPVAEGCPPPALTEEML

SEQ ID NO: 264 - protein, 85 aa, Homo sapiens
MKREERARKRRLQAARRAEEHKNQTIERLTKTAATSGRGGRGGARGERRGGRAAAPAPMVRYCSGAQGSTLSFPPGVPAPTAVSQ

SEQ ID NO: 265 - protein, 85 aa, Homo sapiens
AAGCSEAPRPAAASDGSLVGQAGVLPCLELPTYAAACALVNSRYSCLVAGPHQRHIALSPRYLNRKRTGIREQLDAELLRYSESL

SEQ ID NO: 266 - protein, 85 aa, Homo sapiens
LGVPIAYDNIKVVGELGDIYDDQGHIHLNIEADFVIFCPEPGQKLMGIVNKVSSSHIGCLVHGCFNASIPKPEQLSAEQWQTMEI

SEQ ID NO: 267 - protein, 85 aa, Homo sapiens
NMGDELEFEVFRLDSDAAGVFCIRGKLNITSLQFKRSEVSEEVTENGTEEAAKKPKKKKKKKDPETYEVDSGTTKLADDADDTPM

SEQ ID NO: 268 - protein, 84 aa, Homo sapiens
PMEESALQNTNNANGIWEEEPKKKKKKKKHQEVQDQDPVFQGSDSSGYQSDHKKKKKKRKHSEEAEFTPPLKCSPKRKGKSNFL

SEQ ID NO: 269 - protein, 85 aa, Homo sapiens
RYSCLVAGPHQRHIALSPRYLNRKRTGIREQLDAELLRYSESLLGVPIAYDNIKVVGELGDIYDDQGHIHLNIEADFVIFCPEPG

SEQ ID NO: 270 - protein, 85 aa, Homo sapiens
QKLMGIVNKVSSSHIGCLVHGCFNASIPKPEQLSAEQWQTMEINMGDELEFEVFRLDSDAAGVFCIRGKLNITSLQFKRSEVSEE

SEQ ID NO: 271 - protein, 85 aa, Homo sapiens
VTENGTEEAAKKPKKKKKKKDPETYEVDSGTTKLADDADDTPMEESALQNTNNANGIWEEEPKKKKKKKKHQEVQDQDPVFQGSD

SEQ ID NO: 272 - protein, 85 aa, Homo sapiens
SFRGGGRGGFNRGGGGGGFNRGGSSNHFRGGGGGGGGGNFRGGGRGGFGRGGGRGGFNKGQDQGPPERVVLLGEFLHPCEDDIVC

SEQ ID NO: 273 - protein, 85 aa, Homo sapiens
KCTTDENKVPYFNAPVYLENKEQIGKVDEIFGQLRDFYFSVKLSENMKASSFKKLQKFYIDPYKLLPLQRFLPRPPGEKGPPRGG

SEQ ID NO: 274 - protein, 84 aa, Homo sapiens
KASSFKKLQKFYIDPYKLLPLQRFLPRPPGEKGPPRGGGRGGRGGGRGGGGRGGGRGGGFRGGRGGGGGGFRGGRGGGFRGRGH

SEQ ID NO: 275 - protein, 85 aa, Homo sapiens
GGRGGFGRGGGRGGFNKGQDQGPPERVVLLGEFLHPCEDDIVCKCTTDENKVPYFNAPVYLENKEQIGKVDEIFGQLRDFYFSVK

SEQ ID NO: 276 - protein, 85 aa, Homo sapiens
MSENMKASSFKKLQKFYIDPYKLLPLQRFLPRPPGEKGPPRGGGRGGRGGGRGGGGRGGGRGGGFRGGRGGGGGGFRGGRGGGFR

SEQ ID NO: 277 - protein, 85 aa, Homo sapiens
AMEIDSRPGGLPGSSCNLGAAREHMQAVTRNYITHPRVTYRTVCSVNGPLVVLDRVKFAQYAEIVHFTLPDGTQRSGQVLEVAGT

SEQ ID NO: 278 - protein, 85 aa, Homo sapiens
KAIVQVFEGTSGIDARKTTCEFTGDILRTPVSEDMLGRVFNGSGKPIDKGPVVMAEDFLDINGQPINPHSRIYPEEMIQTGISPI

SEQ ID NO: 279 - protein, 85 aa, Homo sapiens
DVMNSIARGQKIPIFSAAGLPHNEIAAQICRQAGLVKKSKAVLDYHDDNFAIVFAAMGVNMETARFFKSDFEQNGTMGNVCLFLN

SEQ ID NO: 280 - protein, 85 aa, Homo sapiens
MANDPTIERIITPRLALTTAEFLAYQCEKHVLVILTDMSSYAEALREVSAAREEVPGRRGFPGYMYTDLATIYERAGRVEGRGGS

SEQ ID NO: 281 - protein, 85 aa, Homo sapiens
ITQIPILTMPNDDITHPIPDLTGFITEGQIYVDRQLHNRQIYPPINVLPSLSRLMKSAIGEGMTRKDHGDVSNQLYACYAIGKDV

SEQ ID NO: 282 - protein, 85 aa, Homo sapiens
QAMKAVVGEEALTSEDLLYLEFLQKFEKNFINQGPYENRSVFESLDLGWKLLRIFPKEMLKRIPQAVIDEFYSREGALQDLAPDT

SEQ ID NO: 283 - protein, 84 aa, Homo sapiens
KAVVGEEALTSEDLLYLEFLQKFEKNFINQGPYENRSVFESLDLGWKLLRIFPKEMLKRIPQAVIDEFYSREGALQDLAPDTAL

SEQ ID NO: 284 - protein, 85 aa, Homo sapiens
VCSVNGPLVVLDRVKFAQYAEIVHFTLPDGTQRSGQVLEVAGTKAIVQVFEGTSGIDARKTTCEFTGDILRTPVSEDMLGRVFNG

SEQ ID NO: 285 - protein, 85 aa, Homo sapiens
SGKPIDKGPVVMAEDFLDINGQPINPHSRIYPEEMIQTGISPIDVMNSIARGQKIPIFSAAGLPHNEIAAQICRQAGLVKKSKAV

SEQ ID NO: 286 - protein, 85 aa, Homo sapiens
MDYHDDNFAIVFAAMGVNMETARFFKSDFEQNGTMGNVCLFLNLANDPTIERIITPRLALTTAEFLAYQCEKHVLVILTDMSSYA

SEQ ID NO: 287 - protein, 85 aa, Homo sapiens
EALREVSAAREEVPGRRGFPGYMYTDLATIYERAGRVEGRGGSITQIPILTMPNDDITHPIPDLTGFITEGQIYVDRQLHNRQIY

SEQ ID NO: 288 - protein, 85 aa, Homo sapiens
PPINVLPSLSRLMKSAIGEGMTRKDHGDVSNQLYACYAIGKDVQAMKAVVGEEALTSEDLLYLEFLQKFEKNFINQGPYENRSVF

SEQ ID NO: 289 - protein, 85 aa, Homo sapiens
GSELIGRLAPRLGLAEPDMLRKAEEYLRLSRVKCVGLSARTTETSSAVMCLDLAASWMKCPLDRAYLIKLSGLNKETYQSCLKSF

SEQ ID NO: 290 - protein, 85 aa, Homo sapiens
ECLLGLNSNIGIRDLAVQFSCIEAVNMASKILKSYESSLPQTQQVDLDLSRPLFTSAALLSACKILKLKVDKNKMVATSGVKKAI

SEQ ID NO: 291 - protein, 84 aa, Homo sapiens
KAIFDRLCKQLEKIGQQVDREPGDVATPPRKRKKIVVEAPAKEMEKVEEMPHKPQKDEDLTQDYEEWKRKILENAASAQKATAE

SEQ ID NO: 292 - protein, 85 aa, Homo sapiens
ETSSAVMCLDLAASWMKCPLDRAYLIKLSGLNKETYQSCLKSFECLLGLNSNIGIRDLAVQFSCIEAVNMASKILKSYESSLPQT

SEQ ID NO: 293 - protein, 85 aa, Homo sapiens
QQVDLDLSRPLFTSAALLSACKILKLKVDKNKMVATSGVKKAIFDRLCKQLEKIGQQVDREPGDVATPPRKRKKIVVEAPAKEME

SEQ ID NO: 294 - protein, 85 aa, Homo sapiens
EHVTEGSWESLPVPLHPQVLGALRELGFPYMTPVQSATIPLFMRNKDVAAEAVTGSGKTLAFVIPILEILLRREEKLKKSQVGAI

SEQ ID NO: 295 - protein, 85 aa, Homo sapiens
IITPTRELAIQIDEVLSHFTKHFPEFSQILWIGGRNPGEDVERFKQQGGNIIVATPGRLEDMFRRKAEGLDLASCVRSLDVLVLD

SEQ ID NO: 296 - protein, 85 aa, Homo sapiens
EADRLLDMGFEASINTILEFLPKQRRTGLFSATQTQEVENLVRAGLRNPVRVSVKEKGVAASSAQKTPSRLENYYMVCKADEKFN

SEQ ID NO: 297 - protein, 85 aa, Homo sapiens
QLVHFLRNHKQEKHLVFFSTCACVEYYGKALEVLVKGVKIMCIHGKMKYKRNKIFMEFRKLQSGILVCTDVMARGIDIPEVNWVL

SEQ ID NO: 298 - protein, 85 aa, Homo sapiens
QYDPPSNASAFVHRCGRTARIGHGGSALVFLLPMEESYINFLAINQKCPLQEMKPQRNTADLLPKLKSMALADRAVFEKGMKAFV

SEQ ID NO: 299 - protein, 85 aa, Homo sapiens
SYVQAYAKHECNLIFRLKDLDFASLARGFALLRMPKMPELRGKQFPDFVPVDVNTDTIPFKDKIREKQRQKLLEQQRREKTENEG

SEQ ID NO: 300 - protein, 85 aa, Homo sapiens
RRKFIKNKAWSKQKAKKEKKKKMNEKRKREEGSDIEDEDMEELLNDTRLLKKLKKGKITEEEFEKGLLTTGKRTIKTVDLGISDL

SEQ ID NO: 301 - protein, 84 aa, Homo sapiens
KNKAWSKQKAKKEKKKKMNEKRKREEGSDIEDEDMEELLNDTRLLKKLKKGKITEEEFEKGLLTTGKRTIKTVDLGISDLEDDC

SEQ ID NO: 302 - protein, 85 aa, Homo sapiens
MRNKDVAAEAVTGSGKTLAFVIPILEILLRREEKLKKSQVGAIIITPTRELAIQIDEVLSHFTKHFPEFSQILWIGGRNPGEDVE

SEQ ID NO: 303 - protein, 85 aa, Homo sapiens
RFKQQGGNIIVATPGRLEDMFRRKAEGLDLASCVRSLDVLVLDEADRLLDMGFEASINTILEFLPKQRRTGLFSATQTQEVENLV

SEQ ID NO: 304 - protein, 85 aa, Homo sapiens
RAGLRNPVRVSVKEKGVAASSAQKTPSRLENYYMVCKADEKFNQLVHFLRNHKQEKHLVFFSTCACVEYYGKALEVLVKGVKIMC

SEQ ID NO: 305 - protein, 85 aa, Homo sapiens
IHGKMKYKRNKIFMEFRKLQSGILVCTDVMARGIDIPEVNWVLQYDPPSNASAFVHRCGRTARIGHGGSALVFLLPMEESYINFL

SEQ ID NO: 306 - protein, 85 aa, Homo sapiens
AINQKCPLQEMKPQRNTADLLPKLKSMALADRAVFEKGMKAFVSYVQAYAKHECNLIFRLKDLDFASLARGFALLRMPKMPELRG

SEQ ID NO: 307 - protein, 85 aa, Homo sapiens
KQFPDFVPVDVNTDTIPFKDKIREKQRQKLLEQQRREKTENEGRRKFIKNKAWSKQKAKKEKKKKMNEKRKREEGSDIEDEDMEE

SEQ ID NO: 308 - protein, 85 aa, Homo sapiens
SSKKAKTKTTKKRPQRATSNVFAMFDQSQIQEFKEAFNMIDQNRDGFIDKEDLHDMLASLGKNPTDAYLDAMMNEAPGPINFTMF

SEQ ID NO: 309 - protein, 85 aa, Homo sapiens
MTMFGEKLNGTDPEDVIRNAFACFDEEATGTIQEDYLRELLTTMGDRFTDEEVDELYREAPIDKKGNFNYIEFTRILKHGAKDKD

SEQ ID NO: 310 - protein, 84 aa, Homo sapiens
MFGEKLNGTDPEDVIRNAFACFDEEATGTIQEDYLRELLTTMGDRFTDEEVDELYREAPIDKKGNFNYIEFTRILKHGAKDKDD

SEQ ID NO: 311 - protein, 85 aa, Homo sapiens
NRDGFIDKEDLHDMLASLGKNPTDAYLDAMMNEAPGPINFTMFLTMFGEKLNGTDPEDVIRNAFACFDEEATGTIQEDYLRELLT

SEQ ID NO: 312 - protein, 85 aa, Homo sapiens
EEETHTDAKIRAENGTGSSPRGPGCSLRHFACEQNLLSRPDGSASFLQGDTSVLAGVYGPAEVKVSKEIFNKATLEVILRPKIGL

SEQ ID NO: 313 - protein, 85 aa, Homo sapiens
PGVAEKSRERLIRNTCEAVVLGTLHPRTSITVVLQVVSDAGSLLACCLNAACMALVDAGVPMRALFCGVACALDSDGTLVLDPTS

SEQ ID NO: 314 - protein, 84 aa, Homo sapiens
FCGVACALDSDGTLVLDPTSKQEKEARAVLTFALDSVERKLLMSSTKGLYSDTELQQCLAAAQAASQHVFRFYRESLQRRYSKS

SEQ ID NO: 315 - protein, 85 aa, Homo sapiens
SASFLQGDTSVLAGVYGPAEVKVSKEIFNKATLEVILRPKIGLPGVAEKSRERLIRNTCEAVVLGTLHPRTSITVVLQVVSDAGS

SEQ ID NO: 316 - protein, 85 aa, Homo sapiens
LLACCLNAACMALVDAGVPMRALFCGVACALDSDGTLVLDPTSKQEKEARAVLTFALDSVERKLLMSSTKGLYSDTELQQCLAAA

SEQ ID NO: 317 - protein, 85 aa, Homo sapiens
SSKRTKTKTKKRPQRATSNVFAMFDQSQIQEFKEAFNMIDQNRDGFIDKEDLHDMLASLGKNPTDEYLDAMMNEAPGPINFTMFL

SEQ ID NO: 318 - protein, 85 aa, Homo sapiens
TMFGEKLNGTDPEDVIRNAFACFDEEATGTIQEDYLRELLTTMGDRFTDEEVDELYREAPIDKKGNFNYIEFTRILKHGAKDKDD

SEQ ID NO: 319 - protein, 84 aa, Homo sapiens; identical to SEQ ID NO: 310

SEQ ID NO: 320 - protein, 85 aa, Homo sapiens
RDGFIDKEDLHDMLASLGKNPTDEYLDAMMNEAPGPINFTMFLTMFGEKLNGTDPEDVIRNAFACFDEEATGTIQEDYLRELLTT

SEQ ID NO: 321 - protein, 85 aa, Homo sapiens
AASETVRLRLQFDYPPPATPHCTAFWLLVDLNRCRVVTDLISLIRQRFGFSSGAFLGLYLEGGLLPPAESARLVRDNDCLRVKLE

SEQ ID NO: 322 - protein, 85 aa, Homo sapiens
ERGVAENSVVISNGDINLSLRKAKKRAFQLEEGEETEPDCKYSKKHWKSRENNNNNEKVLDLEPKAVTDQTVSKKNKRKNKATCG

SEQ ID NO: 323 - protein, 85 aa, Homo sapiens
TVGDDNEEAKRKSPKKKEKCEYKKKAKNPKSPKVQAVKDWANQRCSSPKGSARNSLVKAKRKGSVSVCSKESPSSSSESESCDES

SEQ ID NO: 324 - protein, 85 aa, Homo sapiens
ISDGPSKVTLEARNSSEKLPTELSKEEPSTKNTTADKLAIKLGFSLTPSKGKTSGTTSSSSDSSAESDDQCLMSSSTPECAAGFL

SEQ ID NO: 325 - protein, 85 aa, Homo sapiens
KTVGLFAGRGRPGPGLSSQTAGAAGWRRSGSNGGGQAPGASPSVSLPASLGRGWGREENLFSWKGAKGRGMRGRGRGRGHPVSCV

SEQ ID NO: 326 - protein, 85 aa, Homo sapiens
VNRSTDNQRQQQLNDVVKNSSTIIQNPVETPKKDYSLLPLLAAAPQVGEKIAFKLLELTSSYSPDVSDYKEGRILSHNPETQQVD

SEQ ID NO: 327 - protein, 84 aa, Homo sapiens
SDYKEGRILSHNPETQQVDIEILSSLPALREPGKFDLVYHNENGAEVVEYAVTQESKITVFWKELIDPRLIIESPSNTSSTEPA

SEQ ID NO: 328 - protein, 85 aa, Homo sapiens
LIRQRFGFSSGAFLGLYLEGGLLPPAESARLVRDNDCLRVKLEERGVAENSVVISNGDINLSLRKAKKRAFQLEEGEETEPDCKY

SEQ ID NO: 329 - protein, 85 aa, Homo sapiens
SKKHWKSRENNNNNEKVLDLEPKAVTDQTVSKKNKRKNKATCGTVGDDNEEAKRKSPKKKEKCEYKKKAKNPKSPKVQAVKDWAN

SEQ ID NO: 330 - protein, 85 aa, Homo sapiens
QRCSSPKGSARNSLVKAKRKGSVSVCSKESPSSSSESESCDESISDGPSKVTLEARNSSEKLPTELSKEEPSTKNTTADKLAIKL

SEQ ID NO: 331 - protein, 85 aa, Homo sapiens
GFSLTPSKGKTSGTTSSSSDSSAESDDQCLMSSSTPECAAGFLKTVGLFAGRGRPGPGLSSQTAGAAGWRRSGSNGGGQAPGASP

SEQ ID NO: 332 - protein, 85 aa, Homo sapiens
SVSLPASLGRGWGREENLFSWKGAKGRGMRGRGRGRGHPVSCVVNRSTDNQRQQQLNDVVKNSSTIIQNPVETPKKDYSLLPLLA

SEQ ID NO: 333 - protein, 85 aa, Homo sapiens
AAPQVGEKIAFKLLELTSSYSPDVSDYKEGRILSHNPETQQVDIEILSSLPALREPGKFDLVYHNENGAEVVEYAVTQESKITVF

SEQ ID NO: 334 - protein, 85 aa, Homo sapiens
PPKGKSGSGKAGKGGAASGSDSADKKAQGPKGGGNAVKVRHILCEKHGKIMEAMEKLKSGMRFNEVAAQYSEDKARQGVCCSYYL

SEQ ID NO: 335 - protein, 84 aa, Homo sapiens
PKGKSGSGKAGKGGAASGSDSADKKAQGPKGGGNAVKVRHILCEKHGKIMEAMEKLKSGMRFNEVAAQYSEDKARQGVCCSYYL

SEQ ID NO: 336 - protein, 85 aa, Homo sapiens
PPERRRRMKLDRRTGAKPKRKPGMRPDWKAGAGPGGPPQKPAPSSQRKPPARPSAAAAAIAVAAAEEERRLRQRNRLRLEEDKPA

SEQ ID NO: 337 - protein, 85 aa, Homo sapiens
VERCLEELVFGDVENDEDALLRRLRGPRVQEHEDSGDSEVENEAKGNFPPQKKPVWVDEEDEDEEMVDMMNNRFRKDMMKNASES

SEQ ID NO: 338 - protein, 85 aa, Homo sapiens
KLSKDNLKKRLKEEFQHAMGGVPAWAETTKRKTSSDDESEEDEDDLLQRTGNFISTSTSLPRGILKMKNCQHANAERPTVARISS

SEQ ID NO: 339 - protein, 85 aa, Homo sapiens
VQFHPGAQIVMVAGLDNAVSLFQVDGKTNPKIQSIYLERFPIFKACFSANGEEVLATSTHSKVLYVYDMLAGKLIPVHQVRGLKE

SEQ ID NO: 340 - protein, 85 aa, Homo sapiens
KIVRSFEVSPDGSFLLINGIAGYLHLLAMKTKELIGSMKINGRVAASTFSSDSKKVYASSGDGEVYVWDVNSRKCLNRFVDEGSL

SEQ ID NO: 341 - protein, 85 aa, Homo sapiens
YGLSIATSRNGQYVACGSNCGVVNIYNQDSCLQETNPKPIKAIMNLVTGVTSLTFNPTTEILAIASEKMKEAVRLVHLPSCTVFS

SEQ ID NO: 342 - protein, 84 aa, Homo sapiens
VTGVTSLTFNPTTEILAIASEKMKEAVRLVHLPSCTVFSNFPVIKNKNISHVHTMDFSPRSGYFALGNEKGKALMYRLHHYSDF

SEQ ID NO: 343 - protein, 85 aa, Homo sapiens
PSSQRKPPARPSAAAAAIAVAAAEEERRLRQRNRLRLEEDKPAVERCLEELVFGDVENDEDALLRRLRGPRVQEHEDSGDSEVEN

SEQ ID NO: 344 - protein, 85 aa, Homo sapiens
EAKGNFPPQKKPVWVDEEDEDEEMVDMMNNRFRKDMMKNASESKLSKDNLKKRLKEEFQHAMGGVPAWAETTKRKTSSDDESEED

SEQ ID NO: 345 - protein, 85 aa, Homo sapiens
EDDLLQRTGNFISTSTSLPRGILKMKNCQHANAERPTVARISSVQFHPGAQIVMVAGLDNAVSLFQVDGKTNPKIQSIYLERFPI

SEQ ID NO: 346 - protein, 85 aa, Homo sapiens
FKACFSANGEEVLATSTHSKVLYVYDMLAGKLIPVHQVRGLKEKIVRSFEVSPDGSFLLINGIAGYLHLLAMKTKELIGSMKING

SEQ ID NO: 347 - protein, 85 aa, Homo sapiens
RVAASTFSSDSKKVYASSGDGEVYVWDVNSRKCLNRFVDEGSLYGLSIATSRNGQYVACGSNCGVVNIYNQDSCLQETNPKPIKA

SEQ ID NO: 348 - protein, 85 aa, Homo sapiens
IMNLVTGVTSLTFNPTTEILAIASEKMKEAVRLVHLPSCTVFSNFPVIKNKNISHVHTMDFSPRSGYFALGNEKGKALMYRLHHY

SEQ ID NO: 349 - protein, 85 aa, Homo sapiens
SSSYYVNALFSKYTAGASLFQNAEPTSCSFAPNSQRSGYGAGAGAFASTVPGLYNVNSPLYQSPFASGYGLGADAYGNLPCASYD

SEQ ID NO: 350 - protein, 85 aa, Homo sapiens
QNIPGLCSDLAKGACDKTDEGALHGAAEANFRIYPWMRSSGPDRKRGRQTYTRYQTLELEKEFHFNRYLTRRRRIEIAHALCLTE

SEQ ID NO: 351 - protein, 84 aa, Homo sapiens
KEFHFNRYLTRRRRIEIAHALCLTERQIKIWFQNRRMKWKKEHKDEGPTAAAAPEGAVPSAAATAAADKADEEDDDEEEEDEEE

SEQ ID NO: 352 - protein, 85 aa, Homo sapiens
AGAFASTVPGLYNVNSPLYQSPFASGYGLGADAYGNLPCASYDQNIPGLCSDLAKGACDKTDEGALHGAAEANFRIYPWMRSSGP

SEQ ID NO: 353 - protein, 85 aa, Homo sapiens
DRKRGRQTYTRYQTLELEKEFHFNRYLTRRRRIEIAHALCLTERQIKIWFQNRRMKWKKEHKDEGPTAAAAPEGAVPSAAATAAA

SEQ ID NO: 354 - protein, 85 aa, Homo sapiens
GKNKQPRGQQRQGGPPAADAAGPDDMEPKKGTGAPKECGEEEPRTCCGCRFPLLLALLQLALGIAVTVVGFLMASISSSLLVRDT

SEQ ID NO: 355 - protein, 85 aa, Homo sapiens
PFWAGIIVCLVAYLGLFMLCVSYQVDERTCIQFSMKLLYFLLSALGLTVCVLAVAFAAHHYSQLTQFTCETTLDSCQCKLPSSEP

SEQ ID NO: 356 - protein, 84 aa, Homo sapiens
DSCQCKLPSSEPLSRTFVYRDVTDCTSVTGTFKLFLLIQMILNLVCGLVCLLACFVMWKHRYQVFYVGVRICSLTASEGPQQKI

SEQ ID NO: 357 - protein, 85 aa, Homo sapiens
PRTCCGCRFPLLLALLQLALGIAVTVVGFLMASISSSLLVRDTPFWAGIIVCLVAYLGLFMLCVSYQVDERTCIQFSMKLLYFLL

SEQ ID NO: 358 - protein, 85 aa, Homo sapiens
SALGLTVCVLAVAFAAHHYSQLTQFTCETTLDSCQCKLPSSEPLSRTFVYRDVTDCTSVTGTFKLFLLIQMILNLVCGLVCLLAC

SEQ ID NO: 359 - protein, 85 aa, Homo sapiens
PKFKAARGVGGQEKHAPLADQILAGNAVRAGVREKRRGRGTGEAEEEYVGPRLSRRILQQARQQQEELEAEHGTGDKPAAPRERT

SEQ ID NO: 360 - protein, 85 aa, Homo sapiens
TRLGPRMPQDGSDDEDEEWPTLEKAATMTAAGHHAEVVVDPEDERAIEMFMNKNPPARRTLADIIMEKLTEKQTEVETVMSEVSG

SEQ ID NO: 361 - protein, 85 aa, Homo sapiens
FPMPQLDPRVLEVYRGVREVLSKYRSGKLPKAFKIIPALSNWEQILYVTEPEAWTAAAMYQATRIFASNLKERMAQRFYNLVLLP

SEQ ID NO: 362 - protein, 85 aa, Homo sapiens
RVRDDVAEYKRLNFHLYMALKKALFKPGAWFKGILIPLCESGTCTLREAIIVGSIITKCSIPVLHSSAAMLKIAEMEYSGANSIF

SEQ ID NO: 363 - protein, 85 aa, Homo sapiens
MRLLLDKKYALPYRVLDALVFHFLGFRTEKRELPVLWHQCLLTLVQRYKADLATDQKEALLELLRLQPHPQLSPEIRRELQSAVP

SEQ ID NO: 364 - protein, 84 aa, Homo sapiens
YRVLDALVFHFLGFRTEKRELPVLWHQCLLTLVQRYKADLATDQKEALLELLRLQPHPQLSPEIRRELQSAVPRDVEDVPITVE

SEQ ID NO: 365 - protein, 85 aa, Homo sapiens
EAEEEYVGPRLSRRILQQARQQQEELEAEHGTGDKPAAPRERTTRLGPRMPQDGSDDEDEEWPTLEKAATMTAAGHHAEVVVDPE

SEQ ID NO: 366 - protein, 85 aa, Homo sapiens
DERAIEMFMNKNPPARRTLADIIMEKLTEKQTEVETVMSEVSGFPMPQLDPRVLEVYRGVREVLSKYRSGKLPKAFKIIPALSNW

SEQ ID NO: 367 - protein, 85 aa, Homo sapiens
EQILYVTEPEAWTAAAMYQATRIFASNLKERMAQRFYNLVLLPRVRDDVAEYKRLNFHLYMALKKALFKPGAWFKGILIPLCESG

SEQ ID NO: 368 - protein, 85 aa, Homo sapiens
TCTLREAIIVGSIITKCSIPVLHSSAAMLKIAEMEYSGANSIFLRLLLDKKYALPYRVLDALVFHFLGFRTEKRELPVLWHQCLL

SEQ ID NO: 369 - protein, 85 aa, Homo sapiens
KETPLSNCERRFLLRAIEEKKRLDGRQTYDYRNIRISFGTDYGCCIVELGKTRVLGQVSCELVSPKLNRATEGILFFNLELSQMA

SEQ ID NO: 370 - protein, 85 aa, Homo sapiens
APAFEPGRQSDLLVKLNRLMERCLRNSKCIDTESLCVVAGEKVWQIRVDLHLLNHDGNIIDAASIAAIVALCHFRRPDVSVQGDE

SEQ ID NO: 371 - protein, 85 aa, Homo sapiens
VTLYTPEERDPVPLSIHHMPICVSFAFFQQGTYLLVDPNEREERVMDGLLVIAMNKHREICTIQSSGGIMLLKDQVLRCSKIAGV

SEQ ID NO: 372 - protein, 85 aa, Homo sapiens
KVAEITELILKALENDQKVRKEGGKFGFAESIANQRITAFKMEKAPIDTSDVEEKAEEIIAEAEPPSEVVSTPVLWTPGTAQIGE

SEQ ID NO: 373 - protein, 85 aa, Homo sapiens
GVENSWGDLEDSEKEDDEGGGDQAIILDGIKMDTGVEVSDIGSQDAPIILSDSEEEEMIILEPDKNPKKIRTQTTSAKQEKAPSK

SEQ ID NO: 374 - protein, 84 aa, Homo sapiens
EDDEGGGDQAIILDGIKMDTGVEVSDIGSQDAPIILSDSEEEEMIILEPDKNPKKIRTQTTSAKQEKAPSKKPVKRRKKKRAAN

SEQ ID NO: 375 - protein, 85 aa, Homo sapiens
GCCIVELGKTRVLGQVSCELVSPKLNRATEGILFFNLELSQMAAPAFEPGRQSDLLVKLNRLMERCLRNSKCIDTESLCVVAGEK

SEQ ID NO: 376 - protein, 85 aa, Homo sapiens
VWQIRVDLHLLNHDGNIIDAASIAAIVALCHFRRPDVSVQGDEVTLYTPEERDPVPLSIHHMPICVSFAFFQQGTYLLVDPNERE

SEQ ID NO: 377 - protein, 85 aa, Homo sapiens
ERVMDGLLVIAMNKHREICTIQSSGGIMLLKDQVLRCSKIAGVKVAEITELILKALENDQKVRKEGGKFGFAESIANQRITAFKM

SEQ ID NO: 378 - protein, 85 aa, Homo sapiens
EKAPIDTSDVEEKAEEIIAEAEPPSEVVSTPVLWTPGTAQIGEGVENSWGDLEDSEKEDDEGGGDQAIILDGIKMDTGVEVSDIG

SEQ ID NO: 379 - protein, 85 aa, Homo sapiens
VCEKCEKKLGTVITPDTWKDGARNTTESGGRKLNENKALTSKKARFDPYGKNKFSTCRICKSSVHQPGSHYCQGCAYKKGICAMC

SEQ ID NO: 380 - protein, 84 aa, Homo sapiens
TWKDGARNTTESGGRKLNENKALTSKKARFDPYGKNKFSTCRICKSSVHQPGSHYCQGCAYKKGICAMCGKKVLDTKNYKQTSV

SEQ ID NO: 381 - protein, 85 aa, Homo sapiens
ASGRDERPPWRLGRLLLLMCLLLLGSSARAAHIKKAEATTTTTSAGAEAAEGQFDRYYHEEELESALREAAAAGLPGLARLFSIG

SEQ ID NO: 382 - protein, 85 aa, Homo sapiens
RSVEGRPLWVLRLTAGLGSLIPEGDAGPDAAGPDAAGPLLPGRPQVKLVGNMHGDETVSRQVLIYLARELAAGYRRGDPRLVRLL

SEQ ID NO: 383 - protein, 85 aa, Homo sapiens
NTTDVYLLPSLNPDGFERAREGDCGFGDGGPSGASGRDNSRGRDLNRSFPDQFSTGEPPALDEVPEVRALIEWIRRNKFVLSGNL

SEQ ID NO: 384 - protein, 85 aa, Homo sapiens
HGGSVVASYPFDDSPEHKATGIYSKTSDDEVFKYLAKAYASNHPIMKTGEPHCPGDEDETFKDGITNGAHWYDVEGGMQDYNYVW

SEQ ID NO: 385 - protein, 85 aa, Homo sapiens
ANCFEITLELSCCKYPPASQLRQEWENNRESLITLIEKVHIGVKGFVKDSITGSGLENATISVAGINHNITTGRFGDFYRLLVPG

SEQ ID NO: 386 - protein, 85 aa, Homo sapiens
TYNLTVVLTGYMPLTVTNVVVKEGPATEVDFSLRPTVTSVIPDTTEAVSTASTVAIPNILSGTSSSYQPIQPKDFHHHHFPDMEI

SEQ ID NO: 387 - protein, 85 aa, Homo sapiens
FLRRFANEYPNITRLYSLGKSVESRELYVMEISDNPGVHEPGEPEFKYIGNMHGNEVVGRELLLNLIEYLCKNFGTDPEVTDLVH

SEQ ID NO: 388 - protein, 85 aa, Homo sapiens
NTRIHLMPSMNPDGYEKSQEGDSISVIGRNNSNNFDLNRNFPDQFVQITDPTQPETIAVMSWMKSYPFVLSANLHGGSLVVNYPF

SEQ ID NO: 389 - protein, 85 aa, Homo sapiens
DDDEQGLATYSKSPDDAVFQQIALSYSKENSQMFQGRPCKNMYPNEYFPHGITNGASWYNVPGGMQDWNYLQTNCFEVTIELGCV

SEQ ID NO: 390 - protein, 85 aa, Homo sapiens
KYPLEKELPNFWEQNRRSLIQFMKQVHQGVRGFVLDATDGRGILNATISVAEINHPVTTYKTGDYWRLLVPGTYKITASARGYNP

SEQ ID NO: 391 - protein, 85 aa, Homo sapiens
VTKNVTVKSEGAIQVNFTLVRSSTDSNNESKKGKGASSSTNDASDPTTKEFETLIKDLSAENGLESLMLRSSSNLALALYRYHSY

SEQ ID NO: 392 - protein, 85 aa, Homo sapiens
KDLSEFLRGLVMNYPHITNLTNLGQSTEYRHIWSLEISNKPNVSEPEEPKIRFVAGIHGNAPVGTELLLALAEFLCLNYKKNPAV

SEQ ID NO: 393 - protein, 85 aa, Homo sapiens
TQLVDRTRIVIVPSLNPDGRERAQEKDCTSKIGQTNARGKDLDTDFTNNASQPETKAIIENLIQKQDFSLSVALDGGSMLVTYPY

SEQ ID NO: 394 - protein, 85 aa, Homo sapiens
DKPVQTVENKETLKHLASLYANNHPSMHMGQPSCPNKSDENIPGGVMRGAEWHSHLGSMKDYSVTYGHCPEITVYTSCCYFPSAA

SEQ ID NO: 395 - protein, 85 aa, Homo sapiens
RLPSLWADNKRSLLSMLVEVHKGVHGFVKDKTGKPISKAVIVLNEGIKVQTKEGGYFHVLLAPGVHNIIAIADGYQQQHSQVFVH

SEQ ID NO: 396 - protein, 85 aa, Homo sapiens
HDAASSVVIVFDTDNRIFGLPRELVVTVSGATMSALILTACIIWCICSIKSNRHKDGFHRLRQHHDEYEDEIRMMSTGSKKSLLS

SEQ ID NO: 397 - protein, 84 aa, Homo sapiens
PRELVVTVSGATMSALILTACIIWCICSIKSNRHKDGFHRLRQHHDEYEDEIRMMSTGSKKSLLSHEFQDETDTEEETLYSSKH

SEQ ID NO: 398 - protein, 85 aa, Homo sapiens
TSAGAEAAEGQFDRYYHEEELESALREAAAAGLPGLARLFSIGRSVEGRPLWVLRLTAGLGSLIPEGDAGPDAAGPDAAGPLLPG

SEQ ID NO: 399 - protein, 85 aa, Homo sapiens
RPQVKLVGNMHGDETVSRQVLIYLARELAAGYRRGDPRLVRLLNTTDVYLLPSLNPDGFERAREGDCGFGDGGPSGASGRDNSRG

SEQ ID NO: 400 - protein, 85 aa, Homo sapiens
RDLNRSFPDQFSTGEPPALDEVPEVRALIEWIRRNKFVLSGNLHGGSVVASYPFDDSPEHKATGIYSKTSDDEVFKYLAKAYASN

SEQ ID NO: 401 - protein, 85 aa, Homo sapiens
HPIMKTGEPHCPGDEDETFKDGITNGAHWYDVEGGMQDYNYVWANCFEITLELSCCKYPPASQLRQEWENNRESLITLIEKVHIG

SEQ ID NO: 402 - protein, 85 aa, Homo sapiens
VKGFVKDSITGSGLENATISVAGINHNITTGRFGDFYRLLVPGTYNLTVVLTGYMPLTVTNVVVKEGPATEVDFSLRPTVTSVIP

SEQ ID NO: 403 - protein, 85 aa, Homo sapiens
DTTEAVSTASTVAIPNILSGTSSSYQPIQPKDFHHHHFPDMEIFLRRFANEYPNITRLYSLGKSVESRELYVMEISDNPGVHEPG

SEQ ID NO: 404 - protein, 85 aa, Homo sapiens
EPEFKYIGNMHGNEVVGRELLLNLIEYLCKNFGTDPEVTDLVHNTRIHLMPSMNPDGYEKSQEGDSISVIGRNNSNNFDLNRNFP

SEQ ID NO: 405 - protein, 85 aa, Homo sapiens
DQFVQITDPTQPETIAVMSWMKSYPFVLSANLHGGSLVVNYPFDDDEQGLATYSKSPDDAVFQQIALSYSKENSQMFQGRPCKNM

SEQ ID NO: 406 - protein, 85 aa, Homo sapiens
YPNEYFPHGITNGASWYNVPGGMQDWNYLQTNCFEVTIELGCVKYPLEKELPNFWEQNRRSLIQFMKQVHQGVRGFVLDATDGRG

SEQ ID NO: 407 - protein, 85 aa, Homo sapiens
ILNATISVAEINHPVTTYKTGDYWRLLVPGTYKITASARGYNPVTKNVTVKSEGAIQVNFTLVRSSTDSNNESKKGKGASSSTND

SEQ ID NO: 408 - protein, 85 aa, Homo sapiens
ASDPTTKEFETLIKDLSAENGLESLMLRSSSNLALALYRYHSYKDLSEFLRGLVMNYPHITNLTNLGQSTEYRHIWSLEISNKPN

SEQ ID NO: 409 - protein, 85 aa, Homo sapiens
VSEPEEPKIRFVAGIHGNAPVGTELLLALAEFLCLNYKKNPAVTQLVDRTRIVIVPSLNPDGRERAQEKDCTSKIGQTNARGKDL

SEQ ID NO: 410 - protein, 85 aa, Homo sapiens
DTDFTNNASQPETKAIIENLIQKQDFSLSVALDGGSMLVTYPYDKPVQTVENKETLKHLASLYANNHPSMHMGQPSCPNKSDENI

SEQ ID NO: 411 - protein, 85 aa, Homo sapiens
PGGVMRGAEWHSHLGSMKDYSVTYGHCPEITVYTSCCYFPSAARLPSLWADNKRSLLSMLVEVHKGVHGFVKDKTGKPISKAVIV

SEQ ID NO: 412 - protein, 85 aa, Homo sapiens
LNEGIKVQTKEGGYFHVLLAPGVHNIIAIADGYQQQHSQVFVHHDAASSVVIVFDTDNRIFGLPRELVVTVSGATMSALILTACI

SEQ ID NO: 413 - protein, 85 aa, Homo sapiens
NLVGSYAHHHHHHHPHPAHPMLHEPFLFGPASRCHQERPYFQSWLLSPADAAPDFPAGGPPPAAAAAATAYGPDARPGQSPGRLE

SEQ ID NO: 414 - protein, 85 aa, Homo sapiens
ALGGRLGRRKGSGPKKERRRTESINSAFAELRECIPNVPADTKLSKIKTLRLATSYIAYLMDVLAKDAQSGDPEAFKAELKKADG

SEQ ID NO: 415 - protein, 84 aa, Homo sapiens
KIKTLRLATSYIAYLMDVLAKDAQSGDPEAFKAELKKADGGRESKRKRELQQHEGFPPALGPVEKRIKGRTGWPQQVWALELNQ

SEQ ID NO: 416 - protein, 85 aa, Homo sapiens
SWLLSPADAAPDFPAGGPPPAAAAAATAYGPDARPGQSPGRLEALGGRLGRRKGSGPKKERRRTESINSAFAELRECIPNVPADT

SEQ ID NO: 417 - protein, 85 aa, Homo sapiens
KLSKIKTLRLATSYIAYLMDVLAKDAQSGDPEAFKAELKKADGGRESKRKRELQQHEGFPPALGPVEKRIKGRTGWPQQVWALEL

SEQ ID NO: 418 - protein, 85 aa, Homo sapiens
ASPSLERPEKGAGKSEFRNQKPKPENQDESELLTVPDGWKEPAFSKEDNPRGLLEESSFATLFPKYREAYLKECWPLVQKALNEH

SEQ ID NO: 419 - protein, 85 aa, Homo sapiens
HVNATLDLIEGSMTVCTTKKTFDPYIIIRARDLIKLLARSVSFEQAVRILQDDVACDIIKIGSLVRNKERFVKRRQRLIGPKGST

SEQ ID NO: 420 - protein, 85 aa, Homo sapiens
MKALELLTNCYIMVQGNTVSAIGPFSGLKEVRKVVLDTMKNIHPIYNIKSLMIKRELAKDSELRSQSWERFLPQFKHKNVNKRKE

SEQ ID NO: 421 - protein, 85 aa, Homo sapiens
PKKKTVKKEYTPFPPPQPESQIDKELASGEYFLKANQKKRQKMEAIKAKQAEAISKRQEERNKAFIPPKEKPIVKPKEASTETKI

SEQ ID NO: 422 - protein, 84 aa, Homo sapiens
KMEAIKAKQAEAISKRQEERNKAFIPPKEKPIVKPKEASTETKIDVASIKEKVKKAKNKKLGALTAEEIALKMEADEKKKKKKK

SEQ ID NO: 423 - protein, 85 aa, Homo sapiens
AFSKEDNPRGLLEESSFATLFPKYREAYLKECWPLVQKALNEHHVNATLDLIEGSMTVCTTKKTFDPYIIIRARDLIKLLARSVS

SEQ ID NO: 424 - protein, 85 aa, Homo sapiens
FEQAVRILQDDVACDIIKIGSLVRNKERFVKRRQRLIGPKGSTLKALELLTNCYIMVQGNTVSAIGPFSGLKEVRKVVLDTMKNI

SEQ ID NO: 425 - protein, 85 aa, Homo sapiens
HPIYNIKSLMIKRELAKDSELRSQSWERFLPQFKHKNVNKRKEPKKKTVKKEYTPFPPPQPESQIDKELASGEYFLKANQKKRQK

SEQ ID NO: 426 - protein, 85 aa, Homo sapiens
AAAALRDPAQVPVAADLLTDHEEGYVTFEDVAVYFSQEEWRLLDDAQRLLYRNVMLENFTLLASLGLASSKTHEITQLESWEEPF

SEQ ID NO: 427 - protein, 85 aa, Homo sapiens
MPAWEVVTSAIPRGCWHGAEAEEAPEQIASVGLLSSNIQQHQKQHCGEKPLKRQEGRVPVLRSCKVHLSEKSLQSREVGKALLIS

SEQ ID NO: 428 - protein, 85 aa, Homo sapiens
SGVLKHQVTHTGEKSHRSSKSREAFHAGKRHYKCSECGKAFGQKYLLVQHQRLHAGKKTYECSECGKLFRDMSNLFIHQIVHTGE

SEQ ID NO: 429 - protein, 85 aa, Homo sapiens
RPYGCSNCGKSFSRNAHLIEHQRVHTGEKPFTCSECGKAFRHNSTLVQHHKIHTGVRPYECSECGKLFSFNSSLMKHQRIHTGER

SEQ ID NO: 430 - protein, 85 aa, Homo sapiens
PYKCSECGKFYSHKSNLIKHWRVHTGERPYKCSDCGKFFTQCSSLMQHQKVHTGEKPFKCNECGRFFRENSTLVRHQRVHTGAKP

SEQ ID NO: 431 - protein, 84 aa, Homo sapiens
YECRECGKFFSQSSTLMQHRKVHIGEKPFKCNECGRLFRENSSLVKHQRVHTGAKPYECRECGKFFRHNSSLFKHRRIHTGEMQ

SEQ ID NO: 432 - protein, 85 aa, Homo sapiens
LDDAQRLLYRNVMLENFTLLASLGLASSKTHEITQLESWEEPFMPAWEVVTSAIPRGCWHGAEAEEAPEQIASVGLLSSNIQQHQ

SEQ ID NO: 433 - protein, 85 aa, Homo sapiens
KQHCGEKPLKRQEGRVPVLRSCKVHLSEKSLQSREVGKALLISSGVLKHQVTHTGEKSHRSSKSREAFHAGKRHYKCSECGKAFG

SEQ ID NO: 434 - protein, 85 aa, Homo sapiens
QKYLLVQHQRLHAGKKTYECSECGKLFRDMSNLFIHQIVHTGERPYGCSNCGKSFSRNAHLIEHQRVHTGEKPFTCSECGKAFRH

SEQ ID NO: 435 - protein, 85 aa, Homo sapiens
NSTLVQHHKIHTGVRPYECSECGKLFSFNSSLMKHQRIHTGERPYKCSECGKFYSHKSNLIKHWRVHTGERPYKCSDCGKFFTQC

SEQ ID NO: 436 - protein, 85 aa, Homo sapiens
SSLMQHQKVHTGEKPFKCNECGRFFRENSTLVRHQRVHTGAKPYECRECGKFFSQSSTLMQHRKVHIGEKPFKCNECGRLFRENS

SEQ ID NO: 437 - protein, 85 aa, Homo sapiens
APVKKLVVKGGKKKKQVLKFTLDCTHPVEDGIMDAANFEQFLQERIKVNGKAGNLGGGVVTIERSKSKITVTSEVPFSKRYLKYL

SEQ ID NO: 438 - protein, 84 aa, Homo sapiens
ERIKVNGKAGNLGGGVVTIERSKSKITVTSEVPFSKRYLKYLTKKYLKKNNLRDWLRVVANSKESYELRYFQINQDEEEEEDED

SEQ ID NO: 439 - protein, 85 aa, Homo sapiens
QERIKVNGKAGNLGGGVVTIERSKSKITVTSEVPFSKRYLKYLTKKYLKKNNLRDWLRVVANSKESYELRYFQINQDEEEEEDED

SEQ ID NO: 440 - protein, 85 aa, Homo sapiens
GRARRFQWPLLLLWAAAAGPGAGQEVQTENVTVAEGGVAEITCRLHQYDGSIVVIQNPARQTLFFNGTRALKDERFQLEEFSPRR

SEQ ID NO: 441 - protein, 85 aa, Homo sapiens
VRIRLSDARLEDEGGYFCQLYTEDTHHQIATLTVLVAPENPVVEVREQAVEGGEVELSCLVPRSRPAATLRWYRDRKELKGVSSS

SEQ ID NO: 442 - protein, 85 aa, Homo sapiens
QENGKVWSVASTVRFRVDRKDDGGIIICEAQNQALPSGHSKQTQYVLDVQYSPTARIHASQAVVREGDTLVLTCAVTGNPRPNQI

SEQ ID NO: 443 - protein, 85 aa, Homo sapiens
RWNRGNESLPERAEAVGETLTLPGLVSADNGTYTCEASNKHGHARALYVLVVYDPGAVVEAQTSVPYAIVGGILALLVFLIICVL

SEQ ID NO: 444 - protein, 84 aa, Homo sapiens
VLVVYDPGAVVEAQTSVPYAIVGGILALLVFLIICVLVGMVWCSVRQKGSYLTHEASGLDEQGEAREAFLNGSDGHKRKEEFFI

SEQ ID NO: 445 - protein, 85 aa, Homo sapiens
CRLHQYDGSIVVIQNPARQTLFFNGTRALKDERFQLEEFSPRRVRIRLSDARLEDEGGYFCQLYTEDTHHQIATLTVLVAPENPV

SEQ ID NO: 446 - protein, 85 aa, Homo sapiens
VEVREQAVEGGEVELSCLVPRSRPAATLRWYRDRKELKGVSSSQENGKVWSVASTVRFRVDRKDDGGIIICEAQNQALPSGHSKQ

SEQ ID NO: 447 - protein, 85 aa, Homo sapiens
TQYVLDVQYSPTARIHASQAVVREGDTLVLTCAVTGNPRPNQIRWNRGNESLPERAEAVGETLTLPGLVSADNGTYTCEASNKHG

SEQ ID NO: 448 - protein, 85 aa, Homo sapiens
HARALYVLVVYDPGAVVEAQTSVPYAIVGGILALLVFLIICVLVGMVWCSVRQKGSYLTHEASGLDEQGEAREAFLNGSDGHKRK

SEQ ID NO: 449 - protein, 85 aa, Homo sapiens
SGWADERGGEGDGRIYVGNLPTDVREKDLEDLFYKYGRIREIELKNRHGLVPFAFVRFEDPRDAEDAIYGRNGYDYGQCRLRVEF

SEQ ID NO: 450 - protein, 85 aa, Homo sapiens
PRTYGGRGGWPRGGRNGPPTRRSDFRVLVSGLPPSGSWQDLKDHMREAGDVCYADVQKDGVGMVEYLRKEDMEYALRKLDDTKFR

SEQ ID NO: 451 - protein, 84 aa, Homo sapiens
CYADVQKDGVGMVEYLRKEDMEYALRKLDDTKFRSHEGETSYIRVYPERSTSYGYSRSRSGSRGRDSPYQSRGSPHYFSPFRPY

SEQ ID NO: 452 - protein, 85 aa, Homo sapiens
ELKNRHGLVPFAFVRFEDPRDAEDAIYGRNGYDYGQCRLRVEFPRTYGGRGGWPRGGRNGPPTRRSDFRVLVSGLPPSGSWQDLK

SEQ ID NO: 453 - protein, 85 aa, Homo sapiens
DHMREAGDVCYADVQKDGVGMVEYLRKEDMEYALRKLDDTKFRSHEGETSYIRVYPERSTSYGYSRSRSGSRGRDSPYQSRGSPH

SEQ ID NO: 454 - protein, 85 aa, Homo sapiens
GLYAAAAGVLAGVESRQGSIKGLVYSSNFQNVKQLYALVCETQRYSAVLDAVIASAGLLRAEKKLRPHLAKVLVYELLLGKGFRG

SEQ ID NO: 455 - protein, 85 aa, Homo sapiens
GGGRWKALLGRHQARLKAELARLKVHRGVSRNEDLLEVGSRPGPASQLPRFVRVNTLKTCSDDVVDYFKRQGFSYQGRASSLDDL

SEQ ID NO: 456 - protein, 85 aa, Homo sapiens
RALKGKHFLLDPLMPELLVFPAQTDLHEHPLYRAGHLILQDRASCLPAMLLDPPPGSHVIDACAAPGNKTSHLAALLKNQGKIFA

SEQ ID NO: 457 - protein, 85 aa, Homo sapiens
FDLDAKRLASMATLLARAGVSCCELAEEDFLAVSPSDPRYHEVHYILLDPSCSGSGMPSRQLEEPGAGTPSPVRLHALAGFQQRA

SEQ ID NO: 458 - protein, 85 aa, Homo sapiens
MCHALTFPSLQRLVYSTCSLCQEENEDVVRDALQQNPGAFRLAPALPAWPHRGLSTFPGAEHCLRASPETTLSSGFFVAVIERVE

SEQ ID NO: 459 - protein, 84 aa, Homo sapiens
LTFPSLQRLVYSTCSLCQEENEDVVRDALQQNPGAFRLAPALPAWPHRGLSTFPGAEHCLRASPETTLSSGFFVAVIERVEVPR

SEQ ID NO: 460 - protein, 85 aa, Homo sapiens
QRYSAVLDAVIASAGLLRAEKKLRPHLAKVLVYELLLGKGFRGGGGRWKALLGRHQARLKAELARLKVHRGVSRNEDLLEVGSRP

SEQ ID NO: 461 - protein, 85 aa, Homo sapiens
GPASQLPRFVRVNTLKTCSDDVVDYFKRQGFSYQGRASSLDDLRALKGKHFLLDPLMPELLVFPAQTDLHEHPLYRAGHLILQDR

SEQ ID NO: 462 - protein, 85 aa, Homo sapiens
ASCLPAMLLDPPPGSHVIDACAAPGNKTSHLAALLKNQGKIFAFDLDAKRLASMATLLARAGVSCCELAEEDFLAVSPSDPRYHE

SEQ ID NO: 463 - protein, 85 aa, Homo sapiens
VHYILLDPSCSGSGMPSRQLEEPGAGTPSPVRLHALAGFQQRALCHALTFPSLQRLVYSTCSLCQEENEDVVRDALQQNPGAFRL

SEQ ID NO: 464 - protein, 85 aa, Homo sapiens
AAERKTRLSKNLLRMKFMQRGLDSETKKQLEEEEKKIISEEHWYLDLPELKEKESFIIEEQSFLLCEDLLYGRMSFRGFNPEVEK

SEQ ID NO: 465 - protein, 84 aa, Homo sapiens
FRGFNPEVEKLMLQMNAKHKAEEVEDETVELDVSDEEMARRYETLVGTIGKKFARKRDHANYEEDENGDITPIKAKKMFLKPQD

SEQ ID NO: 466 - protein, 85 aa, Homo sapiens
WYLDLPELKEKESFIIEEQSFLLCEDLLYGRMSFRGFNPEVEKLMLQMNAKHKAEEVEDETVELDVSDEEMARRYETLVGTIGKK

SEQ ID NO: 467 - protein, 85 aa, Homo sapiens
SRSGAAAEKADSRQRPQMKVNEYKENQNIAYVSLRPAQTTVLIKTAKVYLAPFSLSNYQLDQLMCPKSLSEKNSNNEVACKKTKI

SEQ ID NO: 468 - protein, 85 aa, Homo sapiens
KKTCRRIIPPKMKNTSSKAESTLQNSSSAVHTESNKLQPKRTADAMNLSVDVESSQDGDSDEDTTPSLDFSGLSPYERKRLKNIS

SEQ ID NO: 469 - protein, 85 aa, Homo sapiens
ENADFFASLQLSESAARLREMIEKRQPPKSKRKKPKRENGIGCRRSMRLLKVDPSGVSLPAAPTPPTLVADETPLLPPGPLEMTS

SEQ ID NO: 470 - protein, 85 aa, Homo sapiens
ENQEDNNERFKGFLHTWAGMSKPSSKNTEKGLSSIKSYKANLNGMVISEDTVYKVTTGPIFSMALHPSETRTLVAVGAKFGQVGL

SEQ ID NO: 471 - protein, 85 aa, Homo sapiens
CDLTQQPKEDGVYVFHPHSQPVSCLYFSPANPAHILSLSYDGTLRCGDFSRAIFEEVYRNERSSFSSFDFLAEDASTLIVGHWDG

SEQ ID NO: 472 - protein, 85 aa, Homo sapiens
NMSLVDRRTPGTSYEKLTSSSMGKIRTVHVHPVHRQYFITAGLRDTHIYDARRLNSRRSQPLISLTEHTKSIASAYFSPLTGNRV

SEQ ID NO: 473 - protein, 85 aa, Homo sapiens
VTTCADCNLRIFDSSCISSKIPLLTTIRHNTFTGRWLTRFQAMWDPKQEDCVIVGSMAHPRRVEIFHETGKRVHSFGGEYLVSVC

SEQ ID NO: 474 - protein, 84 aa, Homo sapiens
FTGRWLTRFQAMWDPKQEDCVIVGSMAHPRRVEIFHETGKRVHSFGGEYLVSVCSINAMHPTRYILAGGNSSGKIHVFMNEKSC

SEQ ID NO: 475 - protein, 85 aa, Homo sapiens
IKTAKVYLAPFSLSNYQLDQLMCPKSLSEKNSNNEVACKKTKIKKTCRRIIPPKMKNTSSKAESTLQNSSSAVHTESNKLQPKRT

SEQ ID NO: 476 - protein, 85 aa, Homo sapiens
ADAMNLSVDVESSQDGDSDEDTTPSLDFSGLSPYERKRLKNISENADFFASLQLSESAARLREMIEKRQPPKSKRKKPKRENGIG

SEQ ID NO: 477 - protein, 85 aa, Homo sapiens
CRRSMRLLKVDPSGVSLPAAPTPPTLVADETPLLPPGPLEMTSENQEDNNERFKGFLHTWAGMSKPSSKNTEKGLSSIKSYKANL

SEQ ID NO: 478 - protein, 85 aa, Homo sapiens
NGMVISEDTVYKVTTGPIFSMALHPSETRTLVAVGAKFGQVGLCDLTQQPKEDGVYVFHPHSQPVSCLYFSPANPAHILSLSYDG

SEQ ID NO: 479 - protein, 85 aa, Homo sapiens
TLRCGDFSRAIFEEVYRNERSSFSSFDFLAEDASTLIVGHWDGNMSLVDRRTPGTSYEKLTSSSMGKIRTVHVHPVHRQYFITAG

SEQ ID NO: 480 - protein, 85 aa, Homo sapiens
MRDTHIYDARRLNSRRSQPLISLTEHTKSIASAYFSPLTGNRVVTTCADCNLRIFDSSCISSKIPLLTTIRHNTFTGRWLTRFQA

SEQ ID NO: 481 - protein, 85 aa, Homo sapiens
MMMALSKTFGQKPVKFQLEDDGEFYMIGSEVGNYLRMFRGSLYKRYPSLWRRLATVEERKKIVASSHGKKTKPNTKDHGYTTLAT

SEQ ID NO: 482 - protein, 85 aa, Homo sapiens
SVTLLKASEVEEILDGNDEKYKAVSISTEPPTYLSFDDHDPAVIHENASQPEVLVPIRLDMEIDGQKLRDAFTWNMNEKLMTPEM

SEQ ID NO: 483 - protein, 85 aa, Homo sapiens
FSEILCDDLDLNPLTFVPAIASAIRQQIESYPTDSILEDQSDQRVIIKLNIHVGNISLVDQFEWDMSEKENSPEKFALKLCSELG

SEQ ID NO: 484 - protein, 84 aa, Homo sapiens
GLGGEFVTTIAYSIRGQLSWHQKTYAFSENPLPTVEIAIRNTGDADQWCPLLETLTDAEMEKKIRDQDRNTRRMRRLANTAPAW

SEQ ID NO: 485 - protein, 85 aa, Homo sapiens
YKRYPSLWRRLATVEERKKIVASSHGKKTKPNTKDHGYTTLATSVTLLKASEVEEILDGNDEKYKAVSISTEPPTYLSFDDHDPA

SEQ ID NO: 486 - protein, 85 aa, Homo sapiens
VIHENASQPEVLVPIRLDMEIDGQKLRDAFTWNMNEKLMTPEMFSEILCDDLDLNPLTFVPAIASAIRQQIESYPTDSILEDQSD

SEQ ID NO: 487 - protein, 85 aa, Homo sapiens
QRVIIKLNIHVGNISLVDQFEWDMSEKENSPEKFALKLCSELGLGGEFVTTIAYSIRGQLSWHQKTYAFSENPLPTVEIAIRNTG

SEQ ID NO: 488 - protein, 85 aa, Homo sapiens
AHITINQYLQQVYEAIDSRDGASCAELVSFKHPHVANPRLQMASPEEKCQQVLEPPYDEMFAAHLRCTYAVGNHDFIEAYKCQTV

SEQ ID NO: 489 - protein, 85 aa, Homo sapiens
IVQYPLSFMAAVPHRTHAVDYLGLETRKHWASCSFLQLERNDSVLEQKLVSALSLGTSFLRAFQAHKEENWALPVMYAVALDLRV

SEQ ID NO: 490 - protein, 85 aa, Homo sapiens
FANNADQQLVKKGKSKVGDMLEKAAELLMSCFRVCASDTRAGIEDSKKWGMLFLVNQLFKIYFKINKLHLCKPLIRAIDSSNLKD

SEQ ID NO: 491 - protein, 85 aa, Homo sapiens
DYSTAQRVTYKYYVGRKAMFDSDFKQAEEYLSFAFEHCHRSSQKNKRMILIYLLPVKMLLGHMPTVELLKKYHLMQFAEVTRAVS

SEQ ID NO: 492 - protein, 85 aa, Homo sapiens
EGNLLLLHEALAKHEAFFIRCGIFLILEKLKIITYRNLFKKVYLLLKTHQLSLDAFLVALKFMQVEDVDIDEVQCILANLIYMGH

SEQ ID NO: 493 - protein, 84 aa, Homo sapiens
KLKIITYRNLFKKVYLLLKTHQLSLDAFLVALKFMQVEDVDIDEVQCILANLIYMGHVKGYISHQHQKLVVSKQNPFPPLSTVC

SEQ ID NO: 494 - protein, 85 aa, Homo sapiens
ASPEEKCQQVLEPPYDEMFAAHLRCTYAVGNHDFIEAYKCQTVIVQYPLSFMAAVPHRTHAVDYLGLETRKHWASCSFLQLERND

SEQ ID NO: 495 - protein, 85 aa, Homo sapiens
SVLEQKLVSALSLGTSFLRAFQAHKEENWALPVMYAVALDLRVFANNADQQLVKKGKSKVGDMLEKAAELLMSCFRVCASDTRAG

SEQ ID NO: 496 - protein, 85 aa, Homo sapiens
IEDSKKWGMLFLVNQLFKIYFKINKLHLCKPLIRAIDSSNLKDDYSTAQRVTYKYYVGRKAMFDSDFKQAEEYLSFAFEHCHRSS

SEQ ID NO: 497 - protein, 85 aa, Homo sapiens
QKNKRMILIYLLPVKMLLGHMPTVELLKKYHLMQFAEVTRAVSEGNLLLLHEALAKHEAFFIRCGIFLILEKLKIITYRNLFKKV

SEQ ID NO: 498 - protein, 85 aa, Homo sapiens
AGHTQQPSGRGNPRPAPSPSPVPGTVPGASERVALKKEIGLLSACTIIIGNIIGSGIFISPKGVLEHSGSVGLALFVWVLGGGVT

SEQ ID NO: 499 - protein, 85 aa, Homo sapiens
ALGSLCYAELGVAIPKSGGDYAYVTEIFGGLAGFLLLWSAVLIMYPTSLAVISMTFSNYVLQPVFPNCIPPTTASRVLSMACLML

SEQ ID NO: 500 - protein, 85 aa, Homo sapiens
MTWVNSSSVRWATRIQDMFTGGKLLALSLIIGVGLLQIFQGHFEELRPSNAFAFWMTPSVGHLALAFLQGSFAFSGWNFLNYVTE

SEQ ID NO: 501 - protein, 85 aa, Homo sapiens
EMVDARKNLPRAIFISIPLVTFVYTFTNIAYFTAMSPQELLSSNAVAVTFGEKLLGYFSWVMPVSVALSTFGGINGYLFTYSRLC

SEQ ID NO: 502 - protein, 85 aa, Homo sapiens
FSGAREGHLPSLLAMIHVRHCTPIPALLVCCGATAVIMLVGDTYTLINYVSFINYLCYGVTILGLLLLRWRRPALHRPIKVNLLI

SEQ ID NO: 503 - protein, 85 aa, Homo sapiens
PVAYLVFWAFLLVFSFISEPMVCGVGVIIILTGVPIFFLGVFWRSKPKCVHRLTESMTHWGQELCFVVYPQDAPEEEENGPCPPS

SEQ ID NO: 504 - protein, 84 aa, Homo sapiens
FSFISEPMVCGVGVIIILTGVPIFFLGVFWRSKPKCVHRLTESMTHWGQELCFVVYPQDAPEEEENGPCPPSLLPATDKPSKPQ

SEQ ID NO: 505 - protein, 85 aa, Homo sapiens
SACTIIIGNIIGSGIFISPKGVLEHSGSVGLALFVWVLGGGVTALGSLCYAELGVAIPKSGGDYAYVTEIFGGLAGFLLLWSAVL

SEQ ID NO: 506 - protein, 85 aa, Homo sapiens
IMYPTSLAVISMTFSNYVLQPVFPNCIPPTTASRVLSMACLMLLTWVNSSSVRWATRIQDMFTGGKLLALSLIIGVGLLQIFQGH

SEQ ID NO: 507 - protein, 85 aa, Homo sapiens
FEELRPSNAFAFWMTPSVGHLALAFLQGSFAFSGWNFLNYVTEEMVDARKNLPRAIFISIPLVTFVYTFTNIAYFTAMSPQELLS

SEQ ID NO: 508 - protein, 85 aa, Homo sapiens
SNAVAVTFGEKLLGYFSWVMPVSVALSTFGGINGYLFTYSRLCFSGAREGHLPSLLAMIHVRHCTPIPALLVCCGATAVIMLVGD

SEQ ID NO: 509 - protein, 85 aa, Homo sapiens
TYTLINYVSFINYLCYGVTILGLLLLRWRRPALHRPIKVNLLIPVAYLVFWAFLLVFSFISEPMVCGVGVIIILTGVPIFFLGVF

SEQ ID NO: 510 - protein, 85 aa, Homo sapiens
VGCGVAVLCLWVSCGAAAGQLEYSVPEETERGVAVGNLSADLRLPAAAMSSRNFRFLSSHRELYFGVDLPSGNLVVREPADREQL

SEQ ID NO: 511 - protein, 85 aa, Homo sapiens
CRAKAACVLTYDLVLEDPLELHKIRIHVLDTNDNSPLFPAGDVQLHIPEFLTPGARFTLPNAQDDDEGSNGILSYSLSPSQHFRL

SEQ ID NO: 512 - protein, 85 aa, Homo sapiens
DMGSRVDGSEYPELVLEKALDREQRATHLLVLTARDGGLPARSGDAQVTIIVVDTNDNAPVFERSVYRTKVPETAPNGTVLFRVQ

SEQ ID NO: 513 - protein, 85 aa, Homo sapiens
ALDPDEGSNGEVQYSLSNSTQAELRHRFHVHPKSGEVQVAASLGPPETLLEAYIEARDEGVFGLASTAKLLVEVTDVNDHAPELD

SEQ ID NO: 514 - protein, 85 aa, Homo sapiens
FLTLSNPVPEDAAPGTVIALFSVKDEDLDSNGRVICGMSSAGPFQLTASFDNYYSLLIDGPLDREQISEYQVLITASDSGSPPLS

SEQ ID NO: 515 - protein, 85 aa, Homo sapiens
TRRTITVSVADVNDNTPNFPQPQQELFVAENNGPGASLGRVFAQDPDLGKNGLVSYELLDVISEGPSASSLLAVESSSGAITAKT

SEQ ID NO: 516 - protein, 85 aa, Homo sapiens
SFDFEQLRGFHFQVEGRDGGIPPRSATVTINLFVVDRNDNYPVILFPLPRNGSVPVEIVPRSARTGHLVTKVVAEDADSGSNAWL

SEQ ID NO: 517 - protein, 85 aa, Homo sapiens
SYHISRASDSSLFRISANIGELRTARLVLPTDAVKQRVVVVVRDHGDPPLSSSVTLGVLLSNSVPQLLPDFEDVWEPGGQLSAQN

SEQ ID NO: 518 - protein, 85 aa, Homo sapiens
MYLVIALACISFLFLGCLLFFVCTKLHQSPGCCAQSCCRSTEDLRYGSKMVSNPCMTSATIDVTTVERLSQTYLYRASLGLGSDN

SEQ ID NO: 519 - protein, 85 aa, Homo sapiens
NSLLLRGEYNAADLRNLATGVGLNLPISCIQIRNRKGDHANVNAMPRQPNPDWRYSASLRAGMHSSVHLEEAGILRAGPGGPDQQ

SEQ ID NO: 520 - protein, 85 aa, Homo sapiens
WPTVSSATPEPEAGEVSPPVGAGVNSNSWTFKYGPGNPKQSGPGELPDKFIIPGSPAIISIRQEPTNSQIDKSDFITFGKKEETK

SEQ ID NO: 521 - protein, 84 aa, Homo sapiens
WTFKYGPGNPKQSGPGELPDKFIIPGSPAIISIRQEPTNSQIDKSDFITFGKKEETKKKKKKKKGNKTQEKKEKGNSTTDNSDQ

SEQ ID NO: 522 - protein, 85 aa, Homo sapiens
RLPAAAMSSRNFRFLSSHRELYFGVDLPSGNLVVREPADREQLCRAKAACVLTYDLVLEDPLELHKIRIHVLDTNDNSPLFPAGD

SEQ ID NO: 523 - protein, 85 aa, Homo sapiens
VQLHIPEFLTPGARFTLPNAQDDDEGSNGILSYSLSPSQHFRLDMGSRVDGSEYPELVLEKALDREQRATHLLVLTARDGGLPAR

SEQ ID NO: 524 - protein, 85 aa, Homo sapiens
SGDAQVTIIVVDTNDNAPVFERSVYRTKVPETAPNGTVLFRVQALDPDEGSNGEVQYSLSNSTQAELRHRFHVHPKSGEVQVAAS

SEQ ID NO: 525 - protein, 85 aa, Homo sapiens
LGPPETLLEAYIEARDEGVFGLASTAKLLVEVTDVNDHAPELDFLTLSNPVPEDAAPGTVIALFSVKDEDLDSNGRVICGMSSAG

SEQ ID NO: 526 - protein, 85 aa, Homo sapiens
PFQLTASFDNYYSLLIDGPLDREQISEYQVLITASDSGSPPLSTRRTITVSVADVNDNTPNFPQPQQELFVAENNGPGASLGRVF

SEQ ID NO: 527 - protein, 85 aa, Homo sapiens
AQDPDLGKNGLVSYELLDVISEGPSASSLLAVESSSGAITAKTSFDFEQLRGFHFQVEGRDGGIPPRSATVTINLFVVDRNDNYP

SEQ ID NO: 528 - protein, 85 aa, Homo sapiens
VILFPLPRNGSVPVEIVPRSARTGHLVTKVVAEDADSGSNAWLSYHISRASDSSLFRISANIGELRTARLVLPTDAVKQRVVVVV

SEQ ID NO: 529 - protein, 85 aa, Homo sapiens
RDHGDPPLSSSVTLGVLLSNSVPQLLPDFEDVWEPGGQLSAQNLYLVIALACISFLFLGCLLFFVCTKLHQSPGCCAQSCCRSTE

SEQ ID NO: 530 - protein, 85 aa, Homo sapiens
DLRYGSKMVSNPCMTSATIDVTTVERLSQTYLYRASLGLGSDNNSLLLRGEYNAADLRNLATGVGLNLPISCIQIRNRKGDHANV

SEQ ID NO: 531 - protein, 85 aa, Homo sapiens
NAMPRQPNPDWRYSASLRAGMHSSVHLEEAGILRAGPGGPDQQWPTVSSATPEPEAGEVSPPVGAGVNSNSWTFKYGPGNPKQSG

SEQ ID NO: 532 - protein, 85 aa, Homo sapiens
EAYEQVQKGPLKLKGVAELGVTKRKKKKKDKDKAKLLEAMGTSKKNEEEKRRGLDKRTPAQAAFEKMQEKRQMERILKKASKTHK

SEQ ID NO: 533 - protein, 84 aa, Homo sapiens
KKDKDKAKLLEAMGTSKKNEEEKRRGLDKRTPAQAAFEKMQEKRQMERILKKASKTHKQRVEDFNRHLDTLTEHYDIPKVSWTK

SEQ ID NO: 534 - protein, 85 aa, Homo sapiens
ARALCRLPRRGLWLLLAHHLFMTTACQEANYGALLRELCLTQFQVDMEAVGETLWCDWGRTIRSYRELADCTWHMAEKLGCFWPN

SEQ ID NO: 535 - protein, 84 aa, Homo sapiens
SYRELADCTWHMAEKLGCFWPNAEVDRFFLAVHGRYFRSCPISGRAVRDPPGSILYPFIVVPITVTLLVTALVVWQSKRTEGIV

SEQ ID NO: 536 - protein, 85 aa, Homo sapiens
FQVDMEAVGETLWCDWGRTIRSYRELADCTWHMAEKLGCFWPNAEVDRFFLAVHGRYFRSCPISGRAVRDPPGSILYPFIVVPIT

SEQ ID NO: 537 - protein, 85 aa, Homo sapiens
PGANYRAGAGAGAGARRPRGARDREEDGGGLEPAAVARDLLRGTSNMSFEELLELQSQVGTKTYKQLVAGNSPKKQASRPPIQNA

SEQ ID NO: 538 - protein, 85 aa, Homo sapiens
CVADKHRPLEMSAKIRVPFLRQVVPISKKVARDPRFDDLSGEYNPEVFDKTYQFLNDIRAKEKELVKKQLKKHLSGEEHEKLQQL

SEQ ID NO: 539 - protein, 85 aa, Homo sapiens
LQRMEQQEMAQQERKQQQELHLALKQERRAQAQQGHRPYFLKKSEQRQLALAEKFKELKRSKKLENFLSRKRRRNAGKDRRHLPL

SEQ ID NO: 540 - protein, 84 aa, Homo sapiens
EQQEMAQQERKQQQELHLALKQERRAQAQQGHRPYFLKKSEQRQLALAEKFKELKRSKKLENFLSRKRRRNAGKDRRHLPLSKE

SEQ ID NO: 541 - protein, 85 aa, Homo sapiens
GTSNMSFEELLELQSQVGTKTYKQLVAGNSPKKQASRPPIQNACVADKHRPLEMSAKIRVPFLRQVVPISKKVARDPRFDDLSGE

SEQ ID NO: 542 - protein, 85 aa, Homo sapiens
YNPEVFDKTYQFLNDIRAKEKELVKKQLKKHLSGEEHEKLQQLLQRMEQQEMAQQERKQQQELHLALKQERRAQAQQGHRPYFLK

SEQ ID NO: 543 - protein, 85 aa, Homo sapiens
KDAAEELSFARVLLQRVDELEKLFKDREQFLELVSRKLSLVPGAEEVTMVTWEELEQAITDGWRASQAGSETLMGFSKHGGFTSL

SEQ ID NO: 544 - protein, 85 aa, Homo sapiens
TSPEGTLSGDSTKQPSIEQALDSASGLGPDRTASGSGGTAHPSDGVSSREQSKVPSGTGRQQQPRARDEAGVPRLHQSSTFQFKS

SEQ ID NO: 545 - protein, 85 aa, Homo sapiens
DSDRHRSREKLTSTQPRRNARPGPVQQDLPLARDQPSSVPASQSQVHLRPDRRGLEPTGMNQPGLVPASTYPHGVVPLSMGQLGV

SEQ ID NO: 546 - protein, 85 aa, Homo sapiens
PPPEMDDRELIPFVVDEQRMLPPSVPGRDQQGLELPSTDQHGLVSVSAYQHGMTFPGTDQRSMEPLGMDQRGCVISGMGQQGLVP

SEQ ID NO: 547 - protein, 85 aa, Homo sapiens
PGIDQQGLTLPVVDQHGLVLPFTDQHGLVSPGLMPISADQQGFVQPSLEATGFIQPGTEQHDLIQSGRFQRALVQRGAYQPGLVQ

SEQ ID NO: 548 - protein, 85 aa, Homo sapiens
PGADQRGLVRPGMDQSGLAQPGADQRGLVWPGMDQSGLAQPGRDQHGLIQPGTGQHDLVQSGTGQGVLVQPGVDQPGMVQPGRFQ

SEQ ID NO: 549 - protein, 85 aa, Homo sapiens
RALVQPGAYQPGLVQPGADQIDVVQPGADQHGLVQSGADQSDLAQPGAVQHGLVQPGVDQRGLAQPRADHQRGLVPPGADQRGLV

SEQ ID NO: 550 - protein, 85 aa, Homo sapiens
QPGADQHGLVQPGVDQHGLAQPGEVQRSLVQPGIVQRGLVQPGAVQRGLVQPGAVQRGLVQPGVDQRGLVQPGAVQRGLVQPGAV

SEQ ID NO: 551 - protein, 85 aa, Homo sapiens
QHGLVQPGADQRGLVQPGVDQRGLVQPGVDQRGLVQPGMDQRGLIQPGADQPGLVQPGAGQLGMVQPGIGQQGMVQPQADPHGLV

SEQ ID NO: 552 - protein, 85 aa, Homo sapiens
QPGAYPLGLVQPGAYLHDLSQSGTYPRGLVQPGMDQYGLRQPGAYQPGLIAPGTKLRGSSTFQADSTGFISVRPYQHGMVPPGRE

SEQ ID NO: 553 - protein, 85 aa, Homo sapiens
QYGQVSPLLASQGLASPGIDRRSLVPPETYQQGLMHPGTDQHSPIPLSTGLGSTHPDQQHVASPGPGEHDQVYPDAAQHGHAFSL

SEQ ID NO: 554 - protein, 85 aa, Homo sapiens
FDSHDSMYPGYRGPGYLSADQHGQEGLDPNRTRASDRHGIPAQKAPGQDVTLFRSPDSVDRVLSEGSEVSSEVLSERRNSLRRMS

SEQ ID NO: 555 - protein, 85 aa, Homo sapiens
SSFPTAVETFHLMGELSSLYVGLKESMKDLDEEQAGQTDLEKIQFLLAQMVKRTIPPELQEQLKTVKTLAKEVWQEKAKVERLQR

SEQ ID NO: 556 - protein, 85 aa, Homo sapiens
ILEGEGNQEAGKELKAGELRLQLGVLRVTVADIEKELAELRESQDRGKAAMENSVSEASLYLQDQLDKLRMIIESMLTSSSTLLS

SEQ ID NO: 557 - protein, 85 aa, Homo sapiens
MSMAPHKAHTLAPGQIDPEATCPACSLDVSHQVSTLVRRYEQLQDMVNSLAVSRPSKKAKLQRQDEELLGRVQSAILQVQGDCEK

SEQ ID NO: 558 - protein, 85 aa, Homo sapiens
LNITTSNLIEDHRQKQKDIAMLYQGLEKLEKEKANREHLEMEIDVKADKSALATKVSRVQFDATTEQLNHMMQELVAKMSGQEQD

SEQ ID NO: 559 - protein, 85 aa, Homo sapiens
WQKMLDRLLTEMDNKLDRLELDPVKQLLEDRWKSLRQQLRERPPLYQADEAAAMRRQLLAHFHCLSCDRPLETPVTGHAIPVTPA

SEQ ID NO: 560 - protein, 85 aa, Homo sapiens
GPGLPGHHSIRPYTVFELEQVRQHSRNLKLGSAFPRGDLAQMEQSVGRLRSMHSKMLMNIEKVQIHFGGSTKASSQIIRELLHAQ

SEQ ID NO: 561 - protein, 85 aa, Homo sapiens
CLGSPCYKRVTDMADYTYSTVPRRCGGSHTLTYPYHRSRPQHLPRGLYPTEEIQIAMKHDEVDILGLDGHIYKGRMDTRLPGILR

SEQ ID NO: 562 - protein, 84 aa, Homo sapiens
PTEEIQIAMKHDEVDILGLDGHIYKGRMDTRLPGILRKDSSGTSKRKSQQPRPHVHRPPSLSSNGQLPSRPQSAQISAGNTSER

SEQ ID NO: 563 - protein, 85 aa, Homo sapiens
GAEEVTMVTWEELEQAITDGWRASQAGSETLMGFSKHGGFTSLTSPEGTLSGDSTKQPSIEQALDSASGLGPDRTASGSGGTAHP

SEQ ID NO: 564 - protein, 85 aa, Homo sapiens
SDGVSSREQSKVPSGTGRQQQPRARDEAGVPRLHQSSTFQFKSDSDRHRSREKLTSTQPRRNARPGPVQQDLPLARDQPSSVPAS

SEQ ID NO: 565 - protein, 85 aa, Homo sapiens
QSQVHLRPDRRGLEPTGMNQPGLVPASTYPHGVVPLSMGQLGVPPPEMDDRELIPFVVDEQRMLPPSVPGRDQQGLELPSTDQHG

SEQ ID NO: 566 - protein, 85 aa, Homo sapiens
MVSVSAYQHGMTFPGTDQRSMEPLGMDQRGCVISGMGQQGLVPPGIDQQGLTLPVVDQHGLVLPFTDQHGLVSPGLMPISADQQG

SEQ ID NO: 567 - protein, 85 aa, Homo sapiens
FVQPSLEATGFIQPGTEQHDLIQSGRFQRALVQRGAYQPGLVQPGADQRGLVRPGMDQSGLAQPGADQRGLVWPGMDQSGLAQPG

SEQ ID NO: 568 - protein, 85 aa, Homo sapiens
RDQHGLIQPGTGQHDLVQSGTGQGVLVQPGVDQPGMVQPGRFQRALVQPGAYQPGLVQPGADQIDVVQPGADQHGLVQSGADQSD

SEQ ID NO: 569 - protein, 85 aa, Homo sapiens
MAQPGAVQHGLVQPGVDQRGLAQPRADHQRGLVPPGADQRGLVQPGADQHGLVQPGVDQHGLAQPGEVQRSLVQPGIVQRGLVQP

SEQ ID NO: 570 - protein, 85 aa, Homo sapiens
GAVQRGLVQPGAVQRGLVQPGVDQRGLVQPGAVQRGLVQPGAVQHGLVQPGADQRGLVQPGVDQRGLVQPGVDQRGLVQPGMDQR

SEQ ID NO: 571 - protein, 85 aa, Homo sapiens
GLIQPGADQPGLVQPGAGQLGMVQPGIGQQGMVQPQADPHGLVQPGAYPLGLVQPGAYLHDLSQSGTYPRGLVQPGMDQYGLRQP

SEQ ID NO: 572 - protein, 85 aa, Homo sapiens
GAYQPGLIAPGTKLRGSSTFQADSTGFISVRPYQHGMVPPGREQYGQVSPLLASQGLASPGIDRRSLVPPETYQQGLMHPGTDQH

SEQ ID NO: 573 - protein, 85 aa, Homo sapiens
SPIPLSTGLGSTHPDQQHVASPGPGEHDQVYPDAAQHGHAFSLFDSHDSMYPGYRGPGYLSADQHGQEGLDPNRTRASDRHGIPA

SEQ ID NO: 574 - protein, 85 aa, Homo sapiens
QKAPGQDVTLFRSPDSVDRVLSEGSEVSSEVLSERRNSLRRMSSSFPTAVETFHLMGELSSLYVGLKESMKDLDEEQAGQTDLEK

SEQ ID NO: 575 - protein, 85 aa, Homo sapiens
IQFLLAQMVKRTIPPELQEQLKTVKTLAKEVWQEKAKVERLQRILEGEGNQEAGKELKAGELRLQLGVLRVTVADIEKELAELRE

SEQ ID NO: 576 - protein, 85 aa, Homo sapiens
SQDRGKAAMENSVSEASLYLQDQLDKLRMIIESMLTSSSTLLSMSMAPHKAHTLAPGQIDPEATCPACSLDVSHQVSTLVRRYEQ

SEQ ID NO: 577 - protein, 85 aa, Homo sapiens
LQDMVNSLAVSRPSKKAKLQRQDEELLGRVQSAILQVQGDCEKLNITTSNLIEDHRQKQKDIAMLYQGLEKLEKEKANREHLEME

SEQ ID NO: 578 - protein, 85 aa, Homo sapiens
IDVKADKSALATKVSRVQFDATTEQLNHMMQELVAKMSGQEQDWQKMLDRLLTEMDNKLDRLELDPVKQLLEDRWKSLRQQLRER

SEQ ID NO: 579 - protein, 85 aa, Homo sapiens
PPLYQADEAAAMRRQLLAHFHCLSCDRPLETPVTGHAIPVTPAGPGLPGHHSIRPYTVFELEQVRQHSRNLKLGSAFPRGDLAQM

SEQ ID NO: 580 - protein, 85 aa, Homo sapiens
EQSVGRLRSMHSKMLMNIEKVQIHFGGSTKASSQIIRELLHAQCLGSPCYKRVTDMADYTYSTVPRRCGGSHTLTYPYHRSRPQH

SEQ ID NO: 581 - protein, 85 aa, Homo sapiens
LPRGLYPTEEIQIAMKHDEVDILGLDGHIYKGRMDTRLPGILRKDSSGTSKRKSQQPRPHVHRPPSLSSNGQLPSRPQSAQISAG

SEQ ID NO: 582 - protein, 85 aa, Homo sapiens
ALPFQKELEKYKNIDEDELLGKLSEEELKQLENVLDDLDPESAMLPAGFRQKDQTQKAATGPFDREHLLMYLEKEALEQKDREDF

SEQ ID NO: 583 - protein, 85 aa, Homo sapiens
VPFTGEKKGRVFIPKEKPIETRKEEKVTLDPELEEALASASDTELYDLAAVLGVHNLLNNPKFDEETANNKGGKGPVRNVVKGEK

SEQ ID NO: 584 - protein, 85 aa, Homo sapiens
VKPVFEEPPNPTNVEISLQQMKANDPSLQEVNLNNIKNIPIPTLREFAKALETNTHVKKFSLAATRSNDPVAIAFADMLKVNKTL

SEQ ID NO: 585 - protein, 85 aa, Homo sapiens
TSLNIESNFITGTGILALVEALKENDTLTEIKIDNQRQQLGTAVEMEIAQMLEENSRILKFGYQFTKQGPRTRVAAAITKNNDLV

SEQ ID NO: 586 - protein, 84 aa, Homo sapiens
GTGILALVEALKENDTLTEIKIDNQRQQLGTAVEMEIAQMLEENSRILKFGYQFTKQGPRTRVAAAITKNNDLVRKKRVEADRR

SEQ ID NO: 587 - protein, 85 aa, Homo sapiens
AMLPAGFRQKDQTQKAATGPFDREHLLMYLEKEALEQKDREDFVPFTGEKKGRVFIPKEKPIETRKEEKVTLDPELEEALASASD

SEQ ID NO: 588 - protein, 85 aa, Homo sapiens
TELYDLAAVLGVHNLLNNPKFDEETANNKGGKGPVRNVVKGEKVKPVFEEPPNPTNVEISLQQMKANDPSLQEVNLNNIKNIPIP

SEQ ID NO: 589 - protein, 85 aa, Homo sapiens
TLREFAKALETNTHVKKFSLAATRSNDPVAIAFADMLKVNKTLTSLNIESNFITGTGILALVEALKENDTLTEIKIDNQRQQLGT

SEQ ID NO: 590 - protein, 85 aa, Homo sapiens
ASGDTLYIATDGSEMPAEIVELHEIEVETIPVETIETTVVGEEEEEDDDDEDGGGGDHGGGGGHGHAGHHHHHHHHHHHPPMIAL

SEQ ID NO: 591 - protein, 85 aa, Homo sapiens
QPLVTDDPTQVHHHQEVILVQTREEVVGGDDSDGLRAEDGFEDQILIPVPAPAGGDDDYIEQTLVTVAAAGKSGGGGSSSSGGGR

SEQ ID NO: 592 - protein, 85 aa, Homo sapiens
VKKGGGKKSGKKSYLSGGAGAAGGGGADPGNKKWEQKQVQIKTLEGEFSVTMWSSDEKKDIDHETVVEEQIIGENSPPDYSEYMT

SEQ ID NO: 593 - protein, 85 aa, Homo sapiens
GKKLPPGGIPGIDLSDPKQLAEFARMKPRKIKEDDAPRTIACPHKGCTKMFRDNSAMRKHLHTHGPRVHVCAECGKAFVESSKLK

SEQ ID NO: 594 - protein, 84 aa, Homo sapiens
GKAFVESSKLKRHQLVHTGEKPFQCTFEGCGKRFSLDFNLRTHVRIHTGDRPYVCPFDGCNKKFAQSTNLKSHILTHAKAKNNQ

SEQ ID NO: 595 - protein, 85 aa, Homo sapiens
EEEEDDDDEDGGGGDHGGGGGHGHAGHHHHHHHHHHHPPMIALQPLVTDDPTQVHHHQEVILVQTREEVVGGDDSDGLRAEDGFE

SEQ ID NO: 596 - protein, 85 aa, Homo sapiens
DQILIPVPAPAGGDDDYIEQTLVTVAAAGKSGGGGSSSSGGGRVKKGGGKKSGKKSYLSGGAGAAGGGGADPGNKKWEQKQVQIK

SEQ ID NO: 597 - protein, 85 aa, Homo sapiens
TLEGEFSVTMWSSDEKKDIDHETVVEEQIIGENSPPDYSEYMTGKKLPPGGIPGIDLSDPKQLAEFARMKPRKIKEDDAPRTIAC

SEQ ID NO: 598 - protein, 85 aa, Homo sapiens
PHKGCTKMFRDNSAMRKHLHTHGPRVHVCAECGKAFVESSKLKRHQLVHTGEKPFQCTFEGCGKRFSLDFNLRTHVRIHTGDRPY

SEQ ID NO: 599 - protein, 85 aa, Homo sapiens
EIGTEISRKIRSAIKGKLQELGAYVDEELPDYIMVMVANKKSQDQMTEDLSLFLGNNTIRFTVWLHGVLDKLRSVTTEPSSLKSS

SEQ ID NO: 600 - protein, 85 aa, Homo sapiens
DTNIFDSNVPSNKSNFSRGDERRHEAAVPPLAIPSARPEKRDSRVSTSSQESKTTNVRQTYDDGAATRLMSTVKPLREPAPSEDV

SEQ ID NO: 601 - protein, 85 aa, Homo sapiens
IDIKPEPDDLIDEDLNFVQENPLSQKKPTVTLTYGSSRPSIEIYRPPASRNADSGVHLNRLQFQQQQNSIHAAKQLDMQSSWVYE

SEQ ID NO: 602 - protein, 85 aa, Homo sapiens
TGRLCEPEVLNSLEETYSPFFRNNSEKMSMEDENFRKRKLPVVSSVVKVKKFNHDGEEEEEDDDYGSRTGSISSSVSVPAKPERR

SEQ ID NO: 603 - protein, 85 aa, Homo sapiens
PSLPPSKQANKNLILKAISEAQESVTKTTNYSTVPQKQTLPVAPRTRTSQEELLAEVVQGQSRTPRISPPIKEEETKGDSVEKNQ

SEQ ID NO: 604 - protein, 85 aa, Homo sapiens
GTQQRQLLSRLQIDPVMAETLQMSQDYYDMESMVHADTRSFILKKPKLSEEVVVAPNQESGMKTADSLRVLSGHLMQTRDLVQPD

SEQ ID NO: 605 - protein, 85 aa, Homo sapiens
KPASPKFIVTLDGVPSPPGYMSDQEEDMCFEGMKPVNQTAASNKGLRGLLHPQQLHLLSRQLEDPNGSFSNAEMSELSVAQKPEK

SEQ ID NO: 606 - protein, 85 aa, Homo sapiens
LLERCKYWPACKNGDECAYHHPISPCKAFPNCKFAEKCLFVHPNCKYDAKCTKPDCPFTHVSRRIPVLSPKPAVAPPAPPSSSQL

SEQ ID NO: 607 - protein, 84 aa, Homo sapiens
PFTHVSRRIPVLSPKPAVAPPAPPSSSQLCRYFPACKKMECPFYHPKHCRFNTQCTRPDCTFYHPTINVPPRHALKWIRPQTSE

SEQ ID NO: 608 - protein, 85 aa, Homo sapiens
QDQMTEDLSLFLGNNTIRFTVWLHGVLDKLRSVTTEPSSLKSSDTNIFDSNVPSNKSNFSRGDERRHEAAVPPLAIPSARPEKRD

SEQ ID NO: 609 - protein, 85 aa, Homo sapiens
SRVSTSSQESKTTNVRQTYDDGAATRLMSTVKPLREPAPSEDVIDIKPEPDDLIDEDLNFVQENPLSQKKPTVTLTYGSSRPSIE

SEQ ID NO: 610 - protein, 85 aa, Homo sapiens
IYRPPASRNADSGVHLNRLQFQQQQNSIHAAKQLDMQSSWVYETGRLCEPEVLNSLEETYSPFFRNNSEKMSMEDENFRKRKLPV

SEQ ID NO: 611 - protein, 85 aa, Homo sapiens
VSSVVKVKKFNHDGEEEEEDDDYGSRTGSISSSVSVPAKPERRPSLPPSKQANKNLILKAISEAQESVTKTTNYSTVPQKQTLPV

SEQ ID NO: 612 - protein, 85 aa, Homo sapiens
APRTRTSQEELLAEVVQGQSRTPRISPPIKEEETKGDSVEKNQGTQQRQLLSRLQIDPVMAETLQMSQDYYDMESMVHADTRSFI

SEQ ID NO: 613 - protein, 85 aa, Homo sapiens
MKKPKLSEEVVVAPNQESGMKTADSLRVLSGHLMQTRDLVQPDKPASPKFIVTLDGVPSPPGYMSDQEEDMCFEGMKPVNQTAAS

SEQ ID NO: 614 - protein, 85 aa, Homo sapiens
NKGLRGLLHPQQLHLLSRQLEDPNGSFSNAEMSELSVAQKPEKLLERCKYWPACKNGDECAYHHPISPCKAFPNCKFAEKCLFVH

SEQ ID NO: 615 - protein, 85 aa, Homo sapiens
PNCKYDAKCTKPDCPFTHVSRRIPVLSPKPAVAPPAPPSSSQLCRYFPACKKMECPFYHPKHCRFNTQCTRPDCTFYHPTINVPP

SEQ ID NO: 616 - protein, 85 aa, Homo sapiens
ANSAKAEEYEKMSLEQAKASVNSETESSFNINENTTASGTGLSEKTSVCRQVDIARKRKEFEDDLVKESSSCGKDTPSKKRKLDP

SEQ ID NO: 617 - protein, 85 aa, Homo sapiens
EIVPEEKDCGDAEGNSKKRKRETEDVPKDKSSTGDGTQNKRKIALEDVPEKQKNLEEGHSSTVAAHYNELQEVGLEKRSQSRIFY

SEQ ID NO: 618 - protein, 85 aa, Homo sapiens
LRNFNNWMKSVLIGEFLEKVRQKKKRDITVLDLGCGKGGDLLKWKKGRINKLVCTDIADVSVKQCQQRYEDMKNRRDSEYIFSAE

SEQ ID NO: 619 - protein, 85 aa, Homo sapiens
FITADSSKELLIDKFRDPQMCFDICSCQFVCHYSFESYEQADMMLRNACERLSPGGYFIGTTPNSFELIRRLEASETESFGNEIY

SEQ ID NO: 620 - protein, 85 aa, Homo sapiens
TVKFQKKGDYPLFGCKYDFNLEGVVDVPEFLVYFPLLNEMAKKYNMKLVYKKTFLEFYEEKIKNNENKMLLKRMQALEPYPANES

SEQ ID NO: 621 - protein, 84 aa, Homo sapiens
KTFLEFYEEKIKNNENKMLLKRMQALEPYPANESSKLVSEKVDDYEHAAKYMKNSQVRLPLGTLSKSEWEATSIYLVFAFEKQQ

SEQ ID NO: 622 - protein, 85 aa, Homo sapiens
SEKTSVCRQVDIARKRKEFEDDLVKESSSCGKDTPSKKRKLDPEIVPEEKDCGDAEGNSKKRKRETEDVPKDKSSTGDGTQNKRK

SEQ ID NO: 623 - protein, 85 aa, Homo sapiens
IALEDVPEKQKNLEEGHSSTVAAHYNELQEVGLEKRSQSRIFYLRNFNNWMKSVLIGEFLEKVRQKKKRDITVLDLGCGKGGDLL

SEQ ID NO: 624 - protein, 85 aa, Homo sapiens
KWKKGRINKLVCTDIADVSVKQCQQRYEDMKNRRDSEYIFSAEFITADSSKELLIDKFRDPQMCFDICSCQFVCHYSFESYEQAD

SEQ ID NO: 625 - protein, 85 aa, Homo sapiens
MMLRNACERLSPGGYFIGTTPNSFELIRRLEASETESFGNEIYTVKFQKKGDYPLFGCKYDFNLEGVVDVPEFLVYFPLLNEMAK

SEQ ID NO: 626 - protein, 85 aa, Homo sapiens
KYNMKLVYKKTFLEFYEEKIKNNENKMLLKRMQALEPYPANESSKLVSEKVDDYEHAAKYMKNSQVRLPLGTLSKSEWEATSIYL

SEQ ID NO: 627 - protein, 85 aa, Homo sapiens
LGTVKMEGHETSDWNSYYADTQEAYSSVPVSNMNSGLGSMNSMNTYMTMNTMTTSGNMTPASFNMSYANPGLGAGLSPGAVAGMP

SEQ ID NO: 628 - protein, 85 aa, Homo sapiens
GGSAGAMNSMTAAGVTAMGTALSPSGMGAMGAQQAASMNGLGPYAAAMNPCMSPMAYAPSNLGRSRAGGGGDAKTFKRSYPHAKP

SEQ ID NO: 629 - protein, 85 aa, Homo sapiens
PYSYISLITMAIQQAPSKMLTLSEIYQWIMDLFPYYRQNQQRWQNSIRHSLSFNDCFVKVARSPDKPGKGSYWTLHPDSGNMFEN

SEQ ID NO: 630 - protein, 85 aa, Homo sapiens
GCYLRRQKRFKCEKQPGAGGGGGSGSGGSGAKGGPESRKDPSGASNPSADSPLHRGVHGKTGQLEGAPAPGPAASPQTLDHSGAT

SEQ ID NO: 631 - protein, 85 aa, Homo sapiens
ATGGASELKTPASSTAPPISSGPGALASVPASHPAHGLAPHESQLHLKGDPHYSFNHPFSINNLMSSSEQQHKLDFKAYEQALQY

SEQ ID NO: 632 - protein, 84 aa, Homo sapiens
KGDPHYSFNHPFSINNLMSSSEQQHKLDFKAYEQALQYSPYGSTLPASLPLGSASVTTRSPIEPSALEPAYYQGVYSRPVLNTS

SEQ ID NO: 633 - protein, 85 aa, Homo sapiens
MNTYMTMNTMTTSGNMTPASFNMSYANPGLGAGLSPGAVAGMPGGSAGAMNSMTAAGVTAMGTALSPSGMGAMGAQQAASMNGLG

SEQ ID NO: 634 - protein, 85 aa, Homo sapiens
PYAAAMNPCMSPMAYAPSNLGRSRAGGGGDAKTFKRSYPHAKPPYSYISLITMAIQQAPSKMLTLSEIYQWIMDLFPYYRQNQQR

SEQ ID NO: 635 - protein, 85 aa, Homo sapiens
WQNSIRHSLSFNDCFVKVARSPDKPGKGSYWTLHPDSGNMFENGCYLRRQKRFKCEKQPGAGGGGGSGSGGSGAKGGPESRKDPS

SEQ ID NO: 636 - protein, 85 aa, Homo sapiens
GASNPSADSPLHRGVHGKTGQLEGAPAPGPAASPQTLDHSGATATGGASELKTPASSTAPPISSGPGALASVPASHPAHGLAPHE

SEQ ID NO: 637 - protein, 85 aa, Homo sapiens
SQLHLKGDPHYSFNHPFSINNLMSSSEQQHKLDFKAYEQALQYSPYGSTLPASLPLGSASVTTRSPIEPSALEPAYYQGVYSRPV

SEQ ID NO: 638 - protein, 85 aa, Homo sapiens
SPLKIHGPIRIRSMQTGITKWKEGSFEIVEKENKVSLVVHYNTGGIPRIFQLSHNIKNVVLRPSGAKQSRLMLTLQDNSFLSIDK

SEQ ID NO: 639 - protein, 85 aa, Homo sapiens
VPSKDAEEMRLFLDAVHQNRLPAAMKPSQGSGSFGAILGSRTSQKETSRQLSYSDNQASAKRGSLETKDDIPFRKVLGNPGRGSI

SEQ ID NO: 640 - protein, 85 aa, Homo sapiens
KTVAGSGIARTIPSLTSTSTPLRSGLLENRTEKRKRMISTGSELNEDYPKENDSSSNNKAMTDPSRKYLTSSREKQLSLKQSEEN

SEQ ID NO: 641 - protein, 85 aa, Homo sapiens
RTSGLLPLQSSSFYGSRAGSKEHSSGGTNLDRTNVSSQTPSAKRSLGFLPQPVPLSVKKLRCNQDYTGWNKPRVPLSSHQQQQLQ

SEQ ID NO: 642 - protein, 85 aa, Homo sapiens
GFSNLGNTCYMNAILQSLFSLQSFANDLLKQGIPWKKIPLNALIRRFAHLLVKKDICNSETKKDLLKKVKNAISATAERFSGYMQ

SEQ ID NO: 643 - protein, 85 aa, Homo sapiens
NDAHEFLSQCLDQLKEDMEKLNKTWKTEPVSGEENSPDISATRAYTCPVITNLEFEVQHSIICKACGEIIPKREQFNDLSIDLPR

SEQ ID NO: 644 - protein, 85 aa, Homo sapiens
RKKPLPPRSIQDSLDLFFRAEELEYSCEKCGGKCALVRHKFNRLPRVLILHLKRYSFNVALSLNNKIGQQVIIPRYLTLSSHCTE

SEQ ID NO: 645 - protein, 85 aa, Homo sapiens
NTKPPFTLGWSAHMAISRPLKASQMVNSCITSPSTPSKKFTFKSKSSLALCLDSDSEDELKRSVALSQRLCEMLGNEQQQEDLEK

SEQ ID NO: 646 - protein, 85 aa, Homo sapiens
DSKLCPIEPDKSELENSGFDRMSEEELLAAVLEISKRDASPSLSHEDDDKPTSSPDTGFAEDDIQEMPENPDTMETEKPKTITEL

SEQ ID NO: 647 - protein, 85 aa, Homo sapiens
DPASFTEITKDCDENKENKTPEGSQGEVDWLQQYDMEREREEQELQQALAQSLQEQEAWEQKEDDDLKRATELSLQEFNNSFVDA

SEQ ID NO: 648 - protein, 85 aa, Homo sapiens
MGSDEDSGNEDVFDMEYTEAEAEELKRNAETGNLPHSYRLISVVSHIGSTSSSGHYISDVYDIKKQAWFTYNDLEVSKIQEAAVQ

SEQ ID NO: 649 - protein, 84 aa, Homo sapiens
SHIGSTSSSGHYISDVYDIKKQAWFTYNDLEVSKIQEAAVQSDRDRSGYIFFYMHKEIFDELLETEKNSQSLSTEVGKTTRQAL

SEQ ID NO: 650 - protein, 85 aa, Homo sapiens
TGGIPRIFQLSHNIKNVVLRPSGAKQSRLMLTLQDNSFLSIDKVPSKDAEEMRLFLDAVHQNRLPAAMKPSQGSGSFGAILGSRT

SEQ ID NO: 651 - protein, 85 aa, Homo sapiens
SQKETSRQLSYSDNQASAKRGSLETKDDIPFRKVLGNPGRGSIKTVAGSGIARTIPSLTSTSTPLRSGLLENRTEKRKRMISTGS

SEQ ID NO: 652 - protein, 85 aa, Homo sapiens
ELNEDYPKENDSSSNNKAMTDPSRKYLTSSREKQLSLKQSEENRTSGLLPLQSSSFYGSRAGSKEHSSGGTNLDRTNVSSQTPSA

SEQ ID NO: 653 - protein, 85 aa, Homo sapiens
KRSLGFLPQPVPLSVKKLRCNQDYTGWNKPRVPLSSHQQQQLQGFSNLGNTCYMNAILQSLFSLQSFANDLLKQGIPWKKIPLNA

SEQ ID NO: 654 - protein, 85 aa, Homo sapiens
LIRRFAHLLVKKDICNSETKKDLLKKVKNAISATAERFSGYMQNDAHEFLSQCLDQLKEDMEKLNKTWKTEPVSGEENSPDISAT

SEQ ID NO: 655 - protein, 85 aa, Homo sapiens
RAYTCPVITNLEFEVQHSIICKACGEIIPKREQFNDLSIDLPRRKKPLPPRSIQDSLDLFFRAEELEYSCEKCGGKCALVRHKFN

SEQ ID NO: 656 - protein, 85 aa, Homo sapiens
RLPRVLILHLKRYSFNVALSLNNKIGQQVIIPRYLTLSSHCTENTKPPFTLGWSAHMAISRPLKASQMVNSCITSPSTPSKKFTF

SEQ ID NO: 657 - protein, 85 aa, Homo sapiens
KSKSSLALCLDSDSEDELKRSVALSQRLCEMLGNEQQQEDLEKDSKLCPIEPDKSELENSGFDRMSEEELLAAVLEISKRDASPS

SEQ ID NO: 658 - protein, 85 aa, Homo sapiens
MSHEDDDKPTSSPDTGFAEDDIQEMPENPDTMETEKPKTITELDPASFTEITKDCDENKENKTPEGSQGEVDWLQQYDMEREREE

SEQ ID NO: 659 - protein, 85 aa, Homo sapiens
QELQQALAQSLQEQEAWEQKEDDDLKRATELSLQEFNNSFVDALGSDEDSGNEDVFDMEYTEAEAEELKRNAETGNLPHSYRLIS

SEQ ID NO: 660 - protein, 85 aa, Homo sapiens
VVSHIGSTSSSGHYISDVYDIKKQAWFTYNDLEVSKIQEAAVQSDRDRSGYIFFYMHKEIFDELLETEKNSQSLSTEVGKTTRQA

SEQ ID NO: 661 - protein, 85 aa, Homo sapiens
RPLTEEETRVMFEKIAKYIGENLQLLVDRPDGTYCFRLHNDRVYYVSEKIMKLAANISGDKLVSLGTCFGKFTKTHKFRLHVTAL

SEQ ID NO: 662 - protein, 84 aa, Homo sapiens
KIMKLAANISGDKLVSLGTCFGKFTKTHKFRLHVTALDYLAPYAKGFGVAAKSTQDCRKVDPMAIVVFHQADIGEYVRHEETLT

SEQ ID NO: 663 - protein, 85 aa, Homo sapiens
VYYVSEKIMKLAANISGDKLVSLGTCFGKFTKTHKFRLHVTALDYLAPYAKGFGVAAKSTQDCRKVDPMAIVVFHQADIGEYVRH

SEQ ID NO: 664 - protein, 85 aa, Homo sapiens
AARKGRRRTCETGEPMEAESGDTSSEGPAQVYLPGRGPPLREGEELVMDEEAYVLYHRAQTGAPCLSFDIVRDHLGDNRTELPLT

SEQ ID NO: 665 - protein, 85 aa, Homo sapiens
LYLCAGTQAESAQSNRLMMLRMHNLHGTKPPPSEGSDEEEEEEDEEDEEERKPQLELAMVPHYGGINRVRVSWLGEEPVAGVWSE

SEQ ID NO: 666 - protein, 85 aa, Homo sapiens
KGQVEVFALRRLLQVVEEPQALAAFLRDEQAQMKPIFSFAGHMGEGFALDWSPRVTGRLLTGDCQKNIHLWTPTDGGSWHVDQRP

SEQ ID NO: 667 - protein, 85 aa, Homo sapiens
FVGHTRSVEDLQWSPTENTVFASCSADASIRIWDIRAAPSKACMLTTATAHDGDVNVISWSRREPFLLSGGDDGALKIWDLRQFK

SEQ ID NO: 668 - protein, 85 aa, Homo sapiens
SGSPVATFKQHVAPVTSVEWHPQDSGVFAASGADHQITQWDLAVERDPEAGDVEADPGLADLPQQLLFVHQGETELKELHWHPQC

SEQ ID NO: 669 - protein, 84 aa, Homo sapiens
PQDSGVFAASGADHQITQWDLAVERDPEAGDVEADPGLADLPQQLLFVHQGETELKELHWHPQCPGLLVSTALSGFTIFRTISV

SEQ ID NO: 670 - protein, 85 aa, Homo sapiens
GEELVMDEEAYVLYHRAQTGAPCLSFDIVRDHLGDNRTELPLTLYLCAGTQAESAQSNRLMMLRMHNLHGTKPPPSEGSDEEEEE

SEQ ID NO: 671 - protein, 85 aa, Homo sapiens
EDEEDEEERKPQLELAMVPHYGGINRVRVSWLGEEPVAGVWSEKGQVEVFALRRLLQVVEEPQALAAFLRDEQAQMKPIFSFAGH

SEQ ID NO: 672 - protein, 85 aa, Homo sapiens
MGEGFALDWSPRVTGRLLTGDCQKNIHLWTPTDGGSWHVDQRPFVGHTRSVEDLQWSPTENTVFASCSADASIRIWDIRAAPSKA

SEQ ID NO: 673 - protein, 85 aa, Homo sapiens
CMLTTATAHDGDVNVISWSRREPFLLSGGDDGALKIWDLRQFKSGSPVATFKQHVAPVTSVEWHPQDSGVFAASGADHQITQWDL

SEQ ID NO: 674 - protein, 85 aa, Homo sapiens
AEAPQQQLGIPVVKLEKELPWGRGREDPSPETFRLRFRQFRYQEAAGPQEALRELQELCRRWLRPELHTKEQILELLVLEQFLTI

SEQ ID NO: 675 - protein, 85 aa, Homo sapiens
MPREFYAWIREHGPESGKALAAMVEDLTERALEAKAVPCHRQGEQEETALCRGAWEPGIQLGPVEVKPEWGMPPGEGVQGPDPGT

SEQ ID NO: 676 - protein, 85 aa, Homo sapiens
EEQLSQDPGDETRAFQEQGGGSKEKEAKPPQEDLKGALVALTSERFGEASLQGPGLGRVCEQEPGGPAGSAPGLPPPQHGAIPLP

SEQ ID NO: 677 - protein, 85 aa, Homo sapiens
DEVKTHSSFWKPFQCPECGKGFSRSSNLVRHQRTHEEKSYGCVECGKGFTLREYLMKHQRTHLGKRPYVCSECWKTFSQRHHLEV

SEQ ID NO: 678 - protein, 85 aa, Homo sapiens
HQRSHTGEKPYKCGDCWKSFSRRQHLQVHRRTHTGEKPYTCECGKSFSRNANLAVHRRAHTGEKPYGCQVCGKRFSKGERLVRHQ

SEQ ID NO: 679 - protein, 84 aa, Homo sapiens
CECGKSFSRNANLAVHRRAHTGEKPYGCQVCGKRFSKGERLVRHQRIHTGEKPYHCPACGRSFNQRSILNRHQKTQHRQEPLVQ

SEQ ID NO: 680 - protein, 85 aa, Homo sapiens
QEAAGPQEALRELQELCRRWLRPELHTKEQILELLVLEQFLTILPREFYAWIREHGPESGKALAAMVEDLTERALEAKAVPCHRQ

SEQ ID NO: 681 - protein, 85 aa, Homo sapiens
GEQEETALCRGAWEPGIQLGPVEVKPEWGMPPGEGVQGPDPGTEEQLSQDPGDETRAFQEQGGGSKEKEAKPPQEDLKGALVALT

SEQ ID NO: 682 - protein, 85 aa, Homo sapiens
SERFGEASLQGPGLGRVCEQEPGGPAGSAPGLPPPQHGAIPLPDEVKTHSSFWKPFQCPECGKGFSRSSNLVRHQRTHEEKSYGC

SEQ ID NO: 683 - protein, 85 aa, Homo sapiens
VECGKGFTLREYLMKHQRTHLGKRPYVCSECWKTFSQRHHLEVHQRSHTGEKPYKCGDCWKSFSRRQHLQVHRRTHTGEKPYTCE

SEQ ID NO: 684 - protein, 85 aa, Homo sapiens
AARRRRSTGGGRARALNESKRVNNGNTAPEDSSPAKKTRRCQRQESKKMPVAGGKANKDRTEDKQDGMPGRSWASKRVSESVKAL

SEQ ID NO: 685 - protein, 85 aa, Homo sapiens
MLKGKAPVDPECTAKVGKAHVYCEGNDVYDVMLNQTNLQFNNNKYYLIQLLEDDAQRNFSVWMRWGRVGKMGQHSLVACSGNLNK

SEQ ID NO: 686 - protein, 85 aa, Homo sapiens
AKEIFQKKFLDKTKNNWEDREKFEKVPGKYDMLQMDYATNTQDEEETKKEESLKSPLKPESQLDLRVQELIKLICNVQAMEEMMM

SEQ ID NO: 687 - protein, 85 aa, Homo sapiens
EMKYNTKKAPLGKLTVAQIKAGYQSLKKIEDCIRAGQHGRALMEACNEFYTRIPHDFGLRTPPLIRTQKELSEKIQLLEALGDIE

SEQ ID NO: 688 - protein, 85 aa, Homo sapiens
IAIKLVKTELQSPEHPLDQHYRNLHCALRPLDHESYEFKVISQYLQSTHAPTHSDYTMTLLDLFEVEKDGEKEAFREDLHNRMLL

SEQ ID NO: 689 - protein, 85 aa, Homo sapiens
WHGSRMSNWVGILSHGLRIAPPEAPITGYMFGKGIYFADMSSKSANYCFASRLKNTGLLLLSEVALGQCNELLEANPKAEGLLQG

SEQ ID NO: 690 - protein, 84 aa, Homo sapiens
EANPKAEGLLQGKHSTKGLGKMAPSSAHFVTLNGSTVPLGPASDTGILNPDGYTLNYNEYIVYNPNQVRMRYLLKVQFNFLQLW

SEQ ID NO: 691 - protein, 85 aa, Homo sapiens
RQESKKMPVAGGKANKDRTEDKQDGMPGRSWASKRVSESVKALLLKGKAPVDPECTAKVGKAHVYCEGNDVYDVMLNQTNLQFNN

SEQ ID NO: 692 - protein, 85 aa, Homo sapiens
NKYYLIQLLEDDAQRNFSVWMRWGRVGKMGQHSLVACSGNLNKAKEIFQKKFLDKTKNNWEDREKFEKVPGKYDMLQMDYATNTQ

SEQ ID NO: 693 - protein, 85 aa, Homo sapiens
DEEETKKEESLKSPLKPESQLDLRVQELIKLICNVQAMEEMMMEMKYNTKKAPLGKLTVAQIKAGYQSLKKIEDCIRAGQHGRAL

SEQ ID NO: 694 - protein, 85 aa, Homo sapiens
MEACNEFYTRIPHDFGLRTPPLIRTQKELSEKIQLLEALGDIEIAIKLVKTELQSPEHPLDQHYRNLHCALRPLDHESYEFKVIS

SEQ ID NO: 695 - protein, 85 aa, Homo sapiens
QYLQSTHAPTHSDYTMTLLDLFEVEKDGEKEAFREDLHNRMLLWHGSRMSNWVGILSHGLRIAPPEAPITGYMFGKGIYFADMSS

SEQ ID NO: 696 - protein, 85 aa, Homo sapiens
KSANYCFASRLKNTGLLLLSEVALGQCNELLEANPKAEGLLQGKHSTKGLGKMAPSSAHFVTLNGSTVPLGPASDTGILNPDGYT

SEQ ID NO: 697 - protein, 85 aa, Homo sapiens
MGGSAGRLKMSSSGTLSNYYVDSLIGHEGDEVFAARFGPPGPGAQGRPAGVADGPAATAAEFASCSFAPRSAVFSASWSAVPSQP

SEQ ID NO: 698 - protein, 85 aa, Homo sapiens
PAAAAMSGLYHPYVPPPPLAASASEPGRYVRSWMEPLPGFPGGAGGGGGGGGGGPGRGPSPGPSGPANGRHYGIKPETRAAPAPA

SEQ ID NO: 699 - protein, 85 aa, Homo sapiens
TAASTTSSSSTSLSSSSKRTECSVARESQGSSGPEFSCNSFLQEKAAAATGGTGPGAGIGAATGTGGSSEPSACSDHPIPGCSLK

SEQ ID NO: 700 - protein, 85 aa, Homo sapiens
EEEKQHSQPQQQQLDPNNPAANWIHARSTRKKRCPYTKYQTLELEKEFLFNMYLTRDRRYEVARILNLTERQVKIWFQNRRMKMK

SEQ ID NO: 701 - protein, 84 aa, Homo sapiens
QLDPNNPAANWIHARSTRKKRCPYTKYQTLELEKEFLFNMYLTRDRRYEVARILNLTERQVKIWFQNRRMKMKKMSKEKCPKGD

SEQ ID NO: 702 - protein, 85 aa, Homo sapiens
GAQGRPAGVADGPAATAAEFASCSFAPRSAVFSASWSAVPSQPPAAAAMSGLYHPYVPPPPLAASASEPGRYVRSWMEPLPGFPG

SEQ ID NO: 703 - protein, 85 aa, Homo sapiens
GAGGGGGGGGGGPGRGPSPGPSGPANGRHYGIKPETRAAPAPATAASTTSSSSTSLSSSSKRTECSVARESQGSSGPEFSCNSFL

SEQ ID NO: 704 - protein, 85 aa, Homo sapiens
QEKAAAATGGTGPGAGIGAATGTGGSSEPSACSDHPIPGCSLKEEEKQHSQPQQQQLDPNNPAANWIHARSTRKKRCPYTKYQTL

SEQ ID NO: 705 - protein, 85 aa, Homo sapiens
AAPEPLSPAGGAGEEAPEEDEDEAEAEDPERPNAGAGGGRSGGGGSSVSGGGGGGGAGAGGCGGPGGALTRRAVTLRVLLKDALL

SEQ ID NO: 706 - protein, 85 aa, Homo sapiens
EPGAGVLSIYYLGKKFLGDLQPDGRIMWQETGQTFNSPSAWATHCKKLVNPAKKSGCGWASVKYKGQKLDKYKATWLRLHQLHTP

SEQ ID NO: 707 - protein, 85 aa, Homo sapiens
ATAADESPASEGEEEELLMEEEEEDVLAGVSAEDKSRRPLGKSPSEPAHPEATTPGKRVDSKIRVPVRYCMLGSRDLARNPHTLV

SEQ ID NO: 708 - protein, 85 aa, Homo sapiens
EVTSFAAINKFQPFNVAVSSNVLFLLDFHSHLTRSEVVGYLGGRWDVNSQMLTVLRAFPCRSRLGDAETAAAIEEEIYQSLFLRG

SEQ ID NO: 709 - protein, 85 aa, Homo sapiens
MSLVGWYHSHPHSPALPSLQDIDAQMDYQLRLQGSSNGFQPCLALLCSPYYSGNPGPESKISPFWVMPPPEMLLVEFYKGSPDLV

SEQ ID NO: 710 - protein, 84 aa, Homo sapiens
CSPYYSGNPGPESKISPFWVMPPPEMLLVEFYKGSPDLVRLQEPWSQEHTYLDKLKISLASRTPKDQSLCHVLEQVCGVLKQGS

SEQ ID NO: 711 - protein, 85 aa, Homo sapiens
GGGSSVSGGGGGGGAGAGGCGGPGGALTRRAVTLRVLLKDALLEPGAGVLSIYYLGKKFLGDLQPDGRIMWQETGQTFNSPSAWA

SEQ ID NO: 712 - protein, 85 aa, Homo sapiens
THCKKLVNPAKKSGCGWASVKYKGQKLDKYKATWLRLHQLHTPATAADESPASEGEEEELLMEEEEEDVLAGVSAEDKSRRPLGK

SEQ ID NO: 713 - protein, 85 aa, Homo sapiens
SPSEPAHPEATTPGKRVDSKIRVPVRYCMLGSRDLARNPHTLVEVTSFAAINKFQPFNVAVSSNVLFLLDFHSHLTRSEVVGYLG

SEQ ID NO: 714 - protein, 85 aa, Homo sapiens
GRWDVNSQMLTVLRAFPCRSRLGDAETAAAIEEEIYQSLFLRGLSLVGWYHSHPHSPALPSLQDIDAQMDYQLRLQGSSNGFQPC

SEQ ID NO: 715 - protein, 85 aa, Homo sapiens
LALLCSPYYSGNPGPESKISPFWVMPPPEMLLVEFYKGSPDLVRLQEPWSQEHTYLDKLKISLASRTPKDQSLCHVLEQVCGVLK

SEQ ID NO: 716 - protein, 85 aa, Homo sapiens
SLNPPIFLKRSEENSSKFVETKQSQTTSIASEDPLQNLCLASQEVLQKAQQSGRSKCLKCGGSRMFYCYTCYVPVENVPIEQIPL

SEQ ID NO: 717 - protein, 85 aa, Homo sapiens
VKLPLKIDIIKHPNETDGKSTAIHAKLLAPEFVNIYTYPCIPEYEEKDHEVALIFPGPQSISIKDISFHLQKRIQNNVRGKNDDP

SEQ ID NO: 718 - protein, 85 aa, Homo sapiens
DKPSFKRKRTEEQEFCDLNDSKCKGTTLKKIIFIDSTWNQTNKIFTDERLQGLLQVELKTRKTCFWRHQKGKPDTFLSTIEAIYY

SEQ ID NO: 719 - protein, 84 aa, Homo sapiens
LQGLLQVELKTRKTCFWRHQKGKPDTFLSTIEAIYYFLVDYHTDILKEKYRGQYDNLLFFYSFMYQLIKNAKCSGDKETGKLTH

SEQ ID NO: 720 - protein, 85 aa, Homo sapiens
QEVLQKAQQSGRSKCLKCGGSRMFYCYTCYVPVENVPIEQIPLVKLPLKIDIIKHPNETDGKSTAIHAKLLAPEFVNIYTYPCIP

SEQ ID NO: 721 - protein, 85 aa, Homo sapiens
EYEEKDHEVALIFPGPQSISIKDISFHLQKRIQNNVRGKNDDPDKPSFKRKRTEEQEFCDLNDSKCKGTTLKKIIFIDSTWNQTN

SEQ ID NO: 722 - protein, 85 aa, Homo sapiens
KIFTDERLQGLLQVELKTRKTCFWRHQKGKPDTFLSTIEAIYYFLVDYHTDILKEKYRGQYDNLLFFYSFMYQLIKNAKCSGDKE

SEQ ID NO: 723 - protein, 85 aa, Homo sapiens
KSEAKDGEEESLQTAFKKLRVDASGSVASLSVGEGTGVRAPVRTATDDTKPKTTCASKDSWHGSTRKSSRGAVRTQRRRRSKSPV

SEQ ID NO: 724 - protein, 85 aa, Homo sapiens
LHPPKFIHCSTIASSSSSQLKHKSQTDSPDGSSGLGISSPKEFSAGESSTSLDANHTGAVVEPLRTSVPRLPSESKKEDSSDATQ

SEQ ID NO: 725 - protein, 85 aa, Homo sapiens
VPQASLKASDLSDFQSVSKLNQGKPCTCIGKECQCKRWHDMEVYSFSGLQSVPPLAPERRSTLEDYSQSLHARTLSGSPRSCSEQ

SEQ ID NO: 726 - protein, 84 aa, Homo sapiens
WHDMEVYSFSGLQSVPPLAPERRSTLEDYSQSLHARTLSGSPRSCSEQARVFVDDVTIEDLSGYMEYYLYIPKKMSHMAEMMYT

SEQ ID NO: 727 - protein, 85 aa, Homo sapiens
RTATDDTKPKTTCASKDSWHGSTRKSSRGAVRTQRRRRSKSPVLHPPKFIHCSTIASSSSSQLKHKSQTDSPDGSSGLGISSPKE

SEQ ID NO: 728 - protein, 85 aa, Homo sapiens
FSAGESSTSLDANHTGAVVEPLRTSVPRLPSESKKEDSSDATQVPQASLKASDLSDFQSVSKLNQGKPCTCIGKECQCKRWHDME

SEQ ID NO: 729 - protein, 85 aa, Homo sapiens
FKRMAEFGPDSGGRVKGVTIVKPIVYGNVARYFGKKREEDGHTHQWTVYVKPYRNEDMSAYVKKIQFKLHESYGNPLRVVTKPPY

SEQ ID NO: 730 - protein, 85 aa, Homo sapiens
EITETGWGEFEIIIKIFFIDPNERPVTLYHLLKLFQSDTNAMLGKKTVVSEFYDEMIFQDPTAMMQQLLTTSRQLTLGAYKHETE

SEQ ID NO: 731 - protein, 84 aa, Homo sapiens
FQDPTAMMQQLLTTSRQLTLGAYKHETEFAELEVKTREKLEAAKKKTSFEIAELKERLKASRETINCLKNEIRKLEEDDQAKDI

SEQ ID NO: 732 - protein, 85 aa, Homo sapiens
THQWTVYVKPYRNEDMSAYVKKIQFKLHESYGNPLRVVTKPPYEITETGWGEFEIIIKIFFIDPNERPVTLYHLLKLFQSDTNAM

SEQ ID NO: 733 - protein, 85 aa, Homo sapiens
MGKKTVVSEFYDEMIFQDPTAMMQQLLTTSRQLTLGAYKHETEFAELEVKTREKLEAAKKKTSFEIAELKERLKASRETINCLKN

SEQ ID NO: 734 - protein, 85 aa, Homo sapiens
SSMWSEYTIGGVKIYFPYKAYPSQLAMMNSILRGLNSKQHCLLESPTGSGKSLALLCSALAWQQSLSGKPADEGVSEKAEVQLSC

SEQ ID NO: 735 - protein, 85 aa, Homo sapiens
CCACHSKDFTNNDMNQGTSRHFNYPSTPPSERNGTSSTCQDSPEKTTLAAKLSAKKQASIYRDENDDFQVEKKRIRPLETTQQIR

SEQ ID NO: 736 - protein, 85 aa, Homo sapiens
KRHCFGTEVHNLDAKVDSGKTVKLNSPLEKINSFSPQKPPGHCSRCCCSTKQGNSQESSNTIKKDHTGKSKIPKIYFGTRTHKQI

SEQ ID NO: 737 - protein, 85 aa, Homo sapiens
AQITRELRRTAYSGVPMTILSSRDHTCVHPEVVGNFNRNEKCMELLDGKNGKSCYFYHGVHKISDQHTLQTFQGMCKAWDIEELV

SEQ ID NO: 738 - protein, 85 aa, Homo sapiens
SLGKKLKACPYYTARELIQDADIIFCPYNYLLDAQIRESMDLNLKEQVVILDEAHNIEDCARESASYSVTEVQLRFARDELDSMV

SEQ ID NO: 739 - protein, 85 aa, Homo sapiens
NNNIRKKDHEPLRAVCCSLINWLEANAEYLVERDYESACKIWSGNEMLLTLHKMGITTATFPILQGHFSAVLQKEEKISPIYGKE

SEQ ID NO: 740 - protein, 85 aa, Homo sapiens
EAREVPVISASTQIMLKGLFMVLDYLFRQNSRFADDYKIAIQQTYSWTNQIDISDKNGLLVLPKNKKRSRQKTAVHVLNFWCLNP

SEQ ID NO: 741 - protein, 85 aa, Homo sapiens
AVAFSDINGKVQTIVLTSGTLSPMKSFSSELGVTFTIQLEANHIIKNSQVWVGTIGSGPKGRNLCATFQNTETFEFQDEVGALLL

SEQ ID NO: 742 - protein, 85 aa, Homo sapiens
SVCQTVSQGILCFLPSYKLLEKLKERWLSTGLWHNLELVKTVIVEPQGGEKTNFDELLQVYYDAIKYKGEKDGALLVAVCRGKVS

SEQ ID NO: 743 - protein, 85 aa, Homo sapiens
EGLDFSDDNARAVITIGIPFPNVKDLQVELKRQYNDHHSKLRGLLPGRQWYEIQAYRALNQALGRCIRHRNDWGALILVDDRFRN

SEQ ID NO: 744 - protein, 85 aa, Homo sapiens
NPSRYISGLSKWVRQQIQHHSTFESALESLAEFSKKHQKVLNVSIKDRTNIQDNESTLEVTSLKYSTSPYLLEAASHLSPENFVE

SEQ ID NO: 745 - protein, 85 aa, Homo sapiens
DEAKICVQELQCPKIITKNSPLPSSIISRKEKNDPVFLEEAGKAEKIVISRSTSPTFNKQTKRVSWSSFNSLGQYFTGKIPKATP

SEQ ID NO: 746 - protein, 85 aa, Homo sapiens
ELGSSENSASSPPRFKTEKMESKTVLPFTDKCESSNLTVNTSFGSCPQSETIISSLKIDATLTRKNHSEHPLCSEEALDPDIELS

SEQ ID NO: 747 - protein, 85 aa, Homo sapiens
LVSEEDKQSTSNRDFETEAEDESIYFTPELYDPEDTDEEKNDLAETDRGNRLANNSDCILAKDLFEIRTIKEVDSAREVKAEDCI

SEQ ID NO: 748 - protein, 84 aa, Homo sapiens
LAKDLFEIRTIKEVDSAREVKAEDCIDTKLNGILHIEESKIDDIDGNVKTTWINELELGKTHEIEIKNFKPSPSKNKGMFPGFK

SEQ ID NO: 749 - protein, 85 aa, Homo sapiens
MESPTGSGKSLALLCSALAWQQSLSGKPADEGVSEKAEVQLSCCCACHSKDFTNNDMNQGTSRHFNYPSTPPSERNGTSSTCQDS

SEQ ID NO: 750 - protein, 85 aa, Homo sapiens
PEKTTLAAKLSAKKQASIYRDENDDFQVEKKRIRPLETTQQIRKRHCFGTEVHNLDAKVDSGKTVKLNSPLEKINSFSPQKPPGH

SEQ ID NO: 751 - protein, 85 aa, Homo sapiens
CSRCCCSTKQGNSQESSNTIKKDHTGKSKIPKIYFGTRTHKQIAQITRELRRTAYSGVPMTILSSRDHTCVHPEVVGNFNRNEKC

SEQ ID NO: 752 - protein, 85 aa, Homo sapiens
MELLDGKNGKSCYFYHGVHKISDQHTLQTFQGMCKAWDIEELVSLGKKLKACPYYTARELIQDADIIFCPYNYLLDAQIRESMDL

SEQ ID NO: 753 - protein, 85 aa, Homo sapiens
NLKEQVVILDEAHNIEDCARESASYSVTEVQLRFARDELDSMVNNNIRKKDHEPLRAVCCSLINWLEANAEYLVERDYESACKIW

SEQ ID NO: 754 - protein, 85 aa, Homo sapiens
SGNEMLLTLHKMGITTATFPILQGHFSAVLQKEEKISPIYGKEEAREVPVISASTQIMLKGLFMVLDYLFRQNSRFADDYKIAIQ

SEQ ID NO: 755 - protein, 85 aa, Homo sapiens
QTYSWTNQIDISDKNGLLVLPKNKKRSRQKTAVHVLNFWCLNPAVAFSDINGKVQTIVLTSGTLSPMKSFSSELGVTFTIQLEAN

SEQ ID NO: 756 - protein, 85 aa, Homo sapiens
HIIKNSQVWVGTIGSGPKGRNLCATFQNTETFEFQDEVGALLLSVCQTVSQGILCFLPSYKLLEKLKERWLSTGLWHNLELVKTV

SEQ ID NO: 757 - protein, 85 aa, Homo sapiens
IVEPQGGEKTNFDELLQVYYDAIKYKGEKDGALLVAVCRGKVSEGLDFSDDNARAVITIGIPFPNVKDLQVELKRQYNDHHSKLR

SEQ ID NO: 758 - protein, 85 aa, Homo sapiens
GLLPGRQWYEIQAYRALNQALGRCIRHRNDWGALILVDDRFRNNPSRYISGLSKWVRQQIQHHSTFESALESLAEFSKKHQKVLN

SEQ ID NO: 759 - protein, 85 aa, Homo sapiens
VSIKDRTNIQDNESTLEVTSLKYSTSPYLLEAASHLSPENFVEDEAKICVQELQCPKIITKNSPLPSSIISRKEKNDPVFLEEAG

SEQ ID NO: 760 - protein, 85 aa, Homo sapiens
KAEKIVISRSTSPTFNKQTKRVSWSSFNSLGQYFTGKIPKATPELGSSENSASSPPRFKTEKMESKTVLPFTDKCESSNLTVNTS

SEQ ID NO: 761 - protein, 85 aa, Homo sapiens
FGSCPQSETIISSLKIDATLTRKNHSEHPLCSEEALDPDIELSLVSEEDKQSTSNRDFETEAEDESIYFTPELYDPEDTDEEKND

SEQ ID NO: 762 - protein, 85 aa, Homo sapiens
LAETDRGNRLANNSDCILAKDLFEIRTIKEVDSAREVKAEDCIDTKLNGILHIEESKIDDIDGNVKTTWINELELGKTHEIEIKN

SEQ ID NO: 763 - protein, 85 aa, Homo sapiens
PVKKKRKSPGVAAAVAEDGGLKKCKISSYCRSQPPARLISGEEHFSSKKCLAWFYEYAGPDEVVGPEGMEKFCEDIGVEPENIIM

SEQ ID NO: 764 - protein, 85 aa, Homo sapiens
LVLAWKLEAESMGFFTKEEWLKGMTSLQCDCTEKLQNKFDFLRSQLNDISSFKNIYRYAFDFARDKDQRSLDIDTAKSMLALLLG

SEQ ID NO: 765 - protein, 84 aa, Homo sapiens
QRSLDIDTAKSMLALLLGRTWPLFSVFYQYLEQSKYRVMNKDQWYNVLEFSRTVHADLSNYDEDGAWPVLLDEFVEWQKVRQTS

SEQ ID NO: 766 - protein, 85 aa, Homo sapiens
EHFSSKKCLAWFYEYAGPDEVVGPEGMEKFCEDIGVEPENIIMLVLAWKLEAESMGFFTKEEWLKGMTSLQCDCTEKLQNKFDFL

SEQ ID NO: 767 - protein, 85 aa, Homo sapiens
RSQLNDISSFKNIYRYAFDFARDKDQRSLDIDTAKSMLALLLGRTWPLFSVFYQYLEQSKYRVMNKDQWYNVLEFSRTVHADLSN

SEQ ID NO: 768 - protein, 85 aa, Homo sapiens
AAEEEAAAGGKVLREENQCIAPVVSSRVSPGTRPTAMGSFSSHMTEFPRKRKGSDSDPSQEAHSQTEKRRRDKMNNLIEELSAMI

SEQ ID NO: 769 - protein, 85 aa, Homo sapiens
PQCNPMARKLDKLTVLRMAVQHLRSLKGLTNSYVGSNYRPSFLQDNELRHLILKTAEGFLFVVGCERGKILFVSKSVSKILNYDQ

SEQ ID NO: 770 - protein, 85 aa, Homo sapiens
ASLTGQSLFDFLHPKDVAKVKEQLSSFDISPREKLIDAKTGLQVHSNLHAGRTRVYSGSRRSFFCRIKSCKISVKEEHGCLPNSK

SEQ ID NO: 771 - protein, 85 aa, Homo sapiens
KKEHRKFYTIHCTGYLRSWPPNIVGMEEERNSKKDNSNFTCLVAIGRLQPYIVPQNSGEINVKPTEFITRFAVNGKFVYVDQRAT

SEQ ID NO: 772 - protein, 85 aa, Homo sapiens
AILGYLPQELLGTSCYEYFHQDDHNNLTDKHKAVLQSKEKILTDSYKFRAKDGSFVTLKSQWFSFTNPWTKELEYIVSVNTLVLG

SEQ ID NO: 773 - protein, 85 aa, Homo sapiens
HSEPGEASFLPCSSQSSEESSRQSCMSVPGMSTGTVLGAGSIGTDIANEILDLQRLQSSSYLDDSSPTGLMKDTHTVNCRSMSNK

SEQ ID NO: 774 - protein, 84 aa, Homo sapiens
CRSMSNKELFPPSPSEMGELEATRQNQSTVAVHSHEPLLSDGAQLDFDALCDNDDTAMAAFMNYLEAEGGLGDPGDFSDIQWTL

SEQ ID NO: 775 - protein, 85 aa, Homo sapiens
HMTEFPRKRKGSDSDPSQEAHSQTEKRRRDKMNNLIEELSAMIPQCNPMARKLDKLTVLRMAVQHLRSLKGLTNSYVGSNYRPSF

SEQ ID NO: 776 - protein, 85 aa, Homo sapiens
LQDNELRHLILKTAEGFLFVVGCERGKILFVSKSVSKILNYDQASLTGQSLFDFLHPKDVAKVKEQLSSFDISPREKLIDAKTGL

SEQ ID NO: 777 - protein, 85 aa, Homo sapiens
QVHSNLHAGRTRVYSGSRRSFFCRIKSCKISVKEEHGCLPNSKKKEHRKFYTIHCTGYLRSWPPNIVGMEEERNSKKDNSNFTCL

SEQ ID NO: 778 - protein, 85 aa, Homo sapiens
VAIGRLQPYIVPQNSGEINVKPTEFITRFAVNGKFVYVDQRATAILGYLPQELLGTSCYEYFHQDDHNNLTDKHKAVLQSKEKIL

SEQ ID NO: 779 - protein, 85 aa, Homo sapiens
TDSYKFRAKDGSFVTLKSQWFSFTNPWTKELEYIVSVNTLVLGHSEPGEASFLPCSSQSSEESSRQSCMSVPGMSTGTVLGAGSI

SEQ ID NO: 780 - protein, 85 aa, Homo sapiens
GTDIANEILDLQRLQSSSYLDDSSPTGLMKDTHTVNCRSMSNKELFPPSPSEMGELEATRQNQSTVAVHSHEPLLSDGAQLDFDA

SEQ ID NO: 781 - protein, 85 aa, Homo sapiens
ESEMETQSARAEEGFTQVTRKGGRRAKKRQAEQLSAAGEGGDAGRMDTEEARPAKRPVFPPLCGDGLLSGKEETRKIPVPANRYT

SEQ ID NO: 782 - protein, 85 aa, Homo sapiens
PLKENWMKIFTPIVEHLGLQIRFNLKSRNVEIRTCKETKDVSALTKAADFVKAFILGFQVEDALALIRLDDLFLESFEITDVKPL

SEQ ID NO: 783 - protein, 84 aa, Homo sapiens
KPLKGDHLSRAIGRIAGKGGKTKFTIENVTRTRIVLADVKVHILGSFQNIKMARTAICNLILGNPPSKVYGNIRAVASRSADRF

SEQ ID NO: 784 - protein, 85 aa, Homo sapiens
AGRMDTEEARPAKRPVFPPLCGDGLLSGKEETRKIPVPANRYTPLKENWMKIFTPIVEHLGLQIRFNLKSRNVEIRTCKETKDVS

SEQ ID NO: 785 - protein, 85 aa, Homo sapiens
ALTKAADFVKAFILGFQVEDALALIRLDDLFLESFEITDVKPLKGDHLSRAIGRIAGKGGKTKFTIENVTRTRIVLADVKVHILG

SEQ ID NO: 786 - protein, 85 aa, Homo sapiens
SCVLGGVIPLGLLFLVCGSQGYLLPNVTLLEELLSKYQHNESHSRVRRAIPREDKEEILMLHNKLRGQVQPQASNMEYMTWDDEL

SEQ ID NO: 787 - protein, 85 aa, Homo sapiens
EKSAAAWASQCIWEHGPTSLLVSIGQNLGAHWGRYRSPGFHVQSWYDEVKDYTYPYPSECNPWCPERCSGPMCTHYTQIVWATTN

SEQ ID NO: 788 - protein, 85 aa, Homo sapiens
KIGCAVNTCRKMTVWGEVWENAVYFVCNYSPKGNWIGEAPYKNGRPCSECPPSYGGSCRNNLCYREETYTPKPETDEMNEVETAP

SEQ ID NO: 789 - protein, 85 aa, Homo sapiens
IPEENHVWLQPRVMRPTKPKKTSAVNYMTQVVRCDTKMKDRCKGSTCNRYQCPAGCLNHKAKIFGTLFYESSSSICRAAIHYGIL

SEQ ID NO: 790 - protein, 85 aa, Homo sapiens
DDKGGLVDITRNGKVPFFVKSERHGVQSLSKYKPSSSFMVSKVKVQDLDCYTTVAQLCPFEKPATHCPRIHCPAHCKDEPSYWAP

SEQ ID NO: 791 - protein, 84 aa, Homo sapiens
PAHCKDEPSYWAPVFGTNIYADTSSICKTAVHAGVISNESGGDVDVMPVDKKKTYVGSLRNGVQSESLGTPRDGKAFRIFAVRQ

SEQ ID NO: 792 - protein, 85 aa, Homo sapiens
HSRVRRAIPREDKEEILMLHNKLRGQVQPQASNMEYMTWDDELEKSAAAWASQCIWEHGPTSLLVSIGQNLGAHWGRYRSPGFHV

SEQ ID NO: 793 - protein, 85 aa, Homo sapiens
QSWYDEVKDYTYPYPSECNPWCPERCSGPMCTHYTQIVWATTNKIGCAVNTCRKMTVWGEVWENAVYFVCNYSPKGNWIGEAPYK

SEQ ID NO: 794 - protein, 85 aa, Homo sapiens
NGRPCSECPPSYGGSCRNNLCYREETYTPKPETDEMNEVETAPIPEENHVWLQPRVMRPTKPKKTSAVNYMTQVVRCDTKMKDRC

SEQ ID NO: 795 - protein, 85 aa, Homo sapiens
KGSTCNRYQCPAGCLNHKAKIFGTLFYESSSSICRAAIHYGILDDKGGLVDITRNGKVPFFVKSERHGVQSLSKYKPSSSFMVSK

SEQ ID NO: 796 - protein, 85 aa, Homo sapiens
VKVQDLDCYTTVAQLCPFEKPATHCPRIHCPAHCKDEPSYWAPVFGTNIYADTSSICKTAVHAGVISNESGGDVDVMPVDKKKTY

SEQ ID NO: 797 - protein, 85 aa, Homo sapiens
RRAELAGLKTMAWVPAESAVEELMPRLLPVEPCDLTEGFDPSVPPRTPQEYLRRVQIEAAQCPDVVVAQIDPKKLKRKQSVNISL

SEQ ID NO: 798 - protein, 85 aa, Homo sapiens
SGCQPAPEGYSPTLQWQQQQVAQFSTVRQNVNKHRSHWKSQQLDSNVTMPKSEDEEGWKKFCLGEKLCADGAVGPATNESPGIDY

SEQ ID NO: 799 - protein, 85 aa, Homo sapiens
VQATVTSVLEYLSNWFGERDFTPELGRWLYALLACLEKPLLPEAHSLIRQLARRCSEVRLLVDSKDDERVPALNLLICLVSRYFD

SEQ ID NO: 800 - protein, 84 aa, Homo sapiens
YLSNWFGERDFTPELGRWLYALLACLEKPLLPEAHSLIRQLARRCSEVRLLVDSKDDERVPALNLLICLVSRYFDQRDLADEPS

SEQ ID NO: 801 - protein, 85 aa, Homo sapiens
VPPRTPQEYLRRVQIEAAQCPDVVVAQIDPKKLKRKQSVNISLSGCQPAPEGYSPTLQWQQQQVAQFSTVRQNVNKHRSHWKSQQ

SEQ ID NO: 802 - protein, 85 aa, Homo sapiens
MDSNVTMPKSEDEEGWKKFCLGEKLCADGAVGPATNESPGIDYVQATVTSVLEYLSNWFGERDFTPELGRWLYALLACLEKPLLP

SEQ ID NO: 803 - protein, 8 aa, Homo sapiens
LCHPSGPD

SEQ ID NO: 804 - protein, 8 aa, Homo sapiens
ISIHRRMF

SEQ ID NO: 805 - protein, 84 aa, Homo sapiens
LLHKLSVRAADGPQKLLKVIKNPVSDHFPVGCMKVGTSFSIPVVSDVRELVPSSDPIVFVVGAFAHGKRCDLLCCPDLSAVAQS

SEQ ID NO: 806 - protein, 8 aa, Homo sapiens
VTSTSLYC

SEQ ID NO: 807 - protein, 85 aa, Homo sapiens
RIEKCYFCSGPIYPGHGMMFVRNDCKVFRFCKSKCHKNFKKKRNPRKVRWTKAFRKAAGKELTVDNSFEFEKRRNEPIKYQRELW

SEQ ID NO: 808 - protein, 84 aa, Homo sapiens
KYQRELWNKTIDAMKRVEEIKQKRQAKFIMNRLKKNKELQKVQDIKEVKQNIHLIRAPLAGKGKQLEEKMVQQLQEDVDMEDAP

SEQ ID NO: 809 - protein, 85 aa, Homo sapiens
RNPRKVRWTKAFRKAAGKELTVDNSFEFEKRRNEPIKYQRELWNKTIDAMKRVEEIKQKRQAKFIMNRLKKNKELQKVQDIKEVK

SEQ ID NO: 810 - protein, 85 aa, Homo sapiens
RVAALISGGKDSCYNMMQCIAAGHQIVALANLRPAENQVGSDELDSYMYQTVGHHAIDLYAEAMALPLYRRTIRGRSLDTRQVYT

SEQ ID NO: 811 - protein, 85 aa, Homo sapiens
KCEGDEVEDLYELLKLVKEKEEVEGISVGAILSDYQRIRVENVCKRLNLQPLAYLWQRNQEDLLREMISSNIQAMIIKVAALGLD

SEQ ID NO: 812 - protein, 85 aa, Homo sapiens
PDKHLGKTLDQMEPYLIELSKKYGVHVCGEGGEYETFTLDCPLFKKKIIVDSSEVVIHSADAFAPVAYLRFLELHLEDKVSSVPD

SEQ ID NO: 813 - protein, 84 aa, Homo sapiens
EPYLIELSKKYGVHVCGEGGEYETFTLDCPLFKKKIIVDSSEVVIHSADAFAPVAYLRFLELHLEDKVSSVPDNYRTSNYIYNF

SEQ ID NO: 814 - protein, 85 aa, Homo sapiens
ELDSYMYQTVGHHAIDLYAEAMALPLYRRTIRGRSLDTRQVYTKCEGDEVEDLYELLKLVKEKEEVEGISVGAILSDYQRIRVEN

SEQ ID NO: 815 - protein, 85 aa, Homo sapiens
VCKRLNLQPLAYLWQRNQEDLLREMISSNIQAMIIKVAALGLDPDKHLGKTLDQMEPYLIELSKKYGVHVCGEGGEYETFTLDCP

SEQ ID NO: 816 - protein, 85 aa, Homo sapiens
TRWARVSTTYNKRPLPATSWEDMKKGSFEGTSQNLPKRKQLEANRLSLKNDAPQAKHKKNKKKKEYLNEDVNGFMEYLRQNSQMV

SEQ ID NO: 817 - protein, 85 aa, Homo sapiens
HNGQIIATDSEEVREEIAVALKKDSRREGRRLKRQAAKKNAMVCFHCRKPGHGIADCPAALENQDMGTGICYRCGSTEHEITKCK

SEQ ID NO: 818 - protein, 85 aa, Homo sapiens
AKVDPALGEFPFAKCFVCGEMGHLSRSCPDNPKGLYADGGGCKLCGSVEHLKKDCPESQNSERMVTVGRWAKGMSADYEEILDVP

SEQ ID NO: 819 - protein, 84 aa, Homo sapiens
VCGEMGHLSRSCPDNPKGLYADGGGCKLCGSVEHLKKDCPESQNSERMVTVGRWAKGMSADYEEILDVPKPQKPKTKIPKVVNF

SEQ ID NO: 820 - protein, 85 aa, Homo sapiens
ANRLSLKNDAPQAKHKKNKKKKEYLNEDVNGFMEYLRQNSQMVHNGQIIATDSEEVREEIAVALKKDSRREGRRLKRQAAKKNAM

SEQ ID NO: 821 - protein, 85 aa, Homo sapiens
VCFHCRKPGHGIADCPAALENQDMGTGICYRCGSTEHEITKCKAKVDPALGEFPFAKCFVCGEMGHLSRSCPDNPKGLYADGGGC

SEQ ID NO: 822 - protein, 85 aa, Homo sapiens
DLEEAEEFKERCTQCAAVSWGLTDEGKYYCTSCHNVTERYQEVTNTDLIPNTQIKALNRGLKKKNNTEKGWDWYVCEGFQYILYQ

SEQ ID NO: 823 - protein, 85 aa, Homo sapiens
QAEALKNLGVGPELKNDVLHNFWKRYLQKSKQAYCKNPVYTTGRKPTVLEDNLSHSDWASEPELLSDVSCPPFLESGAESQSDIH

SEQ ID NO: 824 - protein, 85 aa, Homo sapiens
TRKPFPVSKASQSETSVCSGSLDGVEYSQRKEKGIVKMTMPQTLAFCYLSLLWQREAITLSDLLRFVEEDHIPYINAFQHFPEQM

SEQ ID NO: 825 - protein, 85 aa, Homo sapiens
KLYGRDRGIFGIESWPDYEDIYKKTVEVGTFLDLPRFPDITEDCYLHPNILCMKYLMEVNLPDEMHSLTCHVVKMTGMGEVDFLT

SEQ ID NO: 826 - protein, 85 aa, Homo sapiens
FDPIAKMAKTVKYDVQAVAIIVVVLKLLFLLDDSFEWSLSNLAEKHNEKNKKDKPWFDFRKWYQIMKKAFDEKKQKWEEARAKYL

SEQ ID NO: 827 - protein, 85 aa, Homo sapiens
WKSEKPLYYSFVDKPVAYKKREMVVNLQKQFSTLVESTATAGKKSPSSFQFNWTEEDTDRTCFHGHSLQGVLKEKGQSLLTKNSL

SEQ ID NO: 828 - protein, 84 aa, Homo sapiens
MLTKNSLYWLSTQKFCRCYCTHVTTYEESNYSLSYQFILNLFSFLLRIKTSLLHEEVSLVEKKLFEKKYSVKRKKSRSKKVRRH

SEQ ID NO: 829 - protein, 85 aa, Homo sapiens
VTNTDLIPNTQIKALNRGLKKKNNTEKGWDWYVCEGFQYILYQQAEALKNLGVGPELKNDVLHNFWKRYLQKSKQAYCKNPVYTT

SEQ ID NO: 830 - protein, 85 aa, Homo sapiens
GRKPTVLEDNLSHSDWASEPELLSDVSCPPFLESGAESQSDIHTRKPFPVSKASQSETSVCSGSLDGVEYSQRKEKGIVKMTMPQ

SEQ ID NO: 831 - protein, 85 aa, Homo sapiens
TLAFCYLSLLWQREAITLSDLLRFVEEDHIPYINAFQHFPEQMKLYGRDRGIFGIESWPDYEDIYKKTVEVGTFLDLPRFPDITE

SEQ ID NO: 832 - protein, 85 aa, Homo sapiens
DCYLHPNILCMKYLMEVNLPDEMHSLTCHVVKMTGMGEVDFLTFDPIAKMAKTVKYDVQAVAIIVVVLKLLFLLDDSFEWSLSNL

SEQ ID NO: 833 - protein, 85 aa, Homo sapiens
AEKHNEKNKKDKPWFDFRKWYQIMKKAFDEKKQKWEEARAKYLWKSEKPLYYSFVDKPVAYKKREMVVNLQKQFSTLVESTATAG

SEQ ID NO: 834 - protein, 85 aa, Homo sapiens
KKSPSSFQFNWTEEDTDRTCFHGHSLQGVLKEKGQSLLTKNSLYWLSTQKFCRCYCTHVTTYEESNYSLSYQFILNLFSFLLRIK

SEQ ID NO: 835 - protein, 85 aa, Homo sapiens
DYLAPYAKYKVWIKPGAEQSFLYGNHVLKSGLGRITENTSQYQGVVVYSMADIPLGFGVAAKSTQDCRKVDPMAIVVFHQADIGE

SEQ ID NO: 836 - protein, 84 aa, Homo sapiens
VWIKPGAEQSFLYGNHVLKSGLGRITENTSQYQGVVVYSMADIPLGFGVAAKSTQDCRKVDPMAIVVFHQADIGEYVRHEETLT

SEQ ID NO: 837 - protein, 85 aa, Homo sapiens
VYYVSEKIMKLAANISGDKLVSLGTCFGKFTKTHKFRLHVTALDYLAPYAKYKVWIKPGAEQSFLYGNHVLKSGLGRITENTSQY

SEQ ID NO: 838 - protein, 85 aa, Homo sapiens
VLWILWRPFGFSGRFLKLESHSITESKSLIPVAWTSLTQMLLEAPGIFLLGQRKRFSTMPETETHERETELFSPPSDVRGMTKLD

SEQ ID NO: 839 - protein, 85 aa, Homo sapiens
RTAFKKTVNIPVLKVRKEIVSKLMRSLKRAALQRPGIRRVIEDPEDKESRLIMLDPYKIFTHDSFEKAELSVLEQLNVSPQISKY

SEQ ID NO: 840 - protein, 85 aa, Homo sapiens
NLELTYEHFKSEEILRAVLPEGQDVTSGFSRIGHIAHLNLRDHQLPFKHLIGQVMIDKNPGITSAVNKINNIDNMYRNFQMEVLS

SEQ ID NO: 841 - protein, 85 aa, Homo sapiens
GEQNMMTKVRENNYTYEFDFSKVYWNPRLSTEHSRITELLKPGDVLFDVFAGVGPFAIPVAKKNCTVFANDLNPESHKWLLYNCK

SEQ ID NO: 842 - protein, 85 aa, Homo sapiens
LNKVDQKVKVFNLDGKDFLQGPVKEELMQLLGLSKERKPSVHVVMNLPAKAIEFLSAFKWLLDGQPCSSEFLPIVHCYSFSKDAN

SEQ ID NO: 843 - protein, 84 aa, Homo sapiens
NPAEDVRQRAGAVLGISLEACSSVHLVRNVAPNKEMLCITFQIPASVLYKNQTRNPENHEDPPLKRQRTAEAFSDEKTQIVSNT

SEQ ID NO: 844 - protein, 85 aa, Homo sapiens
EAPGIFLLGQRKRFSTMPETETHERETELFSPPSDVRGMTKLDRTAFKKTVNIPVLKVRKEIVSKLMRSLKRAALQRPGIRRVIE

SEQ ID NO: 845 - protein, 85 aa, Homo sapiens
DPEDKESRLIMLDPYKIFTHDSFEKAELSVLEQLNVSPQISKYNLELTYEHFKSEEILRAVLPEGQDVTSGFSRIGHIAHLNLRD

SEQ ID NO: 846 - protein, 85 aa, Homo sapiens
HQLPFKHLIGQVMIDKNPGITSAVNKINNIDNMYRNFQMEVLSGEQNMMTKVRENNYTYEFDFSKVYWNPRLSTEHSRITELLKP

SEQ ID NO: 847 - protein, 85 aa, Homo sapiens
GDVLFDVFAGVGPFAIPVAKKNCTVFANDLNPESHKWLLYNCKLNKVDQKVKVFNLDGKDFLQGPVKEELMQLLGLSKERKPSVH

SEQ ID NO: 848 - protein, 85 aa, Homo sapiens
VVMNLPAKAIEFLSAFKWLLDGQPCSSEFLPIVHCYSFSKDANPAEDVRQRAGAVLGISLEACSSVHLVRNVAPNKEMLCITFQI

SEQ ID NO: 849 - protein, 5 aa, Homo sapiens
ISPMS

SEQ ID NO: 850 - protein, 39 aa, Homo sapiens
SVIALMVIHFWPFRHLLVHNWRYPFQKWVRMDKRNTRSI

SEQ ID NO: 851 - protein, 84 aa, Homo sapiens
INKESSSSKPVVFPVPPPDDLTQPSSQSLTPVTPQKSSMATQNLPEQHVSERSQALQQTSATDISSAGSISGDIIDELMSSDGK

SEQ ID NO: 852 - protein, 5 aa, Homo sapiens
MKLKI

SEQ ID NO: 853 - protein, 9 aa, Homo sapiens
IQDLSMCCL

SEQ ID NO: 854 - protein, 85 aa, Homo sapiens
AQQQMTSSQKALMLELKSLQEEPVEGFRITLVDESDLYNWEVAIFGPPNTLYEGGYFKAHIKFPIDYPYSPPTFRFLTKMWHPNI

SEQ ID NO: 855 - protein, 85 aa, Homo sapiens
YENGDVCISILHPPVDDPQSGELPSERWNPTQNVRTILLSVISLLNEPNTFSPANVDASVMFRKWRDSKGKDKEYAEIIRKQVSA

SEQ ID NO: 856 - protein, 84 aa, Homo sapiens
KGKDKEYAEIIRKQVSATKAEAEKDGVKVPTTLAEYCIKTKVPSNDNSSDLLYDDLYDDDIDDEDEEEEDADCYDDDDSGNEES

SEQ ID NO: 857 - protein, 85 aa, Homo sapiens
AIFGPPNTLYEGGYFKAHIKFPIDYPYSPPTFRFLTKMWHPNIYENGDVCISILHPPVDDPQSGELPSERWNPTQNVRTILLSVI

SEQ ID NO: 858 - protein, 85 aa, Homo sapiens
SLLNEPNTFSPANVDASVMFRKWRDSKGKDKEYAEIIRKQVSATKAEAEKDGVKVPTTLAEYCIKTKVPSNDNSSDLLYDDLYDD

SEQ ID NO: 859 - protein, 85 aa, Homo sapiens
IIPSLEELDSLKYSDLQNLAKSLGLRANLRATKLLKALKGYIKHEARKGNENQDESQTSASSCDETEIQISNQEEAERQPLGHVT

SEQ ID NO: 860 - protein, 85 aa, Homo sapiens
KTRRRCKTVRVDPDSQNHEKQESQDLRATAKVPSPPDEHQEAENAVSSGNRDSKVPSEGKKSLYTDESSKPGKNKRTAITTPNFK

SEQ ID NO: 861 - protein, 85 aa, Homo sapiens
KLHEAHFKEMESIDQYIERKKKHFEEHNSMNELKQQPINKGGVRTPVPPRGRLSVASTPISQRRSQGRSCGPASQSTLGLKGSLK

SEQ ID NO: 862 - protein, 85 aa, Homo sapiens
RSAISAAKTGVRFSAATKDNEHKRSLTKTPARKSAHVTVSGGTPKGEAVLGTHKLKTITGNSAAVITPFKLTTEATQTPVSNKKP

SEQ ID NO: 863 - protein, 85 aa, Homo sapiens
VFDLKASLSRPLNYEPHKGKLKPWGQSKENNYLNQHVNRINFYKKTYKQPHLQTKEEQRKKREQERKEKKAKVLGMRRGLILAED

SEQ ID NO: 864 - protein, 84 aa, Homo sapiens
FDLKASLSRPLNYEPHKGKLKPWGQSKENNYLNQHVNRINFYKKTYKQPHLQTKEEQRKKREQERKEKKAKVLGMRRGLILAED

SEQ ID NO: 865 - protein, 85 aa, Homo sapiens
KHEARKGNENQDESQTSASSCDETEIQISNQEEAERQPLGHVTKTRRRCKTVRVDPDSQNHEKQESQDLRATAKVPSPPDEHQEA

SEQ ID NO: 866 - protein, 85 aa, Homo sapiens
ENAVSSGNRDSKVPSEGKKSLYTDESSKPGKNKRTAITTPNFKKLHEAHFKEMESIDQYIERKKKHFEEHNSMNELKQQPINKGG

SEQ ID NO: 867 - protein, 85 aa, Homo sapiens
VRTPVPPRGRLSVASTPISQRRSQGRSCGPASQSTLGLKGSLKRSAISAAKTGVRFSAATKDNEHKRSLTKTPARKSAHVTVSGG

SEQ ID NO: 868 - protein, 85 aa, Homo sapiens
TPKGEAVLGTHKLKTITGNSAAVITPFKLTTEATQTPVSNKKPVFDLKASLSRPLNYEPHKGKLKPWGQSKENNYLNQHVNRINF

SEQ ID NO: 869 - protein, 85 aa, Homo sapiens
VLLESEQFLTELTRLFQKCRTSGSVYITLKKYDGRTKPIPKKGTVEGFEPADNKCLLRATDGKKKISTVVSSKEVNKFQMAYSNL

SEQ ID NO: 870 - protein, 84 aa, Homo sapiens
DNKCLLRATDGKKKISTVVSSKEVNKFQMAYSNLLRANMDGLKKRDKKNKTKKTKAAAAAAAAAPAAAATAPTTAATTAATAAQ

SEQ ID NO: 871 - protein, 85 aa, Homo sapiens
GTVEGFEPADNKCLLRATDGKKKISTVVSSKEVNKFQMAYSNLLRANMDGLKKRDKKNKTKKTKAAAAAAAAAPAAAATAPTTAA

SEQ ID NO: 872 - protein, 85 aa, Homo sapiens
GLEAARELECAALGTLLRDPREAERTLLLDCRPFLAFCRRHVRAARPVPWNALLRRRARGPPAAVLACLLPDRALRTRLVRGELA

SEQ ID NO: 873 - protein, 85 aa, Homo sapiens
RAVVLDEGSASVAELRPDSPAHVLLAALLHETRAGPTAVYFLRGGFDGFQGCCPDLCSEAPAPALPPTGDKTSRSDSRAPVYDQG

SEQ ID NO: 874 - protein, 85 aa, Homo sapiens
GPVEILPYLFLGSCSHSSDLQGLQACGITAVLNVSASCPNHFEGLFRYKSIPVEDNQMVEISAWFQEAIGFIDWVKNSGGRVLVH

SEQ ID NO: 875 - protein, 84 aa, Homo sapiens
EISAWFQEAIGFIDWVKNSGGRVLVHCQAGISRSATICLAYLMQSRRVRLDEAFDFVKQRRGVISPNFSFMGQLLQFETQVLCH

SEQ ID NO: 876 - protein, 85 aa, Homo sapiens
RAARPVPWNALLRRRARGPPAAVLACLLPDRALRTRLVRGELARAVVLDEGSASVAELRPDSPAHVLLAALLHETRAGPTAVYFL

SEQ ID NO: 877 - protein, 85 aa, Homo sapiens
RGGFDGFQGCCPDLCSEAPAPALPPTGDKTSRSDSRAPVYDQGGPVEILPYLFLGSCSHSSDLQGLQACGITAVLNVSASCPNHF

SEQ ID NO: 878 - protein, 85 aa, Homo sapiens
EGLFRYKSIPVEDNQMVEISAWFQEAIGFIDWVKNSGGRVLVHCQAGISRSATICLAYLMQSRRVRLDEAFDFVKQRRGVISPNF

SEQ ID NO: 879 - protein, 85 aa, Homo sapiens
CAASASPDNLVFHMKNEMRNIKYKPVDYQQLRALTEAKKLASASAKLKIRKAMLTSKLSKEQTLIKQHKQVWWQEYQRLNEVRCK

SEQ ID NO: 880 - protein, 85 aa, Homo sapiens
MESEIKSLLNEENIGNECLCDLTNFEQELSEQQCTYLKNVINPIQQLRADLKYRQHHTLQHSHPHIEFNSMKVLEEVDFVKKQLK

SEQ ID NO: 881 - protein, 85 aa, Homo sapiens
TVFERLRLEQQRIENDLSDWSIKILDHSLEEKTNPLSELPIELESLECPYPDLKSSILSEFYKFTQKYQKKLQDFNLQLEDIYRN

SEQ ID NO: 882 - protein, 85 aa, Homo sapiens
CQLSEEDHWIYQAILDQYPGDLFGRRTLYLDMLQRYFPHKSRHDLVEHEKYCDQYRFAIEQQNILISNWNKNKKDFIQKAVLTLT

SEQ ID NO: 883 - protein, 85 aa, Homo sapiens
EACATHEMESMLAKDKKKQQELCADLKAKVRQWRAHQEEVARLEMEISARRREKEEEKEKLWKKKELLQRAEKKKKIKKYWAKKK

SEQ ID NO: 884 - protein, 85 aa, Homo sapiens
QKWQEMEMRDLQRLEELKKLIAEQSLKDRERVKYRQELLERRLMEKKEVALQEAHEDKERARRLEALRKQVAVVAQFDPVRMMSD

SEQ ID NO: 885 - protein, 84 aa, Homo sapiens
MMSDTMASKARMGIEIEEEFILQKPLFTLNTYNEQQIISDPRLRFELALREAGLHRTLYAKEILPKISPQKPPRKDMESTVFKI

SEQ ID NO: 886 - protein, 85 aa, Homo sapiens
ASAKLKIRKAMLTSKLSKEQTLIKQHKQVWWQEYQRLNEVRCKMESEIKSLLNEENIGNECLCDLTNFEQELSEQQCTYLKNVIN

SEQ ID NO: 887 - protein, 85 aa, Homo sapiens
PIQQLRADLKYRQHHTLQHSHPHIEFNSMKVLEEVDFVKKQLKTVFERLRLEQQRIENDLSDWSIKILDHSLEEKTNPLSELPIE

SEQ ID NO: 888 - protein, 85 aa, Homo sapiens
LESLECPYPDLKSSILSEFYKFTQKYQKKLQDFNLQLEDIYRNCQLSEEDHWIYQAILDQYPGDLFGRRTLYLDMLQRYFPHKSR

SEQ ID NO: 889 - protein, 85 aa, Homo sapiens
HDLVEHEKYCDQYRFAIEQQNILISNWNKNKKDFIQKAVLTLTEACATHEMESMLAKDKKKQQELCADLKAKVRQWRAHQEEVAR

SEQ ID NO: 890 - protein, 85 aa, Homo sapiens
MEMEISARRREKEEEKEKLWKKKELLQRAEKKKKIKKYWAKKKQKWQEMEMRDLQRLEELKKLIAEQSLKDRERVKYRQELLERR

SEQ ID NO: 891 - protein, 85 aa, Homo sapiens
MMEKKEVALQEAHEDKERARRLEALRKQVAVVAQFDPVRMMSDTMASKARMGIEIEEEFILQKPLFTLNTYNEQQIISDPRLRFE

SEQ ID NO: 892 - protein, 85 aa, Homo sapiens
ASWLPETLFETVGQGPPPSKDYYQLLVTRSQVIFRWWKISLRSEYRSTKPGEAKETHEDFLENSHLQGQTALIFGARILDYVINL

SEQ ID NO: 893 - protein, 85 aa, Homo sapiens
CKGKFDFLERLSDDLLLTIISYLDLEDIARLCQTSHRFAKLCMSDKLWEQIVQSTCDTITPDVRALAEDTGWRQLFFTNKLQLQR

SEQ ID NO: 894 - protein, 84 aa, Homo sapiens
IISYLDLEDIARLCQTSHRFAKLCMSDKLWEQIVQSTCDTITPDVRALAEDTGWRQLFFTNKLQLQRQLRKRKQKYGNLREKQP

SEQ ID NO: 895 - protein, 85 aa, Homo sapiens
SEYRSTKPGEAKETHEDFLENSHLQGQTALIFGARILDYVINLCKGKFDFLERLSDDLLLTIISYLDLEDIARLCQTSHRFAKLC

SEQ ID NO: 896 - protein, 85 aa, Homo sapiens
AEDVSSAAPSPRGCADGRDADPTEEQMAETERNDEEQFECQELLECQVQVGAPEEEEEEEEDAGLVAEAEAVAAGWMLDFLCLSL

SEQ ID NO: 897 - protein, 85 aa, Homo sapiens
CRAFRDGRSEDFRRTRNSAEAIIHGLSSLTACQLRTIYICQFLTRIAAGKTLDAQFENDERITPLESALMIWGSIEKEHDKLHEE

SEQ ID NO: 898 - protein, 85 aa, Homo sapiens
IQNLIKIQAIAVCMENGNFKEAEEVFERIFGDPNSHMPFKSKLLMIISQKDTFHSFFQHFSYNHMMEKIKSYVNYVLSEKSSTFL

SEQ ID NO: 899 - protein, 85 aa, Homo sapiens
MKAAAKVVESKRTRTITSQDKPSGNDVEMETEANLDTRKSVSDKQSAVTESSEGTVSLLRSHKNLFLSKLQHGTQQQDLNKKERR

SEQ ID NO: 900 - protein, 85 aa, Homo sapiens
VGTPQSTKKKKESRRATESRIPVSKSQPVTPEKHRARKRQAWLWEEDKNLRSGVRKYGEGNWSKILLHYKFNNRTSVMLKDRWRT

SEQ ID NO: 901 - protein, 84 aa, Homo sapiens
RATESRIPVSKSQPVTPEKHRARKRQAWLWEEDKNLRSGVRKYGEGNWSKILLHYKFNNRTSVMLKDRWRTMKKLKLISSDSED

SEQ ID NO: 902 - protein, 85 aa, Homo sapiens
MLECQVQVGAPEEEEEEEEDAGLVAEAEAVAAGWMLDFLCLSLCRAFRDGRSEDFRRTRNSAEAIIHGLSSLTACQLRTIYICQF

SEQ ID NO: 903 - protein, 85 aa, Homo sapiens
MTRIAAGKTLDAQFENDERITPLESALMIWGSIEKEHDKLHEEIQNLIKIQAIAVCMENGNFKEAEEVFERIFGDPNSHMPFKSK

SEQ ID NO: 904 - protein, 85 aa, Homo sapiens
MLMIISQKDTFHSFFQHFSYNHMMEKIKSYVNYVLSEKSSTFLMKAAAKVVESKRTRTITSQDKPSGNDVEMETEANLDTRKSVS

SEQ ID NO: 905 - protein, 85 aa, Homo sapiens
DKQSAVTESSEGTVSLLRSHKNLFLSKLQHGTQQQDLNKKERRVGTPQSTKKKKESRRATESRIPVSKSQPVTPEKHRARKRQAW

SEQ ID NO: 906 - protein, 85 aa, Homo sapiens
QSCESSGDSADDPLSRGLRRRGQPRVVVIGAGLAGLAAAKALLEQGFTDVTVLEASSHIGGRVQSVKLGHATFELGATWIHGSHG

SEQ ID NO: 907 - protein, 85 aa, Homo sapiens
NPIYHLAEANGLLEETTDGERSVGRISLYSKNGVACYLTNHGRRIPKDVVEEFSDLYNEVYNLTQEFFRHDKPVNAESQNSVGVF

SEQ ID NO: 908 - protein, 85 aa, Homo sapiens
TREEVRNRIRNDPDDPEATKRLKLAMIQQYLKVESCESSSHSMDEVSLSAFGEWTEIPGAHHIIPSGFMRVVELLAEGIPAHVIQ

SEQ ID NO: 909 - protein, 85 aa, Homo sapiens
LGKPVRCIHWDQASARPRGPEIEPRGVLKRQYTSFFRPGLPTEKVAAIHRLGIGTTDKIFLEFEEPFWGPECNSLQFVWEDEAES

SEQ ID NO: 910 - protein, 85 aa, Homo sapiens
HTLTYPPELWYRKICGFDVLYPPERYGHVLSGWICGEEALVMEKCDDEAVAEICTEMLRQFTGNPNIPKPRRILRSAWGSNPYFR

SEQ ID NO: 911 - protein, 85 aa, Homo sapiens
GSYSYTQVGSSGADVEKLAKPLPYTESSKTAHGSSTKQQPGHLFSSKCPEQPLDANRGAVKPMQVLFSGEATHRKYYSTTHGALL

SEQ ID NO: 912 - protein, 84 aa, Homo sapiens
PYTESSKTAHGSSTKQQPGHLFSSKCPEQPLDANRGAVKPMQVLFSGEATHRKYYSTTHGALLSGQREAARLIEMYRDLFQQGT

SEQ ID NO: 913 - protein, 85 aa, Homo sapiens
LEQGFTDVTVLEASSHIGGRVQSVKLGHATFELGATWIHGSHGNPIYHLAEANGLLEETTDGERSVGRISLYSKNGVACYLTNHG

SEQ ID NO: 914 - protein, 85 aa, Homo sapiens
RRIPKDVVEEFSDLYNEVYNLTQEFFRHDKPVNAESQNSVGVFTREEVRNRIRNDPDDPEATKRLKLAMIQQYLKVESCESSSHS

SEQ ID NO: 915 - protein, 85 aa, Homo sapiens
MDEVSLSAFGEWTEIPGAHHIIPSGFMRVVELLAEGIPAHVIQLGKPVRCIHWDQASARPRGPEIEPRGVLKRQYTSFFRPGLPT

SEQ ID NO: 916 - protein, 85 aa, Homo sapiens
EKVAAIHRLGIGTTDKIFLEFEEPFWGPECNSLQFVWEDEAESHTLTYPPELWYRKICGFDVLYPPERYGHVLSGWICGEEALVM

SEQ ID NO: 917 - protein, 85 aa, Homo sapiens
EKCDDEAVAEICTEMLRQFTGNPNIPKPRRILRSAWGSNPYFRGSYSYTQVGSSGADVEKLAKPLPYTESSKTAHGSSTKQQPGH

SEQ ID NO: 918 - protein, 85 aa, Homo sapiens
AAAAAAAVGGQQPSQPELPAPGLALDKAATAAHLKAALSRPDNRAGAEELQALLERVLSAERPLAAAAGGEDAAAAGGGGGPGAA

SEQ ID NO: 919 - protein, 85 aa, Homo sapiens
EEEALEWCKCLLAGGGGYDEFCAAVRAYDPAALCGLVWTANFVAYRCRTCGISPCMSLCAECFHQGDHTGHDFNMFRSQAGGACD

SEQ ID NO: 920 - protein, 85 aa, Homo sapiens
CGDSNVMRESGFCKRHQIKSSSNIPCVPKDLLMMSEFVLPRFIFCLIQYLREGYNEPAADGPSEKDLNKVLQLLEPQISFLEDLT

SEQ ID NO: 921 - protein, 85 aa, Homo sapiens
KMGGAMRSVLTQVLTNQQNYKDLTSGLGENACVKKSHEKYLIALKSSGLTYPEDKLVYGVQEPSAGTSSLAVQGFIGATGTLGQV

SEQ ID NO: 922 - protein, 85 aa, Homo sapiens
DSSDEDDQDGSQGLGKRKRVKLSSGTKDQSIMDVLKHKSFLEELLFWTIKYEFPQKMVTFLLNMLPDQEYKVAFTKTFVQHYAFI

SEQ ID NO: 923 - protein, 85 aa, Homo sapiens
MKTLKKSHESDTMSNRIVHISVQLFSNEELARQVTEECQLLDIMVTVLLYMMESCLIKSELQDEENSLHVVVNCGEALLKNNTYW

SEQ ID NO: 924 - protein, 85 aa, Homo sapiens
PLVSDFINILSHQSVAKRFLEDHGLLVTWMNFVSFFQGMNLNKRELNEHVEFESQTYYAAFAAELEACAQPMWGLLSHCKVRETQ

SEQ ID NO: 925 - protein, 85 aa, Homo sapiens
EYTRNVVRYCLEALQDWFDAINFVDEPAPNQVTFHLPLHRYYAMFLSKAVKCQELDLDSVLPDQEMLMKLMIHPLQIQASLAEIH

SEQ ID NO: 926 - protein, 85 aa, Homo sapiens
SNMWVRNGLQIKGQAMTYVQSHFCNSMIDPDIYLLQVCASRLDPDYFISSVFERFKVVDLLTMASQHQNTVLDAEHERSMLEGAL

SEQ ID NO: 927 - protein, 85 aa, Homo sapiens
TFLVILLSLRLHLGMSDDEILRAEMVAQLCMNDRTHSSLLDLIPENPNPKSGIIPGSYSFESVLSAVADFKAPVFEPGGSMQQGM

SEQ ID NO: 928 - protein, 85 aa, Homo sapiens
YTPKAEVWDQEFDPVMVILRTVYRRDVQSAMDRYTAFLKQSGKFPGNPWPPYKKRTSLHPSYKGLMRLLHCKTLHIVLFTLLYKI

SEQ ID NO: 929 - protein, 85 aa, Homo sapiens
MMDHQNLSEHVLCMVLYLIELGLENSAEEESDEEASVGGPERCHDSWFPGSNLVSNMRHFINYVRVRVPETAPEVKRDSPASTSS

SEQ ID NO: 930 - protein, 85 aa, Homo sapiens
DNLGSLQNSGTAQVFSLVAERRKKFQEIINRSSSEANQVVRPKTSSKWSAPGSAPQLTTAILEIKESILSLLIKLHHKLSGKQNS

SEQ ID NO: 931 - protein, 85 aa, Homo sapiens
YYPPWLDDIEILIQPEIPKYSHGDGITAVERILLKAASQSRMNKRIIEEICRKVTPPVPPKKVTAAEKKTLDKEERRQKARERQQ

SEQ ID NO: 932 - protein, 85 aa, Homo sapiens
KLLAEFASRQKSFMETAMDVDSPENDIPMEITTAEPQVSEAVYDCVICGQSGPSSEDRPTGLVVLLQASSVLGQCRDNVEPKKLP

SEQ ID NO: 933 - protein, 85 aa, Homo sapiens
ISEEEQIYPWDTCAAVHDVRLSLLQRYFKDSSCLLAVSIGWEGGVYVQTCGHTLHIDCHKSYMESLRNDQVLQGFSVDKGEFTCP

SEQ ID NO: 934 - protein, 85 aa, Homo sapiens
LCRQFANSVLPCYPGSNVENNPWQRPSNKSIQDLIKEVEELQGRPGAFPSETNLSKEMESVMKDIKNTTQKKYRDYSKTPGSPDN

SEQ ID NO: 935 - protein, 85 aa, Homo sapiens
DFLFMYSVARTNLELELIHRGGNLCSGGASTAGKRSCLNQLFHVLALHMRLYSIDSEYNPWRKLTQLEEMNPQLGYEEQQPEVPI

SEQ ID NO: 936 - protein, 85 aa, Homo sapiens
LYHDVTSLLLIQILMMPQPLRKDHFTCIVKVLFTLLYTQALAALSVKCSEEDRSAWKHAGALKKSTCDAEKSYEVLLSFVISELF

SEQ ID NO: 937 - protein, 85 aa, Homo sapiens
KGKLYHEEGTQECAMVNPIAWSPESMEKCLQDFCLPFLRITSLLQHHLFGEDLPSCQEEEEFSVLASCLGLLPTFYQTEHPFISA

SEQ ID NO: 938 - protein, 85 aa, Homo sapiens
SCLDWPVPAFDIITQWCFEIKSFTERHAEQGKALLIQESKWKLPHLLQLPENYNTIFQYYHRKTCSVCTKVPKDPAVCLVCGTFV

SEQ ID NO: 939 - protein, 85 aa, Homo sapiens
CLKGLCCKQQSYCECVLHSQNCGAGTGIFLLINASVIIIIRGHRFCLWGSVYLDAHGEEDRDLRRGKPLYICKERYKVLEQQWIS

SEQ ID NO: 940 - protein, 84 aa, Homo sapiens
SQNCGAGTGIFLLINASVIIIIRGHRFCLWGSVYLDAHGEEDRDLRRGKPLYICKERYKVLEQQWISHTFDHINKRWGPHYNGL

SEQ ID NO: 941 - protein, 85 aa, Homo sapiens
NRAGAEELQALLERVLSAERPLAAAAGGEDAAAAGGGGGPGAAEEEALEWCKCLLAGGGGYDEFCAAVRAYDPAALCGLVWTANF

SEQ ID NO: 942 - protein, 85 aa, Homo sapiens
VAYRCRTCGISPCMSLCAECFHQGDHTGHDFNMFRSQAGGACDCGDSNVMRESGFCKRHQIKSSSNIPCVPKDLLMMSEFVLPRF

SEQ ID NO: 943 - protein, 85 aa, Homo sapiens
IFCLIQYLREGYNEPAADGPSEKDLNKVLQLLEPQISFLEDLTKMGGAMRSVLTQVLTNQQNYKDLTSGLGENACVKKSHEKYLI

SEQ ID NO: 944 - protein, 85 aa, Homo sapiens
ALKSSGLTYPEDKLVYGVQEPSAGTSSLAVQGFIGATGTLGQVDSSDEDDQDGSQGLGKRKRVKLSSGTKDQSIMDVLKHKSFLE

SEQ ID NO: 945 - protein, 85 aa, Homo sapiens
ELLFWTIKYEFPQKMVTFLLNMLPDQEYKVAFTKTFVQHYAFIMKTLKKSHESDTMSNRIVHISVQLFSNEELARQVTEECQLLD

SEQ ID NO: 946 - protein, 85 aa, Homo sapiens
IMVTVLLYMMESCLIKSELQDEENSLHVVVNCGEALLKNNTYWPLVSDFINILSHQSVAKRFLEDHGLLVTWMNFVSFFQGMNLN

SEQ ID NO: 947 - protein, 85 aa, Homo sapiens
KRELNEHVEFESQTYYAAFAAELEACAQPMWGLLSHCKVRETQEYTRNVVRYCLEALQDWFDAINFVDEPAPNQVTFHLPLHRYY

SEQ ID NO: 948 - protein, 85 aa, Homo sapiens
AMFLSKAVKCQELDLDSVLPDQEMLMKLMIHPLQIQASLAEIHSNMWVRNGLQIKGQAMTYVQSHFCNSMIDPDIYLLQVCASRL

SEQ ID NO: 949 - protein, 85 aa, Homo sapiens
DPDYFISSVFERFKVVDLLTMASQHQNTVLDAEHERSMLEGALTFLVILLSLRLHLGMSDDEILRAEMVAQLCMNDRTHSSLLDL

SEQ ID NO: 950 - protein, 85 aa, Homo sapiens
IPENPNPKSGIIPGSYSFESVLSAVADFKAPVFEPGGSMQQGMYTPKAEVWDQEFDPVMVILRTVYRRDVQSAMDRYTAFLKQSG

SEQ ID NO: 951 - protein, 85 aa, Homo sapiens
KFPGNPWPPYKKRTSLHPSYKGLMRLLHCKTLHIVLFTLLYKILMDHQNLSEHVLCMVLYLIELGLENSAEEESDEEASVGGPER

SEQ ID NO: 952 - protein, 85 aa, Homo sapiens
CHDSWFPGSNLVSNMRHFINYVRVRVPETAPEVKRDSPASTSSDNLGSLQNSGTAQVFSLVAERRKKFQEIINRSSSEANQVVRP

SEQ ID NO: 953 - protein, 85 aa, Homo sapiens
KTSSKWSAPGSAPQLTTAILEIKESILSLLIKLHHKLSGKQNSYYPPWLDDIEILIQPEIPKYSHGDGITAVERILLKAASQSRM

SEQ ID NO: 954 - protein, 85 aa, Homo sapiens
NKRIIEEICRKVTPPVPPKKVTAAEKKTLDKEERRQKARERQQKLLAEFASRQKSFMETAMDVDSPENDIPMEITTAEPQVSEAV

SEQ ID NO: 955 - protein, 85 aa, Homo sapiens
YDCVICGQSGPSSEDRPTGLVVLLQASSVLGQCRDNVEPKKLPISEEEQIYPWDTCAAVHDVRLSLLQRYFKDSSCLLAVSIGWE

SEQ ID NO: 956 - protein, 85 aa, Homo sapiens
GGVYVQTCGHTLHIDCHKSYMESLRNDQVLQGFSVDKGEFTCPLCRQFANSVLPCYPGSNVENNPWQRPSNKSIQDLIKEVEELQ

SEQ ID NO: 957 - protein, 85 aa, Homo sapiens
GRPGAFPSETNLSKEMESVMKDIKNTTQKKYRDYSKTPGSPDNDFLFMYSVARTNLELELIHRGGNLCSGGASTAGKRSCLNQLF

SEQ ID NO: 958 - protein, 85 aa, Homo sapiens
HVLALHMRLYSIDSEYNPWRKLTQLEEMNPQLGYEEQQPEVPILYHDVTSLLLIQILMMPQPLRKDHFTCIVKVLFTLLYTQALA

SEQ ID NO: 959 - protein, 85 aa, Homo sapiens
ALSVKCSEEDRSAWKHAGALKKSTCDAEKSYEVLLSFVISELFKGKLYHEEGTQECAMVNPIAWSPESMEKCLQDFCLPFLRITS

SEQ ID NO: 960 - protein, 85 aa, Homo sapiens
LLQHHLFGEDLPSCQEEEEFSVLASCLGLLPTFYQTEHPFISASCLDWPVPAFDIITQWCFEIKSFTERHAEQGKALLIQESKWK

SEQ ID NO: 961 - protein, 85 aa, Homo sapiens
LPHLLQLPENYNTIFQYYHRKTCSVCTKVPKDPAVCLVCGTFVCLKGLCCKQQSYCECVLHSQNCGAGTGIFLLINASVIIIIRG

SEQ ID NO: 962 - protein, 85 aa, Homo sapiens
LKVTVPSCSASSCSSVTASAAPGTASLVPDYWIDGSNRDALSDFFEVESELGRGATSIVYRCKQKGTQKPYALKVLKKTVDKKIV

SEQ ID NO: 963 - protein, 85 aa, Homo sapiens
RTEIGVLLRLSHPNIIKLKEIFETPTEISLVLELVTGGELFDRIVEKGYYSERDAADAVKQILEAVAYLHENGIVHRDLKPENLL

SEQ ID NO: 964 - protein, 85 aa, Homo sapiens
YATPAPDAPLKIADFGLSKIVEHQVLMKTVCGTPGYCAPEILRGCAYGPEVDMWSVGIITYILLCGFEPFYDERGDQFMFRRILN

SEQ ID NO: 965 - protein, 85 aa, Homo sapiens
CEYYFISPWWDEVSLNAKDLVRKLIVLDPKKRLTTFQALQHPWVTGKAANFVHMDTAQKKLQEFNARRKLKAAVKAVVASSRLGS

SEQ ID NO: 966 - protein, 85 aa, Homo sapiens
ASSSHGSIQESHKASRDPSPIQDGNEDMKAIPEGEKIQGDGAQAAVKGAQAELMKVQALEKVKGADINAEEAPKMVPKAVEDGIK

SEQ ID NO: 967 - protein, 84 aa, Homo sapiens
AQAELMKVQALEKVKGADINAEEAPKMVPKAVEDGIKVADLELEEGLAEEKLKTVEEAAAPREGQGSSAVGFEVPQQDVILPEY

SEQ ID NO: 968 - protein, 85 aa, Homo sapiens
DFFEVESELGRGATSIVYRCKQKGTQKPYALKVLKKTVDKKIVRTEIGVLLRLSHPNIIKLKEIFETPTEISLVLELVTGGELFD

SEQ ID NO: 969 - protein, 85 aa, Homo sapiens
RIVEKGYYSERDAADAVKQILEAVAYLHENGIVHRDLKPENLLYATPAPDAPLKIADFGLSKIVEHQVLMKTVCGTPGYCAPEIL

SEQ ID NO: 970 - protein, 85 aa, Homo sapiens
RGCAYGPEVDMWSVGIITYILLCGFEPFYDERGDQFMFRRILNCEYYFISPWWDEVSLNAKDLVRKLIVLDPKKRLTTFQALQHP

SEQ ID NO: 971 - protein, 85 aa, Homo sapiens
WVTGKAANFVHMDTAQKKLQEFNARRKLKAAVKAVVASSRLGSASSSHGSIQESHKASRDPSPIQDGNEDMKAIPEGEKIQGDGA

SEQ ID NO: 972 - protein, 85 aa, Homo sapiens
QAAVKGAQAELMKVQALEKVKGADINAEEAPKMVPKAVEDGIKVADLELEEGLAEEKLKTVEEAAAPREGQGSSAVGFEVPQQDV

SEQ ID NO: 973 - protein, 85 aa, Homo sapiens
EEQQPEPKSQRDSALGAAAAATPGGLSLSLSPGASGSSGSGSDGDSVPVSPQPAPPSPPAAPCLPPLAHHPHLPPHPPPPPPQHL

SEQ ID NO: 974 - protein, 85 aa, Homo sapiens
AAPAHQPQPAAQLHRTTNFFIDNILRPDFGCKKEQPPPQLLVAAAARGGAGGGGRVERDRGQTAAGRDPVHPLGTRAPGAASLLC

SEQ ID NO: 975 - protein, 85 aa, Homo sapiens
APDANCGPPDGSQPAAAGAGASKAGNPAAAAAAAAAAVAAAAAAAAAKPSDTGGGGSGGGAGSPGAQGTKYPEHGNPAILLMGSA

SEQ ID NO: 976 - protein, 85 aa, Homo sapiens
NGGPVVKTDSQQPLVWPAWVYCTRYSDRPSSGPRTRKLKKKKNEKEDKRPRTAFTAEQLQRLKAEFQANRYITEQRRQTLAQELS

SEQ ID NO: 977 - protein, 84 aa, Homo sapiens
AFTAEQLQRLKAEFQANRYITEQRRQTLAQELSLNESQIKIWFQNKRAKIKKATGIKNGLALHLMAQGLYNHSTTTVQDKDESE

SEQ ID NO: 978 - protein, 85 aa, Homo sapiens
DGDSVPVSPQPAPPSPPAAPCLPPLAHHPHLPPHPPPPPPQHLAAPAHQPQPAAQLHRTTNFFIDNILRPDFGCKKEQPPPQLLV

SEQ ID NO: 979 - protein, 85 aa, Homo sapiens
AAAARGGAGGGGRVERDRGQTAAGRDPVHPLGTRAPGAASLLCAPDANCGPPDGSQPAAAGAGASKAGNPAAAAAAAAAAVAAAA

SEQ ID NO: 980 - protein, 85 aa, Homo sapiens
AAAAAKPSDTGGGGSGGGAGSPGAQGTKYPEHGNPAILLMGSANGGPVVKTDSQQPLVWPAWVYCTRYSDRPSSGPRTRKLKKKK

SEQ ID NO: 981 - protein, 85 aa, Homo sapiens
NEKEDKRPRTAFTAEQLQRLKAEFQANRYITEQRRQTLAQELSLNESQIKIWFQNKRAKIKKATGIKNGLALHLMAQGLYNHSTT

SEQ ID NO: 982 - protein, 59 aa, Homo sapiens
RERTWTWLCQRRPDWTAVYTRPGPNCWPRAGDTGHPAPGFGTVPAPRRMVKARMGPEAR

SEQ ID NO: 983 - protein, 85 aa, Homo sapiens
LSAWILRGCGAAWTRTSRRPRRSHATGPCTTLRRTRAWPPPPALRRAPRPPPTAPPASCAATRAQSRTAKMTAVTPVLLSPPAPP

SEQ ID NO: 984 - protein, 85 aa, Homo sapiens
SASIRRLAESSWTWGSPCAEHPRARAGRRKAATDCPWAAGSQWRGPAGQGAPRSCLFPGSRTAARAQHPRVAPPPPPAPLNTRAS

SEQ ID NO: 985 - protein, 11 aa, Homo sapiens
ALRSQLPRNPL

SEQ ID NO: 986 - protein, 84 aa, Homo sapiens
WLQSLNLEQYAAEFAARQVDGPQLLQLDGSKLKSLGLSNSHDRALVKRKLKEMAAAAEKERKAQEKAARQREKLRRREQEAKKS

SEQ ID NO: 987 - protein, 17 aa, Homo sapiens
VPAPRRMVKARMGPEAR

SEQ ID NO: 988 - protein, 85 aa, Homo sapiens
ALRRAPRPPPTAPPASCAATRAQSRTAKMTAVTPVLLSPPAPPSASIRRLAESSWTWGSPCAEHPRARAGRRKAATDCPWAAGSQ

SEQ ID NO: 989 - protein, 54 aa, Homo sapiens
WRGPAGQGAPRSCLFPGSRTAARAQHPRVAPPPPPAPLNTRASALRSQLPRNPL

SEQ ID NO: 990 - protein, 43 aa, Homo sapiens
LSLQMSSWMNPSPLSTTGPASRWASGCRASTWNSMLLSLLHGR

SEQ ID NO: 991 - protein, 85 aa, Homo sapiens
AAEEEAAAGGKVLREENQCIAPVVSSRVSPGTRPTAMGSFSSHMTEFPRKRKGSDSDPSQSGIMTEKVVEKLSQNPLTYLLSTRI

SEQ ID NO: 992 - protein, 85 aa, Homo sapiens
EISASSGSRVEDGEHQVKMKAFREAHSQTEKRRRDKMNNLIEELSAMIPQCNPMARKLDKLTVLRMAVQHLRSLKGLTNSYVGSN

SEQ ID NO: 993 - protein, 85 aa, Homo sapiens
YRPSFLQDNELRHLILKTAEGFLFVVGCERGKILFVSKSVSKILNYDQASLTGQSLFDFLHPKDVAKVKEQLSSFDISPREKLID

SEQ ID NO: 994 - protein, 85 aa, Homo sapiens
AKTGLQVHSNLHAGRTRVYSGSRRSFFCRIKSCKISVKEEHGCLPNSKKKEHRKFYTIHCTGYLRSWPPNIVGMEEERNSKKDNS

SEQ ID NO: 995 - protein, 85 aa, Homo sapiens
NFTCLVAIGRLQPYIVPQNSGEINVKPTEFITRFAVNGKFVYVDQRATAILGYLPQELLGTSCYEYFHQDDHNNLTDKHKAVLQS

SEQ ID NO: 996 - protein, 85 aa, Homo sapiens
KEKILTDSYKFRAKDGSFVTLKSQWFSFTNPWTKELEYIVSVNTLVLGHSEPGEASFLPCSSQSSEESSRQSCMSVPGMSTGTVL

SEQ ID NO: 997 - protein, 85 aa, Homo sapiens
GAGSIGTDIANEILDLQRLQSSSYLDDSSPTGLMKDTHTVNCRSMSNKELFPPSPSEMGELEATRQNQSTVAVHSHEPLLSDGAQ

SEQ ID NO: 998 - protein, 85 aa, Homo sapiens
HMTEFPRKRKGSDSDPSQSGIMTEKVVEKLSQNPLTYLLSTRIEISASSGSRVEDGEHQVKMKAFREAHSQTEKRRRDKMNNLIE

SEQ ID NO: 999 - protein, 85 aa, Homo sapiens
ELSAMIPQCNPMARKLDKLTVLRMAVQHLRSLKGLTNSYVGSNYRPSFLQDNELRHLILKTAEGFLFVVGCERGKILFVSKSVSK

SEQ ID NO: 1000 - protein, 85 aa, Homo sapiens
ILNYDQASLTGQSLFDFLHPKDVAKVKEQLSSFDISPREKLIDAKTGLQVHSNLHAGRTRVYSGSRRSFFCRIKSCKISVKEEHG

SEQ ID NO: 1001 - protein, 85 aa, Homo sapiens
CLPNSKKKEHRKFYTIHCTGYLRSWPPNIVGMEEERNSKKDNSNFTCLVAIGRLQPYIVPQNSGEINVKPTEFITRFAVNGKFVY

SEQ ID NO: 1002 - protein, 85 aa, Homo sapiens
VDQRATAILGYLPQELLGTSCYEYFHQDDHNNLTDKHKAVLQSKEKILTDSYKFRAKDGSFVTLKSQWFSFTNPWTKELEYIVSV

SEQ ID NO: 1003 - protein, 85 aa, Homo sapiens
NTLVLGHSEPGEASFLPCSSQSSEESSRQSCMSVPGMSTGTVLGAGSIGTDIANEILDLQRLQSSSYLDDSSPTGLMKDTHTVNC

SEQ ID NO: 1004 - protein, 85 aa, Homo sapiens
EEDEFIGEKTFQRYCAEFIKHSQQIGDSWEWRPSKDCSDGYMCKIHFQIKNGSVMSHLGASTHGQTCLPMEEAFELPLDDCEVIE

SEQ ID NO: 1005 - protein, 85 aa, Homo sapiens
TAAASEVIKYEYHVLYSCSYQVPVLYFRASFLDGRPLTLKDIWEGVHECYKMRLLQGPWDTITQQEHPILGQPFFVLHPCKTNEF

SEQ ID NO: 1006 - protein, 84 aa, Homo sapiens
KMRLLQGPWDTITQQEHPILGQPFFVLHPCKTNEFMTPVLKNSQKINKNVNYITSWLSIVGPVVGLNLPLSYAKATSQDERNVP

SEQ ID NO: 1007 - protein, 85 aa, Homo sapiens
CKIHFQIKNGSVMSHLGASTHGQTCLPMEEAFELPLDDCEVIETAAASEVIKYEYHVLYSCSYQVPVLYFRASFLDGRPLTLKDI

SEQ ID NO: 1008 - protein, 85 aa, Homo sapiens
WEGVHECYKMRLLQGPWDTITQQEHPILGQPFFVLHPCKTNEFMTPVLKNSQKINKNVNYITSWLSIVGPVVGLNLPLSYAKATS

SEQ ID NO: 1009 - protein, 85 aa, Homo sapiens
EEEDEEARALLAGGPDEADRGAPAAPGALPALCDPSRLAHRLLVLLLMCFLGFGSYFCYDNPAALQTQVKRDMQVNTTKFMLLYA

SEQ ID NO: 1010 - protein, 85 aa, Homo sapiens
WYSWPNVVLCFFGGFLIDRVFGIRWGTIIFSCFVCIGQVVFALGGIFNAFWLMEFGRFVFGIGGESLAVAQNTYAVSWFKGKELN

SEQ ID NO: 1011 - protein, 85 aa, Homo sapiens
MVFGLQLSMARIGSTVNMNLMGWLYSKIEALLGSAGHTTLGITLMIGGITCILSLICALALAYLDQRAERILHKEQGKTGEVIKL

SEQ ID NO: 1012 - protein, 85 aa, Homo sapiens
TDVKDFSLPLWLIFIICVCYYVAVFPFIGLGKVFFTEKFGFSSQAASAINSVVYVISAPMSPVFGLLVDKTGKNIIWVLCAVAAT

SEQ ID NO: 1013 - protein, 85 aa, Homo sapiens
LVSHMMLAFTMWNPWIAMCLLGLSYSLLACALWPMVAFVVPEHQLGTAYGFMQSIQNLGLAIISIIAGMILDSRGYLFLEVFFIA

SEQ ID NO: 1014 - protein, 84 aa, Homo sapiens
PEHQLGTAYGFMQSIQNLGLAIISIIAGMILDSRGYLFLEVFFIACVSLSLLSVVLLYLVNRAQGGNLNYSARQREEIKFSHTE

SEQ ID NO: 1015 - protein, 85 aa, Homo sapiens
MVLLLMCFLGFGSYFCYDNPAALQTQVKRDMQVNTTKFMLLYAWYSWPNVVLCFFGGFLIDRVFGIRWGTIIFSCFVCIGQVVFA

SEQ ID NO: 1016 - protein, 85 aa, Homo sapiens
MGGIFNAFWLMEFGRFVFGIGGESLAVAQNTYAVSWFKGKELNLVFGLQLSMARIGSTVNMNLMGWLYSKIEALLGSAGHTTLGI

SEQ ID NO: 1017 - protein, 85 aa, Homo sapiens
TLMIGGITCILSLICALALAYLDQRAERILHKEQGKTGEVIKLTDVKDFSLPLWLIFIICVCYYVAVFPFIGLGKVFFTEKFGFS

SEQ ID NO: 1018 - protein, 85 aa, Homo sapiens
SQAASAINSVVYVISAPMSPVFGLLVDKTGKNIIWVLCAVAATLVSHMMLAFTMWNPWIAMCLLGLSYSLLACALWPMVAFVVPE

SEQ ID NO: 1019 - protein, 85 aa, Homo sapiens
RRAPAAERLLELGFPPRCGRQEPPFPLGVTRGWGRWPIQKRREGARPVPFSERSQEDGRGPAARSSGTLWRIRTRLSLCRDPEPP

SEQ ID NO: 1020 - protein, 85 aa, Homo sapiens
PPLCLLRVSLLCALRAGGRGSRWGEDGARLLLLPPARAAGNGEAEPSGGPSYAGRMLESSGCKALKEGVLEKRSDGLLQLWKKKC

SEQ ID NO: 1021 - protein, 85 aa, Homo sapiens
CILTEEGLLLIPPKQLQHQQQQQQQQQQQQQQQPGQGPAEPSQPSGPAVASLEPPVKLKELHFSNMKTVDCVERKGKYMYFTVVM

SEQ ID NO: 1022 - protein, 85 aa, Homo sapiens
AEGKEIDFRCPQDQGWNAEITLQMVQYKNRQAILAVKSTRQKQQHLVQQQPPSQPQPQPQLQPQPQPQPQPQPQPQSQPQPQPQP

SEQ ID NO: 1023 - protein, 84 aa, Homo sapiens
QPQPQPQPQPQPQPQSQPQPQPQPKPQPQQLHPYPHPHPHPHSHPHSHPHPHPHPHPHQIPHPHPQPHSQPHGHRLLRSTSNSA

SEQ ID NO: 1024 - protein, 85 aa, Homo sapiens
EGARPVPFSERSQEDGRGPAARSSGTLWRIRTRLSLCRDPEPPPPLCLLRVSLLCALRAGGRGSRWGEDGARLLLLPPARAAGNG

SEQ ID NO: 1025 - protein, 85 aa, Homo sapiens
EAEPSGGPSYAGRMLESSGCKALKEGVLEKRSDGLLQLWKKKCCILTEEGLLLIPPKQLQHQQQQQQQQQQQQQQQPGQGPAEPS

SEQ ID NO: 1026 - protein, 85 aa, Homo sapiens
QPSGPAVASLEPPVKLKELHFSNMKTVDCVERKGKYMYFTVVMAEGKEIDFRCPQDQGWNAEITLQMVQYKNRQAILAVKSTRQK

SEQ ID NO: 1027 - protein, 85 aa, Homo sapiens
QQHLVQQQPPSQPQPQPQLQPQPQPQPQPQPQPQSQPQPQPQPKPQPQQLHPYPHPHPHPHSHPHSHPHPHPHPHPHQIPHPHPQ

SEQ ID NO: 1028 - protein, 85 aa, Homo sapiens
KVVQHALPTPRRGALTMSLNSSLSCRKELSNLTEEEGGEGGVIITQFIAIIVITIFVCLGNLVIVVTLYKKSYLLTLSNKFVFSL

SEQ ID NO: 1029 - protein, 85 aa, Homo sapiens
TLSNFLLSVLVLPFVVTSSIRREWIFGVVWCNFSALLYLLISSASMLTLGVIAIDRYYAVLYPMVYPMKITGNRAVMALVYIWLH

SEQ ID NO: 1030 - protein, 85 aa, Homo sapiens
SLIGCLPPLFGWSSVEFDEFKWMCVAAWHREPGYTAFWQIWCALFPFLVMLVCYGFIFRVARVKARKVHCGTVVIVEEDAQRTGR

SEQ ID NO: 1031 - protein, 85 aa, Homo sapiens
KNSSTSTSSSGSRRNAFQGVVYSANQCKALITILVVLGAFMVTWGPYMVVIASEALWGKSSVSPSLETWATWLSFASAVCHPLIY

SEQ ID NO: 1032 - protein, 85 aa, Homo sapiens
GLWNKTVRKELLGMCFGDRYYREPFVQRQRTSRLFSISNRITDLGLSPHLTALMAGGQPLGHSSSTGDTGFSCSQDSGTDMMLLE

SEQ ID NO: 1033 - protein, 85 aa, Homo sapiens
DYTSDDNPPSHCTCPPKRRSSVTFEDEVEQIKEAAKNSILHVKAEVHKSLDSYAASLAKAIEAEAKINLFGEEALPGVLVTARTV

SEQ ID NO: 1034 - protein, 84 aa, Homo sapiens
NSILHVKAEVHKSLDSYAASLAKAIEAEAKINLFGEEALPGVLVTARTVPGGGFGGRRGSRTLVSQRLQLQSIEEGDVLAAEQR

SEQ ID NO: 1035 - protein, 85 aa, Homo sapiens
IITQFIAIIVITIFVCLGNLVIVVTLYKKSYLLTLSNKFVFSLTLSNFLLSVLVLPFVVTSSIRREWIFGVVWCNFSALLYLLIS

SEQ ID NO: 1036 - protein, 85 aa, Homo sapiens
SASMLTLGVIAIDRYYAVLYPMVYPMKITGNRAVMALVYIWLHSLIGCLPPLFGWSSVEFDEFKWMCVAAWHREPGYTAFWQIWC

SEQ ID NO: 1037 - protein, 85 aa, Homo sapiens
ALFPFLVMLVCYGFIFRVARVKARKVHCGTVVIVEEDAQRTGRKNSSTSTSSSGSRRNAFQGVVYSANQCKALITILVVLGAFMV

SEQ ID NO: 1038 - protein, 85 aa, Homo sapiens
TWGPYMVVIASEALWGKSSVSPSLETWATWLSFASAVCHPLIYGLWNKTVRKELLGMCFGDRYYREPFVQRQRTSRLFSISNRIT

SEQ ID NO: 1039 - protein, 85 aa, Homo sapiens
DLGLSPHLTALMAGGQPLGHSSSTGDTGFSCSQDSGTDMMLLEDYTSDDNPPSHCTCPPKRRSSVTFEDEVEQIKEAAKNSILHV

SEQ ID NO: 1040 - protein, 85 aa, Homo sapiens
TGIAAASFFSNTCRFGGCGLHFPTLADLIEHIEDNHIDTDPRVLEKQELQQPTYVALSYINRFMTDAARREQESLKKKIQPKLSL

SEQ ID NO: 1041 - protein, 85 aa, Homo sapiens
TLSSSVSRGNVSTPPRHSSGSLTPPVTPPITPSSSFRSSTPTGSEYDEEEVDYEESDSDESWTTESAISSEAILSSMCMNGGEEK

SEQ ID NO: 1042 - protein, 84 aa, Homo sapiens
LSSMCMNGGEEKPFACPVPGCKKRYKNVNGIKYHAKNGHRTQIRVRKPFKCRCGKSYKTAQGLRHHTINFHPPVSAEIIRKMQQ

SEQ ID NO: 1043 - protein, 85 aa, Homo sapiens
VLEKQELQQPTYVALSYINRFMTDAARREQESLKKKIQPKLSLTLSSSVSRGNVSTPPRHSSGSLTPPVTPPITPSSSFRSSTPT

SEQ ID NO: 1044 - protein, 85 aa, Homo sapiens
GSEYDEEEVDYEESDSDESWTTESAISSEAILSSMCMNGGEEKPFACPVPGCKKRYKNVNGIKYHAKNGHRTQIRVRKPFKCRCG

SEQ ID NO: 1045 - protein, 85 aa, Homo sapiens
GKPSSMDTKFKDDLFRKYVQFHESKVDTTTSRQRPGSDECLRVAASTLLSLHKVDPFYRFRLIQFYEVVESSLRSLSSSSLRALH

SEQ ID NO: 1046 - protein, 85 aa, Homo sapiens
GAFSMLETVGINLFLYPWKKEFRSIKTYTGPFVYYVKSTLLEEDIRAILSCMGYTPELGTAYKLRELVETLQVKMVSFELFLAKV

SEQ ID NO: 1047 - protein, 85 aa, Homo sapiens
ECEQMLEIHSQVKDKGYSELDIVSERKSSAEDVRGCSDALRRRAEGREHLTASMSRVALQKSASERAAKDYYKPRVTKPSRSVDA

SEQ ID NO: 1048 - protein, 85 aa, Homo sapiens
YDSYWESRKPPLKASLSLRKEPVATDVGDDLKDEIIRPSPSLLTMASSPHGSPDVLPPASPSNGPALLRGTYFSTQDDVDLYTDS

SEQ ID NO: 1049 - protein, 85 aa, Homo sapiens
EPRATYRRQDALRPDVWLLRNDAHSLYHKRSPPAKESALSKCQSCGLSCSSSLCQRCDSLLTCPPASKPSAFPSKASTHDSLAHG

SEQ ID NO: 1050 - protein, 85 aa, Homo sapiens
ASLREKYPGQTQGLDRLPHLHSKSKPSTTPTSRCGFCNRPGATNTCTQCSKVSCDACLSAYHYDPCYKKSELHKFMPNNQLNYKS

SEQ ID NO: 1051 - protein, 84 aa, Homo sapiens
TQGLDRLPHLHSKSKPSTTPTSRCGFCNRPGATNTCTQCSKVSCDACLSAYHYDPCYKKSELHKFMPNNQLNYKSTQLSHLVYR

SEQ ID NO: 1052 - protein, 85 aa, Homo sapiens
VAASTLLSLHKVDPFYRFRLIQFYEVVESSLRSLSSSSLRALHGAFSMLETVGINLFLYPWKKEFRSIKTYTGPFVYYVKSTLLE

SEQ ID NO: 1053 - protein, 85 aa, Homo sapiens
EDIRAILSCMGYTPELGTAYKLRELVETLQVKMVSFELFLAKVECEQMLEIHSQVKDKGYSELDIVSERKSSAEDVRGCSDALRR

SEQ ID NO: 1054 - protein, 85 aa, Homo sapiens
RAEGREHLTASMSRVALQKSASERAAKDYYKPRVTKPSRSVDAYDSYWESRKPPLKASLSLRKEPVATDVGDDLKDEIIRPSPSL

SEQ ID NO: 1055 - protein, 85 aa, Homo sapiens
MTMASSPHGSPDVLPPASPSNGPALLRGTYFSTQDDVDLYTDSEPRATYRRQDALRPDVWLLRNDAHSLYHKRSPPAKESALSKC

SEQ ID NO: 1056 - protein, 85 aa, Homo sapiens
QSCGLSCSSSLCQRCDSLLTCPPASKPSAFPSKASTHDSLAHGASLREKYPGQTQGLDRLPHLHSKSKPSTTPTSRCGFCNRPGA

SEQ ID NO: 1057 - protein, 85 aa, Homo sapiens
GKGDPNKPRGKMSSYAFFVQTCREEHKKKHPDSSVNFAEFSKKCSERWKTMSAKEKSKFEDMAKSDKARYDREMKNYVPPKGDKK

SEQ ID NO: 1058 - protein, 85 aa, Homo sapiens
GKKKDPNAPKRPPSAFFLFCSEHRPKIKSEHPGLSIGDTAKKLGEMWSEQSAKDKQPYEQKAAKLKEKYEKDIAAYRAKGKSEAG

SEQ ID NO: 1059 - protein, 84 aa, Homo sapiens
AKKLGEMWSEQSAKDKQPYEQKAAKLKEKYEKDIAAYRAKGKSEAGKKGPGRPTGSKKKNEPEDEEEEEEEEDEDEEEEDEDEE

SEQ ID NO: 1060 - protein, 85 aa, Homo sapiens
KCSERWKTMSAKEKSKFEDMAKSDKARYDREMKNYVPPKGDKKGKKKDPNAPKRPPSAFFLFCSEHRPKIKSEHPGLSIGDTAKK

SEQ ID NO: 1061 - protein, 85 aa, Homo sapiens
AAAAARWNHVWVGTETGILKGVNLQRKQAANFTAGGQPRREEAVSALCWGTGGETQMLVGCADRTVKHFSTEDGIFQGQRHCPGG

SEQ ID NO: 1062 - protein, 85 aa, Homo sapiens
EGMFRGLAQADGTLITCVDSGILRVWHDKDKDTSSDPLLELRVGPGVCRMRQDPAHPHVVATGGKENALKIWDLQGSEEPVFRAK

SEQ ID NO: 1063 - protein, 85 aa, Homo sapiens
NVRNDWLDLRVPIWDQDIQFLPGSQKLVTCTGYHQVRVYDPASPQRRPVLETTYGEYPLTAMTLTPGGNSVIVGNTHGQLAEIDL

SEQ ID NO: 1064 - protein, 85 aa, Homo sapiens
RQGRLLGCLKGLAGSVRGLQCHPSKPLLASCGLDRVLRIHRIQNPRGLEHKVYLKSQLNCLLLSGRDNWEDEPQEPQEPNKVPLE

SEQ ID NO: 1065 - protein, 84 aa, Homo sapiens
RGLEHKVYLKSQLNCLLLSGRDNWEDEPQEPQEPNKVPLEDTETDELWASLEAAAKRKLSGLEQPQGALQTRRRKKKRPGSTSP

SEQ ID NO: 1066 - protein, 85 aa, Homo sapiens
AVSALCWGTGGETQMLVGCADRTVKHFSTEDGIFQGQRHCPGGEGMFRGLAQADGTLITCVDSGILRVWHDKDKDTSSDPLLELR

SEQ ID NO: 1067 - protein, 85 aa, Homo sapiens
VGPGVCRMRQDPAHPHVVATGGKENALKIWDLQGSEEPVFRAKNVRNDWLDLRVPIWDQDIQFLPGSQKLVTCTGYHQVRVYDPA

SEQ ID NO: 1068 - protein, 85 aa, Homo sapiens
SPQRRPVLETTYGEYPLTAMTLTPGGNSVIVGNTHGQLAEIDLRQGRLLGCLKGLAGSVRGLQCHPSKPLLASCGLDRVLRIHRI

SEQ ID NO: 1069 - protein, 85 aa, Homo sapiens
QNPRGLEHKVYLKSQLNCLLLSGRDNWEDEPQEPQEPNKVPLEDTETDELWASLEAAAKRKLSGLEQPQGALQTRRRKKKRPGST

SEQ ID NO: 1070 - protein, 85 aa, Homo sapiens
TSQEKTEEYPFADIFDEDETERNFLLSKPVCFVVFGKPGVGKTTLARYITQAWKCIRVEALPILEEQIAAETESGVMLQSMLISG

SEQ ID NO: 1071 - protein, 85 aa, Homo sapiens
QSIPDELVIKLMLEKLNSPEVCHFGYIITEIPSLSQDAMTTLQQIELIKNLNLKPDVIINIKCPDYDLCQRISGQRQHNNTGYIY

SEQ ID NO: 1072 - protein, 85 aa, Homo sapiens
SRDQWDPEVIENHRKKKKEAQKDGKGEEEEEEEEQEEEEAFIAEMQMVAEILHHLVQRPEDYLENVENIVKLYKETILQTLEEVM

SEQ ID NO: 1073 - protein, 85 aa, Homo sapiens
AEHNPQYLIELNGNKPAEELFMIVMDRLKYLNLKRAAILTKLQGAEEEINDTMENDELFRTLASYKLIAPRYRWQRSKWGRTCPV

SEQ ID NO: 1074 - protein, 84 aa, Homo sapiens
TCPVNLKDGNIYSGLPDYSVSFLGKIYCLSSEEALKPFLLNPRPYLLPPMPGPPCKVFILGPQYSGKTTLCNMLAENYKGKVTN

SEQ ID NO: 1075 - protein, 85 aa, Homo sapiens
TTLARYITQAWKCIRVEALPILEEQIAAETESGVMLQSMLISGQSIPDELVIKLMLEKLNSPEVCHFGYIITEIPSLSQDAMTTL

SEQ ID NO: 1076 - protein, 85 aa, Homo sapiens
QQIELIKNLNLKPDVIINIKCPDYDLCQRISGQRQHNNTGYIYSRDQWDPEVIENHRKKKKEAQKDGKGEEEEEEEEQEEEEAFI

SEQ ID NO: 1077 - protein, 85 aa, Homo sapiens
AEMQMVAEILHHLVQRPEDYLENVENIVKLYKETILQTLEEVMAEHNPQYLIELNGNKPAEELFMIVMDRLKYLNLKRAAILTKL

SEQ ID NO: 1078 - protein, 85 aa, Homo sapiens
QGAEEEINDTMENDELFRTLASYKLIAPRYRWQRSKWGRTCPVNLKDGNIYSGLPDYSVSFLGKIYCLSSEEALKPFLLNPRPYL

SEQ ID NO: 1079 - protein, 85 aa, Homo sapiens
HKWILTWILPTLLYRSCFHIICLVGTISLACNDMTPEQMATNVNCSSPERHTRSYDYMEGGDIRVRRLFCRTQWYLRIDKRGKVK

SEQ ID NO: 1080 - protein, 85 aa, Homo sapiens
GTQEMKNNYNIMEIRTVAVGIVAIKGVESEFYLAMNKEGKLYAKKECNEDCNFKELILENHYNTYASAKWTHNGGEMFVALNQKG

SEQ ID NO: 1081 - protein, 84 aa, Homo sapiens
KGVESEFYLAMNKEGKLYAKKECNEDCNFKELILENHYNTYASAKWTHNGGEMFVALNQKGIPVRGKKTKKEQKTAHFLPMAIT

SEQ ID NO: 1082 - protein, 85 aa, Homo sapiens
VNCSSPERHTRSYDYMEGGDIRVRRLFCRTQWYLRIDKRGKVKGTQEMKNNYNIMEIRTVAVGIVAIKGVESEFYLAMNKEGKLY

SEQ ID NO: 1083 - protein, 85 aa, Homo sapiens
ELAAGSFSEEQFWEACAELQQPALAGADWQLLVETSGISIYRLLDKKTGLYEYKVFGVLEDCSPTLLADIYMDSDYRKQWDQYVK

SEQ ID NO: 1084 - protein, 85 aa, Homo sapiens
ELYEQECNGETVVYWEVKYPFPMSNRDYVYLRQRRDLDMEGRKIHVILARSTSMPQLGERSGVIRVKQYKQSLAIESDGKKGSKV

SEQ ID NO: 1085 - protein, 84 aa, Homo sapiens
HVILARSTSMPQLGERSGVIRVKQYKQSLAIESDGKKGSKVFMYYFDNPGGQIPSWLINWAAKNGVPNFLKDMARACQNYLKKT

SEQ ID NO: 1086 - protein, 85 aa, Homo sapiens
MLDKKTGLYEYKVFGVLEDCSPTLLADIYMDSDYRKQWDQYVKELYEQECNGETVVYWEVKYPFPMSNRDYVYLRQRRDLDMEGR

SEQ ID NO: 1087 - protein, 85 aa, Homo sapiens
KIHVILARSTSMPQLGERSGVIRVKQYKQSLAIESDGKKGSKVFMYYFDNPGGQIPSWLINWAAKNGVPNFLKDMARACQNYLKK

SEQ ID NO: 1088 - protein, 85 aa, Homo sapiens
EIPGSLCKKVKLSNNAQNWGMQRATNVTYQAHHVSRNKRGQVVGTRGGFRGCTVWLTGLSGAGKTTVSMALEEYLVCHGIPCYTL

SEQ ID NO: 1089 - protein, 85 aa, Homo sapiens
DGDNIRQGLNKNLGFSPEDREENVRRIAEVAKLFADAGLVCITSFISPYTQDRNNARQIHEGASLPFFEVFVDAPLHVCEQRDVK

SEQ ID NO: 1090 - protein, 85 aa, Homo sapiens
GLYKKARAGEIKGFTGIDSEYEKPEAPELVLKTDSCDVNDCVQQVVELLQERDIVPVDASYEVKELYVPENKLHLAKTDAETLPA

SEQ ID NO: 1091 - protein, 85 aa, Homo sapiens
MKINKVDMQWVQVLAEGWATPLNGFMREREYLQCLHFDCLLDGGVINLSVPIVLTATHEDKERLDGCTAFALMYEGRRVAILRNP

SEQ ID NO: 1092 - protein, 85 aa, Homo sapiens
EFFEHRKEERCARQWGTTCKNHPYIKMVMEQGDWLIGGDLQVLDRVYWNDGLDQYRLTPTELKQKFKDMNADAVFAFQLRNPVHN

SEQ ID NO: 1093 - protein, 85 aa, Homo sapiens
GHALLMQDTHKQLLERGYRRPVLLLHPLGGWTKDDDVPLMWRMKQHAAVLEEGVLNPETTVVAIFPSPMMYAGPTEVQWHCRARM

SEQ ID NO: 1094 - protein, 85 aa, Homo sapiens
VAGANFYIVGRDPAGMPHPETGKDLYEPSHGAKVLTMAPGLITLEIVPFRVAAYNKKKKRMDYYDSEHHEDFEFISGTRMRKLAR

SEQ ID NO: 1095 - protein, 84 aa, Homo sapiens
HGAKVLTMAPGLITLEIVPFRVAAYNKKKKRMDYYDSEHHEDFEFISGTRMRKLAREGQKPPEGFMAPKAWTVLTEYYKSLEKA

SEQ ID NO: 1096 - protein, 85 aa, Homo sapiens
VGTRGGFRGCTVWLTGLSGAGKTTVSMALEEYLVCHGIPCYTLDGDNIRQGLNKNLGFSPEDREENVRRIAEVAKLFADAGLVCI

SEQ ID NO: 1097 - protein, 85 aa, Homo sapiens
TSFISPYTQDRNNARQIHEGASLPFFEVFVDAPLHVCEQRDVKGLYKKARAGEIKGFTGIDSEYEKPEAPELVLKTDSCDVNDCV

SEQ ID NO: 1098 - protein, 85 aa, Homo sapiens
QQVVELLQERDIVPVDASYEVKELYVPENKLHLAKTDAETLPALKINKVDMQWVQVLAEGWATPLNGFMREREYLQCLHFDCLLD

SEQ ID NO: 1099 - protein, 85 aa, Homo sapiens
GGVINLSVPIVLTATHEDKERLDGCTAFALMYEGRRVAILRNPEFFEHRKEERCARQWGTTCKNHPYIKMVMEQGDWLIGGDLQV

SEQ ID NO: 1100 - protein, 85 aa, Homo sapiens
MDRVYWNDGLDQYRLTPTELKQKFKDMNADAVFAFQLRNPVHNGHALLMQDTHKQLLERGYRRPVLLLHPLGGWTKDDDVPLMWR

SEQ ID NO: 1101 - protein, 85 aa, Homo sapiens
MKQHAAVLEEGVLNPETTVVAIFPSPMMYAGPTEVQWHCRARMVAGANFYIVGRDPAGMPHPETGKDLYEPSHGAKVLTMAPGLI

SEQ ID NO: 1102 - protein, 85 aa, Homo sapiens
APPSAPLPAQGPGKARPSRKRGRRPRALKFVDVAVYFSPEEWGCLRPAQRALYRDVMRETYGHLGALGCAGPKPALISWLERNTD

SEQ ID NO: 1103 - protein, 85 aa, Homo sapiens
DWEPAALDPQEYPRGLTVQRKSRTRKKNGEKEVFPPKEAPRKGKRGRRPSKPRLIPRQTSGGPICPDCGCTFPDHQALESHKCAQ

SEQ ID NO: 1104 - protein, 85 aa, Homo sapiens
NLKKPYPCPDCGRRFSYPSLLVSHRRAHSGECPYVCDQCGKRFSQRKNLSQHQVIHTGEKPYHCPDCGRCFRRSRSLANHRTTHT

SEQ ID NO: 1105 - protein, 85 aa, Homo sapiens
GEKPHQCPSCGRRFAYPSLLAIHQRTHTGEKPYTCLECNRRFRQRTALVIHQRIHTGEKPYPCPDCERRFSSSSRLVSHRRVHSG

SEQ ID NO: 1106 - protein, 85 aa, Homo sapiens
ERPYACEHCEARFSQRSTLLQHQLLHTGEKPYPCPDCGRAFRRSGSLAIHRSTHTEEKLHACDDCGRRFAYPSLLASHRRVHSGE

SEQ ID NO: 1107 - protein, 84 aa, Homo sapiens
ASHRRVHSGERPYACDLCSKRFAQWSHLAQHQLLHTGEKPFPCLECGRCFRQRWSLAVHKCSPKAPNCSPRSAIGGSSQRGNAH

SEQ ID NO: 1108 - protein, 85 aa, Homo sapiens
GCLRPAQRALYRDVMRETYGHLGALGCAGPKPALISWLERNTDDWEPAALDPQEYPRGLTVQRKSRTRKKNGEKEVFPPKEAPRK

SEQ ID NO: 1109 - protein, 85 aa, Homo sapiens
GKRGRRPSKPRLIPRQTSGGPICPDCGCTFPDHQALESHKCAQNLKKPYPCPDCGRRFSYPSLLVSHRRAHSGECPYVCDQCGKR

SEQ ID NO: 1110 - protein, 85 aa, Homo sapiens
FSQRKNLSQHQVIHTGEKPYHCPDCGRCFRRSRSLANHRTTHTGEKPHQCPSCGRRFAYPSLLAIHQRTHTGEKPYTCLECNRRF

SEQ ID NO: 1111 - protein, 85 aa, Homo sapiens
RQRTALVIHQRIHTGEKPYPCPDCERRFSSSSRLVSHRRVHSGERPYACEHCEARFSQRSTLLQHQLLHTGEKPYPCPDCGRAFR

SEQ ID NO: 1112 - protein, 85 aa, Homo sapiens
RSGSLAIHRSTHTEEKLHACDDCGRRFAYPSLLASHRRVHSGERPYACDLCSKRFAQWSHLAQHQLLHTGEKPFPCLECGRCFRQ

SEQ ID NO: 1113 - protein, 85 aa, Homo sapiens
SRGYSENNNFLNNNNQMVLDMILYPLIGIPQTINWETIARLVPGLTPKECAKRFDELKSSGSSPVDNQYNSLMAAGESPVETLAT

SEQ ID NO: 1114 - protein, 85 aa, Homo sapiens
YIKSSLLDIHGEFQETPVGHDAVSKTGRHSIASTRNCSSESENCTTHNGGEMTEESEGPNMVIHVCDEAKNLKEDFTCPRDLLIS

SEQ ID NO: 1115 - protein, 85 aa, Homo sapiens
EMKYFAEYLSMDAQRWEEVDISVHCDVHIFNWLIKYIKRNTKENKDCEMPTLEPGNVISILISSEFLKMDSLVEQCIQYCHKNMN

SEQ ID NO: 1116 - protein, 85 aa, Homo sapiens
AIVATPCNMNCINANLLTRIADLFSHNEVDDLKDKKDKFKSKLFCKKIERLFDPEYLNPDSRSNAATLYRCCLCKKLLTKETERR

SEQ ID NO: 1117 - protein, 85 aa, Homo sapiens
IPCIPGKINVDRRGNIVYIHIRDKTWDVHEYLNSLFEELKSWRDVYWRLWGTINWLTCSRCYQAFLCIEFSHCQYHSETVVYPTA

SEQ ID NO: 1118 - protein, 85 aa, Homo sapiens
ASSLNTVGTGIYPCCNQKVLRFDPTQLTKGCKVRDHMVTLRDQGEGGDLPSCPTARMLDDLHKYRDVIVVPFSKDTVSDVGVGLC

SEQ ID NO: 1119 - protein, 85 aa, Homo sapiens
DEKGIECDVLLEPNTPWGPKTGELNAFLSLKNWTLQLKQQSLFSEEEEYTTGSEVTEDEVGDEEEVSKKQRKKEKPKKFTRQPKK

SEQ ID NO: 1120 - protein, 85 aa, Homo sapiens
QVSSPCAQRKEKALEKSASRDVSPFVMSMQKNKWDATRSLRFNQDAQREDDQRRMTEITGHLIKMRLGDLDRVKSKEAKETDKLR

SEQ ID NO: 1121 - protein, 84 aa, Homo sapiens
SMQKNKWDATRSLRFNQDAQREDDQRRMTEITGHLIKMRLGDLDRVKSKEAKETDKLRPRDGTVSKSNRKSGLSSVLLMTVLLC

SEQ ID NO: 1122 - protein, 85 aa, Homo sapiens
PGLTPKECAKRFDELKSSGSSPVDNQYNSLMAAGESPVETLATYIKSSLLDIHGEFQETPVGHDAVSKTGRHSIASTRNCSSESE

SEQ ID NO: 1123 - protein, 85 aa, Homo sapiens
NCTTHNGGEMTEESEGPNMVIHVCDEAKNLKEDFTCPRDLLISEMKYFAEYLSMDAQRWEEVDISVHCDVHIFNWLIKYIKRNTK

SEQ ID NO: 1124 - protein, 85 aa, Homo sapiens
ENKDCEMPTLEPGNVISILISSEFLKMDSLVEQCIQYCHKNMNAIVATPCNMNCINANLLTRIADLFSHNEVDDLKDKKDKFKSK

SEQ ID NO: 1125 - protein, 85 aa, Homo sapiens
LFCKKIERLFDPEYLNPDSRSNAATLYRCCLCKKLLTKETERRIPCIPGKINVDRRGNIVYIHIRDKTWDVHEYLNSLFEELKSW

SEQ ID NO: 1126 - protein, 85 aa, Homo sapiens
RDVYWRLWGTINWLTCSRCYQAFLCIEFSHCQYHSETVVYPTAASSLNTVGTGIYPCCNQKVLRFDPTQLTKGCKVRDHMVTLRD

SEQ ID NO: 1127 - protein, 85 aa, Homo sapiens
QGEGGDLPSCPTARMLDDLHKYRDVIVVPFSKDTVSDVGVGLCDEKGIECDVLLEPNTPWGPKTGELNAFLSLKNWTLQLKQQSL

SEQ ID NO: 1128 - protein, 85 aa, Homo sapiens
FSEEEEYTTGSEVTEDEVGDEEEVSKKQRKKEKPKKFTRQPKKQVSSPCAQRKEKALEKSASRDVSPFVMSMQKNKWDATRSLRF

SEQ ID NO: 1129 - protein, 85 aa, Homo sapiens
MKSQGLVSFKDVAVDFTQEEWQQLDPSQRTLYRDVMLENYSHLVSMGYPVSKPDVISKLEQGEEPWIIKGDISNWIYPDEYQADG

SEQ ID NO: 1130 - protein, 85 aa, Homo sapiens
RQDRKSNLHNSQSCILGTVSFHHKILKGVTRDGSLCSILKVCQGDGQLQRFLENQDKLFRQVTFVNSKTVTEASGHKYNPLGKIF

SEQ ID NO: 1131 - protein, 85 aa, Homo sapiens
QECIETDISIQRFHKYDAFKKNLKPNIDLPSCYKSNSRKKPDQSFGGGKSSSQSEPNSNLEKIHNGVIPFDDNQCGNVFRNTQSL

SEQ ID NO: 1132 - protein, 85 aa, Homo sapiens
IQYQNVETKEKSCVCVTCGKAFAKKSQLIVHQRIHTGKKPYDCGACGKAFSEKFHLVVHQRTHTGEKPYDCSECGKAFSQKSSLI

SEQ ID NO: 1133 - protein, 85 aa, Homo sapiens
IHQRVHTGEKPYECSECGKAFSQKSPLIIHQRIHTGEKPYECRECGKAFSQKSQLIIHHRAHTGEKPYECTECGKAFCEKSHLII

SEQ ID NO: 1134 - protein, 85 aa, Homo sapiens
HKRIHTGEKPYKCAQCEEAFSRKTELITHQLVHTGEKPYECTECGKTFSRKSQLIIHQRTHTGEKPYKCSECGKAFCQKSHLIGH

SEQ ID NO: 1135 - protein, 85 aa, Homo sapiens
QRIHTGEKPYICTECGKAFSQKSHLPGHQRIHTGEKPYICAECGKAFSQKSDLVLHQRIHTGERPYQCAICGKAFIQKSQLTVHQ

SEQ ID NO: 1136 - protein, 84 aa, Homo sapiens
YICTECGKAFSQKSHLPGHQRIHTGEKPYICAECGKAFSQKSDLVLHQRIHTGERPYQCAICGKAFIQKSQLTVHQRIHTVVKS

SEQ ID NO: 1137 - protein, 85 aa, Homo sapiens
MVSMGYPVSKPDVISKLEQGEEPWIIKGDISNWIYPDEYQADGRQDRKSNLHNSQSCILGTVSFHHKILKGVTRDGSLCSILKVC

SEQ ID NO: 1138 - protein, 85 aa, Homo sapiens
QGDGQLQRFLENQDKLFRQVTFVNSKTVTEASGHKYNPLGKIFQECIETDISIQRFHKYDAFKKNLKPNIDLPSCYKSNSRKKPD

SEQ ID NO: 1139 - protein, 85 aa, Homo sapiens
QSFGGGKSSSQSEPNSNLEKIHNGVIPFDDNQCGNVFRNTQSLIQYQNVETKEKSCVCVTCGKAFAKKSQLIVHQRIHTGKKPYD

SEQ ID NO: 1140 - protein, 85 aa, Homo sapiens
CGACGKAFSEKFHLVVHQRTHTGEKPYDCSECGKAFSQKSSLIIHQRVHTGEKPYECSECGKAFSQKSPLIIHQRIHTGEKPYEC

SEQ ID NO: 1141 - protein, 85 aa, Homo sapiens
RECGKAFSQKSQLIIHHRAHTGEKPYECTECGKAFCEKSHLIIHKRIHTGEKPYKCAQCEEAFSRKTELITHQLVHTGEKPYECT

SEQ ID NO: 1142 - protein, 85 aa, Homo sapiens
ECGKTFSRKSQLIIHQRTHTGEKPYKCSECGKAFCQKSHLIGHQRIHTGEKPYICTECGKAFSQKSHLPGHQRIHTGEKPYICAE

SEQ ID NO: 1143 - protein, 85 aa, Homo sapiens
HIKSIILEGFKSYAQRTEVNGFDPLFNAITGLNGSGKSNILDSICFLLGISNLSQVRASNLQDLVYKNGQAGITKASVSITFDNS

SEQ ID NO: 1144 - protein, 85 aa, Homo sapiens
DKKQSPLGFEVHDEITVTRQVVIGGRNKYLINGVNANNTRVQDLFCSVGLNVNNPHFLIMQGRITKVLNMKPPEILSMIEEAAGT

SEQ ID NO: 1145 - protein, 85 aa, Homo sapiens
RMYEYKKIAAQKTIEKKEAKLKEIKTILEEEITPTIQKLKEERSSYLEYQKVMREIEHLSRLYIAYQFLLAEDTKVRSAEELKEM

SEQ ID NO: 1146 - protein, 85 aa, Homo sapiens
QDKVIKLQEELSENDKKIKALNHEIEELEKRKDKETGGILRSLEDALAEAQRVNTKSQSAFDLKKKNLACEESKRKELEKNMVED

SEQ ID NO: 1147 - protein, 85 aa, Homo sapiens
SKTLAAKEKEVKKITDGLHALQEASNKDAEALAAAQQHFNAVSAGLSSNEDGAEATLAGQMMACKNDISKAQTEAKQAQMKLKHA

SEQ ID NO: 1148 - protein, 85 aa, Homo sapiens
QQELKNKQAEVKKMDSGYRKDQEALEAVKRLKEKLEAEMKKLNYEENKEESLLEKRRQLSRDIGRLKETYEALLARFPNLRFAYK

SEQ ID NO: 1149 - protein, 85 aa, Homo sapiens
DPEKNWNRNCVKGLVASLISVKDTSATTALELVAGERLYNVVVDTEVTGKKLLERGELKRRYTIIPLNKISARCIAPETLRVAQN

SEQ ID NO: 1150 - protein, 85 aa, Homo sapiens
LVGPDNVHVALSLVEYKPELQKAMEFVFGTTFVCDNMDNAKKVAFDKRIMTRTVTLGGDVFDPHGTLSGGARSQAASILTKFQEL

SEQ ID NO: 1151 - protein, 85 aa, Homo sapiens
KDVQDELRIKENELRALEEELAGLKNTAEKYRQLKQQWEMKTEEADLLQTKLQQSSYHKQQEELDALKKTIEESEETLKNTKEIQ

SEQ ID NO: 1152 - protein, 85 aa, Homo sapiens
RKAEEKYEVLENKMKNAEAERERELKDAQKKLDCAKTKADASSKKMKEKQQEVEAITLELEELKREHTSYKQQLEAVNEAIKSYE

SEQ ID NO: 1153 - protein, 85 aa, Homo sapiens
SQIEVMAAEVAKNKESVNKAQEEVTKQKEVITAQDTVIKAKYAEVAKHKEQNNDSQLKIKELDHNISKHKREAEDGAAKVSKMLK

SEQ ID NO: 1154 - protein, 85 aa, Homo sapiens
DYDWINAERHLFGQPNSAYDFKTNNPKEAGQRLQKLQEMKEKLGRNVNMRAMNVLTEAEERYNDLMKKKRIVENDKSKILTTIED

SEQ ID NO: 1155 - protein, 85 aa, Homo sapiens
LDQKKNQALNIAWQKVNKDFGSIFSTLLPGANAMLAPPEGQTVLDGLEFKVALGNTWKENLTELSGGQRSLVALSLILSMLLFKP

SEQ ID NO: 1156 - protein, 85 aa, Homo sapiens
APIYILDEVDAALDLSHTQNIGQMLRTHFTHSQFIVVSLKEGMFNNANVLFKTKFVDGVSTVARFTQCQNGKISKEAKSKAKPPK

SEQ ID NO: 1157 - protein, 84 aa, Homo sapiens
EVDAALDLSHTQNIGQMLRTHFTHSQFIVVSLKEGMFNNANVLFKTKFVDGVSTVARFTQCQNGKISKEAKSKAKPPKGAHVEV

SEQ ID NO: 1158 - protein, 85 aa, Homo sapiens
SICFLLGISNLSQVRASNLQDLVYKNGQAGITKASVSITFDNSDKKQSPLGFEVHDEITVTRQVVIGGRNKYLINGVNANNTRVQ

SEQ ID NO: 1159 - protein, 85 aa, Homo sapiens
DLFCSVGLNVNNPHFLIMQGRITKVLNMKPPEILSMIEEAAGTRMYEYKKIAAQKTIEKKEAKLKEIKTILEEEITPTIQKLKEE

SEQ ID NO: 1160 - protein, 85 aa, Homo sapiens
RSSYLEYQKVMREIEHLSRLYIAYQFLLAEDTKVRSAEELKEMQDKVIKLQEELSENDKKIKALNHEIEELEKRKDKETGGILRS

SEQ ID NO: 1161 - protein, 85 aa, Homo sapiens
LEDALAEAQRVNTKSQSAFDLKKKNLACEESKRKELEKNMVEDSKTLAAKEKEVKKITDGLHALQEASNKDAEALAAAQQHFNAV

SEQ ID NO: 1162 - protein, 85 aa, Homo sapiens
SAGLSSNEDGAEATLAGQMMACKNDISKAQTEAKQAQMKLKHAQQELKNKQAEVKKMDSGYRKDQEALEAVKRLKEKLEAEMKKL

SEQ ID NO: 1163 - protein, 85 aa, Homo sapiens
NYEENKEESLLEKRRQLSRDIGRLKETYEALLARFPNLRFAYKDPEKNWNRNCVKGLVASLISVKDTSATTALELVAGERLYNVV

SEQ ID NO: 1164 - protein, 85 aa, Homo sapiens
VDTEVTGKKLLERGELKRRYTIIPLNKISARCIAPETLRVAQNLVGPDNVHVALSLVEYKPELQKAMEFVFGTTFVCDNMDNAKK

SEQ ID NO: 1165 - protein, 85 aa, Homo sapiens
VAFDKRIMTRTVTLGGDVFDPHGTLSGGARSQAASILTKFQELKDVQDELRIKENELRALEEELAGLKNTAEKYRQLKQQWEMKT

SEQ ID NO: 1166 - protein, 85 aa, Homo sapiens
EEADLLQTKLQQSSYHKQQEELDALKKTIEESEETLKNTKEIQRKAEEKYEVLENKMKNAEAERERELKDAQKKLDCAKTKADAS

SEQ ID NO: 1167 - protein, 85 aa, Homo sapiens
SKKMKEKQQEVEAITLELEELKREHTSYKQQLEAVNEAIKSYESQIEVMAAEVAKNKESVNKAQEEVTKQKEVITAQDTVIKAKY

SEQ ID NO: 1168 - protein, 85 aa, Homo sapiens
AEVAKHKEQNNDSQLKIKELDHNISKHKREAEDGAAKVSKMLKDYDWINAERHLFGQPNSAYDFKTNNPKEAGQRLQKLQEMKEK

SEQ ID NO: 1169 - protein, 85 aa, Homo sapiens
LGRNVNMRAMNVLTEAEERYNDLMKKKRIVENDKSKILTTIEDLDQKKNQALNIAWQKVNKDFGSIFSTLLPGANAMLAPPEGQT

SEQ ID NO: 1170 - protein, 85 aa, Homo sapiens
VLDGLEFKVALGNTWKENLTELSGGQRSLVALSLILSMLLFKPAPIYILDEVDAALDLSHTQNIGQMLRTHFTHSQFIVVSLKEG

SEQ ID NO: 1171 - protein, 85 aa, Homo sapiens
VCSPVTLRIAPPDRRFSRSAIPEQIISSTLSSPSSNAPDPCAKETVLSALKEKKKKRTVEEEDQIFLDGQENKRSCLVDGLTDAS

SEQ ID NO: 1172 - protein, 84 aa, Homo sapiens
SSPSSNAPDPCAKETVLSALKEKKKKRTVEEEDQIFLDGQENKRSCLVDGLTDASSAFKVPRPGPDTLQFTVDVFHFANDSRNM

SEQ ID NO: 1173 - protein, 85 aa, Homo sapiens
MQEESDLSLIIAQIVQKLKGSNLYSQLERQAWASLQRPEIKLESLKEDIKEFFKISGWEKKLQNAVYSELSVFPLPSHPAAPPEH

SEQ ID NO: 1174 - protein, 85 aa, Homo sapiens
LKEPLVYMRKAQGSWEKRILKSLNSMCTELSIPLARKRPVGEQKELLNKWNEMGTDEPDLSLFRPVYAPKDFLEVLINLRNPNYE

SEQ ID NO: 1175 - protein, 85 aa, Homo sapiens
NGDSLSFRTHLGLIQVPLKVKDIPELKECFVELGLNIGQLGIDDSTQVPPELFENEHVRIGQKVLAEQDSAAAQQYIRQGSPTAL

SEQ ID NO: 1176 - protein, 85 aa, Homo sapiens
RAELWALILNISSQPEDVLYYEQLKTNVIQHDLLVDSLIYKDVKLTASNDDYYFVFEDYLYQVLLCFSRDTSVLSHFAFNSASPP

SEQ ID NO: 1177 - protein, 85 aa, Homo sapiens
KSYIRGKLGLEEYAVFYPPNGVIPFHGFSMYVAPLCFLYHEPSKLYQIFREMYVRFFFRLHSISSHPSGIVSLCLLFETLLQTYL

SEQ ID NO: 1178 - protein, 85 aa, Homo sapiens
PQLFYHLREIGAQPLRISFKWMVRAFSGYLATDQLLLLWDRILGYNSLEILAVLAAAVFAFRAVNLMEVTSLAAAEAVLADLSTL

SEQ ID NO: 1179 - protein, 84 aa, Homo sapiens
ISFKWMVRAFSGYLATDQLLLLWDRILGYNSLEILAVLAAAVFAFRAVNLMEVTSLAAAEAVLADLSTLKVMPLLQIFLFATVT

SEQ ID NO: 1180 - protein, 85 aa, Homo sapiens
ESLKEDIKEFFKISGWEKKLQNAVYSELSVFPLPSHPAAPPEHLKEPLVYMRKAQGSWEKRILKSLNSMCTELSIPLARKRPVGE

SEQ ID NO: 1181 - protein, 85 aa, Homo sapiens
QKELLNKWNEMGTDEPDLSLFRPVYAPKDFLEVLINLRNPNYENGDSLSFRTHLGLIQVPLKVKDIPELKECFVELGLNIGQLGI

SEQ ID NO: 1182 - protein, 85 aa, Homo sapiens
DDSTQVPPELFENEHVRIGQKVLAEQDSAAAQQYIRQGSPTALRAELWALILNISSQPEDVLYYEQLKTNVIQHDLLVDSLIYKD

SEQ ID NO: 1183 - protein, 85 aa, Homo sapiens
VKLTASNDDYYFVFEDYLYQVLLCFSRDTSVLSHFAFNSASPPKSYIRGKLGLEEYAVFYPPNGVIPFHGFSMYVAPLCFLYHEP

SEQ ID NO: 1184 - protein, 85 aa, Homo sapiens
SKLYQIFREMYVRFFFRLHSISSHPSGIVSLCLLFETLLQTYLPQLFYHLREIGAQPLRISFKWMVRAFSGYLATDQLLLLWDRI

SEQ ID NO: 1185 - protein, 85 aa, Homo sapiens
DPGQQPPPQPAPQGQGQPPSQPPQGQGPPSGPGQPAPAATQAAPQAPPAGHQIVHVRGDSETDLEALFNAVMNPKTANVPQTVPM

SEQ ID NO: 1186 - protein, 85 aa, Homo sapiens
RLRKLPDSFFKPPEPKSHSRQASTDAGTAGALTPQHVRAHSSPASLQLGAVSPGTLTPTGVVSGPAATPTAQHLRQSSFEIPDDV

SEQ ID NO: 1187 - protein, 85 aa, Homo sapiens
PLPAGWEMAKTSSGQRYFLNHIDQTTTWQDPRKAMLSQMNVTAPTSPPVQQNMMNSASGPLPDGWEQAMTQDGEIYYINHKNKTT

SEQ ID NO: 1188 - protein, 85 aa, Homo sapiens
SWLDPRLDPRFAMNQRISQSAPVKQPPPLAPQSPQGGVMGGSNSNQQQQMRLQQLQMEKERLRLKQQELLRQAMRNINPSTANSP

SEQ ID NO: 1189 - protein, 85 aa, Homo sapiens
KCQELALRSQLPTLEQDGGTQNPVSSPGMSQELRTMTTNSSDPFLNSGTYHSRDESTDSGLSMSSYSVPRTPDDFLNSVDEMDTG

SEQ ID NO: 1190 - protein, 84 aa, Homo sapiens
DEMDTGDTINQSTLPSQQNRFPDYLEAIPGTNVDLGTLEGDGMNIEGEELMPSLQEALSSDILNDMESVLAATKLDKESFLTWL

SEQ ID NO: 1191 - protein, 85 aa, Homo sapiens
APQAPPAGHQIVHVRGDSETDLEALFNAVMNPKTANVPQTVPMRLRKLPDSFFKPPEPKSHSRQASTDAGTAGALTPQHVRAHSS

SEQ ID NO: 1192 - protein, 85 aa, Homo sapiens
PASLQLGAVSPGTLTPTGVVSGPAATPTAQHLRQSSFEIPDDVPLPAGWEMAKTSSGQRYFLNHIDQTTTWQDPRKAMLSQMNVT

SEQ ID NO: 1193 - protein, 85 aa, Homo sapiens
APTSPPVQQNMMNSASGPLPDGWEQAMTQDGEIYYINHKNKTTSWLDPRLDPRFAMNQRISQSAPVKQPPPLAPQSPQGGVMGGS

SEQ ID NO: 1194 - protein, 85 aa, Homo sapiens
NSNQQQQMRLQQLQMEKERLRLKQQELLRQAMRNINPSTANSPKCQELALRSQLPTLEQDGGTQNPVSSPGMSQELRTMTTNSSD

SEQ ID NO: 1195 - protein, 85 aa, Homo sapiens
PFLNSGTYHSRDESTDSGLSMSSYSVPRTPDDFLNSVDEMDTGDTINQSTLPSQQNRFPDYLEAIPGTNVDLGTLEGDGMNIEGE

SEQ ID NO: 1196 - protein, 85 aa, Homo sapiens
RRLAAEELGVVTMQRIFNSFVYTEKISNGESEVQQLAKKIREKFNRYLDVVNRNKQVVEASYTAHLTSPLTAIQDCCTIPPSMME

SEQ ID NO: 1197 - protein, 85 aa, Homo sapiens
FDGNFNTNVSRTISCDRLSTTVNSRAFNPGRDLNSVLADNLKSNPGIKWQYFSSEEGIFTVFPAHKFRCKGSYEHRSRPIYVSTV

SEQ ID NO: 1198 - protein, 85 aa, Homo sapiens
RPQSKHIVVILDHGASVTDTQLQIAKDAAQVILSAIDEHDKISVLTVADTVRTCSLDQCYKTFLSPATSETKRKMSTFVSSVKSS

SEQ ID NO: 1199 - protein, 85 aa, Homo sapiens
DSPTQHAVGFQKAFQLIRSTNNNTKFQANTDMVIIYLSAGITSKDSSEEDKKATLQVINEENSFLNNSVMILTYALMNDGVTGLK

SEQ ID NO: 1200 - protein, 85 aa, Homo sapiens
ELAFLRDLAEQNSGKYGVPDRMALPVIKGSMMVLNQLSNLETTVGRFYTNLPNRMIDEAVFSLPFSDEMGDGLIMTVSKPCYFGN

SEQ ID NO: 1201 - protein, 85 aa, Homo sapiens
LLLGIVGVDVNLAYILEDVTYYQDSLASYTFLIDDKGYTLMHPSLTRPYLLSEPPLHTDIIHYENIPKFELVRQNILSLPLGSQI

SEQ ID NO: 1202 - protein, 85 aa, Homo sapiens
IAVPVNSSLSWHINKLRETGKEAYNVSYAWKMVQDTSFILCIVVIQPEIPVKQLKNLNTVPSSKLLYHRLDLLGQPSACLHFKQL

SEQ ID NO: 1203 - protein, 85 aa, Homo sapiens
ATLESPTIMLSAGSFSSPYEHLSQPETKRMVEHYTAYLSDNTRLIANPGLKFSVRNEVMATSHVTDEWMTQMEMSSLNTYIVRRY

SEQ ID NO: 1204 - protein, 85 aa, Homo sapiens
IATPNGVLRIYPGSLMDKAFDPTRRQWYLHAVANPGLISLTGPYLDVGGAGYVVTISHTIHSSSTQLSSGHTVAVMGIDFTLRYF

SEQ ID NO: 1205 - protein, 85 aa, Homo sapiens
YKVLMDLLPVCNQDGGNKIRCFIMEDRGYLVAHPTLIDPKGHAPVEQQHITHKEPLVANDILNHPNFVKKNLCNSFSDRTVQRFY

SEQ ID NO: 1206 - protein, 85 aa, Homo sapiens
KFNTSLAGDLTNLVHGSHCSKYRLARIPGTNAFVGIVNETCDSLAFCACSMVDRLCLNCHRMEQNECECPCECPLEVNECTGNLT

SEQ ID NO: 1207 - protein, 85 aa, Homo sapiens
NAENRNPSCEVHQEPVTYTAIDPGLQDALHQCVNSRCSQRLESGDCFGVLDCEWCMVDSDGKTHLDKPYCAPQKECFGGIVGAKS

SEQ ID NO: 1208 - protein, 85 aa, Homo sapiens
PYVDDMGAIGDEVITLNMIKSAPVGPVAGGIMGCIMVLVLAVYAYRHQIHRRSHQHMSPLAAQEMSVRMSNLENDRDERDDDSHE

SEQ ID NO: 1209 - protein, 85 aa, Homo sapiens
DRGIISNTRFIAAVIERHAHSPERRRRYWGRSGTESDHGYSTMSPQEDSENPPCNNDPLSAGVDVGNHDEDLDLDTPPQTAALLS

SEQ ID NO: 1210 - protein, 84 aa, Homo sapiens
TESDHGYSTMSPQEDSENPPCNNDPLSAGVDVGNHDEDLDLDTPPQTAALLSHKFHHYRSHHPTLHHSHHLQAAVTVHTVDAEC

SEQ ID NO: 1211 - protein, 85 aa, Homo sapiens
KFNRYLDVVNRNKQVVEASYTAHLTSPLTAIQDCCTIPPSMMEFDGNFNTNVSRTISCDRLSTTVNSRAFNPGRDLNSVLADNLK

SEQ ID NO: 1212 - protein, 85 aa, Homo sapiens
SNPGIKWQYFSSEEGIFTVFPAHKFRCKGSYEHRSRPIYVSTVRPQSKHIVVILDHGASVTDTQLQIAKDAAQVILSAIDEHDKI

SEQ ID NO: 1213 - protein, 85 aa, Homo sapiens
SVLTVADTVRTCSLDQCYKTFLSPATSETKRKMSTFVSSVKSSDSPTQHAVGFQKAFQLIRSTNNNTKFQANTDMVIIYLSAGIT

SEQ ID NO: 1214 - protein, 85 aa, Homo sapiens
SKDSSEEDKKATLQVINEENSFLNNSVMILTYALMNDGVTGLKELAFLRDLAEQNSGKYGVPDRMALPVIKGSMMVLNQLSNLET

SEQ ID NO: 1215 - protein, 85 aa, Homo sapiens
TVGRFYTNLPNRMIDEAVFSLPFSDEMGDGLIMTVSKPCYFGNLLLGIVGVDVNLAYILEDVTYYQDSLASYTFLIDDKGYTLMH

SEQ ID NO: 1216 - protein, 85 aa, Homo sapiens
PSLTRPYLLSEPPLHTDIIHYENIPKFELVRQNILSLPLGSQIIAVPVNSSLSWHINKLRETGKEAYNVSYAWKMVQDTSFILCI

SEQ ID NO: 1217 - protein, 85 aa, Homo sapiens
VVIQPEIPVKQLKNLNTVPSSKLLYHRLDLLGQPSACLHFKQLATLESPTIMLSAGSFSSPYEHLSQPETKRMVEHYTAYLSDNT

SEQ ID NO: 1218 - protein, 85 aa, Homo sapiens
RLIANPGLKFSVRNEVMATSHVTDEWMTQMEMSSLNTYIVRRYIATPNGVLRIYPGSLMDKAFDPTRRQWYLHAVANPGLISLTG

SEQ ID NO: 1219 - protein, 85 aa, Homo sapiens
PYLDVGGAGYVVTISHTIHSSSTQLSSGHTVAVMGIDFTLRYFYKVLMDLLPVCNQDGGNKIRCFIMEDRGYLVAHPTLIDPKGH

SEQ ID NO: 1220 - protein, 85 aa, Homo sapiens
APVEQQHITHKEPLVANDILNHPNFVKKNLCNSFSDRTVQRFYKFNTSLAGDLTNLVHGSHCSKYRLARIPGTNAFVGIVNETCD

SEQ ID NO: 1221 - protein, 85 aa, Homo sapiens
SLAFCACSMVDRLCLNCHRMEQNECECPCECPLEVNECTGNLTNAENRNPSCEVHQEPVTYTAIDPGLQDALHQCVNSRCSQRLE

SEQ ID NO: 1222 - protein, 85 aa, Homo sapiens
SGDCFGVLDCEWCMVDSDGKTHLDKPYCAPQKECFGGIVGAKSPYVDDMGAIGDEVITLNMIKSAPVGPVAGGIMGCIMVLVLAV

SEQ ID NO: 1223 - protein, 85 aa, Homo sapiens
YAYRHQIHRRSHQHMSPLAAQEMSVRMSNLENDRDERDDDSHEDRGIISNTRFIAAVIERHAHSPERRRRYWGRSGTESDHGYST

SEQ ID NO: 1224 - protein, 85 aa, Homo sapiens
EMQSPIVQRQERQVRDRGVTRSKAEKVRPPTVPVPQVDIVPGRLSEAEWMALTALEEGEDVVGDILADLLARVMDSAFKVYLTQQ

SEQ ID NO: 1225 - protein, 85 aa, Homo sapiens
CIPFTISQAREAMLQITEWRFLARDEGESAVAEDPTWGEDEEPSACTTDSWAQGSVPVLHASTSEGLENFQGEDPGGVDRIPLGR

SEQ ID NO: 1226 - protein, 85 aa, Homo sapiens
SWMGRGSQEQMESWEPSPQLRVTSAPPPTSELFQEAGPGGPVEEADGQSRGLSSAGSLSASFQLSVEEAPADDADPSLDPYLVAS

SEQ ID NO: 1227 - protein, 85 aa, Homo sapiens
PQASTGRGHPLGFHLSLEDLYCCMPQLDAAGDRLELRSEGVPCIASGVLVSYPSVGGATRPSASCQQQRAGHSDVRLSAHHHRMR

SEQ ID NO: 1228 - protein, 85 aa, Homo sapiens
RKAAVKRLDPARLPCHWVRPLAEVLVPDSQTRPLEAYRGRQRGEKTKARAEPQALGPGTRVSPAAFFPLRPGIPFRDLDSGPALL

SEQ ID NO: 1229 - protein, 85 aa, Homo sapiens
FPTLNLGLSSPSLESKLPLPNSRIRFLTTHPVLPDVARSRSPKLWPSVRWPSGWEGKAELLGELWAGRTRVPPQGLELADREGQD

SEQ ID NO: 1230 - protein, 84 aa, Homo sapiens
ADREGQDPGRWPRTTPPVLEATSQVMWKPVLLPEALKLAPGVSMWNRSTQVLLSSGVPEQEDKEGSTFPPVEQHPIQTGAPKPR

SEQ ID NO: 1231 - protein, 85 aa, Homo sapiens
RLSEAEWMALTALEEGEDVVGDILADLLARVMDSAFKVYLTQQCIPFTISQAREAMLQITEWRFLARDEGESAVAEDPTWGEDEE

SEQ ID NO: 1232 - protein, 85 aa, Homo sapiens
PSACTTDSWAQGSVPVLHASTSEGLENFQGEDPGGVDRIPLGRSWMGRGSQEQMESWEPSPQLRVTSAPPPTSELFQEAGPGGPV

SEQ ID NO: 1233 - protein, 85 aa, Homo sapiens
EEADGQSRGLSSAGSLSASFQLSVEEAPADDADPSLDPYLVASPQASTGRGHPLGFHLSLEDLYCCMPQLDAAGDRLELRSEGVP

SEQ ID NO: 1234 - protein, 85 aa, Homo sapiens
CIASGVLVSYPSVGGATRPSASCQQQRAGHSDVRLSAHHHRMRRKAAVKRLDPARLPCHWVRPLAEVLVPDSQTRPLEAYRGRQR

SEQ ID NO: 1235 - protein, 85 aa, Homo sapiens
GEKTKARAEPQALGPGTRVSPAAFFPLRPGIPFRDLDSGPALLFPTLNLGLSSPSLESKLPLPNSRIRFLTTHPVLPDVARSRSP

SEQ ID NO: 1236 - protein, 85 aa, Homo sapiens
KLWPSVRWPSGWEGKAELLGELWAGRTRVPPQGLELADREGQDPGRWPRTTPPVLEATSQVMWKPVLLPEALKLAPGVSMWNRST

SEQ ID NO: 1237 - protein, 85 aa, Homo sapiens
RQVCCSALPPPPLEKGRCSSYSDSSSSSSERSSSSSSSSSESGSSSRSSSNNSSISRPAAPPEPRPQQQPQPRSPAARRAAARSR

SEQ ID NO: 1238 - protein, 85 aa, Homo sapiens
AAAAGGMRRDPAPGFSMLLFGVSLACYSPSLKSVQDQAYKAPVVVEGKVQGLVPAGGSSSNSTREPPASGRVALVKVLDKWPLRS

SEQ ID NO: 1239 - protein, 85 aa, Homo sapiens
GGLQREQVISVGSCVPLERNQRYIFFLEPTEQPLVFKTAFAPLDTNGKNLKKEVGKILCTDCATRPKLKKMKSQTGQVGEKQSLK

SEQ ID NO: 1240 - protein, 85 aa, Homo sapiens
CEAAAGNPQPSYRWFKDGKELNRSRDIRIKYGNGRKNSRLQFNKVKVEDAGEYVCEAENILGKDTVRGRLYVNSVSTTLSSWSGH

SEQ ID NO: 1241 - protein, 85 aa, Homo sapiens
ARKCNETAKSYCVNGGVCYYIEGINQLSCKCPVGYTGDRCQQFAMVNFSKAEELYQKRVLTITGICVALLVVGIVCVVAYCKTKK

SEQ ID NO: 1242 - protein, 85 aa, Homo sapiens
QRKQMHNHLRQNMCPAHQNRSLANGPSHPRLDPEEIQMADYISKNVPATDHVIRRETETTFSGSHSCSPSHHCSTATPTSSHRHE

SEQ ID NO: 1243 - protein, 85 aa, Homo sapiens
SHTWSLERSESLTSDSQSGIMLSSVGTSKCNSPACVEARARRAAAYNLEERRRATAPPYHDSVDSLRDSPHSERYVSALTTPARL

SEQ ID NO: 1244 - protein, 85 aa, Homo sapiens
SPVDFHYSLATQVPTFEITSPNSAHAVSLPPAAPISYRLAEQQPLLRHPAPPGPGPGPGPGPGPGADMQRSYDSYYYPAAGPGPR

SEQ ID NO: 1245 - protein, 85 aa, Homo sapiens
RGTCALGGSLGSLPASPFRIPEDDEYETTQECAPPPPPRPRARGASRRTSAGPRRWRRSRLNGLAAQRARAARDSLSLSSGSGGG

SEQ ID NO: 1246 - protein, 84 aa, Homo sapiens
SGSGGGSASASDDDADDADGALAAESTPFLGLRGAHDALRSDSPPLCPAADSRTYYSLDSHSTRASSRHSRGPPPRAKQDSAPL

SEQ ID NO: 1247 - protein, 85 aa, Homo sapiens
GSSSRSSSNNSSISRPAAPPEPRPQQQPQPRSPAARRAAARSRAAAAGGMRRDPAPGFSMLLFGVSLACYSPSLKSVQDQAYKAP

SEQ ID NO: 1248 - protein, 85 aa, Homo sapiens
VVVEGKVQGLVPAGGSSSNSTREPPASGRVALVKVLDKWPLRSGGLQREQVISVGSCVPLERNQRYIFFLEPTEQPLVFKTAFAP

SEQ ID NO: 1249 - protein, 85 aa, Homo sapiens
LDTNGKNLKKEVGKILCTDCATRPKLKKMKSQTGQVGEKQSLKCEAAAGNPQPSYRWFKDGKELNRSRDIRIKYGNGRKNSRLQF

SEQ ID NO: 1250 - protein, 85 aa, Homo sapiens
NKVKVEDAGEYVCEAENILGKDTVRGRLYVNSVSTTLSSWSGHARKCNETAKSYCVNGGVCYYIEGINQLSCKCPVGYTGDRCQQ

SEQ ID NO: 1251 - protein, 85 aa, Homo sapiens
FAMVNFSKAEELYQKRVLTITGICVALLVVGIVCVVAYCKTKKQRKQMHNHLRQNMCPAHQNRSLANGPSHPRLDPEEIQMADYI

SEQ ID NO: 1252 - protein, 85 aa, Homo sapiens
SKNVPATDHVIRRETETTFSGSHSCSPSHHCSTATPTSSHRHESHTWSLERSESLTSDSQSGIMLSSVGTSKCNSPACVEARARR

SEQ ID NO: 1253 - protein, 85 aa, Homo sapiens
AAAYNLEERRRATAPPYHDSVDSLRDSPHSERYVSALTTPARLSPVDFHYSLATQVPTFEITSPNSAHAVSLPPAAPISYRLAEQ

SEQ ID NO: 1254 - protein, 85 aa, Homo sapiens
QPLLRHPAPPGPGPGPGPGPGPGADMQRSYDSYYYPAAGPGPRRGTCALGGSLGSLPASPFRIPEDDEYETTQECAPPPPPRPRA

SEQ ID NO: 1255 - protein, 85 aa, Homo sapiens
RGASRRTSAGPRRWRRSRLNGLAAQRARAARDSLSLSSGSGGGSASASDDDADDADGALAAESTPFLGLRGAHDALRSDSPPLCP

SEQ ID NO: 1256 - protein, 85 aa, Homo sapiens
QSNKTFNLEKQNHTPRKHHQHHHQQQHHQQQQQQPPPPPIPANGQQASSQNEGLTIDLKNFRKPGEKTFTQRSRLFVGNLPPDIT

SEQ ID NO: 1257 - protein, 85 aa, Homo sapiens
EEEMRKLFEKYGKAGEVFIHKDKGFGFIRLETRTLAEIAKVELDNMPLRGKQLRVRFACHSASLTVRNLPQYVSNELLEEAFSVF

SEQ ID NO: 1258 - protein, 85 aa, Homo sapiens
GQVERAVVIVDDRGRPSGKGIVEFSGKPAARKALDRCSEGSFLLTTFPRPVTVEPMDQLDDEEGLPEKLVIKNQQFHKEREQPPR

SEQ ID NO: 1259 - protein, 85 aa, Homo sapiens
FAQPGSFEYEYAMRWKALIEMEKQQQDQVDRNIKEAREKLEMEMEAARHEHQVMLMRQDLMRRQEELRRMEELHNQEVQKRKQLE

SEQ ID NO: 1260 - protein, 85 aa, Homo sapiens
LRQEEERRRREEEMRRQQEEMMRRQQEGFKGTFPDAREQEIRMGQMAMGGAMGINNRGAMPPAPVPAGTPAPPGPATMMPDGTLG

SEQ ID NO: 1261 - protein, 84 aa, Homo sapiens
AMGGAMGINNRGAMPPAPVPAGTPAPPGPATMMPDGTLGLTPPTTERFGQAATMEGIGAIGGTPPAFNRAAPGAEFAPNKRRRY

SEQ ID NO: 1262 - protein, 85 aa, Homo sapiens
NGQQASSQNEGLTIDLKNFRKPGEKTFTQRSRLFVGNLPPDITEEEMRKLFEKYGKAGEVFIHKDKGFGFIRLETRTLAEIAKVE

SEQ ID NO: 1263 - protein, 85 aa, Homo sapiens
MDNMPLRGKQLRVRFACHSASLTVRNLPQYVSNELLEEAFSVFGQVERAVVIVDDRGRPSGKGIVEFSGKPAARKALDRCSEGSF

SEQ ID NO: 1264 - protein, 85 aa, Homo sapiens
MLTTFPRPVTVEPMDQLDDEEGLPEKLVIKNQQFHKEREQPPRFAQPGSFEYEYAMRWKALIEMEKQQQDQVDRNIKEAREKLEM

SEQ ID NO: 1265 - protein, 85 aa, Homo sapiens
EMEAARHEHQVMLMRQDLMRRQEELRRMEELHNQEVQKRKQLELRQEEERRRREEEMRRQQEEMMRRQQEGFKGTFPDAREQEIR

SEQ ID NO: 1266 - protein, 85 aa, Homo sapiens
MGQMAMGGAMGINNRGAMPPAPVPAGTPAPPGPATMMPDGTLGLTPPTTERFGQAATMEGIGAIGGTPPAFNRAAPGAEFAPNKR

SEQ ID NO: 1267 - protein, 85 aa, Homo sapiens
SSRKSKSNSLIHTECLSQVQRILRERFCRQSPHSNLFGVQVQYKHLSELLKRTALHGESNSVLIIGPRGSGKTMLINHALKELME

SEQ ID NO: 1268 - protein, 85 aa, Homo sapiens
IEEVSENVLQVHLNGLLQINDKIALKEITRQLNLENVVGDKVFGSFAENLSFLLEALKKGDRTSSCPVIFILDEFDLFAHHKNQT

SEQ ID NO: 1269 - protein, 85 aa, Homo sapiens
LLYNLFDISQSAQTPIAVIGLTCRLDILELLEKRVKSRFSHRQIHLMNSFGFPQYVKIFKEQLSLPAEFPDKVFAEKWNENVQYL

SEQ ID NO: 1270 - protein, 85 aa, Homo sapiens
SEDRSVQEVLQKHFNISKNLRSLHMLLMLALNRVTASHPFMTAVDLMEASQLCSMDSKANIVHGLSVLEICLIIAMKHLNDIYEE

SEQ ID NO: 1271 - protein, 85 aa, Homo sapiens
EPFNFQMVYNEFQKFVQRKAHSVYNFEKPVVMKAFEHLQQLELIKPMERTSGNSQREYQLMKLLLDNTQIMNALQKYPNCPTDVR

SEQ ID NO: 1272 - protein, 84 aa, Homo sapiens
FQKFVQRKAHSVYNFEKPVVMKAFEHLQQLELIKPMERTSGNSQREYQLMKLLLDNTQIMNALQKYPNCPTDVRQWATSSLSWL

SEQ ID NO: 1273 - protein, 85 aa, Homo sapiens
YKHLSELLKRTALHGESNSVLIIGPRGSGKTMLINHALKELMEIEEVSENVLQVHLNGLLQINDKIALKEITRQLNLENVVGDKV

SEQ ID NO: 1274 - protein, 85 aa, Homo sapiens
FGSFAENLSFLLEALKKGDRTSSCPVIFILDEFDLFAHHKNQTLLYNLFDISQSAQTPIAVIGLTCRLDILELLEKRVKSRFSHR

SEQ ID NO: 1275 - protein, 85 aa, Homo sapiens
QIHLMNSFGFPQYVKIFKEQLSLPAEFPDKVFAEKWNENVQYLSEDRSVQEVLQKHFNISKNLRSLHMLLMLALNRVTASHPFMT

SEQ ID NO: 1276 - protein, 85 aa, Homo sapiens
AVDLMEASQLCSMDSKANIVHGLSVLEICLIIAMKHLNDIYEEEPFNFQMVYNEFQKFVQRKAHSVYNFEKPVVMKAFEHLQQLE

SEQ ID NO: 1277 - protein, 85 aa, Homo sapiens
ARKCNETAKSYCVNGGVCYYIEGINQLSCKCPNGFFGQRCLEKLPLRLYMPDPKQKHLGFELKEAEELYQKRVLTITGICVALLV

SEQ ID NO: 1278 - protein, 85 aa, Homo sapiens
VGIVCVVAYCKTKKQRKQMHNHLRQNMCPAHQNRSLANGPSHPRLDPEEIQMADYISKNVPATDHVIRRETETTFSGSHSCSPSH

SEQ ID NO: 1279 - protein, 85 aa, Homo sapiens
HCSTATPTSSHRHESHTWSLERSESLTSDSQSGIMLSSVGTSKCNSPACVEARARRAAAYNLEERRRATAPPYHDSVDSLRDSPH

SEQ ID NO: 1280 - protein, 85 aa, Homo sapiens
SERYVSALTTPARLSPVDFHYSLATQVPTFEITSPNSAHAVSLPPAAPISYRLAEQQPLLRHPAPPGPGPGPGPGPGPGADMQRS

SEQ ID NO: 1281 - protein, 85 aa, Homo sapiens
YDSYYYPAAGPGPRRGTCALGGSLGSLPASPFRIPEDDEYETTQECAPPPPPRPRARGASRRTSAGPRRWRRSRLNGLAAQRARA

SEQ ID NO: 1282 - protein, 85 aa, Homo sapiens
ARDSLSLSSGSGGGSASASDDDADDADGALAAESTPFLGLRGAHDALRSDSPPLCPAADSRTYYSLDSHSTRASSRHSRGPPPRA

SEQ ID NO: 1283 - protein, 85 aa, Homo sapiens
NKVKVEDAGEYVCEAENILGKDTVRGRLYVNSVSTTLSSWSGHARKCNETAKSYCVNGGVCYYIEGINQLSCKCPNGFFGQRCLE

SEQ ID NO: 1284 - protein, 85 aa, Homo sapiens
KLPLRLYMPDPKQKHLGFELKEAEELYQKRVLTITGICVALLVVGIVCVVAYCKTKKQRKQMHNHLRQNMCPAHQNRSLANGPSH

SEQ ID NO: 1285 - protein, 85 aa, Homo sapiens
PRLDPEEIQMADYISKNVPATDHVIRRETETTFSGSHSCSPSHHCSTATPTSSHRHESHTWSLERSESLTSDSQSGIMLSSVGTS

SEQ ID NO: 1286 - protein, 85 aa, Homo sapiens
KCNSPACVEARARRAAAYNLEERRRATAPPYHDSVDSLRDSPHSERYVSALTTPARLSPVDFHYSLATQVPTFEITSPNSAHAVS

SEQ ID NO: 1287 - protein, 85 aa, Homo sapiens
MPPAAPISYRLAEQQPLLRHPAPPGPGPGPGPGPGPGADMQRSYDSYYYPAAGPGPRRGTCALGGSLGSLPASPFRIPEDDEYET

SEQ ID NO: 1288 - protein, 85 aa, Homo sapiens
TQECAPPPPPRPRARGASRRTSAGPRRWRRSRLNGLAAQRARAARDSLSLSSGSGGGSASASDDDADDADGALAAESTPFLGLRG

SEQ ID NO: 1289 - protein, 85 aa, Homo sapiens
GPLQFRDVAIEFSLEEWHCLDTAQRNLYRNVMLENYSNLVFLGITVSKPDLITCLEQGRKPLTMKRNEMIAKPSVSFLQVHSESQ

SEQ ID NO: 1290 - protein, 84 aa, Homo sapiens
VAIEFSLEEWHCLDTAQRNLYRNVMLENYSNLVFLGITVSKPDLITCLEQGRKPLTMKRNEMIAKPSVSFLQVHSESQSPLHDI

SEQ ID NO: 1291 - protein, 85 aa, Homo sapiens
VVFRVHLLLGGERMEDALSEVDFQLKVDLHFTDSEQQLRDVAGAPMVSSRTLGLHFHPRNGLHHQVPVMFDYFHLSVISVTVHAA

SEQ ID NO: 1292 - protein, 85 aa, Homo sapiens
MVALQQPLISFTRPGRGSWLGKGGPDTGQEQSIISLENLVFGAGYCKPTSSEGSFYITSENCMQHAHKWHRDLCLLLLHAYRGLR

SEQ ID NO: 1293 - protein, 85 aa, Homo sapiens
LHFLVIMRDIPELPHTELEALAVEETLSQLCSELQMLNNPEKIAEQISKDLAWLTSHMMTLWTQFLDTVTLHSQVTTYLTQEHHT

SEQ ID NO: 1294 - protein, 85 aa, Homo sapiens
MRVRRFSEAFFYMEHQKLAVLTFQENLIQTHSQLSLDIRNSEYLTSMPPLPAECLDIDGDWNTLPVIFEDRYVDCPATGHNLSVY

SEQ ID NO: 1295 - protein, 85 aa, Homo sapiens
PNFDVPVTSPTIMNLKDKEDNCMVNSNLSFREDLVLSTIKPSQMDSDEEVIRCPEPGENVATQNHMDMCSESQVYISIGEFQNKA

SEQ ID NO: 1296 - protein, 85 aa, Homo sapiens
GVPEDECWTGQTSDAGTYPVADVDTSRRSPGPEDGQAPVLTYIDVKSSNKNPSRAEPLVAFNAQHESRSSRDKYGLDRTGLSKVV

SEQ ID NO: 1297 - protein, 85 aa, Homo sapiens
VGGSHQNAISSDKTTLHELSTLGKGIDQEGKMVLLSLKLTPSEPCDPLSSTLREPLDIRSSLKDSHTEEQEELSVLSGVIKRSSS

SEQ ID NO: 1298 - protein, 85 aa, Homo sapiens
IISDSGIESEPSSVAWSEARSRALELPSDREVLHPFVRRHALHRNSLEGGHTESNTSLPSGIQASLTSISSLPFEEDEREVALTK

SEQ ID NO: 1299 - protein, 85 aa, Homo sapiens
LTKSVSAPHISSPEEAAEDADTKQQDGGFAEPSDMHSKSQGSPGSCSQLCGDSGTDAGADHPLVEIVLDADNQQGPGYIDIPKGK

SEQ ID NO: 1300 - protein, 85 aa, Homo sapiens
GKQFDAQGHCLPDGRTENTPGVETKGLNLKIPRVIALENPRTRSLHRALEETPKGMPKDLNVGQQALSNSGISEVEGLSQHQVPE

SEQ ID NO: 1301 - protein, 85 aa, Homo sapiens
MSCTSAADAINRNSTGQQSQSGSPCIMDDTAFNRGVNAFPEAKHKAGTVCPTVTHSVHSQVLKNQELKAGTSIMGSHLTSAETFT

SEQ ID NO: 1302 - protein, 85 aa, Homo sapiens
MDSLKAVEVVNLSVSCTATCLPFSSVPKETPARAGFSSKQTLFPITHQPLGSFGVVSTHSSTLDEEVSERMFRGRGRKFGRWNSP

SEQ ID NO: 1303 - protein, 84 aa, Homo sapiens
SSKQTLFPITHQPLGSFGVVSTHSSTLDEEVSERMFRGRGRKFGRWNSPGCLCPWPGWEQCRPPAGKDFHRTGAPWRKTGLPNV

SEQ ID NO: 1304 - protein, 85 aa, Homo sapiens
GAPMVSSRTLGLHFHPRNGLHHQVPVMFDYFHLSVISVTVHAALVALQQPLISFTRPGRGSWLGKGGPDTGQEQSIISLENLVFG

SEQ ID NO: 1305 - protein, 85 aa, Homo sapiens
AGYCKPTSSEGSFYITSENCMQHAHKWHRDLCLLLLHAYRGLRLHFLVIMRDIPELPHTELEALAVEETLSQLCSELQMLNNPEK

SEQ ID NO: 1306 - protein, 85 aa, Homo sapiens
IAEQISKDLAWLTSHMMTLWTQFLDTVTLHSQVTTYLTQEHHTLRVRRFSEAFFYMEHQKLAVLTFQENLIQTHSQLSLDIRNSE

SEQ ID NO: 1307 - protein, 85 aa, Homo sapiens
YLTSMPPLPAECLDIDGDWNTLPVIFEDRYVDCPATGHNLSVYPNFDVPVTSPTIMNLKDKEDNCMVNSNLSFREDLVLSTIKPS

SEQ ID NO: 1308 - protein, 85 aa, Homo sapiens
QMDSDEEVIRCPEPGENVATQNHMDMCSESQVYISIGEFQNKAGVPEDECWTGQTSDAGTYPVADVDTSRRSPGPEDGQAPVLTY

SEQ ID NO: 1309 - protein, 85 aa, Homo sapiens
IDVKSSNKNPSRAEPLVAFNAQHESRSSRDKYGLDRTGLSKVVVGGSHQNAISSDKTTLHELSTLGKGIDQEGKMVLLSLKLTPS

SEQ ID NO: 1310 - protein, 85 aa, Homo sapiens
EPCDPLSSTLREPLDIRSSLKDSHTEEQEELSVLSGVIKRSSSIISDSGIESEPSSVAWSEARSRALELPSDREVLHPFVRRHAL

SEQ ID NO: 1311 - protein, 85 aa, Homo sapiens
HRNSLEGGHTESNTSLPSGIQASLTSISSLPFEEDEREVALTKLTKSVSAPHISSPEEAAEDADTKQQDGGFAEPSDMHSKSQGS

SEQ ID NO: 1312 - protein, 85 aa, Homo sapiens
PGSCSQLCGDSGTDAGADHPLVEIVLDADNQQGPGYIDIPKGKGKQFDAQGHCLPDGRTENTPGVETKGLNLKIPRVIALENPRT

SEQ ID NO: 1313 - protein, 85 aa, Homo sapiens
RSLHRALEETPKGMPKDLNVGQQALSNSGISEVEGLSQHQVPELSCTSAADAINRNSTGQQSQSGSPCIMDDTAFNRGVNAFPEA

SEQ ID NO: 1314 - protein, 85 aa, Homo sapiens
KHKAGTVCPTVTHSVHSQVLKNQELKAGTSIMGSHLTSAETFTLDSLKAVEVVNLSVSCTATCLPFSSVPKETPARAGFSSKQTL

SEQ ID NO: 1315 - protein, 85 aa, Homo sapiens
FGKPDKMDVRCHSDAEAARVSKNAHKESRESKGAEGNLPAAFLKEPQGAFSASGAAEDCNKSKSNSAADPDYCRRILVRDAKGSI

SEQ ID NO: 1316 - protein, 85 aa, Homo sapiens
REIILPKGLDLDRPKRTRTSFTAEQLYRLEMEFQRCQYVVGRERTELARQLNLSETQANSEENNERFKRGIKKQKKKRKKEPAND

SEQ ID NO: 1317 - protein, 84 aa, Homo sapiens
TRTSFTAEQLYRLEMEFQRCQYVVGRERTELARQLNLSETQANSEENNERFKRGIKKQKKKRKKEPANDESRRGDSGGRGWQPL

SEQ ID NO: 1318 - protein, 85 aa, Homo sapiens
LKEPQGAFSASGAAEDCNKSKSNSAADPDYCRRILVRDAKGSIREIILPKGLDLDRPKRTRTSFTAEQLYRLEMEFQRCQYVVGR

SEQ ID NO: 1319 - protein, 85 aa, Homo sapiens
NREDRNVLRMKERERRNQEIQQGEDAFPPSSPLFAEPYKVTSKEDKLSSRIQSMLGNYDEMKDFIGDRSIPKLVAIPKPTVPPSA

SEQ ID NO: 1320 - protein, 85 aa, Homo sapiens
DEKSNPNFFEQRHGGSHQSSKWTPVGPAPSTSQSQKRSSGLQSGHSSQRTSAGSSSGTNSSGQRHDRESYNNSGSSSRKKGQHGS

SEQ ID NO: 1321 - protein, 85 aa, Homo sapiens
EHSKSRSSSPGKPQAVSSLNSSHSRSHGNDHHSKEHQRSKSPRDPDANWDSPSRVPFSSGQHSTQSFPPSLMSKSNSMLQKPTAY

SEQ ID NO: 1322 - protein, 85 aa, Homo sapiens
VRPMDGQESMEPKLSSEHYSSQSHGNSMTELKPSSKAHLTKLKIPSQPLDASASGDVSCVDEILKEMTHSWPPPLTAIHTPCKTE

SEQ ID NO: 1323 - protein, 85 aa, Homo sapiens
PSKFPFPTKESQQSNFGTGEQKRYNPSKTSNGHQSKSMLKDDLKLSSSEDSDGEQDCDKTMPRSTPGSNSEPSHHNSEGADNSRD

SEQ ID NO: 1324 - protein, 85 aa, Homo sapiens
DSSSHSGSESSSGSDSESESSSSDSEANEPSQSASPEPEPPPTNKWQLDNWLNKVNPHKVSPASSVDSNIPSSQGYKKEGREQGT

SEQ ID NO: 1325 - protein, 85 aa, Homo sapiens
GNSYTDTSGPKETSSATPGRDSKTIQKGSESGRGRQKSPAQSDSTTQRRTVGKKQPKKAEKAAAEEPRGGLKIESETPVDLASSM

SEQ ID NO: 1326 - protein, 85 aa, Homo sapiens
PSSRHKAATKGSRKPNIKKESKSSPRPTAEKKKYKSTSKSSQKSREIIETDTSSSDSDESESLPPSSQTPKYPESNRTPVKPSSV

SEQ ID NO: 1327 - protein, 85 aa, Homo sapiens
EEEDSFFRQRMFSPMEEKELLSPLSEPDDRYPLIVKIDLNLLTRIPGKPYKETEPPKGEKKNVPEKHTREAQKQASEKVSNKGKR

SEQ ID NO: 1328 - protein, 85 aa, Homo sapiens
KHKNEDDNRASESKKPKTEDKNSAGHKPSSNRESSKQSAAKEKDLLPSPAGPVPSKDPKTEHGSRKRTISQSSSLKSSSNSNKET

SEQ ID NO: 1329 - protein, 85 aa, Homo sapiens
SGSSKNSSSTSKQKKTEGKTSSSSKEVKEKAPSSSSNCPPSAPTLDSSKPRRTKLVFDDRNYSADHYLQEAKKLKHNADALSDRF

SEQ ID NO: 1330 - protein, 85 aa, Homo sapiens
EKAVYYLDAVVSFIECGNALEKNAQESKSPFPMYSETVDLIKYTMKLKNYLAPDATAADKRLTVLCLRCESLLYLRLFKLKKENA

SEQ ID NO: 1331 - protein, 85 aa, Homo sapiens
MKYSKTLTEHLKNSYNNSQAPSPGLGSKAVGMPSPVSPKLSPGNSGNYSSGASSASASGSSVTIPQKIHQMAASYVQVTSNFLYA

SEQ ID NO: 1332 - protein, 84 aa, Homo sapiens
GSSVTIPQKIHQMAASYVQVTSNFLYATEIWDQAEQLSKEQKEFFAELDKVMGPLIFNASIMTDLVRYTRQGLHWLRQDAKLIS

SEQ ID NO: 1333 - protein, 85 aa, Homo sapiens
KEDKLSSRIQSMLGNYDEMKDFIGDRSIPKLVAIPKPTVPPSADEKSNPNFFEQRHGGSHQSSKWTPVGPAPSTSQSQKRSSGLQ

SEQ ID NO: 1334 - protein, 85 aa, Homo sapiens
SGHSSQRTSAGSSSGTNSSGQRHDRESYNNSGSSSRKKGQHGSEHSKSRSSSPGKPQAVSSLNSSHSRSHGNDHHSKEHQRSKSP

SEQ ID NO: 1335 - protein, 85 aa, Homo sapiens
RDPDANWDSPSRVPFSSGQHSTQSFPPSLMSKSNSMLQKPTAYVRPMDGQESMEPKLSSEHYSSQSHGNSMTELKPSSKAHLTKL

SEQ ID NO: 1336 - protein, 85 aa, Homo sapiens
KIPSQPLDASASGDVSCVDEILKEMTHSWPPPLTAIHTPCKTEPSKFPFPTKESQQSNFGTGEQKRYNPSKTSNGHQSKSMLKDD

SEQ ID NO: 1337 - protein, 85 aa, Homo sapiens
LKLSSSEDSDGEQDCDKTMPRSTPGSNSEPSHHNSEGADNSRDDSSSHSGSESSSGSDSESESSSSDSEANEPSQSASPEPEPPP

SEQ ID NO: 1338 - protein, 85 aa, Homo sapiens
TNKWQLDNWLNKVNPHKVSPASSVDSNIPSSQGYKKEGREQGTGNSYTDTSGPKETSSATPGRDSKTIQKGSESGRGRQKSPAQS

SEQ ID NO: 1339 - protein, 85 aa, Homo sapiens
DSTTQRRTVGKKQPKKAEKAAAEEPRGGLKIESETPVDLASSMPSSRHKAATKGSRKPNIKKESKSSPRPTAEKKKYKSTSKSSQ

SEQ ID NO: 1340 - protein, 85 aa, Homo sapiens
KSREIIETDTSSSDSDESESLPPSSQTPKYPESNRTPVKPSSVEEEDSFFRQRMFSPMEEKELLSPLSEPDDRYPLIVKIDLNLL

SEQ ID NO: 1341 - protein, 85 aa, Homo sapiens
TRIPGKPYKETEPPKGEKKNVPEKHTREAQKQASEKVSNKGKRKHKNEDDNRASESKKPKTEDKNSAGHKPSSNRESSKQSAAKE

SEQ ID NO: 1342 - protein, 85 aa, Homo sapiens
KDLLPSPAGPVPSKDPKTEHGSRKRTISQSSSLKSSSNSNKETSGSSKNSSSTSKQKKTEGKTSSSSKEVKEKAPSSSSNCPPSA

SEQ ID NO: 1343 - protein, 85 aa, Homo sapiens
PTLDSSKPRRTKLVFDDRNYSADHYLQEAKKLKHNADALSDRFEKAVYYLDAVVSFIECGNALEKNAQESKSPFPMYSETVDLIK

SEQ ID NO: 1344 - protein, 85 aa, Homo sapiens
YTMKLKNYLAPDATAADKRLTVLCLRCESLLYLRLFKLKKENALKYSKTLTEHLKNSYNNSQAPSPGLGSKAVGMPSPVSPKLSP

SEQ ID NO: 1345 - protein, 85 aa, Homo sapiens
GNSGNYSSGASSASASGSSVTIPQKIHQMAASYVQVTSNFLYATEIWDQAEQLSKEQKEFFAELDKVMGPLIFNASIMTDLVRYT

SEQ ID NO: 1346 - protein, 85 aa, Homo sapiens
MKAAAKVVESKRTRTITSQDKPSGNDVEMETEANLDTRKRSHKNLFLSKLQHGTQQQDLNKKERRVGTPQSTKKKKESRRATESR

SEQ ID NO: 1347 - protein, 85 aa, Homo sapiens
MLMIISQKDTFHSFFQHFSYNHMMEKIKSYVNYVLSEKSSTFLMKAAAKVVESKRTRTITSQDKPSGNDVEMETEANLDTRKRSH

SEQ ID NO: 1348 - protein, 85 aa, Homo sapiens
KNLFLSKLQHGTQQQDLNKKERRVGTPQSTKKKKESRRATESRIPVSKSQPVTPEKHRARKRQAWLWEEDKNLRSGVRKYGEGNW

SEQ ID NO: 1349 - protein, 85 aa, Homo sapiens
EDLGENTMVLSTLRSLNNFISQRVEGGSGLDISTSAPGSLQMQYQQSMQLEERAEQIRSKSHLIQVEREKMQMELSHKRARVELE

SEQ ID NO: 1350 - protein, 85 aa, Homo sapiens
RAASTSARNYEREVDRNQELLTRIRQLQEREAGAEEKMQEQLERNRQCQQNLDAASKRLREKEDSLAQAGETINALKGRISELQW

SEQ ID NO: 1351 - protein, 85 aa, Homo sapiens
SVMDQEMRVKRLESEKQELQEQLDLQHKKCQEANQKIQELQASQEARADHEQQIKDLEQKLSLQEQDAAIVKNMKSELVRLPRLE

SEQ ID NO: 1352 - protein, 85 aa, Homo sapiens
RELKQLREESAHLREMRETNGLLQEELEGLQRKLGRQEKMQETLVGLELENERLLAKLQSWERLDQTMGLSIRTPEDLSRFVVEL

SEQ ID NO: 1353 - protein, 85 aa, Homo sapiens
QQRELALKDKNSAVTSSARGLEKARQQLQEELRQVSGQLLEERKKRETHEALARRLQKRVLLLTKERDGMRAILGSYDSELTPAE

SEQ ID NO: 1354 - protein, 85 aa, Homo sapiens
YSPQLTRRMREAEDMVQKVHSHSAEMEAQLSQALEELGGQKQRADMLEMELKMLKSQSSSAEQSFLFSREEADTLRLKVEELEGE

SEQ ID NO: 1355 - protein, 85 aa, Homo sapiens
RSRLEEEKRMLEAQLERRALQGDYDQSRTKVLHMSLNPTSVARQRLREDHSQLQAECERLRGLLRAMERGGTVPADLEAAAASLP

SEQ ID NO: 1356 - protein, 85 aa, Homo sapiens
SSKEVAELKKQVESAELKNQRLKEVFQTKIQEFRKACYTLTGYQIDITTENQYRLTSLYAEHPGDCLIFKATSPSGSKMQLLETE

SEQ ID NO: 1357 - protein, 84 aa, Homo sapiens
TLTGYQIDITTENQYRLTSLYAEHPGDCLIFKATSPSGSKMQLLETEFSHTVGELIEVHLRRQDSIPAFLSSLTLELFSRQTVA

SEQ ID NO: 1358 - protein, 85 aa, Homo sapiens
QYQQSMQLEERAEQIRSKSHLIQVEREKMQMELSHKRARVELERAASTSARNYEREVDRNQELLTRIRQLQEREAGAEEKMQEQL

SEQ ID NO: 1359 - protein, 85 aa, Homo sapiens
ERNRQCQQNLDAASKRLREKEDSLAQAGETINALKGRISELQWSVMDQEMRVKRLESEKQELQEQLDLQHKKCQEANQKIQELQA

SEQ ID NO: 1360 - protein, 85 aa, Homo sapiens
SQEARADHEQQIKDLEQKLSLQEQDAAIVKNMKSELVRLPRLERELKQLREESAHLREMRETNGLLQEELEGLQRKLGRQEKMQE

SEQ ID NO: 1361 - protein, 85 aa, Homo sapiens
TLVGLELENERLLAKLQSWERLDQTMGLSIRTPEDLSRFVVELQQRELALKDKNSAVTSSARGLEKARQQLQEELRQVSGQLLEE

SEQ ID NO: 1362 - protein, 85 aa, Homo sapiens
RKKRETHEALARRLQKRVLLLTKERDGMRAILGSYDSELTPAEYSPQLTRRMREAEDMVQKVHSHSAEMEAQLSQALEELGGQKQ

SEQ ID NO: 1363 - protein, 85 aa, Homo sapiens
RADMLEMELKMLKSQSSSAEQSFLFSREEADTLRLKVEELEGERSRLEEEKRMLEAQLERRALQGDYDQSRTKVLHMSLNPTSVA

SEQ ID NO: 1364 - protein, 85 aa, Homo sapiens
RQRLREDHSQLQAECERLRGLLRAMERGGTVPADLEAAAASLPSSKEVAELKKQVESAELKNQRLKEVFQTKIQEFRKACYTLTG

SEQ ID NO: 1365 - protein, 85 aa, Homo sapiens
PSLRTRREEAEMELSVPGPSPWTPAAQARVRDAPAVTHPGSAACGTPCCSDTELEAICPHYQQPDCDTRTEDKEFLHKEDIHEDL

SEQ ID NO: 1366 - protein, 85 aa, Homo sapiens
ESQAEISENYAGDVSQVPELGDLCDDVSERDWGVPEGRRLPQSLSQEGDFTPAAMGLLRGPLGEKDLDCNGFDSRFSLSPNLMAC

SEQ ID NO: 1367 - protein, 85 aa, Homo sapiens
QEIPTEERPHPYDMGGQSFQHSVDLTGHEGVPTAESPLICNECGKTFQGNPDLIQRQIVHTGEASFMCDDCGKTFSQNSVLKNRH

SEQ ID NO: 1368 - protein, 85 aa, Homo sapiens
RSHMSEKAYQCSECGKAFRGHSDFSRHQSHHSSERPYMCNECGKAFSQNSSLKKHQKSHMSEKPYECNECGKAFRRSSNLIQHQR

SEQ ID NO: 1369 - protein, 85 aa, Homo sapiens
IHSGEKPYVCSECGKAFRRSSNLIKHHRTHTGEKPFECGECGKAFSQSAHLRKHQRVHTGEKPYECNDCGKPFSRVSNLIKHHRV

SEQ ID NO: 1370 - protein, 85 aa, Homo sapiens
HTGEKPYKCSDCGKAFSQSSSLIQHRRIHTGEKPHVCNVCGKAFSYSSVLRKHQIIHTGEKPYRCSVCGKAFSHSSALIQHQGVH

SEQ ID NO: 1371 - protein, 85 aa, Homo sapiens
TGDKPYACHECGKTFGRSSNLILHQRVHTGEKPYECTECGKTFSQSSTLIQHQRIHNGLKPHECNQCGKAFNRSSNLIHHQKVHT

SEQ ID NO: 1372 - protein, 85 aa, Homo sapiens
GEKPYTCVECGKGFSQSSHLIQHQIIHTGERPYKCSECGKAFSQRSVLIQHQRIHTGVKPYDCAACGKAFSQRSKLIKHQLIHTR

SEQ ID NO: 1373 - protein, 84 aa, Homo sapiens
KPYTCVECGKGFSQSSHLIQHQIIHTGERPYKCSECGKAFSQRSVLIQHQRIHTGVKPYDCAACGKAFSQRSKLIKHQLIHTRE

SEQ ID NO: 1374 - protein, 85 aa, Homo sapiens
ACGTPCCSDTELEAICPHYQQPDCDTRTEDKEFLHKEDIHEDLESQAEISENYAGDVSQVPELGDLCDDVSERDWGVPEGRRLPQ

SEQ ID NO: 1375 - protein, 85 aa, Homo sapiens
SLSQEGDFTPAAMGLLRGPLGEKDLDCNGFDSRFSLSPNLMACQEIPTEERPHPYDMGGQSFQHSVDLTGHEGVPTAESPLICNE

SEQ ID NO: 1376 - protein, 85 aa, Homo sapiens
CGKTFQGNPDLIQRQIVHTGEASFMCDDCGKTFSQNSVLKNRHRSHMSEKAYQCSECGKAFRGHSDFSRHQSHHSSERPYMCNEC

SEQ ID NO: 1377 - protein, 85 aa, Homo sapiens
GKAFSQNSSLKKHQKSHMSEKPYECNECGKAFRRSSNLIQHQRIHSGEKPYVCSECGKAFRRSSNLIKHHRTHTGEKPFECGECG

SEQ ID NO: 1378 - protein, 85 aa, Homo sapiens
KAFSQSAHLRKHQRVHTGEKPYECNDCGKPFSRVSNLIKHHRVHTGEKPYKCSDCGKAFSQSSSLIQHRRIHTGEKPHVCNVCGK

SEQ ID NO: 1379 - protein, 85 aa, Homo sapiens
AFSYSSVLRKHQIIHTGEKPYRCSVCGKAFSHSSALIQHQGVHTGDKPYACHECGKTFGRSSNLILHQRVHTGEKPYECTECGKT

SEQ ID NO: 1380 - protein, 85 aa, Homo sapiens
FSQSSTLIQHQRIHNGLKPHECNQCGKAFNRSSNLIHHQKVHTGEKPYTCVECGKGFSQSSHLIQHQIIHTGERPYKCSECGKAF

SEQ ID NO: 1381 - protein, 85 aa, Homo sapiens
MVLFETSVGYAIFKVLNEKKLQEVDSLWKEFETPEKANKIVKLKHFEKFQDTAEALAAFTALMEGKINKQLKKVLKKIVKEAHEP

SEQ ID NO: 1382 - protein, 85 aa, Homo sapiens
MAVADAKLGGVIKEKLNLSCIHSPVVNELMRGIRSQMDGLIPGVEPREMAAMCLGLAHSLSRYRLKFSADKVDTMIVQAISLLDD

SEQ ID NO: 1383 - protein, 85 aa, Homo sapiens
MDKELNNYIMRCREWYGWHFPELGKIISDNLTYCKCLQKVGDRKNYASAKLSELLPEEVEAEVKAAAEISMGTEVSEEDICNILH

SEQ ID NO: 1384 - protein, 85 aa, Homo sapiens
LCTQVIEISEYRTQLYEYLQNRMMAIAPNVTVMVGELVGARLIAHAGSLLNLAKHAASTVQILGAEKALFRALKSRRDTPKYGLI

SEQ ID NO: 1385 - protein, 85 aa, Homo sapiens
YHASLVGQTSPKHKGKISRMLAAKTVLAIRYDAFGEDSSSAMGVENRAKLEARLRTLEDRGIRKISGTGKALAKTEKYEHKSEVK

SEQ ID NO: 1386 - protein, 85 aa, Homo sapiens
TYDPSGDSTLPTCSKKRKIEQVDKEDEITEKKAKKAKIKVKVEEEEEEKVAEEEETSVKKKKKRGKKKHIKEEPLSEEEPCTSTA

SEQ ID NO: 1387 - protein, 84 aa, Homo sapiens
EQVDKEDEITEKKAKKAKIKVKVEEEEEEKVAEEEETSVKKKKKRGKKKHIKEEPLSEEEPCTSTAIASPEKKKKKKKKRENED

SEQ ID NO: 1388 - protein, 85 aa, Homo sapiens
LKHFEKFQDTAEALAAFTALMEGKINKQLKKVLKKIVKEAHEPLAVADAKLGGVIKEKLNLSCIHSPVVNELMRGIRSQMDGLIP

SEQ ID NO: 1389 - protein, 85 aa, Homo sapiens
GVEPREMAAMCLGLAHSLSRYRLKFSADKVDTMIVQAISLLDDLDKELNNYIMRCREWYGWHFPELGKIISDNLTYCKCLQKVGD

SEQ ID NO: 1390 - protein, 85 aa, Homo sapiens
RKNYASAKLSELLPEEVEAEVKAAAEISMGTEVSEEDICNILHLCTQVIEISEYRTQLYEYLQNRMMAIAPNVTVMVGELVGARL

SEQ ID NO: 1391 - protein, 85 aa, Homo sapiens
IAHAGSLLNLAKHAASTVQILGAEKALFRALKSRRDTPKYGLIYHASLVGQTSPKHKGKISRMLAAKTVLAIRYDAFGEDSSSAM

SEQ ID NO: 1392 - protein, 85 aa, Homo sapiens
GVENRAKLEARLRTLEDRGIRKISGTGKALAKTEKYEHKSEVKTYDPSGDSTLPTCSKKRKIEQVDKEDEITEKKAKKAKIKVKV

SEQ ID NO: 1393 - protein, 85 aa, Homo sapiens
LSLKLPQLLQVHQVPRVFWEDGIMSGYRRPTSSALDCVLSSFQMTNETVNIWTHFLPTWYFLWRLLALAGGPGFRAEPYHWPLLV

SEQ ID NO: 1394 - protein, 85 aa, Homo sapiens
FLLPACLYPFASCCAHTFSSMSPRMRHICYFLDYGALSLYSLGCAFPYAAYSMPASWLHGHLHQFFVPAAALNSFLCTGLSCYSR

SEQ ID NO: 1395 - protein, 85 aa, Homo sapiens
FLELESPGLSKVLRTGAFAYPFLFDNLPLFYRLGLCWGRGHGCGQEALSTSHGYHLFCALLTGFLFASHLPERLAPGRFDYIGHS

SEQ ID NO: 1396 - protein, 85 aa, Homo sapiens
HQLFHICAVLGTHFQLEAVLADMGSRRAWLATQEPALGLAGTVATLVLAAAGNLLIIAAFTATLLRAPSTCPLLQGGPLEGGTQA

SEQ ID NO: 1397 - protein, 84 aa, Homo sapiens
HICAVLGTHFQLEAVLADMGSRRAWLATQEPALGLAGTVATLVLAAAGNLLIIAAFTATLLRAPSTCPLLQGGPLEGGTQAKQQ

SEQ ID NO: 1398 - protein, 85 aa, Homo sapiens
QMTNETVNIWTHFLPTWYFLWRLLALAGGPGFRAEPYHWPLLVFLLPACLYPFASCCAHTFSSMSPRMRHICYFLDYGALSLYSL

SEQ ID NO: 1399 - protein, 85 aa, Homo sapiens
GCAFPYAAYSMPASWLHGHLHQFFVPAAALNSFLCTGLSCYSRFLELESPGLSKVLRTGAFAYPFLFDNLPLFYRLGLCWGRGHG

SEQ ID NO: 1400 - protein, 85 aa, Homo sapiens
CGQEALSTSHGYHLFCALLTGFLFASHLPERLAPGRFDYIGHSHQLFHICAVLGTHFQLEAVLADMGSRRAWLATQEPALGLAGT

SEQ ID NO: 1401 - protein, 85 aa, Homo sapiens
AGRPHPYDGNSSDPENWDRKLHSRPRKLYKHSSTSSRIAKGGVDHTKMSLHGASGGHERSRDRRRSSDRSRDSSHERTESQLTPC

SEQ ID NO: 1402 - protein, 85 aa, Homo sapiens
IRNVTSPTRQHHVEREKDHSSSRPSSPRPQKASPNGSISSAGNSSRNSSQSSSDGSCKTAGEMVFVYENAKEGARNIRTSERVTL

SEQ ID NO: 1403 - protein, 85 aa, Homo sapiens
IVDNTRFVVDPSIFTAQPNTMLGRMFGSGREHNFTRPNEKGEYEVAEGIGSTVFRAILDYYKTGIIRCPDGISIPELREACDYLC

SEQ ID NO: 1404 - protein, 85 aa, Homo sapiens
ISFEYSTIKCRDLSALMHELSNDGARRQFEFYLEEMILPLMVASAQSGERECHIVVLTDDDVVDWDEEYPPQMGEEYSQIIYSTK

SEQ ID NO: 1405 - protein, 85 aa, Homo sapiens
LYRFFKYIENRDVAKSVLKERGLKKIRLGIEGYPTYKEKVKKRPGGRPEVIYNYVQRPFIRMSWEKEEGKSRHVDFQCVKSKSIT

SEQ ID NO: 1406 - protein, 84 aa, Homo sapiens
IYNYVQRPFIRMSWEKEEGKSRHVDFQCVKSKSITNLAAAAADIPQDQLVVMHPTPQVDELDILPIHPPSGNSDLDPDAQNPML

SEQ ID NO: 1407 - protein, 85 aa, Homo sapiens
VDHTKMSLHGASGGHERSRDRRRSSDRSRDSSHERTESQLTPCIRNVTSPTRQHHVEREKDHSSSRPSSPRPQKASPNGSISSAG

SEQ ID NO: 1408 - protein, 85 aa, Homo sapiens
NSSRNSSQSSSDGSCKTAGEMVFVYENAKEGARNIRTSERVTLIVDNTRFVVDPSIFTAQPNTMLGRMFGSGREHNFTRPNEKGE

SEQ ID NO: 1409 - protein, 85 aa, Homo sapiens
YEVAEGIGSTVFRAILDYYKTGIIRCPDGISIPELREACDYLCISFEYSTIKCRDLSALMHELSNDGARRQFEFYLEEMILPLMV

SEQ ID NO: 1410 - protein, 85 aa, Homo sapiens
ASAQSGERECHIVVLTDDDVVDWDEEYPPQMGEEYSQIIYSTKLYRFFKYIENRDVAKSVLKERGLKKIRLGIEGYPTYKEKVKK

SEQ ID NO: 1411 - protein, 85 aa, Homo sapiens
RPGGRPEVIYNYVQRPFIRMSWEKEEGKSRHVDFQCVKSKSITNLAAAAADIPQDQLVVMHPTPQVDELDILPIHPPSGNSDLDP

SEQ ID NO: 1412 - protein, 85 aa, Homo sapiens
GPLSARLLMQRGRPKSDRLGKIRSLDLSGLELLSEHLDPKLLCRLTQLQELDLSNNHLETLPDNLGLSHLRVLRCANNQLGDVTA

SEQ ID NO: 1413 - protein, 85 aa, Homo sapiens
MCQFPKLEELSLEGNPFLTVNDNLKVSFLLPTLRKVNGKDASSTYSQVENLNRELTSRVTAHWEKFMATLGPEEEAEKAQADFVK

SEQ ID NO: 1414 - protein, 85 aa, Homo sapiens
SAVRDVRYGPESLSEFTQWRVRMISEELVAASRTQVQKANSPEKPPEAGAAHKPRARLAALKRPDDVPLSLSPSKRACASPSAQV

SEQ ID NO: 1415 - protein, 85 aa, Homo sapiens
EGSPVAGSDGSQPAVKLEPLHFLQCHSKNNSPQDLETQLWACAFEPAWEEGATSQTVATCGGEAVCVIDCQTGIVLHKYKAPGEE

SEQ ID NO: 1416 - protein, 85 aa, Homo sapiens
FFSVAWTALMVVTQAGHKKRWSVLAAAGLRGLVRLLHVRAGFCCGVIRAHKKAIATLCFSPAHETHLFTASYDKRIILWDIGVPN

SEQ ID NO: 1417 - protein, 85 aa, Homo sapiens
QDYEFQASQLLTLDTTSIPLRLCPVASCPDARLLAGCEGGCCCWDVRLDQPQKRRVCEVEFVFSEGSEASGRRVDGLAFVNEDIV

SEQ ID NO: 1418 - protein, 85 aa, Homo sapiens
ASKGSGLGTICLWSWRQTWGGRGSQSTVAVVVLARLQWSSTELAYFSLSACPDKGIVLCGDEEGNVWLYDVSNILKQPPLLPAAL

SEQ ID NO: 1419 - protein, 84 aa, Homo sapiens
DKGIVLCGDEEGNVWLYDVSNILKQPPLLPAALQAPTQILKWPQPWALGQVVTKTMVNTVVANASFTYLTALTDSNIVAIWGRM

SEQ ID NO: 1420 - protein, 85 aa, Homo sapiens
CRLTQLQELDLSNNHLETLPDNLGLSHLRVLRCANNQLGDVTALCQFPKLEELSLEGNPFLTVNDNLKVSFLLPTLRKVNGKDAS

SEQ ID NO: 1421 - protein, 85 aa, Homo sapiens
STYSQVENLNRELTSRVTAHWEKFMATLGPEEEAEKAQADFVKSAVRDVRYGPESLSEFTQWRVRMISEELVAASRTQVQKANSP

SEQ ID NO: 1422 - protein, 85 aa, Homo sapiens
EKPPEAGAAHKPRARLAALKRPDDVPLSLSPSKRACASPSAQVEGSPVAGSDGSQPAVKLEPLHFLQCHSKNNSPQDLETQLWAC

SEQ ID NO: 1423 - protein, 85 aa, Homo sapiens
AFEPAWEEGATSQTVATCGGEAVCVIDCQTGIVLHKYKAPGEEFFSVAWTALMVVTQAGHKKRWSVLAAAGLRGLVRLLHVRAGF

SEQ ID NO: 1424 - protein, 85 aa, Homo sapiens
CCGVIRAHKKAIATLCFSPAHETHLFTASYDKRIILWDIGVPNQDYEFQASQLLTLDTTSIPLRLCPVASCPDARLLAGCEGGCC

SEQ ID NO: 1425 - protein, 85 aa, Homo sapiens
CWDVRLDQPQKRRVCEVEFVFSEGSEASGRRVDGLAFVNEDIVASKGSGLGTICLWSWRQTWGGRGSQSTVAVVVLARLQWSSTE

SEQ ID NO: 1426 - protein, 85 aa, Homo sapiens
MAYFSLSACPDKGIVLCGDEEGNVWLYDVSNILKQPPLLPAALQAPTQILKWPQPWALGQVVTKTMVNTVVANASFTYLTALTDS

SEQ ID NO: 1427 - protein, 85 aa, Homo sapiens
AAATLRDPAQQGYVTFEDVAVYFSQEEWRLLDDAQRLLYRNVMLENFTLLASLGLASSKTHEITQLESWEEPFMPAWEVVTSAIL

SEQ ID NO: 1428 - protein, 85 aa, Homo sapiens
RGSWQGAKAEAAAEQSASVEVPSSNVQQHQKQHCGEKPLKRQEGRVPVLRSCRVHLSEKSLQSREVGKDLLTSSGVLKHQVTHTG

SEQ ID NO: 1429 - protein, 85 aa, Homo sapiens
EKSHRSSKSREAFHAGKRHYKCSECGKAFGQKYLLVQHQRLHTGEKPYECSECGKLFSHKSNLFIHQIVHTGERPYGCSDCGKSF

SEQ ID NO: 1430 - protein, 85 aa, Homo sapiens
SRNADLIQHQRVHTGEKPFTCSECGKAFRHNSTLVQHHRIHTGVRPYECSECGKLFSFNSSLMKHQRVHTGERPYKCSECGKFYS

SEQ ID NO: 1431 - protein, 85 aa, Homo sapiens
HKSSLINHWRVHTGERPYECSECGKFFSQSSSLMQHRKVHTGEKPFKCNECGRFFSENSSLVKHQRVHTGAKPYECRECGKFFRH

SEQ ID NO: 1432 - protein, 84 aa, Homo sapiens
YECSECGKFFSQSSSLMQHRKVHTGEKPFKCNECGRFFSENSSLVKHQRVHTGAKPYECRECGKFFRHSSSLVKHRRIHTGEIQ

SEQ ID NO: 1433 - protein, 85 aa, Homo sapiens
MLENFTLLASLGLASSKTHEITQLESWEEPFMPAWEVVTSAILRGSWQGAKAEAAAEQSASVEVPSSNVQQHQKQHCGEKPLKRQ

SEQ ID NO: 1434 - protein, 85 aa, Homo sapiens
EGRVPVLRSCRVHLSEKSLQSREVGKDLLTSSGVLKHQVTHTGEKSHRSSKSREAFHAGKRHYKCSECGKAFGQKYLLVQHQRLH

SEQ ID NO: 1435 - protein, 85 aa, Homo sapiens
TGEKPYECSECGKLFSHKSNLFIHQIVHTGERPYGCSDCGKSFSRNADLIQHQRVHTGEKPFTCSECGKAFRHNSTLVQHHRIHT

SEQ ID NO: 1436 - protein, 85 aa, Homo sapiens
GVRPYECSECGKLFSFNSSLMKHQRVHTGERPYKCSECGKFYSHKSSLINHWRVHTGERPYECSECGKFFSQSSSLMQHRKVHTG

SEQ ID NO: 1437 - protein, 85 aa, Homo sapiens
SELTKELMELVWGTKSSPGLSDTIFCRWTQGFVFSESEGSALEQFEGGPCAVIAPVQAFLLKKLLFSSEKSSWRDCSEEEQKELL

SEQ ID NO: 1438 - protein, 85 aa, Homo sapiens
CHTLCDILESACCDHSGSYCLVSWLRGKTTEETASISGSPAESSCQVEHSSALAVEELGFERFHALIQKRSFRSLPELKDAVLDQ

SEQ ID NO: 1439 - protein, 85 aa, Homo sapiens
YSMWGNKFGVLLFLYSVLLTKGIENIKNEIEDASEPLIDPVYGHGSQSLINLLLTGHAVSNVWDGDRECSGMKLLGIHEQAAVGF

SEQ ID NO: 1440 - protein, 85 aa, Homo sapiens
LTLMEALRYCKVGSYLKSPKFPIWIVGSETHLTVFFAKDMALVAPEAPSEQARRVFQTYDPEDNGFIPDSLLEDVMKALDLVSDP

SEQ ID NO: 1441 - protein, 85 aa, Homo sapiens
EYINLMKNKLDPEGLGIILLGPFLQEFFPDQGSSGPESFTVYHYNGLKQSNYNEKVMYVEGTAVVMGFEDPMLQTDDTPIKRCLQ

SEQ ID NO: 1442 - protein, 84 aa, Homo sapiens
GPFLQEFFPDQGSSGPESFTVYHYNGLKQSNYNEKVMYVEGTAVVMGFEDPMLQTDDTPIKRCLQTKWPYIELLWTTDRSPSLN

SEQ ID NO: 1443 - protein, 85 aa, Homo sapiens
EQFEGGPCAVIAPVQAFLLKKLLFSSEKSSWRDCSEEEQKELLCHTLCDILESACCDHSGSYCLVSWLRGKTTEETASISGSPAE

SEQ ID NO: 1444 - protein, 85 aa, Homo sapiens
SSCQVEHSSALAVEELGFERFHALIQKRSFRSLPELKDAVLDQYSMWGNKFGVLLFLYSVLLTKGIENIKNEIEDASEPLIDPVY

SEQ ID NO: 1445 - protein, 85 aa, Homo sapiens
GHGSQSLINLLLTGHAVSNVWDGDRECSGMKLLGIHEQAAVGFLTLMEALRYCKVGSYLKSPKFPIWIVGSETHLTVFFAKDMAL

SEQ ID NO: 1446 - protein, 85 aa, Homo sapiens
VAPEAPSEQARRVFQTYDPEDNGFIPDSLLEDVMKALDLVSDPEYINLMKNKLDPEGLGIILLGPFLQEFFPDQGSSGPESFTVY

SEQ ID NO: 1447 - protein, 85 aa, Homo sapiens
AGPLWRTAAFVQRHRTGLLVGSCAGLFGVPISYHLFPDPVVQWLYQYWPQGQPAPLPPQLQSLFQEVLQDIGVPSGHCYKPFTTF

SEQ ID NO: 1448 - protein, 85 aa, Homo sapiens
TFQPVSAGFPRLPAGAVVGIPASFLGDLVINTNHPVVIHGHTVDWRSPAGARLRASLTLSREAQKFALAREVVYLESSTTAVHAL

SEQ ID NO: 1449 - protein, 85 aa, Homo sapiens
MAPACLAGTWALGVGAKYTLGLHAGPMNLRAAFSLVAAVAGFVAYAFSQDSLTHAVESWLDRRTASLSAAYACGGVEFYEKLLSG

SEQ ID NO: 1450 - protein, 84 aa, Homo sapiens
ESWLDRRTASLSAAYACGGVEFYEKLLSGNLALRSLLGKDGEKLYTPSGNIVPRHLFRIKHLPYTTRRDSVLQMWRGMLNPGRS

SEQ ID NO: 1451 - protein, 85 aa, Homo sapiens
WLYQYWPQGQPAPLPPQLQSLFQEVLQDIGVPSGHCYKPFTTFTFQPVSAGFPRLPAGAVVGIPASFLGDLVINTNHPVVIHGHT

SEQ ID NO: 1452 - protein, 85 aa, Homo sapiens
VDWRSPAGARLRASLTLSREAQKFALAREVVYLESSTTAVHALLAPACLAGTWALGVGAKYTLGLHAGPMNLRAAFSLVAAVAGF

SEQ ID NO: 1453 - protein, 85 aa, Homo sapiens
VAYAFSQDSLTHAVESWLDRRTASLSAAYACGGVEFYEKLLSGNLALRSLLGKDGEKLYTPSGNIVPRHLFRIKHLPYTTRRDSV

SEQ ID NO: 1454 - protein, 85 aa, Homo sapiens
GRSRRTGAHRAHSLARQMKAKRRRPDLDEIHRELRPQGSARPQPDPNAEFDPDLPGGGLHRCLACARYFIDSTNLKTHFRSKDHK

SEQ ID NO: 1455 - protein, 84 aa, Homo sapiens
STNLKTHFRSKDHKKRYEGVRRGLMDGCSADRALTWSAPNSCFSFSQAEAAERRALQSGRGGEGSGYGILCAPQAAGSAHGSVH

SEQ ID NO: 1456 - protein, 85 aa, Homo sapiens
QPDPNAEFDPDLPGGGLHRCLACARYFIDSTNLKTHFRSKDHKKRYEGVRRGLMDGCSADRALTWSAPNSCFSFSQAEAAERRAL

SEQ ID NO: 1457 - protein, 85 aa, Homo sapiens
FPLKDAEMGAFTFFASALPHDVCGSNGLPLTPNSIKILGRFQILKTITHPRLCQYVDISRGKHERLVVVAEHCERSLEDLLRERK

SEQ ID NO: 1458 - protein, 85 aa, Homo sapiens
PVSCSTVLCIAFEVLQGLQYMNKHGIVHRALSPHNILLDRKGHIKLAKFGLYHMTAHGDDVDFPIGYPSYLAPEVIAQGIFKTTD

SEQ ID NO: 1459 - protein, 85 aa, Homo sapiens
HMPSKKPLPSGPKSDVWSLGIILFELCVGRKLFQSLDISERLKFLLTLDCVDDTLIVLAEEHGCLDIIKELPETVIDLLNKCLTF

SEQ ID NO: 1460 - protein, 85 aa, Homo sapiens
HPSKRPTPDQLMKDKVFSEVSPLYTPFTKPASLFSSSLRCADLTLPEDISQLCKDINNDYLAERSIEEVYYLWCLAGGDLEKELV

SEQ ID NO: 1461 - protein, 85 aa, Homo sapiens
NKEIIRSKPPICTLPNFLFEDGESFGQGRDRSSLLDDTTVTLSLCQLRNRLKDVGGEAFYPLLEDDQSNLPHSNSNNELSAAATL

SEQ ID NO: 1462 - protein, 85 aa, Homo sapiens
PLIIREKDTEYQLNRIILFDRLLKAYPYKKNQIWKEARVDIPPLMRGLTWAALLGVEGAIHAKYDAIDKDTPIPTDRQIEVDIPR

SEQ ID NO: 1463 - protein, 85 aa, Homo sapiens
CHQYDELLSSPEGHAKFRRVLKAWVVSHPDLVYWQGLDSLCAPFLYLNFNNEALAYACMSAFIPKYLYNFFLKDNSHVIQEYLTV

SEQ ID NO: 1464 - protein, 85 aa, Homo sapiens
FSQMIAFHDPELSNHLNEIGFIPDLYAIPWFLTMFTHVFPLHKIFHLWDTLLLGNSSFPFCIGVAILQQLRDRLLANGFNECILL

SEQ ID NO: 1465 - protein, 85 aa, Homo sapiens
FSDLPEIDIERCVRESINLFCWTPKSATYRQHAQPPKPSSDSSGGRSSAPYFSAECPDPPKTDLSRESIPLNDLKSEVSPRISAE

SEQ ID NO: 1466 - protein, 85 aa, Homo sapiens
DLIDLCELTVTGHFKTPSKKTKSSKPKLLVVDIRNSEDFIRGHISGSINIPFSAAFTAEGELTQGPYTAMLQNFKGKVIVIVGHV

SEQ ID NO: 1467 - protein, 84 aa, Homo sapiens
ISGSINIPFSAAFTAEGELTQGPYTAMLQNFKGKVIVIVGHVAKHTAEFAAHLVKMKYPRICILDGGINKIKPTGLLTIPSPQI

SEQ ID NO: 1468 - protein, 85 aa, Homo sapiens
ILKTITHPRLCQYVDISRGKHERLVVVAEHCERSLEDLLRERKPVSCSTVLCIAFEVLQGLQYMNKHGIVHRALSPHNILLDRKG

SEQ ID NO: 1469 - protein, 85 aa, Homo sapiens
HIKLAKFGLYHMTAHGDDVDFPIGYPSYLAPEVIAQGIFKTTDHMPSKKPLPSGPKSDVWSLGIILFELCVGRKLFQSLDISERL

SEQ ID NO: 1470 - protein, 85 aa, Homo sapiens
KFLLTLDCVDDTLIVLAEEHGCLDIIKELPETVIDLLNKCLTFHPSKRPTPDQLMKDKVFSEVSPLYTPFTKPASLFSSSLRCAD

SEQ ID NO: 1471 - protein, 85 aa, Homo sapiens
LTLPEDISQLCKDINNDYLAERSIEEVYYLWCLAGGDLEKELVNKEIIRSKPPICTLPNFLFEDGESFGQGRDRSSLLDDTTVTL

SEQ ID NO: 1472 - protein, 85 aa, Homo sapiens
SLCQLRNRLKDVGGEAFYPLLEDDQSNLPHSNSNNELSAAATLPLIIREKDTEYQLNRIILFDRLLKAYPYKKNQIWKEARVDIP

SEQ ID NO: 1473 - protein, 85 aa, Homo sapiens
PLMRGLTWAALLGVEGAIHAKYDAIDKDTPIPTDRQIEVDIPRCHQYDELLSSPEGHAKFRRVLKAWVVSHPDLVYWQGLDSLCA

SEQ ID NO: 1474 - protein, 85 aa, Homo sapiens
PFLYLNFNNEALAYACMSAFIPKYLYNFFLKDNSHVIQEYLTVFSQMIAFHDPELSNHLNEIGFIPDLYAIPWFLTMFTHVFPLH

SEQ ID NO: 1475 - protein, 85 aa, Homo sapiens
KIFHLWDTLLLGNSSFPFCIGVAILQQLRDRLLANGFNECILLFSDLPEIDIERCVRESINLFCWTPKSATYRQHAQPPKPSSDS

SEQ ID NO: 1476 - protein, 85 aa, Homo sapiens
SGGRSSAPYFSAECPDPPKTDLSRESIPLNDLKSEVSPRISAEDLIDLCELTVTGHFKTPSKKTKSSKPKLLVVDIRNSEDFIRG

SEQ ID NO: 1477 - protein, 85 aa, Homo sapiens
HISGSINIPFSAAFTAEGELTQGPYTAMLQNFKGKVIVIVGHVAKHTAEFAAHLVKMKYPRICILDGGINKIKPTGLLTIPSPQI

SEQ ID NO: 1478 - protein, 85 aa, Homo sapiens
DTPRVLLSAVFLISFLWDLPGFQQASISSSSSSAELGSTKGMRSRKEGKMQRAPRDSDAGREGQEPQPRPQDEPRAQQPRAQEPP

SEQ ID NO: 1479 - protein, 85 aa, Homo sapiens
GRGPRVVPHEYMLSIYRTYSIAEKLGINASFFQSSKSANTITSFVDRGLDDLSHTPLRRQKYLFDVSMLSDKEELVGAELRLFRQ

SEQ ID NO: 1480 - protein, 85 aa, Homo sapiens
APSAPWGPPAGPLHVQLFPCLSPLLLDARTLDPQGAPPAGWEVFDVWQGLRHQPWKQLCLELRAAWGELDAGEAEARARGPQQPP

SEQ ID NO: 1481 - protein, 85 aa, Homo sapiens
PPDLRSLGFGRRVRPPQERALLVVFTRSQRKNLFAEMREQLGSAEAAGPGAGAEGSWPPPSGAPDARPWLPSPGRRRRRTAFASR

SEQ ID NO: 1482 - protein, 85 aa, Homo sapiens
HGKRHGKKSRLRCSKKPLHVNFKELGWDDWIIAPLEYEAYHCEGVCDFPLRSHLEPTNHAIIQTLMNSMDPGSTPPSCCVPTKLT

SEQ ID NO: 1483 - protein, 84 aa, Homo sapiens
IIAPLEYEAYHCEGVCDFPLRSHLEPTNHAIIQTLMNSMDPGSTPPSCCVPTKLTPISILYIDAGNNVVYKQYEDMVVESCGCR

SEQ ID NO: 1484 - protein, 85 aa, Homo sapiens
RSRKEGKMQRAPRDSDAGREGQEPQPRPQDEPRAQQPRAQEPPGRGPRVVPHEYMLSIYRTYSIAEKLGINASFFQSSKSANTIT

SEQ ID NO: 1485 - protein, 85 aa, Homo sapiens
SFVDRGLDDLSHTPLRRQKYLFDVSMLSDKEELVGAELRLFRQAPSAPWGPPAGPLHVQLFPCLSPLLLDARTLDPQGAPPAGWE

SEQ ID NO: 1486 - protein, 85 aa, Homo sapiens
VFDVWQGLRHQPWKQLCLELRAAWGELDAGEAEARARGPQQPPPPDLRSLGFGRRVRPPQERALLVVFTRSQRKNLFAEMREQLG

SEQ ID NO: 1487 - protein, 85 aa, Homo sapiens
SAEAAGPGAGAEGSWPPPSGAPDARPWLPSPGRRRRRTAFASRHGKRHGKKSRLRCSKKPLHVNFKELGWDDWIIAPLEYEAYHC

SEQ ID NO: 1488 - protein, 85 aa, Homo sapiens
EEQPQMQDADEPADSGGEGRAGGPPQVAGAQAACSEDRMTLLLRLRAQTKQQLLEYKSMVDASEEKTPEQIMQEKQIEAKIEDLE

SEQ ID NO: 1489 - protein, 85 aa, Homo sapiens
NEIEEVKVAFEIKKLALDRMRLSTALKKNLEKISRQSSVLMDNMKHLLELNKLIMKSQQESWDLEEKLLDIRKKRLQLKQASESK

SEQ ID NO: 1490 - protein, 84 aa, Homo sapiens
LKQASESKLLEIQTEKNKQKIDLDSMENSERIKIIRQNLQMEIKITTVIQHVFQNLILGSKVNWAEDPALKEIVLQLEKNVDMM

SEQ ID NO: 1491 - protein, 85 aa, Homo sapiens
LRLRAQTKQQLLEYKSMVDASEEKTPEQIMQEKQIEAKIEDLENEIEEVKVAFEIKKLALDRMRLSTALKKNLEKISRQSSVLMD

SEQ ID NO: 1492 - protein, 85 aa, Homo sapiens
NMKHLLELNKLIMKSQQESWDLEEKLLDIRKKRLQLKQASESKLLEIQTEKNKQKIDLDSMENSERIKIIRQNLQMEIKITTVIQ

SEQ ID NO: 1493 - protein, 85 aa, Homo sapiens
AQGLIEVERKFLPGPGTEERLQELGGTLEYRVTFRDTYYDTPELSLMQADHWLRRREDSGWELKCPGAAGVLGPHTEYKELTAEP

SEQ ID NO: 1494 - protein, 85 aa, Homo sapiens
TIVAQLCKVLRADGLGAGDVAAVLGPLGLQEVASFVTKRSAWKLVLLGADEEEPQLRVDLDTADFGYAVGEVEALVHEEAEVPTA

SEQ ID NO: 1495 - protein, 84 aa, Homo sapiens
DTADFGYAVGEVEALVHEEAEVPTALEKIHRLSSMLGVPAQETAPAKLIVYLQRFRPQDYQRLLEVNSSRERPQETEDPDHCLG

SEQ ID NO: 1496 - protein, 85 aa, Homo sapiens
ELSLMQADHWLRRREDSGWELKCPGAAGVLGPHTEYKELTAEPTIVAQLCKVLRADGLGAGDVAAVLGPLGLQEVASFVTKRSAW

SEQ ID NO: 1497 - protein, 85 aa, Homo sapiens
KLVLLGADEEEPQLRVDLDTADFGYAVGEVEALVHEEAEVPTALEKIHRLSSMLGVPAQETAPAKLIVYLQRFRPQDYQRLLEVN

SEQ ID NO: 1498 - protein, 85 aa, Homo sapiens
NGHSDEESVRNSSGESSQSDDDSGSASGSGSGSSSGSSSDGSSSQSGSSDSDSGSESGSQSESESDTSRENKVQAKPPKVDGAEF

SEQ ID NO: 1499 - protein, 85 aa, Homo sapiens
WKSSPSILAVQRSAILKKQQQQQQQQQHQASSNSGSEEDSSSSEDSDDSSSEVKRKKHKDEDWQMSGSGSPSQSGSDSESEEERE

SEQ ID NO: 1500 - protein, 85 aa, Homo sapiens
KSSCDETESDYEPKNKVKSRKPQNRSKSKNGKKILGQKKRQIDSSEEDDDEEDYDNDKRSSRRQATVNVSYKEDEEMKTDSDDLL

SEQ ID NO: 1501 - protein, 85 aa, Homo sapiens
EVCGEDVPQPEEEEFETIERFMDCRIGRKGATGATTTIYAVEADGDPNAGFEKNKEPGEIQYLIKWKGWSHIHNTWETEETLKQQ

SEQ ID NO: 1502 - protein, 85 aa, Homo sapiens
NVRGMKKLDNYKKKDQETKRWLKNASPEDVEYYNCQQELTDDLHKQYQIVERIIAHSNQKSAAGYPDYYCKWQGLPYSECSWEDG

SEQ ID NO: 1503 - protein, 85 aa, Homo sapiens
ALISKKFQACIDEYFSRNQSKTTPFKDCKVLKQRPRFVALKKQPSYIGGHEGLELRDYQLNGLNWLAHSWCKGNSCILADEMGLG

SEQ ID NO: 1504 - protein, 85 aa, Homo sapiens
KTIQTISFLNYLFHEHQLYGPFLLVVPLSTLTSWQREIQTWASQMNAVVYLGDINSRNMIRTHEWTHHQTKRLKFNILLTTYEIL

SEQ ID NO: 1505 - protein, 85 aa, Homo sapiens
LKDKAFLGGLNWAFIGVDEAHRLKNDDSLLYKTLIDFKSNHRLLITGTPLQNSLKELWSLLHFIMPEKFSSWEDFEEEHGKGREY

SEQ ID NO: 1506 - protein, 85 aa, Homo sapiens
GYASLHKELEPFLLRRVKKDVEKSLPAKVEQILRMEMSALQKQYYKWILTRNYKALSKGSKGSTSGFLNIMMELKKCCNHCYLIK

SEQ ID NO: 1507 - protein, 85 aa, Homo sapiens
PPDNNEFYNKQEALQHLIRSSGKLILLDKLLIRLRERGNRVLIFSQMVRMLDILAEYLKYRQFPFQRLDGSIKGELRKQALDHFN

SEQ ID NO: 1508 - protein, 85 aa, Homo sapiens
AEGSEDFCFLLSTRAGGLGINLASADTVVIFDSDWNPQNDLQAQARAHRIGQKKQVNIYRLVTKGSVEEDILERAKKKMVLDHLV

SEQ ID NO: 1509 - protein, 85 aa, Homo sapiens
IQRMDTTGKTVLHTGSAPSSSTPFNKEELSAILKFGAEELFKEPEGEEQEPQEMDIDEILKRAETHENEPGPLTVGDELLSQFKV

SEQ ID NO: 1510 - protein, 85 aa, Homo sapiens
ANFSNMDEDDIELEPERNSKNWEEIIPEDQRRRLEEEERQKELEEIYMLPRMRNCAKQISFNGSEGRRSRSRRYSGSDSDSISEG

SEQ ID NO: 1511 - protein, 85 aa, Homo sapiens
KRPKKRGRPRTIPRENIKGFSDAEIRRFIKSYKKFGGPLERLDAIARDAELVDKSETDLRRLGELVHNGCIKALKDSSSGTERTG

SEQ ID NO: 1512 - protein, 85 aa, Homo sapiens
GRLGKVKGPTFRISGVQVNAKLVISHEEELIPLHKSIPSDPEERKQYTIPCHTKAAHFDIDWGKEDDSNLLIGIYEYGYGSWEMI

SEQ ID NO: 1513 - protein, 85 aa, Homo sapiens
KMDPDLSLTHKILPDDPDKKPQAKQLQTRADYLIKLLSRDLAKKEALSGAGSSKRRKARAKKNKAMKSIKVKEEIKSDSSPLPSE

SEQ ID NO: 1514 - protein, 85 aa, Homo sapiens
KSDEDDDKLSESKSDGRERSKKSSVSDAPVHITASGEPVPISEESEELDQKTFSICKERMRPVKAALKQLDRPEKGLSEREQLEH

SEQ ID NO: 1515 - protein, 85 aa, Homo sapiens
TRQCLIKIGDHITECLKEYTNPEQIKQWRKNLWIFVSKFTEFDARKLHKLYKHAIKKRQESQQNSDQNSNLNPHVIRNPDVERLK

SEQ ID NO: 1516 - protein, 85 aa, Homo sapiens
ENTNHDDSSRDSYSSDRHLTQYHDHHKDRHQGDSYKKSDSRKRPYSSFSNGKDHRDWDHYKQDSRYYSDREKHRKLDDHRSRDHR

SEQ ID NO: 1517 - protein, 85 aa, Homo sapiens
SNLEGSLKDRSHSDHRSHSDHRLHSDHRSSSEYTHHKSSRDYRYHSDWQMDHRASSSGPRSPLDQRSPYGSRSPFEHSVEHKSTP

SEQ ID NO: 1518 - protein, 84 aa, Homo sapiens
SHSDHRSHSDHRLHSDHRSSSEYTHHKSSRDYRYHSDWQMDHRASSSGPRSPLDQRSPYGSRSPFEHSVEHKSTPEHTWSSRKT

SEQ ID NO: 1519 - protein, 85 aa, Homo sapiens
SSQSGSSDSDSGSESGSQSESESDTSRENKVQAKPPKVDGAEFWKSSPSILAVQRSAILKKQQQQQQQQQHQASSNSGSEEDSSS

SEQ ID NO: 1520 - protein, 85 aa, Homo sapiens
SEDSDDSSSEVKRKKHKDEDWQMSGSGSPSQSGSDSESEEEREKSSCDETESDYEPKNKVKSRKPQNRSKSKNGKKILGQKKRQI

SEQ ID NO: 1521 - protein, 85 aa, Homo sapiens
DSSEEDDDEEDYDNDKRSSRRQATVNVSYKEDEEMKTDSDDLLEVCGEDVPQPEEEEFETIERFMDCRIGRKGATGATTTIYAVE

SEQ ID NO: 1522 - protein, 85 aa, Homo sapiens
ADGDPNAGFEKNKEPGEIQYLIKWKGWSHIHNTWETEETLKQQNVRGMKKLDNYKKKDQETKRWLKNASPEDVEYYNCQQELTDD

SEQ ID NO: 1523 - protein, 85 aa, Homo sapiens
LHKQYQIVERIIAHSNQKSAAGYPDYYCKWQGLPYSECSWEDGALISKKFQACIDEYFSRNQSKTTPFKDCKVLKQRPRFVALKK

SEQ ID NO: 1524 - protein, 85 aa, Homo sapiens
QPSYIGGHEGLELRDYQLNGLNWLAHSWCKGNSCILADEMGLGKTIQTISFLNYLFHEHQLYGPFLLVVPLSTLTSWQREIQTWA

SEQ ID NO: 1525 - protein, 85 aa, Homo sapiens
SQMNAVVYLGDINSRNMIRTHEWTHHQTKRLKFNILLTTYEILLKDKAFLGGLNWAFIGVDEAHRLKNDDSLLYKTLIDFKSNHR

SEQ ID NO: 1526 - protein, 85 aa, Homo sapiens
LLITGTPLQNSLKELWSLLHFIMPEKFSSWEDFEEEHGKGREYGYASLHKELEPFLLRRVKKDVEKSLPAKVEQILRMEMSALQK

SEQ ID NO: 1527 - protein, 85 aa, Homo sapiens
QYYKWILTRNYKALSKGSKGSTSGFLNIMMELKKCCNHCYLIKPPDNNEFYNKQEALQHLIRSSGKLILLDKLLIRLRERGNRVL

SEQ ID NO: 1528 - protein, 85 aa, Homo sapiens
IFSQMVRMLDILAEYLKYRQFPFQRLDGSIKGELRKQALDHFNAEGSEDFCFLLSTRAGGLGINLASADTVVIFDSDWNPQNDLQ

SEQ ID NO: 1529 - protein, 85 aa, Homo sapiens
AQARAHRIGQKKQVNIYRLVTKGSVEEDILERAKKKMVLDHLVIQRMDTTGKTVLHTGSAPSSSTPFNKEELSAILKFGAEELFK

SEQ ID NO: 1530 - protein, 85 aa, Homo sapiens
EPEGEEQEPQEMDIDEILKRAETHENEPGPLTVGDELLSQFKVANFSNMDEDDIELEPERNSKNWEEIIPEDQRRRLEEEERQKE

SEQ ID NO: 1531 - protein, 85 aa, Homo sapiens
LEEIYMLPRMRNCAKQISFNGSEGRRSRSRRYSGSDSDSISEGKRPKKRGRPRTIPRENIKGFSDAEIRRFIKSYKKFGGPLERL

SEQ ID NO: 1532 - protein, 85 aa, Homo sapiens
DAIARDAELVDKSETDLRRLGELVHNGCIKALKDSSSGTERTGGRLGKVKGPTFRISGVQVNAKLVISHEEELIPLHKSIPSDPE

SEQ ID NO: 1533 - protein, 85 aa, Homo sapiens
ERKQYTIPCHTKAAHFDIDWGKEDDSNLLIGIYEYGYGSWEMIKMDPDLSLTHKILPDDPDKKPQAKQLQTRADYLIKLLSRDLA

SEQ ID NO: 1534 - protein, 85 aa, Homo sapiens
KKEALSGAGSSKRRKARAKKNKAMKSIKVKEEIKSDSSPLPSEKSDEDDDKLSESKSDGRERSKKSSVSDAPVHITASGEPVPIS

SEQ ID NO: 1535 - protein, 85 aa, Homo sapiens
EESEELDQKTFSICKERMRPVKAALKQLDRPEKGLSEREQLEHTRQCLIKIGDHITECLKEYTNPEQIKQWRKNLWIFVSKFTEF

SEQ ID NO: 1536 - protein, 85 aa, Homo sapiens
DARKLHKLYKHAIKKRQESQQNSDQNSNLNPHVIRNPDVERLKENTNHDDSSRDSYSSDRHLTQYHDHHKDRHQGDSYKKSDSRK

SEQ ID NO: 1537 - protein, 85 aa, Homo sapiens
RPYSSFSNGKDHRDWDHYKQDSRYYSDREKHRKLDDHRSRDHRSNLEGSLKDRSHSDHRSHSDHRLHSDHRSSSEYTHHKSSRDY

SEQ ID NO: 1538 - protein, 85 aa, Homo sapiens
ISRIEYIHSKNFIHRDVKPDNFLMGLGKKGNLVYIIDFGLAKKYRDARTHQHIPYRENKNLTGTARYASINTHLGIGAEGCHQET

SEQ ID NO: 1539 - protein, 84 aa, Homo sapiens
IHSKNFIHRDVKPDNFLMGLGKKGNLVYIIDFGLAKKYRDARTHQHIPYRENKNLTGTARYASINTHLGIGAEGCHQETEIRKD

SEQ ID NO: 1540 - protein, 85 aa, Homo sapiens
PKSKELVSSSSSGSDSDSEVDKKLKRKKQVAPEKPVKKQKTGETSRALSSSKQSSSSRDDNMFQIGKMRYVSVRDFKGKVLIDIR

SEQ ID NO: 1541 - protein, 84 aa, Homo sapiens
ETSRALSSSKQSSSSRDDNMFQIGKMRYVSVRDFKGKVLIDIREYWMDPEGEMKPGRKGISLNPEQWSQLKEQISDIDDAVRKL

SEQ ID NO: 1542 - protein, 85 aa, Homo sapiens
AAQCCCRQAPGAEAAPVRPPPEPPPALDVASASSAQLFRLRHLQLGLELRPEARELAGCLVLELCALRPAPRALVLDAHPALRLH

SEQ ID NO: 1543 - protein, 85 aa, Homo sapiens
SAAFRRAPAAAAETPCAFAFSAPGPGPAPPPPLPAFPEAPGSEPACCPLAFRVDPFTDYGSSLTVTLPPELQAHQPFQVILRYTS

SEQ ID NO: 1544 - protein, 85 aa, Homo sapiens
TDAPAIWWLDPELTYGCAKPFVFTQGHSVCNRSFFPCFDTPAVKCTYSAVVKAPSGVQVLMSATRSAYMEEEGVFHFHMEHPVPA

SEQ ID NO: 1545 - protein, 85 aa, Homo sapiens
YLVALVAGDLKPADIGPRSRVWAEPCLLPTATSKLSGAVEQWLSAAERLYGPYMWGRYDIVFLPPSFPIVAMENPCLTFIISSIL

SEQ ID NO: 1546 - protein, 85 aa, Homo sapiens
ESDEFLVIDVIHEVAHSWFGNAVTNATWEEMWLSEGLATYAQRRITTETYGAAFTCLETAFRLDALHRQMKLLGEDSPVSKLQVK

SEQ ID NO: 1547 - protein, 85 aa, Homo sapiens
MEPGVNPSHLMNLFTYEKGYCFVYYLSQLCGDPQRFDDFLRAYVEKYKFTSVVAQDLLDSFLSFFPELKEQSVDCRAGLEFERWL

SEQ ID NO: 1548 - protein, 85 aa, Homo sapiens
NATGPPLAEPDLSQGSSLTRPVEALFQLWTAEPLDQAAASASAIDISKWRTFQTALFLDRLLDGSPLPQEVVMSLSKCYSSLLDS

SEQ ID NO: 1549 - protein, 85 aa, Homo sapiens
MNAEIRIRWLQIVVRNDYYPDLHRVRRFLESQMSRMYTIPLYEDLCTGALKSFALEVFYQTQGRLHPNLRRAIQQILSQGLGSST

SEQ ID NO: 1550 - protein, 84 aa, Homo sapiens
CTGALKSFALEVFYQTQGRLHPNLRRAIQQILSQGLGSSTEPASEPSTELGKAEADTDSDAQALLLGDEAPSSAISLRDVNVSA

SEQ ID NO: 1551 - protein, 85 aa, Homo sapiens
MQLGLELRPEARELAGCLVLELCALRPAPRALVLDAHPALRLHSAAFRRAPAAAAETPCAFAFSAPGPGPAPPPPLPAFPEAPGS

SEQ ID NO: 1552 - protein, 85 aa, Homo sapiens
EPACCPLAFRVDPFTDYGSSLTVTLPPELQAHQPFQVILRYTSTDAPAIWWLDPELTYGCAKPFVFTQGHSVCNRSFFPCFDTPA

SEQ ID NO: 1553 - protein, 85 aa, Homo sapiens
VKCTYSAVVKAPSGVQVLMSATRSAYMEEEGVFHFHMEHPVPAYLVALVAGDLKPADIGPRSRVWAEPCLLPTATSKLSGAVEQW

SEQ ID NO: 1554 - protein, 85 aa, Homo sapiens
MSAAERLYGPYMWGRYDIVFLPPSFPIVAMENPCLTFIISSILESDEFLVIDVIHEVAHSWFGNAVTNATWEEMWLSEGLATYAQ

SEQ ID NO: 1555 - protein, 85 aa, Homo sapiens
RRITTETYGAAFTCLETAFRLDALHRQMKLLGEDSPVSKLQVKLEPGVNPSHLMNLFTYEKGYCFVYYLSQLCGDPQRFDDFLRA

SEQ ID NO: 1556 - protein, 85 aa, Homo sapiens
YVEKYKFTSVVAQDLLDSFLSFFPELKEQSVDCRAGLEFERWLNATGPPLAEPDLSQGSSLTRPVEALFQLWTAEPLDQAAASAS

SEQ ID NO: 1557 - protein, 85 aa, Homo sapiens
AIDISKWRTFQTALFLDRLLDGSPLPQEVVMSLSKCYSSLLDSMNAEIRIRWLQIVVRNDYYPDLHRVRRFLESQMSRMYTIPLY

SEQ ID NO: 1558 - protein, 85 aa, Homo sapiens
EDLCTGALKSFALEVFYQTQGRLHPNLRRAIQQILSQGLGSSTEPASEPSTELGKAEADTDSDAQALLLGDEAPSSAISLRDVNV

SEQ ID NO: 1559 - protein, 85 aa, Homo sapiens
SSKRAKAKTTKKRPQRATSNVFAMFDQSQIQEFKEAFNMIDQNRDGFIDKEDLHDMLASLGKNPTDEYLEGMMSEAPGPINFTMF

SEQ ID NO: 1560 - protein, 85 aa, Homo sapiens
LTMFGEKLNGTDPEDVIRNAFACFDEEASGFIHEDHLRELLTTMGDRFTDEEVDEMYREAPIDKKGNFNYVEFTRILKHGAKDKD

SEQ ID NO: 1561 - protein, 84 aa, Homo sapiens
MFGEKLNGTDPEDVIRNAFACFDEEASGFIHEDHLRELLTTMGDRFTDEEVDEMYREAPIDKKGNFNYVEFTRILKHGAKDKDD

SEQ ID NO: 1562 - protein, 85 aa, Homo sapiens
NRDGFIDKEDLHDMLASLGKNPTDEYLEGMMSEAPGPINFTMFLTMFGEKLNGTDPEDVIRNAFACFDEEASGFIHEDHLRELLT

SEQ ID NO: 1563 - protein, 85 aa, Homo sapiens
MGMYVPDRFSLKSSRVQDGMGLYTARRVRKGEKFGPFAGEKRMPEDLDENMDYRLMWEVRGSKGEVLYILDATNPRHSNWLRFVH

SEQ ID NO: 1564 - protein, 85 aa, Homo sapiens
EAPSQEQKNLAAIQEGENIFYLAVEDIETDTELLIGYLDSDMEAEEEEQQIMTVIKEGEVENSRRQSTAGRKDRLGCKEDYACPQ

SEQ ID NO: 1565 - protein, 85 aa, Homo sapiens
CESSFTSEDILAEHLQTLHQKPTEEKEFKCKNCGKKFPVKQALQRHVLQCTAKSSLKESSRSFQCSVCNSSFSSASSFEQHQETC

SEQ ID NO: 1566 - protein, 85 aa, Homo sapiens
RGDARFVCKADSCGKRLKSKDALKRHQENVHTGDPKKKLICSVCNKKCSSASSLQEHRKIHEIFDCQECMKKFISANQLKRHMIT

SEQ ID NO: 1567 - protein, 85 aa, Homo sapiens
HSEKRPYNCEICNKSFKRLDQVGAHKVIHSEDKPYKCKLCGKGFAHRNVYKNHKKTHSEERPFQCEECKALFRTPFSLQRHLLIH

SEQ ID NO: 1568 - protein, 85 aa, Homo sapiens
NSERTFKCHHCDATFKRKDTLNVHVQVVHERHKKYRCELCNKAFVTPSVLRSHKKTHTGEKEKICPYCGQKFASSGTLRVHIRSH

SEQ ID NO: 1569 - protein, 85 aa, Homo sapiens
TGERPYQCPYCEKGFSKNDGLKMHIRTHTREKPYKCSECSKAFSQKRGLDEHKRTHTGEKPFQCDVCDLAFSLKKMLIRHKMTHN

SEQ ID NO: 1570 - protein, 84 aa, Homo sapiens
CSECSKAFSQKRGLDEHKRTHTGEKPFQCDVCDLAFSLKKMLIRHKMTHNPNRPLAECQFCHKKFTRNDYLKVHMDNIHGVADS

SEQ ID NO: 1571 - protein, 85 aa, Homo sapiens
MPEDLDENMDYRLMWEVRGSKGEVLYILDATNPRHSNWLRFVHEAPSQEQKNLAAIQEGENIFYLAVEDIETDTELLIGYLDSDM

SEQ ID NO: 1572 - protein, 85 aa, Homo sapiens
EAEEEEQQIMTVIKEGEVENSRRQSTAGRKDRLGCKEDYACPQCESSFTSEDILAEHLQTLHQKPTEEKEFKCKNCGKKFPVKQA

SEQ ID NO: 1573 - protein, 85 aa, Homo sapiens
MQRHVLQCTAKSSLKESSRSFQCSVCNSSFSSASSFEQHQETCRGDARFVCKADSCGKRLKSKDALKRHQENVHTGDPKKKLICS

SEQ ID NO: 1574 - protein, 85 aa, Homo sapiens
VCNKKCSSASSLQEHRKIHEIFDCQECMKKFISANQLKRHMITHSEKRPYNCEICNKSFKRLDQVGAHKVIHSEDKPYKCKLCGK

SEQ ID NO: 1575 - protein, 85 aa, Homo sapiens
GFAHRNVYKNHKKTHSEERPFQCEECKALFRTPFSLQRHLLIHNSERTFKCHHCDATFKRKDTLNVHVQVVHERHKKYRCELCNK

SEQ ID NO: 1576 - protein, 85 aa, Homo sapiens
AFVTPSVLRSHKKTHTGEKEKICPYCGQKFASSGTLRVHIRSHTGERPYQCPYCEKGFSKNDGLKMHIRTHTREKPYKCSECSKA

SEQ ID NO: 1577 - protein, 85 aa, Homo sapiens
EPPRGPPANGAEPSRAVGTVKVYLPNKQRTVVTVRDGMSVYDSLDKALKVRGLNQDCCVVYRLIKGRKTVTAWDTAIAPLDGEEL

SEQ ID NO: 1578 - protein, 85 aa, Homo sapiens
IVEVLEDVPLTMHNFVRKTFFSLAFCDFCLKFLFHGFRCQTCGYKFHQHCSSKVPTVCVDMSTNRQQPSRFYHSVQDLSGGSRQH

SEQ ID NO: 1579 - protein, 85 aa, Homo sapiens
EAPSNRPLNELLTPQGPSPRTQHCDPEHFPFPAPANAPLQRIRSTSTPNVHMVSTTAPMDSNLIQLTGQSFSTDAAGSRGGSDGT

SEQ ID NO: 1580 - protein, 85 aa, Homo sapiens
PRGSPSPASVSSGRKSPHSKSPAEQRERKSLADDKKKVKNLGYRDSGYYWEVPPSEVQLLKRIGTGSFGTVFRGRWHGDVAVKVL

SEQ ID NO: 1581 - protein, 85 aa, Homo sapiens
KVSQPTAEQAQAFKNEMQVLRKTRHVNILLFMGFMTRPGFAIITQWCEGSSLYHHLHVADTRFDMVQLIDVARQTAQGMDYLHAK

SEQ ID NO: 1582 - protein, 85 aa, Homo sapiens
NIIHRDLKSNNIFLHEGLTVKIGDFGLATVKTRWSGAQPLEQPSGSVLWMAAEVIRMQDPNPYSFQSDVYAYGVVLYELMTGSLP

SEQ ID NO: 1583 - protein, 85 aa, Homo sapiens
YSHIGCRDQIIFMVGRGYLSPDLSKISSNCPKAMRRLLSDCLKFQREERPLFPQILATIELLQRSLPKIERSASEPSLHRTQADE

SEQ ID NO: 1584 - protein, 84 aa, Homo sapiens
GRGYLSPDLSKISSNCPKAMRRLLSDCLKFQREERPLFPQILATIELLQRSLPKIERSASEPSLHRTQADELPACLLSAARLVP

SEQ ID NO: 1585 - protein, 85 aa, Homo sapiens
SLDKALKVRGLNQDCCVVYRLIKGRKTVTAWDTAIAPLDGEELIVEVLEDVPLTMHNFVRKTFFSLAFCDFCLKFLFHGFRCQTC

SEQ ID NO: 1586 - protein, 85 aa, Homo sapiens
GYKFHQHCSSKVPTVCVDMSTNRQQPSRFYHSVQDLSGGSRQHEAPSNRPLNELLTPQGPSPRTQHCDPEHFPFPAPANAPLQRI

SEQ ID NO: 1587 - protein, 85 aa, Homo sapiens
RSTSTPNVHMVSTTAPMDSNLIQLTGQSFSTDAAGSRGGSDGTPRGSPSPASVSSGRKSPHSKSPAEQRERKSLADDKKKVKNLG

SEQ ID NO: 1588 - protein, 85 aa, Homo sapiens
YRDSGYYWEVPPSEVQLLKRIGTGSFGTVFRGRWHGDVAVKVLKVSQPTAEQAQAFKNEMQVLRKTRHVNILLFMGFMTRPGFAI

SEQ ID NO: 1589 - protein, 85 aa, Homo sapiens
ITQWCEGSSLYHHLHVADTRFDMVQLIDVARQTAQGMDYLHAKNIIHRDLKSNNIFLHEGLTVKIGDFGLATVKTRWSGAQPLEQ

SEQ ID NO: 1590 - protein, 85 aa, Homo sapiens
PSGSVLWMAAEVIRMQDPNPYSFQSDVYAYGVVLYELMTGSLPYSHIGCRDQIIFMVGRGYLSPDLSKISSNCPKAMRRLLSDCL

SEQ ID NO: 1591 - protein, 85 aa, Homo sapiens
PSCSTSTMPGMICKNPDLEFDSLQPCFYPDEDDFYFGGPDSTPPGEDIWKKFELLPTPPLSPSRGFAEHSSEPPSWVTEMLLENE

SEQ ID NO: 1592 - protein, 85 aa, Homo sapiens
MWGSPAEEDAFGLGGLGGLTPNPVILQDCMWSGFSAREKLERAVSEKLQHGRGPPTAGSTAQSPGAGAASPAGRGHGGAAGAGRA

SEQ ID NO: 1593 - protein, 85 aa, Homo sapiens
GAALPAELAHPAAECVDPAVVFPFPVNKREPAPVPAAPASAPAAGPAVASGAGIAAPAGAPGVAPPRPGGRQTSGGDHKALSTSG

SEQ ID NO: 1594 - protein, 85 aa, Homo sapiens
EDTLSDSDDEDDEEEDEEEEIDVVTVEKRRSSSNTKAVTTFTITVRPKNAALGPGRAQSSELILKRCLPIHQQHNYAAPSPYVES

SEQ ID NO: 1595 - protein, 85 aa, Homo sapiens
EDAPPQKKIKSEASPRPLKSVIPPKAKSLSPRNSDSEDSERRRNHNILERQRRNDLRSSFLTLRDHVPELVKNEKAAKVVILKKA

SEQ ID NO: 1596 - protein, 84 aa, Homo sapiens
ERRRNHNILERQRRNDLRSSFLTLRDHVPELVKNEKAAKVVILKKATEYVHSLQAEEHQLLLEKEKLQARQQQLLKKIEHARTC

SEQ ID NO: 1597 - protein, 85 aa, Homo sapiens
PPGEDIWKKFELLPTPPLSPSRGFAEHSSEPPSWVTEMLLENELWGSPAEEDAFGLGGLGGLTPNPVILQDCMWSGFSAREKLER

SEQ ID NO: 1598 - protein, 85 aa, Homo sapiens
AVSEKLQHGRGPPTAGSTAQSPGAGAASPAGRGHGGAAGAGRAGAALPAELAHPAAECVDPAVVFPFPVNKREPAPVPAAPASAP

SEQ ID NO: 1599 - protein, 85 aa, Homo sapiens
AAGPAVASGAGIAAPAGAPGVAPPRPGGRQTSGGDHKALSTSGEDTLSDSDDEDDEEEDEEEEIDVVTVEKRRSSSNTKAVTTFT

SEQ ID NO: 1600 - protein, 85 aa, Homo sapiens
ITVRPKNAALGPGRAQSSELILKRCLPIHQQHNYAAPSPYVESEDAPPQKKIKSEASPRPLKSVIPPKAKSLSPRNSDSEDSERR

SEQ ID NO: 1601 - protein, 85 aa, Homo sapiens
MELRHRGSCPGPREAVSPPHREGEAAGGDHETESTSDKETDIDDRYGDLDSRTDSDIPEIPPSSDRTPEILKKALSGLSSRWKNW

SEQ ID NO: 1602 - protein, 85 aa, Homo sapiens
WIRGILTLTMISLFFLIIYMGSFMLMLLVLGIQVKCFHEIITIGYRVYHSYDLPWFRTLSWYFLLCVNYFFYGETVADYFATFVQ

SEQ ID NO: 1603 - protein, 85 aa, Homo sapiens
REEQLQFLIRYHRFISFALYLAGFCMFVLSLVKKHYRLQFYMFAWTHVTLLITVTQSHLVIQNLFEGMIWFLVPISSVICNDITA

SEQ ID NO: 1604 - protein, 85 aa, Homo sapiens
YLFGFFFGRTPLIKLSPKKTWEGFIGGFFSTVVFGFIAAYVLSKYQYFVCPVEYRSDVNSFVTECEPSELFQLQTYSLPPFLKAV

SEQ ID NO: 1605 - protein, 85 aa, Homo sapiens
MRQERVSLYPFQIHSIALSTFASLIGPFGGFFASGFKRAFKIKDFANTIPGHGGIMDRFDCQYLMATFVHVYITSFIRGPNPSKV

SEQ ID NO: 1606 - protein, 84 aa, Homo sapiens
KRAFKIKDFANTIPGHGGIMDRFDCQYLMATFVHVYITSFIRGPNPSKVLQQLLVLQPEQQLNIYKTLKTHLIEKGILQPTLKV

SEQ ID NO: 1607 - protein, 85 aa, Homo sapiens
DDRYGDLDSRTDSDIPEIPPSSDRTPEILKKALSGLSSRWKNWWIRGILTLTMISLFFLIIYMGSFMLMLLVLGIQVKCFHEIIT

SEQ ID NO: 1608 - protein, 85 aa, Homo sapiens
IGYRVYHSYDLPWFRTLSWYFLLCVNYFFYGETVADYFATFVQREEQLQFLIRYHRFISFALYLAGFCMFVLSLVKKHYRLQFYM

SEQ ID NO: 1609 - protein, 85 aa, Homo sapiens
FAWTHVTLLITVTQSHLVIQNLFEGMIWFLVPISSVICNDITAYLFGFFFGRTPLIKLSPKKTWEGFIGGFFSTVVFGFIAAYVL

SEQ ID NO: 1610 - protein, 85 aa, Homo sapiens
SKYQYFVCPVEYRSDVNSFVTECEPSELFQLQTYSLPPFLKAVLRQERVSLYPFQIHSIALSTFASLIGPFGGFFASGFKRAFKI

SEQ ID NO: 1611 - protein, 85 aa, Homo sapiens
SQPRTPEQALDTPGDCPPGRRDEDAGEGIQCSQRMLSFSDALLSIIATVMILPVTHTEISPEQQFDRSVQRLLATRIAVYLMTFL

SEQ ID NO: 1612 - protein, 85 aa, Homo sapiens
IVTVAWAAHTRLFQVVGKTDDTLALLNLACMMTITFLPYTFSLMVTFPDVPLGIFLFCVCVIAIGVVQALIVGYAFHFPHLLSPQ

SEQ ID NO: 1613 - protein, 85 aa, Homo sapiens
IQRSAHRALYRRHVLGIVLQGPALCFAAAIFSLFFVPLSYLLMVTVILLPYVSKVTGWCRDRLLGHREPSAHPVEVFSFDLHEPL

SEQ ID NO: 1614 - protein, 85 aa, Homo sapiens
SKERVEAFSDGVYAIVATLLILDICEDNVPDPKDVKERFSGSLVAALSATGPRFLAYFGSFATVGLLWFAHHSLFLHVRKATRAM

SEQ ID NO: 1615 - protein, 85 aa, Homo sapiens
GLLNTLSLAFVGGLPLAYQQTSAFARQPRDELERVRVSCTIIFLASIFQLAMWTTALLHQAETLQPSVWFGGREHVLMFAKLALY

SEQ ID NO: 1616 - protein, 84 aa, Homo sapiens
AKLALYPCASLLAFASTCLLSRFSVGIFHLMQIAVPCAFLLLRLLVGLALATLRVLRGLARPEHPPPAPTGQDDPQSQLLPAPC

SEQ ID NO: 1617 - protein, 85 aa, Homo sapiens
MSIIATVMILPVTHTEISPEQQFDRSVQRLLATRIAVYLMTFLIVTVAWAAHTRLFQVVGKTDDTLALLNLACMMTITFLPYTFS

SEQ ID NO: 1618 - protein, 85 aa, Homo sapiens
LMVTFPDVPLGIFLFCVCVIAIGVVQALIVGYAFHFPHLLSPQIQRSAHRALYRRHVLGIVLQGPALCFAAAIFSLFFVPLSYLL

SEQ ID NO: 1619 - protein, 85 aa, Homo sapiens
MVTVILLPYVSKVTGWCRDRLLGHREPSAHPVEVFSFDLHEPLSKERVEAFSDGVYAIVATLLILDICEDNVPDPKDVKERFSGS

SEQ ID NO: 1620 - protein, 85 aa, Homo sapiens
LVAALSATGPRFLAYFGSFATVGLLWFAHHSLFLHVRKATRAMGLLNTLSLAFVGGLPLAYQQTSAFARQPRDELERVRVSCTII

SEQ ID NO: 1621 - protein, 85 aa, Homo sapiens
FLASIFQLAMWTTALLHQAETLQPSVWFGGREHVLMFAKLALYPCASLLAFASTCLLSRFSVGIFHLMQIAVPCAFLLLRLLVGL

SEQ ID NO: 1622 - protein, 85 aa, Homo sapiens
PAGLTEPAGAAPPAAVSASGTVTMAPAGALPVRVESTPVALGAVTKAPVSVCVEPTASQPLRSPVGTLVTKVAPVSAPPKVSSGP

SEQ ID NO: 1623 - protein, 85 aa, Homo sapiens
RLPAPQIVAVKAPNTTTIQFPANLQLPPGTVLIKSNSGPLMLVSPQQTVTRAETTSNITSRPAVPANPQTVKICTVPNSSSQLIK

SEQ ID NO: 1624 - protein, 85 aa, Homo sapiens
KVAVTPVKKLAQIGTTVVTTVPKPSSVQSVAVPTSVVTVTPGKPLNTVTTLKPSSLGASSTPSNEPNLKAENSAAVQINLSPTML

SEQ ID NO: 1625 - protein, 85 aa, Homo sapiens
ENVKKCKNFLAMLIKLACSGSQSPEMGQNVKKLVEQLLDAKIEAEEFTRKLYVELKSSPQPHLVPFLKKSVVALRQLLPNSQSFI

SEQ ID NO: 1626 - protein, 85 aa, Homo sapiens
QQCVQQTSSDMVIATCTTTVTTSPVVTTTVSSSQSEKSIIVSGATAPRTVSVQTLNPLAGPVGAKAGVVTLHSVGPTAATGGTTA

SEQ ID NO: 1627 - protein, 85 aa, Homo sapiens
GTGLLQTSKPLVTSVANTVTTVSLQPEKPVVSGTAVTLSLPAVTFGETSGAAICLPSVKPVVSSAGTTSDKPVIGTPVQIKLAQP

SEQ ID NO: 1628 - protein, 85 aa, Homo sapiens
GPVLSQPAGIPQAVQVKQLVVQQPSGGNEKQVTTISHSSTLTIQKCGQKTMPVNTIIPTSQFPPASILKQITLPGNKILSLQASP

SEQ ID NO: 1629 - protein, 85 aa, Homo sapiens
TQKNRIKENVTSCFRDEDDINDVTSMAGVNLNEENACILATNSELVGTLIQSCKDEPFLFIGALQKRILDIGKKHDITELNSDAV

SEQ ID NO: 1630 - protein, 85 aa, Homo sapiens
NLISQATQERLRGLLEKLTAIAQHRMTTYKASENYILCSDTRSQLKFLEKLDQLEKQRKDLEEREMLLKAAKSRSNKEDPEQLRL

SEQ ID NO: 1631 - protein, 85 aa, Homo sapiens
KQKAKELQQLELAQIQHRDANLTALAAIGPRKKRPLESGIEGLKDNLLASGTSSLTATKQLHRPRITRICLRDLIFCMEQEREMK

SEQ ID NO: 1632 - protein, 84 aa, Homo sapiens
AQIQHRDANLTALAAIGPRKKRPLESGIEGLKDNLLASGTSSLTATKQLHRPRITRICLRDLIFCMEQEREMKYSRALYLALLK

SEQ ID NO: 1633 - protein, 85 aa, Homo sapiens
AVTKAPVSVCVEPTASQPLRSPVGTLVTKVAPVSAPPKVSSGPRLPAPQIVAVKAPNTTTIQFPANLQLPPGTVLIKSNSGPLML

SEQ ID NO: 1634 - protein, 85 aa, Homo sapiens
VSPQQTVTRAETTSNITSRPAVPANPQTVKICTVPNSSSQLIKKVAVTPVKKLAQIGTTVVTTVPKPSSVQSVAVPTSVVTVTPG

SEQ ID NO: 1635 - protein, 85 aa, Homo sapiens
KPLNTVTTLKPSSLGASSTPSNEPNLKAENSAAVQINLSPTMLENVKKCKNFLAMLIKLACSGSQSPEMGQNVKKLVEQLLDAKI

SEQ ID NO: 1636 - protein, 85 aa, Homo sapiens
EAEEFTRKLYVELKSSPQPHLVPFLKKSVVALRQLLPNSQSFIQQCVQQTSSDMVIATCTTTVTTSPVVTTTVSSSQSEKSIIVS

SEQ ID NO: 1637 - protein, 85 aa, Homo sapiens
GATAPRTVSVQTLNPLAGPVGAKAGVVTLHSVGPTAATGGTTAGTGLLQTSKPLVTSVANTVTTVSLQPEKPVVSGTAVTLSLPA

SEQ ID NO: 1638 - protein, 85 aa, Homo sapiens
VTFGETSGAAICLPSVKPVVSSAGTTSDKPVIGTPVQIKLAQPGPVLSQPAGIPQAVQVKQLVVQQPSGGNEKQVTTISHSSTLT

SEQ ID NO: 1639 - protein, 85 aa, Homo sapiens
IQKCGQKTMPVNTIIPTSQFPPASILKQITLPGNKILSLQASPTQKNRIKENVTSCFRDEDDINDVTSMAGVNLNEENACILATN

SEQ ID NO: 1640 - protein, 85 aa, Homo sapiens
SELVGTLIQSCKDEPFLFIGALQKRILDIGKKHDITELNSDAVNLISQATQERLRGLLEKLTAIAQHRMTTYKASENYILCSDTR

SEQ ID NO: 1641 - protein, 85 aa, Homo sapiens
SQLKFLEKLDQLEKQRKDLEEREMLLKAAKSRSNKEDPEQLRLKQKAKELQQLELAQIQHRDANLTALAAIGPRKKRPLESGIEG

SEQ ID NO: 1642 - protein, 85 aa, Homo sapiens
ASRGRRPEHGGPPELFYDETEARKYVRNSRMIDIQTRMAGRALELLYLPENKPCYLLDIGCGTGLSGSYLSDEGHYWVGLDISPA

SEQ ID NO: 1643 - protein, 85 aa, Homo sapiens
MLDEAVDREIEGDLLLGDMGQGIPFKPGTFDGCISISAVQWLCNANKKSENPAKRLYCFFASLFSVLVRGSRAVLQLYPENSEQL

SEQ ID NO: 1644 - protein, 85 aa, Homo sapiens
ELITTQATKAGFSGGMVVDYPNSAKAKKFYLCLFSGPSTFIPEGLSENQDEVEPRESVFTNERFPLRMSRRGMVRKSRAWVLEKK

SEQ ID NO: 1645 - protein, 84 aa, Homo sapiens
KKFYLCLFSGPSTFIPEGLSENQDEVEPRESVFTNERFPLRMSRRGMVRKSRAWVLEKKERHRRQGREVRPDTQYTGRKRKPRF

SEQ ID NO: 1646 - protein, 85 aa, Homo sapiens
MELLYLPENKPCYLLDIGCGTGLSGSYLSDEGHYWVGLDISPAMLDEAVDREIEGDLLLGDMGQGIPFKPGTFDGCISISAVQWL

SEQ ID NO: 1647 - protein, 85 aa, Homo sapiens
CNANKKSENPAKRLYCFFASLFSVLVRGSRAVLQLYPENSEQLELITTQATKAGFSGGMVVDYPNSAKAKKFYLCLFSGPSTFIP

SEQ ID NO: 1648 - protein, 85 aa, Homo sapiens
APQKDRKPKRSTWRFNLDLTHPVEDGIFDSGNFEQFLREKVKVNGKTGNLGNVVHIERFKNKITVVSEKQFSKRYLKYLTKKYLK

SEQ ID NO: 1649 - protein, 84 aa, Homo sapiens
REKVKVNGKTGNLGNVVHIERFKNKITVVSEKQFSKRYLKYLTKKYLKKNNLRDWLRVVASDKETYELRYFQISQDEDESESED

SEQ ID NO: 1650 - protein, 85 aa, Homo sapiens
SSAAEPPPPPPPESAPSKPAASIASGGSNSSNKGGPEGVAAQAVASAASAGPADAEMEEIFDDASPGKQKEIQEPDPTYEEKMQT

SEQ ID NO: 1651 - protein, 85 aa, Homo sapiens
DRANRFEYLLKQTELFAHFIQPAAQKTPTSPLKMKPGRPRIKKDEKQNLLSVGDYRHRRTEQEEDEELLTESSKATNVCTRFEDS

SEQ ID NO: 1652 - protein, 85 aa, Homo sapiens
PSYVKWGKLRDYQVRGLNWLISLYENGINGILADEMGLGKTLQTISLLGYMKHYRNIPGPHMVLVPKSTLHNWMSEFKRWVPTLR

SEQ ID NO: 1653 - protein, 85 aa, Homo sapiens
SVCLIGDKEQRAAFVRDVLLPGEWDVCVTSYEMLIKEKSVFKKFNWRYLVIDEAHRIKNEKSKLSEIVREFKTTNRLLLTGTPLQ

SEQ ID NO: 1654 - protein, 85 aa, Homo sapiens
NNLHELWSLLNFLLPDVFNSADDFDSWFDTNNCLGDQKLVERLHMVLRPFLLRRIKADVEKSLPPKKEVKIYVGLSKMQREWYTR

SEQ ID NO: 1655 - protein, 85 aa, Homo sapiens
ILMKDIDILNSAGKMDKMRLLNILMQLRKCCNHPYLFDGAEPGPPYTTDMHLVTNSGKMVVLDKLLPKLKEQGSRVLIFSQMTRV

SEQ ID NO: 1656 - protein, 85 aa, Homo sapiens
MDILEDYCMWRNYEYCRLDGQTPHDERQDSINAYNEPNSTKFVFMLSTRAGGLGINLATADVVILYDSDWNPQVDLQAMDRAHRI

SEQ ID NO: 1657 - protein, 85 aa, Homo sapiens
GQTKTVRVFRFITDNTVEERIVERAEMKLRLDSIVIQQGRLVDQNLNKIGKDEMLQMIRHGATHVFASKESEITDEDIDGILERG

SEQ ID NO: 1658 - protein, 85 aa, Homo sapiens
AKKTAEMNEKLSKMGESSLRNFTMDTESSVYNFEGEDYREKQKIAFTEWIEPPKRERKANYAVDAYFREALRVSEPKAPKAPRPP

SEQ ID NO: 1659 - protein, 85 aa, Homo sapiens
KQPNVQDFQFFPPRLFELLEKEILFYRKTIGYKVPRNPELPNAAQAQKEEQLKIDEAESLNDEELEEKEKLLTQGFTNWNKRDFN

SEQ ID NO: 1660 - protein, 85 aa, Homo sapiens
QFIKANEKWGRDDIENIAREVEGKTPEEVIEYSAVFWERCNELQDIEKIMAQIERGEARIQRRISIKKALDTKIGRYKAPFHQLR

SEQ ID NO: 1661 - protein, 85 aa, Homo sapiens
ISYGTNKGKNYTEEEDRFLICMLHKLGFDKENVYDELRQCIRNSPQFRFDWFLKSRTAMELQRRCNTLITLIERENMELEEKEKA

SEQ ID NO: 1662 - protein, 84 aa, Homo sapiens
VYDELRQCIRNSPQFRFDWFLKSRTAMELQRRCNTLITLIERENMELEEKEKAEKKKRGPKPSTQKRKMDGAPDGRGRKKKLKL

SEQ ID NO: 1663 - protein, 85 aa, Homo sapiens
AVASAASAGPADAEMEEIFDDASPGKQKEIQEPDPTYEEKMQTDRANRFEYLLKQTELFAHFIQPAAQKTPTSPLKMKPGRPRIK

SEQ ID NO: 1664 - protein, 85 aa, Homo sapiens
KDEKQNLLSVGDYRHRRTEQEEDEELLTESSKATNVCTRFEDSPSYVKWGKLRDYQVRGLNWLISLYENGINGILADEMGLGKTL

SEQ ID NO: 1665 - protein, 85 aa, Homo sapiens
QTISLLGYMKHYRNIPGPHMVLVPKSTLHNWMSEFKRWVPTLRSVCLIGDKEQRAAFVRDVLLPGEWDVCVTSYEMLIKEKSVFK

SEQ ID NO: 1666 - protein, 85 aa, Homo sapiens
KFNWRYLVIDEAHRIKNEKSKLSEIVREFKTTNRLLLTGTPLQNNLHELWSLLNFLLPDVFNSADDFDSWFDTNNCLGDQKLVER

SEQ ID NO: 1667 - protein, 85 aa, Homo sapiens
LHMVLRPFLLRRIKADVEKSLPPKKEVKIYVGLSKMQREWYTRILMKDIDILNSAGKMDKMRLLNILMQLRKCCNHPYLFDGAEP

SEQ ID NO: 1668 - protein, 85 aa, Homo sapiens
GPPYTTDMHLVTNSGKMVVLDKLLPKLKEQGSRVLIFSQMTRVLDILEDYCMWRNYEYCRLDGQTPHDERQDSINAYNEPNSTKF

SEQ ID NO: 1669 - protein, 85 aa, Homo sapiens
VFMLSTRAGGLGINLATADVVILYDSDWNPQVDLQAMDRAHRIGQTKTVRVFRFITDNTVEERIVERAEMKLRLDSIVIQQGRLV

SEQ ID NO: 1670 - protein, 85 aa, Homo sapiens
DQNLNKIGKDEMLQMIRHGATHVFASKESEITDEDIDGILERGAKKTAEMNEKLSKMGESSLRNFTMDTESSVYNFEGEDYREKQ

SEQ ID NO: 1671 - protein, 85 aa, Homo sapiens
KIAFTEWIEPPKRERKANYAVDAYFREALRVSEPKAPKAPRPPKQPNVQDFQFFPPRLFELLEKEILFYRKTIGYKVPRNPELPN

SEQ ID NO: 1672 - protein, 85 aa, Homo sapiens
AAQAQKEEQLKIDEAESLNDEELEEKEKLLTQGFTNWNKRDFNQFIKANEKWGRDDIENIAREVEGKTPEEVIEYSAVFWERCNE

SEQ ID NO: 1673 - protein, 85 aa, Homo sapiens
LQDIEKIMAQIERGEARIQRRISIKKALDTKIGRYKAPFHQLRISYGTNKGKNYTEEEDRFLICMLHKLGFDKENVYDELRQCIR

SEQ ID NO: 1674 - protein, 85 aa, Homo sapiens
ETPLDVLSRAASLVHADDEKREAALRGEPRIQTLPVASALSSHRTGPPPISPSKRKFSMEPGDEDLDCDNDHVSKMSRIFNPHLN

SEQ ID NO: 1675 - protein, 85 aa, Homo sapiens
KTANGDCRRDPRERSRSPIERAVAPTMSLHGSHLYTSLPSLGLEQPLALTKNSLDASRPAGLSPTLTPGERQQNRPSVITCASAG

SEQ ID NO: 1676 - protein, 85 aa, Homo sapiens
ARNCNLSHCPIAHSGCAAPGPASYRRPPSAATTCDPVVEEHFRRSLGKNYKEPEPAPNSVSITGSVDDHFAKALGDTWLQIKAAK

SEQ ID NO: 1677 - protein, 84 aa, Homo sapiens
PVVEEHFRRSLGKNYKEPEPAPNSVSITGSVDDHFAKALGDTWLQIKAAKDGASSSPESASRRGQPASPSAHMVSHSHSPSVVS

SEQ ID NO: 1678 - protein, 85 aa, Homo sapiens
HRTGPPPISPSKRKFSMEPGDEDLDCDNDHVSKMSRIFNPHLNKTANGDCRRDPRERSRSPIERAVAPTMSLHGSHLYTSLPSLG

SEQ ID NO: 1679 - protein, 85 aa, Homo sapiens
MEQPLALTKNSLDASRPAGLSPTLTPGERQQNRPSVITCASAGARNCNLSHCPIAHSGCAAPGPASYRRPPSAATTCDPVVEEHF

SEQ ID NO: 1680 - protein, 85 aa, Homo sapiens
NLSSASSTEEKAVTTVLWGCELSQERRTWTFRPQLEGKQSCRLLLHTICLGEKAKEEMHRVEILPPANQEDKKMQPVTIASLQAS

SEQ ID NO: 1681 - protein, 85 aa, Homo sapiens
VLPMVSMVGVQLSPPVTFQLRAGSGPVFLSGQERYEASDLTWEEEEEEEGEEEEEEEEDDEDEDADISLEEQSPVKQVKRLVPQK

SEQ ID NO: 1682 - protein, 84 aa, Homo sapiens
EEEEEGEEEEEEEEDDEDEDADISLEEQSPVKQVKRLVPQKQASVAKKKKLEKEEEEIRASVRDKSPVKKAKATARAKKPGFKK

SEQ ID NO: 1683 - protein, 85 aa, Homo sapiens
MLLHTICLGEKAKEEMHRVEILPPANQEDKKMQPVTIASLQASVLPMVSMVGVQLSPPVTFQLRAGSGPVFLSGQERYEASDLTW

SEQ ID NO: 1684 - protein, 85 aa, Homo sapiens
EEEEEEEGEEEEEEEEDDEDEDADISLEEQSPVKQVKRLVPQKQASVAKKKKLEKEEEEIRASVRDKSPVKKAKATARAKKPGFK

SEQ ID NO: 1685 - protein, 85 aa, Homo sapiens
SGFSPELIDYLEGKISFEEFERRREERKTREKKSLQEKGKLSAEENPDDSEVPSSSGINSTKSQDKDVNEGETSDGVRKSVHKVF

SEQ ID NO: 1686 - protein, 85 aa, Homo sapiens
ASMLGENEDDEEEEEEEEEEEEEEETPEQPTAGDVFVLEMVLNRETKKMMKEKRPRSKLPRALRGLMGEANIRFARGEREEAILM

SEQ ID NO: 1687 - protein, 85 aa, Homo sapiens
CMEIIRQAPLAYEPFSTLAMIYEDQGDMEKSLQFELIAAHLNPSDTEEWVRLAEMSLEQDNIKQAIFCYTKALKYEPTNVRYLWE

SEQ ID NO: 1688 - protein, 85 aa, Homo sapiens
RSSLYEQMGDHKMAMDGYRRILNLLSPSDGERFMQLARDMAKSYYEANDVTSAINIIDEAFSKHQGLVSMEDVNIAAELYISNKQ

SEQ ID NO: 1689 - protein, 85 aa, Homo sapiens
YDKALEIITDFSGIVLEKKTSEEGTSEENKAPENVTCTIPDGVPIDITVKLMVCLVHLNILEPLNPLLTTLVEQNPEDMGDLYLD

SEQ ID NO: 1690 - protein, 85 aa, Homo sapiens
VAEAFLDVGEYNSALPLLSALVCSERYNLAVVWLRHAECLKALGYMERAAESYGKVVDLAPLHLDARISLSTLQQQLGQPEKALE

SEQ ID NO: 1691 - protein, 85 aa, Homo sapiens
ALEPMYDPDTLAQDANAAQQELKLLLHRSTLLFSQGKMYGYVDTLLTMLAMLLKVAMNRAQVCLISSSKSGERHLYLIKVSRDKI

SEQ ID NO: 1692 - protein, 85 aa, Homo sapiens
SDSNDQESANCDAKAIFAVLTSVLTKDDWWNLLLKAIYSLCDLSRFQEAELLVDSSLEYYSFYDDRQKRKELEYFGLSAAILDKN

SEQ ID NO: 1693 - protein, 85 aa, Homo sapiens
FRKAYNYIRIMVMENVNKPQLWNIFNQVTMHSQDVRHHRFCLRLMLKNPENHALCVLNGHNAFVSGSFKHALGQYVQAFRTHPDE

SEQ ID NO: 1694 - protein, 85 aa, Homo sapiens
PLYSFCIGLTFIHMASQKYVLRRHALIVQGFSFLNRYLSLRGPCQESFYNLGRGLHQLGLIHLAIHYYQKALELPPLVVEGIELD

SEQ ID NO: 1695 - protein, 84 aa, Homo sapiens
YLSLRGPCQESFYNLGRGLHQLGLIHLAIHYYQKALELPPLVVEGIELDQLDLRRDIAYNLSLIYQSSGNTGMAQTLLYTYCSI

SEQ ID NO: 1696 - protein, 85 aa, Homo sapiens
AEENPDDSEVPSSSGINSTKSQDKDVNEGETSDGVRKSVHKVFASMLGENEDDEEEEEEEEEEEEEEETPEQPTAGDVFVLEMVL

SEQ ID NO: 1697 - protein, 85 aa, Homo sapiens
NRETKKMMKEKRPRSKLPRALRGLMGEANIRFARGEREEAILMCMEIIRQAPLAYEPFSTLAMIYEDQGDMEKSLQFELIAAHLN

SEQ ID NO: 1698 - protein, 85 aa, Homo sapiens
PSDTEEWVRLAEMSLEQDNIKQAIFCYTKALKYEPTNVRYLWERSSLYEQMGDHKMAMDGYRRILNLLSPSDGERFMQLARDMAK

SEQ ID NO: 1699 - protein, 85 aa, Homo sapiens
SYYEANDVTSAINIIDEAFSKHQGLVSMEDVNIAAELYISNKQYDKALEIITDFSGIVLEKKTSEEGTSEENKAPENVTCTIPDG

SEQ ID NO: 1700 - protein, 85 aa, Homo sapiens
VPIDITVKLMVCLVHLNILEPLNPLLTTLVEQNPEDMGDLYLDVAEAFLDVGEYNSALPLLSALVCSERYNLAVVWLRHAECLKA

SEQ ID NO: 1701 - protein, 85 aa, Homo sapiens
LGYMERAAESYGKVVDLAPLHLDARISLSTLQQQLGQPEKALEALEPMYDPDTLAQDANAAQQELKLLLHRSTLLFSQGKMYGYV

SEQ ID NO: 1702 - protein, 85 aa, Homo sapiens
DTLLTMLAMLLKVAMNRAQVCLISSSKSGERHLYLIKVSRDKISDSNDQESANCDAKAIFAVLTSVLTKDDWWNLLLKAIYSLCD

SEQ ID NO: 1703 - protein, 85 aa, Homo sapiens
LSRFQEAELLVDSSLEYYSFYDDRQKRKELEYFGLSAAILDKNFRKAYNYIRIMVMENVNKPQLWNIFNQVTMHSQDVRHHRFCL

SEQ ID NO: 1704 - protein, 85 aa, Homo sapiens
RLMLKNPENHALCVLNGHNAFVSGSFKHALGQYVQAFRTHPDEPLYSFCIGLTFIHMASQKYVLRRHALIVQGFSFLNRYLSLRG

SEQ ID NO: 1705 - protein, 85 aa, Homo sapiens
NLELLESFGQNYPEEADGTLDCISMALTCTFNRWGTLLAVGCNDGRIVIWDFLTRGIAKIISAHIHPVCSLCWSRDGHKLVSAST

SEQ ID NO: 1706 - protein, 85 aa, Homo sapiens
DNIVSQWDVLSGDCDQRFRFPSPILKVQYHPRDQNKVLVCPMKSAPVMLTLSDSKHVVLPVDDDSDLNVVASFDRRGEYIYTGNA

SEQ ID NO: 1707 - protein, 85 aa, Homo sapiens
KGKILVLKTDSQDLVASFRVTTGTSNTTAIKSIEFARKGSCFLINTADRIIRVYDGREILTCGRDGEPEPMQKLQDLVNRTPWKK

SEQ ID NO: 1708 - protein, 85 aa, Homo sapiens
CCFSGDGEYIVAGSARQHALYIWEKSIGNLVKILHGTRGELLLDVAWHPVRPIIASISSGVVSIWAQNQVENWSAFAPDFKELDE

SEQ ID NO: 1709 - protein, 85 aa, Homo sapiens
NVEYEERESEFDIEDEDKSEPEQTGADAAEDEEVDVTSVDPIAAFCSSDEELEDSKALLYLPIAPEVEDPEENPYGPPPDAVQTS

SEQ ID NO: 1710 - protein, 85 aa, Homo sapiens
MMDEGASSEKKRQSSADGSQPPKKKPKTTNIELQGVPNDEVHPLLGVKGDGKSKKKQAGRPKGSKGKEKDSPFKPKLYKGDRGLP

SEQ ID NO: 1711 - protein, 84 aa, Homo sapiens
TNIELQGVPNDEVHPLLGVKGDGKSKKKQAGRPKGSKGKEKDSPFKPKLYKGDRGLPLEGSAKGKVQAELSQPLTAGGAISELL

SEQ ID NO: 1712 - protein, 85 aa, Homo sapiens
NDGRIVIWDFLTRGIAKIISAHIHPVCSLCWSRDGHKLVSASTDNIVSQWDVLSGDCDQRFRFPSPILKVQYHPRDQNKVLVCPM

SEQ ID NO: 1713 - protein, 85 aa, Homo sapiens
KSAPVMLTLSDSKHVVLPVDDDSDLNVVASFDRRGEYIYTGNAKGKILVLKTDSQDLVASFRVTTGTSNTTAIKSIEFARKGSCF

SEQ ID NO: 1714 - protein, 85 aa, Homo sapiens
LINTADRIIRVYDGREILTCGRDGEPEPMQKLQDLVNRTPWKKCCFSGDGEYIVAGSARQHALYIWEKSIGNLVKILHGTRGELL

SEQ ID NO: 1715 - protein, 85 aa, Homo sapiens
MDVAWHPVRPIIASISSGVVSIWAQNQVENWSAFAPDFKELDENVEYEERESEFDIEDEDKSEPEQTGADAAEDEEVDVTSVDPI

SEQ ID NO: 1716 - protein, 85 aa, Homo sapiens
AAFCSSDEELEDSKALLYLPIAPEVEDPEENPYGPPPDAVQTSLMDEGASSEKKRQSSADGSQPPKKKPKTTNIELQGVPNDEVH

SEQ ID NO: 1717 - protein, 85 aa, Homo sapiens
PEVERKPKITASRKLLLKSLMLAKAKECWEQEHEEREAEKVRYLAERIPTLQTRGLSLSALQDLCRELHAKVEVVDEERYDIEAK

SEQ ID NO: 1718 - protein, 85 aa, Homo sapiens
CLHNTREIKDLKLKVMDLRGKFKRPPLRRVRVSADAMLRALLGSKHKVSMDLRANLKSVKKEDTEKERPVEVGDWRKNVEAMSGM

SEQ ID NO: 1719 - protein, 84 aa, Homo sapiens
LRGKFKRPPLRRVRVSADAMLRALLGSKHKVSMDLRANLKSVKKEDTEKERPVEVGDWRKNVEAMSGMEGRKKMFDAAKSPTSQ

SEQ ID NO: 1720 - protein, 85 aa, Homo sapiens
YLAERIPTLQTRGLSLSALQDLCRELHAKVEVVDEERYDIEAKCLHNTREIKDLKLKVMDLRGKFKRPPLRRVRVSADAMLRALL

SEQ ID NO: 1721 - protein, 85 aa, Homo sapiens
ESPGESGAGSPGAPSPSSFTTGHLAREKPAQDPLYDVPNASGGQAGGPQRPGRVVSLRERLLLTRPVWLQLQANAAAALHMLRTE

SEQ ID NO: 1722 - protein, 85 aa, Homo sapiens
PPGTFLVRKSNTRQCQALCMRLPEASGPSFVSSHYILESPGGVSLEGSELMFPDLVQLICAYCHTRDILLLPLQLPRAIHHAATH

SEQ ID NO: 1723 - protein, 85 aa, Homo sapiens
KELEAISHLGIEFWSSSLNIKAQRGPAGGPVLPQLKARSPQELDQGTGAALCFFNPLFPGDLGPTKREKFKRSFKVRVSTETSSP

SEQ ID NO: 1724 - protein, 85 aa, Homo sapiens
MSPPAVPPPPVPVLPGAVPSQTERLPPCQLLRRESSVGYRVPAGSGPSLPPMPSLQEVDCGSPSSSEEEGVPGSRGSPATSPHLG

SEQ ID NO: 1725 - protein, 85 aa, Homo sapiens
RRRPLLRSMSAAFCSLLAPERQVGRAAAALMQDRHTAAGQLVQDLLTQVRAGPEPQELQGIRQALSRARAMLSAELGPEKLLSPK

SEQ ID NO: 1726 - protein, 85 aa, Homo sapiens
RLEHVLEKSLHCSVLKPLRPILAARLRRRLAADGSLGRLAEGLRLARAQGPGAFGSHLSLPSPVELEQVRQKLLQLLRTYSPSAQ

SEQ ID NO: 1727 - protein, 85 aa, Homo sapiens
VKRLLQACKLLYMALRTQEGEGAGADEFLPLLSLVLAHCDLPELLLEAEYMSELLEPSLLTGEGGYYLTSLSASLALLSGLGQAH

SEQ ID NO: 1728 - protein, 85 aa, Homo sapiens
TLPLSPVQELRRSLSLWEQRRLPATHCFQHLLRVAYQDPSSGCTSKTLAVPPEASIATLNQLCATKFRVTQPNTFGLFLYKEQGY

SEQ ID NO: 1729 - protein, 85 aa, Homo sapiens
HRLPPGALAHRLPTTGYLVYRRAEWPETQGAVTEEEGSGQSEARSRGEEQGCQGDGDAGVKASPRDIREQSETTAEGGQGQAQEG

SEQ ID NO: 1730 - protein, 84 aa, Homo sapiens
VYRRAEWPETQGAVTEEEGSGQSEARSRGEEQGCQGDGDAGVKASPRDIREQSETTAEGGQGQAQEGPAQPGEPEAEGSRAAEE

SEQ ID NO: 1731 - protein, 85 aa, Homo sapiens
GQAGGPQRPGRVVSLRERLLLTRPVWLQLQANAAAALHMLRTEPPGTFLVRKSNTRQCQALCMRLPEASGPSFVSSHYILESPGG

SEQ ID NO: 1732 - protein, 85 aa, Homo sapiens
VSLEGSELMFPDLVQLICAYCHTRDILLLPLQLPRAIHHAATHKELEAISHLGIEFWSSSLNIKAQRGPAGGPVLPQLKARSPQE

SEQ ID NO: 1733 - protein, 85 aa, Homo sapiens
MDQGTGAALCFFNPLFPGDLGPTKREKFKRSFKVRVSTETSSPLSPPAVPPPPVPVLPGAVPSQTERLPPCQLLRRESSVGYRVP

SEQ ID NO: 1734 - protein, 85 aa, Homo sapiens
AGSGPSLPPMPSLQEVDCGSPSSSEEEGVPGSRGSPATSPHLGRRRPLLRSMSAAFCSLLAPERQVGRAAAALMQDRHTAAGQLV

SEQ ID NO: 1735 - protein, 85 aa, Homo sapiens
QDLLTQVRAGPEPQELQGIRQALSRARAMLSAELGPEKLLSPKRLEHVLEKSLHCSVLKPLRPILAARLRRRLAADGSLGRLAEG

SEQ ID NO: 1736 - protein, 85 aa, Homo sapiens
LRLARAQGPGAFGSHLSLPSPVELEQVRQKLLQLLRTYSPSAQVKRLLQACKLLYMALRTQEGEGAGADEFLPLLSLVLAHCDLP

SEQ ID NO: 1737 - protein, 85 aa, Homo sapiens
ELLLEAEYMSELLEPSLLTGEGGYYLTSLSASLALLSGLGQAHTLPLSPVQELRRSLSLWEQRRLPATHCFQHLLRVAYQDPSSG

SEQ ID NO: 1738 - protein, 85 aa, Homo sapiens
CTSKTLAVPPEASIATLNQLCATKFRVTQPNTFGLFLYKEQGYHRLPPGALAHRLPTTGYLVYRRAEWPETQGAVTEEEGSGQSE

SEQ ID NO: 1739 - protein, 85 aa, Homo sapiens
NDSLFVSLDRLLLEFVFQYEQDISTKEEMIQRINKCCEDIKENKVTICRIHETINATDEEIDHYCKHSEEIKDNCRNWKPTCDVF

SEQ ID NO: 1740 - protein, 85 aa, Homo sapiens
RKHEDYMQDQFTVYQGTVEKDKEMYHDYICQYKEVLKQYQLKYSETPFSREYYEKKREHEEIQSRVLACTEQLKMNETIFMKFRV

SEQ ID NO: 1741 - protein, 85 aa, Homo sapiens
PAPFPSLTKWTLNIVNLRCETQDILKHASNLTKSSSELKKEVDEMEIEINYLNQQISRHNETKALSETLEEKNKNTENRKELKER

SEQ ID NO: 1742 - protein, 85 aa, Homo sapiens
IFGKDEHVLTLNKTQSSQLFLPYESQKLVRPIKMHSSEPRVADIKEESSAKQSKLANIDFRQKENDTQIFNDSAVDNHSKCSHIT

SEQ ID NO: 1743 - protein, 85 aa, Homo sapiens
TITSSQKFMQVRLLTPQKQSNSNQWSEKGDKDAEYGDKGTVRQVRESKCTSQAIYTEHFGKSVENDSDEVEERAENFPRTSEIPI

SEQ ID NO: 1744 - protein, 85 aa, Homo sapiens
FLGTPKAVKAPESLEKIKFPKTPPFEINRNRNAVPEVQTEKESPGLSFLMSYTSRSPGLNLFDSSVFDTEISSDQFNEHYSARNL

SEQ ID NO: 1745 - protein, 84 aa, Homo sapiens
EHYSARNLNPLSSEQEIGNLLEKPEGEDGFTFSFPSDTSTHTFGAGKDDFSFPFSFGQGQNSIPSSSLKGFSSSSQNTTQFTFF

SEQ ID NO: 1746 - protein, 85 aa, Homo sapiens
NKVTICRIHETINATDEEIDHYCKHSEEIKDNCRNWKPTCDVFRKHEDYMQDQFTVYQGTVEKDKEMYHDYICQYKEVLKQYQLK

SEQ ID NO: 1747 - protein, 85 aa, Homo sapiens
YSETPFSREYYEKKREHEEIQSRVLACTEQLKMNETIFMKFRVPAPFPSLTKWTLNIVNLRCETQDILKHASNLTKSSSELKKEV

SEQ ID NO: 1748 - protein, 85 aa, Homo sapiens
DEMEIEINYLNQQISRHNETKALSETLEEKNKNTENRKELKERIFGKDEHVLTLNKTQSSQLFLPYESQKLVRPIKMHSSEPRVA

SEQ ID NO: 1749 - protein, 85 aa, Homo sapiens
DIKEESSAKQSKLANIDFRQKENDTQIFNDSAVDNHSKCSHITTITSSQKFMQVRLLTPQKQSNSNQWSEKGDKDAEYGDKGTVR

SEQ ID NO: 1750 - protein, 85 aa, Homo sapiens
QVRESKCTSQAIYTEHFGKSVENDSDEVEERAENFPRTSEIPIFLGTPKAVKAPESLEKIKFPKTPPFEINRNRNAVPEVQTEKE

SEQ ID NO: 1751 - protein, 85 aa, Homo sapiens
SPGLSFLMSYTSRSPGLNLFDSSVFDTEISSDQFNEHYSARNLNPLSSEQEIGNLLEKPEGEDGFTFSFPSDTSTHTFGAGKDDF

SEQ ID NO: 1752 - protein, 85 aa, Homo sapiens
EENDPKPGEAAAAVEGQRQPESSPGGGSGGGGGSSPGEADTGRRRALMLPAVLQAPGNHQHPHRITNFFIDNILRPEFGRRKDAG

SEQ ID NO: 1753 - protein, 85 aa, Homo sapiens
TCCAGAGGGRGGGAGGEGGASGAEGGGGAGGSEQLLGSGSREPRQNPPCAPGAGGPLPAAGSDSPGDGEGGSKTLSLHGGAKKGG

SEQ ID NO: 1754 - protein, 85 aa, Homo sapiens
DPGGPLDGSLKARGLGGGDLSVSSDSDSSQAGANLGAQPMLWPAWVYCTRYSDRPSSGPRSRKPKKKNPNKEDKRPRTAFTAEQL

SEQ ID NO: 1755 - protein, 84 aa, Homo sapiens
AFTAEQLQRLKAEFQTNRYLTEQRRQSLAQELSLNESQIKIWFQNKRAKIKKATGNKNTLAVHLMAQGLYNHSTTAKEGKSDSE

SEQ ID NO: 1756 - protein, 85 aa, Homo sapiens
RRRALMLPAVLQAPGNHQHPHRITNFFIDNILRPEFGRRKDAGTCCAGAGGGRGGGAGGEGGASGAEGGGGAGGSEQLLGSGSRE

SEQ ID NO: 1757 - protein, 85 aa, Homo sapiens
PRQNPPCAPGAGGPLPAAGSDSPGDGEGGSKTLSLHGGAKKGGDPGGPLDGSLKARGLGGGDLSVSSDSDSSQAGANLGAQPMLW

SEQ ID NO: 1758 - protein, 85 aa, Homo sapiens
PAWVYCTRYSDRPSSGPRSRKPKKKNPNKEDKRPRTAFTAEQLQRLKAEFQTNRYLTEQRRQSLAQELSLNESQIKIWFQNKRAK

SEQ ID NO: 1759 - protein, 85 aa, Homo sapiens
ELGELLYNKSEYIETASGNKVSRQSVLCGSQNIVLNGKTIVMNDCIIRGDLANVRVGRHCVVKSRSVIRPPFKKFSKGVAFFPLH

SEQ ID NO: 1760 - protein, 85 aa, Homo sapiens
IGDHVFIEEDCVVNAAQIGSYVHVGKNCVIGRRCVLKDCCKILDNTVLPPETVVPPFTVFSGCPGLFSGELPECTQELMIDVTKS

SEQ ID NO: 1761 - protein, 84 aa, Homo sapiens
VNAAQIGSYVHVGKNCVIGRRCVLKDCCKILDNTVLPPETVVPPFTVFSGCPGLFSGELPECTQELMIDVTKSYYQKFLPLTQV

SEQ ID NO: 1762 - protein, 85 aa, Homo sapiens
NDCIIRGDLANVRVGRHCVVKSRSVIRPPFKKFSKGVAFFPLHIGDHVFIEEDCVVNAAQIGSYVHVGKNCVIGRRCVLKDCCKI

SEQ ID NO: 1763 - protein, 85 aa, Homo sapiens
SESSSKSSQPLASKQEKDGTEKRGRGRPRKQPPVSPGTALVGSQKEPSEVPTPKRPRGRPKGSKNKGAAKTRKTTTTPGRKPRGR

SEQ ID NO: 1764 - protein, 84 aa, Homo sapiens
RGRGRPRKQPPVSPGTALVGSQKEPSEVPTPKRPRGRPKGSKNKGAAKTRKTTTTPGRKPRGRPKKLEKEEEEGISQESSEEEQ

SEQ ID NO: 1765 - protein, 85 aa, Homo sapiens
NGDDAFARRPTVGAQIPEKIQKAFDDIAKYFSKEEWEKMKASEKIFYVYMKRKYEAMTKLGFKATLPPFMCNKRAEDFQGNDLDN

SEQ ID NO: 1766 - protein, 85 aa, Homo sapiens
DPNRGNQVERPQMTFGRLQGISPKIMPKKPAEEGNDSEEVPEASGPQNDGKELCPPGKPTTSEKIHERSGPKRGEHAWTHRLRER

SEQ ID NO: 1767 - protein, 84 aa, Homo sapiens
QGISPKIMPKKPAEEGNDSEEVPEASGPQNDGKELCPPGKPTTSEKIHERSGPKRGEHAWTHRLRERKQLVIYEEISDPEEDDE

SEQ ID NO: 1768 - protein, 85 aa, Homo sapiens
EKIFYVYMKRKYEAMTKLGFKATLPPFMCNKRAEDFQGNDLDNDPNRGNQVERPQMTFGRLQGISPKIMPKKPAEEGNDSEEVPE

SEQ ID NO: 1769 - protein, 85 aa, Homo sapiens
KSSDIDQDLFTDSYCKVCSAQLISESQRVAHYESRKHASKVRLYYMLHPRDGGCPAKRLRSENGSDADMVDKNKCCTLCNMSFTS

SEQ ID NO: 1770 - protein, 84 aa, Homo sapiens
MVDKNKCCTLCNMSFTSAVVADSHYQGKIHAKRLKLLLGEKTPLKTTGLRRNYRCTICSVSLNSIEQYHAHLKGSKHQTNLKNK

SEQ ID NO: 1771 - protein, 85 aa, Homo sapiens
MYYMLHPRDGGCPAKRLRSENGSDADMVDKNKCCTLCNMSFTSAVVADSHYQGKIHAKRLKLLLGEKTPLKTTGLRRNYRCTICS

SEQ ID NO: 1772 - protein, 85 aa, Homo sapiens
MAAVPPGLEPWNRVRIPKAGNRSAVTVQNPGAALDLCIAAVIKECHLVILSLKSQTLDAETDVLCAVLYSNHNRMGRHKPHLALK

SEQ ID NO: 1773 - protein, 85 aa, Homo sapiens
QVEQCLKRLKNMNLEGSIQDLFELFSSNENQPLTTKVCVVPSQPVVELVLMKVLGACKLLLRLLDCCCKTFLLTVKHLGLQEFII

SEQ ID NO: 1774 - protein, 85 aa, Homo sapiens
LNLVMVGLVSRLWVLYKGVLKRLILLYEPLFGLLQEVARIQPMPYFKDFTFPSDITEFLGQPYFEAFKKKMPIAFAAKGINKLLN

SEQ ID NO: 1775 - protein, 85 aa, Homo sapiens
KLFLINEQSPRASEETLLGISKKAKQMKINVQNNVDLGQPVKNKRVFKEESSEFDVRAFCNQLKHKATQETSFDFKCSQSRLKTT

SEQ ID NO: 1776 - protein, 85 aa, Homo sapiens
KYSSQKVIGTPHAKSFVQRFREAESFTQLSEEIQMAVVWCRSKKLKAQAIFLGNKLLKSNRLKHLEAQGTSLPKKLECIKTSICN

SEQ ID NO: 1777 - protein, 85 aa, Homo sapiens
HLLRGSGIKTSKHHLRQRRSQNKFLRRQRKPQRKLQSTLLREIQQFSQGTRKSATDTSAKWRLSHCTVHRTDLYPNSKQLLNSGV

SEQ ID NO: 1778 - protein, 84 aa, Homo sapiens
SAKWRLSHCTVHRTDLYPNSKQLLNSGVSMPVIQTKEKMIHENLRGIHENETDSWTVMQINKNSTSGTIKETDDIDDIFALMGV

SEQ ID NO: 1779 - protein, 85 aa, Homo sapiens
KECHLVILSLKSQTLDAETDVLCAVLYSNHNRMGRHKPHLALKQVEQCLKRLKNMNLEGSIQDLFELFSSNENQPLTTKVCVVPS

SEQ ID NO: 1780 - protein, 85 aa, Homo sapiens
QPVVELVLMKVLGACKLLLRLLDCCCKTFLLTVKHLGLQEFIILNLVMVGLVSRLWVLYKGVLKRLILLYEPLFGLLQEVARIQP

SEQ ID NO: 1781 - protein, 85 aa, Homo sapiens
MPYFKDFTFPSDITEFLGQPYFEAFKKKMPIAFAAKGINKLLNKLFLINEQSPRASEETLLGISKKAKQMKINVQNNVDLGQPVK

SEQ ID NO: 1782 - protein, 85 aa, Homo sapiens
NKRVFKEESSEFDVRAFCNQLKHKATQETSFDFKCSQSRLKTTKYSSQKVIGTPHAKSFVQRFREAESFTQLSEEIQMAVVWCRS

SEQ ID NO: 1783 - protein, 85 aa, Homo sapiens
KKLKAQAIFLGNKLLKSNRLKHLEAQGTSLPKKLECIKTSICNHLLRGSGIKTSKHHLRQRRSQNKFLRRQRKPQRKLQSTLLRE

SEQ ID NO: 1784 - protein, 85 aa, Homo sapiens
IQQFSQGTRKSATDTSAKWRLSHCTVHRTDLYPNSKQLLNSGVSMPVIQTKEKMIHENLRGIHENETDSWTVMQINKNSTSGTIK

SEQ ID NO: 1785 - protein, 85 aa, Homo sapiens
SYPQGYLYQAPGSLALYSCPAYGASALAAPRSEELARSASGSAFSPYPGSAAFTAQAATGFGSPLQYSADAAAAAAGFPSYMGAP

SEQ ID NO: 1786 - protein, 85 aa, Homo sapiens
YDAHTTGMTGAISYHPYGSAAYPYQLNDPAYRKNATRDATATLKAWLNEHRKNPYPTKGEKIMLAIITKMTLTQVSTWFANARRR

SEQ ID NO: 1787 - protein, 85 aa, Homo sapiens
LKKENKMTWAPRNKSEDEDEDEGDATRSKDESPDKAQEGTETSAEDEGISLHVDSLTDHSCSAESDGEKLPCRAGDPLCESGSEC

SEQ ID NO: 1788 - protein, 85 aa, Homo sapiens
KDKYDDLEDDEDDDEEGERGLAPPKPVTSSPLTGLEAPLLSPPPEAAPRGGRKTPQGSRTSPGAPPPASKPKLWSLAEIATSDLK

SEQ ID NO: 1789 - protein, 85 aa, Homo sapiens
QPSLGPGCGPPGLPAAAAPASTGAPPGGSPYPASPLLGRPLYYTSPFYGNYTNYGNLNAALQGQGLLRYNSAAAAPGEALHTAPK

SEQ ID NO: 1790 - protein, 84 aa, Homo sapiens
FYGNYTNYGNLNAALQGQGLLRYNSAAAAPGEALHTAPKAASDAGKAGAHPLESHYRSPGGGYEPKKDASEGCTVVGGGVQPYL

SEQ ID NO: 1791 - protein, 85 aa, Homo sapiens
AFSPYPGSAAFTAQAATGFGSPLQYSADAAAAAAGFPSYMGAPYDAHTTGMTGAISYHPYGSAAYPYQLNDPAYRKNATRDATAT

SEQ ID NO: 1792 - protein, 85 aa, Homo sapiens
LKAWLNEHRKNPYPTKGEKIMLAIITKMTLTQVSTWFANARRRLKKENKMTWAPRNKSEDEDEDEGDATRSKDESPDKAQEGTET

SEQ ID NO: 1793 - protein, 85 aa, Homo sapiens
SAEDEGISLHVDSLTDHSCSAESDGEKLPCRAGDPLCESGSECKDKYDDLEDDEDDDEEGERGLAPPKPVTSSPLTGLEAPLLSP

SEQ ID NO: 1794 - protein, 85 aa, Homo sapiens
PPEAAPRGGRKTPQGSRTSPGAPPPASKPKLWSLAEIATSDLKQPSLGPGCGPPGLPAAAAPASTGAPPGGSPYPASPLLGRPLY

SEQ ID NO: 1795 - protein, 85 aa, Homo sapiens
YTSPFYGNYTNYGNLNAALQGQGLLRYNSAAAAPGEALHTAPKAASDAGKAGAHPLESHYRSPGGGYEPKKDASEGCTVVGGGVQ

SEQ ID NO: 1796 - protein, 85 aa, Homo sapiens
ASTDYSTYSQAAAQQGYSAYTAQPTQGYAQTTQAYGQQSYGTYGQPTDVSYTQAQTTATYGQTAYATSYGQPPTGYTTPTAPQAY

SEQ ID NO: 1797 - protein, 85 aa, Homo sapiens
SQPVQGYGTGAYDTTTATVTTTQASYAAQSAYGTQPAYPAYGQQPAATAPTRPQDGNKPTETSQPQSSTGGYNQPSLGYGQSNYS

SEQ ID NO: 1798 - protein, 85 aa, Homo sapiens
YPQVPGSYPMQPVTAPPSYPPTSYSSTQPTSYDQSSYSQQNTYGQPSSYGQQSSYGQQSSYGQQPPTSYPPQTGSYSQAPSQYSQ

SEQ ID NO: 1799 - protein, 85 aa, Homo sapiens
QSSSYGQQIYFVGSGRTKNGFETRAFSSLHGFQSAGERGGFNKPGGPMDEGPDLDLGPPVDPDEDSDNSAIYVQGLNDSVTLDDL

SEQ ID NO: 1800 - protein, 85 aa, Homo sapiens
ADFFKQCGVVKMNKRTGQPMIHIYLDKETGKPKGDATVSYEDPPTAKAAVEWFDGKDFQGSKLKVSLARKKPPMNSMRGGLPPRE

SEQ ID NO: 1801 - protein, 85 aa, Homo sapiens
GRGMPPPLRGGPGGPGGPGGPMGRMGGRGGDRGGFPPRGPRGSRGNPSGGGNVQHRAGDWQCPNPGCGNQNFAWRTECNQCKAPK

SEQ ID NO: 1802 - protein, 85 aa, Homo sapiens
PEGFLPPPFPPPGGDRGRGGPGGMRGGRGGLMDRGGPGGMFRGGRGGDRGGFRGGRGMDRGGFGGGRRGGPGGPPGPLMEQMGGR

SEQ ID NO: 1803 - protein, 84 aa, Homo sapiens
GGRGGLMDRGGPGGMFRGGRGGDRGGFRGGRGMDRGGFGGGRRGGPGGPPGPLMEQMGGRRGGRGGPGKMDKGEHRQERRDRPY

SEQ ID NO: 1804 - protein, 85 aa, Homo sapiens
YGQPTDVSYTQAQTTATYGQTAYATSYGQPPTGYTTPTAPQAYSQPVQGYGTGAYDTTTATVTTTQASYAAQSAYGTQPAYPAYG

SEQ ID NO: 1805 - protein, 85 aa, Homo sapiens
QQPAATAPTRPQDGNKPTETSQPQSSTGGYNQPSLGYGQSNYSYPQVPGSYPMQPVTAPPSYPPTSYSSTQPTSYDQSSYSQQNT

SEQ ID NO: 1806 - protein, 85 aa, Homo sapiens
YGQPSSYGQQSSYGQQSSYGQQPPTSYPPQTGSYSQAPSQYSQQSSSYGQQIYFVGSGRTKNGFETRAFSSLHGFQSAGERGGFN

SEQ ID NO: 1807 - protein, 85 aa, Homo sapiens
KPGGPMDEGPDLDLGPPVDPDEDSDNSAIYVQGLNDSVTLDDLADFFKQCGVVKMNKRTGQPMIHIYLDKETGKPKGDATVSYED

SEQ ID NO: 1808 - protein, 85 aa, Homo sapiens
PPTAKAAVEWFDGKDFQGSKLKVSLARKKPPMNSMRGGLPPREGRGMPPPLRGGPGGPGGPGGPMGRMGGRGGDRGGFPPRGPRG

SEQ ID NO: 1809 - protein, 85 aa, Homo sapiens
SRGNPSGGGNVQHRAGDWQCPNPGCGNQNFAWRTECNQCKAPKPEGFLPPPFPPPGGDRGRGGPGGMRGGRGGLMDRGGPGGMFR

SEQ ID NO: 1810 - protein, 85 aa, Homo sapiens
SSTRSQNPHGLKQIGLDQIWDDLRAGIQQVYTRQSMAKSRYMELYTHVYNYCTSVHQSNQARGAGVPPSKSKKGQTPGGAQFVGL

SEQ ID NO: 1811 - protein, 85 aa, Homo sapiens
ELYKRLKEFLKNYLTNLLKDGEDLMDESVLKFYTQQWEDYRFSSKVLNGICAYLNRHWVRRECDEGRKGIYEIYSLALVTWRDCL

SEQ ID NO: 1812 - protein, 85 aa, Homo sapiens
FRPLNKQVTNAVLKLIEKERNGETINTRLISGVVQSYVELGLNEDDAFAKGPTLTVYKESFESQFLADTERFYTRESTEFLQQNP

SEQ ID NO: 1813 - protein, 85 aa, Homo sapiens
VTEYMKKAEARLLEEQRRVQVYLHESTQDELARKCEQVLIEKHLEIFHTEFQNLLDADKNEDLGRMYNLVSRIQDGLGELKKLLE

SEQ ID NO: 1814 - protein, 85 aa, Homo sapiens
THIHNQGLAAIEKCGEAALNDPKMYVQTVLDVHKKYNALVMSAFNNDAGFVAALDKACGRFINNNAVTKMAQSSSKSPELLARYC

SEQ ID NO: 1815 - protein, 85 aa, Homo sapiens
DSLLKKSSKNPEEAELEDTLNQVMVVFKYIEDKDVFQKFYAKMLAKRLVHQNSASDDAEASMISKLKQACGFEYTSKLQRMFQDI

SEQ ID NO: 1816 - protein, 85 aa, Homo sapiens
GVSKDLNEQFKKHLTNSEPLDLDFSIQVLSSGSWPFQQSCTFALPSELERSYQRFTAFYASRHSGRKLTWLYQLSKGELVTNCFK

SEQ ID NO: 1817 - protein, 85 aa, Homo sapiens
NRYTLQASTFQMAILLQYNTEDAYTVQQLTDSTQIKMDILAQVLQILLKSKLLVLEDENANVDEVELKPDTLIKLYLGYKNKKLR

SEQ ID NO: 1818 - protein, 85 aa, Homo sapiens
VNINVPMKTEQKQEQETTHKNIEEDRKLLIQAAIVRIMKMRKVLKHQQLLGEVLTQLSSRFKPRVPVIKKCIDILIEKEYLERVD

SEQ ID NO: 1819 - protein, 84 aa, Homo sapiens
KQEQETTHKNIEEDRKLLIQAAIVRIMKMRKVLKHQQLLGEVLTQLSSRFKPRVPVIKKCIDILIEKEYLERVDGEKDTYSYLA

SEQ ID NO: 1820 - protein, 85 aa, Homo sapiens
ELYTHVYNYCTSVHQSNQARGAGVPPSKSKKGQTPGGAQFVGLELYKRLKEFLKNYLTNLLKDGEDLMDESVLKFYTQQWEDYRF

SEQ ID NO: 1821 - protein, 85 aa, Homo sapiens
SSKVLNGICAYLNRHWVRRECDEGRKGIYEIYSLALVTWRDCLFRPLNKQVTNAVLKLIEKERNGETINTRLISGVVQSYVELGL

SEQ ID NO: 1822 - protein, 85 aa, Homo sapiens
NEDDAFAKGPTLTVYKESFESQFLADTERFYTRESTEFLQQNPVTEYMKKAEARLLEEQRRVQVYLHESTQDELARKCEQVLIEK

SEQ ID NO: 1823 - protein, 85 aa, Homo sapiens
HLEIFHTEFQNLLDADKNEDLGRMYNLVSRIQDGLGELKKLLETHIHNQGLAAIEKCGEAALNDPKMYVQTVLDVHKKYNALVMS

SEQ ID NO: 1824 - protein, 85 aa, Homo sapiens
AFNNDAGFVAALDKACGRFINNNAVTKMAQSSSKSPELLARYCDSLLKKSSKNPEEAELEDTLNQVMVVFKYIEDKDVFQKFYAK

SEQ ID NO: 1825 - protein, 85 aa, Homo sapiens
MLAKRLVHQNSASDDAEASMISKLKQACGFEYTSKLQRMFQDIGVSKDLNEQFKKHLTNSEPLDLDFSIQVLSSGSWPFQQSCTF

SEQ ID NO: 1826 - protein, 85 aa, Homo sapiens
ALPSELERSYQRFTAFYASRHSGRKLTWLYQLSKGELVTNCFKNRYTLQASTFQMAILLQYNTEDAYTVQQLTDSTQIKMDILAQ

SEQ ID NO: 1827 - protein, 85 aa, Homo sapiens
VLQILLKSKLLVLEDENANVDEVELKPDTLIKLYLGYKNKKLRVNINVPMKTEQKQEQETTHKNIEEDRKLLIQAAIVRIMKMRK

SEQ ID NO: 1828 - protein, 85 aa, Homo sapiens
VTCAHLGRRARLPAAQPSACPGTCFSQEERMAAGYLPRWSQELVTFEDVSMDFSQEEWELLEPAQKNLYREVMLENYRNVVSLEA

SEQ ID NO: 1829 - protein, 85 aa, Homo sapiens
MKNQCTDVGIKEGPLSPAQTSQVTSLSSWTGYLLFQPVASSHLEQREALWIEEKGTPQASCSDWMTVLRNQDSTYKKVALQEEPA

SEQ ID NO: 1830 - protein, 85 aa, Homo sapiens
SGINMIKLIREDGGWKQLEDSHEDPQGLLSQKASLHVVAVPQEKATAWHGFGENGNLSPALVLSQGSSKGNHLCGSELDITSLAS

SEQ ID NO: 1831 - protein, 85 aa, Homo sapiens
DSVLNHHQLGYADRRPCESNECGNAIRQNSHFIQHGGKMFVYLENGQSLNHGMALTIHNKINTAEKPFECHQCGKVFNRRHSLSE

SEQ ID NO: 1832 - protein, 85 aa, Homo sapiens
HQRIHTGEKPYECQECGRAFTHSSTLTRHLRTHTGEKPYGCGECGKAFNRISSLTQHQRIHTGEKPYKCEDCGKSFCQSSYLILH

SEQ ID NO: 1833 - protein, 85 aa, Homo sapiens
KRTHTGEKPYECSECGKAFSDRSSLNQHERTHTGENPYECKQCGRAFSQRSSLVRHERTHTGEKPYRCQECGKAFSQSSSLVTHQ

SEQ ID NO: 1834 - protein, 84 aa, Homo sapiens
ERTHTGENPYECKQCGRAFSQRSSLVRHERTHTGEKPYRCQECGKAFSQSSSLVTHQKTHSSQKTYKIIDCGKAFYQNRHLIGY

SEQ ID NO: 1835 - protein, 85 aa, Homo sapiens
LVTFEDVSMDFSQEEWELLEPAQKNLYREVMLENYRNVVSLEALKNQCTDVGIKEGPLSPAQTSQVTSLSSWTGYLLFQPVASSH

SEQ ID NO: 1836 - protein, 85 aa, Homo sapiens
MEQREALWIEEKGTPQASCSDWMTVLRNQDSTYKKVALQEEPASGINMIKLIREDGGWKQLEDSHEDPQGLLSQKASLHVVAVPQ

SEQ ID NO: 1837 - protein, 85 aa, Homo sapiens
EKATAWHGFGENGNLSPALVLSQGSSKGNHLCGSELDITSLASDSVLNHHQLGYADRRPCESNECGNAIRQNSHFIQHGGKMFVY

SEQ ID NO: 1838 - protein, 85 aa, Homo sapiens
MENGQSLNHGMALTIHNKINTAEKPFECHQCGKVFNRRHSLSEHQRIHTGEKPYECQECGRAFTHSSTLTRHLRTHTGEKPYGCG

SEQ ID NO: 1839 - protein, 85 aa, Homo sapiens
ECGKAFNRISSLTQHQRIHTGEKPYKCEDCGKSFCQSSYLILHKRTHTGEKPYECSECGKAFSDRSSLNQHERTHTGENPYECKQ

SEQ ID NO: 1840 - protein, 85 aa, Homo sapiens
SDVEENNFEGRESRSQSKSPTGTPARVKSESRSGSRSPSRVSKHSESHSRSRSKSRSRSRRHSHRRYTRSRSHSHSHRRRSRSRS

SEQ ID NO: 1841 - protein, 85 aa, Homo sapiens
YTPEYRRRRSRSHSPMSNRRRHTGSRANPDPNTCLGVFGLSLYTTERDLREVFSRYGPLSGVNVVYDQRTGRSRGFAFVYFERID

SEQ ID NO: 1842 - protein, 85 aa, Homo sapiens
DSKEAMERANGMELDGRRIRVDYSITKRAHTPTPGIYMGRPTHSGGGGGGGGGGGGGGGGRRRDSYYDRGYDRGYDRYEDYDYRY

SEQ ID NO: 1843 - protein, 84 aa, Homo sapiens
RAHTPTPGIYMGRPTHSGGGGGGGGGGGGGGGGRRRDSYYDRGYDRGYDRYEDYDYRYRRRSPSPYYSRYRSRSRSRSYSPRRY

SEQ ID NO: 1844 - protein, 85 aa, Homo sapiens
KHSESHSRSRSKSRSRSRRHSHRRYTRSRSHSHSHRRRSRSRSYTPEYRRRRSRSHSPMSNRRRHTGSRANPDPNTCLGVFGLSL

SEQ ID NO: 1845 - protein, 85 aa, Homo sapiens
YTTERDLREVFSRYGPLSGVNVVYDQRTGRSRGFAFVYFERIDDSKEAMERANGMELDGRRIRVDYSITKRAHTPTPGIYMGRPT

SEQ ID NO: 1846 - protein, 85 aa, Homo sapiens
FLYNLTLQRATGISFAIHGNFSGTKQQEIVVSRGKILELLRPDPNTGKVHTLLTVEVFGVIRSLMAFRLTGGTKDYIVVGSDSGR

SEQ ID NO: 1847 - protein, 85 aa, Homo sapiens
IVILEYQPSKNMFEKIHQETFGKSGCRRIVPGQFLAVDPKGRAVMISAIEKQKLVYILNRDAAARLTISSPLEAHKANTLVYHVV

SEQ ID NO: 1848 - protein, 85 aa, Homo sapiens
GVDVGFENPMFACLEMDYEEADNDPTGEAAANTQQTLTFYELDLGLNHVVRKYSEPLEEHGNFLITVPGGSDGPSGVLICSENYI

SEQ ID NO: 1849 - protein, 85 aa, Homo sapiens
TYKNFGDQPDIRCPIPRRRNDLDDPERGMIFVCSATHKTKSMFFFLAQTEQGDIFKITLETDEDMVTEIRLKYFDTVPVAAAMCV

SEQ ID NO: 1850 - protein, 85 aa, Homo sapiens
LKTGFLFVASEFGNHYLYQIAHLGDDDEEPEFSSAMPLEEGDTFFFQPRPLKNLVLVDELDSLSPILFCQIADLANEDTPQLYVA

SEQ ID NO: 1851 - protein, 85 aa, Homo sapiens
CGRGPRSSLRVLRHGLEVSEMAVSELPGNPNAVWTVRRHIEDEFDAYIIVSFVNATLVLSIGETVEEVTDSGFLGTTPTLSCSLL

SEQ ID NO: 1852 - protein, 85 aa, Homo sapiens
GDDALVQVYPDGIRHIRADKRVNEWKTPGKKTIVKCAVNQRQVVIALTGGELVYFEMDPSGQLNEYTERKEMSADVVCMSLANVP

SEQ ID NO: 1853 - protein, 85 aa, Homo sapiens
PGEQRSRFLAVGLVDNTVRIISLDPSDCLQPLSMQALPAQPESLCIVEMGGTEKQDELGERGSIGFLYLNIGLQNGVLLRTVLDP

SEQ ID NO: 1854 - protein, 85 aa, Homo sapiens
VTGDLSDTRTRYLGSRPVKLFRVRMQGQEAVLAMSSRSWLSYSYQSRFHLTPLSYETLEFASGFASEQCPEGIVAISTNTLRILA

SEQ ID NO: 1855 - protein, 85 aa, Homo sapiens
LEKLGAVFNQVAFPLQYTPRKFVIHPESNNLIIIETDHNAYTEATKAQRKQQMAEEMVEAAGEDERELAAEMAAAFLNENLPESI

SEQ ID NO: 1856 - protein, 85 aa, Homo sapiens
FGAPKAGNGQWASVIRVMNPIQGNTLDLVQLEQNEAAFSVAVCRFSNTGEDWYVLVGVAKDLILNPRSVAGGFVYTYKLVNNGEK

SEQ ID NO: 1857 - protein, 85 aa, Homo sapiens
MEFLHKTPVEEVPAAIAPFQGRVLIGVGKLLRVYDLGKKKLLRKCENKHIANYISGIQTIGHRVIVSDVQESFIWVRYKRNENQL

SEQ ID NO: 1858 - protein, 85 aa, Homo sapiens
IIFADDTYPRWVTTASLLDYDTVAGADKFGNICVVRLPPNTNDEVDEDPTGNKALWDRGLLNGASQKAEVIMNYHVGETVLSLQK

SEQ ID NO: 1859 - protein, 85 aa, Homo sapiens
TTLIPGGSESLVYTTLSGGIGILVPFTSHEDHDFFQHVEMHLRSEHPPLCGRDHLSFRSYYFPVKNVIDGDLCEQFNSMEPNKQK

SEQ ID NO: 1860 - protein, 84 aa, Homo sapiens
SHEDHDFFQHVEMHLRSEHPPLCGRDHLSFRSYYFPVKNVIDGDLCEQFNSMEPNKQKNVSEELDRTPPEVSKKLEDIRTRYAF

SEQ ID NO: 1861 - protein, 85 aa, Homo sapiens
DPNTGKVHTLLTVEVFGVIRSLMAFRLTGGTKDYIVVGSDSGRIVILEYQPSKNMFEKIHQETFGKSGCRRIVPGQFLAVDPKGR

SEQ ID NO: 1862 - protein, 85 aa, Homo sapiens
AVMISAIEKQKLVYILNRDAAARLTISSPLEAHKANTLVYHVVGVDVGFENPMFACLEMDYEEADNDPTGEAAANTQQTLTFYEL

SEQ ID NO: 1863 - protein, 85 aa, Homo sapiens
DLGLNHVVRKYSEPLEEHGNFLITVPGGSDGPSGVLICSENYITYKNFGDQPDIRCPIPRRRNDLDDPERGMIFVCSATHKTKSM

SEQ ID NO: 1864 - protein, 85 aa, Homo sapiens
FFFLAQTEQGDIFKITLETDEDMVTEIRLKYFDTVPVAAAMCVLKTGFLFVASEFGNHYLYQIAHLGDDDEEPEFSSAMPLEEGD

SEQ ID NO: 1865 - protein, 85 aa, Homo sapiens
TFFFQPRPLKNLVLVDELDSLSPILFCQIADLANEDTPQLYVACGRGPRSSLRVLRHGLEVSEMAVSELPGNPNAVWTVRRHIED

SEQ ID NO: 1866 - protein, 85 aa, Homo sapiens
EFDAYIIVSFVNATLVLSIGETVEEVTDSGFLGTTPTLSCSLLGDDALVQVYPDGIRHIRADKRVNEWKTPGKKTIVKCAVNQRQ

SEQ ID NO: 1867 - protein, 85 aa, Homo sapiens
VVIALTGGELVYFEMDPSGQLNEYTERKEMSADVVCMSLANVPPGEQRSRFLAVGLVDNTVRIISLDPSDCLQPLSMQALPAQPE

SEQ ID NO: 1868 - protein, 85 aa, Homo sapiens
SLCIVEMGGTEKQDELGERGSIGFLYLNIGLQNGVLLRTVLDPVTGDLSDTRTRYLGSRPVKLFRVRMQGQEAVLAMSSRSWLSY

SEQ ID NO: 1869 - protein, 85 aa, Homo sapiens
SYQSRFHLTPLSYETLEFASGFASEQCPEGIVAISTNTLRILALEKLGAVFNQVAFPLQYTPRKFVIHPESNNLIIIETDHNAYT

SEQ ID NO: 1870 - protein, 85 aa, Homo sapiens
EATKAQRKQQMAEEMVEAAGEDERELAAEMAAAFLNENLPESIFGAPKAGNGQWASVIRVMNPIQGNTLDLVQLEQNEAAFSVAV

SEQ ID NO: 1871 - protein, 85 aa, Homo sapiens
CRFSNTGEDWYVLVGVAKDLILNPRSVAGGFVYTYKLVNNGEKLEFLHKTPVEEVPAAIAPFQGRVLIGVGKLLRVYDLGKKKLL

SEQ ID NO: 1872 - protein, 85 aa, Homo sapiens
RKCENKHIANYISGIQTIGHRVIVSDVQESFIWVRYKRNENQLIIFADDTYPRWVTTASLLDYDTVAGADKFGNICVVRLPPNTN

SEQ ID NO: 1873 - protein, 85 aa, Homo sapiens
DEVDEDPTGNKALWDRGLLNGASQKAEVIMNYHVGETVLSLQKTTLIPGGSESLVYTTLSGGIGILVPFTSHEDHDFFQHVEMHL

SEQ ID NO: 1874 - protein, 85 aa, Homo sapiens
TVVSVPQREPLVLGGRLAPLGFSSRGYFGALPMVTTAPPPLPRIPDPRALPPTLFLPHFLGGDGPCLTPQPRAPAALPNRSLAVA

SEQ ID NO: 1875 - protein, 85 aa, Homo sapiens
GGTPRAAPKKRRKKKVRASPAGQLPSRFHQYQQHRPSLEGGRSPATGPSGAQEVPGPAAALAPSPAAAAGTEGASPDLAPLRPAA

SEQ ID NO: 1876 - protein, 85 aa, Homo sapiens
PGQTPLRKEVLKSKMGKSEKIALPHGQLVHGIHLYEQPKINRQKSKYNLPLTKITSAKRNENNFWQDSVSSDRIQKQEKKPFKNT

SEQ ID NO: 1877 - protein, 84 aa, Homo sapiens
RIQKQEKKPFKNTENIKNSHLKKSAFLTEVSQKENYAGAKFSDPPSPSVLPKPPSHWMGSTVENSNQNRELMAVHLKTLLKVQT

SEQ ID NO: 1878 - protein, 85 aa, Homo sapiens
RIPDPRALPPTLFLPHFLGGDGPCLTPQPRAPAALPNRSLAVAGGTPRAAPKKRRKKKVRASPAGQLPSRFHQYQQHRPSLEGGR

SEQ ID NO: 1879 - protein, 85 aa, Homo sapiens
SPATGPSGAQEVPGPAAALAPSPAAAAGTEGASPDLAPLRPAAPGQTPLRKEVLKSKMGKSEKIALPHGQLVHGIHLYEQPKINR

SEQ ID NO: 1880 - protein, 85 aa, Homo sapiens
QKSKYNLPLTKITSAKRNENNFWQDSVSSDRIQKQEKKPFKNTENIKNSHLKKSAFLTEVSQKENYAGAKFSDPPSPSVLPKPPS

SEQ ID NO: 1881 - protein, 85 aa, Homo sapiens
RHSKRTYCPDWDDKDWDYGKWRSSSSHKRRKRSHSSAQENKRCKYNHSKMCDSHYLESRSINEKDYHSRRYIDEYRNDYTQGCEP

SEQ ID NO: 1882 - protein, 85 aa, Homo sapiens
GHRQRDHESRYQNHSSKSSGRSGRSSYKSKHRIHHSTSHRRSHGKSHRRKRTRSVEDDEEGHLICQSGDVLSARYEIVDTLGEGA

SEQ ID NO: 1883 - protein, 85 aa, Homo sapiens
FGKVVECIDHKAGGRHVAVKIVKNVDRYCEAARSEIQVLEHLNTTDPNSTFRCVQMLEWFEHHGHICIVFELLGLSTYDFIKENG

SEQ ID NO: 1884 - protein, 85 aa, Homo sapiens
FLPFRLDHIRKMAYQICKSVNFLHSNKLTHTDLKPENILFVQSDYTEAYNPKIKRDERTLINPDIKVVDFGSATYDDEHHSTLVS

SEQ ID NO: 1885 - protein, 85 aa, Homo sapiens
TRHYRAPEVILALGWSQPCDVWSIGCILIEYYLGFTVFPTHDSKEHLAMMERILGPLPKHMIQKTRKRKYFHHDRLDWDEHSSAG

SEQ ID NO: 1886 - protein, 84 aa, Homo sapiens
HMIQKTRKRKYFHHDRLDWDEHSSAGRYVSRRCKPLKEFMLSQDVEHERLFDLIQKMLEYDPAKRITLREALKHPFFDLLKKSI

SEQ ID NO: 1887 - protein, 85 aa, Homo sapiens
CKYNHSKMCDSHYLESRSINEKDYHSRRYIDEYRNDYTQGCEPGHRQRDHESRYQNHSSKSSGRSGRSSYKSKHRIHHSTSHRRS

SEQ ID NO: 1888 - protein, 85 aa, Homo sapiens
HGKSHRRKRTRSVEDDEEGHLICQSGDVLSARYEIVDTLGEGAFGKVVECIDHKAGGRHVAVKIVKNVDRYCEAARSEIQVLEHL

SEQ ID NO: 1889 - protein, 85 aa, Homo sapiens
NTTDPNSTFRCVQMLEWFEHHGHICIVFELLGLSTYDFIKENGFLPFRLDHIRKMAYQICKSVNFLHSNKLTHTDLKPENILFVQ

SEQ ID NO: 1890 - protein, 85 aa, Homo sapiens
SDYTEAYNPKIKRDERTLINPDIKVVDFGSATYDDEHHSTLVSTRHYRAPEVILALGWSQPCDVWSIGCILIEYYLGFTVFPTHD

SEQ ID NO: 1891 - protein, 85 aa, Homo sapiens
SKEHLAMMERILGPLPKHMIQKTRKRKYFHHDRLDWDEHSSAGRYVSRRCKPLKEFMLSQDVEHERLFDLIQKMLEYDPAKRITL

SEQ ID NO: 1892 - protein, 85 aa, Homo sapiens
EGESSRFEIHTPVSDKKKKKCSIHKERPQKHSHEIFRDSSLVNEQSQITRRKKRKKDFQHLISSPLKKSRICDETANATSTLKKR

SEQ ID NO: 1893 - protein, 85 aa, Homo sapiens
KKRRYSALEVDEEAGVTVVLVDKENINNTPKHFRKDVDVVCVDMSIEQKLPRKPKTDKFQVLAKSHAHKSEALHSKVREKKNKKH

SEQ ID NO: 1894 - protein, 85 aa, Homo sapiens
QRKAASWESQRARDTLPQSESHQEESWLSVGPGGEITELPASAHKNKSKKKKKKSSNREYETLAMPEGSQAGREAGTDMQESQPT

SEQ ID NO: 1895 - protein, 85 aa, Homo sapiens
VGLDDETPQLLGPTHKKKSKKKKKKKSNHQEFEALAMPEGSQVGSEVGADMQESRPAVGLHGETAGIPAPAYKNKSKKKKKKSNH

SEQ ID NO: 1896 - protein, 85 aa, Homo sapiens
QEFEAVAMPESLESAYPEGSQVGSEVGTVEGSTALKGFKESNSTKKKSKKRKLTSVKRARVSGDDFSVPSKNSESTLFDSVEGDG

SEQ ID NO: 1897 - protein, 85 aa, Homo sapiens
AMMEEGVKSRPRQKKTQACLASKHVQEAPRLEPANEEHNVETAEDSEIRYLSADSGDADDSDADLGSAVKQLQEFIPNIKDRATS

SEQ ID NO: 1898 - protein, 85 aa, Homo sapiens
TIKRMYRDDLERFKEFKAQGVAIKFGKFSVKENKQLEKNVEDFLALTGIESADKLLYTDRYPEEKSVITNLKRRYSFRLHIGRNI

SEQ ID NO: 1899 - protein, 85 aa, Homo sapiens
ARPWKLIYYRAKKMFDVNNYKGRYSEGDTEKLKMYHSLLGNDWKTIGEMVARSSLSVALKFSQISSQRNRGAWSKSETRKLIKAV

SEQ ID NO: 1900 - protein, 85 aa, Homo sapiens
EEVILKKMSPQELKEVDSKLQENPESCLSIVREKLYKGISWVEVEAKVQTRNWMQCKSKWTEILTKRMTNGRRIYYGMNALRAKV

SEQ ID NO: 1901 - protein, 85 aa, Homo sapiens
SLIERLYEINVEDTNEIDWEDLASAIGDVPPSYVQTKFSRLKAVYVPFWQKKTFPEIIDYLYETTLPLLKEKLEKMMEKKGTKIQ

SEQ ID NO: 1902 - protein, 84 aa, Homo sapiens
EIIDYLYETTLPLLKEKLEKMMEKKGTKIQTPAAPKQVFPFRDIFYYEDDSEGEDIEKESEGQAPCMAHACNSSTLGGQGRWII

SEQ ID NO: 1903 - protein, 85 aa, Homo sapiens
NEQSQITRRKKRKKDFQHLISSPLKKSRICDETANATSTLKKRKKRRYSALEVDEEAGVTVVLVDKENINNTPKHFRKDVDVVCV

SEQ ID NO: 1904 - protein, 85 aa, Homo sapiens
DMSIEQKLPRKPKTDKFQVLAKSHAHKSEALHSKVREKKNKKHQRKAASWESQRARDTLPQSESHQEESWLSVGPGGEITELPAS

SEQ ID NO: 1905 - protein, 85 aa, Homo sapiens
AHKNKSKKKKKKSSNREYETLAMPEGSQAGREAGTDMQESQPTVGLDDETPQLLGPTHKKKSKKKKKKKSNHQEFEALAMPEGSQ

SEQ ID NO: 1906 - protein, 85 aa, Homo sapiens
VGSEVGADMQESRPAVGLHGETAGIPAPAYKNKSKKKKKKSNHQEFEAVAMPESLESAYPEGSQVGSEVGTVEGSTALKGFKESN

SEQ ID NO: 1907 - protein, 85 aa, Homo sapiens
STKKKSKKRKLTSVKRARVSGDDFSVPSKNSESTLFDSVEGDGAMMEEGVKSRPRQKKTQACLASKHVQEAPRLEPANEEHNVET

SEQ ID NO: 1908 - protein, 85 aa, Homo sapiens
AEDSEIRYLSADSGDADDSDADLGSAVKQLQEFIPNIKDRATSTIKRMYRDDLERFKEFKAQGVAIKFGKFSVKENKQLEKNVED

SEQ ID NO: 1909 - protein, 85 aa, Homo sapiens
FLALTGIESADKLLYTDRYPEEKSVITNLKRRYSFRLHIGRNIARPWKLIYYRAKKMFDVNNYKGRYSEGDTEKLKMYHSLLGND

SEQ ID NO: 1910 - protein, 85 aa, Homo sapiens
WKTIGEMVARSSLSVALKFSQISSQRNRGAWSKSETRKLIKAVEEVILKKMSPQELKEVDSKLQENPESCLSIVREKLYKGISWV

SEQ ID NO: 1911 - protein, 85 aa, Homo sapiens
EVEAKVQTRNWMQCKSKWTEILTKRMTNGRRIYYGMNALRAKVSLIERLYEINVEDTNEIDWEDLASAIGDVPPSYVQTKFSRLK

SEQ ID NO: 1912 - protein, 85 aa, Homo sapiens
AVYVPFWQKKTFPEIIDYLYETTLPLLKEKLEKMMEKKGTKIQTPAAPKQVFPFRDIFYYEDDSEGEDIEKESEGQAPCMAHACN

SEQ ID NO: 1913 - protein, 85 aa, Homo sapiens
AGLPRRIIKETQRLLAEPVPGIKAEPDESNARYFHVVIAGPQDSPFEGGTFKLELFLPEEYPMAAPKVRFMTKIYHPNVDKLGRI

SEQ ID NO: 1914 - protein, 84 aa, Homo sapiens
VRFMTKIYHPNVDKLGRICLDILKDKWSPALQIRTVLLSIQALLSAPNPDDPLANDVAEQWKTNEAQAIETARAWTRLYAMNNI

SEQ ID NO: 1915 - protein, 85 aa, Homo sapiens
DSPFEGGTFKLELFLPEEYPMAAPKVRFMTKIYHPNVDKLGRICLDILKDKWSPALQIRTVLLSIQALLSAPNPDDPLANDVAEQ

SEQ ID NO: 1916 - protein, 84 aa, Homo sapiens
MPAWPHRGLSTFPGAEHCLRASPETTLSSGFFVAVIERVEVPSLTGQSISTRTHTQPSPKEKEETAKSRSRCLHTALHIAEAPG

SEQ ID NO: 1917 - protein, 85 aa, Homo sapiens
APALPAWPHRGLSTFPGAEHCLRASPETTLSSGFFVAVIERVEVPSLTGQSISTRTHTQPSPKEKEETAKSRSRCLHTALHIAEA

SEQ ID NO: 1918 - protein, 85 aa, Homo sapiens
PKKAKPTGSGKEEGPAPCKQMKLEAAGGPSALNFDSPSSLFESLISPIKTETFFKEFWEQKPLLIQRDDPALATYYGSLFKLTDL

SEQ ID NO: 1919 - protein, 85 aa, Homo sapiens
KSLCSRGMYYGRDVNVCRCVNGKKKVLNKDGKAHFLQLRKDFDQKRATIQFHQPQRFKDELWRIQEKLECYFGSLVGSNVYITPA

SEQ ID NO: 1920 - protein, 85 aa, Homo sapiens
GSQGLPPHYDDVEVFILQLEGEKHWRLYHPTVPLAREYSVEAEERIGRPVHEFMLKPGDLLYFPRGTIHQADTPAGLAHSTHVTI

SEQ ID NO: 1921 - protein, 85 aa, Homo sapiens
STYQNNSWGDFLLDTISGLVFDTAKEDVELRTGIPRQLLLQVESTTVATRRLSGFLRTLADRLEGTKELLSSDMKKDFIMHRLPP

SEQ ID NO: 1922 - protein, 85 aa, Homo sapiens
YSAGDGAELSTPGGKLPRLDSVVRLQFKDHIVLTVLPDQDQSDEAQEKMVYIYHSLKNSRETHMMGNEEETEFHGLRFPLSHLDA

SEQ ID NO: 1923 - protein, 84 aa, Homo sapiens
QSDEAQEKMVYIYHSLKNSRETHMMGNEEETEFHGLRFPLSHLDALKQIWNSPAISVKDLKLTTDEEKESLVLSLWTECLIQVV

SEQ ID NO: 1924 - protein, 85 aa, Homo sapiens
SLISPIKTETFFKEFWEQKPLLIQRDDPALATYYGSLFKLTDLKSLCSRGMYYGRDVNVCRCVNGKKKVLNKDGKAHFLQLRKDF

SEQ ID NO: 1925 - protein, 85 aa, Homo sapiens
DQKRATIQFHQPQRFKDELWRIQEKLECYFGSLVGSNVYITPAGSQGLPPHYDDVEVFILQLEGEKHWRLYHPTVPLAREYSVEA

SEQ ID NO: 1926 - protein, 85 aa, Homo sapiens
EERIGRPVHEFMLKPGDLLYFPRGTIHQADTPAGLAHSTHVTISTYQNNSWGDFLLDTISGLVFDTAKEDVELRTGIPRQLLLQV

SEQ ID NO: 1927 - protein, 85 aa, Homo sapiens
ESTTVATRRLSGFLRTLADRLEGTKELLSSDMKKDFIMHRLPPYSAGDGAELSTPGGKLPRLDSVVRLQFKDHIVLTVLPDQDQS

SEQ ID NO: 1928 - protein, 85 aa, Homo sapiens
ESGAVLLESKSSPFNLLHEMHELRLLGHLCDVTVSVEYQGVRKDFMAHKAVLAATSKFFKEVFLNEKSVDGTRTNVYLNEVQVAD

SEQ ID NO: 1929 - protein, 85 aa, Homo sapiens
FASFLEFVYTAKVQVEEDRVQRMLEVAEKLKCLDLSETCFQLKKQMLESVLLELQNFSESQEVEVSSGSQVSAAPAPRASVATDG

SEQ ID NO: 1930 - protein, 85 aa, Homo sapiens
PHPSGLTDSLDYPGERASNGMSSDLPPKKSKDKLDKKKEVVKPPYPKIRRASGRLAGRKVFVEIPKKKYTRRLREQQKTAEGDVG

SEQ ID NO: 1931 - protein, 85 aa, Homo sapiens
DYRCPQDQSPDRVGTEMEQVSKNEGCQAGAELEELSKKAGPEEEEEEEEEDEEGEKKKSNFKCSICEKAFLYEKSFLKHSKHRHG

SEQ ID NO: 1932 - protein, 85 aa, Homo sapiens
VATEVVYRCDTCGQTFANRCNLKSHQRHVHSSERHFPCELCGKKFKRKKDVKRHVLQVHEGGGERHRCGQCGKGLSSKTALRLHE

SEQ ID NO: 1933 - protein, 85 aa, Homo sapiens
RTHTGDRPYGCTECGARFSQPSALKTHMRIHTGEKPFVCDECGARFTQNHMLIYHKRCHTGERPFMCETCGKSFASKEYLKHHNR

SEQ ID NO: 1934 - protein, 85 aa, Homo sapiens
IHTGSKPFKCEVCFRTFAQRNSLYQHIKVHTGERPYCCDQCGKQFTQLNALQRHRRIHTGERPFMCNACGRTFTDKSTLRRHTSI

SEQ ID NO: 1935 - protein, 85 aa, Homo sapiens
HDKNTPWKSFLVIVDGSPKNDDGHKTEQPDEEYVSSKLSDKLLSFAENGHFHNLAAVQDTVPTMQENSSADTACKADDSVVSQDT

SEQ ID NO: 1936 - protein, 84 aa, Homo sapiens
EYVSSKLSDKLLSFAENGHFHNLAAVQDTVPTMQENSSADTACKADDSVVSQDTLLATTISELSELTPQTDSMPTQLHSLSNME

SEQ ID NO: 1937 - protein, 85 aa, Homo sapiens
KDFMAHKAVLAATSKFFKEVFLNEKSVDGTRTNVYLNEVQVADFASFLEFVYTAKVQVEEDRVQRMLEVAEKLKCLDLSETCFQL

SEQ ID NO: 1938 - protein, 85 aa, Homo sapiens
KKQMLESVLLELQNFSESQEVEVSSGSQVSAAPAPRASVATDGPHPSGLTDSLDYPGERASNGMSSDLPPKKSKDKLDKKKEVVK

SEQ ID NO: 1939 - protein, 85 aa, Homo sapiens
PPYPKIRRASGRLAGRKVFVEIPKKKYTRRLREQQKTAEGDVGDYRCPQDQSPDRVGTEMEQVSKNEGCQAGAELEELSKKAGPE

SEQ ID NO: 1940 - protein, 85 aa, Homo sapiens
EEEEEEEEDEEGEKKKSNFKCSICEKAFLYEKSFLKHSKHRHGVATEVVYRCDTCGQTFANRCNLKSHQRHVHSSERHFPCELCG

SEQ ID NO: 1941 - protein, 85 aa, Homo sapiens
KKFKRKKDVKRHVLQVHEGGGERHRCGQCGKGLSSKTALRLHERTHTGDRPYGCTECGARFSQPSALKTHMRIHTGEKPFVCDEC

SEQ ID NO: 1942 - protein, 85 aa, Homo sapiens
GARFTQNHMLIYHKRCHTGERPFMCETCGKSFASKEYLKHHNRIHTGSKPFKCEVCFRTFAQRNSLYQHIKVHTGERPYCCDQCG

SEQ ID NO: 1943 - protein, 85 aa, Homo sapiens
KQFTQLNALQRHRRIHTGERPFMCNACGRTFTDKSTLRRHTSIHDKNTPWKSFLVIVDGSPKNDDGHKTEQPDEEYVSSKLSDKL

SEQ ID NO: 1944 - protein, 85 aa, Homo sapiens
GNILTCCINSHCGWPRGKDAPCYESDTDIYETVAAATSESTTVEPGKLDVGATEGQDLQHISNQKMPTGPPEDRLSLKFLPSSEE

SEQ ID NO: 1945 - protein, 85 aa, Homo sapiens
DNDDAKILPSPVQGSSEDNLSLVCLPRSEDDDCDDDDDDDAQILPSRVQGGCYRFDSSSCSSEDNLSLVCLPRSEDDDCDDDDDD

SEQ ID NO: 1946 - protein, 84 aa, Homo sapiens
CSSEDNLSLVCLPRSEDDDCDDDDDDAQILPSPVQACSEDSLFLRCSLRHKDEEEEDDDDIHITARIESDLTLESLSDEEIHPG

SEQ ID NO: 1947 - protein, 85 aa, Homo sapiens
VEPGKLDVGATEGQDLQHISNQKMPTGPPEDRLSLKFLPSSEEDNDDAKILPSPVQGSSEDNLSLVCLPRSEDDDCDDDDDDDAQ

SEQ ID NO: 1948 - protein, 85 aa, Homo sapiens
ILPSRVQGGCYRFDSSSCSSEDNLSLVCLPRSEDDDCDDDDDDAQILPSPVQACSEDSLFLRCSLRHKDEEEEDDDDIHITARIE

SEQ ID NO: 1949 - protein, 85 aa, Homo sapiens
QSSSYGQQSSFRQDHPSSMGVYGQESGGFSGPGENRSMSGPDNRGRGRGGFDRGGMSRDPDEDSDNSAIYVQGLNDSVTLDDLAD

SEQ ID NO: 1950 - protein, 85 aa, Homo sapiens
FFKQCGVVKMNKRTGQPMIHIYLDKETGKPKGDATVSYEDPPTAKAAVEWFDGKDFQGSKLKVSLARKKPPMNSMRGGLPPREGR

SEQ ID NO: 1951 - protein, 85 aa, Homo sapiens
GMPPPLRGGPGGPGGPGGPMGRMGGRGGDRGGFPPRGPRGSRGNPSGGGNVQHRAGDWQCPNPGCGNQNFAWRTECNQCKAPKPE

SEQ ID NO: 1952 - protein, 85 aa, Homo sapiens
GFLPPPFPPPGGDRGRGGPGGMRGGRGGLMDRGGPGGMFRGGRGGDRGGFRGGRGMDRGGFGGGRRGGPGGPPGPLMEQMGGRRG

SEQ ID NO: 1953 - protein, 85 aa, Homo sapiens
YGQPSSYGQQSSYGQQSSYGQQPPTSYPPQTGSYSQAPSQYSQQSSSYGQQSSFRQDHPSSMGVYGQESGGFSGPGENRSMSGPD

SEQ ID NO: 1954 - protein, 85 aa, Homo sapiens
NRGRGRGGFDRGGMSRDPDEDSDNSAIYVQGLNDSVTLDDLADFFKQCGVVKMNKRTGQPMIHIYLDKETGKPKGDATVSYEDPP

SEQ ID NO: 1955 - protein, 85 aa, Homo sapiens
TAKAAVEWFDGKDFQGSKLKVSLARKKPPMNSMRGGLPPREGRGMPPPLRGGPGGPGGPGGPMGRMGGRGGDRGGFPPRGPRGSR

SEQ ID NO: 1956 - protein, 85 aa, Homo sapiens
GNPSGGGNVQHRAGDWQCPNPGCGNQNFAWRTECNQCKAPKPEGFLPPPFPPPGGDRGRGGPGGMRGGRGGLMDRGGPGGMFRGG

SEQ ID NO: 1957 - protein, 85 aa, Homo sapiens
DFREILMIASKGQGVNNVPKRYSLAVGPPKKDPKVKGVQSAAVQAFLKRKEEELRRKALEEKRRKEELVKKRIELKHDKKARAMA

SEQ ID NO: 1958 - protein, 85 aa, Homo sapiens
KRTKDNFHGYNGIPIEEKSKKRQATESHTSQGTDREYEMEEENEFLEYNHAESEQEYEEEQEPPKVESKPKVPLKSAPPPMNFTD

SEQ ID NO: 1959 - protein, 85 aa, Homo sapiens
LLRLAEKKQFEPVEIKVVKKSEERPMTAEELREREFLERKHRRKKLETDGKLPPTVSKKAPSQKESVGTKLSKGSGDRHPSSKGM

SEQ ID NO: 1960 - protein, 85 aa, Homo sapiens
PLPHAEKKSRPSMANEKHLALSSSKSMPGERIKAGSGNSSQPSLREGHDKPVFNGAGKPHSSTSSPSVPKTSASRTQKSAVEHKA

SEQ ID NO: 1961 - protein, 85 aa, Homo sapiens
KKSLSHPSHSRPGPMVTPHNKAKSPGVRQPGSSSSSAPGQPSTGVARPTVSSGPVPRRQNGSSSSGPERSISGSKKPTNDSNPSR

SEQ ID NO: 1962 - protein, 85 aa, Homo sapiens
RTVSGTCGPGQPASSSGGPGRPISGSVSSARPLGSSRGPGRPVSSPHELRRPVSGLGPPGRSVSGPGRSISGSIPAGRTVSNSVP

SEQ ID NO: 1963 - protein, 85 aa, Homo sapiens
GRPVSSLGPGQTVSSSGPTIKPKCTVVSETISSKNIISRSSNGQMNGMKPPLSGYRAAQGPQRLPFPTGYKRQREYEEEDDDDDE

SEQ ID NO: 1964 - protein, 85 aa, Homo sapiens
YDSEMEDFIEDEGEPQEEISKHIREIFGYDRKKYKDESDYALRYMESSWKEQQKEEAKSLRLGMQEDLEEMRREEEEMQRRRAKK

SEQ ID NO: 1965 - protein, 84 aa, Homo sapiens
EDFIEDEGEPQEEISKHIREIFGYDRKKYKDESDYALRYMESSWKEQQKEEAKSLRLGMQEDLEEMRREEEEMQRRRAKKLKRR

SEQ ID NO: 1966 - protein, 85 aa, Homo sapiens
VQAFLKRKEEELRRKALEEKRRKEELVKKRIELKHDKKARAMAKRTKDNFHGYNGIPIEEKSKKRQATESHTSQGTDREYEMEEE

SEQ ID NO: 1967 - protein, 85 aa, Homo sapiens
NEFLEYNHAESEQEYEEEQEPPKVESKPKVPLKSAPPPMNFTDLLRLAEKKQFEPVEIKVVKKSEERPMTAEELREREFLERKHR

SEQ ID NO: 1968 - protein, 85 aa, Homo sapiens
RKKLETDGKLPPTVSKKAPSQKESVGTKLSKGSGDRHPSSKGMPLPHAEKKSRPSMANEKHLALSSSKSMPGERIKAGSGNSSQP

SEQ ID NO: 1969 - protein, 85 aa, Homo sapiens
SLREGHDKPVFNGAGKPHSSTSSPSVPKTSASRTQKSAVEHKAKKSLSHPSHSRPGPMVTPHNKAKSPGVRQPGSSSSSAPGQPS

SEQ ID NO: 1970 - protein, 85 aa, Homo sapiens
TGVARPTVSSGPVPRRQNGSSSSGPERSISGSKKPTNDSNPSRRTVSGTCGPGQPASSSGGPGRPISGSVSSARPLGSSRGPGRP

SEQ ID NO: 1971 - protein, 85 aa, Homo sapiens
VSSPHELRRPVSGLGPPGRSVSGPGRSISGSIPAGRTVSNSVPGRPVSSLGPGQTVSSSGPTIKPKCTVVSETISSKNIISRSSN

SEQ ID NO: 1972 - protein, 85 aa, Homo sapiens
GQMNGMKPPLSGYRAAQGPQRLPFPTGYKRQREYEEEDDDDDEYDSEMEDFIEDEGEPQEEISKHIREIFGYDRKKYKDESDYAL

SEQ ID NO: 1973 - protein, 85 aa, Homo sapiens
KLLENSSFEAINSQLTVETGDAHIIGRIESYSCKMAGDDKHMFKQFCQEGQPHVLEALSPPQTSGLSPSRLSKSQGGEEEGPLSD

SEQ ID NO: 1974 - protein, 85 aa, Homo sapiens
KCSRKTLFYLIATLNESFRPDYDFSTARSHEFSREPSLSWVVNAVNCSLFSAVREDFKDLKPQLWNAVDEEICLAECDIYSYNPD

SEQ ID NO: 1975 - protein, 85 aa, Homo sapiens
MDSDPFGEDGSLWSFNYFFYNKRLKRIVFFSCRSISGSTYTPSEAGNELDMELGEEEVEEESRSGGSGAEETSTMEEDRVPVICI

SEQ ID NO: 1976 - protein, 84 aa, Homo sapiens
DSDPFGEDGSLWSFNYFFYNKRLKRIVFFSCRSISGSTYTPSEAGNELDMELGEEEVEEESRSGGSGAEETSTMEEDRVPVICI

SEQ ID NO: 1977 - protein, 85 aa, Homo sapiens
FKQFCQEGQPHVLEALSPPQTSGLSPSRLSKSQGGEEEGPLSDKCSRKTLFYLIATLNESFRPDYDFSTARSHEFSREPSLSWVV

SEQ ID NO: 1978 - protein, 85 aa, Homo sapiens
NAVNCSLFSAVREDFKDLKPQLWNAVDEEICLAECDIYSYNPDLDSDPFGEDGSLWSFNYFFYNKRLKRIVFFSCRSISGSTYTP

SEQ ID NO: 1979 - protein, 85 aa, Homo sapiens
VKLAKAGKNQGDPKKMAPPPKEVEEDSEDEEMSEDEEDDSSGEEVVIPQKKGKKAAATSAKKVVVSPTKKVAVATPAKKAAVTPG

SEQ ID NO: 1980 - protein, 85 aa, Homo sapiens
KKAAATPAKKTVTPAKAVTTPGKKGATPGKALVATPGKKGAAIPAKGAKNGKNAKKEDSDEEEDDDSEEDEEDDEDEDEDEDEIE

SEQ ID NO: 1981 - protein, 85 aa, Homo sapiens
PAAMKAAAAAPASEDEDDEDDEDDEDDDDDEEDDSEEEAMETTPAKGKKAAKVVPVKAKNVAEDEDEEEDDEDEDDDDDEDDEDD

SEQ ID NO: 1982 - protein, 85 aa, Homo sapiens
DDEDDEEEEEEEEEEPVKEAPGKRKKEMAKQKAAPEAKKQKVEGTEPTTAFNLFVGNLNFNKSAPELKTGISDVFAKNDLAVVDV

SEQ ID NO: 1983 - protein, 85 aa, Homo sapiens
RIGMTRKFGYVDFESAEDLEKALELTGLKVFGNEIKLEKPKGKDSKKERDARTLLAKNLPYKVTQDELKEVFEDAAEIRLVSKDG

SEQ ID NO: 1984 - protein, 85 aa, Homo sapiens
KSKGIAYIEFKTEADAEKTFEEKQGTEIDGRSISLYYTGEKGQNQDYRGGKNSTWSGESKTLVLSNLSYSATEETLQEVFEKATF

SEQ ID NO: 1985 - protein, 85 aa, Homo sapiens
IKVPQNQNGKSKGYAFIEFASFEDAKEALNSCNKREIEGRAIRLELQGPRGSPNARSQPSKTLFVKGLSEDTTEETLKESFDGSV

SEQ ID NO: 1986 - protein, 85 aa, Homo sapiens
RARIVTDRETGSSKGFGFVDFNSEEDAKAAKEAMEDGEIDGNKVTLDWAKPKGEGGFGGRGGGRGGFGGRGGGRGGRGGFGGRGR

SEQ ID NO: 1987 - protein, 84 aa, Homo sapiens
KEAMEDGEIDGNKVTLDWAKPKGEGGFGGRGGGRGGFGGRGGGRGGRGGFGGRGRGGFGGRGGFRGGRGGGGDHKPQGKKTKFE

SEQ ID NO: 1988 - protein, 85 aa, Homo sapiens
EEVVIPQKKGKKAAATSAKKVVVSPTKKVAVATPAKKAAVTPGKKAAATPAKKTVTPAKAVTTPGKKGATPGKALVATPGKKGAA

SEQ ID NO: 1989 - protein, 85 aa, Homo sapiens
IPAKGAKNGKNAKKEDSDEEEDDDSEEDEEDDEDEDEDEDEIEPAAMKAAAAAPASEDEDDEDDEDDEDDDDDEEDDSEEEAMET

SEQ ID NO: 1990 - protein, 85 aa, Homo sapiens
TPAKGKKAAKVVPVKAKNVAEDEDEEEDDEDEDDDDDEDDEDDDDEDDEEEEEEEEEEPVKEAPGKRKKEMAKQKAAPEAKKQKV

SEQ ID NO: 1991 - protein, 85 aa, Homo sapiens
EGTEPTTAFNLFVGNLNFNKSAPELKTGISDVFAKNDLAVVDVRIGMTRKFGYVDFESAEDLEKALELTGLKVFGNEIKLEKPKG

SEQ ID NO: 1992 - protein, 85 aa, Homo sapiens
KDSKKERDARTLLAKNLPYKVTQDELKEVFEDAAEIRLVSKDGKSKGIAYIEFKTEADAEKTFEEKQGTEIDGRSISLYYTGEKG

SEQ ID NO: 1993 - protein, 85 aa, Homo sapiens
QNQDYRGGKNSTWSGESKTLVLSNLSYSATEETLQEVFEKATFIKVPQNQNGKSKGYAFIEFASFEDAKEALNSCNKREIEGRAI

SEQ ID NO: 1994 - protein, 85 aa, Homo sapiens
RLELQGPRGSPNARSQPSKTLFVKGLSEDTTEETLKESFDGSVRARIVTDRETGSSKGFGFVDFNSEEDAKAAKEAMEDGEIDGN

SEQ ID NO: 1995 - protein, 85 aa, Homo sapiens
SMLPTFGFTQEQVACVCEVLQQGGNIERLGRFLWSLPACEHLHKNESVLKAKAVVAFHRGNFRELYKILESHQFSPHNHAKLQQL

SEQ ID NO: 1996 - protein, 85 aa, Homo sapiens
WLKAHYIEAEKLRGRPLGAVGKYRVRRKFPLPRSIWDGEETSYCFKEKSRSVLREWYAHNPYPSPREKRELAEATGLTTTQVSNW

SEQ ID NO: 1997 - protein, 85 aa, Homo sapiens
FKNRRQRDRAAEAKERENNENSNSNSHNPLNGSGKSVLGSSEDEKTPSGTPDHSSSSPALLLSPPPPGLPSLHSLGHPPGPSAVP

SEQ ID NO: 1998 - protein, 84 aa, Homo sapiens
VLGSSEDEKTPSGTPDHSSSSPALLLSPPPPGLPSLHSLGHPPGPSAVPVPVPGGGGADPLQHHHGLQDSILNPMSANLVDLGS

SEQ ID NO: 1999 - protein, 85 aa, Homo sapiens
HKNESVLKAKAVVAFHRGNFRELYKILESHQFSPHNHAKLQQLWLKAHYIEAEKLRGRPLGAVGKYRVRRKFPLPRSIWDGEETS

SEQ ID NO: 2000 - protein, 85 aa, Homo sapiens
YCFKEKSRSVLREWYAHNPYPSPREKRELAEATGLTTTQVSNWFKNRRQRDRAAEAKERENNENSNSNSHNPLNGSGKSVLGSSE

SEQ ID NO: 2001 - protein, 85 aa, Homo sapiens
VRWFHRDLSGLDAETLLKGRGVHGSFLARPSRKNQGDFSLSVRVGDQVTHIRIQNSGDFYDLYGGEKFATLTELVEYYTQQQGVL

SEQ ID NO: 2002 - protein, 85 aa, Homo sapiens
QDRDGTIIHLKYPLNCSDPTSERWYHGHMSGGQAETLLQAKGEPWTFLVRESLSQPGDFVLSVLSDQPKAGPGSPLRVTHIKVMC

SEQ ID NO: 2003 - protein, 85 aa, Homo sapiens
EGGRYTVGGLETFDSLTDLVEHFKKTGIEEASGAFVYLRQPYYATRVNAADIENRVLELNKKQESEDTAKAGFWEEFESLQKQEV

SEQ ID NO: 2004 - protein, 85 aa, Homo sapiens
KNLHQRLEGQRPENKGKNRYKNILPFDHSRVILQGRDSNIPGSDYINANYIKNQLLGPDENAKTYIASQGCLEATVNDFWQMAWQ

SEQ ID NO: 2005 - protein, 85 aa, Homo sapiens
ENSRVIVMTTREVEKGRNKCVPYWPEVGMQRAYGPYSVTNCGEHDTTEYKLRTLQVSPLDNGDLIREIWHYQYLSWPDHGVPSEP

SEQ ID NO: 2006 - protein, 85 aa, Homo sapiens
GGVLSFLDQINQRQESLPHAGPIIVHCSAGIGRTGTIIVIDMLMENISTKGLDCDIDIQKTIQMVRAQRSGMVQTEAQYKFIYVA

SEQ ID NO: 2007 - protein, 84 aa, Homo sapiens
IAQFIETTKKKLEVLQSQKGQESEYGNITYPPAMKNAHAKASRTSSKHKEDVYENLHTKNKREEKVKKQRSADKEKSKGSLKRK

SEQ ID NO: 2008 - protein, 85 aa, Homo sapiens
RVGDQVTHIRIQNSGDFYDLYGGEKFATLTELVEYYTQQQGVLQDRDGTIIHLKYPLNCSDPTSERWYHGHMSGGQAETLLQAKG

SEQ ID NO: 2009 - protein, 85 aa, Homo sapiens
EPWTFLVRESLSQPGDFVLSVLSDQPKAGPGSPLRVTHIKVMCEGGRYTVGGLETFDSLTDLVEHFKKTGIEEASGAFVYLRQPY

SEQ ID NO: 2010 - protein, 85 aa, Homo sapiens
YATRVNAADIENRVLELNKKQESEDTAKAGFWEEFESLQKQEVKNLHQRLEGQRPENKGKNRYKNILPFDHSRVILQGRDSNIPG

SEQ ID NO: 2011 - protein, 85 aa, Homo sapiens
SDYINANYIKNQLLGPDENAKTYIASQGCLEATVNDFWQMAWQENSRVIVMTTREVEKGRNKCVPYWPEVGMQRAYGPYSVTNCG

SEQ ID NO: 2012 - protein, 85 aa, Homo sapiens
EHDTTEYKLRTLQVSPLDNGDLIREIWHYQYLSWPDHGVPSEPGGVLSFLDQINQRQESLPHAGPIIVHCSAGIGRTGTIIVIDM

SEQ ID NO: 2013 - protein, 85 aa, Homo sapiens
LMENISTKGLDCDIDIQKTIQMVRAQRSGMVQTEAQYKFIYVAIAQFIETTKKKLEVLQSQKGQESEYGNITYPPAMKNAHAKAS

SEQ ID NO: 2014 - protein, 85 aa, Homo sapiens
GNSASRSDFEWVYTDQPHTQRRKEILAKYPAIKALMRPDPRLKWAVLVLVLVQMLACWLVRGLAWRWLLFWAYAFGGCVNHSLTL

SEQ ID NO: 2015 - protein, 85 aa, Homo sapiens
AIHDISHNAAFGTGRAARNRWLAVFANLPVGVPYAASFKKYHVDHHRYLGGDGLDVDVPTRLEGWFFCTPARKLLWLVLQPFFYS

SEQ ID NO: 2016 - protein, 85 aa, Homo sapiens
LRPLCVHPKAVTRMEVLNTLVQLAADLAIFALWGLKPVVYLLASSFLGLGLHPISGHFVAEHYMFLKGHETYSYYGPLNWITFNV

SEQ ID NO: 2017 - protein, 84 aa, Homo sapiens
HETYSYYGPLNWITFNVGYHVEHHDFPSIPGYNLPLVRKIAPEYYDHLPQHHSWVKVLWDFVFEDSLGPYARVKRVYRLAKDGL

SEQ ID NO: 2018 - protein, 85 aa, Homo sapiens
KWAVLVLVLVQMLACWLVRGLAWRWLLFWAYAFGGCVNHSLTLAIHDISHNAAFGTGRAARNRWLAVFANLPVGVPYAASFKKYH

SEQ ID NO: 2019 - protein, 85 aa, Homo sapiens
VDHHRYLGGDGLDVDVPTRLEGWFFCTPARKLLWLVLQPFFYSLRPLCVHPKAVTRMEVLNTLVQLAADLAIFALWGLKPVVYLL

SEQ ID NO: 2020 - protein, 85 aa, Homo sapiens
ASSFLGLGLHPISGHFVAEHYMFLKGHETYSYYGPLNWITFNVGYHVEHHDFPSIPGYNLPLVRKIAPEYYDHLPQHHSWVKVLW

SEQ ID NO: 2021 - protein, 85 aa, Homo sapiens
SEKSVEAAAELSAKDLKEKKEKVEEKASRKERKKEVVEEEENGAEEEEEETAEDGEEEDEGEEEDEEEEEEDDEGPALKRAAEEE

SEQ ID NO: 2022 - protein, 84 aa, Homo sapiens
EKKEKVEEKASRKERKKEVVEEEENGAEEEEEETAEDGEEEDEGEEEDEEEEEEDDEGPALKRAAEEEDEADPKRQKTENGASA

SEQ ID NO: 2023 - protein, 85 aa, Homo sapiens
SVELEEALPVTTAEGMAKKVTKAGGSAALSPSKKRKNSKKKNQPGKYSQLVVETIRRLGERNGSSLAKIYTEAKKVPWFDQQNGR

SEQ ID NO: 2024 - protein, 85 aa, Homo sapiens
TYLKYSIKALVQNDTLLQVKGTGANGSFKLNRKKLEGGGERRGAPAAATAPAPTAHKAKKAAPGAAGSRRADKKPARGQKPEQRS

SEQ ID NO: 2025 - protein, 84 aa, Homo sapiens
APAAATAPAPTAHKAKKAAPGAAGSRRADKKPARGQKPEQRSHKKGAGAKKDKGGKAKKTAAAGGKKVKKAAKPSVPKVPKGRK

SEQ ID NO: 2026 - protein, 85 aa, Homo sapiens
QPGKYSQLVVETIRRLGERNGSSLAKIYTEAKKVPWFDQQNGRTYLKYSIKALVQNDTLLQVKGTGANGSFKLNRKKLEGGGERR

SEQ ID NO: 2027 - protein, 85 aa, Homo sapiens
GAPAAATAPAPTAHKAKKAAPGAAGSRRADKKPARGQKPEQRSHKKGAGAKKDKGGKAKKTAAAGGKKVKKAAKPSVPKVPKGRK

SEQ ID NO: 2028 - protein, 85 aa, Homo sapiens
MLQHPGQVSASEEELRFAIQNKHLCHRMSSALESVTVSDRPLGVSITKAEVAPEEDERKKRRRERNKIAAAKCRNKKKEKTECLQ

SEQ ID NO: 2029 - protein, 84 aa, Homo sapiens
KHLCHRMSSALESVTVSDRPLGVSITKAEVAPEEDERKKRRRERNKIAAAKCRNKKKEKTECLQKLPRPFWVQKTCIWAVDSCK

SEQ ID NO: 2030 - protein, 85 aa, Homo sapiens
PRSFEQVIILKKWFLKPYKGQTLPGRVLFLRYVVQTLEDDFQQTLRRQRQHLQQSIANMVLSCDKQPHNVRDVIKWLVKAVTEDG

SEQ ID NO: 2031 - protein, 85 aa, Homo sapiens
MTQPPNGNQTSSGTGILKASSSHPSSQPNLTKNTNQLIVCQLQRMLSIAVEVDRTPTCSSNKIAEMMFGFVLDIPERSQREMFFT

SEQ ID NO: 2032 - protein, 85 aa, Homo sapiens
TMESHLLRCKVLEIIFLHSCETPTRLPLSLAQALYFLNNSTSLLKCQSDKSQWQTWDELVEHLQFLLSSYQHVLREHLRSSVIDR

SEQ ID NO: 2033 - protein, 84 aa, Homo sapiens
RSSVIDRKDLIIKRIKPKPQQGDDITVVDVEKQIEAFRSRLIQMLGEPLVPQLQDKVHLLKLLLFYAADLNPDAEPFQKGWSGS

SEQ ID NO: 2034 - protein, 85 aa, Homo sapiens
QTLRRQRQHLQQSIANMVLSCDKQPHNVRDVIKWLVKAVTEDGLTQPPNGNQTSSGTGILKASSSHPSSQPNLTKNTNQLIVCQL

SEQ ID NO: 2035 - protein, 85 aa, Homo sapiens
QRMLSIAVEVDRTPTCSSNKIAEMMFGFVLDIPERSQREMFFTTMESHLLRCKVLEIIFLHSCETPTRLPLSLAQALYFLNNSTS

SEQ ID NO: 2036 - protein, 85 aa, Homo sapiens
MLKCQSDKSQWQTWDELVEHLQFLLSSYQHVLREHLRSSVIDRKDLIIKRIKPKPQQGDDITVVDVEKQIEAFRSRLIQMLGEPL

SEQ ID NO: 2037 - protein, 85 aa, Homo sapiens
AVPWEEYFRLALQEKLSTKLPEQAEDHVPPVLRLLEKRQELVDADQALQAQKEVFRTKTAALKQRWEQLEQKERELKGSFIRFDK

SEQ ID NO: 2038 - protein, 85 aa, Homo sapiens
FLQDSEARRNRALRRAAEERHQAGRREVEALRLWTQLQELRREHARLQRRLKRLEPCARLLEQALELLPGFQEVPELVARFDGLA

SEQ ID NO: 2039 - protein, 85 aa, Homo sapiens
ETQAALRLREREQLAELEAARARLQQLRDAWPDEVLAQGQRRAQLQERLEAARERTLQWESKWIQIQNTAAEKTLLLGRSRMAVL

SEQ ID NO: 2040 - protein, 84 aa, Homo sapiens
ERTLQWESKWIQIQNTAAEKTLLLGRSRMAVLNLFQLVCQHQGQPPTLDIEDTEGQLEHVKLFMQDLSAMLAGLGQAEPAAPAS

SEQ ID NO: 2041 - protein, 85 aa, Homo sapiens
DADQALQAQKEVFRTKTAALKQRWEQLEQKERELKGSFIRFDKFLQDSEARRNRALRRAAEERHQAGRREVEALRLWTQLQELRR

SEQ ID NO: 2042 - protein, 85 aa, Homo sapiens
EHARLQRRLKRLEPCARLLEQALELLPGFQEVPELVARFDGLAETQAALRLREREQLAELEAARARLQQLRDAWPDEVLAQGQRR

SEQ ID NO: 2043 - protein, 85 aa, Homo sapiens
AQLQERLEAARERTLQWESKWIQIQNTAAEKTLLLGRSRMAVLNLFQLVCQHQGQPPTLDIEDTEGQLEHVKLFMQDLSAMLAGL

SEQ ID NO: 2044 - protein, 85 aa, Homo sapiens
HALFADSFAALGRLDNITLVMVFHPQYLESFLKTQHYLLQMDGPLPLHYRHYIGIMAAARHQCSYLVNLHVNDFLHVGGDPKWLN

SEQ ID NO: 2045 - protein, 85 aa, Homo sapiens
GLENAPQKLQNLGELNKVLAHRPWLITKEHIEGLLKAEEHSWSLAELVHAVVLLTHYHSLASFTFGCGISPEIHCDGGHTFRPPS

SEQ ID NO: 2046 - protein, 85 aa, Homo sapiens
VSNYCICDITNGNHSVDEMPVNSAENVSVSDSFFEVEALMEKMRQLQECRDEEEASQEEMASRFEIEKRESMFVFSSDDEEVTPA

SEQ ID NO: 2047 - protein, 85 aa, Homo sapiens
RAVSRHFEDTSYGYKDFSRHGMHVPTFRVQDYCWEDHGYSLVNRLYPDVGQLIDEKFHIAYNLTYNTMAMHKDVDTSMLRRAIWN

SEQ ID NO: 2048 - protein, 85 aa, Homo sapiens
YIHCMFGIRYDDYDYGEINQLLDRSFKVYIKTVVCTPEKVTKRMYDSFWRQFKHSEKVHVNLLLIEARMQAELLYALRAITRYMT

SEQ ID NO: 2049 - protein, 84 aa, Homo sapiens
IHCMFGIRYDDYDYGEINQLLDRSFKVYIKTVVCTPEKVTKRMYDSFWRQFKHSEKVHVNLLLIEARMQAELLYALRAITRYMT

SEQ ID NO: 2050 - protein, 85 aa, Homo sapiens
GPLPLHYRHYIGIMAAARHQCSYLVNLHVNDFLHVGGDPKWLNGLENAPQKLQNLGELNKVLAHRPWLITKEHIEGLLKAEEHSW

SEQ ID NO: 2051 - protein, 85 aa, Homo sapiens
SLAELVHAVVLLTHYHSLASFTFGCGISPEIHCDGGHTFRPPSVSNYCICDITNGNHSVDEMPVNSAENVSVSDSFFEVEALMEK

SEQ ID NO: 2052 - protein, 85 aa, Homo sapiens
MRQLQECRDEEEASQEEMASRFEIEKRESMFVFSSDDEEVTPARAVSRHFEDTSYGYKDFSRHGMHVPTFRVQDYCWEDHGYSLV

SEQ ID NO: 2053 - protein, 85 aa, Homo sapiens
NRLYPDVGQLIDEKFHIAYNLTYNTMAMHKDVDTSMLRRAIWNYIHCMFGIRYDDYDYGEINQLLDRSFKVYIKTVVCTPEKVTK

SEQ ID NO: 2054 - protein, 85 aa, Homo sapiens
AERPGPPGGAVSATAYPDTPAEFPPHLQAGAMRRRFWGVFNCLCAGAFGALAAASAKLAFGSEVSMGLCVLGIIVMASTNSLMWT

SEQ ID NO: 2055 - protein, 84 aa, Homo sapiens
VMASTNSLMWTFFSRGLSFSMSSAIASVTVTFSNILSSAFLGYVLYGECQEVLWWGGVFLILCGLTLIHRKLPPTWKPLPHKQQ

SEQ ID NO: 2056 - protein, 85 aa, Homo sapiens
MCAGAFGALAAASAKLAFGSEVSMGLCVLGIIVMASTNSLMWTFFSRGLSFSMSSAIASVTVTFSNILSSAFLGYVLYGECQEVL

SEQ ID NO: 2057 - protein, 85 aa, Homo sapiens
KNATIVMSVRREQGSSSGEGSLSFEDVAVGFTREEWQFLDQSQKVLYKEVMLENYINLVSIGYRGTKPDSLFKLEQGEPPGIAEG

SEQ ID NO: 2058 - protein, 85 aa, Homo sapiens
AAHSQICPGFVIQSRRYAGKDSDAFGGYGRSCLHIKRDKTLTGVKYHRCVKPSSPKSQLNDLQKICAGGKPHECSVCGRAFSRKA

SEQ ID NO: 2059 - protein, 85 aa, Homo sapiens
QLIQHQRTERGEKPHGCGECGKTFMRKIQLTEHQRTHTGEKPHECSECGKAFSRKSQLMVHQRTHTGEKPYRCSKCGKAFSRKCR

SEQ ID NO: 2060 - protein, 85 aa, Homo sapiens
LNRHQRSHTGEKLYGCSVCGKAFSQKAYLTAHQRLHTGDKPYKCSDCGRTFYFKSDLTRHQRIHTGEKPYECSECEKAFRSKSKL

SEQ ID NO: 2061 - protein, 85 aa, Homo sapiens
IQHQRTHTGERPYSCRECGKAFAHMSVLIKHEKTHIRETAINSLTVEKPSSRSHTSLYMSELIQEQKTVNTVPIEMPSSGTPPLL

SEQ ID NO: 2062 - protein, 84 aa, Homo sapiens
ELIQEQKTVNTVPIEMPSSGTPPLLNKSERLVGRNVVIVEQPFPRNQAFVVNQEFEQRISLTNEVNVAPSVINYILYLTDIVSE

SEQ ID NO: 2063 - protein, 85 aa, Homo sapiens
QKVLYKEVMLENYINLVSIGYRGTKPDSLFKLEQGEPPGIAEGAAHSQICPGFVIQSRRYAGKDSDAFGGYGRSCLHIKRDKTLT

SEQ ID NO: 2064 - protein, 85 aa, Homo sapiens
GVKYHRCVKPSSPKSQLNDLQKICAGGKPHECSVCGRAFSRKAQLIQHQRTERGEKPHGCGECGKTFMRKIQLTEHQRTHTGEKP

SEQ ID NO: 2065 - protein, 85 aa, Homo sapiens
HECSECGKAFSRKSQLMVHQRTHTGEKPYRCSKCGKAFSRKCRLNRHQRSHTGEKLYGCSVCGKAFSQKAYLTAHQRLHTGDKPY

SEQ ID NO: 2066 - protein, 85 aa, Homo sapiens
KCSDCGRTFYFKSDLTRHQRIHTGEKPYECSECEKAFRSKSKLIQHQRTHTGERPYSCRECGKAFAHMSVLIKHEKTHIRETAIN

SEQ ID NO: 2067 - protein, 85 aa, Homo sapiens
SLTVEKPSSRSHTSLYMSELIQEQKTVNTVPIEMPSSGTPPLLNKSERLVGRNVVIVEQPFPRNQAFVVNQEFEQRISLTNEVNV

SEQ ID NO: 2068 - protein, 85 aa, Homo sapiens
TTVVVHVDSKAELTTLLEQWEKEHGSGQDMVPILTRMSQLIEKETEEYRKGDPDPFDDRHPGRADPECMLGHLLRILFKNDDFMN

SEQ ID NO: 2069 - protein, 85 aa, Homo sapiens
ALVNAYVMTSREPPLNTAACRLLLDIMPGLETAVVFQEKEGIVENLFKWAREADQPLRTYSTGLLGGAMENQDIAANYRDENSQL

SEQ ID NO: 2070 - protein, 85 aa, Homo sapiens
VAIVLRRLRELQLQEVALRQENKRPSPRKLSSEPLLPLDEEAVDMDYGDMAVDDAEIQKSALQIIINCVCGPDNRISSIGKFISG

SEQ ID NO: 2071 - protein, 85 aa, Homo sapiens
TPRRKLPQNPKSSEHTLAKMWNVVQSNNGIKVLLSLLSIKMPITDADQIRALACKALVGLSRSSTVRQIISKLPLFSSCQIQQLM

SEQ ID NO: 2072 - protein, 85 aa, Homo sapiens
KEPVLQDKRSDHVKFCKYAAELIERVSGKPLLIGTDVSLARLQKADVVAQSRISFPEKELLLLIRNHLISKGLGETATVLTKEAD

SEQ ID NO: 2073 - protein, 85 aa, Homo sapiens
MPMTAASHSSAFTPVTAAASPVSLPRTPRIANGIATRLGSHAAVGASAPSAPTAHPQPRPPQGPLALPGPSYAGNSPLIGRISFI

SEQ ID NO: 2074 - protein, 85 aa, Homo sapiens
RERPSPCNGRKIRVLRQKSDHGAYSQSPAIKKQLDRHLPSPPTLDSIITEYLREQHARCKNPVATCPPFSLFTPHQCPEPKQRRQ

SEQ ID NO: 2075 - protein, 85 aa, Homo sapiens
APINFTSRLNRRASFPKYGGVDGGCFDRHLIFSRFRPISVFREANEDESGFTCCAFSARERFLMLGTCTGQLKLYNVFSGQEEAS

SEQ ID NO: 2076 - protein, 85 aa, Homo sapiens
YNCHNSAITHLEPSRDGSLLLTSATWSQPLSALWGMKSVFDMKHSFTEDHYVEFSKHSQDRVIGTKGDIAHIYDIQTGNKLLTLF

SEQ ID NO: 2077 - protein, 85 aa, Homo sapiens
NPDLANNYKRNCATFNPTDDLVLNDGVLWDVRSAQAIHKFDKFNMNISGVFHPNGLEVIINTEIWDLRTFHLLHTVPALDQCRVV

SEQ ID NO: 2078 - protein, 85 aa, Homo sapiens
FNHTGTVMYGAMLQADDEDDLMEERMKSPFGSSFRTFNATDYKPIATIDVKRNIFDLCTDTKDCYLAVIENQGSMDALNMDTVCR

SEQ ID NO: 2079 - protein, 85 aa, Homo sapiens
MYEVGRQRLAEDEDEEEDQEEEEQEEEDDDEDDDDTDDLDELDTDQLLEAELEEDDNNENAGEDGDNDFSPSDEELANLLEEGED

SEQ ID NO: 2080 - protein, 84 aa, Homo sapiens
LDELDTDQLLEAELEEDDNNENAGEDGDNDFSPSDEELANLLEEGEDGEDEDSDADEEVELILGDTDSSDNSDLEDDIILSLNE

SEQ ID NO: 2081 - protein, 85 aa, Homo sapiens
KETEEYRKGDPDPFDDRHPGRADPECMLGHLLRILFKNDDFMNALVNAYVMTSREPPLNTAACRLLLDIMPGLETAVVFQEKEGI

SEQ ID NO: 2082 - protein, 85 aa, Homo sapiens
VENLFKWAREADQPLRTYSTGLLGGAMENQDIAANYRDENSQLVAIVLRRLRELQLQEVALRQENKRPSPRKLSSEPLLPLDEEA

SEQ ID NO: 2083 - protein, 85 aa, Homo sapiens
VDMDYGDMAVDDAEIQKSALQIIINCVCGPDNRISSIGKFISGTPRRKLPQNPKSSEHTLAKMWNVVQSNNGIKVLLSLLSIKMP

SEQ ID NO: 2084 - protein, 85 aa, Homo sapiens
ITDADQIRALACKALVGLSRSSTVRQIISKLPLFSSCQIQQLMKEPVLQDKRSDHVKFCKYAAELIERVSGKPLLIGTDVSLARL

SEQ ID NO: 2085 - protein, 85 aa, Homo sapiens
QKADVVAQSRISFPEKELLLLIRNHLISKGLGETATVLTKEADLPMTAASHSSAFTPVTAAASPVSLPRTPRIANGIATRLGSHA

SEQ ID NO: 2086 - protein, 85 aa, Homo sapiens
AVGASAPSAPTAHPQPRPPQGPLALPGPSYAGNSPLIGRISFIRERPSPCNGRKIRVLRQKSDHGAYSQSPAIKKQLDRHLPSPP

SEQ ID NO: 2087 - protein, 85 aa, Homo sapiens
TLDSIITEYLREQHARCKNPVATCPPFSLFTPHQCPEPKQRRQAPINFTSRLNRRASFPKYGGVDGGCFDRHLIFSRFRPISVFR

SEQ ID NO: 2088 - protein, 85 aa, Homo sapiens
EANEDESGFTCCAFSARERFLMLGTCTGQLKLYNVFSGQEEASYNCHNSAITHLEPSRDGSLLLTSATWSQPLSALWGMKSVFDM

SEQ ID NO: 2089 - protein, 85 aa, Homo sapiens
KHSFTEDHYVEFSKHSQDRVIGTKGDIAHIYDIQTGNKLLTLFNPDLANNYKRNCATFNPTDDLVLNDGVLWDVRSAQAIHKFDK

SEQ ID NO: 2090 - protein, 85 aa, Homo sapiens
FNMNISGVFHPNGLEVIINTEIWDLRTFHLLHTVPALDQCRVVFNHTGTVMYGAMLQADDEDDLMEERMKSPFGSSFRTFNATDY

SEQ ID NO: 2091 - protein, 85 aa, Homo sapiens
KPIATIDVKRNIFDLCTDTKDCYLAVIENQGSMDALNMDTVCRLYEVGRQRLAEDEDEEEDQEEEEQEEEDDDEDDDDTDDLDEL

SEQ ID NO: 2092 - protein, 85 aa, Homo sapiens
KSCAVSLTTAAVAFGDEAKKMAEGKASRESEEESVSLTVEEREALGGMDSRLFGFVRLHEDGARTKTLLGKAVRCYESLILKAEG

SEQ ID NO: 2093 - protein, 85 aa, Homo sapiens
KVESDFFCQLGHFNLLLEDYSKALSAYQRYYSLQADYWKNAAFLYGLGLVYFYYNAFHWAIKAFQDVLYVDPSFCRAKEIHLRLG

SEQ ID NO: 2094 - protein, 85 aa, Homo sapiens
LMFKVNTDYKSSLKHFQLALIDCNPCTLSNAEIQFHIAHLYETQRKYHSAKEAYEQLLQTENLPAQVKATVLQQLGWMHHNMDLV

SEQ ID NO: 2095 - protein, 85 aa, Homo sapiens
GDKATKESYAIQYLQKSLEADPNSGQSWYFLGRCYSSIGKVQDAFISYRQSIDKSEASADTWCSIGVLYQQQNQPMDALQAYICA

SEQ ID NO: 2096 - protein, 85 aa, Homo sapiens
VQLDHGHAAAWMDLGTLYESCNQPQDAIKCYLNAARSKRCSNTSTLAARIKFLQNGSDNWNGGQSLSHHPVQQVYSLCLTPQKLQ

SEQ ID NO: 2097 - protein, 85 aa, Homo sapiens
HLEQLRANRDNLNPAQKHQLEQLESQFVLMQQMRHKEVAQVRTTGIHNGAITDSSLPTNSVSNRQPHGALTRVSSVSQPGVRPAC

SEQ ID NO: 2098 - protein, 85 aa, Homo sapiens
VEKLLSSGAFSAGCIPCGTSKILGSTDTILLGSNCIAGSESNGNVPYLQQNTHTLPHNHTDLNSSTEEPWRKQLSNSAQGLHKSQ

SEQ ID NO: 2099 - protein, 85 aa, Homo sapiens
SSCLSGPNEEQPLFSTGSAQYHQATSTGIKKANEHLTLPSNSVPQGDADSHLSCHTATSGGQQGIMFTKESKPSKNRSLVPETSR

SEQ ID NO: 2100 - protein, 85 aa, Homo sapiens
HTGDTSNGCADVKGLSNHVHQLIADAVSSPNHGDSPNLLIADNPQLSALLIGKANGNVGTGTCDKVNNIHPAVHTKTDHSVASSP

SEQ ID NO: 2101 - protein, 85 aa, Homo sapiens
SSAISTATPSPKSTEQRSINSVTSLNSPHSGLHTVNGEGLGKSQSSTKVDLPLASHRSTSQILPSMSVSICPSSTEVLKACRNPG

SEQ ID NO: 2102 - protein, 85 aa, Homo sapiens
KNGLSNSCILLDKCPPPRPPTSPYPPLPKDKLNPPTPSIYLENKRDAFFPPLHQFCTNPKNPVTVIRGLAGALKLDLGLFSTKTL

SEQ ID NO: 2103 - protein, 85 aa, Homo sapiens
VEANNEHMVEVRTQLLQPADENWDPTGTKKIWRCESNRSHTTIAKYAQYQASSFQESLRAGMQWCDLSSLQPPPPGFKRFSHLSL

SEQ ID NO: 2104 - protein, 84 aa, Homo sapiens
AGMQWCDLSSLQPPPPGFKRFSHLSLPNSWNYRHLPSCPTNFCIFVETGFHHVGQACLELLTSGGLLASASQSAGITGVSHHAR

SEQ ID NO: 2105 - protein, 85 aa, Homo sapiens
EALGGMDSRLFGFVRLHEDGARTKTLLGKAVRCYESLILKAEGKVESDFFCQLGHFNLLLEDYSKALSAYQRYYSLQADYWKNAA

SEQ ID NO: 2106 - protein, 85 aa, Homo sapiens
FLYGLGLVYFYYNAFHWAIKAFQDVLYVDPSFCRAKEIHLRLGLMFKVNTDYKSSLKHFQLALIDCNPCTLSNAEIQFHIAHLYE

SEQ ID NO: 2107 - protein, 85 aa, Homo sapiens
TQRKYHSAKEAYEQLLQTENLPAQVKATVLQQLGWMHHNMDLVGDKATKESYAIQYLQKSLEADPNSGQSWYFLGRCYSSIGKVQ

SEQ ID NO: 2108 - protein, 85 aa, Homo sapiens
DAFISYRQSIDKSEASADTWCSIGVLYQQQNQPMDALQAYICAVQLDHGHAAAWMDLGTLYESCNQPQDAIKCYLNAARSKRCSN

SEQ ID NO: 2109 - protein, 85 aa, Homo sapiens
TSTLAARIKFLQNGSDNWNGGQSLSHHPVQQVYSLCLTPQKLQHLEQLRANRDNLNPAQKHQLEQLESQFVLMQQMRHKEVAQVR

SEQ ID NO: 2110 - protein, 85 aa, Homo sapiens
TTGIHNGAITDSSLPTNSVSNRQPHGALTRVSSVSQPGVRPACVEKLLSSGAFSAGCIPCGTSKILGSTDTILLGSNCIAGSESN

SEQ ID NO: 2111 - protein, 85 aa, Homo sapiens
GNVPYLQQNTHTLPHNHTDLNSSTEEPWRKQLSNSAQGLHKSQSSCLSGPNEEQPLFSTGSAQYHQATSTGIKKANEHLTLPSNS

SEQ ID NO: 2112 - protein, 85 aa, Homo sapiens
VPQGDADSHLSCHTATSGGQQGIMFTKESKPSKNRSLVPETSRHTGDTSNGCADVKGLSNHVHQLIADAVSSPNHGDSPNLLIAD

SEQ ID NO: 2113 - protein, 85 aa, Homo sapiens
NPQLSALLIGKANGNVGTGTCDKVNNIHPAVHTKTDHSVASSPSSAISTATPSPKSTEQRSINSVTSLNSPHSGLHTVNGEGLGK

SEQ ID NO: 2114 - protein, 85 aa, Homo sapiens
SQSSTKVDLPLASHRSTSQILPSMSVSICPSSTEVLKACRNPGKNGLSNSCILLDKCPPPRPPTSPYPPLPKDKLNPPTPSIYLE

SEQ ID NO: 2115 - protein, 85 aa, Homo sapiens
NKRDAFFPPLHQFCTNPKNPVTVIRGLAGALKLDLGLFSTKTLVEANNEHMVEVRTQLLQPADENWDPTGTKKIWRCESNRSHTT

SEQ ID NO: 2116 - protein, 85 aa, Homo sapiens
IAKYAQYQASSFQESLRAGMQWCDLSSLQPPPPGFKRFSHLSLPNSWNYRHLPSCPTNFCIFVETGFHHVGQACLELLTSGGLLA

SEQ ID NO: 2117 - protein, 85 aa, Homo sapiens
PQNEYIELHRKRYGYRLDYHEKKRKKESREAHERSKKAKKMIGLKAKLYHKQRHAEKIQMKKTIKMHEKRNTKQKNDEKTPQGAV

SEQ ID NO: 2118 - protein, 85 aa, Homo sapiens
PAYLLDREGQSRAKVLSNMIKQKRKEKAGKWEVPLPKVRAQGETEVLKVIRTGKRKKKAWKRMVTKVCFVGDGFTRKPPKYERFI

SEQ ID NO: 2119 - protein, 84 aa, Homo sapiens
IKQKRKEKAGKWEVPLPKVRAQGETEVLKVIRTGKRKKKAWKRMVTKVCFVGDGFTRKPPKYERFIRPMENMPRLPTILKMMDV

SEQ ID NO: 2120 - protein, 85 aa, Homo sapiens
GLKAKLYHKQRHAEKIQMKKTIKMHEKRNTKQKNDEKTPQGAVPAYLLDREGQSRAKVLSNMIKQKRKEKAGKWEVPLPKVRAQG

SEQ ID NO: 2121 - protein, 85 aa, Homo sapiens
GEVEAPGRLWLESPPGGAPPIFLPSDGQALVLGRGPLTQVTDRKCSRTQVELVADPETRTVAVKQLGVNPSTTGTQELKPGLEGS

SEQ ID NO: 2122 - protein, 85 aa, Homo sapiens
MGVGDTLYLVNGLHPLTLRWEETRTPESQPDTPPGTPLVSQDEKRDAELPKKRMRKSNPGWENLEKLLVFTAAGVKPQGKVAGFD

SEQ ID NO: 2123 - protein, 85 aa, Homo sapiens
MDGTLITTRSGKVFPTGPSDWRILYPEIPRKLRELEAEGYKLVIFTNQMSIGRGKLPAEEFKAKVEAVVEKLGVPFQVLVATHAG

SEQ ID NO: 2124 - protein, 85 aa, Homo sapiens
MYRKPVTGMWDHLQEQANDGTPISIGDSIFVGDAAGRPANWAPGRKKKDFSCADRLFALNLGLPFATPEEFFLKWPAAGFELPAF

SEQ ID NO: 2125 - protein, 85 aa, Homo sapiens
DPRTVSRSGPLCLPESRALLSASPEVVVAVGFPGAGKSTFLKKHLVSAGYVHVNRDTLGSWQRCVTTCETALKQGKRVAIDNTNP

SEQ ID NO: 2126 - protein, 85 aa, Homo sapiens
DAASRARYVQCARAAGVPCRCFLFTATLEQARHNNRFREMTDSSHIPVSDMVMYGYRKQFEAPTLAEGFSAILEIPFRLWVEPRL

SEQ ID NO: 2127 - protein, 84 aa, Homo sapiens
ARAAGVPCRCFLFTATLEQARHNNRFREMTDSSHIPVSDMVMYGYRKQFEAPTLAEGFSAILEIPFRLWVEPRLGRLYCQFSEG

SEQ ID NO: 2128 - protein, 85 aa, Homo sapiens
RKCSRTQVELVADPETRTVAVKQLGVNPSTTGTQELKPGLEGSLGVGDTLYLVNGLHPLTLRWEETRTPESQPDTPPGTPLVSQD

SEQ ID NO: 2129 - protein, 85 aa, Homo sapiens
EKRDAELPKKRMRKSNPGWENLEKLLVFTAAGVKPQGKVAGFDLDGTLITTRSGKVFPTGPSDWRILYPEIPRKLRELEAEGYKL

SEQ ID NO: 2130 - protein, 85 aa, Homo sapiens
VIFTNQMSIGRGKLPAEEFKAKVEAVVEKLGVPFQVLVATHAGLYRKPVTGMWDHLQEQANDGTPISIGDSIFVGDAAGRPANWA

SEQ ID NO: 2131 - protein, 85 aa, Homo sapiens
PGRKKKDFSCADRLFALNLGLPFATPEEFFLKWPAAGFELPAFDPRTVSRSGPLCLPESRALLSASPEVVVAVGFPGAGKSTFLK

SEQ ID NO: 2132 - protein, 85 aa, Homo sapiens
KHLVSAGYVHVNRDTLGSWQRCVTTCETALKQGKRVAIDNTNPDAASRARYVQCARAAGVPCRCFLFTATLEQARHNNRFREMTD

SEQ ID NO: 2133 - protein, 85 aa, Homo sapiens
GKSCKVVVCGQASVGKTSILEQLLYGNHVVGSEMIETQEDIYVGSIETDRGVREQVRFYDTRGLRDGAELPRHCFSCTDGYVLVY

SEQ ID NO: 2134 - protein, 85 aa, Homo sapiens
STDSRESFQRVELLKKEIDKSKDKKEVTIVVLGNKCDLQEQRRVDPDVAQHWAKSEKVKLWEVSVADRRSLLEPFVYLASKMTQP

SEQ ID NO: 2135 - protein, 84 aa, Homo sapiens
KDKKEVTIVVLGNKCDLQEQRRVDPDVAQHWAKSEKVKLWEVSVADRRSLLEPFVYLASKMTQPQSKSAFPLSRKNKGSGSLDG

SEQ ID NO: 2136 - protein, 85 aa, Homo sapiens
VGSIETDRGVREQVRFYDTRGLRDGAELPRHCFSCTDGYVLVYSTDSRESFQRVELLKKEIDKSKDKKEVTIVVLGNKCDLQEQR

SEQ ID NO: 2137 - protein, 85 aa, Homo sapiens
ALPIIVKWGGQEYSVTTLSEDDTVLDLKQFLKTLTGVLPERQKLLGLKVKGKPAENDVKLGALKLKPNTKIMMMGTREESLEDVL

SEQ ID NO: 2138 - protein, 85 aa, Homo sapiens
GPPPDNDDVVNDFDIEDEVVEVENREENLLKISRRVKEYKVEILNPPREGKKLLVLDVDYTLFDHRSCAETGVELMRPYLHEFLT

SEQ ID NO: 2139 - protein, 85 aa, Homo sapiens
SAYEDYDIVIWSATNMKWIEAKMKELGVSTNANYKITFMLDSAAMITVHTPRRGLIDVKPLGVIWGKFSEFYSKKNTIMFDDIGR

SEQ ID NO: 2140 - protein, 84 aa, Homo sapiens
IWGKFSEFYSKKNTIMFDDIGRNFLMNPQNGLKIRPFMKAHLNRDKDKELLKLTQYLKEIAKLDDFLDLNHKYWERYLSKKQGQ

SEQ ID NO: 2141 - protein, 85 aa, Homo sapiens
KLLGLKVKGKPAENDVKLGALKLKPNTKIMMMGTREESLEDVLGPPPDNDDVVNDFDIEDEVVEVENREENLLKISRRVKEYKVE

SEQ ID NO: 2142 - protein, 85 aa, Homo sapiens
ILNPPREGKKLLVLDVDYTLFDHRSCAETGVELMRPYLHEFLTSAYEDYDIVIWSATNMKWIEAKMKELGVSTNANYKITFMLDS

SEQ ID NO: 2143 - protein, 85 aa, Homo sapiens
AAMITVHTPRRGLIDVKPLGVIWGKFSEFYSKKNTIMFDDIGRNFLMNPQNGLKIRPFMKAHLNRDKDKELLKLTQYLKEIAKLD

SEQ ID NO: 2144 - protein, 85 aa, Homo sapiens
KMMHMAHCVTLVQLSISCDHLIDKDIGSKSDPLCVLLQDVGGGSWAELGRTERVRNCSSPEFSKTLQLEYRFETVQKLRFGIYDI

SEQ ID NO: 2145 - protein, 85 aa, Homo sapiens
DNKTPELRDDDFLGGAECSLGQIVSSQVLTLPLMLKPGKPAGRGTITVSAQELKDNRVVTMEVEARNLDKKDFLGKSDPFLEFFR

SEQ ID NO: 2146 - protein, 85 aa, Homo sapiens
QGDGKWHLVYRSEVIKNNLNPTWKRFSVPVQHFCGGNPSTPIQVQCSDYDSDGSHDLIGTFHTSLAQLQAVPAEFECIHPEKQQK

SEQ ID NO: 2147 - protein, 85 aa, Homo sapiens
KKSYKNSGTIRVKICRVETEYSFLDYVMGGCQINFTVGVDFTGSNGDPSSPDSLHYLSPTGVNEYLMALWSVGSVVQDYDSDKLF

SEQ ID NO: 2148 - protein, 85 aa, Homo sapiens
PAFGFGAQVPPDWQVSHEFALNFNPSNPYCAGIQGIVDAYRQALPQVRLYGPTNFAPIINHVARFAAQAAHQGTASQYFMLLLLT

SEQ ID NO: 2149 - protein, 85 aa, Homo sapiens
DGAVTDVEATREAVVRASNLPMSVIIVGVGGADFEAMEQLDADGGPLHTRSGQAAARDIVQFVPYRRFQNAPREALAQTVLAEVP

SEQ ID NO: 2150 - protein, 84 aa, Homo sapiens
DFEAMEQLDADGGPLHTRSGQAAARDIVQFVPYRRFQNAPREALAQTVLAEVPTQLVSYFRAQGWAPLKPLPPSAKDPAQAPQA

SEQ ID NO: 2151 - protein, 85 aa, Homo sapiens
GSWAELGRTERVRNCSSPEFSKTLQLEYRFETVQKLRFGIYDIDNKTPELRDDDFLGGAECSLGQIVSSQVLTLPLMLKPGKPAG

SEQ ID NO: 2152 - protein, 85 aa, Homo sapiens
RGTITVSAQELKDNRVVTMEVEARNLDKKDFLGKSDPFLEFFRQGDGKWHLVYRSEVIKNNLNPTWKRFSVPVQHFCGGNPSTPI

SEQ ID NO: 2153 - protein, 85 aa, Homo sapiens
QVQCSDYDSDGSHDLIGTFHTSLAQLQAVPAEFECIHPEKQQKKKSYKNSGTIRVKICRVETEYSFLDYVMGGCQINFTVGVDFT

SEQ ID NO: 2154 - protein, 85 aa, Homo sapiens
GSNGDPSSPDSLHYLSPTGVNEYLMALWSVGSVVQDYDSDKLFPAFGFGAQVPPDWQVSHEFALNFNPSNPYCAGIQGIVDAYRQ

SEQ ID NO: 2155 - protein, 85 aa, Homo sapiens
ALPQVRLYGPTNFAPIINHVARFAAQAAHQGTASQYFMLLLLTDGAVTDVEATREAVVRASNLPMSVIIVGVGGADFEAMEQLDA

SEQ ID NO: 2156 - protein, 85 aa, Homo sapiens
LLPSLSPRVQPAFTQCARPQPPPHAPSPVGGRRGVFASSRHATTGTRGKMAAAVLSGPSAGSAAGVPGGTGGLSAVSSGPRLRLL

SEQ ID NO: 2157 - protein, 85 aa, Homo sapiens
MLESVSGLLQPRTGSAVAPVHPPNRSAPHLPGLMCLLRLHGSVGGAQNLSALGALVSLSNARLSSIKTRFEGLCLLSLLVGESPT

SEQ ID NO: 2158 - protein, 85 aa, Homo sapiens
ELFQQHCVSWLRSIQQVLQTQDPPATMELAVAVLRDLLRYAAQLPALFRDISMNHLPGLLTSLLGLRPECEQSALEGMKACMTYF

SEQ ID NO: 2159 - protein, 85 aa, Homo sapiens
PRACGSLKGKLASFFLSRVDALSPQLQQLACECYSRLPSLGAGFSQGLKHTESWEQELHSLLASLHTLLGALYEGAETAPVQNEG

SEQ ID NO: 2160 - protein, 85 aa, Homo sapiens
PGVEMLLSSEDGDAHVLLQLRQRFSGLARCLGLMLSSEFGAPVSVPVQEILDFICRTLSVSSKNISLHGDGPLRLLLLPSIHLEA

SEQ ID NO: 2161 - protein, 85 aa, Homo sapiens
MDLLSALILACGSRLLRFGILIGRLLPQVLNSWSIGRDSLSPGQERPYSTVRTKVYAILELWVQVCGASAGMLQGGASGEALLTH

SEQ ID NO: 2162 - protein, 85 aa, Homo sapiens
MLSDISPPADALKLRSPRGSPDGSLQTGKPSAPKKLKLDVGEAMAPPSHRKGDSNANSDVCAAALRGLSRTILMCGPLIKEETHR

SEQ ID NO: 2163 - protein, 85 aa, Homo sapiens
RLHDLVLPLVMGVQQGEVLGSSPYTSSRCRRELYCLLLALLLAPSPRCPPPLACALQAFSLGQREDSLEVSSFCSEALVTCAALT

SEQ ID NO: 2164 - protein, 85 aa, Homo sapiens
HPRVPPLQPMGPTCPTPAPVPPPEAPSPFRAPPFHPPGPMPSVGSMPSAGPMPSAGPMPSAGPVPSARPGPPTTANHLGLSVPGL

SEQ ID NO: 2165 - protein, 85 aa, Homo sapiens
VSVPPRLLPGPENHRAGSNEDPILAPSGTPPPTIPPDETFGGRVPRPAFVHYDKEEASDVEISLESDSDDSVVIVPEGLPPLPPP

SEQ ID NO: 2166 - protein, 85 aa, Homo sapiens
PPSGATPPPIAPTGPPTASPPVPAKEEPEELPAAPGPLPPPPPPPPPVPGPVTLPPPQLVPEGTPGGGGPPALEEDLTVININSS

SEQ ID NO: 2167 - protein, 85 aa, Homo sapiens
DEEEEEEEEEEEEEEEEEEEEEDFEEEEEDEEEYFEEEEEEEEEFEEEFEEEEGELEEEEEEEDEEEEEELEEVEDLEFGTAGGE

SEQ ID NO: 2168 - protein, 85 aa, Homo sapiens
VEEGAPPPPTLPPALPPPESPPKVQPEPEPEPGLLLEVEEPGTEEERGADTAPTLAPEALPSQGEVEREGESPAAGPPPQELVEE

SEQ ID NO: 2169 - protein, 84 aa, Homo sapiens
GPPPQELVEEEPSAPPTLLEEETEDGSDKVQPPPETPAEEEMETETEAEALQEKEQDDTAAMLADFIDCPPDDEKPPPPTEPDS

SEQ ID NO: 2170 - protein, 85 aa, Homo sapiens
TTGTRGKMAAAVLSGPSAGSAAGVPGGTGGLSAVSSGPRLRLLLLESVSGLLQPRTGSAVAPVHPPNRSAPHLPGLMCLLRLHGS

SEQ ID NO: 2171 - protein, 85 aa, Homo sapiens
VGGAQNLSALGALVSLSNARLSSIKTRFEGLCLLSLLVGESPTELFQQHCVSWLRSIQQVLQTQDPPATMELAVAVLRDLLRYAA

SEQ ID NO: 2172 - protein, 85 aa, Homo sapiens
QLPALFRDISMNHLPGLLTSLLGLRPECEQSALEGMKACMTYFPRACGSLKGKLASFFLSRVDALSPQLQQLACECYSRLPSLGA

SEQ ID NO: 2173 - protein, 85 aa, Homo sapiens
GFSQGLKHTESWEQELHSLLASLHTLLGALYEGAETAPVQNEGPGVEMLLSSEDGDAHVLLQLRQRFSGLARCLGLMLSSEFGAP

SEQ ID NO: 2174 - protein, 85 aa, Homo sapiens
VSVPVQEILDFICRTLSVSSKNISLHGDGPLRLLLLPSIHLEALDLLSALILACGSRLLRFGILIGRLLPQVLNSWSIGRDSLSP

SEQ ID NO: 2175 - protein, 85 aa, Homo sapiens
GQERPYSTVRTKVYAILELWVQVCGASAGMLQGGASGEALLTHLLSDISPPADALKLRSPRGSPDGSLQTGKPSAPKKLKLDVGE

SEQ ID NO: 2176 - protein, 85 aa, Homo sapiens
AMAPPSHRKGDSNANSDVCAAALRGLSRTILMCGPLIKEETHRRLHDLVLPLVMGVQQGEVLGSSPYTSSRCRRELYCLLLALLL

SEQ ID NO: 2177 - protein, 85 aa, Homo sapiens
APSPRCPPPLACALQAFSLGQREDSLEVSSFCSEALVTCAALTHPRVPPLQPMGPTCPTPAPVPPPEAPSPFRAPPFHPPGPMPS

SEQ ID NO: 2178 - protein, 85 aa, Homo sapiens
VGSMPSAGPMPSAGPMPSAGPVPSARPGPPTTANHLGLSVPGLVSVPPRLLPGPENHRAGSNEDPILAPSGTPPPTIPPDETFGG

SEQ ID NO: 2179 - protein, 85 aa, Homo sapiens
RVPRPAFVHYDKEEASDVEISLESDSDDSVVIVPEGLPPLPPPPPSGATPPPIAPTGPPTASPPVPAKEEPEELPAAPGPLPPPP

SEQ ID NO: 2180 - protein, 85 aa, Homo sapiens
PPPPPVPGPVTLPPPQLVPEGTPGGGGPPALEEDLTVININSSDEEEEEEEEEEEEEEEEEEEEEDFEEEEEDEEEYFEEEEEEE

SEQ ID NO: 2181 - protein, 85 aa, Homo sapiens
EEFEEEFEEEEGELEEEEEEEDEEEEEELEEVEDLEFGTAGGEVEEGAPPPPTLPPALPPPESPPKVQPEPEPEPGLLLEVEEPG

SEQ ID NO: 2182 - protein, 85 aa, Homo sapiens
TEEERGADTAPTLAPEALPSQGEVEREGESPAAGPPPQELVEEEPSAPPTLLEEETEDGSDKVQPPPETPAEEEMETETEAEALQ

SEQ ID NO: 2183 - protein, 85 aa, Homo sapiens
NLTEDCMVFEDVAIYFSQEEWGILNDAQRHLHSNVMLENFALLSSVGCWHGAKDEEVPSKQCVSVRVLQVTIPKPALSTLKAQPC

SEQ ID NO: 2184 - protein, 85 aa, Homo sapiens
KMCSSILKDILHLAEHDGTHPEQGLYTCAAEHDLHQKEQIREKLTRSDEWRPSFVNHSAHVGERNFTCTQGGKDFTASSDLLQQQ

SEQ ID NO: 2185 - protein, 85 aa, Homo sapiens
VLNSGWKLYRDTQDGEAFQGEQNDFNSSQGGKDFCHQHGLFEHQKTHNGERPYEFSECGELFRYNSNLIKYQQNHAGERPYEGTE

SEQ ID NO: 2186 - protein, 85 aa, Homo sapiens
YGKTFIRKSNLVQHQKIHSEGFLSKRSDPIEHQEILSRPTPYECTQCGKAFLTQAHLVGHQKTHTGEQPYECNKCGKFFMYNSKL

SEQ ID NO: 2187 - protein, 85 aa, Homo sapiens
IRHQKVHTGERRYECSECGKLFMDSFTLGRHQRVHTGERPFECSICGKFFSHRSTLNMHQRVHAGKRLYKCSECGKAFSLKHNVV

SEQ ID NO: 2188 - protein, 85 aa, Homo sapiens
QHLKIHTGERPYECTECEKAFVRKSHLVQHQKIHTDAFSKRSDLIQHKRIDIRPRPYTCSECGKAFLTQAHLVGHQKIHTGERPY

SEQ ID NO: 2189 - protein, 85 aa, Homo sapiens
ECTQCAKAFVRKSHLVQHEKIHTDAFSKRSDLIQHKRIDLRPRPYVCSECGKAFLTQAHLDGHQKIQTGERRYECNECGKFFLDS

SEQ ID NO: 2190 - protein, 85 aa, Homo sapiens
YKLVIHQRIHTGEKPYKCSKCGKFFRYRCTLSRHQKVHTGERPYECSECGKFFRDSYKLIIHQRVHTGEKPYECSNCGKFLRYRS

SEQ ID NO: 2191 - protein, 85 aa, Homo sapiens
TFIKHHKVCTGEKPHECSKCRELFRTKSSLIIHQQSHTGESPFKLRECGKDFNKCNTGQRQKTHTGERSYECGESSKVFKYNSSL

SEQ ID NO: 2192 - protein, 84 aa, Homo sapiens
PHECSKCRELFRTKSSLIIHQQSHTGESPFKLRECGKDFNKCNTGQRQKTHTGERSYECGESSKVFKYNSSLIKHQIIHTGKRP

SEQ ID NO: 2193 - protein, 85 aa, Homo sapiens
MSSVGCWHGAKDEEVPSKQCVSVRVLQVTIPKPALSTLKAQPCKMCSSILKDILHLAEHDGTHPEQGLYTCAAEHDLHQKEQIRE

SEQ ID NO: 2194 - protein, 85 aa, Homo sapiens
KLTRSDEWRPSFVNHSAHVGERNFTCTQGGKDFTASSDLLQQQVLNSGWKLYRDTQDGEAFQGEQNDFNSSQGGKDFCHQHGLFE

SEQ ID NO: 2195 - protein, 85 aa, Homo sapiens
HQKTHNGERPYEFSECGELFRYNSNLIKYQQNHAGERPYEGTEYGKTFIRKSNLVQHQKIHSEGFLSKRSDPIEHQEILSRPTPY

SEQ ID NO: 2196 - protein, 85 aa, Homo sapiens
ECTQCGKAFLTQAHLVGHQKTHTGEQPYECNKCGKFFMYNSKLIRHQKVHTGERRYECSECGKLFMDSFTLGRHQRVHTGERPFE

SEQ ID NO: 2197 - protein, 85 aa, Homo sapiens
CSICGKFFSHRSTLNMHQRVHAGKRLYKCSECGKAFSLKHNVVQHLKIHTGERPYECTECEKAFVRKSHLVQHQKIHTDAFSKRS

SEQ ID NO: 2198 - protein, 85 aa, Homo sapiens
DLIQHKRIDIRPRPYTCSECGKAFLTQAHLVGHQKIHTGERPYECTQCAKAFVRKSHLVQHEKIHTDAFSKRSDLIQHKRIDLRP

SEQ ID NO: 2199 - protein, 85 aa, Homo sapiens
RPYVCSECGKAFLTQAHLDGHQKIQTGERRYECNECGKFFLDSYKLVIHQRIHTGEKPYKCSKCGKFFRYRCTLSRHQKVHTGER

SEQ ID NO: 2200 - protein, 85 aa, Homo sapiens
PYECSECGKFFRDSYKLIIHQRVHTGEKPYECSNCGKFLRYRSTFIKHHKVCTGEKPHECSKCRELFRTKSSLIIHQQSHTGESP

SEQ ID NO: 2201 - protein, 85 aa, Homo sapiens
SPRMRHICYFLDYGALSLYSLGCAFPYAAYSMPASWLHGHLHQFFVPAAALNSFLCTGLSCYSRFLELESPGLSKVLRTGAFAYP

SEQ ID NO: 2202 - protein, 85 aa, Homo sapiens
FLFDNLPLFYRLGLCWGRGHGCGQEALSTSHGYHLFCALLTGFLFASHLPERLAPGRFDYIGEGTPGPAREEAGADAFPEHRMNW

SEQ ID NO: 2203 - protein, 85 aa, Homo sapiens
ATATSYSTSVQCWAPTSSWRQCWLIWDHAEPGWPHRNLPWAWQAQWPHWSWLQLGTYSLLLLSQPPCFGPPVHALCCRVAHWRGV

SEQ ID NO: 2204 - protein, 85 aa, Homo sapiens
PRPNNSEAPSLTLSWRGQRPGPSADEEPRFGPNQVGTHLSLEPTGAEERGHRREGREEEGCLGGLAECERDREGALDGSGRSAEG

SEQ ID NO: 2205 - protein, 84 aa, Homo sapiens
TLSWRGQRPGPSADEEPRFGPNQVGTHLSLEPTGAEERGHRREGREEEGCLGGLAECERDREGALDGSGRSAEGLRGEMHACPG

SEQ ID NO: 2206 - protein, 85 aa, Homo sapiens
QFFVPAAALNSFLCTGLSCYSRFLELESPGLSKVLRTGAFAYPFLFDNLPLFYRLGLCWGRGHGCGQEALSTSHGYHLFCALLTG

SEQ ID NO: 2207 - protein, 85 aa, Homo sapiens
FLFASHLPERLAPGRFDYIGEGTPGPAREEAGADAFPEHRMNWATATSYSTSVQCWAPTSSWRQCWLIWDHAEPGWPHRNLPWAW

SEQ ID NO: 2208 - protein, 85 aa, Homo sapiens
QAQWPHWSWLQLGTYSLLLLSQPPCFGPPVHALCCRVAHWRGVPRPNNSEAPSLTLSWRGQRPGPSADEEPRFGPNQVGTHLSLE

SEQ ID NO: 2209 - protein, 85 aa, Homo sapiens
ASSKLREPVDEVFDLDLAVPETARLDSSLHKARAQLLAKGRRHRPSRSRLRDSASSAEDGEGSDGPGGKVTDGCGSPLHRLRSPL

SEQ ID NO: 2210 - protein, 85 aa, Homo sapiens
HSGPGSPAGGSFCLDPPGLRRSLDEDEPPPSPLTRYRPLHNAASHEGLAAASCSPPRSAPSSDSSPSFVRRHPRAEPHSEDDSRD

SEQ ID NO: 2211 - protein, 85 aa, Homo sapiens
ASPPEPASPTIGLDKKTRRKFLDLGVTLRRASTGKSRKEKGSNRLSMGSRESVEGSGRSGGSPFLPFSWFTDSGKGSASSGSTTS

SEQ ID NO: 2212 - protein, 85 aa, Homo sapiens
PTCSPKHEGFSPKKSASQESTLSDDSTPPSSSPKIPSGPWQEAKCSYPYHTLSQSSDEFLDEPLPPVHHWTSQQVGQWLQSLNLE

SEQ ID NO: 2213 - protein, 85 aa, Homo sapiens
HRPSRSRLRDSASSAEDGEGSDGPGGKVTDGCGSPLHRLRSPLHSGPGSPAGGSFCLDPPGLRRSLDEDEPPPSPLTRYRPLHNA

SEQ ID NO: 2214 - protein, 85 aa, Homo sapiens
ASHEGLAAASCSPPRSAPSSDSSPSFVRRHPRAEPHSEDDSRDASPPEPASPTIGLDKKTRRKFLDLGVTLRRASTGKSRKEKGS

SEQ ID NO: 2215 - protein, 85 aa, Homo sapiens
NRLSMGSRESVEGSGRSGGSPFLPFSWFTDSGKGSASSGSTTSPTCSPKHEGFSPKKSASQESTLSDDSTPPSSSPKIPSGPWQE

SEQ ID NO: 2216 - protein, 85 aa, Homo sapiens
AKCSYPYHTLSQSSDEFLDEPLPPVHHWTSQQVGQWLQSLNLEQYAAEFAARQVDGPQLLQLDGSKLKSLGLSNSHDRALVKRKL

SEQ ID NO: 2217 - protein, 85 aa, Homo sapiens
GGLEKKKYERGSATNYITRNKARKKLQLSLADFRRLCILKGIYPHEPKHKKKVNKGSTAARTFYLIKDIRFLLHEPIVNKFREYK

SEQ ID NO: 2218 - protein, 85 aa, Homo sapiens
VFVRKLRKAYGKSEWNTVERLKDNKPNYKLDHIIKERYPTFIDALRDLDDALSMCFLFSTFPRTGKCHVQTIQLCRRLTVEFMHY

SEQ ID NO: 2219 - protein, 85 aa, Homo sapiens
IIAARALRKVFLSIKGIYYQAEVLGQPIVWITPYAFSHDHPTDVDYRVMATFTEFYTTLLGFVNFRLYQLLNLHYPPKLEGQAQA

SEQ ID NO: 2220 - protein, 85 aa, Homo sapiens
EAKAGEGTYALDSESCMEKLAALSASLARVVVPATEEEAEVDEFPTDGEEDRRKELEAQEKHKKLFEGLKFFLNREVPREALAFI

SEQ ID NO: 2221 - protein, 85 aa, Homo sapiens
IRSFGGEVSWDKSLCIGATYDVTDSRITHQIVDRPGQQTSVIGRCYVQPQWVFDSVNARLLLPVAEYFSGVQLPPHLSPFVTEKE

SEQ ID NO: 2222 - protein, 85 aa, Homo sapiens
GDYVPPEKLKLLALQRGEDPGNLNESEEEEEEDDNNEGDGDEEGENEEEEEDAEAGSEKEEEARLAALEEQRMEGKKPRVMAGTL

SEQ ID NO: 2223 - protein, 84 aa, Homo sapiens
EGKKPRVMAGTLKLEDKQRLAQEEESEAKRLAIMMMKKREKYLYQKIMFGKRRKIREANKLAEKRKAHDEAVRSEKKAKKARPE

SEQ ID NO: 2224 - protein, 85 aa, Homo sapiens
YPHEPKHKKKVNKGSTAARTFYLIKDIRFLLHEPIVNKFREYKVFVRKLRKAYGKSEWNTVERLKDNKPNYKLDHIIKERYPTFI

SEQ ID NO: 2225 - protein, 85 aa, Homo sapiens
DALRDLDDALSMCFLFSTFPRTGKCHVQTIQLCRRLTVEFMHYIIAARALRKVFLSIKGIYYQAEVLGQPIVWITPYAFSHDHPT

SEQ ID NO: 2226 - protein, 85 aa, Homo sapiens
DVDYRVMATFTEFYTTLLGFVNFRLYQLLNLHYPPKLEGQAQAEAKAGEGTYALDSESCMEKLAALSASLARVVVPATEEEAEVD

SEQ ID NO: 2227 - protein, 85 aa, Homo sapiens
EFPTDGEEDRRKELEAQEKHKKLFEGLKFFLNREVPREALAFIIRSFGGEVSWDKSLCIGATYDVTDSRITHQIVDRPGQQTSVI

SEQ ID NO: 2228 - protein, 85 aa, Homo sapiens
GRCYVQPQWVFDSVNARLLLPVAEYFSGVQLPPHLSPFVTEKEGDYVPPEKLKLLALQRGEDPGNLNESEEEEEEDDNNEGDGDE

SEQ ID NO: 2229 - protein, 85 aa, Homo sapiens
EGENEEEEEDAEAGSEKEEEARLAALEEQRMEGKKPRVMAGTLKLEDKQRLAQEEESEAKRLAIMMMKKREKYLYQKIMFGKRRK

SEQ ID NO: 2230 - protein, 85 aa, Homo sapiens
VLEGNPEVGSPRTSDLQHRGNKGSCVLSSPGEDAQPGEEPIKYGELIVLGCCEEGGEETEAQRGEVTGPRAHSCYNGCLASGDKG

SEQ ID NO: 2231 - protein, 85 aa, Homo sapiens
RRRSRLALSRRSHANGVKPDVMHHISTPLVSKALSNRGQHSISYTLSRSHSVIVEYTHDSDTDMFQIGRSTENMIDFVVTDTSPG

SEQ ID NO: 2232 - protein, 85 aa, Homo sapiens
GGAAEGPSAQSTISRYACRILCDRRPPYTARIYAAGFDASSNIFLGERAAKWRTPDGLMDGLTTNGVLVMHPAGGFSEDSAPGVW

SEQ ID NO: 2233 - protein, 85 aa, Homo sapiens
REISVCGNVYTLRDSRSAQQRGKLVENESNVLQDGSLIDLCGATLLWRTPAGLLRAPTLKQLEAQRQEANAARPQCPVGLSTLAF

SEQ ID NO: 2234 - protein, 85 aa, Homo sapiens
PSPARGRTAPDKQQPWVYVRCGHVHGYHGWGCRRERGPQERECPLCRLVGPYVPLWLGQEAGLCLDPGPPSHAFAPCGHVCSEKT

SEQ ID NO: 2235 - protein, 84 aa, Homo sapiens
LCRLVGPYVPLWLGQEAGLCLDPGPPSHAFAPCGHVCSEKTARYWAQTPLPHGTHAFHAACPFCGAWLTGEHGCVRLIFQGPLD

SEQ ID NO: 2236 - protein, 85 aa, Homo sapiens
YGELIVLGCCEEGGEETEAQRGEVTGPRAHSCYNGCLASGDKGRRRSRLALSRRSHANGVKPDVMHHISTPLVSKALSNRGQHSI

SEQ ID NO: 2237 - protein, 85 aa, Homo sapiens
SYTLSRSHSVIVEYTHDSDTDMFQIGRSTENMIDFVVTDTSPGGGAAEGPSAQSTISRYACRILCDRRPPYTARIYAAGFDASSN

SEQ ID NO: 2238 - protein, 85 aa, Homo sapiens
IFLGERAAKWRTPDGLMDGLTTNGVLVMHPAGGFSEDSAPGVWREISVCGNVYTLRDSRSAQQRGKLVENESNVLQDGSLIDLCG

SEQ ID NO: 2239 - protein, 85 aa, Homo sapiens
ATLLWRTPAGLLRAPTLKQLEAQRQEANAARPQCPVGLSTLAFPSPARGRTAPDKQQPWVYVRCGHVHGYHGWGCRRERGPQERE

SEQ ID NO: 2240 - protein, 85 aa, Homo sapiens
CPLCRLVGPYVPLWLGQEAGLCLDPGPPSHAFAPCGHVCSEKTARYWAQTPLPHGTHAFHAACPFCGAWLTGEHGCVRLIFQGPL

SEQ ID NO: 2241 - protein, 85 aa, Homo sapiens
ELRVGNRYRLGRKIGSGSFGDIYLGTDIAAGEEVAIKLECVKTKHPQLHIESKIYKMMQGGVGIPTIRWCGAEGDYNVMVMELLG

SEQ ID NO: 2242 - protein, 85 aa, Homo sapiens
PSLEDLFNFCSRKFSLKTVLLLADQMISRIEYIHSKNFIHRDVKPDNFLMGLGKKGNLVYIIDFGLAKKYRDARTHQHIPYRENK

SEQ ID NO: 2243 - protein, 85 aa, Homo sapiens
NLTGTARYASINTHLGIEQSRRDDLESLGYVLMYFNLGSLPWQGLKAATKRQKYERISEKKMSTPIEVLCKGYPSEFATYLNFCR

SEQ ID NO: 2244 - protein, 85 aa, Homo sapiens
SLRFDDKPDYSYLRQLFRNLFHRQGFSYDYVFDWNMLKFGASRAADDAERERRDREERLRHSRNPATRGLPSTASGRLRGTQEVA

SEQ ID NO: 2245 - protein, 84 aa, Homo sapiens
GRLRGTQEVAPPTPLTPTSHTANTSPRPVSGMERERKVSMRLHRGAPVNISSSDLTGRQDTSRMSTSQIPGRVASSGLQSVVHR

SEQ ID NO: 2246 - protein, 85 aa, Homo sapiens
TKHPQLHIESKIYKMMQGGVGIPTIRWCGAEGDYNVMVMELLGPSLEDLFNFCSRKFSLKTVLLLADQMISRIEYIHSKNFIHRD

SEQ ID NO: 2247 - protein, 85 aa, Homo sapiens
VKPDNFLMGLGKKGNLVYIIDFGLAKKYRDARTHQHIPYRENKNLTGTARYASINTHLGIEQSRRDDLESLGYVLMYFNLGSLPW

SEQ ID NO: 2248 - protein, 85 aa, Homo sapiens
QGLKAATKRQKYERISEKKMSTPIEVLCKGYPSEFATYLNFCRSLRFDDKPDYSYLRQLFRNLFHRQGFSYDYVFDWNMLKFGAS

SEQ ID NO: 2249 - protein, 85 aa, Homo sapiens
RAADDAERERRDREERLRHSRNPATRGLPSTASGRLRGTQEVAPPTPLTPTSHTANTSPRPVSGMERERKVSMRLHRGAPVNISS

SEQ ID NO: 2250 - protein, 85 aa, Homo sapiens
EDSMDMDMSPLRPQNYLFGCELKADKDYHFKVDNDENEHQLSLRTVSLGAGAKDELHIVEAEAMNYEGSPIKVTLATLKMSVQPT

SEQ ID NO: 2251 - protein, 85 aa, Homo sapiens
VSLGGFEITPPVVLRLKCGSGPVHISGQHLVAVEEDAESEDEEEEDVKLLSISGKRSAPGGGSKVPQKKVKLAADEDDDDDDEED

SEQ ID NO: 2252 - protein, 85 aa, Homo sapiens
DDEDDDDDDFDDEEAEEKAPVKKSIRDTPAKNAQKSNQNGKDSKPSSTPRSKGQESFKKQEKTPKTPKGPSSVEDIKAKMQASIE

SEQ ID NO: 2253 - protein, 84 aa, Homo sapiens
GKDSKPSSTPRSKGQESFKKQEKTPKTPKGPSSVEDIKAKMQASIEKGGSLPKVEAKFINYVKNCFRMTDQEAIQDLWQWRKSL

SEQ ID NO: 2254 - protein, 85 aa, Homo sapiens
LRTVSLGAGAKDELHIVEAEAMNYEGSPIKVTLATLKMSVQPTVSLGGFEITPPVVLRLKCGSGPVHISGQHLVAVEEDAESEDE

SEQ ID NO: 2255 - protein, 85 aa, Homo sapiens
EEEDVKLLSISGKRSAPGGGSKVPQKKVKLAADEDDDDDDEEDDDEDDDDDDFDDEEAEEKAPVKKSIRDTPAKNAQKSNQNGKD

SEQ ID NO: 2256 - protein, 85 aa, Homo sapiens
AEMSELSVAQKPEKLLERCKYWPACKNGDECAYHHPISPCKAFPNCKFAEKCLFVHPNCKYDAKCTKPDCPFTHVSRRIPVLSPK

SEQ ID NO: 2257 - protein, 84 aa, Homo sapiens
CPFTHVSRRIPVLSPKPVAPPAPPSSSQLCRYFPACKKMECPFYHPKHCRFNTQCTRPDCTFYHPTINVPPRHALKWIRPQTSE

SEQ ID NO: 2258 - protein, 85 aa, Homo sapiens
APRTRTSQEELLAEVVQGQSRTPRISPPIKEEETKGDSVEKNQAEMSELSVAQKPEKLLERCKYWPACKNGDECAYHHPISPCKA

SEQ ID NO: 2259 - protein, 85 aa, Homo sapiens
FPNCKFAEKCLFVHPNCKYDAKCTKPDCPFTHVSRRIPVLSPKPVAPPAPPSSSQLCRYFPACKKMECPFYHPKHCRFNTQCTRP

SEQ ID NO: 2260 - protein, 85 aa, Homo sapiens
VEEVQKHSVHTLVFRSLKRTHDMFVADNGKPVPLDEESHKRKMAIKLRNEYGPVLHMPTSKENLKEKGPQNATDSYVHKQYPANQ

SEQ ID NO: 2261 - protein, 85 aa, Homo sapiens
GQEVEYFVAGVALTADTKIQRMPSESAAQSLAVALPLQTKADANRTAPSGSEYRHPGASDRPQPTAMNSIVMETGNTKNSALMAK

SEQ ID NO: 2262 - protein, 85 aa, Homo sapiens
KAPTMPKPQWHPPWKLYRVISGHLGWVRCIAVEPGNQWFVTGSADRTIKIWDLASGKLKLSLTGHISTVRGVIVSTRSPYLFSCG

SEQ ID NO: 2263 - protein, 85 aa, Homo sapiens
EDKQVKCWDLEYNKVIRHYHGHLSAVYGLDLHPTIDVLVTCSRDSTARIWDVRTKASVHTLSGHTNAVATVRCQAAEPQIITGSH

SEQ ID NO: 2264 - protein, 85 aa, Homo sapiens
DTTIRLWDLVAGKTRVTLTNHKKSVRAVVLHPRHYTFASGSPDNIKQWKFPDGSFIQNLSGHNAIINTLTVNSDGVLVSGADNGT

SEQ ID NO: 2265 - protein, 84 aa, Homo sapiens
ADNGTMHLWDWRTGYNFQRVHAAVQPGSLDSESGIFACAFDQSESRLLTAEADKTIKVYREDDTATEETHPVSWKPEIIKRKRF

SEQ ID NO: 2266 - protein, 85 aa, Homo sapiens
MAIKLRNEYGPVLHMPTSKENLKEKGPQNATDSYVHKQYPANQGQEVEYFVAGVALTADTKIQRMPSESAAQSLAVALPLQTKAD

SEQ ID NO: 2267 - protein, 85 aa, Homo sapiens
ANRTAPSGSEYRHPGASDRPQPTAMNSIVMETGNTKNSALMAKKAPTMPKPQWHPPWKLYRVISGHLGWVRCIAVEPGNQWFVTG

SEQ ID NO: 2268 - protein, 85 aa, Homo sapiens
SADRTIKIWDLASGKLKLSLTGHISTVRGVIVSTRSPYLFSCGEDKQVKCWDLEYNKVIRHYHGHLSAVYGLDLHPTIDVLVTCS

SEQ ID NO: 2269 - protein, 85 aa, Homo sapiens
RDSTARIWDVRTKASVHTLSGHTNAVATVRCQAAEPQIITGSHDTTIRLWDLVAGKTRVTLTNHKKSVRAVVLHPRHYTFASGSP

SEQ ID NO: 2270 - protein, 85 aa, Homo sapiens
DNIKQWKFPDGSFIQNLSGHNAIINTLTVNSDGVLVSGADNGTMHLWDWRTGYNFQRVHAAVQPGSLDSESGIFACAFDQSESRL

SEQ ID NO: 2271 - protein, 85 aa, Homo sapiens
EPPYSLTAHYDEFQEVKYVSRCGAGGARGASLPPGFPLGAARSATGARSGLPRWNRREVCLLSGLVFAAGLCAILAAMLALKYLG

SEQ ID NO: 2272 - protein, 85 aa, Homo sapiens
PVAAGGGACPEGCPERKAFARAARFLAANLDASIDPCQDFYSFACGGWLRRHAIPDDKLTYGTIAAIGEQNEERLRRLLARPGGG

SEQ ID NO: 2273 - protein, 85 aa, Homo sapiens
PGGAAQRKVRAFFRSCLDMREIERLGPRPMLEVIEDCGGWDLGGAEERPGVAARWDLNRLLYKAQGVYSAAALFSLTVSLDDRNS

SEQ ID NO: 2274 - protein, 85 aa, Homo sapiens
SRYVIRIDQDGLTLPERTLYLAQDEDSEKILAAYRVFMERVLSLLGADAVEQKAQEILQVEQQLANITVSEHDDLRRDVSSMYNK

SEQ ID NO: 2275 - protein, 85 aa, Homo sapiens
VTLGQLQKITPHLRWKWLLDQIFQEDFSEEEEVVLLATDYMQQVSQLIRSTPHRVLHNYLVWRVVVVLSEHLSPPFREALHELAQ

SEQ ID NO: 2276 - protein, 85 aa, Homo sapiens
EMEGSDKPQELARVCLGQANRHFGMALGALFVHEHFSAASKAKVQQLVEDIKYILGQRLEELDWMDAETRAAARAKLQYMMVMVG

SEQ ID NO: 2277 - protein, 85 aa, Homo sapiens
YPDFLLKPDAVDKEYEFEVHEKTYFKNILNSIRFSIQLSVKKIRQEVDKSTWLLPPQALNAYYLPNKNQMVFPAGILQPTLYDPD

SEQ ID NO: 2278 - protein, 85 aa, Homo sapiens
FPQSLNYGGIGTIIGHELTHGYDDWGGQYDRSGNLLHWWTEASYSRFLRKAECIVRLYDNFTVYNQRVNGKHTLGENIADMGGLK

SEQ ID NO: 2279 - protein, 85 aa, Homo sapiens
MAYHAYQKWVREHGPEHPLPRLKYTHDQLFFIAFAQNWCIKRRSQSIYLQVLTDKHAPEHYRVLGSVSQFEEFGRAFHCPKDSPM

SEQ ID NO: 2280 - protein, 84 aa, Homo sapiens
REHGPEHPLPRLKYTHDQLFFIAFAQNWCIKRRSQSIYLQVLTDKHAPEHYRVLGSVSQFEEFGRAFHCPKDSPMNPAHKCSVW

SEQ ID NO: 2281 - protein, 85 aa, Homo sapiens
SATGARSGLPRWNRREVCLLSGLVFAAGLCAILAAMLALKYLGPVAAGGGACPEGCPERKAFARAARFLAANLDASIDPCQDFYS

SEQ ID NO: 2282 - protein, 85 aa, Homo sapiens
FACGGWLRRHAIPDDKLTYGTIAAIGEQNEERLRRLLARPGGGPGGAAQRKVRAFFRSCLDMREIERLGPRPMLEVIEDCGGWDL

SEQ ID NO: 2283 - protein, 85 aa, Homo sapiens
GGAEERPGVAARWDLNRLLYKAQGVYSAAALFSLTVSLDDRNSSRYVIRIDQDGLTLPERTLYLAQDEDSEKILAAYRVFMERVL

SEQ ID NO: 2284 - protein, 85 aa, Homo sapiens
SLLGADAVEQKAQEILQVEQQLANITVSEHDDLRRDVSSMYNKVTLGQLQKITPHLRWKWLLDQIFQEDFSEEEEVVLLATDYMQ

SEQ ID NO: 2285 - protein, 85 aa, Homo sapiens
QVSQLIRSTPHRVLHNYLVWRVVVVLSEHLSPPFREALHELAQEMEGSDKPQELARVCLGQANRHFGMALGALFVHEHFSAASKA

SEQ ID NO: 2286 - protein, 85 aa, Homo sapiens
KVQQLVEDIKYILGQRLEELDWMDAETRAAARAKLQYMMVMVGYPDFLLKPDAVDKEYEFEVHEKTYFKNILNSIRFSIQLSVKK

SEQ ID NO: 2287 - protein, 85 aa, Homo sapiens
IRQEVDKSTWLLPPQALNAYYLPNKNQMVFPAGILQPTLYDPDFPQSLNYGGIGTIIGHELTHGYDDWGGQYDRSGNLLHWWTEA

SEQ ID NO: 2288 - protein, 85 aa, Homo sapiens
SYSRFLRKAECIVRLYDNFTVYNQRVNGKHTLGENIADMGGLKLAYHAYQKWVREHGPEHPLPRLKYTHDQLFFIAFAQNWCIKR

SEQ ID NO: 2289 - protein, 85 aa, Homo sapiens
AAPVRLGRKRPLPACPNPLFVRWLTEWRDEATRSRRRTRFVFQKALRSLRRYPLPLRSGKEAKILQHFGDGLCRMLDERLQRHRT

SEQ ID NO: 2290 - protein, 85 aa, Homo sapiens
SGGDHAPDSPSGENSPAPQGRLAEVQDSSMPVPAQPKAGGSGSYWPARHSGARVILLVLYREHLNPNGHHFLTKEELLQRCAQKS

SEQ ID NO: 2291 - protein, 85 aa, Homo sapiens
PRVAPGSARPWPALRSLLHRNLVLRTHQPARYSLTPEGLELAQKLAESEGLSLLNVGIGPKEPPGEETAVPGAASAELASEAGVQ

SEQ ID NO: 2292 - protein, 85 aa, Homo sapiens
QQPLELRPGEYRVLLCVDIGETRGGGHRPELLRELQRLHVTHTVRKLHVGDFVWVAQETNPRDPANPGELVLDHIVERKRLDDLC

SEQ ID NO: 2293 - protein, 85 aa, Homo sapiens
SSIIDGRFREQKFRLKRCGLERRVYLVEEHGSVHNLSLPESTLLQAVTNTQVIDGFFVKRTADIKESAAYLALLTRGLQRLYQGH

SEQ ID NO: 2294 - protein, 85 aa, Homo sapiens
TLRSRPWGTPGNPESGAMTSPNPLCSLLTFSDFNAGAIKNKAQSVREVFARQLMQVRGVSGEKAAALVDRYSTPASLLAAYDACA

SEQ ID NO: 2295 - protein, 84 aa, Homo sapiens
AQSVREVFARQLMQVRGVSGEKAAALVDRYSTPASLLAAYDACATPKEQETLLSTIKCGRLQRNLGPALSRTLSQLYCSYGPLT

SEQ ID NO: 2296 - protein, 85 aa, Homo sapiens
QKALRSLRRYPLPLRSGKEAKILQHFGDGLCRMLDERLQRHRTSGGDHAPDSPSGENSPAPQGRLAEVQDSSMPVPAQPKAGGSG

SEQ ID NO: 2297 - protein, 85 aa, Homo sapiens
SYWPARHSGARVILLVLYREHLNPNGHHFLTKEELLQRCAQKSPRVAPGSARPWPALRSLLHRNLVLRTHQPARYSLTPEGLELA

SEQ ID NO: 2298 - protein, 85 aa, Homo sapiens
QKLAESEGLSLLNVGIGPKEPPGEETAVPGAASAELASEAGVQQQPLELRPGEYRVLLCVDIGETRGGGHRPELLRELQRLHVTH

SEQ ID NO: 2299 - protein, 85 aa, Homo sapiens
TVRKLHVGDFVWVAQETNPRDPANPGELVLDHIVERKRLDDLCSSIIDGRFREQKFRLKRCGLERRVYLVEEHGSVHNLSLPEST

SEQ ID NO: 2300 - protein, 85 aa, Homo sapiens
MLQAVTNTQVIDGFFVKRTADIKESAAYLALLTRGLQRLYQGHTLRSRPWGTPGNPESGAMTSPNPLCSLLTFSDFNAGAIKNKA

SEQ ID NO: 2301 - protein, 85 aa, Homo sapiens
AEVGEDSGARALLALRSAPCSPVLCAAAAAAAFPAAAPPPAPAQPQPPPGPPPPPPPPLPPGAIAGAGSSGGSSGVSGDSAVAGA

SEQ ID NO: 2302 - protein, 85 aa, Homo sapiens
APALVAAAAASVRQSPGPALARLEGREFEFLMRQPSVTIGRNSSQGSVDLSMGLSSFISRRHLQLSFQEPHFYLRCLGKNGVFVD

SEQ ID NO: 2303 - protein, 85 aa, Homo sapiens
GAFQRRGAPALQLPKQCTFRFPSTAIKIQFTSLYHKEEAPASPLRPLYPQISPLKIHIPEPDLRSMVSPVPSPTGTISVPNSCPA

SEQ ID NO: 2304 - protein, 85 aa, Homo sapiens
SPRGAGSSSYRFVQNVTSDLQLAAEFAAKAASEQQADTSGGDSPKDESKPPFSYAQLIVQAISSAQDRQLTLSGIYAHITKHYPY

SEQ ID NO: 2305 - protein, 85 aa, Homo sapiens
YRTADKGWQNSIRHNLSLNRYFIKVPRSQEEPGKGSFWRIDPASEAKLVEQAFRKRRQRGVSCFRTPFGPLSSRSAPASPTHPGL

SEQ ID NO: 2306 - protein, 85 aa, Homo sapiens
MSPRSGGLQTPECLSREGSPIPHDPEFGSKLASVPEYRYSQSAPGSPVSAQPVIMAVPPRPSSLVAKPVAYMPASIVTSQQPAGH

SEQ ID NO: 2307 - protein, 85 aa, Homo sapiens
AIHVVQQAPTVTMVRVVTTSANSANGYILTSQGAAGGSHDAAGAAVLDLGSEARGLEEKPTIAFATIPAAGGVIQTVASQMAPGV

SEQ ID NO: 2308 - protein, 85 aa, Homo sapiens
PGHTVTILQPATPVTLGQHHLPVRAVTQNGKHAVPTNSLAGNAYALTSPLQLLATQASSSAPVVVTRVCEVGPKEPAAAVAATAT

SEQ ID NO: 2309 - protein, 84 aa, Homo sapiens
ATQASSSAPVVVTRVCEVGPKEPAAAVAATATTTPATATTASASASSTGEPEVKRSRVEEPSGAVTTPAGVIAAAGPQGPGTGE

SEQ ID NO: 2310 - protein, 85 aa, Homo sapiens
AQPQPPPGPPPPPPPPLPPGAIAGAGSSGGSSGVSGDSAVAGAAPALVAAAAASVRQSPGPALARLEGREFEFLMRQPSVTIGRN

SEQ ID NO: 2311 - protein, 85 aa, Homo sapiens
SSQGSVDLSMGLSSFISRRHLQLSFQEPHFYLRCLGKNGVFVDGAFQRRGAPALQLPKQCTFRFPSTAIKIQFTSLYHKEEAPAS

SEQ ID NO: 2312 - protein, 85 aa, Homo sapiens
PLRPLYPQISPLKIHIPEPDLRSMVSPVPSPTGTISVPNSCPASPRGAGSSSYRFVQNVTSDLQLAAEFAAKAASEQQADTSGGD

SEQ ID NO: 2313 - protein, 85 aa, Homo sapiens
SPKDESKPPFSYAQLIVQAISSAQDRQLTLSGIYAHITKHYPYYRTADKGWQNSIRHNLSLNRYFIKVPRSQEEPGKGSFWRIDP

SEQ ID NO: 2314 - protein, 85 aa, Homo sapiens
ASEAKLVEQAFRKRRQRGVSCFRTPFGPLSSRSAPASPTHPGLMSPRSGGLQTPECLSREGSPIPHDPEFGSKLASVPEYRYSQS

SEQ ID NO: 2315 - protein, 85 aa, Homo sapiens
APGSPVSAQPVIMAVPPRPSSLVAKPVAYMPASIVTSQQPAGHAIHVVQQAPTVTMVRVVTTSANSANGYILTSQGAAGGSHDAA

SEQ ID NO: 2316 - protein, 85 aa, Homo sapiens
GAAVLDLGSEARGLEEKPTIAFATIPAAGGVIQTVASQMAPGVPGHTVTILQPATPVTLGQHHLPVRAVTQNGKHAVPTNSLAGN

SEQ ID NO: 2317 - protein, 85 aa, Homo sapiens
AYALTSPLQLLATQASSSAPVVVTRVCEVGPKEPAAAVAATATTTPATATTASASASSTGEPEVKRSRVEEPSGAVTTPAGVIAA

SEQ ID NO: 2318 - protein, 85 aa, Homo sapiens
APDSDPFPEGPLLKLLPLDARDRGTQRCRLGPAALHALGARLGSAVKISLPDGGSCLCTAWPRRDGADGFVQLDPLCASPGAAVG

SEQ ID NO: 2319 - protein, 85 aa, Homo sapiens
ASRSRRSLSLNRLLLVPCPPLRRVAVWPVLRERAGAPGARNTAAVLEAAQELLRNRPISLGHVVVAPPGAPGLVAALHIVGGTPS

SEQ ID NO: 2320 - protein, 85 aa, Homo sapiens
PDPAGLVTPRTRVSLGGEPPSEAQPQPEVPLGGLSEAADSLRELLRLPLRYPRALTALGLAVPRGVLLAGPPGVGKTQLVRAVAR

SEQ ID NO: 2321 - protein, 85 aa, Homo sapiens
EAGAELLAVSAPALQGSRPGETEENVRRVFQRARELASRGPSLLFLDEMDALCPQRGSRAPESRVVAQVLTLLDGASGDREVVVV

SEQ ID NO: 2322 - protein, 85 aa, Homo sapiens
GATNRPDALDPALRRPGRFDREVVIGTPTLKQRKEILQVITSKMPISSHVDLGLLAEMTVGYVGADLTALCREAAMHALLHSEKN

SEQ ID NO: 2323 - protein, 85 aa, Homo sapiens
QDNPVIDEIDFLEAFKNIQPSSFRSVIGLMDIKPVDWEEIGGLEDVKLKLKQSIEWPLKFPWEFVRMGLTQPKGVLLYGPPGCAK

SEQ ID NO: 2324 - protein, 85 aa, Homo sapiens
TTLVRALATSCHCSFVSVSGADLFSPFVGDSEKVLSQIFRQARASTPAILFLDEIDSILGARSASKTGCDVQERVLSVLLNELDG

SEQ ID NO: 2325 - protein, 85 aa, Homo sapiens
VGLKTIERRGSKSSQQEFQEVFNRSVMIIAATNRPDVLDTALLRPGRLDKIIYIPPPDHKGRLSILKVCTKTMPIGPDVSLENLA

SEQ ID NO: 2326 - protein, 84 aa, Homo sapiens
PIGPDVSLENLAAETCFFSGADLRNLCTEAALLALQENGLDATTVKQEHFLKSLKTVKPSLSCKDLALYENLFKKEGFSNVEGI

SEQ ID NO: 2327 - protein, 85 aa, Homo sapiens
GSAVKISLPDGGSCLCTAWPRRDGADGFVQLDPLCASPGAAVGASRSRRSLSLNRLLLVPCPPLRRVAVWPVLRERAGAPGARNT

SEQ ID NO: 2328 - protein, 85 aa, Homo sapiens
AAVLEAAQELLRNRPISLGHVVVAPPGAPGLVAALHIVGGTPSPDPAGLVTPRTRVSLGGEPPSEAQPQPEVPLGGLSEAADSLR

SEQ ID NO: 2329 - protein, 85 aa, Homo sapiens
ELLRLPLRYPRALTALGLAVPRGVLLAGPPGVGKTQLVRAVAREAGAELLAVSAPALQGSRPGETEENVRRVFQRARELASRGPS

SEQ ID NO: 2330 - protein, 85 aa, Homo sapiens
LLFLDEMDALCPQRGSRAPESRVVAQVLTLLDGASGDREVVVVGATNRPDALDPALRRPGRFDREVVIGTPTLKQRKEILQVITS

SEQ ID NO: 2331 - protein, 85 aa, Homo sapiens
KMPISSHVDLGLLAEMTVGYVGADLTALCREAAMHALLHSEKNQDNPVIDEIDFLEAFKNIQPSSFRSVIGLMDIKPVDWEEIGG

SEQ ID NO: 2332 - protein, 85 aa, Homo sapiens
LEDVKLKLKQSIEWPLKFPWEFVRMGLTQPKGVLLYGPPGCAKTTLVRALATSCHCSFVSVSGADLFSPFVGDSEKVLSQIFRQA

SEQ ID NO: 2333 - protein, 85 aa, Homo sapiens
RASTPAILFLDEIDSILGARSASKTGCDVQERVLSVLLNELDGVGLKTIERRGSKSSQQEFQEVFNRSVMIIAATNRPDVLDTAL

SEQ ID NO: 2334 - protein, 85 aa, Homo sapiens
LRPGRLDKIIYIPPPDHKGRLSILKVCTKTMPIGPDVSLENLAAETCFFSGADLRNLCTEAALLALQENGLDATTVKQEHFLKSL

SEQ ID NO: 2335 - protein, 85 aa, Homo sapiens
AKGDPKKPKGKMSAYAFFVQTCREEHKKKNPEVPVNFAEFSKKCSERWKTMSGKEKSKFDEMAKADKVRYDREMKDYGPAKGGKK

SEQ ID NO: 2336 - protein, 85 aa, Homo sapiens
KKDPNAPKRPPSGFFLFCSEFRPKIKSTNPGISIGDVAKKLGEMWNNLNDSEKQPYITKAAKLKEKYEKDVADYKSKGKFDGAKG

SEQ ID NO: 2337 - protein, 84 aa, Homo sapiens
GISIGDVAKKLGEMWNNLNDSEKQPYITKAAKLKEKYEKDVADYKSKGKFDGAKGPAKVARKKVEEEDEEEEEEEEEEEEEEDE

SEQ ID NO: 2338 - protein, 85 aa, Homo sapiens
KCSERWKTMSGKEKSKFDEMAKADKVRYDREMKDYGPAKGGKKKKDPNAPKRPPSGFFLFCSEFRPKIKSTNPGISIGDVAKKLG

SEQ ID NO: 2339 - protein, 85 aa, Homo sapiens
ASMPPTPEAQGPILFEDLAVYFSQEECVTLHPAQRSLSKDGTKESLEDAALMGEEGKPEINQQLSLESMELDELALEKYPIAAPL

SEQ ID NO: 2340 - protein, 85 aa, Homo sapiens
VPYPEKSSEDGVGNPEAKILSGTPTYKRRVISLLVTIENHTPLVELSEYLGTNTLSEILDSPWEGAKNVYKCPECDQNFSDHSYL

SEQ ID NO: 2341 - protein, 85 aa, Homo sapiens
VLHQKIHSGEKKHKCGDCGKIFNHRANLRTHRRIHTGEKPYKCAKCSASFRQHSHLSRHMNSHVKEKPYTCSICGRGFMWLPGLA

SEQ ID NO: 2342 - protein, 85 aa, Homo sapiens
QHQKSHSAENTYESTNCDKHFNEKPNLALPEETFVSGPQYQHTKCMKSFRQSLYPALSEKSHDEDSERCSDDGDNFFSFSKFKPL

SEQ ID NO: 2343 - protein, 84 aa, Homo sapiens
LQCPDCDMTFPCFSELISHQNIHTEERPHKCKTCEESFALDSELACHQKSHMLAEPFKCTVCGKTFKSNLHLITHKRTHIKNTT

SEQ ID NO: 2344 - protein, 85 aa, Homo sapiens
KESLEDAALMGEEGKPEINQQLSLESMELDELALEKYPIAAPLVPYPEKSSEDGVGNPEAKILSGTPTYKRRVISLLVTIENHTP

SEQ ID NO: 2345 - protein, 85 aa, Homo sapiens
LVELSEYLGTNTLSEILDSPWEGAKNVYKCPECDQNFSDHSYLVLHQKIHSGEKKHKCGDCGKIFNHRANLRTHRRIHTGEKPYK

SEQ ID NO: 2346 - protein, 85 aa, Homo sapiens
CAKCSASFRQHSHLSRHMNSHVKEKPYTCSICGRGFMWLPGLAQHQKSHSAENTYESTNCDKHFNEKPNLALPEETFVSGPQYQH

SEQ ID NO: 2347 - protein, 85 aa, Homo sapiens
TKCMKSFRQSLYPALSEKSHDEDSERCSDDGDNFFSFSKFKPLQCPDCDMTFPCFSELISHQNIHTEERPHKCKTCEESFALDSE

SEQ ID NO: 2348 - protein, 85 aa, Homo sapiens
AAVAMTPNPVQTLQEEAVCAICLDYFTDPVSIGCGHNFCRVCVTQLWGGEDEEDRDELDREEEEEDGEEEEVEAVGAGAGWDTPM

SEQ ID NO: 2349 - protein, 85 aa, Homo sapiens
RDEDYEGDMEEEVEEEEEGVFWTSGMSRSSWDNMDYVWEEEDEEEDLDYYLGDMEEEDLRGEDEEDEEEVLEEVEEEDLDPVTPL

SEQ ID NO: 2350 - protein, 85 aa, Homo sapiens
PPPPAPRRCFTCPQCRKSFPRRSFRPNLQLANMVQVIRQMHPTPGRGSRVTDQGICPKHQEALKLFCEVDEEAICVVCRESRSHK

SEQ ID NO: 2351 - protein, 85 aa, Homo sapiens
QHSVVPLEEVVQEYKAKLQGHVEPLRKHLEAVQKMKAKEERRVTELKSQMKSELAAVASEFGRLTRFLAEEQAGLERRLREMHEA

SEQ ID NO: 2352 - protein, 85 aa, Homo sapiens
QLGRAGAAASRLAEQAAQLSRLLAEAQERSQQGGLRLLQDIKETFNRCEEVQLQPPEVWSPDPCQPHSHDFLTDAIVRKMSRMFC

SEQ ID NO: 2353 - protein, 85 aa, Homo sapiens
QAARVDLTLDPDTAHPALMLSPDRRGVRLAERRQEVADHPKRFSADCCVLGAQGFRSGRHYWEVEVGGRRGWAVGAARESTHHKE

SEQ ID NO: 2354 - protein, 85 aa, Homo sapiens
KVGPGGSSVGSGDASSSRHHHRRRRLHLPQQPLLQREVWCVGTNGKRYQAQSSTEQTLLSPSEKPRRFGVYLDYEAGRLGFYNAE

SEQ ID NO: 2355 - protein, 84 aa, Homo sapiens
REVWCVGTNGKRYQAQSSTEQTLLSPSEKPRRFGVYLDYEAGRLGFYNAETLAHVHTFSAAFLGERVFPFFRVLSKGTRIKLCP

SEQ ID NO: 2356 - protein, 85 aa, Homo sapiens
VTQLWGGEDEEDRDELDREEEEEDGEEEEVEAVGAGAGWDTPMRDEDYEGDMEEEVEEEEEGVFWTSGMSRSSWDNMDYVWEEED

SEQ ID NO: 2357 - protein, 85 aa, Homo sapiens
EEEDLDYYLGDMEEEDLRGEDEEDEEEVLEEVEEEDLDPVTPLPPPPAPRRCFTCPQCRKSFPRRSFRPNLQLANMVQVIRQMHP

SEQ ID NO: 2358 - protein, 85 aa, Homo sapiens
TPGRGSRVTDQGICPKHQEALKLFCEVDEEAICVVCRESRSHKQHSVVPLEEVVQEYKAKLQGHVEPLRKHLEAVQKMKAKEERR

SEQ ID NO: 2359 - protein, 85 aa, Homo sapiens
VTELKSQMKSELAAVASEFGRLTRFLAEEQAGLERRLREMHEAQLGRAGAAASRLAEQAAQLSRLLAEAQERSQQGGLRLLQDIK

SEQ ID NO: 2360 - protein, 85 aa, Homo sapiens
ETFNRCEEVQLQPPEVWSPDPCQPHSHDFLTDAIVRKMSRMFCQAARVDLTLDPDTAHPALMLSPDRRGVRLAERRQEVADHPKR

SEQ ID NO: 2361 - protein, 85 aa, Homo sapiens
FSADCCVLGAQGFRSGRHYWEVEVGGRRGWAVGAARESTHHKEKVGPGGSSVGSGDASSSRHHHRRRRLHLPQQPLLQREVWCVG

SEQ ID NO: 2362 - protein, 85 aa, Homo sapiens
SSSVEQKKGPTRQRKCGFCKSNRDKECGQLLISENQKVAAHHKCMLFSSALVSSHSDNESLGGFSIEDVQKEIKRGTKLMCSLCH

SEQ ID NO: 2363 - protein, 85 aa, Homo sapiens
CPGATIGCDVKTCHRTYHYHCALHDKAQIREKPSQGIYMVYCRKHKKTAHNSEADLEESFNEHELEPSSPKSKKKSRKGRPRKTN

SEQ ID NO: 2364 - protein, 85 aa, Homo sapiens
FKGLSEDTRSTSSHGTDEMESSSYRDRSPHRSSPSDTRPKCGFCHVGEEENEARGKLHIFNAKKAAAHYKCMLFSSGTVQLTTTS

SEQ ID NO: 2365 - protein, 85 aa, Homo sapiens
RAEFGDFDIKTVLQEIKRGKRMKCTLCSQPGATIGCEIKACVKTYHYHCGVQDKAKYIENMSRGIYKLYCKNHSGNDERDEEDEE

SEQ ID NO: 2366 - protein, 84 aa, Homo sapiens
LCSQPGATIGCEIKACVKTYHYHCGVQDKAKYIENMSRGIYKLYCKNHSGNDERDEEDEERESKSRGKVEIDQQQLTQQQLNGN

SEQ ID NO: 2367 - protein, 85 aa, Homo sapiens
KCMLFSSALVSSHSDNESLGGFSIEDVQKEIKRGTKLMCSLCHCPGATIGCDVKTCHRTYHYHCALHDKAQIREKPSQGIYMVYC

SEQ ID NO: 2368 - protein, 85 aa, Homo sapiens
RKHKKTAHNSEADLEESFNEHELEPSSPKSKKKSRKGRPRKTNFKGLSEDTRSTSSHGTDEMESSSYRDRSPHRSSPSDTRPKCG

SEQ ID NO: 2369 - protein, 85 aa, Homo sapiens
FCHVGEEENEARGKLHIFNAKKAAAHYKCMLFSSGTVQLTTTSRAEFGDFDIKTVLQEIKRGKRMKCTLCSQPGATIGCEIKACV

SEQ ID NO: 2370 - protein, 85 aa, Homo sapiens
DVDAEREKITQEIKELERILDPGSSGSHVEISESSLESDSEADSLPSEDLDPADPPISEEERWGEASNDEDDPKDKTLPEDPETC

SEQ ID NO: 2371 - protein, 85 aa, Homo sapiens
MQLNMVYQEVIQEKLAEANLLLAQNREQQEELMRDLAGSKGTKVKDGKSLPPSTYMGHFMKPYFKDKVTGVGPPANEDTREKAAQ

SEQ ID NO: 2372 - protein, 85 aa, Homo sapiens
GIKAFEELLVTKWKNWEKALLRKSVVSDRLQRLLQPKLLKLEYLHQKQSKVSSELERQALEKQGREAEKEIQDINQLPEEALLGN

SEQ ID NO: 2373 - protein, 85 aa, Homo sapiens
RLDSHDWEKISNINFEGSRSAEEIRKFWQNSEHPSINKQEWSREEEERLQAIAAAHGHLEWQKIAEELGTSRSAFQCLQKFQQHN

SEQ ID NO: 2374 - protein, 85 aa, Homo sapiens
KALKRKEWTEEEDRMLTQLVQEMRVGSHIPYRRIVYYMEGRDSMQLIYRWTKSLDPGLKKGYWAPEEDAKLLQAVAKYGEQDWFK

SEQ ID NO: 2375 - protein, 85 aa, Homo sapiens
IREEVPGRSDAQCRDRYLRRLHFSLKKGRWNLKEEEQLIELIEKYGVGHWAKIASELPHRSGSQCLSKWKIMMGKKQGLRRRRRR

SEQ ID NO: 2376 - protein, 85 aa, Homo sapiens
ARHSVRWSSTSSSGSSSGSSGGSSSSSSSSSEEDEPEQAQAGEGDRALLSPQYMVPDMDLWVPARQSTSQPWRGGAGAWLGGPAA

SEQ ID NO: 2377 - protein, 85 aa, Homo sapiens
SLSPPKGSSASQGGSKEASTTAAAPGEETSPVQVPARAHGPVPRSAQASHSADTRPAGAEKQALEGGRRLLTVPVETVLRVLRAN

SEQ ID NO: 2378 - protein, 85 aa, Homo sapiens
TAARSCTQKEQLRQPPLPTSSPGVSSGDSVARSHVQWLRHRATQSGQRRWRHALHRRLLNRRLLLAVTPWVGDVVVPCTQASQRP

SEQ ID NO: 2379 - protein, 85 aa, Homo sapiens
AVVQTQADGLREQLQQARLASTPVFTLFTQLFHIDTAGCLEVVRERKALPPRLPQAGARDPPVHLLQASSSAQSTPGHLFPNVPA

SEQ ID NO: 2380 - protein, 85 aa, Homo sapiens
QEASKSASHKGSRRLASSRVERTLPQASLLASTGPRPKPKTVSELLQEKRLQEARAREATRGPVVLPSQLLVSSSVILQPPLPHT

SEQ ID NO: 2381 - protein, 85 aa, Homo sapiens
PHGRPAPGPTVLNVPLSGPGAPAAAKPGTSGSWQEAGTSAKDKRLSTMQALPLAPVFSEAEGTAPAASQAPALGPGQISVSCPES

SEQ ID NO: 2382 - protein, 85 aa, Homo sapiens
GLGQSQAPAASRKQGLPEAPPFLPAAPSPTPLPVQPLSLTHIGGPHVATSVPLPVTWVLTAQGLLPVPVPAVVSLPRPAGTPGPA

SEQ ID NO: 2383 - protein, 85 aa, Homo sapiens
GLLATLLPPLTETRAAQGPRAPALSSSWQPPANMNREPEPSCRTDTPAPPTHALSQSPAEADGSVAFVPGEAQVAREIPEPRTSS

SEQ ID NO: 2384 - protein, 85 aa, Homo sapiens
HADPPEAEPPWSGRLPAFGGVIPATEPRGTPGSPSGTQEPRGPLGLEKLPLRQPGPEKGALDLEKPPLPQPGPEKGALDLGLLSQ

SEQ ID NO: 2385 - protein, 85 aa, Homo sapiens
EGEAATQQWLGGQRGVRVPLLGSRLPYQPPALCSLRALSGLLLHKKALEHKATSLVVGGEAERPAGALQASLGLVRGQLQDNPAY

SEQ ID NO: 2386 - protein, 85 aa, Homo sapiens
LLLRARFLAAFTLPALLATLAPQGVRTTLSVPSRVGSESEDEDLLSELELADRDGQPGCTTATCPIQGAPDSGKCSASSCLDTSN

SEQ ID NO: 2387 - protein, 84 aa, Homo sapiens
VRTTLSVPSRVGSESEDEDLLSELELADRDGQPGCTTATCPIQGAPDSGKCSASSCLDTSNDPDDLDVLRTRHARHTRKRRRLV

SEQ ID NO: 2388 - protein, 85 aa, Homo sapiens
DSLPSEDLDPADPPISEEERWGEASNDEDDPKDKTLPEDPETCLQLNMVYQEVIQEKLAEANLLLAQNREQQEELMRDLAGSKGT

SEQ ID NO: 2389 - protein, 85 aa, Homo sapiens
KVKDGKSLPPSTYMGHFMKPYFKDKVTGVGPPANEDTREKAAQGIKAFEELLVTKWKNWEKALLRKSVVSDRLQRLLQPKLLKLE

SEQ ID NO: 2390 - protein, 85 aa, Homo sapiens
YLHQKQSKVSSELERQALEKQGREAEKEIQDINQLPEEALLGNRLDSHDWEKISNINFEGSRSAEEIRKFWQNSEHPSINKQEWS

SEQ ID NO: 2391 - protein, 85 aa, Homo sapiens
REEEERLQAIAAAHGHLEWQKIAEELGTSRSAFQCLQKFQQHNKALKRKEWTEEEDRMLTQLVQEMRVGSHIPYRRIVYYMEGRD

SEQ ID NO: 2392 - protein, 85 aa, Homo sapiens
SMQLIYRWTKSLDPGLKKGYWAPEEDAKLLQAVAKYGEQDWFKIREEVPGRSDAQCRDRYLRRLHFSLKKGRWNLKEEEQLIELI

SEQ ID NO: 2393 - protein, 85 aa, Homo sapiens
EKYGVGHWAKIASELPHRSGSQCLSKWKIMMGKKQGLRRRRRRARHSVRWSSTSSSGSSSGSSGGSSSSSSSSSEEDEPEQAQAG

SEQ ID NO: 2394 - protein, 85 aa, Homo sapiens
EGDRALLSPQYMVPDMDLWVPARQSTSQPWRGGAGAWLGGPAASLSPPKGSSASQGGSKEASTTAAAPGEETSPVQVPARAHGPV

SEQ ID NO: 2395 - protein, 85 aa, Homo sapiens
PRSAQASHSADTRPAGAEKQALEGGRRLLTVPVETVLRVLRANTAARSCTQKEQLRQPPLPTSSPGVSSGDSVARSHVQWLRHRA

SEQ ID NO: 2396 - protein, 85 aa, Homo sapiens
TQSGQRRWRHALHRRLLNRRLLLAVTPWVGDVVVPCTQASQRPAVVQTQADGLREQLQQARLASTPVFTLFTQLFHIDTAGCLEV

SEQ ID NO: 2397 - protein, 85 aa, Homo sapiens
VRERKALPPRLPQAGARDPPVHLLQASSSAQSTPGHLFPNVPAQEASKSASHKGSRRLASSRVERTLPQASLLASTGPRPKPKTV

SEQ ID NO: 2398 - protein, 85 aa, Homo sapiens
SELLQEKRLQEARAREATRGPVVLPSQLLVSSSVILQPPLPHTPHGRPAPGPTVLNVPLSGPGAPAAAKPGTSGSWQEAGTSAKD

SEQ ID NO: 2399 - protein, 85 aa, Homo sapiens
KRLSTMQALPLAPVFSEAEGTAPAASQAPALGPGQISVSCPESGLGQSQAPAASRKQGLPEAPPFLPAAPSPTPLPVQPLSLTHI

SEQ ID NO: 2400 - protein, 85 aa, Homo sapiens
GGPHVATSVPLPVTWVLTAQGLLPVPVPAVVSLPRPAGTPGPAGLLATLLPPLTETRAAQGPRAPALSSSWQPPANMNREPEPSC

SEQ ID NO: 2401 - protein, 85 aa, Homo sapiens
RTDTPAPPTHALSQSPAEADGSVAFVPGEAQVAREIPEPRTSSHADPPEAEPPWSGRLPAFGGVIPATEPRGTPGSPSGTQEPRG

SEQ ID NO: 2402 - protein, 85 aa, Homo sapiens
PLGLEKLPLRQPGPEKGALDLEKPPLPQPGPEKGALDLGLLSQEGEAATQQWLGGQRGVRVPLLGSRLPYQPPALCSLRALSGLL

SEQ ID NO: 2403 - protein, 85 aa, Homo sapiens
LHKKALEHKATSLVVGGEAERPAGALQASLGLVRGQLQDNPAYLLLRARFLAAFTLPALLATLAPQGVRTTLSVPSRVGSESEDE

SEQ ID NO: 2404 - protein, 85 aa, Homo sapiens
KLHCEVEVISRHLPALGLRNRGKGVRAVLSLCQQTSRSQPPVRAFLLISTLKDKRGTRYELRENIEQFFTKFVDEGKATVRLKEP

SEQ ID NO: 2405 - protein, 84 aa, Homo sapiens
RENIEQFFTKFVDEGKATVRLKEPPVDICLSKDSIWLSYHSIPSLPRFGYRKNLCLWKILSELFHSRNYYHESAFCCPHCGLSR

SEQ ID NO: 2406 - protein, 85 aa, Homo sapiens
RAFLLISTLKDKRGTRYELRENIEQFFTKFVDEGKATVRLKEPPVDICLSKDSIWLSYHSIPSLPRFGYRKNLCLWKILSELFHS

SEQ ID NO: 2407 - protein, 85 aa, Homo sapiens
PKSKRDKKVSLTKTAKKGLELKQNLIEELRKCVDTYKYLFIFSVANMRNSKLKDIRNAWKHSRMFFGKNKVMMVALGRSPSDEYK

SEQ ID NO: 2408 - protein, 85 aa, Homo sapiens
DNLHQVSKRLRGEVGLLFTNRTKEEVNEWFTKYTEMDYARAGNKAAFTVSLDPGPLEQFPHSMEPQLRQLGLPTALKRGVVTLLS

SEQ ID NO: 2409 - protein, 84 aa, Homo sapiens
MGLPTALKRGVVTLLSDYEVCKEGDVLTPEQARVLKLFGYEMAEFKVTIKYMWDSQSGRFQQMGDDLPESASESTEESDSEDDD

SEQ ID NO: 2410 - protein, 85 aa, Homo sapiens
SVANMRNSKLKDIRNAWKHSRMFFGKNKVMMVALGRSPSDEYKDNLHQVSKRLRGEVGLLFTNRTKEEVNEWFTKYTEMDYARAG

SEQ ID NO: 2411 - protein, 85 aa, Homo sapiens
NKAAFTVSLDPGPLEQFPHSMEPQLRQLGLPTALKRGVVTLLSDYEVCKEGDVLTPEQARVLKLFGYEMAEFKVTIKYMWDSQSG

SEQ ID NO: 2412 - protein, 85 aa, Homo sapiens
RGLPRKREAWTQPHPLEALYESLRVLEKDTSATSQSVNGSPQAEQPSLESTSKEAFFSRVETFSSLKWAGKPFELSPLVCAKYGW

SEQ ID NO: 2413 - protein, 85 aa, Homo sapiens
VTVECDMLKCSSCQAFLCASLQPAFDFDRYKQRCAELKKALCTAHEKFCFWPDSPSPDRFGMLPLDEPAILVSEFLDRFQSLCHL

SEQ ID NO: 2414 - protein, 85 aa, Homo sapiens
DLQLPSLRPEDLKTMCLTEDKISLLLHLLEDELDHRTDERKTTIKLGSDIQVHVTACILSVCGWACSSSLESMQLSLITCSQCMR

SEQ ID NO: 2415 - protein, 85 aa, Homo sapiens
KVGLWGFQQIESSMTDLDASFGLTSSPIPGLEGRPERLPLVPESPRRMMTRSQDATFSPGSEQAEKSPGPIVSRTRSWDSSSPVD

SEQ ID NO: 2416 - protein, 85 aa, Homo sapiens
RPEPEAASPTTRTRPVTRSMGTGDTPGLEVPSSPLRKAKRARLCSSSSSDTSSRSFFDPTSQHRDWCPWVNITLGKESRENGGTE

SEQ ID NO: 2417 - protein, 84 aa, Homo sapiens
FDPTSQHRDWCPWVNITLGKESRENGGTEPDASAPAEPGWKAVLTILLAHKQSSQPAETDSMSLSEKSRKVFRIFRQWESLCSC

SEQ ID NO: 2418 - protein, 85 aa, Homo sapiens
AEQPSLESTSKEAFFSRVETFSSLKWAGKPFELSPLVCAKYGWVTVECDMLKCSSCQAFLCASLQPAFDFDRYKQRCAELKKALC

SEQ ID NO: 2419 - protein, 85 aa, Homo sapiens
TAHEKFCFWPDSPSPDRFGMLPLDEPAILVSEFLDRFQSLCHLDLQLPSLRPEDLKTMCLTEDKISLLLHLLEDELDHRTDERKT

SEQ ID NO: 2420 - protein, 85 aa, Homo sapiens
TIKLGSDIQVHVTACILSVCGWACSSSLESMQLSLITCSQCMRKVGLWGFQQIESSMTDLDASFGLTSSPIPGLEGRPERLPLVP

SEQ ID NO: 2421 - protein, 85 aa, Homo sapiens
ESPRRMMTRSQDATFSPGSEQAEKSPGPIVSRTRSWDSSSPVDRPEPEAASPTTRTRPVTRSMGTGDTPGLEVPSSPLRKAKRAR

SEQ ID NO: 2422 - protein, 85 aa, Homo sapiens
LCSSSSSDTSSRSFFDPTSQHRDWCPWVNITLGKESRENGGTEPDASAPAEPGWKAVLTILLAHKQSSQPAETDSMSLSEKSRKV

SEQ ID NO: 2423 - protein, 85 aa, Homo sapiens
VEANNEHMVEVRTQLLQPADENWDPTGTKKIWRCESNRSHTTIAKYAQYQASSFQESLREENEKRTQHKDHSDNESTSSENSGRR

SEQ ID NO: 2424 - protein, 85 aa, Homo sapiens
RKGPFKTIKFGTNIDLSDNKKWKLQLHELTKLPAFARVVSAGNLLTHVGHTILGMNTVQLYMKVPGSRTPGHQENNNFCSVNINI

SEQ ID NO: 2425 - protein, 85 aa, Homo sapiens
GPGDCEWFVVPEDYWGVLNDFCEKNNLNFLMSSWWPNLEDLYEANVPVYRFIQRPGDLVWINAGTVHWVQAVGWCNNIAWNVGPL

SEQ ID NO: 2426 - protein, 85 aa, Homo sapiens
TACQYKLAVERYEWNKLKSVKSPVPMVHLSWNMARNIKVSDPKLFEMIKYCLLKILKQYQTLREALVAAGKEVIWHGRTNDEPAH

SEQ ID NO: 2427 - protein, 84 aa, Homo sapiens
VIWHGRTNDEPAHYCSICEVEVFNLLFVTNESNTQKTYIVHCHDCARKTSKSLENFVVLEQYKMEDLIQVYDQFTLALSLSSSS

SEQ ID NO: 2428 - protein, 85 aa, Homo sapiens
IAKYAQYQASSFQESLREENEKRTQHKDHSDNESTSSENSGRRRKGPFKTIKFGTNIDLSDNKKWKLQLHELTKLPAFARVVSAG

SEQ ID NO: 2429 - protein, 85 aa, Homo sapiens
NLLTHVGHTILGMNTVQLYMKVPGSRTPGHQENNNFCSVNINIGPGDCEWFVVPEDYWGVLNDFCEKNNLNFLMSSWWPNLEDLY

SEQ ID NO: 2430 - protein, 85 aa, Homo sapiens
EANVPVYRFIQRPGDLVWINAGTVHWVQAVGWCNNIAWNVGPLTACQYKLAVERYEWNKLKSVKSPVPMVHLSWNMARNIKVSDP

SEQ ID NO: 2431 - protein, 85 aa, Homo sapiens
KLFEMIKYCLLKILKQYQTLREALVAAGKEVIWHGRTNDEPAHYCSICEVEVFNLLFVTNESNTQKTYIVHCHDCARKTSKSLEN

SEQ ID NO: 2432 - protein, 85 aa, Homo sapiens
ADEEEDPTFEEENEEIGGGAEGGQGKRKRLFSKELRCMMYGFGDDQNPYTESVDILEDLVIEFITEMTHKAMSIGRQGRVQVEDI

SEQ ID NO: 2433 - protein, 84 aa, Homo sapiens
YGFGDDQNPYTESVDILEDLVIEFITEMTHKAMSIGRQGRVQVEDIVFLIRKDPRKFARVKDLLTMNEELKRARKAFDEANYGS

SEQ ID NO: 2434 - protein, 85 aa, Homo sapiens
RQGRLLGCLKGLAGSVRGLQCHPSKPLLASCGLDRVLRIHRIQNPRGLEHKDEPQEPQEPNKVPLEDTETDELWASLEAAAKRKL

SEQ ID NO: 2435 - protein, 84 aa, Homo sapiens
LLASCGLDRVLRIHRIQNPRGLEHKDEPQEPQEPNKVPLEDTETDELWASLEAAAKRKLSGLEQPQGALQTRRRKKKRPGSTSP

SEQ ID NO: 2436 - protein, 85 aa, Homo sapiens
NSRPPEYEFFWGLRSYHETSKMKVLKFACRVQKKDPKDWAVQYREAVEMEVQAAAVAVAEAEARAEIYSPCLQIPLINCSSPSHG

SEQ ID NO: 2437 - protein, 84 aa, Homo sapiens
FACRVQKKDPKDWAVQYREAVEMEVQAAAVAVAEAEARAEIYSPCLQIPLINCSSPSHGAKVHPWNLCPHSSQGSYGQSAEGVM

SEQ ID NO: 2438 - protein, 85 aa, Homo sapiens
RMSSKFPSPPLPIFLPPEPVDLGSITSSSCSLNELDNISHLLRKISADINEIKGMKAAILTVEANLFDLNVRVSKNEAKISSLEV

SEQ ID NO: 2439 - protein, 85 aa, Homo sapiens
KMNEYSTTYECNRQFEDQEEDTESQSRTTDVKIIGFLRNVEKGTQQRQLLSRLQIDPVMAETLQMSQAEMSELSVAQKPEKLLER

SEQ ID NO: 2440 - protein, 85 aa, Homo sapiens
CKYWPACKNGDECAYHHPISPCKAFPNCKFAEKCLFVHPNCKYDAKCTKPDCPFTHVSRRIPVLSPKPVAPPAPPSSSQLCRYFP

SEQ ID NO: 2441 - protein, 85 aa, Homo sapiens
RKISADINEIKGMKAAILTVEANLFDLNVRVSKNEAKISSLEVKMNEYSTTYECNRQFEDQEEDTESQSRTTDVKIIGFLRNVEK

SEQ ID NO: 2442 - protein, 85 aa, Homo sapiens
GTQQRQLLSRLQIDPVMAETLQMSQAEMSELSVAQKPEKLLERCKYWPACKNGDECAYHHPISPCKAFPNCKFAEKCLFVHPNCK

SEQ ID NO: 2443 - protein, 85 aa, Homo sapiens
YDAKCTKPDCPFTHVSRRIPVLSPKPVAPPAPPSSSQLCRYFPACKKMECPFYHPKHCRFNTQCTRPDCTFYHPTINVPPRHALK

SEQ ID NO: 2444 - protein, 85 aa, Homo sapiens
QKASVLLFLAWVCFLFYAGIALFTSGFLLTRLELTNHSSCQEPPGPGSLPWGSQGKPGACWMASRFSRVVLVLIDALRFDFAQPQ

SEQ ID NO: 2445 - protein, 85 aa, Homo sapiens
HSHVPREPPVSLPFLGKLSSLQRILEIQPHHARLYRSQVDPPTTTMQRLKALTTGSLPTFIDAGSNFASHAIVEDNLIKQLTSAG

SEQ ID NO: 2446 - protein, 85 aa, Homo sapiens
RRVVFMGDDTWKDLFPGAFSKAFFFPSFNVRDLDTVDNGILEHLYPTMDSGEWDVLIAHFLGVDHCGHKHGPHHPEMAKKLSQMD

SEQ ID NO: 2447 - protein, 85 aa, Homo sapiens
QVIQGLVERLENDTLLVVAGDHGMTTNGDHGGDSELEVSAALFLYSPTAVFPSTPPEEPEVIPQVSLVPTLALLLGLPIPFGNIG

SEQ ID NO: 2448 - protein, 85 aa, Homo sapiens
EVMAELFSGGEDSQPHSSALAQASALHLNAQQVSRFLHTYSAATQDLQAKELHQLQNLFSKASADYQWLLQSPKGAEATLPTVIA

SEQ ID NO: 2449 - protein, 85 aa, Homo sapiens
ELQQFLRGARAMCIESWARFSLSFLLLHLLAAGIPVTTPGPFTVPWQAVSAWALMATQTFYSTGHQPVFPAIHWHAAFVGFPEGH

SEQ ID NO: 2450 - protein, 85 aa, Homo sapiens
GSCTWLPALLVGANTFASHLLFAVGCPLLLLWPFLCESQGLRKRQQPPGNEADARVRPEEEEEPLMEMRLRDAPQHFYAALLQLG

SEQ ID NO: 2451 - protein, 84 aa, Homo sapiens
YAALLQLGLKYLFILGIQILACALAASILRRHLMVWKVFAPKFIFEAVGFIVSSVGLLLGIALVMRVDGAVSSWFRQLFLAQQR

SEQ ID NO: 2452 - protein, 85 aa, Homo sapiens
PPGPGSLPWGSQGKPGACWMASRFSRVVLVLIDALRFDFAQPQHSHVPREPPVSLPFLGKLSSLQRILEIQPHHARLYRSQVDPP

SEQ ID NO: 2453 - protein, 85 aa, Homo sapiens
TTTMQRLKALTTGSLPTFIDAGSNFASHAIVEDNLIKQLTSAGRRVVFMGDDTWKDLFPGAFSKAFFFPSFNVRDLDTVDNGILE

SEQ ID NO: 2454 - protein, 85 aa, Homo sapiens
HLYPTMDSGEWDVLIAHFLGVDHCGHKHGPHHPEMAKKLSQMDQVIQGLVERLENDTLLVVAGDHGMTTNGDHGGDSELEVSAAL

SEQ ID NO: 2455 - protein, 85 aa, Homo sapiens
FLYSPTAVFPSTPPEEPEVIPQVSLVPTLALLLGLPIPFGNIGEVMAELFSGGEDSQPHSSALAQASALHLNAQQVSRFLHTYSA

SEQ ID NO: 2456 - protein, 85 aa, Homo sapiens
ATQDLQAKELHQLQNLFSKASADYQWLLQSPKGAEATLPTVIAELQQFLRGARAMCIESWARFSLSFLLLHLLAAGIPVTTPGPF

SEQ ID NO: 2457 - protein, 85 aa, Homo sapiens
TVPWQAVSAWALMATQTFYSTGHQPVFPAIHWHAAFVGFPEGHGSCTWLPALLVGANTFASHLLFAVGCPLLLLWPFLCESQGLR

SEQ ID NO: 2458 - protein, 85 aa, Homo sapiens
KRQQPPGNEADARVRPEEEEEPLMEMRLRDAPQHFYAALLQLGLKYLFILGIQILACALAASILRRHLMVWKVFAPKFIFEAVGF

SEQ ID NO: 2459 - protein, 85 aa, Homo sapiens
AGCIPEEKTYRRFLELFLGEFRGPCGGGEPEPEPEPEPEPEPESEPEPEPELVEAEAAEASVEEPGEEAATVAATEEGDQEQDPE

SEQ ID NO: 2460 - protein, 85 aa, Homo sapiens
PEEEAAVEGEEEEEGAATAAAAPGHSAVPPPPPQLPPLPPLPRPLSERITREEVEGESLDLCLQQLYKYNCPSFLAAALARATSD

SEQ ID NO: 2461 - protein, 85 aa, Homo sapiens
EVLQSDLSAHYIPKETDGTEGTVEIETVKLARSVFSKLHEICCSWVKDFPLRRRPQLYYETSIHAIKNMRRKMEDKHVCIPDFNM

SEQ ID NO: 2462 - protein, 85 aa, Homo sapiens
LFNLEDQEEQAYFAVFDGHGGVDAAIYASIHLHVNLVRQEMFPHDPAEALCRAFRVTDERFVQKAARESLRCGTTGVVTFIRGNM

SEQ ID NO: 2463 - protein, 85 aa, Homo sapiens
LHVAWVGDSQVMLVRKGQAVELMKPHKPDREDEKQRIEALGGCVVWFGAWRVNGSLSVSRAIGDAEHKPYICGDADSASTVLDGT

SEQ ID NO: 2464 - protein, 85 aa, Homo sapiens
EDYLILACDGFYDTVNPDEAVKVVSDHLKENNGDSSMVAHKLVASARDAGSSDNITVIVVFLRDMNKAVNVSEESDWTENSFQGG

SEQ ID NO: 2465 - protein, 85 aa, Homo sapiens
QEDGGDDKENHGECKRPWPQHQCSAPADLGYDGRVDSFTDRTSLSPGSQINVLEDPGYLDLTQIEASKPHSAQFLLPVEMFGPGA

SEQ ID NO: 2466 - protein, 85 aa, Homo sapiens
PKKANLINELMMEKKSVQSSLPEWSGAGEFPTAFNLGSTGEQIYRMQSLSPVCSGLENEQFKSPGNRVSRLSHLRHHYSKKWHRF

SEQ ID NO: 2467 - protein, 84 aa, Homo sapiens
HHYSKKWHRFRFNPKFYSFLSAQEPSHKIGTSLSSLTGSGKRNRIRSSLPWRQNSWKGYSENMRKLRKTHDIPCPDLPWSYKIE

SEQ ID NO: 2468 - protein, 85 aa, Homo sapiens
ESEPEPEPELVEAEAAEASVEEPGEEAATVAATEEGDQEQDPEPEEEAAVEGEEEEEGAATAAAAPGHSAVPPPPPQLPPLPPLP

SEQ ID NO: 2469 - protein, 85 aa, Homo sapiens
RPLSERITREEVEGESLDLCLQQLYKYNCPSFLAAALARATSDEVLQSDLSAHYIPKETDGTEGTVEIETVKLARSVFSKLHEIC

SEQ ID NO: 2470 - protein, 85 aa, Homo sapiens
CSWVKDFPLRRRPQLYYETSIHAIKNMRRKMEDKHVCIPDFNMLFNLEDQEEQAYFAVFDGHGGVDAAIYASIHLHVNLVRQEMF

SEQ ID NO: 2471 - protein, 85 aa, Homo sapiens
PHDPAEALCRAFRVTDERFVQKAARESLRCGTTGVVTFIRGNMLHVAWVGDSQVMLVRKGQAVELMKPHKPDREDEKQRIEALGG

SEQ ID NO: 2472 - protein, 85 aa, Homo sapiens
CVVWFGAWRVNGSLSVSRAIGDAEHKPYICGDADSASTVLDGTEDYLILACDGFYDTVNPDEAVKVVSDHLKENNGDSSMVAHKL

SEQ ID NO: 2473 - protein, 85 aa, Homo sapiens
VASARDAGSSDNITVIVVFLRDMNKAVNVSEESDWTENSFQGGQEDGGDDKENHGECKRPWPQHQCSAPADLGYDGRVDSFTDRT

SEQ ID NO: 2474 - protein, 85 aa, Homo sapiens
SLSPGSQINVLEDPGYLDLTQIEASKPHSAQFLLPVEMFGPGAPKKANLINELMMEKKSVQSSLPEWSGAGEFPTAFNLGSTGEQ

SEQ ID NO: 2475 - protein, 85 aa, Homo sapiens
IYRMQSLSPVCSGLENEQFKSPGNRVSRLSHLRHHYSKKWHRFRFNPKFYSFLSAQEPSHKIGTSLSSLTGSGKRNRIRSSLPWR

SEQ ID NO: 2476 - protein, 85 aa, Homo sapiens
PPRRSIVEVKVLDVQKRRVPNKHYVYIIRVTWSSGSTEAIYRRYSKFFDLQMQMLDKFPMEGGQKDPKQRIIPFLPGKILFRRSH

SEQ ID NO: 2477 - protein, 85 aa, Homo sapiens
IRDVAVKRLIPIDEYCKALIQLPPYISQCDEVLQFFETRPEDLNPPKEEHIGKKKSGGDQTSVDPMVLEQYVVVANYQKQESSEI

SEQ ID NO: 2478 - protein, 85 aa, Homo sapiens
SLSVGQVVDIIEKNESGWWFVSTAEEQGWVPATCLEGQDGVQDEFSLQPEEEEKYTVIYPYTARDQDEMNLERGAVVEVIQKNLE

SEQ ID NO: 2479 - protein, 85 aa, Homo sapiens
GWWKIRYQGKEGWAPASYLKKNSGEPLPPKPGPGSPSHPGALDLDGVSRQQNAVGREKELLSSQRDGRFEGRPVPDGDAKQRSPK

SEQ ID NO: 2480 - protein, 85 aa, Homo sapiens
MRQRPPPRRDMTIPRGLNLPKPPIPPQVEEEYYTIAEFQTTIPDGISFQAGLKVEVIEKNLSGWWYIQIEDKEGWAPATFIDKYK

SEQ ID NO: 2481 - protein, 85 aa, Homo sapiens
KTSNASRPNFLAPLPHEVTQLRLGEAAALENNTGSEATGPSRPLPDAPHGVMDSGLPWSKDWKGSKDVLRKASSDMSASAGYEEI

SEQ ID NO: 2482 - protein, 85 aa, Homo sapiens
SDPDMEEKPSLPPRKESIIKSEGELLERERERQRTEQLRGPTPKPPGVILPMMPAKHIPPARDSRRPEPKPDKSRLFQLKNDMGL

SEQ ID NO: 2483 - protein, 85 aa, Homo sapiens
ECGHKVLAKEVKKPNLRPISKSKTDLPEEKPDATPQNPFLKSRPQVRPKPAPSPKTEPPQGEDQVDICNLRSKLRPAKSQDKSLL

SEQ ID NO: 2484 - protein, 85 aa, Homo sapiens
DGEGPQAVGGQDVAFSRSFLPGEGPGRAQDRTGKQDGLSPKEISCRAPPRPAKTTDPVSKSVPVPLQEAPQQRPVVPPRRPPPPK

SEQ ID NO: 2485 - protein, 85 aa, Homo sapiens
KTSSSSRPLPEVRGPQCEGHESRAAPTPGRALLVPPKAKPFLSNSLGGQDDTRGKGSLGPWGTGKIGENREKAAAASVPNADGLK

SEQ ID NO: 2486 - protein, 84 aa, Homo sapiens
GTGKIGENREKAAAASVPNADGLKDSLYVAVADFEGDKDTSSFQEGTVFEVREKNSSGWWFCQVLSGAPSWEGWIPSNYLRKKP

SEQ ID NO: 2487 - protein, 85 aa, Homo sapiens
RYSKFFDLQMQMLDKFPMEGGQKDPKQRIIPFLPGKILFRRSHIRDVAVKRLIPIDEYCKALIQLPPYISQCDEVLQFFETRPED

SEQ ID NO: 2488 - protein, 85 aa, Homo sapiens
MNPPKEEHIGKKKSGGDQTSVDPMVLEQYVVVANYQKQESSEISLSVGQVVDIIEKNESGWWFVSTAEEQGWVPATCLEGQDGVQ

SEQ ID NO: 2489 - protein, 85 aa, Homo sapiens
DEFSLQPEEEEKYTVIYPYTARDQDEMNLERGAVVEVIQKNLEGWWKIRYQGKEGWAPASYLKKNSGEPLPPKPGPGSPSHPGAL

SEQ ID NO: 2490 - protein, 85 aa, Homo sapiens
DLDGVSRQQNAVGREKELLSSQRDGRFEGRPVPDGDAKQRSPKMRQRPPPRRDMTIPRGLNLPKPPIPPQVEEEYYTIAEFQTTI

SEQ ID NO: 2491 - protein, 85 aa, Homo sapiens
PDGISFQAGLKVEVIEKNLSGWWYIQIEDKEGWAPATFIDKYKKTSNASRPNFLAPLPHEVTQLRLGEAAALENNTGSEATGPSR

SEQ ID NO: 2492 - protein, 85 aa, Homo sapiens
PLPDAPHGVMDSGLPWSKDWKGSKDVLRKASSDMSASAGYEEISDPDMEEKPSLPPRKESIIKSEGELLERERERQRTEQLRGPT

SEQ ID NO: 2493 - protein, 85 aa, Homo sapiens
PKPPGVILPMMPAKHIPPARDSRRPEPKPDKSRLFQLKNDMGLECGHKVLAKEVKKPNLRPISKSKTDLPEEKPDATPQNPFLKS

SEQ ID NO: 2494 - protein, 85 aa, Homo sapiens
RPQVRPKPAPSPKTEPPQGEDQVDICNLRSKLRPAKSQDKSLLDGEGPQAVGGQDVAFSRSFLPGEGPGRAQDRTGKQDGLSPKE

SEQ ID NO: 2495 - protein, 85 aa, Homo sapiens
ISCRAPPRPAKTTDPVSKSVPVPLQEAPQQRPVVPPRRPPPPKKTSSSSRPLPEVRGPQCEGHESRAAPTPGRALLVPPKAKPFL

SEQ ID NO: 2496 - protein, 85 aa, Homo sapiens
SNSLGGQDDTRGKGSLGPWGTGKIGENREKAAAASVPNADGLKDSLYVAVADFEGDKDTSSFQEGTVFEVREKNSSGWWFCQVLS

SEQ ID NO: 2497 - protein, 85 aa, Homo sapiens
SAYSVPSTFAQASLPVHNQVLPSIESVDGSDPLATLQTPLGRLEAKEEEDEDEDEDTEEDEEEDGEDTDLDDWEPDPPRPFDPHD

SEQ ID NO: 2498 - protein, 85 aa, Homo sapiens
MWCEECNNAHASVCPKHGPLHPIPNRPVLTRARASLPLVLYIDRFLGGVFSKRRIPKRTQFGPVEGPLVRGSELKDCYIHLKVSL

SEQ ID NO: 2499 - protein, 85 aa, Homo sapiens
DKGDRKERDLHEDLWFELSDETLCNWMMFVRPAQNHLEQNLVAYQYGHHVYYTTIKNVEPKQELKVWYAASYAEFVNQKIHDISE

SEQ ID NO: 2500 - protein, 85 aa, Homo sapiens
EERKVLREQEKNWPCYECNRRFISSEQLQQHLNSHDEKLDVFSRTRGRGRGRGKRRFGPGRRPGRPPKFIRLEITSENGEKSDDG

SEQ ID NO: 2501 - protein, 85 aa, Homo sapiens
TQDLLHFPTKEQFDEAEPATLNGLDQPEQTTIPIPQLPQETQSSLEHEPETHTLHLQPQHEESVVPTQSTLTADDMRRAKRIRNA

SEQ ID NO: 2502 - protein, 85 aa, Homo sapiens
ALQHLFIRKSFRPFKCLQCGKAFREKDKLDQHLRFHGREGNCPLTCDLCNKGFISSTSLESHMKLHSDQKTYSCIFCPESFDRLD

SEQ ID NO: 2503 - protein, 85 aa, Homo sapiens
MLKDHVAIHINDGYFTCPTCKKRFPDFIQVKKHVRSFHSEKIYQCTECDKAFCRPDKLRLHMLRHSDRKDFLCSTCGKQFKRKDK

SEQ ID NO: 2504 - protein, 85 aa, Homo sapiens
LREHMQRMHNPEREAKKADRISRSKTFKPRITSTDYDSFTFKCRLCMMGFRRRGMLVNHLSKRHPDMKIEEVPELTLPIIKPNRD

SEQ ID NO: 2505 - protein, 85 aa, Homo sapiens
YFCQYCDKVYKSASKRKAHILKNHPGAELPPSIRKLRPAGPGEPDPMLSTHTQLTGTIATPPVCCPHCSKQYSSKTKMVQHIRKK

SEQ ID NO: 2506 - protein, 85 aa, Homo sapiens
HPEFAQLSNTIHTPLTTAVISATPAVLTTDSATGETVVTTDLLTQAMTELSQTLTTDYRTPQGDYQRIQYIPVSQSASGLQQPQH

SEQ ID NO: 2507 - protein, 85 aa, Homo sapiens
IQLQVVQVASVSGQPLSPSAQQAQQGLSPSHIQGSSSTQGQALQQQQQQQQNSSVQHTYLPSAWNSFRGYSSEIQMMTLPPGQFV

SEQ ID NO: 2508 - protein, 85 aa, Homo sapiens
ITDSGVATPVTTGQVKAVTSGHYVLSESQSELEEKQTSALSGGVQVEPPAHSDSLDPQTNSQQQTTQYIITTTTNGNGSSEVHIT

SEQ ID NO: 2509 - protein, 84 aa, Homo sapiens
SGVATPVTTGQVKAVTSGHYVLSESQSELEEKQTSALSGGVQVEPPAHSDSLDPQTNSQQQTTQYIITTTTNGNGSSEVHITKP

SEQ ID NO: 2510 - protein, 85 aa, Homo sapiens
MEAKEEEDEDEDEDTEEDEEEDGEDTDLDDWEPDPPRPFDPHDLWCEECNNAHASVCPKHGPLHPIPNRPVLTRARASLPLVLYI

SEQ ID NO: 2511 - protein, 85 aa, Homo sapiens
DRFLGGVFSKRRIPKRTQFGPVEGPLVRGSELKDCYIHLKVSLDKGDRKERDLHEDLWFELSDETLCNWMMFVRPAQNHLEQNLV

SEQ ID NO: 2512 - protein, 85 aa, Homo sapiens
AYQYGHHVYYTTIKNVEPKQELKVWYAASYAEFVNQKIHDISEEERKVLREQEKNWPCYECNRRFISSEQLQQHLNSHDEKLDVF

SEQ ID NO: 2513 - protein, 85 aa, Homo sapiens
SRTRGRGRGRGKRRFGPGRRPGRPPKFIRLEITSENGEKSDDGTQDLLHFPTKEQFDEAEPATLNGLDQPEQTTIPIPQLPQETQ

SEQ ID NO: 2514 - protein, 85 aa, Homo sapiens
SSLEHEPETHTLHLQPQHEESVVPTQSTLTADDMRRAKRIRNAALQHLFIRKSFRPFKCLQCGKAFREKDKLDQHLRFHGREGNC

SEQ ID NO: 2515 - protein, 85 aa, Homo sapiens
PLTCDLCNKGFISSTSLESHMKLHSDQKTYSCIFCPESFDRLDLLKDHVAIHINDGYFTCPTCKKRFPDFIQVKKHVRSFHSEKI

SEQ ID NO: 2516 - protein, 85 aa, Homo sapiens
YQCTECDKAFCRPDKLRLHMLRHSDRKDFLCSTCGKQFKRKDKLREHMQRMHNPEREAKKADRISRSKTFKPRITSTDYDSFTFK

SEQ ID NO: 2517 - protein, 85 aa, Homo sapiens
CRLCMMGFRRRGMLVNHLSKRHPDMKIEEVPELTLPIIKPNRDYFCQYCDKVYKSASKRKAHILKNHPGAELPPSIRKLRPAGPG

SEQ ID NO: 2518 - protein, 85 aa, Homo sapiens
EPDPMLSTHTQLTGTIATPPVCCPHCSKQYSSKTKMVQHIRKKHPEFAQLSNTIHTPLTTAVISATPAVLTTDSATGETVVTTDL

SEQ ID NO: 2519 - protein, 85 aa, Homo sapiens
LTQAMTELSQTLTTDYRTPQGDYQRIQYIPVSQSASGLQQPQHIQLQVVQVASVSGQPLSPSAQQAQQGLSPSHIQGSSSTQGQA

SEQ ID NO: 2520 - protein, 85 aa, Homo sapiens
MQQQQQQQQNSSVQHTYLPSAWNSFRGYSSEIQMMTLPPGQFVITDSGVATPVTTGQVKAVTSGHYVLSESQSELEEKQTSALSG

SEQ ID NO: 2521 - protein, 85 aa, Homo sapiens
ELLGEYVGQEGKPQKLRVSCEAPGDGDPFQGLLSGVAQMKDMVTELFDPLVQGEVQHRVAAAPDEDLDGDDEDDAEDENNIDNRT

SEQ ID NO: 2522 - protein, 84 aa, Homo sapiens
MRVSCEAPGDGDPFQGLLSGVAQMKDMVTELFDPLVQGEVQHRVAAAPDEDLDGDDEDDAEDENNIDNRTNFDGPSAKRPKTPS

SEQ ID NO: 2523 - protein, 85 aa, Homo sapiens
AASRRSQHHHHHHQQQLQPAPGASAPPPPPPPPLSPGLAPGTTPASPTASGLAPFASPRHGLALPEGDGSRDPPDRPRSPDPVDG

SEQ ID NO: 2524 - protein, 85 aa, Homo sapiens
TSCCSTTSTICTVAAAPVVPAVSTSSAAGVAPNPAGSGSNNSPSSSSSPTSSSSSSPSSPGSSLAESPEAAGVSSTAPLGPGAAG

SEQ ID NO: 2525 - protein, 85 aa, Homo sapiens
PGTGVPAVSGALRELLEACRNGDVSRVKRLVDAANVNAKDMAGRKSSPLHFAAGFGRKDVVEHLLQMGANVHARDDGGLIPLHNA

SEQ ID NO: 2526 - protein, 85 aa, Homo sapiens
CSFGHAEVVSLLLCQGADPNARDNWNYTPLHEAAIKGKIDVCIVLLQHGADPNIRNTDGKSALDLADPSAKAVLTGEYKKDELLE

SEQ ID NO: 2527 - protein, 85 aa, Homo sapiens
AARSGNEEKLMALLTPLNVNCHASDGRKSTPLHLAAGYNRVRIVQLLLQHGADVHAKDKGGLVPLHNACSYGHYEVTELLLKHGA

SEQ ID NO: 2528 - protein, 85 aa, Homo sapiens
CVNAMDLWQFTPLHEAASKNRVEVCSLLLSHGADPTLVNCHGKSAVDMAPTPELRERLTYEFKGHSLLQAAREADLAKVKKTLAL

SEQ ID NO: 2529 - protein, 85 aa, Homo sapiens
EIINFKQPQSHETALHCAVASLHPKRKQVTELLLRKGANVNEKNKDFMTPLHVAAERAHNDVMEVLHKHGAKMNALDTLGQTALH

SEQ ID NO: 2530 - protein, 85 aa, Homo sapiens
RAALAGHLQTCRLLLSYGSDPSIISLQGFTAAQMGNEAVQQILSESTPIRTSDVDYRLLEASKAGDLETVKQLCSSQNVNCRDLE

SEQ ID NO: 2531 - protein, 85 aa, Homo sapiens
GRHSTPLHFAAGYNRVSVVEYLLHHGADVHAKDKGGLVPLHNACSYGHYEVAELLVRHGASVNVADLWKFTPLHEAAAKGKYEIC

SEQ ID NO: 2532 - protein, 85 aa, Homo sapiens
KLLLKHGADPTKKNRDGNTPLDLVKEGDTDIQDLLRGDAALLDAAKKGCLARVQKLCTPENINCRDTQGRNSTPLHLAAGYNNLE

SEQ ID NO: 2533 - protein, 85 aa, Homo sapiens
VAEYLLEHGADVNAQDKGGLIPLHNAASYGHVDIAALLIKYNTCVNATDKWAFTPLHEAAQKGRTQLCALLLAHGADPTMKNQEG

SEQ ID NO: 2534 - protein, 85 aa, Homo sapiens
QTPLDLATADDIRALLIDAMPPEALPTCFKPQATVVSASLISPASTPSCLSAASSIDNLTGPLAELAVGGASNAGDGAAGTERKE

SEQ ID NO: 2535 - protein, 85 aa, Homo sapiens
GEVAGLDMNISQFLKSLGLEHLRDIFETEQITLDVLADMGHEELKEIGINAYGHRHKLIKGVERLLGGQQGTNPYLTFHCVNQGT

SEQ ID NO: 2536 - protein, 85 aa, Homo sapiens
ILLDLAPEDKEYQSVEEEMQSTIREHRDGGNAGGIFNRYNVIRIQKVVNKKLRERFCHRQKEVSEENHNHHNERMLFHGSPFINA

SEQ ID NO: 2537 - protein, 85 aa, Homo sapiens
IIHKGFDERHAYIGGMFGAGIYFAENSSKSNQYVYGIGGGTGCPTHKDRSCYICHRQMLFCRVTLGKSFLQFSTMKMAHAPPGHH

SEQ ID NO: 2538 - protein, 84 aa, Homo sapiens
ICHRQMLFCRVTLGKSFLQFSTMKMAHAPPGHHSVIGRPSVNGLAYAEYVIYRGEQAYPEYLITYQIMKPEAPSQTATAAEQKT

SEQ ID NO: 2539 - protein, 85 aa, Homo sapiens
TPASPTASGLAPFASPRHGLALPEGDGSRDPPDRPRSPDPVDGTSCCSTTSTICTVAAAPVVPAVSTSSAAGVAPNPAGSGSNNS

SEQ ID NO: 2540 - protein, 85 aa, Homo sapiens
PSSSSSPTSSSSSSPSSPGSSLAESPEAAGVSSTAPLGPGAAGPGTGVPAVSGALRELLEACRNGDVSRVKRLVDAANVNAKDMA

SEQ ID NO: 2541 - protein, 85 aa, Homo sapiens
GRKSSPLHFAAGFGRKDVVEHLLQMGANVHARDDGGLIPLHNACSFGHAEVVSLLLCQGADPNARDNWNYTPLHEAAIKGKIDVC

SEQ ID NO: 2542 - protein, 85 aa, Homo sapiens
IVLLQHGADPNIRNTDGKSALDLADPSAKAVLTGEYKKDELLEAARSGNEEKLMALLTPLNVNCHASDGRKSTPLHLAAGYNRVR

SEQ ID NO: 2543 - protein, 85 aa, Homo sapiens
IVQLLLQHGADVHAKDKGGLVPLHNACSYGHYEVTELLLKHGACVNAMDLWQFTPLHEAASKNRVEVCSLLLSHGADPTLVNCHG

SEQ ID NO: 2544 - protein, 85 aa, Homo sapiens
KSAVDMAPTPELRERLTYEFKGHSLLQAAREADLAKVKKTLALEIINFKQPQSHETALHCAVASLHPKRKQVTELLLRKGANVNE

SEQ ID NO: 2545 - protein, 85 aa, Homo sapiens
KNKDFMTPLHVAAERAHNDVMEVLHKHGAKMNALDTLGQTALHRAALAGHLQTCRLLLSYGSDPSIISLQGFTAAQMGNEAVQQI

SEQ ID NO: 2546 - protein, 85 aa, Homo sapiens
MSESTPIRTSDVDYRLLEASKAGDLETVKQLCSSQNVNCRDLEGRHSTPLHFAAGYNRVSVVEYLLHHGADVHAKDKGGLVPLHN

SEQ ID NO: 2547 - protein, 85 aa, Homo sapiens
ACSYGHYEVAELLVRHGASVNVADLWKFTPLHEAAAKGKYEICKLLLKHGADPTKKNRDGNTPLDLVKEGDTDIQDLLRGDAALL

SEQ ID NO: 2548 - protein, 85 aa, Homo sapiens
DAAKKGCLARVQKLCTPENINCRDTQGRNSTPLHLAAGYNNLEVAEYLLEHGADVNAQDKGGLIPLHNAASYGHVDIAALLIKYN

SEQ ID NO: 2549 - protein, 85 aa, Homo sapiens
TCVNATDKWAFTPLHEAAQKGRTQLCALLLAHGADPTMKNQEGQTPLDLATADDIRALLIDAMPPEALPTCFKPQATVVSASLIS

SEQ ID NO: 2550 - protein, 85 aa, Homo sapiens
PASTPSCLSAASSIDNLTGPLAELAVGGASNAGDGAAGTERKEGEVAGLDMNISQFLKSLGLEHLRDIFETEQITLDVLADMGHE

SEQ ID NO: 2551 - protein, 85 aa, Homo sapiens
ELKEIGINAYGHRHKLIKGVERLLGGQQGTNPYLTFHCVNQGTILLDLAPEDKEYQSVEEEMQSTIREHRDGGNAGGIFNRYNVI

SEQ ID NO: 2552 - protein, 85 aa, Homo sapiens
RIQKVVNKKLRERFCHRQKEVSEENHNHHNERMLFHGSPFINAIIHKGFDERHAYIGGMFGAGIYFAENSSKSNQYVYGIGGGTG

SEQ ID NO: 2553 - protein, 85 aa, Homo sapiens
CPTHKDRSCYICHRQMLFCRVTLGKSFLQFSTMKMAHAPPGHHSVIGRPSVNGLAYAEYVIYRGEQAYPEYLITYQIMKPEAPSQ

SEQ ID NO: 2554 - protein, 85 aa, Homo sapiens
EKATVPVAAATAAEGEGSPPAVAAVAGPPAAAEVGGGVGGSSRARSASSPRGMVRVCDLLLKKKPPQQQHHKAKRNRTCRPPSSS

SEQ ID NO: 2555 - protein, 85 aa, Homo sapiens
ESSSDSDNSGGGGGGGGGGGGGGGTSSNNSEEEEDDDDEEEEVSEVESFILDQDDLENPMLETASKLLLSGTADGADLRTVDPET

SEQ ID NO: 2556 - protein, 85 aa, Homo sapiens
QARLEALLEAAGIGKLSTADGKAFADPEVLRRLTSSVSCALDEAAAALTRMRAESTANAGQSDNRSLAEACSEGDVNAVRKLLIE

SEQ ID NO: 2557 - protein, 85 aa, Homo sapiens
GRSVNEHTEEGESLLCLACSAGYYELAQVLLAMHANVEDRGIKGDITPLMAAANGGHVKIVKLLLAHKADVNAQSSTGNTALTYA

SEQ ID NO: 2558 - protein, 85 aa, Homo sapiens
CAGGYVDVVKVLLESGASIEDHNENGHTPLMEAGSAGHVEVARLLLENGAGINTHSNEFKESALTLACYKGHLEMVRFLLEAGAD

SEQ ID NO: 2559 - protein, 85 aa, Homo sapiens
QEHKTDEMHTALMEACMDGHVEVARLLLDSGAQVNMPADSFESPLTLAACGGHVELAALLIERGASLEEVNDEGYTPLMEAAREG

SEQ ID NO: 2560 - protein, 85 aa, Homo sapiens
HEEMVALLLGQGANINAQTEETQETALTLACCGGFLEVADFLIKAGADIELGCSTPLMEAAQEGHLELVKYLLAAGANVHATTAT

SEQ ID NO: 2561 - protein, 85 aa, Homo sapiens
GDTALTYACENGHTDVADVLLQAGADLEHESEGGRTPLMKAARAGHVCTVQFLISKGANVNRTTANNDHTVLSLACAGGHLAVVE

SEQ ID NO: 2562 - protein, 85 aa, Homo sapiens
LLLAHGADPTHRLKDGSTMLIEAAKGGHTSVVCYLLDYPNNLLSAPPPDVTQLTPPSHDLNRAPRVPVQALPMVVPPQEPDKPPA

SEQ ID NO: 2563 - protein, 85 aa, Homo sapiens
NVATTLPIRNKAVSGRASAMSNTPTHSIAASISQPQTPTPSPIISPSAMLPIYPAIDIDAQTESNHDTALTLACAGGHEELVQTL

SEQ ID NO: 2564 - protein, 85 aa, Homo sapiens
LERGASIEHRDKKGFTPLILAATAGHVGVVEILLDNGADIEAQSERTKDTPLSLACSGGRQEVVELLLARGANKEHRNVSDYTPL

SEQ ID NO: 2565 - protein, 85 aa, Homo sapiens
SLAASGGYVNIIKILLNAGAEINSRTGSKLGISPLMLAAMNGHTAAVKLLLDMGSDINAQIETNRNTALTLACFQGRTEVVSLLL

SEQ ID NO: 2566 - protein, 85 aa, Homo sapiens
DRKANVEHRAKTGLTPLMEAASGGYAEVGRVLLDKGADVNAPPVPSSRDTALTIAADKGHYKFCELLIGRGAHIDVRNKKGNTPL

SEQ ID NO: 2567 - protein, 85 aa, Homo sapiens
WLAANGGHLDVVQLLVQAGADVDAADNRKITPLMAAFRKGHVKVVRYLVKEVNQFPSDSECMRYIATITDKEMLKKCHLCMESIV

SEQ ID NO: 2568 - protein, 85 aa, Homo sapiens
QAKDRQAAEANKNASILLEELDLEKLREESRRLALAAKREKRKEKRRKKKEEQRRKLEEIEAKNKENFELQAAQEKEKLKVEDEP

SEQ ID NO: 2569 - protein, 85 aa, Homo sapiens
EVLTEPPSATTTTTIGISATWTTLAGSHGKRNNTITTTSSKRKNRKNKITPENVQIIFDDPLPISYSQPEKVNGESKSSSTSESG

SEQ ID NO: 2570 - protein, 85 aa, Homo sapiens
DSDNMRISSCSDESSNSNSSRKSDNHSPAVVTTTVSSKKQPSVLVTFPKEERKSVSGKASIKLSETISEGTSNSLSTCTKSGPSP

SEQ ID NO: 2571 - protein, 85 aa, Homo sapiens
LSSPNGKLTVASPKRGQKREEGWKEVVRRSKKVSVPSTVISRVIGRGGCNINAIREFTGAHIDIDKQKDKTGDRIITIRGGTEST

SEQ ID NO: 2572 - protein, 85 aa, Homo sapiens
RQATQLINALIKDPDKEIDELIPKNRLKSSSANSKIGSSAPTTTAANTSLMGIKMTTVALSSTSQTATALTVPAISSASTHKTIK

SEQ ID NO: 2573 - protein, 85 aa, Homo sapiens
NPVNNVRPGFPVSLPLAYPPPQFAHALLAAQTFQQIRPPRLPMTHFGGTFPPAQSTWGPFPVRPLSPARATNSPKPHMVPRHSNQ

SEQ ID NO: 2574 - protein, 85 aa, Homo sapiens
NSSGSQVNSAGSLTSSPTTTTSSSASTVPGTSTNGSPSSPSVRRQLFVTVVKTSNATTTTVTTTASNNNTAPTNATYPMPTAKEH

SEQ ID NO: 2575 - protein, 85 aa, Homo sapiens
YPVSSPSSPSPPAQPGGVSRNSPLDCGSASPNKVASSSEQEAGSPPVVETTNTRPPNSSSSSGSSSAHSNQQQPPGSVSQEPRPP

SEQ ID NO: 2576 - protein, 85 aa, Homo sapiens
LQQSQVPPPEVRMTVPPLATSSAPVAVPSTAPVTYPMPQTPMGCPQPTPKMETPAIRPPPHGTTAPHKNSASVQNSSVAVLSVNH

SEQ ID NO: 2577 - protein, 85 aa, Homo sapiens
IKRPHSVPSSVQLPSTLSTQSACQNSVHPANKPIAPNFSAPLPFGPFSTLFENSPTSAHAFWGGSVVSSQSTPESMLSGKSSYLP

SEQ ID NO: 2578 - protein, 85 aa, Homo sapiens
NSDPLHQSDTSKAPGFRPPLQRPAPSPSGIVNMDSPYGSVTPSSTHLGNFASNISGGQMYGPGAPLGGAPAAANFNRQHFSPLSL

SEQ ID NO: 2579 - protein, 85 aa, Homo sapiens
MTPCSSASNDSSAQSVSSGVRAPSPAPSSVPLGSEKPSNVSQDRKVPVPIGTERSARIRQTGTSAPSVIGSNLSTSVGHSGIWSF

SEQ ID NO: 2580 - protein, 85 aa, Homo sapiens
EGIGGNQDKVDWCNPGMGNPMIHRPMSDPGVFSQHQAMERDSTGIVTPSGTFHQHVPAGYMDFPKVGGMPFSVYGNAMIPPVAPI

SEQ ID NO: 2581 - protein, 84 aa, Homo sapiens
AGYMDFPKVGGMPFSVYGNAMIPPVAPIPDGAGGPIFNGPHAADPSWNSLIKMVSSSTENNGPQTVWTGPWAPHMNSVHMNQLG

SEQ ID NO: 2582 - protein, 85 aa, Homo sapiens
RARSASSPRGMVRVCDLLLKKKPPQQQHHKAKRNRTCRPPSSSESSSDSDNSGGGGGGGGGGGGGGGTSSNNSEEEEDDDDEEEE

SEQ ID NO: 2583 - protein, 85 aa, Homo sapiens
VSEVESFILDQDDLENPMLETASKLLLSGTADGADLRTVDPETQARLEALLEAAGIGKLSTADGKAFADPEVLRRLTSSVSCALD

SEQ ID NO: 2584 - protein, 85 aa, Homo sapiens
EAAAALTRMRAESTANAGQSDNRSLAEACSEGDVNAVRKLLIEGRSVNEHTEEGESLLCLACSAGYYELAQVLLAMHANVEDRGI

SEQ ID NO: 2585 - protein, 85 aa, Homo sapiens
KGDITPLMAAANGGHVKIVKLLLAHKADVNAQSSTGNTALTYACAGGYVDVVKVLLESGASIEDHNENGHTPLMEAGSAGHVEVA

SEQ ID NO: 2586 - protein, 85 aa, Homo sapiens
RLLLENGAGINTHSNEFKESALTLACYKGHLEMVRFLLEAGADQEHKTDEMHTALMEACMDGHVEVARLLLDSGAQVNMPADSFE

SEQ ID NO: 2587 - protein, 85 aa, Homo sapiens
SPLTLAACGGHVELAALLIERGASLEEVNDEGYTPLMEAAREGHEEMVALLLGQGANINAQTEETQETALTLACCGGFLEVADFL

SEQ ID NO: 2588 - protein, 85 aa, Homo sapiens
IKAGADIELGCSTPLMEAAQEGHLELVKYLLAAGANVHATTATGDTALTYACENGHTDVADVLLQAGADLEHESEGGRTPLMKAA

SEQ ID NO: 2589 - protein, 85 aa, Homo sapiens
RAGHVCTVQFLISKGANVNRTTANNDHTVLSLACAGGHLAVVELLLAHGADPTHRLKDGSTMLIEAAKGGHTSVVCYLLDYPNNL

SEQ ID NO: 2590 - protein, 85 aa, Homo sapiens
LSAPPPDVTQLTPPSHDLNRAPRVPVQALPMVVPPQEPDKPPANVATTLPIRNKAVSGRASAMSNTPTHSIAASISQPQTPTPSP

SEQ ID NO: 2591 - protein, 85 aa, Homo sapiens
IISPSAMLPIYPAIDIDAQTESNHDTALTLACAGGHEELVQTLLERGASIEHRDKKGFTPLILAATAGHVGVVEILLDNGADIEA

SEQ ID NO: 2592 - protein, 85 aa, Homo sapiens
QSERTKDTPLSLACSGGRQEVVELLLARGANKEHRNVSDYTPLSLAASGGYVNIIKILLNAGAEINSRTGSKLGISPLMLAAMNG

SEQ ID NO: 2593 - protein, 85 aa, Homo sapiens
HTAAVKLLLDMGSDINAQIETNRNTALTLACFQGRTEVVSLLLDRKANVEHRAKTGLTPLMEAASGGYAEVGRVLLDKGADVNAP

SEQ ID NO: 2594 - protein, 85 aa, Homo sapiens
PVPSSRDTALTIAADKGHYKFCELLIGRGAHIDVRNKKGNTPLWLAANGGHLDVVQLLVQAGADVDAADNRKITPLMAAFRKGHV

SEQ ID NO: 2595 - protein, 85 aa, Homo sapiens
KVVRYLVKEVNQFPSDSECMRYIATITDKEMLKKCHLCMESIVQAKDRQAAEANKNASILLEELDLEKLREESRRLALAAKREKR

SEQ ID NO: 2596 - protein, 85 aa, Homo sapiens
KEKRRKKKEEQRRKLEEIEAKNKENFELQAAQEKEKLKVEDEPEVLTEPPSATTTTTIGISATWTTLAGSHGKRNNTITTTSSKR

SEQ ID NO: 2597 - protein, 85 aa, Homo sapiens
KNRKNKITPENVQIIFDDPLPISYSQPEKVNGESKSSSTSESGDSDNMRISSCSDESSNSNSSRKSDNHSPAVVTTTVSSKKQPS

SEQ ID NO: 2598 - protein, 85 aa, Homo sapiens
VLVTFPKEERKSVSGKASIKLSETISEGTSNSLSTCTKSGPSPLSSPNGKLTVASPKRGQKREEGWKEVVRRSKKVSVPSTVISR

SEQ ID NO: 2599 - protein, 85 aa, Homo sapiens
VIGRGGCNINAIREFTGAHIDIDKQKDKTGDRIITIRGGTESTRQATQLINALIKDPDKEIDELIPKNRLKSSSANSKIGSSAPT

SEQ ID NO: 2600 - protein, 85 aa, Homo sapiens
TTAANTSLMGIKMTTVALSSTSQTATALTVPAISSASTHKTIKNPVNNVRPGFPVSLPLAYPPPQFAHALLAAQTFQQIRPPRLP

SEQ ID NO: 2601 - protein, 85 aa, Homo sapiens
MTHFGGTFPPAQSTWGPFPVRPLSPARATNSPKPHMVPRHSNQNSSGSQVNSAGSLTSSPTTTTSSSASTVPGTSTNGSPSSPSV

SEQ ID NO: 2602 - protein, 85 aa, Homo sapiens
RRQLFVTVVKTSNATTTTVTTTASNNNTAPTNATYPMPTAKEHYPVSSPSSPSPPAQPGGVSRNSPLDCGSASPNKVASSSEQEA

SEQ ID NO: 2603 - protein, 85 aa, Homo sapiens
GSPPVVETTNTRPPNSSSSSGSSSAHSNQQQPPGSVSQEPRPPLQQSQVPPPEVRMTVPPLATSSAPVAVPSTAPVTYPMPQTPM

SEQ ID NO: 2604 - protein, 85 aa, Homo sapiens
GCPQPTPKMETPAIRPPPHGTTAPHKNSASVQNSSVAVLSVNHIKRPHSVPSSVQLPSTLSTQSACQNSVHPANKPIAPNFSAPL

SEQ ID NO: 2605 - protein, 85 aa, Homo sapiens
PFGPFSTLFENSPTSAHAFWGGSVVSSQSTPESMLSGKSSYLPNSDPLHQSDTSKAPGFRPPLQRPAPSPSGIVNMDSPYGSVTP

SEQ ID NO: 2606 - protein, 85 aa, Homo sapiens
SSTHLGNFASNISGGQMYGPGAPLGGAPAAANFNRQHFSPLSLLTPCSSASNDSSAQSVSSGVRAPSPAPSSVPLGSEKPSNVSQ

SEQ ID NO: 2607 - protein, 85 aa, Homo sapiens
DRKVPVPIGTERSARIRQTGTSAPSVIGSNLSTSVGHSGIWSFEGIGGNQDKVDWCNPGMGNPMIHRPMSDPGVFSQHQAMERDS

SEQ ID NO: 2608 - protein, 85 aa, Homo sapiens
TGIVTPSGTFHQHVPAGYMDFPKVGGMPFSVYGNAMIPPVAPIPDGAGGPIFNGPHAADPSWNSLIKMVSSSTENNGPQTVWTGP

SEQ ID NO: 2609 - protein, 85 aa, Homo sapiens
GIQGLAKLIADVAPSAIRENDIKSYFGRKVAIDASMSIYQFLIAVRQGGDVLQNEEGETTSHLMGMFYRTIRMMENGIKPVYVFD

SEQ ID NO: 2610 - protein, 85 aa, Homo sapiens
GKPPQLKSGELAKRSERRAEAEKQLQQAQAAGAEQEVEKFTKRLVKVTKQHNDECKHLLSLMGIPYLDAPSEAEASCAALVKAGK

SEQ ID NO: 2611 - protein, 85 aa, Homo sapiens
VYAAATEDMDCLTFGSPVLMRHLTASEAKKLPIQEFHLSRILQELGLNQEQFVDLCILLGSDYCESIRGIGPKRAVDLIQKHKSI

SEQ ID NO: 2612 - protein, 85 aa, Homo sapiens
EEIVRRLDPNKYPVPENWLHKEAHQLFLEPEVLDPESVELKWSEPNEEELIKFMCGEKQFSEERIRSGVKRLSKSRQGSTQGRLD

SEQ ID NO: 2613 - protein, 84 aa, Homo sapiens
KWSEPNEEELIKFMCGEKQFSEERIRSGVKRLSKSRQGSTQGRLDDFFKVTGSLSSAKRKEPEPKGSTKKKAKTGAAGKFKRGK

SEQ ID NO: 2614 - protein, 85 aa, Homo sapiens
IAVRQGGDVLQNEEGETTSHLMGMFYRTIRMMENGIKPVYVFDGKPPQLKSGELAKRSERRAEAEKQLQQAQAAGAEQEVEKFTK

SEQ ID NO: 2615 - protein, 85 aa, Homo sapiens
RLVKVTKQHNDECKHLLSLMGIPYLDAPSEAEASCAALVKAGKVYAAATEDMDCLTFGSPVLMRHLTASEAKKLPIQEFHLSRIL

SEQ ID NO: 2616 - protein, 85 aa, Homo sapiens
QELGLNQEQFVDLCILLGSDYCESIRGIGPKRAVDLIQKHKSIEEIVRRLDPNKYPVPENWLHKEAHQLFLEPEVLDPESVELKW

SEQ ID NO: 2617 - protein, 85 aa, Homo sapiens
NGPADGEVDYKKKYRNLKRKLKFLIYEHECFQEELRKAQRKLLKVSRDKSFLLDRLLQYENVDEDSSDSDATASSDNSETEGTPK

SEQ ID NO: 2618 - protein, 85 aa, Homo sapiens
MSDTPAPKRKRSPPLGGAPSPSSLSLPPSTGFPLQASGVPSPYLSSMAVGPPDCPVGGPLTFPGRGSGAGVGTTLTPLPPPKMPP

SEQ ID NO: 2619 - protein, 84 aa, Homo sapiens
ASGVPSPYLSSMAVGPPDCPVGGPLTFPGRGSGAGVGTTLTPLPPPKMPPPTILSTVPRQMFSDAGSGDDALDGDDDLVIDIPE

SEQ ID NO: 2620 - protein, 85 aa, Homo sapiens
MKVSRDKSFLLDRLLQYENVDEDSSDSDATASSDNSETEGTPKLSDTPAPKRKRSPPLGGAPSPSSLSLPPSTGFPLQASGVPSP

SEQ ID NO: 2621 - protein, 85 aa, Homo sapiens
EVAVPVKQEAEGLALDSPWHRFRRFHLGDAPGPREALGLLRALCRDWLRPEVHTKEQMLELLVLEQFLSALPADTQAWVCSRQPQ

SEQ ID NO: 2622 - protein, 85 aa, Homo sapiens
SGEEAVALLEELWGPAASPDGSSATRVPQDVTQGPGATGGKEDSGMIPLAGTAPGAEGPAPGDSQAVRPYKQEPSSPPLAPGLPA

SEQ ID NO: 2623 - protein, 85 aa, Homo sapiens
FLAAPGTTSCPECGKTSLKPAHLLRHRQSHSGEKPHACPECGKAFRRKEHLRRHRDTHPGSPGSPGPALRPLPAREKPHACCECG

SEQ ID NO: 2624 - protein, 84 aa, Homo sapiens
PAREKPHACCECGKTFYWREHLVRHRKTHSGARPFACWECGKGFGRREHVLRHQRIHGRAAASAQGAVAPGPDGGGPFPPWPLG

SEQ ID NO: 2625 - protein, 85 aa, Homo sapiens
MCRDWLRPEVHTKEQMLELLVLEQFLSALPADTQAWVCSRQPQSGEEAVALLEELWGPAASPDGSSATRVPQDVTQGPGATGGKE

SEQ ID NO: 2626 - protein, 85 aa, Homo sapiens
DSGMIPLAGTAPGAEGPAPGDSQAVRPYKQEPSSPPLAPGLPAFLAAPGTTSCPECGKTSLKPAHLLRHRQSHSGEKPHACPECG

SEQ ID NO: 2627 - protein, 85 aa, Homo sapiens
KAFRRKEHLRRHRDTHPGSPGSPGPALRPLPAREKPHACCECGKTFYWREHLVRHRKTHSGARPFACWECGKGFGRREHVLRHQR

SEQ ID NO: 2628 - protein, 85 aa, Homo sapiens
DKGRERMAAAAAAAAAAAAAAQCRSPRCAAERRGFRRELDSWRHRLMHCVGFESILEGLYGPRLRRDLSLFEDCEPEELTDWSMD

SEQ ID NO: 2629 - protein, 85 aa, Homo sapiens
EKCSFCNLQREAVSDCIPSLDSSQSTPTEELSSQGQSNTDKIECQAENYLNALFRKKDLPQNCDPNIPLVAQELMKKMIRQFAIE

SEQ ID NO: 2630 - protein, 85 aa, Homo sapiens
YISKSGKTQENRNGSIGPSIVCKSIQMNQAENSLQEEQEGPLDLTVNRMQEQNTQQGDGVLDLSTKKTSIKSEESSICDPSSENS

SEQ ID NO: 2631 - protein, 84 aa, Homo sapiens
STKKTSIKSEESSICDPSSENSVAGMLQVKTDEKLNVSDENTASCPLSPIKMCLNRPIEWNLNLTTASLTSCTVHNQNLKSEEK

SEQ ID NO: 2632 - protein, 85 aa, Homo sapiens
RHRLMHCVGFESILEGLYGPRLRRDLSLFEDCEPEELTDWSMDEKCSFCNLQREAVSDCIPSLDSSQSTPTEELSSQGQSNTDKI

SEQ ID NO: 2633 - protein, 85 aa, Homo sapiens
ECQAENYLNALFRKKDLPQNCDPNIPLVAQELMKKMIRQFAIEYISKSGKTQENRNGSIGPSIVCKSIQMNQAENSLQEEQEGPL

SEQ ID NO: 2634 - protein, 85 aa, Homo sapiens
DLTVNRMQEQNTQQGDGVLDLSTKKTSIKSEESSICDPSSENSVAGMLQVKTDEKLNVSDENTASCPLSPIKMCLNRPIEWNLNL

SEQ ID NO: 2635 - protein, 85 aa, Homo sapiens
APQKHGGGGGGGSGPSAGSGGGGFGGSAAVAAATASGGKSGGGSCGGGGSYSASSSSSAAAAAGAAVLPVKKPKMEHVQADHELF

SEQ ID NO: 2636 - protein, 85 aa, Homo sapiens
LQAFEKPTQIYRFLRTRNLIAPIFLHRTLTYMSHRNSRTNIKRKTFKVDDMLSKVEKMKGEQESHSLSAHLQLTFTGFFHKNDKP

SEQ ID NO: 2637 - protein, 85 aa, Homo sapiens
SPNSENEQNSVTLEVLLVKVCHKKRKDVSCPIRQVPTGKKQVPLNPDLNQTKPGNFPSLAVSSNEFEPSNSHMVKSYSLLFRVTR

SEQ ID NO: 2638 - protein, 85 aa, Homo sapiens
PGRREFNGMINGETNENIDVNEELPARRKRNREDGEKTFVAQMTVFDKNRRLQLLDGEYEVAMQEMEECPISKKRATWETILDGK

SEQ ID NO: 2639 - protein, 85 aa, Homo sapiens
RLPPFETFSQGPTLQFTLRWTGETNDKSTAPIAKPLATRNSESLHQENKPGSVKPTQTIAVKESLTTDLQTRKEKDTPNENRQKL

SEQ ID NO: 2640 - protein, 85 aa, Homo sapiens
RIFYQFLYNNNTRQQTEARDDLHCPWCTLNCRKLYSLLKHLKLCHSRFIFNYVYHPKGARIDVSINECYDGSYAGNPQDIHRQPG

SEQ ID NO: 2641 - protein, 85 aa, Homo sapiens
FAFSRNGPVKRTPITHILVCRPKRTKASMSEFLESEDGEVEQQRTYSSGHNRLYFHSDTCLPLRPQEMEVDSEDEKDPEWLREKT

SEQ ID NO: 2642 - protein, 85 aa, Homo sapiens
ITQIEEFSDVNEGEKEVMKLWNLHVMKHGFIADNQMNHACMLFVENYGQKIIKKNLCRNFMLHLVSMHDFNLISIMSIDKAVTKL

SEQ ID NO: 2643 - protein, 84 aa, Homo sapiens
FMLHLVSMHDFNLISIMSIDKAVTKLREMQQKLEKGESASPANEEITEEQNGTANGFSEINSKEKALETDSVSGVSKQSKKQKL

SEQ ID NO: 2644 - protein, 85 aa, Homo sapiens
GSCGGGGSYSASSSSSAAAAAGAAVLPVKKPKMEHVQADHELFLQAFEKPTQIYRFLRTRNLIAPIFLHRTLTYMSHRNSRTNIK

SEQ ID NO: 2645 - protein, 85 aa, Homo sapiens
RKTFKVDDMLSKVEKMKGEQESHSLSAHLQLTFTGFFHKNDKPSPNSENEQNSVTLEVLLVKVCHKKRKDVSCPIRQVPTGKKQV

SEQ ID NO: 2646 - protein, 85 aa, Homo sapiens
PLNPDLNQTKPGNFPSLAVSSNEFEPSNSHMVKSYSLLFRVTRPGRREFNGMINGETNENIDVNEELPARRKRNREDGEKTFVAQ

SEQ ID NO: 2647 - protein, 85 aa, Homo sapiens
MTVFDKNRRLQLLDGEYEVAMQEMEECPISKKRATWETILDGKRLPPFETFSQGPTLQFTLRWTGETNDKSTAPIAKPLATRNSE

SEQ ID NO: 2648 - protein, 85 aa, Homo sapiens
SLHQENKPGSVKPTQTIAVKESLTTDLQTRKEKDTPNENRQKLRIFYQFLYNNNTRQQTEARDDLHCPWCTLNCRKLYSLLKHLK

SEQ ID NO: 2649 - protein, 85 aa, Homo sapiens
LCHSRFIFNYVYHPKGARIDVSINECYDGSYAGNPQDIHRQPGFAFSRNGPVKRTPITHILVCRPKRTKASMSEFLESEDGEVEQ

SEQ ID NO: 2650 - protein, 85 aa, Homo sapiens
QRTYSSGHNRLYFHSDTCLPLRPQEMEVDSEDEKDPEWLREKTITQIEEFSDVNEGEKEVMKLWNLHVMKHGFIADNQMNHACML

SEQ ID NO: 2651 - protein, 85 aa, Homo sapiens
FVENYGQKIIKKNLCRNFMLHLVSMHDFNLISIMSIDKAVTKLREMQQKLEKGESASPANEEITEEQNGTANGFSEINSKEKALE

SEQ ID NO: 2652 - protein, 85 aa, Homo sapiens
QSSSYGQQSSFRQDHPSSMGVYGQESGGFSGPGENRSMSGPDNRGRGRGGFDRGGMSRGGRGGGRGGMGLQSESLVYTSILKKYP

SEQ ID NO: 2653 - protein, 84 aa, Homo sapiens
HPSSMGVYGQESGGFSGPGENRSMSGPDNRGRGRGGFDRGGMSRGGRGGGRGGMGLQSESLVYTSILKKYPYSVLSRQHNEKWD

SEQ ID NO: 2654 - protein, 85 aa, Homo sapiens
GWGGGGGCTPRPPIHQQPPERRVVTVVFLGLLLDLLAFTLLLPLLPGLLESHGRAHDPLYGSWQGGVDWFATAIGMPVEKRYNSV

SEQ ID NO: 2655 - protein, 85 aa, Homo sapiens
MFGGLIGSAFSVLQFLCAPLTGATSDCLGRRPVMLLCLMGVATSYAVWATSRSFAAFLASRLIGGISKGNVSLSTAIVADLGSPL

SEQ ID NO: 2656 - protein, 85 aa, Homo sapiens
ARSQGMAVIGVAFSLGFTLGPMLGASLPLEMAPWFALLFAASDLLFIFCFLPETLPLEKRAPSIALGFRDAADLLSPLALLRFSA

SEQ ID NO: 2657 - protein, 85 aa, Homo sapiens
VARGQDPPSGDRLSSLRRLGLVYFLYLFLFSGLEYTLSFLTHQRFQFSSLQQGKMFFLIGLTMATIQGAYARRIHPGGEVAAVKR

SEQ ID NO: 2658 - protein, 85 aa, Homo sapiens
ALLLLVPAFLLIGWGRSLPVLGLGLLLYSFAAAVVVPCLSSVVAGYGSPGQKGTVMGTLRSLGALARAAGPLVAASVYWLAGAQA

SEQ ID NO: 2659 - protein, 84 aa, Homo sapiens
AAAVVVPCLSSVVAGYGSPGQKGTVMGTLRSLGALARAAGPLVAASVYWLAGAQACFTTWSGLFLLPFFLLQKLSYPAQTLKAE

SEQ ID NO: 2660 - protein, 85 aa, Homo sapiens
PLLPGLLESHGRAHDPLYGSWQGGVDWFATAIGMPVEKRYNSVLFGGLIGSAFSVLQFLCAPLTGATSDCLGRRPVMLLCLMGVA

SEQ ID NO: 2661 - protein, 85 aa, Homo sapiens
TSYAVWATSRSFAAFLASRLIGGISKGNVSLSTAIVADLGSPLARSQGMAVIGVAFSLGFTLGPMLGASLPLEMAPWFALLFAAS

SEQ ID NO: 2662 - protein, 85 aa, Homo sapiens
DLLFIFCFLPETLPLEKRAPSIALGFRDAADLLSPLALLRFSAVARGQDPPSGDRLSSLRRLGLVYFLYLFLFSGLEYTLSFLTH

SEQ ID NO: 2663 - protein, 85 aa, Homo sapiens
QRFQFSSLQQGKMFFLIGLTMATIQGAYARRIHPGGEVAAVKRALLLLVPAFLLIGWGRSLPVLGLGLLLYSFAAAVVVPCLSSV

SEQ ID NO: 2664 - protein, 85 aa, Homo sapiens
VTRDRAENRDGPKMLKPLVEKRRRDRINRSLEELRLLLLERTRDQNLRNPKLEKAEILEFAVGYLRERSRVEPPGVPRSPVQDAE

SEQ ID NO: 2665 - protein, 85 aa, Homo sapiens
ALASCYLSGFRECLLRLAAFAHDASPAARAQLFSALHGYLRPKPPRPKPVDPRPPAPRPSLDPAAPALGPALHQRPPVHQGHPSP

SEQ ID NO: 2666 - protein, 84 aa, Homo sapiens
APRPSLDPAAPALGPALHQRPPVHQGHPSPRCAWSPSLCSPRAGDSGAPAPLTGLLPPPPPPHRQDGAPKAPLPPPPAFWRPWP

SEQ ID NO: 2667 - protein, 85 aa, Homo sapiens
RDQNLRNPKLEKAEILEFAVGYLRERSRVEPPGVPRSPVQDAEALASCYLSGFRECLLRLAAFAHDASPAARAQLFSALHGYLRP

SEQ ID NO: 2668 - protein, 85 aa, Homo sapiens
KPPRPKPVDPRPPAPRPSLDPAAPALGPALHQRPPVHQGHPSPRCAWSPSLCSPRAGDSGAPAPLTGLLPPPPPPHRQDGAPKAP

SEQ ID NO: 2669 - protein, 85 aa, Homo sapiens
KSAASSRGGGGGGRGGGGWGSWGGGRGGGGGAGKGGGGDGGGQGGKGGFGARARGFGGGGRGRGRGGGDGKDRGGGGQRRGGVAK

SEQ ID NO: 2670 - protein, 85 aa, Homo sapiens
SKSRRRKGAMVVSVEPHRHEGVFIYRGAEDALVTLNMVPGQSVYGERRVTVTEGGVKQEYRTWNPFRSKLAAAILGGVDQIHIKP

SEQ ID NO: 2671 - protein, 85 aa, Homo sapiens
KSKVLYLGAASGTTVSHVSDIIGPDGLVYAVEFSHRAGRDLVNVAKKRTNIIPVLEDARHPLKYRMLIGMVDVIFADVAQPDQSR

SEQ ID NO: 2672 - protein, 84 aa, Homo sapiens
QPDQSRIVALNAHTFLRNGGHFLISIKANCIDSTASAEAVFASEVRKLQQENLKPQEQLTLEPYERDHAVVVGVYRPLPKSSSK

SEQ ID NO: 2673 - protein, 85 aa, Homo sapiens
QGGKGGFGARARGFGGGGRGRGRGGGDGKDRGGGGQRRGGVAKSKSRRRKGAMVVSVEPHRHEGVFIYRGAEDALVTLNMVPGQS

SEQ ID NO: 2674 - protein, 85 aa, Homo sapiens
VYGERRVTVTEGGVKQEYRTWNPFRSKLAAAILGGVDQIHIKPKSKVLYLGAASGTTVSHVSDIIGPDGLVYAVEFSHRAGRDLV

SEQ ID NO: 2675 - protein, 85 aa, Homo sapiens
NVAKKRTNIIPVLEDARHPLKYRMLIGMVDVIFADVAQPDQSRIVALNAHTFLRNGGHFLISIKANCIDSTASAEAVFASEVRKL

SEQ ID NO: 2676 - protein, 85 aa, Homo sapiens
DSDYRKQWDQYVKELYEQECNGETVVYWEVKYPFPMSNRDYVYLRQRRDLDMEGRKIHVILARSTSMPQLGERSGVIRVKQYKQS

SEQ ID NO: 2677 - protein, 85 aa, Homo sapiens
YLRQRRDLDMEGRKIHVILARSTSMPQLGERSGVIRVKQYKQSLAIESDGKKGSKVFMYYFDNPGGQIPSWLINWAAKNGVPNFL

SEQ ID NO: 2678 - protein, 85 aa, Homo sapiens
VRGARQPQQPRSRLAPRLTGTVEKPPRKRRSRTEFALKEIMSSGGAEDDIPQGERKTVTDFCYLLDKSKQLFNGLRDLPQYGQKQ

SEQ ID NO: 2679 - protein, 85 aa, Homo sapiens
WQSYFGRTFDVYTKLWKFQQQHRQVLDNRYGLKRWQIGEIASKIGQLYYHYYLRTSETSYLNEAFSFYSAIRQRSYYSQVNKEDR

SEQ ID NO: 2680 - protein, 85 aa, Homo sapiens
PELVVKKLRYYARFIVVCLLLNKMDVVKDLVKELSDEIEDYTHRFNTEDQVEWNLVLQEVAAFIEADPVMVLNDDNTIVITSNRL

SEQ ID NO: 2681 - protein, 85 aa, Homo sapiens
AETGAPLLEQGMIVGQLSLADALIIGNCNNQVKFSELTVDMFRMLQALEREPMNLASQMNKPGMQESADKPTRRENPHKYLLYKP

SEQ ID NO: 2682 - protein, 85 aa, Homo sapiens
TFSQLYTFLAASFKELPANSVLLIYLSATGVFPTGRSDSEGPYDFGGVLTNSNRDIINGDAIHKRNQSHKEMHCLHPGDLYPFTR

SEQ ID NO: 2683 - protein, 85 aa, Homo sapiens
KPLFIIVDSSNSVAYKNFTNLFGQPLVCLLSPTAYPKALQDQSQRGSLFTLFLNNPLMAFLFVSGLSSMRRGLWEKCQEYLRKIN

SEQ ID NO: 2684 - protein, 85 aa, Homo sapiens
RDIAQLLTHSRSIDQAFLQFFGDEFLRLLLTRFIFCSATMRMHKIFRETRNYPESYPQLPRDETVENPHLQKHILELASILDVRN

SEQ ID NO: 2685 - protein, 84 aa, Homo sapiens
SIDQAFLQFFGDEFLRLLLTRFIFCSATMRMHKIFRETRNYPESYPQLPRDETVENPHLQKHILELASILDVRNVFFENTIDDY

SEQ ID NO: 2686 - protein, 85 aa, Homo sapiens
SGGAEDDIPQGERKTVTDFCYLLDKSKQLFNGLRDLPQYGQKQWQSYFGRTFDVYTKLWKFQQQHRQVLDNRYGLKRWQIGEIAS

SEQ ID NO: 2687 - protein, 85 aa, Homo sapiens
KIGQLYYHYYLRTSETSYLNEAFSFYSAIRQRSYYSQVNKEDRPELVVKKLRYYARFIVVCLLLNKMDVVKDLVKELSDEIEDYT

SEQ ID NO: 2688 - protein, 85 aa, Homo sapiens
HRFNTEDQVEWNLVLQEVAAFIEADPVMVLNDDNTIVITSNRLAETGAPLLEQGMIVGQLSLADALIIGNCNNQVKFSELTVDMF

SEQ ID NO: 2689 - protein, 85 aa, Homo sapiens
RMLQALEREPMNLASQMNKPGMQESADKPTRRENPHKYLLYKPTFSQLYTFLAASFKELPANSVLLIYLSATGVFPTGRSDSEGP

SEQ ID NO: 2690 - protein, 85 aa, Homo sapiens
YDFGGVLTNSNRDIINGDAIHKRNQSHKEMHCLHPGDLYPFTRKPLFIIVDSSNSVAYKNFTNLFGQPLVCLLSPTAYPKALQDQ

SEQ ID NO: 2691 - protein, 85 aa, Homo sapiens
SQRGSLFTLFLNNPLMAFLFVSGLSSMRRGLWEKCQEYLRKINRDIAQLLTHSRSIDQAFLQFFGDEFLRLLLTRFIFCSATMRM

SEQ ID NO: 2692 - protein, 85 aa, Homo sapiens
DCVIFEEVAVNFTPEEWALLDHAQRSLYRDVMLETCRNLASLDCYIYVRTSGSSSQRDVFGNGISNDEEIVKFTGSDSWSIFGEN

SEQ ID NO: 2693 - protein, 85 aa, Homo sapiens
WRFDNTGDQHQIPQRHLRSQLGRLCESNEGHQCGETLSQTANLLVHKSYPTEAKPSECTKCGKAFENRQRSHTGQRPCKECGQAC

SEQ ID NO: 2694 - protein, 85 aa, Homo sapiens
SCLSCQSPPMKTQTVEKPCNCQDSRTASVTYVKSLSSKKSYECQKCGKAFICPSSFRGHVNSHHGQKTHACKVCGKTFMYYSYLT

SEQ ID NO: 2695 - protein, 85 aa, Homo sapiens
RHVRTHTGEKPYECKECGKAFSCPSYFREHVRTHTGEKPYECKHCGKSFSCYSSFRDHVRTHTGEKPCQCKHCGKAFTCYSSLRE

SEQ ID NO: 2696 - protein, 85 aa, Homo sapiens
HGRTHSGEKPYECKECGKAFRYPSSLRAHMRMHTGEKPYVCKQCGKAFGCPTYFRRHVKTHSGVKPYQCKECGKAYSFSSSLRIH

SEQ ID NO: 2697 - protein, 85 aa, Homo sapiens
VRTHTGEKPFECKHCGKAFSCHSSLREHVRTHSGEKPYECNQCGKAFSHAQYFQKHVRSHSGVKPYECTECGKAYSCSSSLRVHV

SEQ ID NO: 2698 - protein, 84 aa, Homo sapiens
KPYECNQCGKAFSHAQYFQKHVRSHSGVKPYECTECGKAYSCSSSLRVHVRTHTGERPYECKQCGKTFRYLASLQAHVRTHAGA

SEQ ID NO: 2699 - protein, 85 aa, Homo sapiens
DCYIYVRTSGSSSQRDVFGNGISNDEEIVKFTGSDSWSIFGENWRFDNTGDQHQIPQRHLRSQLGRLCESNEGHQCGETLSQTAN

SEQ ID NO: 2700 - protein, 85 aa, Homo sapiens
LLVHKSYPTEAKPSECTKCGKAFENRQRSHTGQRPCKECGQACSCLSCQSPPMKTQTVEKPCNCQDSRTASVTYVKSLSSKKSYE

SEQ ID NO: 2701 - protein, 85 aa, Homo sapiens
CQKCGKAFICPSSFRGHVNSHHGQKTHACKVCGKTFMYYSYLTRHVRTHTGEKPYECKECGKAFSCPSYFREHVRTHTGEKPYEC

SEQ ID NO: 2702 - protein, 85 aa, Homo sapiens
KHCGKSFSCYSSFRDHVRTHTGEKPCQCKHCGKAFTCYSSLREHGRTHSGEKPYECKECGKAFRYPSSLRAHMRMHTGEKPYVCK

SEQ ID NO: 2703 - protein, 85 aa, Homo sapiens
QCGKAFGCPTYFRRHVKTHSGVKPYQCKECGKAYSFSSSLRIHVRTHTGEKPFECKHCGKAFSCHSSLREHVRTHSGEKPYECNQ

SEQ ID NO: 2704 - protein, 85 aa, Homo sapiens
ADDVDQQQTTNTVEEPLDLIRLSLDERIYVKMRNDRELRGRLHAYDQHLNMILGDVEETVTTIEIDEETYEEIYKSTKRNIPMLF

SEQ ID NO: 2705 - protein, 84 aa, Homo sapiens
DLIRLSLDERIYVKMRNDRELRGRLHAYDQHLNMILGDVEETVTTIEIDEETYEEIYKSTKRNIPMLFVRGDGVVLVAPPLRVG

SEQ ID NO: 2706 - protein, 85 aa, Homo sapiens
SGILKRKFEEVDGSSPCSSVRESDDEVSSSESADSGDSVNPSTSSHFTPSSILKREKRLRTKNVHFSCVTVYYFTRRQGFTSVPS

SEQ ID NO: 2707 - protein, 85 aa, Homo sapiens
QGGSTLGMSSRHNSVRQYTLGEFAREQERLHREMLREHLREEKLNSLKLKMTKNGTVESEEASTLTLDDISDDDIDLDNTEVDEY

SEQ ID NO: 2708 - protein, 85 aa, Homo sapiens
FFLQPLPTKKRRALLRASGVKKIDVEEKHELRAIRLSREDCGCDCRVFCDPDTCTCSLAGIKCQVDRMSFPCGCTKEGCSNTAGR

SEQ ID NO: 2709 - protein, 85 aa, Homo sapiens
IEFNPIRVRTHFLHTIMKLELEKNREQQIPTLNGCHSEISAHSSSMGPVAHSVEYSIADSFEIETEPQAAVLHLQSAEELDCQGE

SEQ ID NO: 2710 - protein, 85 aa, Homo sapiens
EEEEEEDGSSFCSGVTDSSTQSLAPSESDEEEEEEEEEEEEEDDDDDKGDGFVEGLGTHAEVVPLPSVLCYSDGTAVHESHAKNA

SEQ ID NO: 2711 - protein, 85 aa, Homo sapiens
SFYANSSTLYYQIDSHIPGTPNQISENYSERDTVKNGTLSLVPYTMTPEQFVDYARQAEEAYGASHYPAANPSVIVCCSSSENDS

SEQ ID NO: 2712 - protein, 84 aa, Homo sapiens
VCCSSSENDSGVPCNSLYPEHRSNHPQVEFHSYLKGPSQEGFVSALNGDSHISEHPAENSLSLAEKSILHEECIKSPVVETVPV

SEQ ID NO: 2713 - protein, 85 aa, Homo sapiens
TSSHFTPSSILKREKRLRTKNVHFSCVTVYYFTRRQGFTSVPSQGGSTLGMSSRHNSVRQYTLGEFAREQERLHREMLREHLREE

SEQ ID NO: 2714 - protein, 85 aa, Homo sapiens
KLNSLKLKMTKNGTVESEEASTLTLDDISDDDIDLDNTEVDEYFFLQPLPTKKRRALLRASGVKKIDVEEKHELRAIRLSREDCG

SEQ ID NO: 2715 - protein, 85 aa, Homo sapiens
CDCRVFCDPDTCTCSLAGIKCQVDRMSFPCGCTKEGCSNTAGRIEFNPIRVRTHFLHTIMKLELEKNREQQIPTLNGCHSEISAH

SEQ ID NO: 2716 - protein, 85 aa, Homo sapiens
SSSMGPVAHSVEYSIADSFEIETEPQAAVLHLQSAEELDCQGEEEEEEEDGSSFCSGVTDSSTQSLAPSESDEEEEEEEEEEEEE

SEQ ID NO: 2717 - protein, 85 aa, Homo sapiens
DDDDDKGDGFVEGLGTHAEVVPLPSVLCYSDGTAVHESHAKNASFYANSSTLYYQIDSHIPGTPNQISENYSERDTVKNGTLSLV

SEQ ID NO: 2718 - protein, 85 aa, Homo sapiens
PYTMTPEQFVDYARQAEEAYGASHYPAANPSVIVCCSSSENDSGVPCNSLYPEHRSNHPQVEFHSYLKGPSQEGFVSALNGDSHI

SEQ ID NO: 2719 - protein, 85 aa, Homo sapiens
EISASSGSREAHSQTEKRRRDKMNNLIEELSAMIPQCNPMARKLDKLTVLRMAVQHLRSLKGLTNSYVGSNYRPSFLQDNELRHL

SEQ ID NO: 2720 - protein, 85 aa, Homo sapiens
ILKTAEGFLFVVGCERGKILFVSKSVSKILNYDQASLTGQSLFDFLHPKDVAKVKEQLSSFDISPREKLIDAKTGLQVHSNLHAG

SEQ ID NO: 2721 - protein, 85 aa, Homo sapiens
RTRVYSGSRRSFFCRIKSCKISVKEEHGCLPNSKKKEHRKFYTIHCTGYLRSWPPNIVGMEEERNSKKDNSNFTCLVAIGRLQPY

SEQ ID NO: 2722 - protein, 85 aa, Homo sapiens
IVPQNSGEINVKPTEFITRFAVNGKFVYVDQRATAILGYLPQELLGTSCYEYFHQDDHNNLTDKHKAVLQSKEKILTDSYKFRAK

SEQ ID NO: 2723 - protein, 85 aa, Homo sapiens
DGSFVTLKSQWFSFTNPWTKELEYIVSVNTLVLGHSEPGEASFLPCSSQSSEESSRQSCMSVPGMSTGTVLGAGSIGTDIANEIL

SEQ ID NO: 2724 - protein, 85 aa, Homo sapiens
DLQRLQSSSYLDDSSPTGLMKDTHTVNCRSMSNKELFPPSPSEMGELEATRQNQSTVAVHSHEPLLSDGAQLDFDALCDNDDTAM

SEQ ID NO: 2725 - protein, 85 aa, Homo sapiens
HMTEFPRKRKGSDSDPSQSGIMTEKVVEKLSQNPLTYLLSTRIEISASSGSREAHSQTEKRRRDKMNNLIEELSAMIPQCNPMAR

SEQ ID NO: 2726 - protein, 85 aa, Homo sapiens
KLDKLTVLRMAVQHLRSLKGLTNSYVGSNYRPSFLQDNELRHLILKTAEGFLFVVGCERGKILFVSKSVSKILNYDQASLTGQSL

SEQ ID NO: 2727 - protein, 85 aa, Homo sapiens
FDFLHPKDVAKVKEQLSSFDISPREKLIDAKTGLQVHSNLHAGRTRVYSGSRRSFFCRIKSCKISVKEEHGCLPNSKKKEHRKFY

SEQ ID NO: 2728 - protein, 85 aa, Homo sapiens
TIHCTGYLRSWPPNIVGMEEERNSKKDNSNFTCLVAIGRLQPYIVPQNSGEINVKPTEFITRFAVNGKFVYVDQRATAILGYLPQ

SEQ ID NO: 2729 - protein, 85 aa, Homo sapiens
ELLGTSCYEYFHQDDHNNLTDKHKAVLQSKEKILTDSYKFRAKDGSFVTLKSQWFSFTNPWTKELEYIVSVNTLVLGHSEPGEAS

SEQ ID NO: 2730 - protein, 85 aa, Homo sapiens
FLPCSSQSSEESSRQSCMSVPGMSTGTVLGAGSIGTDIANEILDLQRLQSSSYLDDSSPTGLMKDTHTVNCRSMSNKELFPPSPS

SEQ ID NO: 2731 - protein, 85 aa, Homo sapiens
AKAKKVGARRKASGAPAGARGGPAKANSNPFEVKVNRQKFQILGRKTRHDVGLPGVSRARALRKRTQTLLKEYKERDKSNVFRDK

SEQ ID NO: 2732 - protein, 85 aa, Homo sapiens
RFGEYNSNMSPEEKMMKRFALEQQRHHEKKSIYNLNEDEELTHYGQSLADIEKHNDIVDSDSDAEDRGTLSAELTAAHFGGGGGL

SEQ ID NO: 2733 - protein, 85 aa, Homo sapiens
LHKKTQQEGEEREKPKSRKELIEELIAKSKQEKRERQAQREDALELTEKLDQDWKEIQTLLSHKTPKSENRDKKEKPKPDAYDMM

SEQ ID NO: 2734 - protein, 85 aa, Homo sapiens
VRELGFEMKAQPSNRMKTEAELAKEEQEHLRKLEAERLRRMLGKDEDENVKKPKHMSADDLNDGFVLDKDDRRLLSYKDGKMNVE

SEQ ID NO: 2735 - protein, 85 aa, Homo sapiens
EDVQEEQSKEASDPESNEEEGDSSGGEDTEESDSPDSHLDLESNVESEEENEKPAKEQRQTPGKGLISGKERAGKATRDELPYTF

SEQ ID NO: 2736 - protein, 85 aa, Homo sapiens
AAPESYEELRSLLLGRSMEEQLLVVERIQKCNHPSLAEGNKAKLEKLFGFLLEYVGDLATDDPPDLTVIDKLVVHLYHLCQMFPE

SEQ ID NO: 2737 - protein, 85 aa, Homo sapiens
SASDAIKFVLRDAMHEMEEMIETKGRAALPGLDVLIYLKITGLLFPTSDFWHPVVTPALVCLSQLLTKCPILSLQDVVKGLFVCC

SEQ ID NO: 2738 - protein, 85 aa, Homo sapiens
MFLEYVALSQRFIPELINFLLGILYIATPNKASQGSTLVHPFRALGKNSELLVVSAREDVATWQQSSLSLRWASRLRAPTSTEAN

SEQ ID NO: 2739 - protein, 85 aa, Homo sapiens
HIRLSCLAVGLALLKRCVLMYGSLPSFHAIMGPLQALLTDHLADCSHPQELQELCQSTLTEMESQKQLCRPLTCEKSKPVPLKLF

SEQ ID NO: 2740 - protein, 85 aa, Homo sapiens
TPRLVKVLEFGRKQGSSKEEQERKRLIHKHKREFKGAVREIRKDNQFLARMQLSEIMERDAERKRKVKQLFNSLATQEGEWKALK

SEQ ID NO: 2741 - protein, 84 aa, Homo sapiens
LEFGRKQGSSKEEQERKRLIHKHKREFKGAVREIRKDNQFLARMQLSEIMERDAERKRKVKQLFNSLATQEGEWKALKRKKFKK

SEQ ID NO: 2742 - protein, 85 aa, Homo sapiens
MGRKTRHDVGLPGVSRARALRKRTQTLLKEYKERDKSNVFRDKRFGEYNSNMSPEEKMMKRFALEQQRHHEKKSIYNLNEDEELT

SEQ ID NO: 2743 - protein, 85 aa, Homo sapiens
HYGQSLADIEKHNDIVDSDSDAEDRGTLSAELTAAHFGGGGGLLHKKTQQEGEEREKPKSRKELIEELIAKSKQEKRERQAQRED

SEQ ID NO: 2744 - protein, 85 aa, Homo sapiens
ALELTEKLDQDWKEIQTLLSHKTPKSENRDKKEKPKPDAYDMMVRELGFEMKAQPSNRMKTEAELAKEEQEHLRKLEAERLRRML

SEQ ID NO: 2745 - protein, 85 aa, Homo sapiens
GKDEDENVKKPKHMSADDLNDGFVLDKDDRRLLSYKDGKMNVEEDVQEEQSKEASDPESNEEEGDSSGGEDTEESDSPDSHLDLE

SEQ ID NO: 2746 - protein, 85 aa, Homo sapiens
SNVESEEENEKPAKEQRQTPGKGLISGKERAGKATRDELPYTFAAPESYEELRSLLLGRSMEEQLLVVERIQKCNHPSLAEGNKA

SEQ ID NO: 2747 - protein, 85 aa, Homo sapiens
KLEKLFGFLLEYVGDLATDDPPDLTVIDKLVVHLYHLCQMFPESASDAIKFVLRDAMHEMEEMIETKGRAALPGLDVLIYLKITG

SEQ ID NO: 2748 - protein, 85 aa, Homo sapiens
MLFPTSDFWHPVVTPALVCLSQLLTKCPILSLQDVVKGLFVCCLFLEYVALSQRFIPELINFLLGILYIATPNKASQGSTLVHPF

SEQ ID NO: 2749 - protein, 85 aa, Homo sapiens
RALGKNSELLVVSAREDVATWQQSSLSLRWASRLRAPTSTEANHIRLSCLAVGLALLKRCVLMYGSLPSFHAIMGPLQALLTDHL

SEQ ID NO: 2750 - protein, 85 aa, Homo sapiens
ADCSHPQELQELCQSTLTEMESQKQLCRPLTCEKSKPVPLKLFTPRLVKVLEFGRKQGSSKEEQERKRLIHKHKREFKGAVREIR

SEQ ID NO: 2751 - protein, 85 aa, Homo sapiens
ATPMHRLIARRQAEANKQHVRCQKCLEFGHWTYECTGKRKYLHRPSRTAELKKALKEKENRLLLQQSIGETNVERKAKKKRSKSV

SEQ ID NO: 2752 - protein, 84 aa, Homo sapiens
TSSSSSSSDSSASDSSSESEETSTSSSSEDSDTDESSSSSSSSASSTTSSSSSDSDSDSSSSSSSSTSTDSSSDDEPPKKKKKK

SEQ ID NO: 2753 - protein, 85 aa, Homo sapiens
HRPSRTAELKKALKEKENRLLLQQSIGETNVERKAKKKRSKSVTSSSSSSSDSSASDSSSESEETSTSSSSEDSDTDESSSSSSS

SEQ ID NO: 2754 - protein, 85 aa, Homo sapiens
VPREAPESAQCLCPSLTIPNAKDVLRKRHKRRSRQHQRFMARKALLQEQGLLSMPPEPGSSPLPTPFGAATATEAASSGKQCLRA

SEQ ID NO: 2755 - protein, 85 aa, Homo sapiens
GSGSAPCSRRPAPGKASGPLPSKCVAIDCEMVGTGPRGRVSELARCSIVSYHGNVLYDKYIRPEMPIADYRTRWSGITRQHMRKA

SEQ ID NO: 2756 - protein, 85 aa, Homo sapiens
VPFQVAQKEILKLLKGKVVVGHALHNDFQALKYVHPRSQTRDTTYVPNFLSEPGLHTRARVSLKDLALQLLHKKIQVGQHGHSSV

SEQ ID NO: 2757 - protein, 84 aa, Homo sapiens
MHKKIQVGQHGHSSVEDATTAMELYRLVEVQWEQQEARSLWTCPEDREPDSSTDMEQYMEDQYWPDDLAHGSRGGAREAQDRRN

SEQ ID NO: 2758 - protein, 85 aa, Homo sapiens
KALLQEQGLLSMPPEPGSSPLPTPFGAATATEAASSGKQCLRAGSGSAPCSRRPAPGKASGPLPSKCVAIDCEMVGTGPRGRVSE

SEQ ID NO: 2759 - protein, 85 aa, Homo sapiens
MARCSIVSYHGNVLYDKYIRPEMPIADYRTRWSGITRQHMRKAVPFQVAQKEILKLLKGKVVVGHALHNDFQALKYVHPRSQTRD

SEQ ID NO: 2760 - protein, 85 aa, Homo sapiens
TTYVPNFLSEPGLHTRARVSLKDLALQLLHKKIQVGQHGHSSVEDATTAMELYRLVEVQWEQQEARSLWTCPEDREPDSSTDMEQ

SEQ ID NO: 2761 - protein, 85 aa, Homo sapiens
PGEQQAEEEEEEEMQEEMVLLVKGEEDEGEEKYEVVKLKIPMDNKEVPGEAPAPSADPARPHACPDCGRAFARRSTLAKHARTHT

SEQ ID NO: 2762 - protein, 85 aa, Homo sapiens
GERPFGCTECGRRFSQKSALTKHGRTHTGERPYECPECDKRFSAASNLRQHRRRHTGEKPYACAHCGRRFAQSSNYAQHLRVHTG

SEQ ID NO: 2763 - protein, 85 aa, Homo sapiens
EKPYACPDCGRAFGGSSCLARHRRTHTGERPYACADCGTRFAQSSALAKHRRVHTGEKPHRCAVCGRRFGHRSNLAEHARTHTGE

SEQ ID NO: 2764 - protein, 84 aa, Homo sapiens
AVCGRRFGHRSNLAEHARTHTGERPYPCAECGRRFRLSSHFIRHRRAHMRRRLYICAGCGRDFKLPPGATAATATERCPECEGS

SEQ ID NO: 2765 - protein, 85 aa, Homo sapiens
DNKEVPGEAPAPSADPARPHACPDCGRAFARRSTLAKHARTHTGERPFGCTECGRRFSQKSALTKHGRTHTGERPYECPECDKRF

SEQ ID NO: 2766 - protein, 85 aa, Homo sapiens
SAASNLRQHRRRHTGEKPYACAHCGRRFAQSSNYAQHLRVHTGEKPYACPDCGRAFGGSSCLARHRRTHTGERPYACADCGTRFA

SEQ ID NO: 2767 - protein, 85 aa, Homo sapiens
QSSALAKHRRVHTGEKPHRCAVCGRRFGHRSNLAEHARTHTGERPYPCAECGRRFRLSSHFIRHRRAHMRRRLYICAGCGRDFKL

SEQ ID NO: 2768 - protein, 85 aa, Homo sapiens
SAFKVPRPGPDTLQFTVDVFHFANDSRNMIYITCHLKVTLAEQDPDELNKACSFSKPSNSWFPVEGLADICQCCNKGDCGTPSHS

SEQ ID NO: 2769 - protein, 84 aa, Homo sapiens
DVFHFANDSRNMIYITCHLKVTLAEQDPDELNKACSFSKPSNSWFPVEGLADICQCCNKGDCGTPSHSRRQPRVVSQWSTSASL

SEQ ID NO: 2770 - protein, 85 aa, Homo sapiens
KETVLSALKEKKKKRTVEEEDQIFLDGQENKRSCLVDGLTDASSAFKVPRPGPDTLQFTVDVFHFANDSRNMIYITCHLKVTLAE

SEQ ID NO: 2771 - protein, 85 aa, Homo sapiens
GTVPDPLRSAKTSLIAASGKEDDLGEPQAASPRHRPALLCKNANGFSGAPAEPDLSPRAAAEALMQVCEHETTQPDMSSPGVFNE

SEQ ID NO: 2772 - protein, 85 aa, Homo sapiens
VQKAPATFNSPGNPQLPGSSQPAASAPSSAAGRDLIHTPLTMPANQHTCQSIPGDQPNAITSSMPEDSLMRSQRTSNREQPEKPS

SEQ ID NO: 2773 - protein, 85 aa, Homo sapiens
CPVGGVLSSSKDQVSCEFPSPETIQGTVQTPVTAARVVSHSSSPVGGPEGERQGAICDSEMRSCKPLTRESGCSENKQPSVTASG

SEQ ID NO: 2774 - protein, 85 aa, Homo sapiens
PQGTTSVTPQPTPLTSEPSACPPGPEKVPLPAQRQMSRFKEASTMTNQAESEIKEVPSRAWQDAEVQAVASVESRSVSTSPSILT

SEQ ID NO: 2775 - protein, 85 aa, Homo sapiens
AFLKESRAPEHFEQEQLRVICHSSGSHTLELSDSTLAPQESSQCPGIMPQVHIQAAAAESTAFQRENKLASLPGGVLKTSSINLV

SEQ ID NO: 2776 - protein, 85 aa, Homo sapiens
SSNAQHTCKEDGRLAGMTPVREESTAKKLAGTNSSSLKATAIDQISISACSQAETSYGLGKFETRPSEFAEKTTNGHKTDPDCKL

SEQ ID NO: 2777 - protein, 85 aa, Homo sapiens
SDSCGSISKADHSGSLDPTNKGDAREKKPASPQVVKEKESTGTDTSDAKTLLLNPKSQESGGTESAANPTPSPIRKNQESTLEEN

SEQ ID NO: 2778 - protein, 85 aa, Homo sapiens
RQTKTATSLSLPSDPMGDSSPGSGKKTPSRSVKASPRRPSRVSEFLKEQKLNVTAAAAQVGLTPGDKKKQLGADSKLQLKQSKRV

SEQ ID NO: 2779 - protein, 85 aa, Homo sapiens
RDVVWDEQGMTWEVYGASLDAESLGIAIQNHLQRQIREHEKLIKTQNSQTRRSISSDTSSNKKLRGRQHSVFQSMLQNFRRPNCC

SEQ ID NO: 2780 - protein, 84 aa, Homo sapiens
WEVYGASLDAESLGIAIQNHLQRQIREHEKLIKTQNSQTRRSISSDTSSNKKLRGRQHSVFQSMLQNFRRPNCCVRPAPSSVLD

SEQ ID NO: 2781 - protein, 85 aa, Homo sapiens
ANGFSGAPAEPDLSPRAAAEALMQVCEHETTQPDMSSPGVFNEVQKAPATFNSPGNPQLPGSSQPAASAPSSAAGRDLIHTPLTM

SEQ ID NO: 2782 - protein, 85 aa, Homo sapiens
PANQHTCQSIPGDQPNAITSSMPEDSLMRSQRTSNREQPEKPSCPVGGVLSSSKDQVSCEFPSPETIQGTVQTPVTAARVVSHSS

SEQ ID NO: 2783 - protein, 85 aa, Homo sapiens
SPVGGPEGERQGAICDSEMRSCKPLTRESGCSENKQPSVTASGPQGTTSVTPQPTPLTSEPSACPPGPEKVPLPAQRQMSRFKEA

SEQ ID NO: 2784 - protein, 85 aa, Homo sapiens
STMTNQAESEIKEVPSRAWQDAEVQAVASVESRSVSTSPSILTAFLKESRAPEHFEQEQLRVICHSSGSHTLELSDSTLAPQESS

SEQ ID NO: 2785 - protein, 85 aa, Homo sapiens
QCPGIMPQVHIQAAAAESTAFQRENKLASLPGGVLKTSSINLVSSNAQHTCKEDGRLAGMTPVREESTAKKLAGTNSSSLKATAI

SEQ ID NO: 2786 - protein, 85 aa, Homo sapiens
DQISISACSQAETSYGLGKFETRPSEFAEKTTNGHKTDPDCKLSDSCGSISKADHSGSLDPTNKGDAREKKPASPQVVKEKESTG

SEQ ID NO: 2787 - protein, 85 aa, Homo sapiens
TDTSDAKTLLLNPKSQESGGTESAANPTPSPIRKNQESTLEENRQTKTATSLSLPSDPMGDSSPGSGKKTPSRSVKASPRRPSRV

SEQ ID NO: 2788 - protein, 85 aa, Homo sapiens
SEFLKEQKLNVTAAAAQVGLTPGDKKKQLGADSKLQLKQSKRVRDVVWDEQGMTWEVYGASLDAESLGIAIQNHLQRQIREHEKL

SEQ ID NO: 2789 - protein, 85 aa, Homo sapiens
EREPGAAGVRRALGRRLEAVLASRSEANAVFDILAVLQSEDQEEIQEAVRTCSRLFGALLERGELFVGQLPSEEMVMTGSQGATR

SEQ ID NO: 2790 - protein, 85 aa, Homo sapiens
KYKVWMRHRYHSCCNRLGELLGHPSFQVKELALSALLKFVQLEGAHPLEKSKWEGNYLFPRELFKLVVGGLLSPEEDQSLLLSQF

SEQ ID NO: 2791 - protein, 85 aa, Homo sapiens
REYLDYDDTRYHTMQAAVDAVARVTGQHPEVPPAFWNNAFTLLSAVSLPRREPTVSSFYVKRAELWDTWKVAHLKEHRRVFQAMW

SEQ ID NO: 2792 - protein, 85 aa, Homo sapiens
LSFLKHKLPLSLYKKVLLIVHDAILPQLAQPTLMIDFLTRACDLGGALSLLALNGLFILIHKHNLEYPDFYRKLYGLLDPSVFHV

SEQ ID NO: 2793 - protein, 85 aa, Homo sapiens
KYRARFFHLADLFLSSSHLPAYLVAAFAKRLARLALTAPPEALLMVLPFICNLLRRHPACRVLVHRPHGPELDADPYDPGEEDPA

SEQ ID NO: 2794 - protein, 85 aa, Homo sapiens
QSRALESSLWELQALQRHYHPEVSKAASVINQALSMPEVSIAPLLELTAYEIFERDLKKKGPEPVPLEFIPAQGLLGRPGELCAQ

SEQ ID NO: 2795 - protein, 84 aa, Homo sapiens
SSLWELQALQRHYHPEVSKAASVINQALSMPEVSIAPLLELTAYEIFERDLKKKGPEPVPLEFIPAQGLLGRPGELCAQHFTLS

SEQ ID NO: 2796 - protein, 85 aa, Homo sapiens
EEIQEAVRTCSRLFGALLERGELFVGQLPSEEMVMTGSQGATRKYKVWMRHRYHSCCNRLGELLGHPSFQVKELALSALLKFVQL

SEQ ID NO: 2797 - protein, 85 aa, Homo sapiens
EGAHPLEKSKWEGNYLFPRELFKLVVGGLLSPEEDQSLLLSQFREYLDYDDTRYHTMQAAVDAVARVTGQHPEVPPAFWNNAFTL

SEQ ID NO: 2798 - protein, 85 aa, Homo sapiens
MSAVSLPRREPTVSSFYVKRAELWDTWKVAHLKEHRRVFQAMWLSFLKHKLPLSLYKKVLLIVHDAILPQLAQPTLMIDFLTRAC

SEQ ID NO: 2799 - protein, 85 aa, Homo sapiens
DLGGALSLLALNGLFILIHKHNLEYPDFYRKLYGLLDPSVFHVKYRARFFHLADLFLSSSHLPAYLVAAFAKRLARLALTAPPEA

SEQ ID NO: 2800 - protein, 85 aa, Homo sapiens
MLMVLPFICNLLRRHPACRVLVHRPHGPELDADPYDPGEEDPAQSRALESSLWELQALQRHYHPEVSKAASVINQALSMPEVSIA

SEQ ID NO: 2801 - protein, 85 aa, Homo sapiens
KETIQGTGSWGPEPPGPGIPPAYSSPRRERLRWPPPPKPRLKSGGGFGPDPGSGTTVPARRLPVPRPSFDASASEEEEEEEEEED

SEQ ID NO: 2802 - protein, 85 aa, Homo sapiens
EDEEEEVAAWRLPPRWSQLGTSQRPRPSRPTHRKTCSQRRRRAMRAFRMLLYSKSTSLTFHWKLWGRHRGRRRGLAHPKNHLSPQ

SEQ ID NO: 2803 - protein, 85 aa, Homo sapiens
QGGATPQVPSPCCRFDSPRGPPPPRLGLLGALMAEDGVRGSPPVPSGPPMEEDGLRWTPKSPLDPDSGLLSCTLPNGFGGQSGPE

SEQ ID NO: 2804 - protein, 85 aa, Homo sapiens
GERSLAPPDASILISNVCSIGDHVAQELFQGSDLGMAEEAERPGEKAGQHSPLREEHVTCVQSILDEFLQTYGSLIPLSTDEVVE

SEQ ID NO: 2805 - protein, 85 aa, Homo sapiens
KLEDIFQQEFSTPSRKGLVLQLIQSYQRMPGNAMVRGFRVAYKRHVLTMDDLGTLYGQNWLNDQVMNMYGDLVMDTVPEKVHFFN

SEQ ID NO: 2806 - protein, 85 aa, Homo sapiens
SFFYDKLRTKGYDGVKRWTKNVDIFNKELLLIPIHLEVHWSLISVDVRRRTITYFDSQRTLNRRCPKHIAKYLQAEAVKKDRLDF

SEQ ID NO: 2807 - protein, 84 aa, Homo sapiens
CPKHIAKYLQAEAVKKDRLDFHQGWKGYFKMNVARQNNDSDCGAFVLQYCKHLALSQPFSFTQQDMPKLRRQIYKELCHCKLTV

SEQ ID NO: 2808 - protein, 85 aa, Homo sapiens
SGGGFGPDPGSGTTVPARRLPVPRPSFDASASEEEEEEEEEEDEDEEEEVAAWRLPPRWSQLGTSQRPRPSRPTHRKTCSQRRRR

SEQ ID NO: 2809 - protein, 85 aa, Homo sapiens
AMRAFRMLLYSKSTSLTFHWKLWGRHRGRRRGLAHPKNHLSPQQGGATPQVPSPCCRFDSPRGPPPPRLGLLGALMAEDGVRGSP

SEQ ID NO: 2810 - protein, 85 aa, Homo sapiens
PVPSGPPMEEDGLRWTPKSPLDPDSGLLSCTLPNGFGGQSGPEGERSLAPPDASILISNVCSIGDHVAQELFQGSDLGMAEEAER

SEQ ID NO: 2811 - protein, 85 aa, Homo sapiens
PGEKAGQHSPLREEHVTCVQSILDEFLQTYGSLIPLSTDEVVEKLEDIFQQEFSTPSRKGLVLQLIQSYQRMPGNAMVRGFRVAY

SEQ ID NO: 2812 - protein, 85 aa, Homo sapiens
KRHVLTMDDLGTLYGQNWLNDQVMNMYGDLVMDTVPEKVHFFNSFFYDKLRTKGYDGVKRWTKNVDIFNKELLLIPIHLEVHWSL

SEQ ID NO: 2813 - protein, 85 aa, Homo sapiens
ISVDVRRRTITYFDSQRTLNRRCPKHIAKYLQAEAVKKDRLDFHQGWKGYFKMNVARQNNDSDCGAFVLQYCKHLALSQPFSFTQ

SEQ ID NO: 2814 - protein, 85 aa, Homo sapiens
ADGNEDLRADDLPGPAFESYESMELACPAERSGHVAVSDGRHMFVWGGYKSNQVRGLYDFYLPREELWIYNMETGRWKKINTEGD

SEQ ID NO: 2815 - protein, 85 aa, Homo sapiens
VPPSMSGSCAVCVDRVLYLFGGHHSRGNTNKFYMLDSRSTDRVLQWERIDCQGIPPSSKDKLGVWVYKNKLIFFGGYGYLPEDKV

SEQ ID NO: 2816 - protein, 85 aa, Homo sapiens
MGTFEFDETSFWNSSHPRGWNDHVHILDTETFTWSQPITTGKAPSPRAAHACATVGNRGFVFGGRYRDARMNDLHYLNLDTWEWN

SEQ ID NO: 2817 - protein, 85 aa, Homo sapiens
ELIPQGICPVGRSWHSLTPVSSDHLFLFGGFTTDKQPLSDAWTYCISKNEWIQFNHPYTEKPRLWHTACASDEGEVIVFGGCANN

SEQ ID NO: 2818 - protein, 84 aa, Homo sapiens
TACASDEGEVIVFGGCANNLLVHHRAAHSNEILIFSVQPKSLVRLSLEAVICFKEMLANSWNCLPKHLLHSVNQRFGSNNTSGS

SEQ ID NO: 2819 - protein, 85 aa, Homo sapiens
MFVWGGYKSNQVRGLYDFYLPREELWIYNMETGRWKKINTEGDVPPSMSGSCAVCVDRVLYLFGGHHSRGNTNKFYMLDSRSTDR

SEQ ID NO: 2820 - protein, 85 aa, Homo sapiens
VLQWERIDCQGIPPSSKDKLGVWVYKNKLIFFGGYGYLPEDKVLGTFEFDETSFWNSSHPRGWNDHVHILDTETFTWSQPITTGK

SEQ ID NO: 2821 - protein, 85 aa, Homo sapiens
APSPRAAHACATVGNRGFVFGGRYRDARMNDLHYLNLDTWEWNELIPQGICPVGRSWHSLTPVSSDHLFLFGGFTTDKQPLSDAW

SEQ ID NO: 2822 - protein, 85 aa, Homo sapiens
TYCISKNEWIQFNHPYTEKPRLWHTACASDEGEVIVFGGCANNLLVHHRAAHSNEILIFSVQPKSLVRLSLEAVICFKEMLANSW

SEQ ID NO: 2823 - protein, 85 aa, Homo sapiens
ESMAVATDGGERPGVPAGSGLSASQRRAELRRRKLLMNSEQRINRIMGFHRPGSGAEEESQTKSKQQDSDKLNSLSVPSVSKRVV

SEQ ID NO: 2824 - protein, 85 aa, Homo sapiens
MGDSVSTGTTDQQGGVAEVKGTQLGDKLDSFIKPPECSSDVNLELRQRNRGDLTADSVQRGSRHGLEQYLSRFEEAMKLRKQLIS

SEQ ID NO: 2825 - protein, 85 aa, Homo sapiens
EKPSQEDGNTTEEFDSFRIFRLVGCALLALGVRAFVCKYLSIFAPFLTLQLAYMGLYKYFPKSEKKIKTTVLTAALLLSGIPAEV

SEQ ID NO: 2826 - protein, 84 aa, Homo sapiens
IFAPFLTLQLAYMGLYKYFPKSEKKIKTTVLTAALLLSGIPAEVINRSMDTYSKMGEVFTDLCVYFFTFIFCHELLDYWGSEVP

SEQ ID NO: 2827 - protein, 85 aa, Homo sapiens
INRIMGFHRPGSGAEEESQTKSKQQDSDKLNSLSVPSVSKRVVLGDSVSTGTTDQQGGVAEVKGTQLGDKLDSFIKPPECSSDVN

SEQ ID NO: 2828 - protein, 85 aa, Homo sapiens
LELRQRNRGDLTADSVQRGSRHGLEQYLSRFEEAMKLRKQLISEKPSQEDGNTTEEFDSFRIFRLVGCALLALGVRAFVCKYLSI

SEQ ID NO: 2829 - protein, 85 aa, Homo sapiens
DPNRGNQVERPQMTFGRLQGISPKIMPKKPAEEGNDSEEVPEASGPQNDGKELCPPGKPTTSEKIHERSGNREAQEKEERRGTAH

SEQ ID NO: 2830 - protein, 84 aa, Homo sapiens
CPPGKPTTSEKIHERSGNREAQEKEERRGTAHRWSSQNTHNIGRFSLSTSMGAVHGTPKTITHNRDPKGGNMPGPTDCVRENSW

SEQ ID NO: 2831 - protein, 85 aa, Homo sapiens
ASGPQNDGKELCPPGKPTTSEKIHERSGNREAQEKEERRGTAHRWSSQNTHNIGRFSLSTSMGAVHGTPKTITHNRDPKGGNMPG

SEQ ID NO: 2832 - protein, 85 aa, Homo sapiens
GKRDNRVAYMNPIAMARWRGPTQSVGPTIQDYLNRPRPTWEEVKKQLENKKTGSKALAEFEEKMNENWKKELEKSREKLLSGNES

SEQ ID NO: 2833 - protein, 85 aa, Homo sapiens
SSKKRERKKKRKKKSCRSSSSSSSSDSSSSSSDSEDEEKKQGKRRKKKKNRSYKSSQSSTHESESESKESVKKKKKSKDETEKEK

SEQ ID NO: 2834 - protein, 84 aa, Homo sapiens
DETEKEKDVRSLSKKRKKSYPDDKPLSSESSSESDYEEDVQAKKKRRCEEREQAKEKVKKKKKKQHKKHSKKKKKKSGSSHKSR

SEQ ID NO: 2835 - protein, 85 aa, Homo sapiens
VKKQLENKKTGSKALAEFEEKMNENWKKELEKSREKLLSGNESSSKKRERKKKRKKKSCRSSSSSSSSDSSSSSSDSEDEEKKQG

SEQ ID NO: 2836 - protein, 85 aa, Homo sapiens
KRRKKKKNRSYKSSQSSTHESESESKESVKKKKKSKDETEKEKDVRSLSKKRKKSYPDDKPLSSESSSESDYEEDVQAKKKRRCE

SEQ ID NO: 2837 - protein, 85 aa, Homo sapiens
LGKPVRCIHWDQASARPRGPEIEPRGEGDHNHDTGEGGQGGEEPRGGRWDEDEQWSVVVECEDCELIPADHVIVTVSLGVLKRQY

SEQ ID NO: 2838 - protein, 85 aa, Homo sapiens
TSFFRPGLPTEKVAAIHRLGIGTTDKIFLEFEEPFWGPECNSLQFVWEDEAESHTLTYPPELWYRKICGFDVLYPPERYGHVLSG

SEQ ID NO: 2839 - protein, 85 aa, Homo sapiens
WICGEEALVMEKCDDEAVAEICTEMLRQFTGNPNIPKPRRILRSAWGSNPYFRGSYSYTQVGSSGADVEKLAKPLPYTESSKTAP

SEQ ID NO: 2840 - protein, 84 aa, Homo sapiens
WGSNPYFRGSYSYTQVGSSGADVEKLAKPLPYTESSKTAPMQVLFSGEATHRKYYSTTHGALLSGQREAARLIEMYRDLFQQGT

SEQ ID NO: 2841 - protein, 85 aa, Homo sapiens
MDEVSLSAFGEWTEIPGAHHIIPSGFMRVVELLAEGIPAHVIQLGKPVRCIHWDQASARPRGPEIEPRGEGDHNHDTGEGGQGGE

SEQ ID NO: 2842 - protein, 85 aa, Homo sapiens
EPRGGRWDEDEQWSVVVECEDCELIPADHVIVTVSLGVLKRQYTSFFRPGLPTEKVAAIHRLGIGTTDKIFLEFEEPFWGPECNS

SEQ ID NO: 2843 - protein, 85 aa, Homo sapiens
LQFVWEDEAESHTLTYPPELWYRKICGFDVLYPPERYGHVLSGWICGEEALVMEKCDDEAVAEICTEMLRQFTGNPNIPKPRRIL

SEQ ID NO: 2844 - protein, 85 aa, Homo sapiens
RSAWGSNPYFRGSYSYTQVGSSGADVEKLAKPLPYTESSKTAPMQVLFSGEATHRKYYSTTHGALLSGQREAARLIEMYRDLFQQ

SEQ ID NO: 2845 - protein, 85 aa, Homo sapiens
FVASERKMRAHQVLTFLLLFVITSVASENASTSRGCGLDLLPQYVSLCDLDAIWGIVVEAVAGAGALITLLLMLILLVRLPFIKE

SEQ ID NO: 2846 - protein, 85 aa, Homo sapiens
KEKKSPVGLHFLFLLGTLGLFGLTFAFIIQEDETICSVRRFLWGVLFALCFSCLLSQAWRVRRLVRHGTGPAGWQLVGLALCLML

SEQ ID NO: 2847 - protein, 85 aa, Homo sapiens
VQVIIAVEWLVLTVLRDTRPACAYEPMDFVMALIYDMVLLVVTLGLALFTLCGKFKRWKLNGAFLLITAFLSVLIWVAWMTMYLF

SEQ ID NO: 2848 - protein, 85 aa, Homo sapiens
GNVKLQQGDAWNDPTLAITLAASGWVFVIFHAIPEIHCTLLPALQENTPNYFDTSQPRMRETAFEEDVQLPRAYMENKAFSMDEH

SEQ ID NO: 2849 - protein, 84 aa, Homo sapiens
FEEDVQLPRAYMENKAFSMDEHNAALRTAGFPNGSLGKRPSGSLGKRPSAPFRSNVYQPTEMAVVLNGGTIPTAPPSHTGRHLW

SEQ ID NO: 2850 - protein, 85 aa, Homo sapiens
QYVSLCDLDAIWGIVVEAVAGAGALITLLLMLILLVRLPFIKEKEKKSPVGLHFLFLLGTLGLFGLTFAFIIQEDETICSVRRFL

SEQ ID NO: 2851 - protein, 85 aa, Homo sapiens
WGVLFALCFSCLLSQAWRVRRLVRHGTGPAGWQLVGLALCLMLVQVIIAVEWLVLTVLRDTRPACAYEPMDFVMALIYDMVLLVV

SEQ ID NO: 2852 - protein, 85 aa, Homo sapiens
TLGLALFTLCGKFKRWKLNGAFLLITAFLSVLIWVAWMTMYLFGNVKLQQGDAWNDPTLAITLAASGWVFVIFHAIPEIHCTLLP

SEQ ID NO: 2853 - protein, 85 aa, Homo sapiens
ALQENTPNYFDTSQPRMRETAFEEDVQLPRAYMENKAFSMDEHNAALRTAGFPNGSLGKRPSGSLGKRPSAPFRSNVYQPTEMAV

SEQ ID NO: 2854 - protein, 85 aa, Homo sapiens
EESEPERKRARTDEVPAGGSRSEAEDEDDEDYVPYVPLRQRRQLLLQKLLQRRRKGAAEEEQQDSGSEPRGDEDDIPLGPQSNVS

SEQ ID NO: 2855 - protein, 85 aa, Homo sapiens
LLDQHQHLKEKAEARKESAKEKQLKEEEKILESVAEGRALMSVKEMAKGITYDDPIKTSWTPPRYVLSMSEERHERVRKKYHILV

SEQ ID NO: 2856 - protein, 85 aa, Homo sapiens
EGDGIPPPIKSFKEMKFPAAILRGLKKKGIHHPTPIQIQGIPTILSGRDMIGIAFTGSGKTLVFTLPVIMFCLEQEKRLPFSKRE

SEQ ID NO: 2857 - protein, 85 aa, Homo sapiens
GPYGLIICPSRELARQTHGILEYYCRLLQEDSSPLLRCALCIGGMSVKEQMETIRHGVHMMVATPGRLMDLLQKKMVSLDICRYL

SEQ ID NO: 2858 - protein, 85 aa, Homo sapiens
ALDEADRMIDMGFEGDIRTIFSYFKGQRQTLLFSATMPKKIQNFAKSALVKPVTINVGRAGAASLDVIQEVEYVKEEAKMVYLLE

SEQ ID NO: 2859 - protein, 85 aa, Homo sapiens
CLQKTPPPVLIFAEKKADVDAIHEYLLLKGVEAVAIHGGKDQEERTKAIEAFREGKKDVLVATDVASKGLDFPAIQHVINYDMPE

SEQ ID NO: 2860 - protein, 85 aa, Homo sapiens
EIENYVHRIGRTGRSGNTGIATTFINKACDESVLMDLKALLLEAKQKVPPVLQVLHCGDESMLDIGGERGCAFCGGLGHRITDCP

SEQ ID NO: 2861 - protein, 84 aa, Homo sapiens
ACDESVLMDLKALLLEAKQKVPPVLQVLHCGDESMLDIGGERGCAFCGGLGHRITDCPKLEAMQTKQVSNIGRKDYLAHSSMDF

SEQ ID NO: 2862 - protein, 85 aa, Homo sapiens
QLLLQKLLQRRRKGAAEEEQQDSGSEPRGDEDDIPLGPQSNVSLLDQHQHLKEKAEARKESAKEKQLKEEEKILESVAEGRALMS

SEQ ID NO: 2863 - protein, 85 aa, Homo sapiens
VKEMAKGITYDDPIKTSWTPPRYVLSMSEERHERVRKKYHILVEGDGIPPPIKSFKEMKFPAAILRGLKKKGIHHPTPIQIQGIP

SEQ ID NO: 2864 - protein, 85 aa, Homo sapiens
TILSGRDMIGIAFTGSGKTLVFTLPVIMFCLEQEKRLPFSKREGPYGLIICPSRELARQTHGILEYYCRLLQEDSSPLLRCALCI

SEQ ID NO: 2865 - protein, 85 aa, Homo sapiens
GGMSVKEQMETIRHGVHMMVATPGRLMDLLQKKMVSLDICRYLALDEADRMIDMGFEGDIRTIFSYFKGQRQTLLFSATMPKKIQ

SEQ ID NO: 2866 - protein, 85 aa, Homo sapiens
NFAKSALVKPVTINVGRAGAASLDVIQEVEYVKEEAKMVYLLECLQKTPPPVLIFAEKKADVDAIHEYLLLKGVEAVAIHGGKDQ

SEQ ID NO: 2867 - protein, 85 aa, Homo sapiens
EERTKAIEAFREGKKDVLVATDVASKGLDFPAIQHVINYDMPEEIENYVHRIGRTGRSGNTGIATTFINKACDESVLMDLKALLL

SEQ ID NO: 2868 - protein, 85 aa, Homo sapiens
NGDDTFARRPTVGAQIPEKIQKAFDDIAKYFSKEEWEKMKVSEKIVYVYMKRKYEAMTKLGFKAILPSFMRNKRVTDFQGNDFDN

SEQ ID NO: 2869 - protein, 85 aa, Homo sapiens
DPNRGNQVQRPQMTFGRLQGIFPKIMPKKPAEEGNVSKEVPEASGPQNDGKQLCPPGKPTTSEKINMISGPKRGEHAWTHRLRER

SEQ ID NO: 2870 - protein, 84 aa, Homo sapiens
QGIFPKIMPKKPAEEGNVSKEVPEASGPQNDGKQLCPPGKPTTSEKINMISGPKRGEHAWTHRLRERKQLVIYEEISDPEEDDE

SEQ ID NO: 2871 - protein, 85 aa, Homo sapiens
EKIVYVYMKRKYEAMTKLGFKAILPSFMRNKRVTDFQGNDFDNDPNRGNQVQRPQMTFGRLQGIFPKIMPKKPAEEGNVSKEVPE

SEQ ID NO: 2872 - protein, 85 aa, Homo sapiens
DRGQHPPGWAWQWLSSHPATLHQLECSGAISVHCNLYLLGSSDSSAPASRVAETTGPESSVTAAPRARKYKCGLPQPCPEEHLAF

SEQ ID NO: 2873 - protein, 85 aa, Homo sapiens
RVVSGAANVIGPKICLEDKMLMSSVKDNVGRGLNIALVNGVSGELIEARAFDMWAGDVNDLLKFIRPLHEGTLVFVASYDDPATK

SEQ ID NO: 2874 - protein, 84 aa, Homo sapiens
FVASYDDPATKMNEETRKLFSELGSRNAKELAFRDSWVFVGAKGVQNKSPFEQHVKNSKHSNKYEGWPEALEMEGCIPRRSTAS

SEQ ID NO: 2875 - protein, 85 aa, Homo sapiens
DSSAPASRVAETTGPESSVTAAPRARKYKCGLPQPCPEEHLAFRVVSGAANVIGPKICLEDKMLMSSVKDNVGRGLNIALVNGVS

SEQ ID NO: 2876 - protein, 85 aa, Homo sapiens
GELIEARAFDMWAGDVNDLLKFIRPLHEGTLVFVASYDDPATKMNEETRKLFSELGSRNAKELAFRDSWVFVGAKGVQNKSPFEQ

SEQ ID NO: 2877 - protein, 85 aa, Homo sapiens
AVVADSHYQGKIHAKRLKLLLGEKTPLKTTATPLSPLKPPRMDTAPVVASPYQRRDSDRYCGLCAAWFNNPLMAQQHYDGKKHKK

SEQ ID NO: 2878 - protein, 84 aa, Homo sapiens
YCGLCAAWFNNPLMAQQHYDGKKHKKNAARVALLEQLGTTLDMGELRGLRRNYRCTICSVSLNSIEQYHAHLKGSKHQTNLKNK

SEQ ID NO: 2879 - protein, 85 aa, Homo sapiens
MYYMLHPRDGGCPAKRLRSENGSDADMVDKNKCCTLCNMSFTSAVVADSHYQGKIHAKRLKLLLGEKTPLKTTATPLSPLKPPRM

SEQ ID NO: 2880 - protein, 85 aa, Homo sapiens
DTAPVVASPYQRRDSDRYCGLCAAWFNNPLMAQQHYDGKKHKKNAARVALLEQLGTTLDMGELRGLRRNYRCTICSVSLNSIEQY

SEQ ID NO: 2881 - protein, 85 aa, Homo sapiens
STQDERQINTEYAVSLLEQLKLFYEQQLFTDIVLIVEGTEFPCHKMVLATCSSYFRAMFMSGLSESKQTHVHLRNVDAATLQIII

SEQ ID NO: 2882 - protein, 85 aa, Homo sapiens
TYAYTGNLAMNDSTVEQLYETACFLQVEDVLQRCREYLIKKINAENCVRLLSFADLFSCEELKQSAKRMVEHKFTAVYHQDAFMQ

SEQ ID NO: 2883 - protein, 85 aa, Homo sapiens
MSHDLLIDILSSDNLNVEKEETVREAAMLWLEYNTESRSQYLSSVLSQIRIDALSEVTQRAWFQGLPPNDKSVVVQGLYKSMPKF

SEQ ID NO: 2884 - protein, 85 aa, Homo sapiens
FKPRLGMTKEEMMIFIEASSENPCSLYSSVCYSPQAEKVYKLCSPPADLHKVGTVVTPDNDIYIAGGQVPLKNTKTNHSKTSKLQ

SEQ ID NO: 2885 - protein, 85 aa, Homo sapiens
TAFRTVNCFYWFDAQQNTWFPKTPMLFVRIKPSLVCCEGYIYAIGGDSVGGELNRRTVERYDTEKDEWTMVSPLPCAWQWSAAVV

SEQ ID NO: 2886 - protein, 85 aa, Homo sapiens
VHDCIYVMTLNLMYCYFPRSDSWVEMAMRQTSRSFASAAAFGDKIFYIGGLHIATNSGIRLPSGTVDGSSVTVEIYDVNKNEWKM

SEQ ID NO: 2887 - protein, 85 aa, Homo sapiens
AANIPAKRYSDPCVRAVVISNSLCVFMRETHLNERAKYVTYQYDLELDRWSLRQHISERVLWDLGRDFRCTVGKLYPSCLEESPW

SEQ ID NO: 2888 - protein, 84 aa, Homo sapiens
ETHLNERAKYVTYQYDLELDRWSLRQHISERVLWDLGRDFRCTVGKLYPSCLEESPWKPPTYLFSTDGTEEFELDGEMVALPPV

SEQ ID NO: 2889 - protein, 85 aa, Homo sapiens
CHKMVLATCSSYFRAMFMSGLSESKQTHVHLRNVDAATLQIIITYAYTGNLAMNDSTVEQLYETACFLQVEDVLQRCREYLIKKI

SEQ ID NO: 2890 - protein, 85 aa, Homo sapiens
NAENCVRLLSFADLFSCEELKQSAKRMVEHKFTAVYHQDAFMQLSHDLLIDILSSDNLNVEKEETVREAAMLWLEYNTESRSQYL

SEQ ID NO: 2891 - protein, 85 aa, Homo sapiens
SSVLSQIRIDALSEVTQRAWFQGLPPNDKSVVVQGLYKSMPKFFKPRLGMTKEEMMIFIEASSENPCSLYSSVCYSPQAEKVYKL

SEQ ID NO: 2892 - protein, 85 aa, Homo sapiens
CSPPADLHKVGTVVTPDNDIYIAGGQVPLKNTKTNHSKTSKLQTAFRTVNCFYWFDAQQNTWFPKTPMLFVRIKPSLVCCEGYIY

SEQ ID NO: 2893 - protein, 85 aa, Homo sapiens
AIGGDSVGGELNRRTVERYDTEKDEWTMVSPLPCAWQWSAAVVVHDCIYVMTLNLMYCYFPRSDSWVEMAMRQTSRSFASAAAFG

SEQ ID NO: 2894 - protein, 85 aa, Homo sapiens
DKIFYIGGLHIATNSGIRLPSGTVDGSSVTVEIYDVNKNEWKMAANIPAKRYSDPCVRAVVISNSLCVFMRETHLNERAKYVTYQ

SEQ ID NO: 2895 - protein, 85 aa, Homo sapiens
VRKLKFHEQKLLKQVDFLNWEVTDHNLHELRVLRRYRLQRREDYTRYNQLSRAVRELARRLRDLPERDQFRVRASAALLDKLYAL

SEQ ID NO: 2896 - protein, 85 aa, Homo sapiens
GLVPTRGSLELCDFVTASSFCRRRLPTVLLKLRMAQHLQAAVAFVEQGHVRVGPDVVTDPAFLVTRSMEDFVTWVDSSKIKRHVL

SEQ ID NO: 2897 - protein, 84 aa, Homo sapiens
VTASSFCRRRLPTVLLKLRMAQHLQAAVAFVEQGHVRVGPDVVTDPAFLVTRSMEDFVTWVDSSKIKRHVLEYNEERDDFDLEA

SEQ ID NO: 2898 - protein, 85 aa, Homo sapiens
DYTRYNQLSRAVRELARRLRDLPERDQFRVRASAALLDKLYALGLVPTRGSLELCDFVTASSFCRRRLPTVLLKLRMAQHLQAAV

SEQ ID NO: 2899 - protein, 85 aa, Homo sapiens
ATAVEPEDQDLWEEEGILMVKLEDDFTCRPESVLQRDDPVLETSHQNFRRFRYQEAASPREALIRLRELCHQWLRPERRTKEQIL

SEQ ID NO: 2900 - protein, 85 aa, Homo sapiens
ELLVLEQFLTVLPGELQSWVRGQRPESGEEAVTLVEGLQKQPRRPRRWVTVHVHGQEVLSEETVHLGVEPESPNELQDPVQSSTP

SEQ ID NO: 2901 - protein, 85 aa, Homo sapiens
EQSPEETTQSPDLGAPAEQRPHQEEELQTLQESEVPVPEDPDLPAERSSGDSEMVALLTALSQGLVTFKDVAVCFSQDQWSDLDP

SEQ ID NO: 2902 - protein, 85 aa, Homo sapiens
TQKEFYGEYVLEEDCGIVVSLSFPIPRPDEISQVREEEPWVPDIQEPQETQEPEILSFTYTGDRSKDEEECLEQEDLSLEDIHRP

SEQ ID NO: 2903 - protein, 85 aa, Homo sapiens
VLGEPEIHQTPDWEIVFEDNPGRLNERRFGTNISQVNSFVNLRETTPVHPLLGRHHDCSVCGKSFTCNSHLVRHLRTHTGEKPYK

SEQ ID NO: 2904 - protein, 85 aa, Homo sapiens
CMECGKSYTRSSHLARHQKVHKMNAPYKYPLNRKNLEETSPVTQAERTPSVEKPYRCDDCGKHFRWTSDLVRHQRTHTGEKPFFC

SEQ ID NO: 2905 - protein, 85 aa, Homo sapiens
TICGKSFSQKSVLTTHQRIHLGGKPYLCGECGEDFSEHRRYLAHRKTHAAEELYLCSECGRCFTHSAAFAKHLRGHASVRPCRCN

SEQ ID NO: 2906 - protein, 84 aa, Homo sapiens
YLCSECGRCFTHSAAFAKHLRGHASVRPCRCNECGKSFSRRDHLVRHQRTHTGEKPFTCPTCGKSFSRGYHLIRHQRTHSEKTS

SEQ ID NO: 2907 - protein, 85 aa, Homo sapiens
TSHQNFRRFRYQEAASPREALIRLRELCHQWLRPERRTKEQILELLVLEQFLTVLPGELQSWVRGQRPESGEEAVTLVEGLQKQP

SEQ ID NO: 2908 - protein, 85 aa, Homo sapiens
RRPRRWVTVHVHGQEVLSEETVHLGVEPESPNELQDPVQSSTPEQSPEETTQSPDLGAPAEQRPHQEEELQTLQESEVPVPEDPD

SEQ ID NO: 2909 - protein, 85 aa, Homo sapiens
LPAERSSGDSEMVALLTALSQGLVTFKDVAVCFSQDQWSDLDPTQKEFYGEYVLEEDCGIVVSLSFPIPRPDEISQVREEEPWVP

SEQ ID NO: 2910 - protein, 85 aa, Homo sapiens
DIQEPQETQEPEILSFTYTGDRSKDEEECLEQEDLSLEDIHRPVLGEPEIHQTPDWEIVFEDNPGRLNERRFGTNISQVNSFVNL

SEQ ID NO: 2911 - protein, 85 aa, Homo sapiens
RETTPVHPLLGRHHDCSVCGKSFTCNSHLVRHLRTHTGEKPYKCMECGKSYTRSSHLARHQKVHKMNAPYKYPLNRKNLEETSPV

SEQ ID NO: 2912 - protein, 85 aa, Homo sapiens
TQAERTPSVEKPYRCDDCGKHFRWTSDLVRHQRTHTGEKPFFCTICGKSFSQKSVLTTHQRIHLGGKPYLCGECGEDFSEHRRYL

SEQ ID NO: 2913 - protein, 85 aa, Homo sapiens
AHRKTHAAEELYLCSECGRCFTHSAAFAKHLRGHASVRPCRCNECGKSFSRRDHLVRHQRTHTGEKPFTCPTCGKSFSRGYHLIR

SEQ ID NO: 2914 - protein, 85 aa, Homo sapiens
ELQKGKGAAAAAAASGAAGGGGGGAGAGAPGGGRLLLSTSLDAKDELEERLERCMSIVTSMTAGVSEREANDALNAYVCKGLPQH

SEQ ID NO: 2915 - protein, 85 aa, Homo sapiens
EEICLGLFTLILTEPAQAQKCYRDLALVSRDGMNIVLNKINQILMEKYLKLQDTCRTQLVWLVRELVKSGVLGADGVCMTFMKQI

SEQ ID NO: 2916 - protein, 85 aa, Homo sapiens
AGGDVTAKNIWLAESVLDILTEQREWVLKSSILIAMAVYTYLRLIVDHHGTAQLQALRQKEVDFCISLLRERFMECLMIGRDLVR

SEQ ID NO: 2917 - protein, 85 aa, Homo sapiens
LLQNVARIPEFELLWKDIIHNPQALSPQFTGILQLLQSRTSRKFLACRLTPDMETKLLFMTSRVRFGQQKRYQDWFQRQYLSTPD

SEQ ID NO: 2918 - protein, 85 aa, Homo sapiens
SQSLRCDLIRYICGVVHPSNEVLSSDILPRWAIIGWLLTTCTSNVAASNAKLALFYDWLFFSPDKDSIMNIEPAILVMHHSMKPH

SEQ ID NO: 2919 - protein, 85 aa, Homo sapiens
PAITATLLDFMCRIIPNFYPPLEGHVRQGVFSSLNHIVEKRVLAHLAPLFDNPKLDKELRAMLREKFPEFCSSPSPPVEVKIEEP

SEQ ID NO: 2920 - protein, 85 aa, Homo sapiens
VSMEMDNHMSDKDESCYDNAEAAFSDDEEDLNSKGKKREFRFHPIKETVVEEPVDITPYLDQLDESLRDKVLQLQKGSDTEAQCE

SEQ ID NO: 2921 - protein, 85 aa, Homo sapiens
VMQEIVDQVLEEDFDSEQLSVLASCLQELFKAHFRGEVLPEEITEESLEESVGKPLYLIFRNLCQMQEDNSSFSLLLDLLSELYQ

SEQ ID NO: 2922 - protein, 85 aa, Homo sapiens
KQPKIGYHLLYYLRASKAAAGKMNLYESFAQATQLGDLHTCLMMDMKACQEDDVRLLCHLTPSIYTEFPDETLRSGELLNMIVAV

SEQ ID NO: 2923 - protein, 85 aa, Homo sapiens
IDSAQLQELVCHVMMGNLVMFRKDSVLNILIQSLDWETFEQYCAWQLFLAHNIPLETIIPILQHLKYKEHPEALSCLLLQLRREK

SEQ ID NO: 2924 - protein, 85 aa, Homo sapiens
PSEEMVKMVLSRPCHPDDQFTTSILRHWCMKHDELLAEHIKSLLIKNNSLPRKRQSLRSSSSKLAQLTLEQILEHLDNLRLNLTN

SEQ ID NO: 2925 - protein, 85 aa, Homo sapiens
TKQNFFSQTPILQALQHVQASCDEAHKMKFSDLFSLAEEYEDSSTKPPKSRRKAALSSPRSRKNATQPPNAEEESGSSSASEEED

SEQ ID NO: 2926 - protein, 84 aa, Homo sapiens
DEAHKMKFSDLFSLAEEYEDSSTKPPKSRRKAALSSPRSRKNATQPPNAEEESGSSSASEEEDTKPKPTKRKRKGSSAVGSDSD

SEQ ID NO: 2927 - protein, 85 aa, Homo sapiens
AKDELEERLERCMSIVTSMTAGVSEREANDALNAYVCKGLPQHEEICLGLFTLILTEPAQAQKCYRDLALVSRDGMNIVLNKINQ

SEQ ID NO: 2928 - protein, 85 aa, Homo sapiens
ILMEKYLKLQDTCRTQLVWLVRELVKSGVLGADGVCMTFMKQIAGGDVTAKNIWLAESVLDILTEQREWVLKSSILIAMAVYTYL

SEQ ID NO: 2929 - protein, 85 aa, Homo sapiens
RLIVDHHGTAQLQALRQKEVDFCISLLRERFMECLMIGRDLVRLLQNVARIPEFELLWKDIIHNPQALSPQFTGILQLLQSRTSR

SEQ ID NO: 2930 - protein, 85 aa, Homo sapiens
KFLACRLTPDMETKLLFMTSRVRFGQQKRYQDWFQRQYLSTPDSQSLRCDLIRYICGVVHPSNEVLSSDILPRWAIIGWLLTTCT

SEQ ID NO: 2931 - protein, 85 aa, Homo sapiens
SNVAASNAKLALFYDWLFFSPDKDSIMNIEPAILVMHHSMKPHPAITATLLDFMCRIIPNFYPPLEGHVRQGVFSSLNHIVEKRV

SEQ ID NO: 2932 - protein, 85 aa, Homo sapiens
MAHLAPLFDNPKLDKELRAMLREKFPEFCSSPSPPVEVKIEEPVSMEMDNHMSDKDESCYDNAEAAFSDDEEDLNSKGKKREFRF

SEQ ID NO: 2933 - protein, 85 aa, Homo sapiens
HPIKETVVEEPVDITPYLDQLDESLRDKVLQLQKGSDTEAQCEVMQEIVDQVLEEDFDSEQLSVLASCLQELFKAHFRGEVLPEE

SEQ ID NO: 2934 - protein, 85 aa, Homo sapiens
ITEESLEESVGKPLYLIFRNLCQMQEDNSSFSLLLDLLSELYQKQPKIGYHLLYYLRASKAAAGKMNLYESFAQATQLGDLHTCL

SEQ ID NO: 2935 - protein, 85 aa, Homo sapiens
MMDMKACQEDDVRLLCHLTPSIYTEFPDETLRSGELLNMIVAVIDSAQLQELVCHVMMGNLVMFRKDSVLNILIQSLDWETFEQY

SEQ ID NO: 2936 - protein, 85 aa, Homo sapiens
CAWQLFLAHNIPLETIIPILQHLKYKEHPEALSCLLLQLRREKPSEEMVKMVLSRPCHPDDQFTTSILRHWCMKHDELLAEHIKS

SEQ ID NO: 2937 - protein, 85 aa, Homo sapiens
MLIKNNSLPRKRQSLRSSSSKLAQLTLEQILEHLDNLRLNLTNTKQNFFSQTPILQALQHVQASCDEAHKMKFSDLFSLAEEYED

SEQ ID NO: 2938 - protein, 85 aa, Homo sapiens
EPGGEPTGAKESSTLMESLAAVKAAFLAQAPSGSRSAEVQAAQSTEPAAEAGAPEGEGHRGGPPRALGSLGLCENQEARERPGGS

SEQ ID NO: 2939 - protein, 85 aa, Homo sapiens
PRGPVTSEKTGGQSGLESDVPPNAGPGAEGGGSWKGRPFPCGACGRSFKCSSDAAKHRSIHSGEKPYECSDCGKAFIHSSHVVRH

SEQ ID NO: 2940 - protein, 85 aa, Homo sapiens
QRAHSGERPYACAECGKAFGQSFNLLRHQRVHTGEKPYACADCGKAFGQRSDAAKHRRTHTGERLYACGECGKRFLHSSNVVRHR

SEQ ID NO: 2941 - protein, 85 aa, Homo sapiens
RTHHGENPYECRECGQAFSQSSNLLQHQRVHTGERPFACQDCGRAFSRSSFLREHRRIHTGEKPHQCGHCGRAFRALSGFFRHQR

SEQ ID NO: 2942 - protein, 84 aa, Homo sapiens
RPFACQDCGRAFSRSSFLREHRRIHTGEKPHQCGHCGRAFRALSGFFRHQRLHTGEKPFRCTECGRAFRLSFHLIQHRRVHGAE

SEQ ID NO: 2943 - protein, 85 aa, Homo sapiens
QSTEPAAEAGAPEGEGHRGGPPRALGSLGLCENQEARERPGGSPRGPVTSEKTGGQSGLESDVPPNAGPGAEGGGSWKGRPFPCG

SEQ ID NO: 2944 - protein, 85 aa, Homo sapiens
ACGRSFKCSSDAAKHRSIHSGEKPYECSDCGKAFIHSSHVVRHQRAHSGERPYACAECGKAFGQSFNLLRHQRVHTGEKPYACAD

SEQ ID NO: 2945 - protein, 85 aa, Homo sapiens
CGKAFGQRSDAAKHRRTHTGERLYACGECGKRFLHSSNVVRHRRTHHGENPYECRECGQAFSQSSNLLQHQRVHTGERPFACQDC

SEQ ID NO: 2946 - protein, 85 aa, Homo sapiens
EELQEPLRGQLRLCFTQAARTSLLLLRLNDAALRALQECQRQQVRPVIAFQGHRGYLRLPGPGWSCLFSFIVSQCCQEGAGGSLD

SEQ ID NO: 2947 - protein, 85 aa, Homo sapiens
LVCQRFLRSGPNSLHCLGSLRERLIIWAAMDSIPAPSSVQGHNLTEDARHPESWQNTGGYSEGDAVSQPQMALEEVSVSDPLASN

SEQ ID NO: 2948 - protein, 85 aa, Homo sapiens
QGQSLPGSSREHMAQWEVRSQTHVPNREPVQALPSSASRKRLDKKRSVPVATVELEEKRFRTLPLVPSPLQGLTNQDLQEGEDWE

SEQ ID NO: 2949 - protein, 85 aa, Homo sapiens
QEDEDMDPRLEHSSSVQEDSESPSPEDIPDYLLQYRAIHSAEQQHAYEQDFETDYAEYRILHARVGTASQRFIELGAEIKRVRRG

SEQ ID NO: 2950 - protein, 84 aa, Homo sapiens
YRILHARVGTASQRFIELGAEIKRVRRGTPEYKVLEDKIIQEYKKFRKQYPSYREEKRRCEYLHQKLSHIKGLILEFEEKNRGS

SEQ ID NO: 2951 - protein, 85 aa, Homo sapiens
QVRPVIAFQGHRGYLRLPGPGWSCLFSFIVSQCCQEGAGGSLDLVCQRFLRSGPNSLHCLGSLRERLIIWAAMDSIPAPSSVQGH

SEQ ID NO: 2952 - protein, 85 aa, Homo sapiens
NLTEDARHPESWQNTGGYSEGDAVSQPQMALEEVSVSDPLASNQGQSLPGSSREHMAQWEVRSQTHVPNREPVQALPSSASRKRL

SEQ ID NO: 2953 - protein, 85 aa, Homo sapiens
DKKRSVPVATVELEEKRFRTLPLVPSPLQGLTNQDLQEGEDWEQEDEDMDPRLEHSSSVQEDSESPSPEDIPDYLLQYRAIHSAE

SEQ ID NO: 2954 - protein, 85 aa, Homo sapiens
QQHAYEQDFETDYAEYRILHARVGTASQRFIELGAEIKRVRRGTPEYKVLEDKIIQEYKKFRKQYPSYREEKRRCEYLHQKLSHI

SEQ ID NO: 2955 - protein, 85 aa, Homo sapiens
MRVCWLVRQDSRHQRIRLPHLEAVVIGRGPETKITDKKCSRQQEFEEEAKNPGLETHRKRKRSGNSDSIERDAAQEAEAGTGLEP

SEQ ID NO: 2956 - protein, 85 aa, Homo sapiens
GSNSGQCSVPLKKGKDAPIKKESLGHWSQGLKISMQDPKMQVYKDEQVVVIKDKYPKARYHWLVLPWTSISSLKAVAREHLELLK

SEQ ID NO: 2957 - protein, 85 aa, Homo sapiens
HMHTVGEKVIVDFAGSSKLRFRLGYHAIPSMSHVHLHVISQDFDSPCLKNKKHWNSFNTEYFLESQAVIEMVQEAGRVTVRDGMP

SEQ ID NO: 2958 - protein, 84 aa, Homo sapiens
VHLHVISQDFDSPCLKNKKHWNSFNTEYFLESQAVIEMVQEAGRVTVRDGMPELLKLPLRCHECQQLLPSIPQLKEHLRKHWTQ

SEQ ID NO: 2959 - protein, 85 aa, Homo sapiens
QEFEEEAKNPGLETHRKRKRSGNSDSIERDAAQEAEAGTGLEPGSNSGQCSVPLKKGKDAPIKKESLGHWSQGLKISMQDPKMQV

SEQ ID NO: 2960 - protein, 85 aa, Homo sapiens
YKDEQVVVIKDKYPKARYHWLVLPWTSISSLKAVAREHLELLKHMHTVGEKVIVDFAGSSKLRFRLGYHAIPSMSHVHLHVISQD

SEQ ID NO: 2961 - protein, 85 aa, Homo sapiens
AGELADKKDRDASPSKEERKRSRTPDRERDRDRDRKSSPSKDRKRHRSRDRRRGGSRSRSRSRSKSAERERRHKERERDKERDRN

SEQ ID NO: 2962 - protein, 85 aa, Homo sapiens
KKDRDRDKDGHRRDKDRKRSSLSPGRGKDFKSRKDRDSKKDEEDEHGDKKPKAQPLSLEELLAKKKAEEEAEAKPKFLSKAEREA

SEQ ID NO: 2963 - protein, 85 aa, Homo sapiens
EALKRRQQEVEERQRMLEEERKKRKQFQDLGRKMLEDPQERERRERRERMERETNGNEDEEGRQKIREEKDKSKELHAIKERYLG

SEQ ID NO: 2964 - protein, 85 aa, Homo sapiens
GIKKRRRTRHLNDRKFVFEWDASEDTSIDYNPLYKERHQVQLLGRGFIAGIDLKQQKREQSRFYGDLMEKRRTLEEKEQEEARLR

SEQ ID NO: 2965 - protein, 85 aa, Homo sapiens
KLRKKEAKQRWDDRHWSQKKLDEMTDRDWRIFREDYSITTKGGKIPNPIRSWKDSSLPPHILEVIDKCGYKEPTPIQRQAIPIGL

SEQ ID NO: 2966 - protein, 85 aa, Homo sapiens
QNRDIIGVAETGSGKTAAFLIPLLVWITTLPKIDRIEESDQGPYAIILAPTRELAQQIEEETIKFGKPLGIRTVAVIGGISREDQ

SEQ ID NO: 2967 - protein, 85 aa, Homo sapiens
GFRLRMGCEIVIATPGRLIDVLENRYLVLSRCTYVVLDEADRMIDMGFEPDVQKILEHMPVSNQKPDTDEAEDPEKMLANFESGK

SEQ ID NO: 2968 - protein, 85 aa, Homo sapiens
HKYRQTVMFTATMPPAVERLARSYLRRPAVVYIGSAGKPHERVEQKVFLMSESEKRKKLLAILEQGFDPPIIIFVNQKKGCDVLA

SEQ ID NO: 2969 - protein, 85 aa, Homo sapiens
KSLEKMGYNACTLHGGKGQEQREFALSNLKAGAKDILVATDVAGRGIDIQDVSMVVNYDMAKNIEDYIHRIGRTGRAGKSGVAIT

SEQ ID NO: 2970 - protein, 84 aa, Homo sapiens
VNYDMAKNIEDYIHRIGRTGRAGKSGVAITFLTKEDSAVFYELKQAILESPVSSCPPELANHPDAQHKPGTILTKKRREETIFA

SEQ ID NO: 2971 - protein, 85 aa, Homo sapiens
RKRHRSRDRRRGGSRSRSRSRSKSAERERRHKERERDKERDRNKKDRDRDKDGHRRDKDRKRSSLSPGRGKDFKSRKDRDSKKDE

SEQ ID NO: 2972 - protein, 85 aa, Homo sapiens
EDEHGDKKPKAQPLSLEELLAKKKAEEEAEAKPKFLSKAEREAEALKRRQQEVEERQRMLEEERKKRKQFQDLGRKMLEDPQERE

SEQ ID NO: 2973 - protein, 85 aa, Homo sapiens
RRERRERMERETNGNEDEEGRQKIREEKDKSKELHAIKERYLGGIKKRRRTRHLNDRKFVFEWDASEDTSIDYNPLYKERHQVQL

SEQ ID NO: 2974 - protein, 85 aa, Homo sapiens
LGRGFIAGIDLKQQKREQSRFYGDLMEKRRTLEEKEQEEARLRKLRKKEAKQRWDDRHWSQKKLDEMTDRDWRIFREDYSITTKG

SEQ ID NO: 2975 - protein, 85 aa, Homo sapiens
GKIPNPIRSWKDSSLPPHILEVIDKCGYKEPTPIQRQAIPIGLQNRDIIGVAETGSGKTAAFLIPLLVWITTLPKIDRIEESDQG

SEQ ID NO: 2976 - protein, 85 aa, Homo sapiens
PYAIILAPTRELAQQIEEETIKFGKPLGIRTVAVIGGISREDQGFRLRMGCEIVIATPGRLIDVLENRYLVLSRCTYVVLDEADR

SEQ ID NO: 2977 - protein, 85 aa, Homo sapiens
MIDMGFEPDVQKILEHMPVSNQKPDTDEAEDPEKMLANFESGKHKYRQTVMFTATMPPAVERLARSYLRRPAVVYIGSAGKPHER

SEQ ID NO: 2978 - protein, 85 aa, Homo sapiens
VEQKVFLMSESEKRKKLLAILEQGFDPPIIIFVNQKKGCDVLAKSLEKMGYNACTLHGGKGQEQREFALSNLKAGAKDILVATDV

SEQ ID NO: 2979 - protein, 85 aa, Homo sapiens
AGRGIDIQDVSMVVNYDMAKNIEDYIHRIGRTGRAGKSGVAITFLTKEDSAVFYELKQAILESPVSSCPPELANHPDAQHKPGTI

SEQ ID NO: 2980 - protein, 85 aa, Homo sapiens
ELQSRPEALAVELARHQNGDLKKQLHERQPRIAALSDKQALGTITAVPVTGPQVSSLQRLAGQGAAVLPQVRPKTLIPDSLPVAP

SEQ ID NO: 2981 - protein, 85 aa, Homo sapiens
GRDRPPKQPPTFQKATVVSVKNPSPALPTANNTVSHVPAPGSQPQALAEPAALASPLSSAGVAYAIISTSPSNAAAMAPSTAVSV

SEQ ID NO: 2982 - protein, 85 aa, Homo sapiens
VSDSIKVQPLLISADNKPPPRLLSSPHPATHHCPLHPSSLPLTPPSPSLSPSPLHGIFQVIIIQPQVQTQPESTAESRPPTEEPS

SEQ ID NO: 2983 - protein, 85 aa, Homo sapiens
QGAQATKKKKEDRPPTQENPEKIAFMVALGLVTTEHLEEIQSKRQERKRRSTANPAYSGLLETERKRLASNYLNNPLFLTARANE

SEQ ID NO: 2984 - protein, 85 aa, Homo sapiens
DPCWKNEITHDEHCAACKRGANLQPCGTCPGAYHLSCLEPPLKTAPKGVWVCPRCQQKALKKDEGVPWTGMLAIVHSYVTHKTVK

SEQ ID NO: 2985 - protein, 85 aa, Homo sapiens
EEEKQKLLQRGSELQNEHQQLEERDRRLASAVQKCLELKTSLLARQRGTQSSLDRLRALLRLIQGEQLLQVTMTTTSPAPLLAGP

SEQ ID NO: 2986 - protein, 84 aa, Homo sapiens
EERDRRLASAVQKCLELKTSLLARQRGTQSSLDRLRALLRLIQGEQLLQVTMTTTSPAPLLAGPWTKPSVAATHPTVQHPQGHN

SEQ ID NO: 2987 - protein, 85 aa, Homo sapiens
TITAVPVTGPQVSSLQRLAGQGAAVLPQVRPKTLIPDSLPVAPGRDRPPKQPPTFQKATVVSVKNPSPALPTANNTVSHVPAPGS

SEQ ID NO: 2988 - protein, 85 aa, Homo sapiens
QPQALAEPAALASPLSSAGVAYAIISTSPSNAAAMAPSTAVSVVSDSIKVQPLLISADNKPPPRLLSSPHPATHHCPLHPSSLPL

SEQ ID NO: 2989 - protein, 85 aa, Homo sapiens
TPPSPSLSPSPLHGIFQVIIIQPQVQTQPESTAESRPPTEEPSQGAQATKKKKEDRPPTQENPEKIAFMVALGLVTTEHLEEIQS

SEQ ID NO: 2990 - protein, 85 aa, Homo sapiens
KRQERKRRSTANPAYSGLLETERKRLASNYLNNPLFLTARANEDPCWKNEITHDEHCAACKRGANLQPCGTCPGAYHLSCLEPPL

SEQ ID NO: 2991 - protein, 85 aa, Homo sapiens
KTAPKGVWVCPRCQQKALKKDEGVPWTGMLAIVHSYVTHKTVKEEEKQKLLQRGSELQNEHQQLEERDRRLASAVQKCLELKTSL

SEQ ID NO: 2992 - protein, 85 aa, Homo sapiens
DRGTRDEHLPSCPGCPAVASNTRCCPPAACLPGISLSRAGTVSSPSCLLHGMDSGALNRCSEINDSESRSQPENVLLRGPWNLPL

SEQ ID NO: 2993 - protein, 84 aa, Homo sapiens
RCSEINDSESRSQPENVLLRGPWNLPLVHLGFSLLNKTDSAACSSEKVLVEDSPQVPLPGSPTAPEGWPSDAWVAGLLDPSMDK

SEQ ID NO: 2994 - protein, 85 aa, Homo sapiens
SSPSCLLHGMDSGALNRCSEINDSESRSQPENVLLRGPWNLPLVHLGFSLLNKTDSAACSSEKVLVEDSPQVPLPGSPTAPEGWP

SEQ ID NO: 2995 - protein, 85 aa, Homo sapiens
LKEHPEMAEAPQQQLGIPVVKLEKELPWGRGREDPSPETFRLRFRQFRYQEAAGPQEALRELQELCRRWLRPELHTKEQILELLV

SEQ ID NO: 2996 - protein, 85 aa, Homo sapiens
MEQFLTILPREFYAWIREHGPESGKALAAMVEDLTERALEAKAVPCHRQGEQEETALCRGAWEPGIQLGPVEVKPEWGMPPGEGV

SEQ ID NO: 2997 - protein, 85 aa, Homo sapiens
QGPDPGTEEQLSQDPGDETRAFQEQALPVLQAGPGLPAVNPRDQEMAAGFFTAGSQGLGPFKDMALAFPEEEWRHVTPAQIDCFG

SEQ ID NO: 2998 - protein, 85 aa, Homo sapiens
EYVEPQDCRVSPGGGSKEKEAKPPQEDLKGALVALTSERFGEASLQGPGLGRVCEQEPGGPAGSAPGLPPPQHGAIPLPDEVKTH

SEQ ID NO: 2999 - protein, 85 aa, Homo sapiens
SSFWKPFQCPECGKGFSRSSNLVRHQRTHEEKSYGCVECGKGFTLREYLMKHQRTHLGKRPYVCSECWKTFSQRHHLEVHQRSHT

SEQ ID NO: 3000 - protein, 85 aa, Homo sapiens
GEKPYKCGDCWKSFSRRQHLQVHRRTHTGEKPYTCECGKSFSRNANLAVHRRAHTGEKPYGCQVCGKRFSKGERLVRHQRIHTGE

SEQ ID NO: 3001 - protein, 85 aa, Homo sapiens
RFRQFRYQEAAGPQEALRELQELCRRWLRPELHTKEQILELLVLEQFLTILPREFYAWIREHGPESGKALAAMVEDLTERALEAK

SEQ ID NO: 3002 - protein, 85 aa, Homo sapiens
AVPCHRQGEQEETALCRGAWEPGIQLGPVEVKPEWGMPPGEGVQGPDPGTEEQLSQDPGDETRAFQEQALPVLQAGPGLPAVNPR

SEQ ID NO: 3003 - protein, 85 aa, Homo sapiens
DQEMAAGFFTAGSQGLGPFKDMALAFPEEEWRHVTPAQIDCFGEYVEPQDCRVSPGGGSKEKEAKPPQEDLKGALVALTSERFGE

SEQ ID NO: 3004 - protein, 85 aa, Homo sapiens
ASLQGPGLGRVCEQEPGGPAGSAPGLPPPQHGAIPLPDEVKTHSSFWKPFQCPECGKGFSRSSNLVRHQRTHEEKSYGCVECGKG

SEQ ID NO: 3005 - protein, 85 aa, Homo sapiens
FTLREYLMKHQRTHLGKRPYVCSECWKTFSQRHHLEVHQRSHTGEKPYKCGDCWKSFSRRQHLQVHRRTHTGEKPYTCECGKSFS

SEQ ID NO: 3006 - protein, 85 aa, Homo sapiens
ELSSKKKLHALSLAEKIQVLELLDESKMSQSEVARRFQVSQPQISRICKNKEKLLADWCSGTANRERKRKRESKYSGIDEALLCW

SEQ ID NO: 3007 - protein, 85 aa, Homo sapiens
YHIARAKAWDVTGPMLLHKAKELADIMGQDFVPSIGWLVRWKRRNNVGFGARHVLAPSFPPEPPPPGLTSQAQLPLSLKDFSPED

SEQ ID NO: 3008 - protein, 85 aa, Homo sapiens
VFGCAELPLLYRAVPGSFGACDQVQVLLCANSRGTEKRRVLLGGLQAAPRCFFGIRSEALPASYHPDLGIPWLEWLAQFDRDMGQ

SEQ ID NO: 3009 - protein, 85 aa, Homo sapiens
QGRQVALLLAARVVEELAGLPGLYHVKLLPLAASSTTPPLPSSVVRAFKAHYRHRLLGKLAAIQSERDGTSLAEAGAGITVLDAL

SEQ ID NO: 3010 - protein, 85 aa, Homo sapiens
HVASAAWAKVPPQLIFSSFIQEGLAPGKTPPSSHKTSEMPPVPGGLSLEEFSRFVDLEGEEPRSGVCKEEIGTEDEKGDREGAFE

SEQ ID NO: 3011 - protein, 84 aa, Homo sapiens
SLEEFSRFVDLEGEEPRSGVCKEEIGTEDEKGDREGAFEPLPTKADALRALGTLRRWFECNSTSPELFEKFYDCEEEVERLCCL

SEQ ID NO: 3012 - protein, 85 aa, Homo sapiens
QISRICKNKEKLLADWCSGTANRERKRKRESKYSGIDEALLCWYHIARAKAWDVTGPMLLHKAKELADIMGQDFVPSIGWLVRWK

SEQ ID NO: 3013 - protein, 85 aa, Homo sapiens
RRNNVGFGARHVLAPSFPPEPPPPGLTSQAQLPLSLKDFSPEDVFGCAELPLLYRAVPGSFGACDQVQVLLCANSRGTEKRRVLL

SEQ ID NO: 3014 - protein, 85 aa, Homo sapiens
GGLQAAPRCFFGIRSEALPASYHPDLGIPWLEWLAQFDRDMGQQGRQVALLLAARVVEELAGLPGLYHVKLLPLAASSTTPPLPS

SEQ ID NO: 3015 - protein, 85 aa, Homo sapiens
SVVRAFKAHYRHRLLGKLAAIQSERDGTSLAEAGAGITVLDALHVASAAWAKVPPQLIFSSFIQEGLAPGKTPPSSHKTSEMPPV

SEQ ID NO: 3016 - protein, 85 aa, Homo sapiens
PGGLSLEEFSRFVDLEGEEPRSGVCKEEIGTEDEKGDREGAFEPLPTKADALRALGTLRRWFECNSTSPELFEKFYDCEEEVERL

SEQ ID NO: 3017 - protein, 85 aa, Homo sapiens
KELDPKNDISEDKLSVVGEATGGPTRNGARGPGSEGVWEPGSWPERPRGDAGAEWEPLGIPQGNKLLGGSVPACHELKAFANQGC

SEQ ID NO: 3018 - protein, 85 aa, Homo sapiens
VLVPPRLDDPTEKGACPPVRRGKNFSSTSDLSKPPMPCEEKKTYDCSECGKAFSRSSSLIKHQRIHTGEKPFECDTCGKHFIERS

SEQ ID NO: 3019 - protein, 85 aa, Homo sapiens
SLTIHQRVHTGEKPYACGDCGKAFSQRMNLTVHQRTHTGEKPYVCDVCGKAFRKTSSLTQHERIHTGEKPYACGDCGKAFSQNMH

SEQ ID NO: 3020 - protein, 85 aa, Homo sapiens
LIVHQRTHTGEKPYVCPECGRAFSQNMHLTEHQRTHTGEKPYACKECGKAFNKSSSLTLHQRNHTGEKPYVCGECGKAFSQSSYL

SEQ ID NO: 3021 - protein, 85 aa, Homo sapiens
IQHQRFHIGVKPFECSECGKAFSKNSSLTQHQRIHTGEKPYECYICKKHFTGRSSLIVHQIVHTGEKPYVCGECGKAFSQSAYLI

SEQ ID NO: 3022 - protein, 84 aa, Homo sapiens
GEKPYVCGECGKAFSQSAYLIEHQRIHTGEKPYRCGQCGKSFIKNSSLTVHQRIHTGEKPYRCGECGKTFSRNTNLTRHLRIHT

SEQ ID NO: 3023 - protein, 85 aa, Homo sapiens
WPERPRGDAGAEWEPLGIPQGNKLLGGSVPACHELKAFANQGCVLVPPRLDDPTEKGACPPVRRGKNFSSTSDLSKPPMPCEEKK

SEQ ID NO: 3024 - protein, 85 aa, Homo sapiens
TYDCSECGKAFSRSSSLIKHQRIHTGEKPFECDTCGKHFIERSSLTIHQRVHTGEKPYACGDCGKAFSQRMNLTVHQRTHTGEKP

SEQ ID NO: 3025 - protein, 85 aa, Homo sapiens
YVCDVCGKAFRKTSSLTQHERIHTGEKPYACGDCGKAFSQNMHLIVHQRTHTGEKPYVCPECGRAFSQNMHLTEHQRTHTGEKPY

SEQ ID NO: 3026 - protein, 85 aa, Homo sapiens
ACKECGKAFNKSSSLTLHQRNHTGEKPYVCGECGKAFSQSSYLIQHQRFHIGVKPFECSECGKAFSKNSSLTQHQRIHTGEKPYE

SEQ ID NO: 3027 - protein, 85 aa, Homo sapiens
CYICKKHFTGRSSLIVHQIVHTGEKPYVCGECGKAFSQSAYLIEHQRIHTGEKPYRCGQCGKSFIKNSSLTVHQRIHTGEKPYRC

SEQ ID NO: 3028 - protein, 85 aa, Homo sapiens
VMVANKKSQDQMTEDLSLFLGNNTIRFTVWLHGVLDKLRSVTTEPSSLKSSDTNIFDSNVPSNKSNFSRGDERRHEAAVPPLAIP

SEQ ID NO: 3029 - protein, 85 aa, Homo sapiens
SARPEKRDSRVSTSSQESKTTNVRQTYDDGAATRLMSTVKPLREPAPSEDVIDIKPEPDDLIDEDLNFVQENPLSQKKPTVTLTY

SEQ ID NO: 3030 - protein, 85 aa, Homo sapiens
GSSRPSIEIYRPPASRNADSGVHLNRLQFQQQQNSIHAAKQLDMQSSWVYETGRLCEPEVLNSLEETYSPFFRNNSEKMSMEDEN

SEQ ID NO: 3031 - protein, 85 aa, Homo sapiens
FRKRKLPVVSSVVKVKKFNHDGEEEEEDDDYGSRTGSISSSVSVPAKPERRPSLPPSKQANKNLILKAISEAQESVTKTTNYSTV

SEQ ID NO: 3032 - protein, 85 aa, Homo sapiens
PQKQTLPVAPRTRTSQEELLAEVVQGQSRTPRISPPIKEEETKGDSVEKNQGTQQRQLLSRLQIDPVMAETLQMSQAEMSELSVA

SEQ ID NO: 3033 - protein, 85 aa, Homo sapiens
QKPEKLLERCKYWPACKNGDECAYHHPISPCKAFPNCKFAEKCLFVHPNCKYDAKCTKPDCPFTHVSRRIPVLSPKPAVAPPAPP

SEQ ID NO: 3034 - protein, 85 aa, Homo sapiens
TEPSSLKSSDTNIFDSNVPSNKSNFSRGDERRHEAAVPPLAIPSARPEKRDSRVSTSSQESKTTNVRQTYDDGAATRLMSTVKPL

SEQ ID NO: 3035 - protein, 85 aa, Homo sapiens
REPAPSEDVIDIKPEPDDLIDEDLNFVQENPLSQKKPTVTLTYGSSRPSIEIYRPPASRNADSGVHLNRLQFQQQQNSIHAAKQL

SEQ ID NO: 3036 - protein, 85 aa, Homo sapiens
DMQSSWVYETGRLCEPEVLNSLEETYSPFFRNNSEKMSMEDENFRKRKLPVVSSVVKVKKFNHDGEEEEEDDDYGSRTGSISSSV

SEQ ID NO: 3037 - protein, 85 aa, Homo sapiens
SVPAKPERRPSLPPSKQANKNLILKAISEAQESVTKTTNYSTVPQKQTLPVAPRTRTSQEELLAEVVQGQSRTPRISPPIKEEET

SEQ ID NO: 3038 - protein, 85 aa, Homo sapiens
KGDSVEKNQGTQQRQLLSRLQIDPVMAETLQMSQAEMSELSVAQKPEKLLERCKYWPACKNGDECAYHHPISPCKAFPNCKFAEK

SEQ ID NO: 3039 - protein, 85 aa, Homo sapiens
CLFVHPNCKYDAKCTKPDCPFTHVSRRIPVLSPKPAVAPPAPPSSSQLCRYFPACKKMECPFYHPKHCRFNTQCTRPDCTFYHPT

SEQ ID NO: 3040 - protein, 85 aa, Homo sapiens
NGDDAFARRPRAGAQIPEKIQKSFDDIAKYFSKKEWEKMKSLEKISYVYMKRKYEAMTKLGFKATLPPFMHNTGATDLQGNDFDN

SEQ ID NO: 3041 - protein, 85 aa, Homo sapiens
DRNQGNQVERPQMTFCRLQRIFPKIMPKKPAEEGNDSKGVPEASGSQNDGKHLCPPGKPSTSEKINKTSGPKRGKHAWTHRLRER

SEQ ID NO: 3042 - protein, 84 aa, Homo sapiens
QRIFPKIMPKKPAEEGNDSKGVPEASGSQNDGKHLCPPGKPSTSEKINKTSGPKRGKHAWTHRLRERKQLVIYEEISDPEEDDE

SEQ ID NO: 3043 - protein, 85 aa, Homo sapiens
EKISYVYMKRKYEAMTKLGFKATLPPFMHNTGATDLQGNDFDNDRNQGNQVERPQMTFCRLQRIFPKIMPKKPAEEGNDSKGVPE

SEQ ID NO: 3044 - protein, 85 aa, Homo sapiens
SRLSWGYREHNGPIHWKEFFPIADGDQQSPIEIKTKEVKYDSSLRPLSIKYDPSSAKIISNSGHSFNVDFDDTENKSVLRGGPLT

SEQ ID NO: 3045 - protein, 85 aa, Homo sapiens
GSYRLRQVHLHWGSADDHGSEHIVDGVSYAAELHVVHWNSDKYPSFVEAAHEPDGLAVLGVFLQIGEPNSQLQKITDTLDSIKEK

SEQ ID NO: 3046 - protein, 85 aa, Homo sapiens
GKQTRFTNFDLLSLLPPSWDYWTYPGSLTVPPLLESVTWIVLKQPINISSQQLAKFRSLLCTAEGEAAAFLVSNHRPPQPLKGRK

SEQ ID NO: 3047 - protein, 84 aa, Homo sapiens
NFDLLSLLPPSWDYWTYPGSLTVPPLLESVTWIVLKQPINISSQQLAKFRSLLCTAEGEAAAFLVSNHRPPQPLKGRKVRASFH

SEQ ID NO: 3048 - protein, 85 aa, Homo sapiens
SLRPLSIKYDPSSAKIISNSGHSFNVDFDDTENKSVLRGGPLTGSYRLRQVHLHWGSADDHGSEHIVDGVSYAAELHVVHWNSDK

SEQ ID NO: 3049 - protein, 85 aa, Homo sapiens
YPSFVEAAHEPDGLAVLGVFLQIGEPNSQLQKITDTLDSIKEKGKQTRFTNFDLLSLLPPSWDYWTYPGSLTVPPLLESVTWIVL

SEQ ID NO: 3050 - protein, 85 aa, Homo sapiens
ATALDPDQPKKQKILVEEMAPLKGVQEQQVRHECEVTKPEKEKGEETRIENGKLIVVTDSCGRVESSGKISEPMEAHNEGSNLER

SEQ ID NO: 3051 - protein, 85 aa, Homo sapiens
HQAKPKEKIEYKCSEREQRFIQHLDLIEHASTHTGKKLCESDVCQSSSLTGHKKVLSREKGHQCHECGKAFQRSSHLVRHQKIHL

SEQ ID NO: 3052 - protein, 85 aa, Homo sapiens
GEKPYQCNECGKVFSQNAGLLEHLRIHTGEKPYLCIHCGKNFRRSSHLNRHQRIHSQEEPCECKECGKTFSQALLLTHHQRIHSH

SEQ ID NO: 3053 - protein, 85 aa, Homo sapiens
SKSHQCNECGKAFSLTSDLIRHHRIHTGEKPFKCNICQKAFRLNSHLAQHVRIHNEEKPYQCSECGEAFRQRSGLFQHQRYHHKD

SEQ ID NO: 3054 - protein, 84 aa, Homo sapiens
QCNECGKAFSLTSDLIRHHRIHTGEKPFKCNICQKAFRLNSHLAQHVRIHNEEKPYQCSECGEAFRQRSGLFQHQRYHHKDKLA

SEQ ID NO: 3055 - protein, 85 aa, Homo sapiens
KGEETRIENGKLIVVTDSCGRVESSGKISEPMEAHNEGSNLERHQAKPKEKIEYKCSEREQRFIQHLDLIEHASTHTGKKLCESD

SEQ ID NO: 3056 - protein, 85 aa, Homo sapiens
VCQSSSLTGHKKVLSREKGHQCHECGKAFQRSSHLVRHQKIHLGEKPYQCNECGKVFSQNAGLLEHLRIHTGEKPYLCIHCGKNF

SEQ ID NO: 3057 - protein, 85 aa, Homo sapiens
RRSSHLNRHQRIHSQEEPCECKECGKTFSQALLLTHHQRIHSHSKSHQCNECGKAFSLTSDLIRHHRIHTGEKPFKCNICQKAFR

SEQ ID NO: 3058 - protein, 85 aa, Homo sapiens
ATEIGSPPRFFHMPRFQHQAPRQLFYKRPDFAQQQAMQQLTFDGKRMRKAVNRKTIDYNPSVIKYLENRIWQRDQRDMRAIQPDA

SEQ ID NO: 3059 - protein, 85 aa, Homo sapiens
GYYNDLVPPIGMLNNPMNAVTTKFVRTSTNKVKCPVFVVRWTPEGRRLVTGASSGEFTLWNGLTFNFETILQAHDSPVRAMTWSH

SEQ ID NO: 3060 - protein, 85 aa, Homo sapiens
NDMWMLTADHGGYVKYWQSNMNNVKMFQAHKEAIREASFSPTDNKFATCSDDGTVRIWDFLRCHEERILRGHGADVKCVDWHPTK

SEQ ID NO: 3061 - protein, 85 aa, Homo sapiens
GLVVSGSKDSQQPIKFWDPKTGQSLATLHAHKNTVMEVKLNLNGNWLLTASRDHLCKLFDIRNLKEELQVFRGHKKEATAVAWHP

SEQ ID NO: 3062 - protein, 85 aa, Homo sapiens
VHEGLFASGGSDGSLLFWHVGVEKEVGGMEMAHEGMIWSLAWHPLGHILCSGSNDHTSKFWTRNRPGDKMRDRYNLNLLPGMSED

SEQ ID NO: 3063 - protein, 85 aa, Homo sapiens
GVEYDDLEPNSLAVIPGMGIPEQLKLAMEQEQMGKDESNEIEMTIPGLDWGMEEVMQKDQKKVPQKKVPYAKPIPAQFQQAWMQN

SEQ ID NO: 3064 - protein, 85 aa, Homo sapiens
KVPIPAPNEVLNDRKEDIKLEEKKKTQAEIEQEMATLQYTNPQLLEQLKIERLAQKQVEQIQPPPSSGTPLLGPQPFPGQGPMSQ

SEQ ID NO: 3065 - protein, 85 aa, Homo sapiens
IPQGFQQPHPSQQMPMNMAQMGPPGPQGQFRPPGPQGQMGPQGPPLHQGGGGPQGFMGPQGPQGPPQGLPRPQDMHGPQGMQRHP

SEQ ID NO: 3066 - protein, 85 aa, Homo sapiens
GPHGPLGPQGPPGPQGSSGPQGHMGPQGPPGPQGHIGPQGPPGPQGHLGPQGPPGTQGMQGPPGPRGMQGPPHPHGIQGGPGSQG

SEQ ID NO: 3067 - protein, 85 aa, Homo sapiens
IQGPVSQGPLMGLNPRGMQGPPGPRENQGPAPQGMIMGHPPQEMRGPHPPGGLLGHGPQEMRGPQEIRGMQGPPPQGSMLGPPQE

SEQ ID NO: 3068 - protein, 85 aa, Homo sapiens
MRGPPGSQSQQGPPQGSLGPPPQGGMQGPPGPQGQQNPARGPHPSQGPIPFQQQKTPLLGDGPRAPFNQEGQSTGPPPLIPGLGQ

SEQ ID NO: 3069 - protein, 85 aa, Homo sapiens
QGAQGRIPPLNPGQGPGPNKGDSRGPPNHHMGPMSERRHEQSGGPEHGPERGPFRGGQDCRGPPDRRGPHPDFPDDFSRPDDFHP

SEQ ID NO: 3070 - protein, 85 aa, Homo sapiens
DKRFGHRLREFEGRGGPLPQEEKWRRGGPGPPFPPDHREFSEGDGRGAARGPPGAWEGRRPGDERFPRDPEDPRFRGRREESFRR

SEQ ID NO: 3071 - protein, 85 aa, Homo sapiens
GAPPRHEGRAPPRGRDGFPGPEDFGPEENFDASEEAARGRDLRGRGRGTPRGGRKGLLPTPDEFPRFEGGRKPDSWDGNREPGPG

SEQ ID NO: 3072 - protein, 85 aa, Homo sapiens
HEHFRDTPRPDHPPHDGHSPASRERSSSLQGMDMASLPPRKRPWHDGPGTSEHREMEAPGGPSEDRGGKGRGGPGPAQRVPKSGR

SEQ ID NO: 3073 - protein, 84 aa, Homo sapiens
PSEDRGGKGRGGPGPAQRVPKSGRSSSLDGEHHDGYHRDEPFGGPPGSGTPSRGGRSGSNWGRGSNMNSGPPRRGASRGGGRGR

SEQ ID NO: 3074 - protein, 85 aa, Homo sapiens
DGKRMRKAVNRKTIDYNPSVIKYLENRIWQRDQRDMRAIQPDAGYYNDLVPPIGMLNNPMNAVTTKFVRTSTNKVKCPVFVVRWT

SEQ ID NO: 3075 - protein, 85 aa, Homo sapiens
PEGRRLVTGASSGEFTLWNGLTFNFETILQAHDSPVRAMTWSHNDMWMLTADHGGYVKYWQSNMNNVKMFQAHKEAIREASFSPT

SEQ ID NO: 3076 - protein, 85 aa, Homo sapiens
DNKFATCSDDGTVRIWDFLRCHEERILRGHGADVKCVDWHPTKGLVVSGSKDSQQPIKFWDPKTGQSLATLHAHKNTVMEVKLNL

SEQ ID NO: 3077 - protein, 85 aa, Homo sapiens
NGNWLLTASRDHLCKLFDIRNLKEELQVFRGHKKEATAVAWHPVHEGLFASGGSDGSLLFWHVGVEKEVGGMEMAHEGMIWSLAW

SEQ ID NO: 3078 - protein, 85 aa, Homo sapiens
HPLGHILCSGSNDHTSKFWTRNRPGDKMRDRYNLNLLPGMSEDGVEYDDLEPNSLAVIPGMGIPEQLKLAMEQEQMGKDESNEIE

SEQ ID NO: 3079 - protein, 85 aa, Homo sapiens
MTIPGLDWGMEEVMQKDQKKVPQKKVPYAKPIPAQFQQAWMQNKVPIPAPNEVLNDRKEDIKLEEKKKTQAEIEQEMATLQYTNP

SEQ ID NO: 3080 - protein, 85 aa, Homo sapiens
QLLEQLKIERLAQKQVEQIQPPPSSGTPLLGPQPFPGQGPMSQIPQGFQQPHPSQQMPMNMAQMGPPGPQGQFRPPGPQGQMGPQ

SEQ ID NO: 3081 - protein, 85 aa, Homo sapiens
GPPLHQGGGGPQGFMGPQGPQGPPQGLPRPQDMHGPQGMQRHPGPHGPLGPQGPPGPQGSSGPQGHMGPQGPPGPQGHIGPQGPP

SEQ ID NO: 3082 - protein, 85 aa, Homo sapiens
GPQGHLGPQGPPGTQGMQGPPGPRGMQGPPHPHGIQGGPGSQGIQGPVSQGPLMGLNPRGMQGPPGPRENQGPAPQGMIMGHPPQ

SEQ ID NO: 3083 - protein, 85 aa, Homo sapiens
EMRGPHPPGGLLGHGPQEMRGPQEIRGMQGPPPQGSMLGPPQELRGPPGSQSQQGPPQGSLGPPPQGGMQGPPGPQGQQNPARGP

SEQ ID NO: 3084 - protein, 85 aa, Homo sapiens
HPSQGPIPFQQQKTPLLGDGPRAPFNQEGQSTGPPPLIPGLGQQGAQGRIPPLNPGQGPGPNKGDSRGPPNHHMGPMSERRHEQS

SEQ ID NO: 3085 - protein, 85 aa, Homo sapiens
GGPEHGPERGPFRGGQDCRGPPDRRGPHPDFPDDFSRPDDFHPDKRFGHRLREFEGRGGPLPQEEKWRRGGPGPPFPPDHREFSE

SEQ ID NO: 3086 - protein, 85 aa, Homo sapiens
GDGRGAARGPPGAWEGRRPGDERFPRDPEDPRFRGRREESFRRGAPPRHEGRAPPRGRDGFPGPEDFGPEENFDASEEAARGRDL

SEQ ID NO: 3087 - protein, 85 aa, Homo sapiens
RGRGRGTPRGGRKGLLPTPDEFPRFEGGRKPDSWDGNREPGPGHEHFRDTPRPDHPPHDGHSPASRERSSSLQGMDMASLPPRKR

SEQ ID NO: 3088 - protein, 85 aa, Homo sapiens
PWHDGPGTSEHREMEAPGGPSEDRGGKGRGGPGPAQRVPKSGRSSSLDGEHHDGYHRDEPFGGPPGSGTPSRGGRSGSNWGRGSN

SEQ ID NO: 3089 - protein, 85 aa, Homo sapiens
KCEHCTRKECSKKTKTDDQENVSADAPSPAQENGEKGEFHKLADAKIFLSDCLACDSCMTAEEGVQLSQQNAKDFFRVLNLNKKC

SEQ ID NO: 3090 - protein, 85 aa, Homo sapiens
DTSKHKVLVVSVCPQSLPYFAAKFNLSVTDASRRLCGFLKSLGVHYVFDTTIAADFSILESQKEFVRRYRQHSEEERTLPMLTSA

SEQ ID NO: 3091 - protein, 85 aa, Homo sapiens
CPGWVRYAERVLGRPITAHLCTAKSPQQVMGSLVKDYFARQQNLSPEKIFHVIVAPCYDKKLEALQESLPPALHGSRGADCVLTS

SEQ ID NO: 3092 - protein, 85 aa, Homo sapiens
GEIAQIMEQGDLSVRDAAVDTLFGDLKEDKVTRHDGASSDGHLAHIFRHAAKELFNEDVEEVTYRALRNKDFQEVTLEKNGEVVL

SEQ ID NO: 3093 - protein, 85 aa, Homo sapiens
RFAAAYGFRNIQNMILKLKKGKFPFHFVEVLACAGGCLNGRGQAQTPDGHADKALLRQMEGIYADIPVRRPESSAHVQELYQEWL

SEQ ID NO: 3094 - protein, 84 aa, Homo sapiens
ACAGGCLNGRGQAQTPDGHADKALLRQMEGIYADIPVRRPESSAHVQELYQEWLEGINSPKAREVLHTTYQSQERGTHSLDIKW

SEQ ID NO: 3095 - protein, 85 aa, Homo sapiens
ADAKIFLSDCLACDSCMTAEEGVQLSQQNAKDFFRVLNLNKKCDTSKHKVLVVSVCPQSLPYFAAKFNLSVTDASRRLCGFLKSL

SEQ ID NO: 3096 - protein, 85 aa, Homo sapiens
GVHYVFDTTIAADFSILESQKEFVRRYRQHSEEERTLPMLTSACPGWVRYAERVLGRPITAHLCTAKSPQQVMGSLVKDYFARQQ

SEQ ID NO: 3097 - protein, 85 aa, Homo sapiens
NLSPEKIFHVIVAPCYDKKLEALQESLPPALHGSRGADCVLTSGEIAQIMEQGDLSVRDAAVDTLFGDLKEDKVTRHDGASSDGH

SEQ ID NO: 3098 - protein, 85 aa, Homo sapiens
MAHIFRHAAKELFNEDVEEVTYRALRNKDFQEVTLEKNGEVVLRFAAAYGFRNIQNMILKLKKGKFPFHFVEVLACAGGCLNGRG

SEQ ID NO: 3099 - protein, 85 aa, Homo sapiens
LAFAARTVVKPLGFLKPFSLMKASSRFKAHQDALPRLPVPPLQQSLDHYLKALQPIVSEEEWAHTKQLVDEFQASGGVGERLQKG

SEQ ID NO: 3100 - protein, 85 aa, Homo sapiens
MERRARKTENWLSEWWLKTAYLQYRQPVVIYSSPGVMLPKQDFVDLQGQLRFAAKLIEGVLDFKVMIDNETLPVEYLGGKPLCMN

SEQ ID NO: 3101 - protein, 85 aa, Homo sapiens
QYYQILSSCRVPGPKQDTVSNFSKTKKPPTHITVVHNYQFFELDVYHSDGTPLTADQIFVQLEKIWNSSLQTNKEPVGILTSNHR

SEQ ID NO: 3102 - protein, 85 aa, Homo sapiens
NSWAKAYNTLIKDKVNRDSVRSIQKSIFTVCLDATMPRVSEDVYRSHVAGQMLHGGGSRLNSGNRWFDKTLQFIVAEDGSCGLVY

SEQ ID NO: 3103 - protein, 85 aa, Homo sapiens
EHAAAEGPPIVTLLDYVIEYTKKPELVRSPLVPLPMPKKLRFNITPEIKSDIEKAKQNLSIMIQDLDITVMVFHHFGKDFPKSEK

SEQ ID NO: 3104 - protein, 85 aa, Homo sapiens
LSPDAFIQMALQLAYYRIYGQACATYESASLRMFHLGRTDTIRSASMDSLTFVKAMDDSSVTEHQKVELLRKAVQAHRGYTDRAI

SEQ ID NO: 3105 - protein, 85 aa, Homo sapiens
RGEAFDRHLLGLKLQAIEDLVSMPDIFMDTSYAIAMHFHLSTSQVPAKTDCVMFFGPVVPDGYGVCYNPMEAHINFSLSAYNSCA

SEQ ID NO: 3106 - protein, 84 aa, Homo sapiens
YAIAMHFHLSTSQVPAKTDCVMFFGPVVPDGYGVCYNPMEAHINFSLSAYNSCAETNAARLAHYLEKALLDMRALLQSHPRAKL

SEQ ID NO: 3107 - protein, 85 aa, Homo sapiens
QQSLDHYLKALQPIVSEEEWAHTKQLVDEFQASGGVGERLQKGLERRARKTENWLSEWWLKTAYLQYRQPVVIYSSPGVMLPKQD

SEQ ID NO: 3108 - protein, 85 aa, Homo sapiens
FVDLQGQLRFAAKLIEGVLDFKVMIDNETLPVEYLGGKPLCMNQYYQILSSCRVPGPKQDTVSNFSKTKKPPTHITVVHNYQFFE

SEQ ID NO: 3109 - protein, 85 aa, Homo sapiens
MDVYHSDGTPLTADQIFVQLEKIWNSSLQTNKEPVGILTSNHRNSWAKAYNTLIKDKVNRDSVRSIQKSIFTVCLDATMPRVSED

SEQ ID NO: 3110 - protein, 85 aa, Homo sapiens
VYRSHVAGQMLHGGGSRLNSGNRWFDKTLQFIVAEDGSCGLVYEHAAAEGPPIVTLLDYVIEYTKKPELVRSPLVPLPMPKKLRF

SEQ ID NO: 3111 - protein, 85 aa, Homo sapiens
NITPEIKSDIEKAKQNLSIMIQDLDITVMVFHHFGKDFPKSEKLSPDAFIQMALQLAYYRIYGQACATYESASLRMFHLGRTDTI

SEQ ID NO: 3112 - protein, 85 aa, Homo sapiens
RSASMDSLTFVKAMDDSSVTEHQKVELLRKAVQAHRGYTDRAIRGEAFDRHLLGLKLQAIEDLVSMPDIFMDTSYAIAMHFHLST

SEQ ID NO: 3113 - protein, 85 aa, Homo sapiens
RHVQAEPSPSSEPEAGPSQPPVRQGALQGGLLMGYSPAGGATSPGVYQVSIFSPPAGTSEPHRALKRQAPSTEGPRELKRGPGLG

SEQ ID NO: 3114 - protein, 85 aa, Homo sapiens
AREGLPPEEPSTVGLLGPEGPGLGLGVASQHFSHRGLCVVEQRSSVTSSWTSGAWSPPCPPSNASCNTLHTRDWASPDPGGQGSL

SEQ ID NO: 3115 - protein, 85 aa, Homo sapiens
GESPGPAPPGQLHTLDTDLHSLAQIGGKSPVAGVGNGGSLWPRESPGTANGHSPEHTPPGPGPPGPCPTKRRLLPAGEAPDVSSE

SEQ ID NO: 3116 - protein, 85 aa, Homo sapiens
EEGPAPRRRRGSLGHPTAANSSDAKATPFWSHLLPGPKEPVLDPTDCGPMGRRLKGARRLKLSPLRSLRKGPGLLSPPSASPVPT

SEQ ID NO: 3117 - protein, 85 aa, Homo sapiens
PAVSRTLLGNFEESLLRGRFAPSGHIEGFTAEIGASGSYCPQHVTLPVTVTFFDVSEQNAPAPFLGIVDLNPLGRKGYSVPKVGT

SEQ ID NO: 3118 - protein, 85 aa, Homo sapiens
VQVTLFNPNQTVVKMFLVTFDFSDMPAAHMTFLRHRLFLVPVGEEGNANPTHRLLCYLLHLRFRSSRSGRLSLHGDIRLLFSRRS

SEQ ID NO: 3119 - protein, 84 aa, Homo sapiens
HMTFLRHRLFLVPVGEEGNANPTHRLLCYLLHLRFRSSRSGRLSLHGDIRLLFSRRSLELDTGLPYELQAVTEAPHNPRYSPLP

SEQ ID NO: 3120 - protein, 85 aa, Homo sapiens
SPGVYQVSIFSPPAGTSEPHRALKRQAPSTEGPRELKRGPGLGAREGLPPEEPSTVGLLGPEGPGLGLGVASQHFSHRGLCVVEQ

SEQ ID NO: 3121 - protein, 85 aa, Homo sapiens
RSSVTSSWTSGAWSPPCPPSNASCNTLHTRDWASPDPGGQGSLGESPGPAPPGQLHTLDTDLHSLAQIGGKSPVAGVGNGGSLWP

SEQ ID NO: 3122 - protein, 85 aa, Homo sapiens
RESPGTANGHSPEHTPPGPGPPGPCPTKRRLLPAGEAPDVSSEEEGPAPRRRRGSLGHPTAANSSDAKATPFWSHLLPGPKEPVL

SEQ ID NO: 3123 - protein, 85 aa, Homo sapiens
DPTDCGPMGRRLKGARRLKLSPLRSLRKGPGLLSPPSASPVPTPAVSRTLLGNFEESLLRGRFAPSGHIEGFTAEIGASGSYCPQ

SEQ ID NO: 3124 - protein, 85 aa, Homo sapiens
HVTLPVTVTFFDVSEQNAPAPFLGIVDLNPLGRKGYSVPKVGTVQVTLFNPNQTVVKMFLVTFDFSDMPAAHMTFLRHRLFLVPV

SEQ ID NO: 3125 - protein, 85 aa, Homo sapiens
EKILQMAEGIDIGEMPSYDLVLSKPSKGQKRHLSTCDGQNPPKKQAGSKFHARPRFEPVHFVASSSKDERQEDPYGPQTKEVNEQ

SEQ ID NO: 3126 - protein, 85 aa, Homo sapiens
THFASMPRDIYQDYTQDSFSIQDGNSQYCDSSGFILTKDQPVTANMYFDSGNPAPSTTSQQANSQSTPEPSPSQTFPESVVAEKQ

SEQ ID NO: 3127 - protein, 85 aa, Homo sapiens
YFIEKLTATIWKNLSNPEMTSGSDKINYTYMLTRCIQACKTNPEYIYAPLKEIPPADIPKNKKLLTDGYACEVRCQNIYLTTGYA

SEQ ID NO: 3128 - protein, 85 aa, Homo sapiens
GSKNGSRDRATELAVKLLQKRIEVRVVRRKFKHTFGEDLVVCQIGMSSYEFPPALKPPEDLVVLGKDASGQPIFNASAKHWTNFV

SEQ ID NO: 3129 - protein, 85 aa, Homo sapiens
ITENANDAIGILNNSASFNKMSIEYKYEMMPNRTWRCRVFLQDHCLAEGYGTKKTSKHAAADEALKILQKTQPTYPSVKSSQCHT

SEQ ID NO: 3130 - protein, 85 aa, Homo sapiens
GSSPRGSGKKKDIKDLVVYENSSNPVCTLNDTAQFNRMTVEYVYERMTGLRWKCKVILESEVIAEAVGVKKTVKYEAAGEAVKTL

SEQ ID NO: 3131 - protein, 85 aa, Homo sapiens
KKTQPTVINNLKKGAVEDVISRNEIQGRSAEEAYKQQIKEDNIGNQLLRKMGWTGGGLGKSGEGIREPISVKEQHKREGLGLDVE

SEQ ID NO: 3132 - protein, 85 aa, Homo sapiens
RVNKIAKRDIEQIIRNYARSESHTDLTFSRELTNDERKQIHQIAQKYGLKSKSHGVGHDRYLVVGRKRRKEDLLDQLKQEGQVGH

SEQ ID NO: 3133 - protein, 84 aa, Homo sapiens
EQIIRNYARSESHTDLTFSRELTNDERKQIHQIAQKYGLKSKSHGVGHDRYLVVGRKRRKEDLLDQLKQEGQVGHYELVMPQAN

SEQ ID NO: 3134 - protein, 85 aa, Homo sapiens
KKQAGSKFHARPRFEPVHFVASSSKDERQEDPYGPQTKEVNEQTHFASMPRDIYQDYTQDSFSIQDGNSQYCDSSGFILTKDQPV

SEQ ID NO: 3135 - protein, 85 aa, Homo sapiens
TANMYFDSGNPAPSTTSQQANSQSTPEPSPSQTFPESVVAEKQYFIEKLTATIWKNLSNPEMTSGSDKINYTYMLTRCIQACKTN

SEQ ID NO: 3136 - protein, 85 aa, Homo sapiens
PEYIYAPLKEIPPADIPKNKKLLTDGYACEVRCQNIYLTTGYAGSKNGSRDRATELAVKLLQKRIEVRVVRRKFKHTFGEDLVVC

SEQ ID NO: 3137 - protein, 85 aa, Homo sapiens
QIGMSSYEFPPALKPPEDLVVLGKDASGQPIFNASAKHWTNFVITENANDAIGILNNSASFNKMSIEYKYEMMPNRTWRCRVFLQ

SEQ ID NO: 3138 - protein, 85 aa, Homo sapiens
DHCLAEGYGTKKTSKHAAADEALKILQKTQPTYPSVKSSQCHTGSSPRGSGKKKDIKDLVVYENSSNPVCTLNDTAQFNRMTVEY

SEQ ID NO: 3139 - protein, 85 aa, Homo sapiens
VYERMTGLRWKCKVILESEVIAEAVGVKKTVKYEAAGEAVKTLKKTQPTVINNLKKGAVEDVISRNEIQGRSAEEAYKQQIKEDN

SEQ ID NO: 3140 - protein, 85 aa, Homo sapiens
IGNQLLRKMGWTGGGLGKSGEGIREPISVKEQHKREGLGLDVERVNKIAKRDIEQIIRNYARSESHTDLTFSRELTNDERKQIHQ

SEQ ID NO: 3141 - protein, 85 aa, Homo sapiens
GPAPAGEQLRGATGEPEVMEPALEGTGKEGKKASSRKRTLAEPPAKGLLQPVKLSRAELYKEPTNEELNRLRETEILFHSSLLRL

SEQ ID NO: 3142 - protein, 85 aa, Homo sapiens
QVEELLKEVRLSEKKKDRIDAFLREVNQRVVRVPSVPETELTDQAWLPAGVRVPLHQVPYAVKGCFRFLPPAQVTVVGSYLLGTC

SEQ ID NO: 3143 - protein, 85 aa, Homo sapiens
IRPDINVDVALTMPREILQDKDGLNQRYFRKRALYLAHLAHHLAQDPLFGSVCFSYTNGCHLKPSLLLRPRGKDERLVTVRLHPC

SEQ ID NO: 3144 - protein, 85 aa, Homo sapiens
PPPDFFRPCRLLPTKNNVRSAWYRGQSPAGDGSPEPPTPRYNTWVLQDTVLESHLQLLSTILSSAQGLKDGVALLKVWLRQRELD

SEQ ID NO: 3145 - protein, 85 aa, Homo sapiens
KGQGGFTGFLVSMLVVFLVSTRKIHTTMSGYQVLRSVLQFLATTDLTVNGISLCLSSDPSLPALADFHQAFSVVFLDSSGHLNLC

SEQ ID NO: 3146 - protein, 85 aa, Homo sapiens
ADVTASTYHQVQHEARLSMMLLDSRADDGFHLLLMTPKPMIRAFDHVLHLRPLSRLQAACHRLKLWPELQDNGGDYVSAALGPLT

SEQ ID NO: 3147 - protein, 85 aa, Homo sapiens
TLLEQGLGARLNLLAHSRPPVPEWDISQDPPKHKDSGTLTLGLLLRPEGLTSVLELGPEADQPEAAKFRQFWGSRSELRRFQDGA

SEQ ID NO: 3148 - protein, 85 aa, Homo sapiens
IREAVVWEAASMSQKRLIPHQVVTHLLALHADIPETCVHYVGGPLDALIQGLKETSSTGEEALVAAVRCYDDLSRLLWGLEGLPL

SEQ ID NO: 3149 - protein, 85 aa, Homo sapiens
TVSAVQGAHPVLRYTEVFPPTPVRPAFSFYETLRERSSLLPRLDKPCPAYVEPMTVVCHLEGSGQWPQDAEAVQRVRAAFQLRLA

SEQ ID NO: 3150 - protein, 85 aa, Homo sapiens
ELLTQQHGLQCRATATHTDVLKDGFVFRIRVAYQREPQILKEVQSPEGMISLRDTAASLRLERDTRQLPLLTSALHGLQQQHPAF

SEQ ID NO: 3151 - protein, 85 aa, Homo sapiens
SGVARLAKRWVRAQLLGEGFADESLDLVAAALFLHPEPFTPPSSPQVGFLRFLFLVSTFDWKNNPLFVNLNNELTVEEQVEIRSG

SEQ ID NO: 3152 - protein, 85 aa, Homo sapiens
FLAARAQLPVMVIVTPQDRKNSVWTQDGPSAQILQQLVVLAAEALPMLEKQLMDPRGPGDIRTVFRPPLDIYDVLIRLSPRHIPR

SEQ ID NO: 3153 - protein, 85 aa, Homo sapiens
HRQAVDSPAASFCRGLLSQPGPSSLMPVLGYDPPQLYLTQLREAFGDLALFFYDQHGGEVIGVLWKPTSFQPQPFKASSTKGRMV

SEQ ID NO: 3154 - protein, 84 aa, Homo sapiens
REAFGDLALFFYDQHGGEVIGVLWKPTSFQPQPFKASSTKGRMVMSRGGELVMVPNVEAILEDFAVLGEGLVQTVEARSERWTV

SEQ ID NO: 3155 - protein, 85 aa, Homo sapiens
PPAKGLLQPVKLSRAELYKEPTNEELNRLRETEILFHSSLLRLQVEELLKEVRLSEKKKDRIDAFLREVNQRVVRVPSVPETELT

SEQ ID NO: 3156 - protein, 85 aa, Homo sapiens
DQAWLPAGVRVPLHQVPYAVKGCFRFLPPAQVTVVGSYLLGTCIRPDINVDVALTMPREILQDKDGLNQRYFRKRALYLAHLAHH

SEQ ID NO: 3157 - protein, 85 aa, Homo sapiens
MAQDPLFGSVCFSYTNGCHLKPSLLLRPRGKDERLVTVRLHPCPPPDFFRPCRLLPTKNNVRSAWYRGQSPAGDGSPEPPTPRYN

SEQ ID NO: 3158 - protein, 85 aa, Homo sapiens
TWVLQDTVLESHLQLLSTILSSAQGLKDGVALLKVWLRQRELDKGQGGFTGFLVSMLVVFLVSTRKIHTTMSGYQVLRSVLQFLA

SEQ ID NO: 3159 - protein, 85 aa, Homo sapiens
TTDLTVNGISLCLSSDPSLPALADFHQAFSVVFLDSSGHLNLCADVTASTYHQVQHEARLSMMLLDSRADDGFHLLLMTPKPMIR

SEQ ID NO: 3160 - protein, 85 aa, Homo sapiens
AFDHVLHLRPLSRLQAACHRLKLWPELQDNGGDYVSAALGPLTTLLEQGLGARLNLLAHSRPPVPEWDISQDPPKHKDSGTLTLG

SEQ ID NO: 3161 - protein, 85 aa, Homo sapiens
LLLRPEGLTSVLELGPEADQPEAAKFRQFWGSRSELRRFQDGAIREAVVWEAASMSQKRLIPHQVVTHLLALHADIPETCVHYVG

SEQ ID NO: 3162 - protein, 85 aa, Homo sapiens
GPLDALIQGLKETSSTGEEALVAAVRCYDDLSRLLWGLEGLPLTVSAVQGAHPVLRYTEVFPPTPVRPAFSFYETLRERSSLLPR

SEQ ID NO: 3163 - protein, 85 aa, Homo sapiens
LDKPCPAYVEPMTVVCHLEGSGQWPQDAEAVQRVRAAFQLRLAELLTQQHGLQCRATATHTDVLKDGFVFRIRVAYQREPQILKE

SEQ ID NO: 3164 - protein, 85 aa, Homo sapiens
VQSPEGMISLRDTAASLRLERDTRQLPLLTSALHGLQQQHPAFSGVARLAKRWVRAQLLGEGFADESLDLVAAALFLHPEPFTPP

SEQ ID NO: 3165 - protein, 85 aa, Homo sapiens
SSPQVGFLRFLFLVSTFDWKNNPLFVNLNNELTVEEQVEIRSGFLAARAQLPVMVIVTPQDRKNSVWTQDGPSAQILQQLVVLAA

SEQ ID NO: 3166 - protein, 85 aa, Homo sapiens
EALPMLEKQLMDPRGPGDIRTVFRPPLDIYDVLIRLSPRHIPRHRQAVDSPAASFCRGLLSQPGPSSLMPVLGYDPPQLYLTQLR

SEQ ID NO: 3167 - protein, 85 aa, Homo sapiens
SQPVQGYGTGAYDTTTATVTTTQASYAAQSAYGTQPAYPAYGQQPAATAPTSYSSTQPTSYDQSSYSQQNTYGQPSSYGQQSSYG

SEQ ID NO: 3168 - protein, 85 aa, Homo sapiens
QQSSYGQQPPTSYPPQTGSYSQAPSQYSQQSSSYGQQSSFRQDHPSSMGVYGQESGGFSGPGENRSMSGPDNRGRGRGGFDRGGM

SEQ ID NO: 3169 - protein, 85 aa, Homo sapiens
SRGGRGGGRGGMGSAGERGGFNKPGGPMDEGPDLDLGPPVDPDEDSDNSAIYVQGLNDSVTLDDLADFFKQCGVVKMNKRTGQPM

SEQ ID NO: 3170 - protein, 85 aa, Homo sapiens
IHIYLDKETGKPKGDATVSYEDPPTAKAAVEWFDGKDFQGSKLKVSLARKKPPMNSMRGGLPPREGRGMPPPLRGGPGGPGGPGG

SEQ ID NO: 3171 - protein, 85 aa, Homo sapiens
PMGRMGGRGGDRGGFPPRGPRGSRGNPSGGGNVQHRAGDWQCPNPGCGNQNFAWRTECNQCKAPKPEGFLPPPFPPPGGDRGRGG

SEQ ID NO: 3172 - protein, 85 aa, Homo sapiens
PGGMRGGRGGLMDRGGPGGMFRGGRGGDRGGFRGGRGMDRGGFGGGRRGGPGGPPGPLMEQMGGRRGGRGGPGKMDKGEHRQERR

SEQ ID NO: 3173 - protein, 85 aa, Homo sapiens
QQPAATAPTSYSSTQPTSYDQSSYSQQNTYGQPSSYGQQSSYGQQSSYGQQPPTSYPPQTGSYSQAPSQYSQQSSSYGQQSSFRQ

SEQ ID NO: 3174 - protein, 85 aa, Homo sapiens
DHPSSMGVYGQESGGFSGPGENRSMSGPDNRGRGRGGFDRGGMSRGGRGGGRGGMGSAGERGGFNKPGGPMDEGPDLDLGPPVDP

SEQ ID NO: 3175 - protein, 85 aa, Homo sapiens
DEDSDNSAIYVQGLNDSVTLDDLADFFKQCGVVKMNKRTGQPMIHIYLDKETGKPKGDATVSYEDPPTAKAAVEWFDGKDFQGSK

SEQ ID NO: 3176 - protein, 85 aa, Homo sapiens
LKVSLARKKPPMNSMRGGLPPREGRGMPPPLRGGPGGPGGPGGPMGRMGGRGGDRGGFPPRGPRGSRGNPSGGGNVQHRAGDWQC

SEQ ID NO: 3177 - protein, 85 aa, Homo sapiens
PNPGCGNQNFAWRTECNQCKAPKPEGFLPPPFPPPGGDRGRGGPGGMRGGRGGLMDRGGPGGMFRGGRGGDRGGFRGGRGMDRGG

SEQ ID NO: 3178 - protein, 85 aa, Homo sapiens
ASSPAVDVSCRRREKRRQLDARRSKCRIRLGGHMEQWCLLKERLGFSLHSQLAKFLLDRYTSSGCVLCAGPEPLPPKGLQYLVLL

SEQ ID NO: 3179 - protein, 85 aa, Homo sapiens
SHAHSRECSLVPGLRGPGGQDGGLVWECSAGHTFSWGPSLSPTPSEAPKPASLPHTTRRSWCSEATSGQELADLESEHDERTQEA

SEQ ID NO: 3180 - protein, 85 aa, Homo sapiens
RLPRRVGPPPETFPPPGEEEGEEEEDNDEDEEEMLSDASLWTYSSSPDDSEPDAPRLLPSPVTCTPKEGETPPAPAALSSPLAVP

SEQ ID NO: 3181 - protein, 85 aa, Homo sapiens
ALSASSLSSRAPPPAEVRVQPQLSRTPQAAQQTEALASTGSQAQSAPTPAWDEDTAQIGPKRIRKAAKRELMPCDFPGCGRIFSN

SEQ ID NO: 3182 - protein, 85 aa, Homo sapiens
RQYLNHHKKYQHIHQKSFSCPEPACGKSFNFKKHLKEHMKLHSDTRDYICEFCARSFRTSSNLVIHRRIHTGEKPLQCEICGFTC

SEQ ID NO: 3183 - protein, 85 aa, Homo sapiens
RQKASLNWHQRKHAETVAALRFPCEFCGKRFEKPDSVAAHRSKSHPALLLAPQESPSGPLEPCPSISAPGPLGSSEGSRPSASPQ

SEQ ID NO: 3184 - protein, 84 aa, Homo sapiens
QRKHAETVAALRFPCEFCGKRFEKPDSVAAHRSKSHPALLLAPQESPSGPLEPCPSISAPGPLGSSEGSRPSASPQAPTLLPQQ

SEQ ID NO: 3185 - protein, 85 aa, Homo sapiens
RLGFSLHSQLAKFLLDRYTSSGCVLCAGPEPLPPKGLQYLVLLSHAHSRECSLVPGLRGPGGQDGGLVWECSAGHTFSWGPSLSP

SEQ ID NO: 3186 - protein, 85 aa, Homo sapiens
TPSEAPKPASLPHTTRRSWCSEATSGQELADLESEHDERTQEARLPRRVGPPPETFPPPGEEEGEEEEDNDEDEEEMLSDASLWT

SEQ ID NO: 3187 - protein, 85 aa, Homo sapiens
YSSSPDDSEPDAPRLLPSPVTCTPKEGETPPAPAALSSPLAVPALSASSLSSRAPPPAEVRVQPQLSRTPQAAQQTEALASTGSQ

SEQ ID NO: 3188 - protein, 85 aa, Homo sapiens
AQSAPTPAWDEDTAQIGPKRIRKAAKRELMPCDFPGCGRIFSNRQYLNHHKKYQHIHQKSFSCPEPACGKSFNFKKHLKEHMKLH

SEQ ID NO: 3189 - protein, 85 aa, Homo sapiens
SDTRDYICEFCARSFRTSSNLVIHRRIHTGEKPLQCEICGFTCRQKASLNWHQRKHAETVAALRFPCEFCGKRFEKPDSVAAHRS

SEQ ID NO: 3190 - protein, 85 aa, Homo sapiens
AMAPSPSLVQVYTSPAAVAVWEWQDGLGTWHPYSATVCSFIEQQFVQQKGQRFGLGSLAHSIPLGQADPSLAPYIIDLPSWTQFR

SEQ ID NO: 3191 - protein, 85 aa, Homo sapiens
QDTGTMRAVRRHLFPQHSAPGRGVVWEWLSDDGSWTAYEASVCDYLEQQVARGNQLVDLAPLGYNYTVNYTTHTQTNKTSSFCRS

SEQ ID NO: 3192 - protein, 85 aa, Homo sapiens
VRRQAGPPYPVTTIIAPPGHTGVACSCHQCLSGSRTGPVSGRYRHSMTNLPAYPVPQHPPHRTASVFGTHQAFAPYNKPSLSGAR

SEQ ID NO: 3193 - protein, 85 aa, Homo sapiens
SAPRLNTTNAWGAAPPSLGSQPLYRSSLSHLGPQHLPPGSSTSGAVSASLPSGPSSSPGSVPATVPMQMPKPSRVQQALAGMTSV

SEQ ID NO: 3194 - protein, 85 aa, Homo sapiens
MMSAIGLPVCLSRAPQPTSPPASRLASKSHGSVKRLRKMSVKGATPKPEPEPEQVIKNYTEELKVPPDEDCIICMEKLSTASGYS

SEQ ID NO: 3195 - protein, 85 aa, Homo sapiens
DVTDSKAIGSLAVGHLTKCSHAFHLLCLLAMYCNGNKDGSLQCPSCKTIYGEKTGTQPQGKMEVLRFQMSLPGHEDCGTILIVYS

SEQ ID NO: 3196 - protein, 85 aa, Homo sapiens
IPHGIQGPEHPNPGKPFTARGFPRQCYLPDNAQGRKVLELLKVAWKRRLIFTVGTSSTTGETDTVVWNEIHHKTEMDRNITGHGY

SEQ ID NO: 3197 - protein, 84 aa, Homo sapiens
LPDNAQGRKVLELLKVAWKRRLIFTVGTSSTTGETDTVVWNEIHHKTEMDRNITGHGYPDPNYLQNVLAELAAQGVTEDCLEQQ

SEQ ID NO: 3198 - protein, 85 aa, Homo sapiens
QQFVQQKGQRFGLGSLAHSIPLGQADPSLAPYIIDLPSWTQFRQDTGTMRAVRRHLFPQHSAPGRGVVWEWLSDDGSWTAYEASV

SEQ ID NO: 3199 - protein, 85 aa, Homo sapiens
CDYLEQQVARGNQLVDLAPLGYNYTVNYTTHTQTNKTSSFCRSVRRQAGPPYPVTTIIAPPGHTGVACSCHQCLSGSRTGPVSGR

SEQ ID NO: 3200 - protein, 85 aa, Homo sapiens
YRHSMTNLPAYPVPQHPPHRTASVFGTHQAFAPYNKPSLSGARSAPRLNTTNAWGAAPPSLGSQPLYRSSLSHLGPQHLPPGSST

SEQ ID NO: 3201 - protein, 85 aa, Homo sapiens
SGAVSASLPSGPSSSPGSVPATVPMQMPKPSRVQQALAGMTSVLMSAIGLPVCLSRAPQPTSPPASRLASKSHGSVKRLRKMSVK

SEQ ID NO: 3202 - protein, 85 aa, Homo sapiens
GATPKPEPEPEQVIKNYTEELKVPPDEDCIICMEKLSTASGYSDVTDSKAIGSLAVGHLTKCSHAFHLLCLLAMYCNGNKDGSLQ

SEQ ID NO: 3203 - protein, 85 aa, Homo sapiens
CPSCKTIYGEKTGTQPQGKMEVLRFQMSLPGHEDCGTILIVYSIPHGIQGPEHPNPGKPFTARGFPRQCYLPDNAQGRKVLELLK

SEQ ID NO: 3204 - protein, 85 aa, Homo sapiens
SMLAERRRKQKWAVDPQNTAWSNDDSKFGQRMLEKMGWSKGKGLGAQEQGATDHIKVQVKNNHLGLGATINNEDNWIAHQDDFNQ

SEQ ID NO: 3205 - protein, 85 aa, Homo sapiens
LLAELNTCHGQETTDSSDKKEKKSFSLEEKSKISKNRVHYMKFTKGKDLSSRSKTDLDCIFGKRQSKKTPEGDASPSTPEENETT

SEQ ID NO: 3206 - protein, 85 aa, Homo sapiens
TTSAFTIQEYFAKRMAALKNKPQVPVPGSDISETQVERKRGKKRNKEATGKDVESYLQPKAKRHTEGKPERAEAQERVAKKKSAP

SEQ ID NO: 3207 - protein, 84 aa, Homo sapiens
AQERVAKKKSAPAEEQLRGPCWDQSSKASAQDAGDHVQPPEGRDFTLKPKKRRGKKKLQKPVEIAEDATLEETLVKKKKKKDSK

SEQ ID NO: 3208 - protein, 85 aa, Homo sapiens
GLGAQEQGATDHIKVQVKNNHLGLGATINNEDNWIAHQDDFNQLLAELNTCHGQETTDSSDKKEKKSFSLEEKSKISKNRVHYMK

SEQ ID NO: 3209 - protein, 85 aa, Homo sapiens
FTKGKDLSSRSKTDLDCIFGKRQSKKTPEGDASPSTPEENETTTTSAFTIQEYFAKRMAALKNKPQVPVPGSDISETQVERKRGK

SEQ ID NO: 3210 - protein, 85 aa, Homo sapiens
KRNKEATGKDVESYLQPKAKRHTEGKPERAEAQERVAKKKSAPAEEQLRGPCWDQSSKASAQDAGDHVQPPEGRDFTLKPKKRRG

SEQ ID NO: 3211 - protein, 85 aa, Homo sapiens
ATAAQGPLSLLWGWLWSERFWLPENVSWADLEGPADGYGYPRGRHILSVFPLAAGIFFVRLLFERFIAKPCALCIGIEDSGPYQA

SEQ ID NO: 3212 - protein, 85 aa, Homo sapiens
QPNAILEKVFISITKYPDKKRLEGLSKQLDWNVRKIQCWFRHRRNQDKPPTLTKFCESMWRFTFYLCIFCYGIRFLWSSPWFWDI

SEQ ID NO: 3213 - protein, 85 aa, Homo sapiens
RQCWHNYPFQPLSSGLYHYYIMELAFYWSLMFSQFTDIKRKDFLIMFVHHLVTIGLISFSYINNMVRVGTLIMCLHDVSDFLLEA

SEQ ID NO: 3214 - protein, 85 aa, Homo sapiens
AKLANYAKYQRLCDTLFVIFSAVFMVTRLGIYPFWILNTTLFESWEIIGPYASWWLLNGLLLTLQLLHVIWSYLIARIALKALIR

SEQ ID NO: 3215 - protein, 84 aa, Homo sapiens
SWWLLNGLLLTLQLLHVIWSYLIARIALKALIRGKVSKDDRSDVESSSEEEDVTTCTKSPCDSSSSNGANRVNGHMGGSYWAEE

SEQ ID NO: 3216 - protein, 85 aa, Homo sapiens
GRHILSVFPLAAGIFFVRLLFERFIAKPCALCIGIEDSGPYQAQPNAILEKVFISITKYPDKKRLEGLSKQLDWNVRKIQCWFRH

SEQ ID NO: 3217 - protein, 85 aa, Homo sapiens
RRNQDKPPTLTKFCESMWRFTFYLCIFCYGIRFLWSSPWFWDIRQCWHNYPFQPLSSGLYHYYIMELAFYWSLMFSQFTDIKRKD

SEQ ID NO: 3218 - protein, 85 aa, Homo sapiens
FLIMFVHHLVTIGLISFSYINNMVRVGTLIMCLHDVSDFLLEAAKLANYAKYQRLCDTLFVIFSAVFMVTRLGIYPFWILNTTLF

SEQ ID NO: 3219 - protein, 85 aa, Homo sapiens
ESWEIIGPYASWWLLNGLLLTLQLLHVIWSYLIARIALKALIRGKVSKDDRSDVESSSEEEDVTTCTKSPCDSSSSNGANRVNGH

SEQ ID NO: 3220 - protein, 85 aa, Homo sapiens
EVEAAEARSPAPGYKRSGRRYKCLSCTKTFPNAPRAARHAATHGPADCSEEVAEVKPKPETEAKAEEASGEKVSGSAAKPRPYAC

SEQ ID NO: 3221 - protein, 85 aa, Homo sapiens
PLCPKAYKTAPELRSHGRSHTGEKPFPCPECGRRFMQPVCLRVHLASHAGELPFRCAHCPKAYGALSKLKIHQRGHTGERPYACA

SEQ ID NO: 3222 - protein, 85 aa, Homo sapiens
DCGKSFADPSVFRKHRRTHAGLRPYSCERCGKAYAELKDLRNHERSHTGERPFLCSECGKSFSRSSSLTCHQRIHAAQKPYRCPA

SEQ ID NO: 3223 - protein, 85 aa, Homo sapiens
CGKGFTQLSSYQSHERTHSGEKPFLCPRCGRMFSDPSSFRRHQRAHEGVKPYHCEKCGKDFRQPADLAMHRRVHTGDRPFKCLQC

SEQ ID NO: 3224 - protein, 85 aa, Homo sapiens
DKTFVASWDLKRHALVHSGQRPFRCEECGRAFAERASLTKHSRVHSGERPFHCNACGKSFVVSSSLRKHERTHRSSEAAGVPPAQ

SEQ ID NO: 3225 - protein, 85 aa, Homo sapiens
ELVVGLALPVGVAGESSAAPAAGAGLGDPPAGLLGLPPESGGVMATQWQVVGMTVEHVECQDAGVREAPGPLEGAGEAGGEEADE

SEQ ID NO: 3226 - protein, 85 aa, Homo sapiens
KPPQFVCRECKETFSTMTLLRRHERSHPELRPFPCTQCGKSFSDRAGLRKHSRTHSSVRPYTCPHCPKAFLSASDLRKHERTHPV

SEQ ID NO: 3227 - protein, 84 aa, Homo sapiens
RSHPELRPFPCTQCGKSFSDRAGLRKHSRTHSSVRPYTCPHCPKAFLSASDLRKHERTHPVPMGTPTPLEPLVALLGMPEEGPA

SEQ ID NO: 3228 - protein, 85 aa, Homo sapiens
HGPADCSEEVAEVKPKPETEAKAEEASGEKVSGSAAKPRPYACPLCPKAYKTAPELRSHGRSHTGEKPFPCPECGRRFMQPVCLR

SEQ ID NO: 3229 - protein, 85 aa, Homo sapiens
VHLASHAGELPFRCAHCPKAYGALSKLKIHQRGHTGERPYACADCGKSFADPSVFRKHRRTHAGLRPYSCERCGKAYAELKDLRN

SEQ ID NO: 3230 - protein, 85 aa, Homo sapiens
HERSHTGERPFLCSECGKSFSRSSSLTCHQRIHAAQKPYRCPACGKGFTQLSSYQSHERTHSGEKPFLCPRCGRMFSDPSSFRRH

SEQ ID NO: 3231 - protein, 85 aa, Homo sapiens
QRAHEGVKPYHCEKCGKDFRQPADLAMHRRVHTGDRPFKCLQCDKTFVASWDLKRHALVHSGQRPFRCEECGRAFAERASLTKHS

SEQ ID NO: 3232 - protein, 85 aa, Homo sapiens
RVHSGERPFHCNACGKSFVVSSSLRKHERTHRSSEAAGVPPAQELVVGLALPVGVAGESSAAPAAGAGLGDPPAGLLGLPPESGG

SEQ ID NO: 3233 - protein, 85 aa, Homo sapiens
VMATQWQVVGMTVEHVECQDAGVREAPGPLEGAGEAGGEEADEKPPQFVCRECKETFSTMTLLRRHERSHPELRPFPCTQCGKSF

SEQ ID NO: 3234 - protein, 85 aa, Homo sapiens
AHAGRTGYDNREIVMKYIHYKLSQRGYEWDAGDVGAAPPGAAPAPGIFSSQPGHTPHPAASRDPVARTSPLQTPAAPGAAAGPAL

SEQ ID NO: 3235 - protein, 85 aa, Homo sapiens
SPVPPVVHLTLRQAGDDFSRRYRRDFAEMSSQLHLTPFTARGRFATVVEELFRDGVNWGRIVAFFEFGGVMCVESVNREMSPLVD

SEQ ID NO: 3236 - protein, 84 aa, Homo sapiens
VMCVESVNREMSPLVDNIALWMTEYLNRHLHTWIQDNGGWDAFVELYGPSMRPLFDFSWLSLKTLLSLALVGACITLGAYLGHK

SEQ ID NO: 3237 - protein, 85 aa, Homo sapiens
PAPGIFSSQPGHTPHPAASRDPVARTSPLQTPAAPGAAAGPALSPVPPVVHLTLRQAGDDFSRRYRRDFAEMSSQLHLTPFTARG

SEQ ID NO: 3238 - protein, 85 aa, Homo sapiens
RFATVVEELFRDGVNWGRIVAFFEFGGVMCVESVNREMSPLVDNIALWMTEYLNRHLHTWIQDNGGWDAFVELYGPSMRPLFDFS

SEQ ID NO: 3239 - protein, 85 aa, Homo sapiens
MTQLKAKSEGKLAKQICKVVLDHFEKQYSKELGDAWNTVREILTSPSCWQYAVLLNRFNYPFELEKDLHLKGYHTLSQGSLPNYP

SEQ ID NO: 3240 - protein, 85 aa, Homo sapiens
KSVKCYLSRTPGRIPSERHQIGNLKKYYLLNAASLLPVLALELRDGEKVLDLCAAPGGKSIALLQCACPGYLHCNEYDSLRLRWL

SEQ ID NO: 3241 - protein, 85 aa, Homo sapiens
RQTLESFIPQPLINVIKVSELDGRKMGDAQPEMFDKVLVDAPCSNDRSWLFSSDSQKASCRISQRRNLPLLQIELLRSAIKALRP

SEQ ID NO: 3242 - protein, 84 aa, Homo sapiens
GGILVYSTCTLSKAENQDVISEILNSHGNIMPMDIKGIARTCSHDFTFAPTGQECGLLVIPDKGKAWGPMYVAKLKKSWSTGKW

SEQ ID NO: 3243 - protein, 85 aa, Homo sapiens
LTSPSCWQYAVLLNRFNYPFELEKDLHLKGYHTLSQGSLPNYPKSVKCYLSRTPGRIPSERHQIGNLKKYYLLNAASLLPVLALE

SEQ ID NO: 3244 - protein, 85 aa, Homo sapiens
LRDGEKVLDLCAAPGGKSIALLQCACPGYLHCNEYDSLRLRWLRQTLESFIPQPLINVIKVSELDGRKMGDAQPEMFDKVLVDAP

SEQ ID NO: 3245 - protein, 85 aa, Homo sapiens
CSNDRSWLFSSDSQKASCRISQRRNLPLLQIELLRSAIKALRPGGILVYSTCTLSKAENQDVISEILNSHGNIMPMDIKGIARTC

SEQ ID NO: 3246 - protein, 85 aa, Homo sapiens
IVQSFLRAFQAHKEENWALPVMYAVALDLRVFANNADQQLVKKGKSKVGDMLEKAAELLMSCFRVCASDTRAGIEDSKKWGMLFL

SEQ ID NO: 3247 - protein, 85 aa, Homo sapiens
VNQLFKIYFKINKLHLCKPLIRAIDSSNLKDDYSTAQRVTYKYYVGRKAMFDSDFKQAEEYLSFAFEHCHRSSQKNKRMILIYLL

SEQ ID NO: 3248 - protein, 85 aa, Homo sapiens
PVKMLLGHMPTVELLKKYHLMQFAEVTRAVSEGNLLLLHEALAKHEAFFIRCGIFLILEKLKIITYRNLFKKVYLLLKTHQLSLD

SEQ ID NO: 3249 - protein, 85 aa, Homo sapiens
ASPEEKCQQVLEPPYDEMFAAHLRCTYAVGNHDFIEAYKCQTVIVQSFLRAFQAHKEENWALPVMYAVALDLRVFANNADQQLVK

SEQ ID NO: 3250 - protein, 85 aa, Homo sapiens
KGKSKVGDMLEKAAELLMSCFRVCASDTRAGIEDSKKWGMLFLVNQLFKIYFKINKLHLCKPLIRAIDSSNLKDDYSTAQRVTYK

SEQ ID NO: 3251 - protein, 85 aa, Homo sapiens
YYVGRKAMFDSDFKQAEEYLSFAFEHCHRSSQKNKRMILIYLLPVKMLLGHMPTVELLKKYHLMQFAEVTRAVSEGNLLLLHEAL

SEQ ID NO: 3252 - protein, 85 aa, Homo sapiens
AKHEAFFIRCGIFLILEKLKIITYRNLFKKVYLLLKTHQLSLDAFLVALKFMQVEDVDIDEVQCILANLIYMGHVKGYISHQHQK

SEQ ID NO: 3253 - protein, 85 aa, Homo sapiens
AQPLCPPLSESWMLSAAWGPTRRPPPSDKDCGRSLVSSPDSWGSTPADSPVASPARPGTLRDPRAPSVGRRGARSSRLGSGQRQS

SEQ ID NO: 3254 - protein, 85 aa, Homo sapiens
ASEREKLRMRTLARALHELRRFLPPSVAPAGQSLTKIETLRLAIRYIGHLSAVLGLSEESLQRRCRQRGDAGSPRGCPLCPDDCP

SEQ ID NO: 3255 - protein, 85 aa, Homo sapiens
AQMQTRTQAEGQGQGRGLGLVSAVRAGASWGSPPACPGARAAPEPRDPPALFAEAACPEGQAMEPSPPSPLLPGDVLALLETWMP

SEQ ID NO: 3256 - protein, 84 aa, Homo sapiens
QGRGLGLVSAVRAGASWGSPPACPGARAAPEPRDPPALFAEAACPEGQAMEPSPPSPLLPGDVLALLETWMPLSPLEWLPEEPK

SEQ ID NO: 3257 - protein, 85 aa, Homo sapiens
GSTPADSPVASPARPGTLRDPRAPSVGRRGARSSRLGSGQRQSASEREKLRMRTLARALHELRRFLPPSVAPAGQSLTKIETLRL

SEQ ID NO: 3258 - protein, 85 aa, Homo sapiens
AIRYIGHLSAVLGLSEESLQRRCRQRGDAGSPRGCPLCPDDCPAQMQTRTQAEGQGQGRGLGLVSAVRAGASWGSPPACPGARAA

SEQ ID NO: 3259 - protein, 85 aa, Homo sapiens
STDSRESFQRVELLKKEIDKSKDKKEGLTLPPRLECSGMITAHCSLNLPRLRWSSCLSPLLRLQVTIVVLGNKCDLQEQRRVDPD

SEQ ID NO: 3260 - protein, 84 aa, Homo sapiens
MLRLQVTIVVLGNKCDLQEQRRVDPDVAQHWAKSEKVKLWEVSVADRRSLLEPFVYLASKMTQPQSKSAFPLSRKNKGSGSLDG

SEQ ID NO: 3261 - protein, 85 aa, Homo sapiens
VGSIETDRGVREQVRFYDTRGLRDGAELPRHCFSCTDGYVLVYSTDSRESFQRVELLKKEIDKSKDKKEGLTLPPRLECSGMITA

SEQ ID NO: 3262 - protein, 85 aa, Homo sapiens
HCSLNLPRLRWSSCLSPLLRLQVTIVVLGNKCDLQEQRRVDPDVAQHWAKSEKVKLWEVSVADRRSLLEPFVYLASKMTQPQSKS

SEQ ID NO: 3263 - protein, 85 aa, Homo sapiens
ATNFLAHEKIWFDKFKYDDAERRFYEQMNGPVAGASRQENGASVILRDIARARENIQKSLAGSSGPGASSGTSGDHGELVVRIAS

SEQ ID NO: 3264 - protein, 85 aa, Homo sapiens
MEVENQSLRGVVQELQQAISKLEARLNVLEKSSPGHRATAPQTQHVSPMRQVEPPAKKPATPAEDDEDDDIDLFGSDNEEEDKEA

SEQ ID NO: 3265 - protein, 85 aa, Homo sapiens
AQLREERLRQYAEKKAKKPALVAKSSILLDVKPWDDETDMAQLEACVRSIQLDGLVWGASKLVPVGYGIRKLQIQCVVEDDKVGT

SEQ ID NO: 3266 - protein, 84 aa, Homo sapiens
ILLDVKPWDDETDMAQLEACVRSIQLDGLVWGASKLVPVGYGIRKLQIQCVVEDDKVGTDLLEEEITKFEEHVQSVDIAAFNKI

SEQ ID NO: 3267 - protein, 85 aa, Homo sapiens
SVILRDIARARENIQKSLAGSSGPGASSGTSGDHGELVVRIASLEVENQSLRGVVQELQQAISKLEARLNVLEKSSPGHRATAPQ

SEQ ID NO: 3268 - protein, 85 aa, Homo sapiens
TQHVSPMRQVEPPAKKPATPAEDDEDDDIDLFGSDNEEEDKEAAQLREERLRQYAEKKAKKPALVAKSSILLDVKPWDDETDMAQ

SEQ ID NO: 3269 - protein, 85 aa, Homo sapiens
NGDDAFVRRPRVGSQIPEKMQKHPWRQVCDRGIHLVNLSPFWKVGREPASSIKALLCGRGEARAFDDIAKYFSEKEWEKMKASEK

SEQ ID NO: 3270 - protein, 85 aa, Homo sapiens
IIYVYMKRKYEAMTKLGFKATLPPFMRNKRVADFQGNDFDNDPNRGNQVEHPQMTFGRLQGIFPKITPEKPAEEGNDSKGVPEAS

SEQ ID NO: 3271 - protein, 84 aa, Homo sapiens
QGIFPKITPEKPAEEGNDSKGVPEASGPQNNGKQLRPSGKLNTSEKVNKTSGPKRGKHAWTHRVRERKQLVIYEEISDPQEDDE

SEQ ID NO: 3272 - protein, 85 aa, Homo sapiens
KVGREPASSIKALLCGRGEARAFDDIAKYFSEKEWEKMKASEKIIYVYMKRKYEAMTKLGFKATLPPFMRNKRVADFQGNDFDND

SEQ ID NO: 3273 - protein, 85 aa, Homo sapiens
PNRGNQVEHPQMTFGRLQGIFPKITPEKPAEEGNDSKGVPEASGPQNNGKQLRPSGKLNTSEKVNKTSGPKRGKHAWTHRVRERK

SEQ ID NO: 3274 - protein, 85 aa, Homo sapiens
GVVNFVFRASEDLQVLENYSDAPMTPKQILQVIEAEGLKEMSGTSPLACLNAMLHSNSRGGEGLFYKLPGRISLFTLKKDALQWS

SEQ ID NO: 3275 - protein, 85 aa, Homo sapiens
RHPATVEGEEPEDTADVESCGSNEASTVSGENDVSLDETSSNASCSTESQSRPLSNPRDSYRASSQANKQKKKTGVMLPRVVLTP

SEQ ID NO: 3276 - protein, 85 aa, Homo sapiens
MKVNGAHVESASGFSGCHADGESGSPSSSSSGSLALGSAAIRGQAEVTQDPAPLLRGFRKPATGQMKRNRGEEIDFETPGSILVN

SEQ ID NO: 3277 - protein, 85 aa, Homo sapiens
TNLRALINSRTFHALPSHFQQQLLFLLPEVDRQVGTDGLLRLSSSALNNEFFTHAAQSWRERLADGEFTHEMQVRIRQEMEKEKK

SEQ ID NO: 3278 - protein, 85 aa, Homo sapiens
VEQWKEKFFEDYYGQKLGLTKEESLQQNVGQEEAEIKSGLCVPGESVRIQRGPATRQRDGHFKKRSRPDLRTRARRNLYKKQESE

SEQ ID NO: 3279 - protein, 85 aa, Homo sapiens
QAGVAKDAKSVASDVPLYKDGEAKTDPAGLSSPHLPGTSSAAPDLEGPEFPVESVASRIQAEPDNLARASASPDRIPSLPQETVD

SEQ ID NO: 3280 - protein, 85 aa, Homo sapiens
QEPKDQKRKSFEQAASASFPEKKPRLEDRQSFRNTIESVHTEKPQPTKEEPKVPPIRIQLSRIKPPWVVKGQPTYQICPRIIPTT

SEQ ID NO: 3281 - protein, 85 aa, Homo sapiens
ESSCRGWTGARTLADIKARALQVRGARGHHCHREAATTAIGGGGGPGGGGGGATDEGGGRGSSSGDGGEACGHPEPRGGPSTPGK

SEQ ID NO: 3282 - protein, 85 aa, Homo sapiens
CTSDLQRTQLLPPYPLNGEHTQAGTAMSRARREDLPSLRKEESCLLQRATVGLTDGLGDASQLPVAPTGDQPCQALPLLSSQTSV

SEQ ID NO: 3283 - protein, 85 aa, Homo sapiens
AERLVEQPQLHPDVRTECESGTTSWESDDEEQGPTVPADNGPIPSLVGDDTLEKGTGQALDSHPTMKDPVNVTPSSTPESSPTDC

SEQ ID NO: 3284 - protein, 85 aa, Homo sapiens
MQNRAFDDELGLGGSCPPMRESDTRQENLKTKALVSNSSLHWIPIPSNDEVVKQPKPESREHIPSVEPQVGEEWEKAAPTPPALP

SEQ ID NO: 3285 - protein, 85 aa, Homo sapiens
GDLTAEEGLDPLDSLTSLWTVPSRGGSDSNGSYCQQVDIEKLKINGDSEALSPHGESTDTASDFEGHLTEDSSEADTREAAVTKG

SEQ ID NO: 3286 - protein, 85 aa, Homo sapiens
SSVDKDEKPNWNQSAPLSKVNGDMRLVTRTDGMVAPQSWVSRVCAVRQKIPDSLLLASTEYQPRAVCLSMPGSSVEATNPLVMQL

SEQ ID NO: 3287 - protein, 85 aa, Homo sapiens
MQGSLPLEKVLPPAHDDSMSESPQVPLTKDQSHGSLRMGSLHGLGKNSGMVDGSSPSSLRALKEPLLPDSCETGTGLARIEATQA

SEQ ID NO: 3288 - protein, 85 aa, Homo sapiens
PGAPQKNCKAVPSFDSLHPVTNPITSSRKLEEMDSKEQFSSFSCEDQKEVRAMSQDSNSNAAPGKSPGDLTTSRTPRFSSPNVIS

SEQ ID NO: 3289 - protein, 85 aa, Homo sapiens
FGPEQTGRALGDQSNVTGQGKKLFGSGNVAATLQRPRPADPMPLPAEIPPVFPSGKLGPSTNSMSGGVQTPREDWAPKPHAFVGS

SEQ ID NO: 3290 - protein, 85 aa, Homo sapiens
VKNEKTFVGGPLKANAENRKATGHSPLELVGHLEGMPFVMDLPFWKLPREPGKGLSEPLEPSSLPSQLSIKQAFYGKLSKLQLSS

SEQ ID NO: 3291 - protein, 85 aa, Homo sapiens
TSFNYSSSSPTFPKGLAGSVVQLSHKANFGASHSASLSLQMFTDSSTVESISLQCACSLKAMIMCQGCGAFCHDDCIGPSKLCVL

SEQ ID NO: 3292 - protein, 84 aa, Homo sapiens
SSSPTFPKGLAGSVVQLSHKANFGASHSASLSLQMFTDSSTVESISLQCACSLKAMIMCQGCGAFCHDDCIGPSKLCVLCLVVR

SEQ ID NO: 3293 - protein, 85 aa, Homo sapiens
GTSPLACLNAMLHSNSRGGEGLFYKLPGRISLFTLKKDALQWSRHPATVEGEEPEDTADVESCGSNEASTVSGENDVSLDETSSN

SEQ ID NO: 3294 - protein, 85 aa, Homo sapiens
ASCSTESQSRPLSNPRDSYRASSQANKQKKKTGVMLPRVVLTPLKVNGAHVESASGFSGCHADGESGSPSSSSSGSLALGSAAIR

SEQ ID NO: 3295 - protein, 85 aa, Homo sapiens
GQAEVTQDPAPLLRGFRKPATGQMKRNRGEEIDFETPGSILVNTNLRALINSRTFHALPSHFQQQLLFLLPEVDRQVGTDGLLRL

SEQ ID NO: 3296 - protein, 85 aa, Homo sapiens
SSSALNNEFFTHAAQSWRERLADGEFTHEMQVRIRQEMEKEKKVEQWKEKFFEDYYGQKLGLTKEESLQQNVGQEEAEIKSGLCV

SEQ ID NO: 3297 - protein, 85 aa, Homo sapiens
PGESVRIQRGPATRQRDGHFKKRSRPDLRTRARRNLYKKQESEQAGVAKDAKSVASDVPLYKDGEAKTDPAGLSSPHLPGTSSAA

SEQ ID NO: 3298 - protein, 85 aa, Homo sapiens
PDLEGPEFPVESVASRIQAEPDNLARASASPDRIPSLPQETVDQEPKDQKRKSFEQAASASFPEKKPRLEDRQSFRNTIESVHTE

SEQ ID NO: 3299 - protein, 85 aa, Homo sapiens
KPQPTKEEPKVPPIRIQLSRIKPPWVVKGQPTYQICPRIIPTTESSCRGWTGARTLADIKARALQVRGARGHHCHREAATTAIGG

SEQ ID NO: 3300 - protein, 85 aa, Homo sapiens
GGGPGGGGGGATDEGGGRGSSSGDGGEACGHPEPRGGPSTPGKCTSDLQRTQLLPPYPLNGEHTQAGTAMSRARREDLPSLRKEE

SEQ ID NO: 3301 - protein, 85 aa, Homo sapiens
SCLLQRATVGLTDGLGDASQLPVAPTGDQPCQALPLLSSQTSVAERLVEQPQLHPDVRTECESGTTSWESDDEEQGPTVPADNGP

SEQ ID NO: 3302 - protein, 85 aa, Homo sapiens
IPSLVGDDTLEKGTGQALDSHPTMKDPVNVTPSSTPESSPTDCLQNRAFDDELGLGGSCPPMRESDTRQENLKTKALVSNSSLHW

SEQ ID NO: 3303 - protein, 85 aa, Homo sapiens
IPIPSNDEVVKQPKPESREHIPSVEPQVGEEWEKAAPTPPALPGDLTAEEGLDPLDSLTSLWTVPSRGGSDSNGSYCQQVDIEKL

SEQ ID NO: 3304 - protein, 85 aa, Homo sapiens
KINGDSEALSPHGESTDTASDFEGHLTEDSSEADTREAAVTKGSSVDKDEKPNWNQSAPLSKVNGDMRLVTRTDGMVAPQSWVSR

SEQ ID NO: 3305 - protein, 85 aa, Homo sapiens
VCAVRQKIPDSLLLASTEYQPRAVCLSMPGSSVEATNPLVMQLLQGSLPLEKVLPPAHDDSMSESPQVPLTKDQSHGSLRMGSLH

SEQ ID NO: 3306 - protein, 85 aa, Homo sapiens
GLGKNSGMVDGSSPSSLRALKEPLLPDSCETGTGLARIEATQAPGAPQKNCKAVPSFDSLHPVTNPITSSRKLEEMDSKEQFSSF

SEQ ID NO: 3307 - protein, 85 aa, Homo sapiens
SCEDQKEVRAMSQDSNSNAAPGKSPGDLTTSRTPRFSSPNVISFGPEQTGRALGDQSNVTGQGKKLFGSGNVAATLQRPRPADPM

SEQ ID NO: 3308 - protein, 85 aa, Homo sapiens
PLPAEIPPVFPSGKLGPSTNSMSGGVQTPREDWAPKPHAFVGSVKNEKTFVGGPLKANAENRKATGHSPLELVGHLEGMPFVMDL

SEQ ID NO: 3309 - protein, 85 aa, Homo sapiens
PFWKLPREPGKGLSEPLEPSSLPSQLSIKQAFYGKLSKLQLSSTSFNYSSSSPTFPKGLAGSVVQLSHKANFGASHSASLSLQMF

SEQ ID NO: 3310 - protein, 85 aa, Homo sapiens
DQDYERRLLRQIVIQNENTMPRVTEMRRTLTPASSPVSSPSKHGDRFIPSRAGANWSVNFHRINENEKSPSQNRKAKDATSDNGK

SEQ ID NO: 3311 - protein, 85 aa, Homo sapiens
DGLAYSALLKNELLGAGIEKVQDPQTEDRRLQPSTPEKKGLFTVTRLCDLSVEGDSVTSVGWSERGNLVAVGTHKGFVQIWDAAA

SEQ ID NO: 3312 - protein, 85 aa, Homo sapiens
GKKLSMLEGHTARVGALAWNAEQLSSGSRDRMILQRDIRTPPLQSERRLQGHRQEVCGLKWSTDHQLLASGGNDNKLLVWNHSSL

SEQ ID NO: 3313 - protein, 85 aa, Homo sapiens
SPVQQYTEHLAAVKAIAWSPHQHGLLASGGGTADRCIRFWNTLTGQPLQCIDTGSQVCNLAWSKHANELVSTHGYSQNQILVWKY

SEQ ID NO: 3314 - protein, 84 aa, Homo sapiens
HANELVSTHGYSQNQILVWKYPSLTQVAKLTGHSYRVLYLAMSPDGEAIVTGAGDETLRFWNVFSKTRSTKESVSVLNLFTRIR

SEQ ID NO: 3315 - protein, 85 aa, Homo sapiens
HGDRFIPSRAGANWSVNFHRINENEKSPSQNRKAKDATSDNGKDGLAYSALLKNELLGAGIEKVQDPQTEDRRLQPSTPEKKGLF

SEQ ID NO: 3316 - protein, 85 aa, Homo sapiens
TVTRLCDLSVEGDSVTSVGWSERGNLVAVGTHKGFVQIWDAAAGKKLSMLEGHTARVGALAWNAEQLSSGSRDRMILQRDIRTPP

SEQ ID NO: 3317 - protein, 85 aa, Homo sapiens
MQSERRLQGHRQEVCGLKWSTDHQLLASGGNDNKLLVWNHSSLSPVQQYTEHLAAVKAIAWSPHQHGLLASGGGTADRCIRFWNT

SEQ ID NO: 3318 - protein, 85 aa, Homo sapiens
MTGQPLQCIDTGSQVCNLAWSKHANELVSTHGYSQNQILVWKYPSLTQVAKLTGHSYRVLYLAMSPDGEAIVTGAGDETLRFWNV

SEQ ID NO: 3319 - protein, 85 aa, Homo sapiens
AESLRSPRRSLYKLVGSPPWKEAFRQRCLERMRNSRDRLLNRYRQAGSSGPGNSQNSFLVQEVMEEEWNALQSVENCPEDLAQLE

SEQ ID NO: 3320 - protein, 84 aa, Homo sapiens
MEEEWNALQSVENCPEDLAQLEELIDMAVLEEIQQELINQEQSIISEYEKSLQFDEKCLSIMLAEWEANPLICPVCTKPVILGL

SEQ ID NO: 3321 - protein, 85 aa, Homo sapiens
YRQAGSSGPGNSQNSFLVQEVMEEEWNALQSVENCPEDLAQLEELIDMAVLEEIQQELINQEQSIISEYEKSLQFDEKCLSIMLA

SEQ ID NO: 3322 - protein, 85 aa, Homo sapiens
VQIGFPPLLSIVSRMNQATVTSVLEYLSNWFGERDFTPELGRWLYALLACLEKPLLPEAHSLIRQLARRCSEVRLLVDSKDDERV

SEQ ID NO: 3323 - protein, 85 aa, Homo sapiens
MDSNVTMPKSEDEEGWKKFCLGEKLCADGAVGPATNESPGIDYVQIGFPPLLSIVSRMNQATVTSVLEYLSNWFGERDFTPELGR

SEQ ID NO: 3324 - protein, 85 aa, Homo sapiens
ASVLNVKESKAPERTVVVAGLPVDLFSDQLLAVLVKSHFQDIKNEGGDVEDVIYPTRTKGVAYVIFKEKKVAENVIRQKKHWLAR

SEQ ID NO: 3325 - protein, 85 aa, Homo sapiens
KTRHAELTVSLRVSHFGDKIFSSVNAILDLSVFGKEVTLETLVKDLKKKIPSLSFSPLKPNGRISVEGSFLAVKRLRESLLARAC

SEQ ID NO: 3326 - protein, 85 aa, Homo sapiens
SLLEKDRNFTSEERKWNRQNPQRNLQRSNNSLASVRTLVPETARSGEMLVLDTDVFLYLKHKCGSYESTLKKFHILSQEKVDGEI

SEQ ID NO: 3327 - protein, 85 aa, Homo sapiens
TTICLKSIQVGSQPNNAKHVKELIEEWSHALYLKLRKETFILEGKENREKRMIKRACEQLSSRYLEVLINLYRTHIDIIGSSSDT

SEQ ID NO: 3328 - protein, 84 aa, Homo sapiens
KHVKELIEEWSHALYLKLRKETFILEGKENREKRMIKRACEQLSSRYLEVLINLYRTHIDIIGSSSDTYLFKKGVMKLIGQKVS

SEQ ID NO: 3329 - protein, 85 aa, Homo sapiens
KNEGGDVEDVIYPTRTKGVAYVIFKEKKVAENVIRQKKHWLARKTRHAELTVSLRVSHFGDKIFSSVNAILDLSVFGKEVTLETL

SEQ ID NO: 3330 - protein, 85 aa, Homo sapiens
VKDLKKKIPSLSFSPLKPNGRISVEGSFLAVKRLRESLLARACSLLEKDRNFTSEERKWNRQNPQRNLQRSNNSLASVRTLVPET

SEQ ID NO: 3331 - protein, 85 aa, Homo sapiens
ARSGEMLVLDTDVFLYLKHKCGSYESTLKKFHILSQEKVDGEITTICLKSIQVGSQPNNAKHVKELIEEWSHALYLKLRKETFIL

SEQ ID NO: 3332 - protein, 85 aa, Homo sapiens
QAPRAALVFALVIALVPVGRGNYEELENSGDTTVESERPNKVTIPSTFAAVTIKETLNANINSTNFAPDENQLEFILMVLIPLIL

SEQ ID NO: 3333 - protein, 85 aa, Homo sapiens
MVLLLLSVVFLATYYKRKRTKQEPSSQGSQSALQTYELGSENVKVPIFEEDTPSVMEIEMEELDKWMNSMNRNADFECLPTLKEE

SEQ ID NO: 3334 - protein, 84 aa, Homo sapiens
YYKRKRTKQEPSSQGSQSALQTYELGSENVKVPIFEEDTPSVMEIEMEELDKWMNSMNRNADFECLPTLKEEKESNHNPSDSES

SEQ ID NO: 3335 - protein, 85 aa, Homo sapiens
TIPSTFAAVTIKETLNANINSTNFAPDENQLEFILMVLIPLILLVLLLLSVVFLATYYKRKRTKQEPSSQGSQSALQTYELGSEN

SEQ ID NO: 3336 - protein, 85 aa, Homo sapiens
ASCLALRMALLLVSGVLAPAVLTDDVPQEPVPTLWNEPAELPSGEGPVESTSPGREPVDTGPPAPTVAPGPEDSTAQERLDQGGG

SEQ ID NO: 3337 - protein, 84 aa, Homo sapiens
EPAELPSGEGPVESTSPGREPVDTGPPAPTVAPGPEDSTAQERLDQGGGSLGPGAIAAIVIAALLATCVVLALVVVALRKFSAS

SEQ ID NO: 3338 - protein, 85 aa, Homo sapiens
ATAQLQRTPMSALVFPNKISTEHQSLVLVKRLLAVSVSCITYLRGIFPECAYGTRYLDDLCVKILREDKNCPGSTQLVKWMLGCY

SEQ ID NO: 3339 - protein, 85 aa, Homo sapiens
DALQKKYVYTNPEDPQTISECYQFKFKYTNNGPLMDFISKNQSNESSMLSTDTKKASILLIRKIYILMQNLGPLPNDVCLTMKLF

SEQ ID NO: 3340 - protein, 85 aa, Homo sapiens
YYDEVTPPDYQPPGFKDGDCEGVIFEGEPMYLNVGEVSTPFHIFKVKVTTERERMENIDSTILSPKQIKTPFQKILRDKDVEDEQ

SEQ ID NO: 3341 - protein, 85 aa, Homo sapiens
EHYTSDDLDIETKMEEQEKNPASSELEEPSLVCEEDEIMRSKESPDLSISHSQVEQLVNKTSELDMSESKTRSGKVFQNKMANGN

SEQ ID NO: 3342 - protein, 84 aa, Homo sapiens
SISHSQVEQLVNKTSELDMSESKTRSGKVFQNKMANGNQPVKSSKENRKRSQHESGRIVLHHFDSSSQESVPKRRKFSEPKEHI

SEQ ID NO: 3343 - protein, 85 aa, Homo sapiens
MRGIFPECAYGTRYLDDLCVKILREDKNCPGSTQLVKWMLGCYDALQKKYVYTNPEDPQTISECYQFKFKYTNNGPLMDFISKNQ

SEQ ID NO: 3344 - protein, 85 aa, Homo sapiens
SNESSMLSTDTKKASILLIRKIYILMQNLGPLPNDVCLTMKLFYYDEVTPPDYQPPGFKDGDCEGVIFEGEPMYLNVGEVSTPFH

SEQ ID NO: 3345 - protein, 85 aa, Homo sapiens
IFKVKVTTERERMENIDSTILSPKQIKTPFQKILRDKDVEDEQEHYTSDDLDIETKMEEQEKNPASSELEEPSLVCEEDEIMRSK

SEQ ID NO: 3346 - protein, 85 aa, Homo sapiens
ESPDLSISHSQVEQLVNKTSELDMSESKTRSGKVFQNKMANGNQPVKSSKENRKRSQHESGRIVLHHFDSSSQESVPKRRKFSEP

SEQ ID NO: 3347 - protein, 85 aa, Homo sapiens
PIVDKLKEALKPGRKDSADDGELGKLLASSAKKVLLQKIEFEPASKSFSYQLEALKSKYVLLNPKTEGASRHKSGDDPPARRQGS

SEQ ID NO: 3348 - protein, 85 aa, Homo sapiens
EHTYESCGDGVPAPQKVLFPTERLSLRWERVFRVGAGLHNLGNTCFLNATIQCLTYTPPLANYLLSKEHARSCHQGSFCMLCVMQ

SEQ ID NO: 3349 - protein, 85 aa, Homo sapiens
NHIVQAFANSGNAIKPVSFIRDLKKIARHFRFGNQEDAHEFLRYTIDAMQKACLNGCAKLDRQTQATTLVHQIFGGYLRSRVKCS

SEQ ID NO: 3350 - protein, 85 aa, Homo sapiens
VCKSVSDTYDPYLDVALEIRQAANIVRALELFVKADVLSGENAYMCAKCKKKVPASKRFTIHRTSNVLTLSLKRFANFSGGKITK

SEQ ID NO: 3351 - protein, 85 aa, Homo sapiens
DVGYPEFLNIRPYMSQNNGDPVMYGLYAVLVHSGYSCHAGHYYCYVKASNGQWYQMNDSLVHSSNVKVVLNQQAYVLFYLRIPGS

SEQ ID NO: 3352 - protein, 85 aa, Homo sapiens
KKSPEGLISRTGSSSLPGRPSVIPDHSKKNIGNGIISSPLTGKRQDSGTMKKPHTTEEIGVPISRNGSTLGLKSQNGCIPPKLPS

SEQ ID NO: 3353 - protein, 85 aa, Homo sapiens
GSPSPKLSQTPTHMPTILDDPGKKVKKPAPPQHFSPRTAQGLPGTSNSNSSRSGSQRQGSWDSRDVVLSTSPKLLATATANGHGL

SEQ ID NO: 3354 - protein, 85 aa, Homo sapiens
KGNDESAGLDRRGSSSSSPEHSASSDSTKAPQTPRSGAAHLCDSQETNCSTAGHSKTPPSGADSKTVKLKSPVLSNTTTEPASTM

SEQ ID NO: 3355 - protein, 85 aa, Homo sapiens
SPPPAKKLALSAKKASTLWRATGNDLRPPPPSPSSDLTHPMKTSHPVVASTWPVHRARAVSPAPQSSSRLQPPFSPHPTLLSSTP

SEQ ID NO: 3356 - protein, 85 aa, Homo sapiens
KPPGTSEPRSCSSISTALPQVNEDLVSLPHQLPEASEPPQSPSEKRKKTFVGEPQRLGSETRLPQHIREATAAPHGKRKRKKKKR

SEQ ID NO: 3357 - protein, 85 aa, Homo sapiens
PEDTAASALQEGQTQRQPGSPMYRREGQAQLPAVRRQEDGTQPQVNGQQVGCVTDGHHASSRKRRRKGAEGLGEEGGLHQDPLRH

SEQ ID NO: 3358 - protein, 85 aa, Homo sapiens
SCSPMGDGDPEAMEESPRKKKKKKRKQETQRAVEEDGHLKCPRSAKPQDAVVPESSSCAPSANGWCPGDRMGLSQAPPVSWNGER

SEQ ID NO: 3359 - protein, 85 aa, Homo sapiens
ESDVVQELLKYSSDKAYGRKVLTWDGKMSAVSQDAIEDSRQARTETVVDDWDEEFDRGKEKKIKKFKREKRRNFNAFQKLQTRRN

SEQ ID NO: 3360 - protein, 84 aa, Homo sapiens
RKVLTWDGKMSAVSQDAIEDSRQARTETVVDDWDEEFDRGKEKKIKKFKREKRRNFNAFQKLQTRRNFWSVTHPAKAASLSYRR

SEQ ID NO: 3361 - protein, 85 aa, Homo sapiens
PASKSFSYQLEALKSKYVLLNPKTEGASRHKSGDDPPARRQGSEHTYESCGDGVPAPQKVLFPTERLSLRWERVFRVGAGLHNLG

SEQ ID NO: 3362 - protein, 85 aa, Homo sapiens
NTCFLNATIQCLTYTPPLANYLLSKEHARSCHQGSFCMLCVMQNHIVQAFANSGNAIKPVSFIRDLKKIARHFRFGNQEDAHEFL

SEQ ID NO: 3363 - protein, 85 aa, Homo sapiens
RYTIDAMQKACLNGCAKLDRQTQATTLVHQIFGGYLRSRVKCSVCKSVSDTYDPYLDVALEIRQAANIVRALELFVKADVLSGEN

SEQ ID NO: 3364 - protein, 85 aa, Homo sapiens
AYMCAKCKKKVPASKRFTIHRTSNVLTLSLKRFANFSGGKITKDVGYPEFLNIRPYMSQNNGDPVMYGLYAVLVHSGYSCHAGHY

SEQ ID NO: 3365 - protein, 85 aa, Homo sapiens
YCYVKASNGQWYQMNDSLVHSSNVKVVLNQQAYVLFYLRIPGSKKSPEGLISRTGSSSLPGRPSVIPDHSKKNIGNGIISSPLTG

SEQ ID NO: 3366 - protein, 85 aa, Homo sapiens
KRQDSGTMKKPHTTEEIGVPISRNGSTLGLKSQNGCIPPKLPSGSPSPKLSQTPTHMPTILDDPGKKVKKPAPPQHFSPRTAQGL

SEQ ID NO: 3367 - protein, 85 aa, Homo sapiens
PGTSNSNSSRSGSQRQGSWDSRDVVLSTSPKLLATATANGHGLKGNDESAGLDRRGSSSSSPEHSASSDSTKAPQTPRSGAAHLC

SEQ ID NO: 3368 - protein, 85 aa, Homo sapiens
DSQETNCSTAGHSKTPPSGADSKTVKLKSPVLSNTTTEPASTMSPPPAKKLALSAKKASTLWRATGNDLRPPPPSPSSDLTHPMK

SEQ ID NO: 3369 - protein, 85 aa, Homo sapiens
TSHPVVASTWPVHRARAVSPAPQSSSRLQPPFSPHPTLLSSTPKPPGTSEPRSCSSISTALPQVNEDLVSLPHQLPEASEPPQSP

SEQ ID NO: 3370 - protein, 85 aa, Homo sapiens
SEKRKKTFVGEPQRLGSETRLPQHIREATAAPHGKRKRKKKKRPEDTAASALQEGQTQRQPGSPMYRREGQAQLPAVRRQEDGTQ

SEQ ID NO: 3371 - protein, 85 aa, Homo sapiens
PQVNGQQVGCVTDGHHASSRKRRRKGAEGLGEEGGLHQDPLRHSCSPMGDGDPEAMEESPRKKKKKKRKQETQRAVEEDGHLKCP

SEQ ID NO: 3372 - protein, 85 aa, Homo sapiens
RSAKPQDAVVPESSSCAPSANGWCPGDRMGLSQAPPVSWNGERESDVVQELLKYSSDKAYGRKVLTWDGKMSAVSQDAIEDSRQA

SEQ ID NO: 3373 - protein, 85 aa, Homo sapiens
ALVSADSRIAELLTELHQLIKQTQEERSRSEHNLVNIQKTHERMQTENKISPYYRTKLRGLYTTAKADAEAECNILRKALDKIAE

SEQ ID NO: 3374 - protein, 85 aa, Homo sapiens
IKSLLEERRIAAKIAGLYNDSEPPRKTMRRGVLMTLLQQSAMTLPLWIGKPGDKPPPLCGAIPASGDYVARPGDKVAARVKAVDG

SEQ ID NO: 3375 - protein, 85 aa, Homo sapiens
DEQWILAEVVSYSHATNKYEVDDIDEEGKERHTLSRRRVIPLPQWKANPETDPEALFQKEQLVLALYPQTTCFYRALIHAPPQRP

SEQ ID NO: 3376 - protein, 84 aa, Homo sapiens
VIPLPQWKANPETDPEALFQKEQLVLALYPQTTCFYRALIHAPPQRPQDDYSVLFEDTSYADGYSPPLNVAQRYVVACKEPKKK

SEQ ID NO: 3377 - protein, 85 aa, Homo sapiens
RMQTENKISPYYRTKLRGLYTTAKADAEAECNILRKALDKIAEIKSLLEERRIAAKIAGLYNDSEPPRKTMRRGVLMTLLQQSAM

SEQ ID NO: 3378 - protein, 85 aa, Homo sapiens
TLPLWIGKPGDKPPPLCGAIPASGDYVARPGDKVAARVKAVDGDEQWILAEVVSYSHATNKYEVDDIDEEGKERHTLSRRRVIPL

SEQ ID NO: 3379 - protein, 85 aa, Homo sapiens
DEDGLELQQEPNSFFDATGADGTHMDGDQIVVEVQETVFVSDVVDSDITVHNFVPDDPDSVVIQDVIEDVVIEDVQCPDIMEEAD

SEQ ID NO: 3380 - protein, 85 aa, Homo sapiens
VSETVIIPEQVLDSDVTEEVSLAHCTVPDDVLASDITSASMSMPEHVLTGDSIHVSDVGHVGHVGHVEHVVHDSVVEAEIVTDPL

SEQ ID NO: 3381 - protein, 85 aa, Homo sapiens
TTDVVSEEVLVADCASEAVIDANGIPVDQQDDDKGNCEDYLMISLDDAGKIEHDGSSGMTMDTESEIDPCKVDGTCPEVIKVYIF

SEQ ID NO: 3382 - protein, 85 aa, Homo sapiens
KADPGEDDLGGTVDIVESEPENDHGVELLDQNSSIRVPREKMVYMTVNDSQPEDEDLNVAEIADEVYMEVIVGEEDAAAAAAAAA

SEQ ID NO: 3383 - protein, 85 aa, Homo sapiens
VHEQQMDDNEIKTFMPIAWAAAYGNNSDGIENRNGTASALLHIDESAGLGRLAKQKPKKRRRPDSRQYQTAIIIGPDGHPLTVYP

SEQ ID NO: 3384 - protein, 85 aa, Homo sapiens
CMICGKKFKSRGFLKRHMKNHPEHLAKKKYRCTDCDYTTNKKISLHNHLESHKLTSKAEKAIECDECGKHFSHAGALFTHKMVHK

SEQ ID NO: 3385 - protein, 85 aa, Homo sapiens
EKGANKMHKCKFCEYETAEQGLLNRHLLAVHSKNFPHICVECGKGFRHPSELKKHMRIHTGEKPYQCQYCEYRSADSSNLKTHVK

SEQ ID NO: 3386 - protein, 85 aa, Homo sapiens
TKHSKEMPFKCDICLLTFSDTKEVQQHALIHQESKTHQCLHCDHKSSNSSDLKRHIISVHTKDYPHKCDMCDKGFHRPSELKKHV

SEQ ID NO: 3387 - protein, 85 aa, Homo sapiens
AAHKGKKMHQCRHCDFKIADPFVLSRHILSVHTKDLPFRCKRCRKGFRQQSELKKHMKTHSGRKVYQCEYCEYSTTDASGFKRHV

SEQ ID NO: 3388 - protein, 84 aa, Homo sapiens
KRCRKGFRQQSELKKHMKTHSGRKVYQCEYCEYSTTDASGFKRHVISIHTKDYPHRCEYCKKGFRRPSEKNQHIMRHHKEVGLP

SEQ ID NO: 3389 - protein, 85 aa, Homo sapiens
VVDSDITVHNFVPDDPDSVVIQDVIEDVVIEDVQCPDIMEEADVSETVIIPEQVLDSDVTEEVSLAHCTVPDDVLASDITSASMS

SEQ ID NO: 3390 - protein, 85 aa, Homo sapiens
MPEHVLTGDSIHVSDVGHVGHVGHVEHVVHDSVVEAEIVTDPLTTDVVSEEVLVADCASEAVIDANGIPVDQQDDDKGNCEDYLM

SEQ ID NO: 3391 - protein, 85 aa, Homo sapiens
ISLDDAGKIEHDGSSGMTMDTESEIDPCKVDGTCPEVIKVYIFKADPGEDDLGGTVDIVESEPENDHGVELLDQNSSIRVPREKM

SEQ ID NO: 3392 - protein, 85 aa, Homo sapiens
VYMTVNDSQPEDEDLNVAEIADEVYMEVIVGEEDAAAAAAAAAVHEQQMDDNEIKTFMPIAWAAAYGNNSDGIENRNGTASALLH

SEQ ID NO: 3393 - protein, 85 aa, Homo sapiens
IDESAGLGRLAKQKPKKRRRPDSRQYQTAIIIGPDGHPLTVYPCMICGKKFKSRGFLKRHMKNHPEHLAKKKYRCTDCDYTTNKK

SEQ ID NO: 3394 - protein, 85 aa, Homo sapiens
ISLHNHLESHKLTSKAEKAIECDECGKHFSHAGALFTHKMVHKEKGANKMHKCKFCEYETAEQGLLNRHLLAVHSKNFPHICVEC

SEQ ID NO: 3395 - protein, 85 aa, Homo sapiens
GKGFRHPSELKKHMRIHTGEKPYQCQYCEYRSADSSNLKTHVKTKHSKEMPFKCDICLLTFSDTKEVQQHALIHQESKTHQCLHC

SEQ ID NO: 3396 - protein, 85 aa, Homo sapiens
DHKSSNSSDLKRHIISVHTKDYPHKCDMCDKGFHRPSELKKHVAAHKGKKMHQCRHCDFKIADPFVLSRHILSVHTKDLPFRCKR

SEQ ID NO: 3397 - protein, 85 aa, Homo sapiens
TSSSPAGLEGSDLSSINTMMSAVMSVGKVTENGGSPQGIKSPSKPPGPNRIGRRNQETKEEKSSYNCPLCEKICTTQHQLTMHIR

SEQ ID NO: 3398 - protein, 85 aa, Homo sapiens
QHNTDTGGADHSCSICGKSLSSASSLDRHMLVHSGERPYKCTVCGQSFTTNGNMHRHMKIHEKDPNSATATAPPSPLKRRRLSSK

SEQ ID NO: 3399 - protein, 85 aa, Homo sapiens
RKLSHDAESEREDPAPAKKMVEDGQSGDLEKKADEVFHCPVCFKEFVCKYGLETHMETHSDNPLRCDICCVTFRTHRGLLRHNAL

SEQ ID NO: 3400 - protein, 85 aa, Homo sapiens
VHKQLPRDAMGRPFIQNNPSIPAGFHDLGFTDFSCRKFPRISQAWCETNLRRCISEQHRFVCDTCDKAFPMLCSLALHKQTHVAA

SEQ ID NO: 3401 - protein, 85 aa, Homo sapiens
DQGQEKPQATPLPGDALDQKGFLALLGLQHTKDVRPAPAEEPLPDDNQAIQLQTLKCQLPQDPGCTNLLSLSPFEAASLGGSLTV

SEQ ID NO: 3402 - protein, 85 aa, Homo sapiens
LPATKDSIKHLSLQPFQKGFIIQPDSSIVVKPISGESAIELADIQQILKMAASAPPQISLPPFSKAPAAPLQAIFKHMPPLKPKP

SEQ ID NO: 3403 - protein, 85 aa, Homo sapiens
MVTPRTVVATSTPPPLINAQQASPGCISPSLPPPPLKLLKGSVEAASNAHLLQSKSGTQPHAATRLSLQQPRAELPGQPEMKTQL

SEQ ID NO: 3404 - protein, 85 aa, Homo sapiens
EQDSIIEALLPLSMEAKIKQEITEGELKAFMTAPGGKKTPAMRKVLYPCRFCNQVFAFSGVLRAHVRSHLGISPYQCNICDYIAA

SEQ ID NO: 3405 - protein, 85 aa, Homo sapiens
DKAALIRHLRTHSGERPYICKICHYPFTVKANCERHLRKKHLKATRKDIEKNIEYVSSSAAELVDAFCAPDTVCRLCGEDLKHYR

SEQ ID NO: 3406 - protein, 85 aa, Homo sapiens
ALRIHMRTHCGRGLGGGHKGRKPFECKECSAAFAAKRNCIHHILKQHLHVPEQDIESYVLAADGLGPAEAPAAEASGRGEDSGCA

SEQ ID NO: 3407 - protein, 85 aa, Homo sapiens
ALGDCKPLTAFLEPQNGFLHRGPTQPPPPHVSIKLEPASSFAVDFNEPLDFSQKGLALVQVKQENISFLSPSSLVPYDCSMEPID

SEQ ID NO: 3408 - protein, 85 aa, Homo sapiens
MSIPKNFRKGDKDLATPSEAKKPEEEAGSSEQPSPCPAPGPSLPVTLGPSGILESPMAPAPAATPEPPAQPLQGPVQLAVPIYSS

SEQ ID NO: 3409 - protein, 85 aa, Homo sapiens
ALVSSPPLVGSSALLSGTALLRPLRPKPPLLLPKPPVTEELPPLASIAQIISSVSSAPTLLKTKVADPGPASTGSNTTASDSLGG

SEQ ID NO: 3410 - protein, 85 aa, Homo sapiens
SVPKAATTATPAATTSPKESSEPPAPASSPEAASPTEQGPAGTSKKRGRKRGMRSRPRANSGGVDLDSSGEFASIEKMLATTDTN

SEQ ID NO: 3411 - protein, 85 aa, Homo sapiens
KFSPFLQTAEDNTQDEVAGAPADHHGPSDEEQGSPPEDKLLRAKRNSYTNCLQKITCPHCPRVFPWASSLQRHMLTHTGQKPFPC

SEQ ID NO: 3412 - protein, 85 aa, Homo sapiens
QKCDAFFSTKSNCERHQLRKHGVTTCSLRRNGLIPQSKESDVGSHDSTGERPYKCQTCERTFTLKHSLVRHQRIHQKARHAKHHG

SEQ ID NO: 3413 - protein, 85 aa, Homo sapiens
KDSDKEERGEEDSENESTHSGNNAVSENEAELAPNASNHMAVTRSRKEGLASATKDCSHREEKVTAGWPSEPGQGDLNPESPAAL

SEQ ID NO: 3414 - protein, 84 aa, Homo sapiens
MAPNASNHMAVTRSRKEGLASATKDCSHREEKVTAGWPSEPGQGDLNPESPAALGQDLLEPRSKRPAHPILATADGASQLVGME

SEQ ID NO: 3415 - protein, 85 aa, Homo sapiens
SKPPGPNRIGRRNQETKEEKSSYNCPLCEKICTTQHQLTMHIRQHNTDTGGADHSCSICGKSLSSASSLDRHMLVHSGERPYKCT

SEQ ID NO: 3416 - protein, 85 aa, Homo sapiens
VCGQSFTTNGNMHRHMKIHEKDPNSATATAPPSPLKRRRLSSKRKLSHDAESEREDPAPAKKMVEDGQSGDLEKKADEVFHCPVC

SEQ ID NO: 3417 - protein, 85 aa, Homo sapiens
FKEFVCKYGLETHMETHSDNPLRCDICCVTFRTHRGLLRHNALVHKQLPRDAMGRPFIQNNPSIPAGFHDLGFTDFSCRKFPRIS

SEQ ID NO: 3418 - protein, 85 aa, Homo sapiens
QAWCETNLRRCISEQHRFVCDTCDKAFPMLCSLALHKQTHVAADQGQEKPQATPLPGDALDQKGFLALLGLQHTKDVRPAPAEEP

SEQ ID NO: 3419 - protein, 85 aa, Homo sapiens
MPDDNQAIQLQTLKCQLPQDPGCTNLLSLSPFEAASLGGSLTVLPATKDSIKHLSLQPFQKGFIIQPDSSIVVKPISGESAIELA

SEQ ID NO: 3420 - protein, 85 aa, Homo sapiens
DIQQILKMAASAPPQISLPPFSKAPAAPLQAIFKHMPPLKPKPLVTPRTVVATSTPPPLINAQQASPGCISPSLPPPPLKLLKGS

SEQ ID NO: 3421 - protein, 85 aa, Homo sapiens
VEAASNAHLLQSKSGTQPHAATRLSLQQPRAELPGQPEMKTQLEQDSIIEALLPLSMEAKIKQEITEGELKAFMTAPGGKKTPAM

SEQ ID NO: 3422 - protein, 85 aa, Homo sapiens
RKVLYPCRFCNQVFAFSGVLRAHVRSHLGISPYQCNICDYIAADKAALIRHLRTHSGERPYICKICHYPFTVKANCERHLRKKHL

SEQ ID NO: 3423 - protein, 85 aa, Homo sapiens
KATRKDIEKNIEYVSSSAAELVDAFCAPDTVCRLCGEDLKHYRALRIHMRTHCGRGLGGGHKGRKPFECKECSAAFAAKRNCIHH

SEQ ID NO: 3424 - protein, 85 aa, Homo sapiens
ILKQHLHVPEQDIESYVLAADGLGPAEAPAAEASGRGEDSGCAALGDCKPLTAFLEPQNGFLHRGPTQPPPPHVSIKLEPASSFA

SEQ ID NO: 3425 - protein, 85 aa, Homo sapiens
VDFNEPLDFSQKGLALVQVKQENISFLSPSSLVPYDCSMEPIDLSIPKNFRKGDKDLATPSEAKKPEEEAGSSEQPSPCPAPGPS

SEQ ID NO: 3426 - protein, 85 aa, Homo sapiens
LPVTLGPSGILESPMAPAPAATPEPPAQPLQGPVQLAVPIYSSALVSSPPLVGSSALLSGTALLRPLRPKPPLLLPKPPVTEELP

SEQ ID NO: 3427 - protein, 85 aa, Homo sapiens
PLASIAQIISSVSSAPTLLKTKVADPGPASTGSNTTASDSLGGSVPKAATTATPAATTSPKESSEPPAPASSPEAASPTEQGPAG

SEQ ID NO: 3428 - protein, 85 aa, Homo sapiens
TSKKRGRKRGMRSRPRANSGGVDLDSSGEFASIEKMLATTDTNKFSPFLQTAEDNTQDEVAGAPADHHGPSDEEQGSPPEDKLLR

SEQ ID NO: 3429 - protein, 85 aa, Homo sapiens
AKRNSYTNCLQKITCPHCPRVFPWASSLQRHMLTHTGQKPFPCQKCDAFFSTKSNCERHQLRKHGVTTCSLRRNGLIPQSKESDV

SEQ ID NO: 3430 - protein, 85 aa, Homo sapiens
GSHDSTGERPYKCQTCERTFTLKHSLVRHQRIHQKARHAKHHGKDSDKEERGEEDSENESTHSGNNAVSENEAELAPNASNHMAV

SEQ ID NO: 3431 - protein, 85 aa, Homo sapiens
NNLNDPPNWNIRPNSRADGGDGSRWNYALLVPMLGLAAFRWIWSRESQKEVEKEREAYRRRTAAFQQDLEAKYHAMISENRRAVA

SEQ ID NO: 3432 - protein, 85 aa, Homo sapiens
QLSLELEKEQNRTASYREALISQGRKLVEEKKLLEQERAQVMQEKRQVQPLRSAYLSCLQREENWQRRARLLLKEFEAVLTERQN

SEQ ID NO: 3433 - protein, 85 aa, Homo sapiens
IYCSLFLPRSKRLEIEKSLLVRASVDPVAADLEMAAGLTDIFQHDTYCGDVWNTNKRQNGRLMWLYLKYWELVVELKKFKRVEEA

SEQ ID NO: 3434 - protein, 84 aa, Homo sapiens
FLPRSKRLEIEKSLLVRASVDPVAADLEMAAGLTDIFQHDTYCGDVWNTNKRQNGRLMWLYLKYWELVVELKKFKRVEEAILEK

SEQ ID NO: 3435 - protein, 85 aa, Homo sapiens
WSRESQKEVEKEREAYRRRTAAFQQDLEAKYHAMISENRRAVAQLSLELEKEQNRTASYREALISQGRKLVEEKKLLEQERAQVM

SEQ ID NO: 3436 - protein, 85 aa, Homo sapiens
QEKRQVQPLRSAYLSCLQREENWQRRARLLLKEFEAVLTERQNIYCSLFLPRSKRLEIEKSLLVRASVDPVAADLEMAAGLTDIF

SEQ ID NO: 3437 - protein, 85 aa, Homo sapiens
AATKRKRRGGFAVQAKKPKRNEIDAEPPAKRHATAEEVEEEERDRIPGPVCKGKWKNKERILIFSSRGINFRTRHLMQDLRMLMP

SEQ ID NO: 3438 - protein, 85 aa, Homo sapiens
HSKADTKMDRKDKLFVINEVCEMKNCNKCIYFEAKKKQDLYMWLSNSPHGPSAKFLVQNIHTLAELKMTGNCLKGSRPLLSFDPA

SEQ ID NO: 3439 - protein, 85 aa, Homo sapiens
FDELPHYALLKELLIQIFSTPRYHPKSQPFVDHVFTFTILDNRIWFRNFQIIEEDAALVEIGPRFVLNLIKIFQGSFGGPTLYEN

SEQ ID NO: 3440 - protein, 85 aa, Homo sapiens
PHYQSPNMHRRVIRSITAAKYREKQQVKDVQKLRKKEPKTLLPHDPTADVFVTPAEEKPIEIQWVKPEPKVDLKARKKRIYKRQR

SEQ ID NO: 3441 - protein, 84 aa, Homo sapiens
RSITAAKYREKQQVKDVQKLRKKEPKTLLPHDPTADVFVTPAEEKPIEIQWVKPEPKVDLKARKKRIYKRQRKMKQRMDSGKTK

SEQ ID NO: 3442 - protein, 85 aa, Homo sapiens
RDRIPGPVCKGKWKNKERILIFSSRGINFRTRHLMQDLRMLMPHSKADTKMDRKDKLFVINEVCEMKNCNKCIYFEAKKKQDLYM

SEQ ID NO: 3443 - protein, 85 aa, Homo sapiens
WLSNSPHGPSAKFLVQNIHTLAELKMTGNCLKGSRPLLSFDPAFDELPHYALLKELLIQIFSTPRYHPKSQPFVDHVFTFTILDN

SEQ ID NO: 3444 - protein, 85 aa, Homo sapiens
RIWFRNFQIIEEDAALVEIGPRFVLNLIKIFQGSFGGPTLYENPHYQSPNMHRRVIRSITAAKYREKQQVKDVQKLRKKEPKTLL

SEQ ID NO: 3445 - protein, 85 aa, Homo sapiens
TTFKEAMTFKDVAVVFTEEELGLLDLAQRKLYRDVMLENFRNLLSVGHQAFHRDTFHFLREEKIWMMKTAIQREGNSGDKIQTEM

SEQ ID NO: 3446 - protein, 85 aa, Homo sapiens
ETVSEAGTHQEWSFQQIWEKIASDLTRSQDLMINSSQFSKEGDFPCQTEAGLSVIHTRQKSSQGNGYKPSFSDVSHFDFHQQLHS

SEQ ID NO: 3447 - protein, 85 aa, Homo sapiens
GEKSHTCDECGKNFCYISALRIHQRVHMGEKCYKCDVCGKEFSQSSHLQTHQRVHTGEKPFKCVECGKGFSRRSALNVHHKLHTG

SEQ ID NO: 3448 - protein, 85 aa, Homo sapiens
EKPYNCEECGKAFIHDSQLQEHQRIHTGEKPFKCDICGKSFCGRSRLNRHSMVHTAEKPFRCDTCDKSFRQRSALNSHRMIHTGE

SEQ ID NO: 3449 - protein, 85 aa, Homo sapiens
KPYKCEECGKGFICRRDLYTHHMVHTGEKPYNCKECGKSFRWASCLLKHQRVHSGEKPFKCEECGKGFYTNSQCYSHQRSHSGEK

SEQ ID NO: 3450 - protein, 85 aa, Homo sapiens
PYKCVECGKGYKRRLDLDFHQRVHTGEKLYNCKECGKSFSRAPCLLKHERLHSGEKPFQCEECGKRFTQNSHLHSHQRVHTGEKP

SEQ ID NO: 3451 - protein, 85 aa, Homo sapiens
YKCEKCGKGYNSKFNLDMHQKVHTGERPYNCKECGKSFGWASCLLKHQRLHSGEKPFKCEECGKRFTQNSQLHSHQRVHTGEKPY

SEQ ID NO: 3452 - protein, 85 aa, Homo sapiens
KCDECGKGFSWSSTRLTHQRRHSRETPLKCEQHGKNIVQNSFSKVQEKVHSVEKPYKCEDCGKGYNRRLNLDMHQRVHMGEKTWK

SEQ ID NO: 3453 - protein, 84 aa, Homo sapiens
LKCEQHGKNIVQNSFSKVQEKVHSVEKPYKCEDCGKGYNRRLNLDMHQRVHMGEKTWKCRECDMCFSQASSLRLHQNVHVGEKP

SEQ ID NO: 3454 - protein, 85 aa, Homo sapiens
MLSVGHQAFHRDTFHFLREEKIWMMKTAIQREGNSGDKIQTEMETVSEAGTHQEWSFQQIWEKIASDLTRSQDLMINSSQFSKEG

SEQ ID NO: 3455 - protein, 85 aa, Homo sapiens
DFPCQTEAGLSVIHTRQKSSQGNGYKPSFSDVSHFDFHQQLHSGEKSHTCDECGKNFCYISALRIHQRVHMGEKCYKCDVCGKEF

SEQ ID NO: 3456 - protein, 85 aa, Homo sapiens
SQSSHLQTHQRVHTGEKPFKCVECGKGFSRRSALNVHHKLHTGEKPYNCEECGKAFIHDSQLQEHQRIHTGEKPFKCDICGKSFC

SEQ ID NO: 3457 - protein, 85 aa, Homo sapiens
GRSRLNRHSMVHTAEKPFRCDTCDKSFRQRSALNSHRMIHTGEKPYKCEECGKGFICRRDLYTHHMVHTGEKPYNCKECGKSFRW

SEQ ID NO: 3458 - protein, 85 aa, Homo sapiens
ASCLLKHQRVHSGEKPFKCEECGKGFYTNSQCYSHQRSHSGEKPYKCVECGKGYKRRLDLDFHQRVHTGEKLYNCKECGKSFSRA

SEQ ID NO: 3459 - protein, 85 aa, Homo sapiens
PCLLKHERLHSGEKPFQCEECGKRFTQNSHLHSHQRVHTGEKPYKCEKCGKGYNSKFNLDMHQKVHTGERPYNCKECGKSFGWAS

SEQ ID NO: 3460 - protein, 85 aa, Homo sapiens
CLLKHQRLHSGEKPFKCEECGKRFTQNSQLHSHQRVHTGEKPYKCDECGKGFSWSSTRLTHQRRHSRETPLKCEQHGKNIVQNSF

SEQ ID NO: 3461 - protein, 85 aa, Homo sapiens
SVLSPGDLKPKRGSPHRGSLDRTDASTDLAMRSWPSELGSRTCSTSATTTAPSNSTPIARHPGRTKGYNSDDNLCEPSLEFEVPN

SEQ ID NO: 3462 - protein, 85 aa, Homo sapiens
HRQYVSRPSSLESSRNTSSNSSPLNLKGSSEQLHGRSESFSSEDLIPSRDLATLPREASTPGRNALGRHEYPLPRNGPLPQEGAQ

SEQ ID NO: 3463 - protein, 85 aa, Homo sapiens
KRGTAPPYVGVRPCSASPSSEMVTLEEFLEESNRSSPTHDTPSCRDDLLSDYFRKASDPPAIGGQPGPPAKKEGAKMPTNFVAPT

SEQ ID NO: 3464 - protein, 85 aa, Homo sapiens
VKMAAPTSEGRPLKPGQYVKPNFRLTEAEAPPSVAPRQAQPPQSLSLGRPRQAPEALGGRETGSHTLQSPAPPSSHSLARERTPL

SEQ ID NO: 3465 - protein, 85 aa, Homo sapiens
VGKAGSSCQGPGPRSRPLDTRRFSLAPPKEERLAPLHQSATAPAIATAGAGAAAAGSGSNSQLLHFSPAAAPAARTKPKAPPRSG

SEQ ID NO: 3466 - protein, 84 aa, Homo sapiens
PRSGEVATITPVRAGLSLSEGDGVPGQGCSEGLPAKSPGRSPDLAPHLGRALEDCSRGSVSKSSPASPEPGGDPQTVWYEYGCV

SEQ ID NO: 3467 - protein, 85 aa, Homo sapiens
CSTSATTTAPSNSTPIARHPGRTKGYNSDDNLCEPSLEFEVPNHRQYVSRPSSLESSRNTSSNSSPLNLKGSSEQLHGRSESFSS

SEQ ID NO: 3468 - protein, 85 aa, Homo sapiens
EDLIPSRDLATLPREASTPGRNALGRHEYPLPRNGPLPQEGAQKRGTAPPYVGVRPCSASPSSEMVTLEEFLEESNRSSPTHDTP

SEQ ID NO: 3469 - protein, 85 aa, Homo sapiens
SCRDDLLSDYFRKASDPPAIGGQPGPPAKKEGAKMPTNFVAPTVKMAAPTSEGRPLKPGQYVKPNFRLTEAEAPPSVAPRQAQPP

SEQ ID NO: 3470 - protein, 85 aa, Homo sapiens
QSLSLGRPRQAPEALGGRETGSHTLQSPAPPSSHSLARERTPLVGKAGSSCQGPGPRSRPLDTRRFSLAPPKEERLAPLHQSATA

SEQ ID NO: 3471 - protein, 85 aa, Homo sapiens
PAIATAGAGAAAAGSGSNSQLLHFSPAAAPAARTKPKAPPRSGEVATITPVRAGLSLSEGDGVPGQGCSEGLPAKSPGRSPDLAP

SEQ ID NO: 3472 - protein, 85 aa, Homo sapiens
AMAKARKPREALLWALSDLEENDFKKLKFYLRDMTLSEGQPPLARGELEGLIPVDLAELLISKYGEKEAVKVVLKGLKVMNLLEL

SEQ ID NO: 3473 - protein, 85 aa, Homo sapiens
VDQLSHICLHDYREVYREHVRCLEEWQEAGVNGRYNQVLLVAKPSSESPESLACPFPEQELESVTVEALFDSGEKPSLAPSLVVL

SEQ ID NO: 3474 - protein, 85 aa, Homo sapiens
QGSAGTGKTTLARKMVLDWATGTLYPGRFDYVFYVSCKEVVLLLESKLEQLLFWCCGDNQAPVTEILRQPERLLFILDGFDELQR

SEQ ID NO: 3475 - protein, 85 aa, Homo sapiens
PFEEKLKKRGLSPKESLLHLLIRRHTLPTCSLLITTRPLALRNLEPLLKQARHVHILGFSEEERARYFSSYFTDEKQADRAFDIV

SEQ ID NO: 3476 - protein, 85 aa, Homo sapiens
QKNDILYKACQVPGICWVVCSWLQGQMERGKVVLETPRNSTDIFMAYVSTFLPPDDDGGCSELSRHRVLRSLCSLAAEGIQHQRF

SEQ ID NO: 3477 - protein, 85 aa, Homo sapiens
LFEEAELRKHNLDGPRLAAFLSSNDYQLGLAIKKFYSFRHISFQDFFHAMSYLVKEDQSRLGKESRREVQRLLEVKEQEGNDEMT

SEQ ID NO: 3478 - protein, 85 aa, Homo sapiens
LTMQFLLDISKKDSFSNLELKFCFRISPCLAQDLKHFKEQMESMKHNRTWDLEFSLYEAKIKNLVKGIQMNNVSFKIKHSNEKKS

SEQ ID NO: 3479 - protein, 84 aa, Homo sapiens
IKNLVKGIQMNNVSFKIKHSNEKKSQSQNLFSVKSSLSHGPKEEQKCPSVHGQKEGKDNIAGTQKEASTGKGRGTEETPKNTYI

SEQ ID NO: 3480 - protein, 85 aa, Homo sapiens
MARGELEGLIPVDLAELLISKYGEKEAVKVVLKGLKVMNLLELVDQLSHICLHDYREVYREHVRCLEEWQEAGVNGRYNQVLLVA

SEQ ID NO: 3481 - protein, 85 aa, Homo sapiens
KPSSESPESLACPFPEQELESVTVEALFDSGEKPSLAPSLVVLQGSAGTGKTTLARKMVLDWATGTLYPGRFDYVFYVSCKEVVL

SEQ ID NO: 3482 - protein, 85 aa, Homo sapiens
MLESKLEQLLFWCCGDNQAPVTEILRQPERLLFILDGFDELQRPFEEKLKKRGLSPKESLLHLLIRRHTLPTCSLLITTRPLALR

SEQ ID NO: 3483 - protein, 85 aa, Homo sapiens
NLEPLLKQARHVHILGFSEEERARYFSSYFTDEKQADRAFDIVQKNDILYKACQVPGICWVVCSWLQGQMERGKVVLETPRNSTD

SEQ ID NO: 3484 - protein, 85 aa, Homo sapiens
IFMAYVSTFLPPDDDGGCSELSRHRVLRSLCSLAAEGIQHQRFLFEEAELRKHNLDGPRLAAFLSSNDYQLGLAIKKFYSFRHIS

SEQ ID NO: 3485 - protein, 85 aa, Homo sapiens
FQDFFHAMSYLVKEDQSRLGKESRREVQRLLEVKEQEGNDEMTLTMQFLLDISKKDSFSNLELKFCFRISPCLAQDLKHFKEQME

SEQ ID NO: 3486 - protein, 85 aa, Homo sapiens
SMKHNRTWDLEFSLYEAKIKNLVKGIQMNNVSFKIKHSNEKKSQSQNLFSVKSSLSHGPKEEQKCPSVHGQKEGKDNIAGTQKEA

SEQ ID NO: 3487 - protein, 85 aa, Homo sapiens
PVDICLSKAISSSLKGFLSAMRLAHRGCNVDTPVSTLTPVKTSEFENFKTKMVITSKKDYPLSKNFPYSLEHLQTSYCGLVRVDM

SEQ ID NO: 3488 - protein, 85 aa, Homo sapiens
RMLCLKSLRKLDLSHNHIKKLPATIGDLIHLQELNLNDNHLESFSVALCHSTLQKSLRSLDLSKNKIKALPVQFCQLQELKNLKL

SEQ ID NO: 3489 - protein, 85 aa, Homo sapiens
DDNELIQFPCKIGQLINLRFLSAARNKLPFLPSEFRNLSLEYLDLFGNTFEQPKVLPVIKLQAPLTLLESSARTILHNRIPYGSH

SEQ ID NO: 3490 - protein, 84 aa, Homo sapiens
ILHNRIPYGSHIIPFHLCQDLDTAKICVCGRFCLNSFIQGTTTMNLHSVAHTVVLVDNLGGTEAPIISYFCSLGCYVNSSDMLK

SEQ ID NO: 3491 - protein, 85 aa, Homo sapiens
RAFLLISTLKDKRGTRYELRENIEQFFTKFVDEGKATVRLKEPPVDICLSKAISSSLKGFLSAMRLAHRGCNVDTPVSTLTPVKT

SEQ ID NO: 3492 - protein, 85 aa, Homo sapiens
SEFENFKTKMVITSKKDYPLSKNFPYSLEHLQTSYCGLVRVDMRMLCLKSLRKLDLSHNHIKKLPATIGDLIHLQELNLNDNHLE

SEQ ID NO: 3493 - protein, 85 aa, Homo sapiens
SFSVALCHSTLQKSLRSLDLSKNKIKALPVQFCQLQELKNLKLDDNELIQFPCKIGQLINLRFLSAARNKLPFLPSEFRNLSLEY

SEQ ID NO: 3494 - protein, 85 aa, Homo sapiens
MDLFGNTFEQPKVLPVIKLQAPLTLLESSARTILHNRIPYGSHIIPFHLCQDLDTAKICVCGRFCLNSFIQGTTTMNLHSVAHTV

SEQ ID NO: 3495 - protein, 85 aa, Homo sapiens
ALVRDRRAHYVMSIVIRWVHCFSSSLRGTFGTRWEAMKAKATELRVCCARRKREAREFKPPQMRGSTRLNISDDLKIGFFSTDHA

SEQ ID NO: 3496 - protein, 85 aa, Homo sapiens
TQTDSSEILSVKELSSSTQKLAQMMKSLQVDFGFLKQLLQLKFEDRLKEESLSLFTILHDRILEIEKHYQQNEDKMRKSFNQQLA

SEQ ID NO: 3497 - protein, 84 aa, Homo sapiens
SSSTQKLAQMMKSLQVDFGFLKQLLQLKFEDRLKEESLSLFTILHDRILEIEKHYQQNEDKMRKSFNQQLADAIAVIKGMYQPL

SEQ ID NO: 3498 - protein, 85 aa, Homo sapiens
ELRVCCARRKREAREFKPPQMRGSTRLNISDDLKIGFFSTDHATQTDSSEILSVKELSSSTQKLAQMMKSLQVDFGFLKQLLQLK

SEQ ID NO: 3499 - protein, 85 aa, Homo sapiens
EDSPLPDLRDIELKLGRKVPESLVRSLRGEEPVPRERDRDPCGGSGGGGGGGGGCSSSSSYCSFPPSLSSSSSSSPTSGSPRGSH

SEQ ID NO: 3500 - protein, 85 aa, Homo sapiens
SSALERLETKLHLLRQEMVNLRATDVRLMRQLLVINESIESIKWMIEEKATITSRGSSLSGSLCSLLESQSTSLRGSYNSLHDGS

SEQ ID NO: 3501 - protein, 84 aa, Homo sapiens
LSGSLCSLLESQSTSLRGSYNSLHDGSDGLDGISVGSYLDTLADDVPGHQTPSDLDQFSDSSLIEDSQALHKRPKLDSEYYCFG

SEQ ID NO: 3502 - protein, 85 aa, Homo sapiens
GGSGGGGGGGGGCSSSSSYCSFPPSLSSSSSSSPTSGSPRGSHSSALERLETKLHLLRQEMVNLRATDVRLMRQLLVINESIESI

SEQ ID NO: 3503 - protein, 85 aa, Homo sapiens
KWMIEEKATITSRGSSLSGSLCSLLESQSTSLRGSYNSLHDGSDGLDGISVGSYLDTLADDVPGHQTPSDLDQFSDSSLIEDSQA

SEQ ID NO: 3504 - protein, 85 aa, Homo sapiens
MLQHPGQVSASEVSASAIVPCLSPPGSLVFEDFANLTPFVKEELRFAIQNKHLCHRMSSALESVTVSDRPLGVSITKAEVAPEED

SEQ ID NO: 3505 - protein, 85 aa, Homo sapiens
ERKKRRRERNKIAAAKCRNKKKEKTECLQKESEKLESVNAELKAQIEELKNEKQHLIYMLNLHRPTCIVRAQNGRTPEDERNLFI

SEQ ID NO: 3506 - protein, 84 aa, Homo sapiens
IAAAKCRNKKKEKTECLQKESEKLESVNAELKAQIEELKNEKQHLIYMLNLHRPTCIVRAQNGRTPEDERNLFIQQIKEGTLQS

SEQ ID NO: 3507 - protein, 85 aa, Homo sapiens
ELRFAIQNKHLCHRMSSALESVTVSDRPLGVSITKAEVAPEEDERKKRRRERNKIAAAKCRNKKKEKTECLQKESEKLESVNAEL

SEQ ID NO: 3508 - protein, 85 aa, Homo sapiens
DSKDESSHVWPTSAEHEQNAAQVHFVPDTGTVAQIVYTDDQVRPPQQVVYTADGASYTSVDGPEHTLVYIHPVEAAQTLFTDPGQ

SEQ ID NO: 3509 - protein, 85 aa, Homo sapiens
VAYVQQDATAQQASLPVHNQVLPSIESVDGSDPLATLQTPLGRLEAKEEEDEDEDEDTEEDEEEDGEDTDLDDWEPDPPRPFDPH

SEQ ID NO: 3510 - protein, 85 aa, Homo sapiens
DLWCEECNNAHASVCPKHGPLHPIPNRPVLTRARASLPLVLYIDRFLGGVFSKRRIPKRTQFGPVEGPLVRGSELKDCYIHLKVS

SEQ ID NO: 3511 - protein, 85 aa, Homo sapiens
LDKGDRKERDLHEDLWFELSDETLCNWMMFVRPAQNHLEQNLVAYQYGHHVYYTTIKNVEPKQELKVWYAASYAEFVNQKIHDIS

SEQ ID NO: 3512 - protein, 85 aa, Homo sapiens
EEERKVLREQEKNWPCYECNRRFISSEQLQQHLNSHDEKLDVFSRTRGRGRGRGKRRFGPGRRPGRPPKFIRLEITSENGEKSDD

SEQ ID NO: 3513 - protein, 85 aa, Homo sapiens
GTQDLLHFPTKEQFDEAEPATLNGLDQPEQTTIPIPQLPQETQSSLEHEPETHTLHLQPQHEESVVPTQSTLTADDMRRAKRIRL

SEQ ID NO: 3514 - protein, 85 aa, Homo sapiens
ELQNAALQHLFIRKSFRPFKCLQCGKAFREKDKLDQHLRFHGREGNCPLTCDLCNKGFISSTSLESHMKLHSDQKTYSCIFCPES

SEQ ID NO: 3515 - protein, 85 aa, Homo sapiens
FDRLDLLKDHVAIHINDGYFTCPTCKKRFPDFIQVKKHVRSFHSEKIYQCTECDKAFCRPDKLRLHMLRHSDRKDFLCSTCGKQF

SEQ ID NO: 3516 - protein, 85 aa, Homo sapiens
KRKDKLREHMQRMHNPEREAKKADRISRSKTFKPRITSTDYDSFTFKCRLCMMGFRRRGMLVNHLSKRHPDMKIEEVPELTLPII

SEQ ID NO: 3517 - protein, 85 aa, Homo sapiens
KPNRDYFCQYCDKVYKSASKRKAHILKNHPGAELPPSIRKLRPAGPGEPDPMLSTHTQLTGTIATPPVCCPHCSKQYSSKTKMVQ

SEQ ID NO: 3518 - protein, 85 aa, Homo sapiens
HIRKKHPEFAQLSNTIHTPLTTAVISATPAVLTTDSATGETVVTTDLLTQAMTELSQTLTTDYRTPQGDYQRIQYIPVSQSASGL

SEQ ID NO: 3519 - protein, 85 aa, Homo sapiens
QQPQHIQLQVVQVASATSPHQSQQSTVDVGQLHDPQPYPQHAIQVQHIQVSEPTASAPSSAQVSGQPLSPSAQQAQQGLSPSHIQ

SEQ ID NO: 3520 - protein, 85 aa, Homo sapiens
GSSSTQGQALQQQQQQQQNSSVQHTYLPSAWNSFRGYSSEIQMMTLPPGQFVITDSGVATPVTTGQVKAVTSGHYVLSESQSELE

SEQ ID NO: 3521 - protein, 85 aa, Homo sapiens
RPPQQVVYTADGASYTSVDGPEHTLVYIHPVEAAQTLFTDPGQVAYVQQDATAQQASLPVHNQVLPSIESVDGSDPLATLQTPLG

SEQ ID NO: 3522 - protein, 85 aa, Homo sapiens
RLEAKEEEDEDEDEDTEEDEEEDGEDTDLDDWEPDPPRPFDPHDLWCEECNNAHASVCPKHGPLHPIPNRPVLTRARASLPLVLY

SEQ ID NO: 3523 - protein, 85 aa, Homo sapiens
IDRFLGGVFSKRRIPKRTQFGPVEGPLVRGSELKDCYIHLKVSLDKGDRKERDLHEDLWFELSDETLCNWMMFVRPAQNHLEQNL

SEQ ID NO: 3524 - protein, 85 aa, Homo sapiens
VAYQYGHHVYYTTIKNVEPKQELKVWYAASYAEFVNQKIHDISEEERKVLREQEKNWPCYECNRRFISSEQLQQHLNSHDEKLDV

SEQ ID NO: 3525 - protein, 85 aa, Homo sapiens
FSRTRGRGRGRGKRRFGPGRRPGRPPKFIRLEITSENGEKSDDGTQDLLHFPTKEQFDEAEPATLNGLDQPEQTTIPIPQLPQET

SEQ ID NO: 3526 - protein, 85 aa, Homo sapiens
QSSLEHEPETHTLHLQPQHEESVVPTQSTLTADDMRRAKRIRLELQNAALQHLFIRKSFRPFKCLQCGKAFREKDKLDQHLRFHG

SEQ ID NO: 3527 - protein, 85 aa, Homo sapiens
REGNCPLTCDLCNKGFISSTSLESHMKLHSDQKTYSCIFCPESFDRLDLLKDHVAIHINDGYFTCPTCKKRFPDFIQVKKHVRSF

SEQ ID NO: 3528 - protein, 85 aa, Homo sapiens
HSEKIYQCTECDKAFCRPDKLRLHMLRHSDRKDFLCSTCGKQFKRKDKLREHMQRMHNPEREAKKADRISRSKTFKPRITSTDYD

SEQ ID NO: 3529 - protein, 85 aa, Homo sapiens
SFTFKCRLCMMGFRRRGMLVNHLSKRHPDMKIEEVPELTLPIIKPNRDYFCQYCDKVYKSASKRKAHILKNHPGAELPPSIRKLR

SEQ ID NO: 3530 - protein, 85 aa, Homo sapiens
PAGPGEPDPMLSTHTQLTGTIATPPVCCPHCSKQYSSKTKMVQHIRKKHPEFAQLSNTIHTPLTTAVISATPAVLTTDSATGETV

SEQ ID NO: 3531 - protein, 85 aa, Homo sapiens
VTTDLLTQAMTELSQTLTTDYRTPQGDYQRIQYIPVSQSASGLQQPQHIQLQVVQVASATSPHQSQQSTVDVGQLHDPQPYPQHA

SEQ ID NO: 3532 - protein, 85 aa, Homo sapiens
IQVQHIQVSEPTASAPSSAQVSGQPLSPSAQQAQQGLSPSHIQGSSSTQGQALQQQQQQQQNSSVQHTYLPSAWNSFRGYSSEIQ

SEQ ID NO: 3533 - protein, 85 aa, Homo sapiens
MMTLPPGQFVITDSGVATPVTTGQVKAVTSGHYVLSESQSELEEKQTSALSGGVQVEPPAHSDSLDPQTNSQQQTTQYIITTTTN

SEQ ID NO: 3534 - protein, 85 aa, Homo sapiens
KIFCSRANPTTGSVEWLEEDEHYDYHQEIARSSYADMLHDKDRNVKYYQGIRAAVSRVKDRGQKALVLDIGTGTGLLSMMAVTAG

SEQ ID NO: 3535 - protein, 85 aa, Homo sapiens
ADFCYAIEVFKPMADAAVKIVEKNGFSDKIKVINKHSTEVTVGPEGDMPCRANILVTELFDTELIGEGALPSYEHAHRHLVEENC

SEQ ID NO: 3536 - protein, 85 aa, Homo sapiens
EAVPHRATVYAQLVESGRMWSWNKLFPIHVQTSLGEQVIVPPVDVESCPGAPSVCDIQLNQVSPADFTVLSDVLPMFSIDFSKQV

SEQ ID NO: 3537 - protein, 85 aa, Homo sapiens
SSSAACHSRRFEPLTSGRAQVVLSWWDIEMDPEGKIKCTMAPFWAHSDPEEMQWRDHWMQCVYFLPQEEPVVQGSALYLVAHHDD

SEQ ID NO: 3538 - protein, 85 aa, Homo sapiens
YCVWYSLQRTSPEKNERVRQMRPVCDCQAHLLWNRPRFGEINDQDRTDRYVQALRTVLKPDSVCLCVSDGSLLSVLAHHLGVEQV

SEQ ID NO: 3539 - protein, 85 aa, Homo sapiens
FTVESSAASHKLLRKIFKANHLEDKINIIEKRPELLTNEDLQGRKVSLLLGEPFFTTSLLPWHNLYFWYVRTAVDQHLGPGAMVM

SEQ ID NO: 3540 - protein, 85 aa, Homo sapiens
PQAASLHAVVVEFRDLWRIRSPCGDCEGFDVHIMDDMIKRALDFRESREAEPHPLWEYPCRSLSEPWQILTFDFQQPVPLQPLCA

SEQ ID NO: 3541 - protein, 85 aa, Homo sapiens
EGTVELRRPGQSHAAVLWMEYHLTPECTLSTGLLEPADPEGGCCWNPHCKQAVYFFSPAPDPRALLGGPRTVSYAVEFHPDTGDI

SEQ ID NO: 3542 - protein, 84 aa, Homo sapiens
HAAVLWMEYHLTPECTLSTGLLEPADPEGGCCWNPHCKQAVYFFSPAPDPRALLGGPRTVSYAVEFHPDTGDIIMEFRHADTPD

SEQ ID NO: 3543 - protein, 85 aa, Homo sapiens
RNVKYYQGIRAAVSRVKDRGQKALVLDIGTGTGLLSMMAVTAGADFCYAIEVFKPMADAAVKIVEKNGFSDKIKVINKHSTEVTV

SEQ ID NO: 3544 - protein, 85 aa, Homo sapiens
GPEGDMPCRANILVTELFDTELIGEGALPSYEHAHRHLVEENCEAVPHRATVYAQLVESGRMWSWNKLFPIHVQTSLGEQVIVPP

SEQ ID NO: 3545 - protein, 85 aa, Homo sapiens
VDVESCPGAPSVCDIQLNQVSPADFTVLSDVLPMFSIDFSKQVSSSAACHSRRFEPLTSGRAQVVLSWWDIEMDPEGKIKCTMAP

SEQ ID NO: 3546 - protein, 85 aa, Homo sapiens
FWAHSDPEEMQWRDHWMQCVYFLPQEEPVVQGSALYLVAHHDDYCVWYSLQRTSPEKNERVRQMRPVCDCQAHLLWNRPRFGEIN

SEQ ID NO: 3547 - protein, 85 aa, Homo sapiens
DQDRTDRYVQALRTVLKPDSVCLCVSDGSLLSVLAHHLGVEQVFTVESSAASHKLLRKIFKANHLEDKINIIEKRPELLTNEDLQ

SEQ ID NO: 3548 - protein, 85 aa, Homo sapiens
GRKVSLLLGEPFFTTSLLPWHNLYFWYVRTAVDQHLGPGAMVMPQAASLHAVVVEFRDLWRIRSPCGDCEGFDVHIMDDMIKRAL

SEQ ID NO: 3549 - protein, 85 aa, Homo sapiens
DFRESREAEPHPLWEYPCRSLSEPWQILTFDFQQPVPLQPLCAEGTVELRRPGQSHAAVLWMEYHLTPECTLSTGLLEPADPEGG

SEQ ID NO: 3550 - protein, 85 aa, Homo sapiens
IDLWLYSYQRLLQTIAVLEAQRSQAVQDLESLGRHQREALKNPIGFVEKLQKKADIGLPYPQRVVQLPEIVWDQYTHSLGNFERE

SEQ ID NO: 3551 - protein, 85 aa, Homo sapiens
FKNRKRHTRRVKLVFDKVGLPARPKSPLDPKKDGESLSYSMLPLSDGPEGSSSRPQMIRGRLCDDTKPETFNQLWTVEEQKKLEQ

SEQ ID NO: 3552 - protein, 85 aa, Homo sapiens
LLIKYPPEEVESRRWQKIADELGNRTAKQVASRVQKYFIKLTKAGIPVPGRTPNLYIYSKKSSTSRRQHPLNKHLFKPSTFMTSH

SEQ ID NO: 3553 - protein, 85 aa, Homo sapiens
EPPVYMDEDDDRSCFHSHMNTAVEDASDDESIPIMYRNLPEYKELLQFKKLKKQKLQQMQAESGFVQHVGFKCDNCGIEPIQGVR

SEQ ID NO: 3554 - protein, 84 aa, Homo sapiens
GFKCDNCGIEPIQGVRWHCQDCPPEMSLDFCDSCSDCLHETDIHKEDHQLEPIYRSETFLDRDYCVSQGTSYNYLDPNYFPANR

SEQ ID NO: 3555 - protein, 85 aa, Homo sapiens
PIGFVEKLQKKADIGLPYPQRVVQLPEIVWDQYTHSLGNFEREFKNRKRHTRRVKLVFDKVGLPARPKSPLDPKKDGESLSYSML

SEQ ID NO: 3556 - protein, 85 aa, Homo sapiens
PLSDGPEGSSSRPQMIRGRLCDDTKPETFNQLWTVEEQKKLEQLLIKYPPEEVESRRWQKIADELGNRTAKQVASRVQKYFIKLT

SEQ ID NO: 3557 - protein, 85 aa, Homo sapiens
KAGIPVPGRTPNLYIYSKKSSTSRRQHPLNKHLFKPSTFMTSHEPPVYMDEDDDRSCFHSHMNTAVEDASDDESIPIMYRNLPEY

SEQ ID NO: 3558 - protein, 85 aa, Homo sapiens
KELLQFKKLKKQKLQQMQAESGFVQHVGFKCDNCGIEPIQGVRWHCQDCPPEMSLDFCDSCSDCLHETDIHKEDHQLEPIYRSET

SEQ ID NO: 3559 - protein, 85 aa, Homo sapiens
DSVAFEDVAVNFTLEEWALLDPSQKNLYRDVMRETFRNLASVGKQWEDQNIEDPFKIPRRNISHIPERLCESKEGGQGEETFSQI

SEQ ID NO: 3560 - protein, 85 aa, Homo sapiens
PDGILNKKTPGVKPCESSVCGEVGMGPSSLNRHIRDHTGREPNEYQEYGKKSYTRNQCGRALSYHRSFPVRERTHPGGKPYDCKE

SEQ ID NO: 3561 - protein, 85 aa, Homo sapiens
CGETFISLVSIRRHMLTHRGGVPYKCKVCGKAFDYPSLFRIHERSHTGEKPYECKQCGKAFSCSSYIRIHERTHTGDKPYECKQC

SEQ ID NO: 3562 - protein, 85 aa, Homo sapiens
GKAFSCSKYIRIHERTHTGEKPYECKQCGKAFRCASSVRSHERTHTGEKLFECKECGKALTCLASVRRHMIKHTGNGPYKCKVCG

SEQ ID NO: 3563 - protein, 85 aa, Homo sapiens
KAFDFPSSFRIHERTHTGEKPYDCKQCGKAFSCSSSFRKHERIHTGEKPYKCTKCGKAFSRSSYFRIHERTHTGEKPYECKQCGK

SEQ ID NO: 3564 - protein, 84 aa, Homo sapiens
FRKHERIHTGEKPYKCTKCGKAFSRSSYFRIHERTHTGEKPYECKQCGKAFSRSTYFRVHEKIHTGEKPYENPNPNASVVPVLS

SEQ ID NO: 3565 - protein, 85 aa, Homo sapiens
GKQWEDQNIEDPFKIPRRNISHIPERLCESKEGGQGEETFSQIPDGILNKKTPGVKPCESSVCGEVGMGPSSLNRHIRDHTGREP

SEQ ID NO: 3566 - protein, 85 aa, Homo sapiens
NEYQEYGKKSYTRNQCGRALSYHRSFPVRERTHPGGKPYDCKECGETFISLVSIRRHMLTHRGGVPYKCKVCGKAFDYPSLFRIH

SEQ ID NO: 3567 - protein, 85 aa, Homo sapiens
ERSHTGEKPYECKQCGKAFSCSSYIRIHERTHTGDKPYECKQCGKAFSCSKYIRIHERTHTGEKPYECKQCGKAFRCASSVRSHE

SEQ ID NO: 3568 - protein, 85 aa, Homo sapiens
RTHTGEKLFECKECGKALTCLASVRRHMIKHTGNGPYKCKVCGKAFDFPSSFRIHERTHTGEKPYDCKQCGKAFSCSSSFRKHER

SEQ ID NO: 3569 - protein, 85 aa, Homo sapiens
VFFTCNACGESVKKIQVEKHVSVCRNCECLSCIDCGKDFWGDDYKNHVKCISEDQKYGGKGYEGKTHKGDIKQQAWIQKISELIK

SEQ ID NO: 3570 - protein, 85 aa, Homo sapiens
RPNVSPKVRELLEQISAFDNVPRKKAKFQNWMKNSLKVHNESILDQVWNIFSEASNSEPVNKEQDQRPLHPVANPHAEISTKVPA

SEQ ID NO: 3571 - protein, 85 aa, Homo sapiens
SKVKDAVEQQGEVKKNKRERKEERQKKRKREKKELKLENHQENSRNQKPKKRKKGQEADLEAGGEEVPEANGSAGKRSKKKKQRK

SEQ ID NO: 3572 - protein, 85 aa, Homo sapiens
DSASEEEARVGAGKRKRRHSEVETDSKKKKMKLPEHPEGGEPEDDEAPAKGKFNWKGTIKAILKQAPDNEITIKKLRKKVLAQYY

SEQ ID NO: 3573 - protein, 84 aa, Homo sapiens
GEPEDDEAPAKGKFNWKGTIKAILKQAPDNEITIKKLRKKVLAQYYTVTDEHHRSEEELLVIFNKKISKNPTFKLLKDKVKLVK

SEQ ID NO: 3574 - protein, 85 aa, Homo sapiens
DYKNHVKCISEDQKYGGKGYEGKTHKGDIKQQAWIQKISELIKRPNVSPKVRELLEQISAFDNVPRKKAKFQNWMKNSLKVHNES

SEQ ID NO: 3575 - protein, 85 aa, Homo sapiens
ILDQVWNIFSEASNSEPVNKEQDQRPLHPVANPHAEISTKVPASKVKDAVEQQGEVKKNKRERKEERQKKRKREKKELKLENHQE

SEQ ID NO: 3576 - protein, 85 aa, Homo sapiens
NSRNQKPKKRKKGQEADLEAGGEEVPEANGSAGKRSKKKKQRKDSASEEEARVGAGKRKRRHSEVETDSKKKKMKLPEHPEGGEP

SEQ ID NO: 3577 - protein, 85 aa, Homo sapiens
GKAKVPASKRAPSSPVAKPGPVKTLTRKKNKKKKRFWKSKAREVSKKPASGPGAVVRPPKAPEDFSQNWKALQEWLLKQKSQAPE

SEQ ID NO: 3578 - protein, 85 aa, Homo sapiens
KPLVISQMGSKKKPKIIQQNKKETSPQVKGEEMPAGKDQEASRGSVPSGSKMDRRAPVPRTKASGTEHNKKGTKERTNGDIVPER

SEQ ID NO: 3579 - protein, 85 aa, Homo sapiens
GDIEHKKRKAKEAAPAPPTEEDIWFDDVDPADIEAAIGPEAAKIARKQLGQSEGSVSLSLVKEQAFGGLTRALALDCEMVGVGPK

SEQ ID NO: 3580 - protein, 85 aa, Homo sapiens
GEESMAARVSIVNQYGKCVYDKYVKPTEPVTDYRTAVSGIRPENLKQGEELEVVQKEVAEMLKGRILVGHALHNDLKVLFLDHPK

SEQ ID NO: 3581 - protein, 84 aa, Homo sapiens
HPKKKIRDTQKYKPFKSQVKSGRPSLRLLSEKILGLQVQQAEHCSIQDAQAAMRLYVMVKKEWESMARDRRPLLTAPDHCSDDA

SEQ ID NO: 3582 - protein, 85 aa, Homo sapiens
EVSKKPASGPGAVVRPPKAPEDFSQNWKALQEWLLKQKSQAPEKPLVISQMGSKKKPKIIQQNKKETSPQVKGEEMPAGKDQEAS

SEQ ID NO: 3583 - protein, 85 aa, Homo sapiens
RGSVPSGSKMDRRAPVPRTKASGTEHNKKGTKERTNGDIVPERGDIEHKKRKAKEAAPAPPTEEDIWFDDVDPADIEAAIGPEAA

SEQ ID NO: 3584 - protein, 85 aa, Homo sapiens
KIARKQLGQSEGSVSLSLVKEQAFGGLTRALALDCEMVGVGPKGEESMAARVSIVNQYGKCVYDKYVKPTEPVTDYRTAVSGIRP

SEQ ID NO: 3585 - protein, 85 aa, Homo sapiens
ENLKQGEELEVVQKEVAEMLKGRILVGHALHNDLKVLFLDHPKKKIRDTQKYKPFKSQVKSGRPSLRLLSEKILGLQVQQAEHCS

SEQ ID NO: 3586 - protein, 85 aa, Homo sapiens
ACGATLKRPMEFEAALLSPGSPKRRRCAPLPGPTPGLRPPDAEPPPPFQTQTPPQSLQQPAPPGSERRLPTPGSSWMKKDQPTFT

SEQ ID NO: 3587 - protein, 84 aa, Homo sapiens
APPGSERRLPTPGSSWMKKDQPTFTLRQVGIICERLLKDYEDKIREEYEQILNTKLAEQYESFVKFTHDQIMRRYGTRPTSYVS

SEQ ID NO: 3588 - protein, 85 aa, Homo sapiens
EPPPPFQTQTPPQSLQQPAPPGSERRLPTPGSSWMKKDQPTFTLRQVGIICERLLKDYEDKIREEYEQILNTKLAEQYESFVKFT

SEQ ID NO: 3589 - protein, 85 aa, Homo sapiens
LQKPKSVKLRALRSPRKFGVAGRSCQEVLRKGCLRFQLPERGSRLCLYEDGTELTEDYFPSVPDNAELVLLTLGQAWQGSVGVRA

SEQ ID NO: 3590 - protein, 84 aa, Homo sapiens
GCLRFQLPERGSRLCLYEDGTELTEDYFPSVPDNAELVLLTLGQAWQGSVGVRARTKTRDTSSLSPGDCQALGNGGRCGQRLFL

SEQ ID NO: 3591 - protein, 85 aa, Homo sapiens
SESSSKSSQPLASKQEKDGTEKRGRGRPRKQPPKEPSEVPTPKRPRGRPKGSKNKGAAKTRKTTTTPGRKPRGRPKKLEKEEEEG

SEQ ID NO: 3592 - protein, 84 aa, Homo sapiens
ASKQEKDGTEKRGRGRPRKQPPKEPSEVPTPKRPRGRPKGSKNKGAAKTRKTTTTPGRKPRGRPKKLEKEEEEGISQESSEEEQ

SEQ ID NO: 3593 - protein, 85 aa, Homo sapiens
AASALYACTKCTQRYPFEELSQGQQLCKECRIAHPIVKCTYCRSEFQQESKTNTICKKCAQNVKQFGTPKPCQYCNIIAAFIGTK

SEQ ID NO: 3594 - protein, 85 aa, Homo sapiens
CQRCTNSEKKYGPPQTCEQCKQQCAFDRKEEGRRKVDGKLLCWLCTLSYKRVLQKTKEQRKSLGSSHSNSSSSSLTEKDQHHPKH

SEQ ID NO: 3595 - protein, 85 aa, Homo sapiens
HHHHHHHHHRHSSSHHKISNLSPEEEQGLWKQSHKSSATIQNETPKKKPKLESKPSNGDSSSINQSADSGGTDNFVLISQLKEEV

SEQ ID NO: 3596 - protein, 84 aa, Homo sapiens
VMSLKRLLQQRDQTILEKDKKLTELKADFQYQESNLRTKMNSMEKAHKETVEQLQAKNRELLKQVAALSKGKKFDKSGSILTSP

SEQ ID NO: 3597 - protein, 85 aa, Homo sapiens
RSEFQQESKTNTICKKCAQNVKQFGTPKPCQYCNIIAAFIGTKCQRCTNSEKKYGPPQTCEQCKQQCAFDRKEEGRRKVDGKLLC

SEQ ID NO: 3598 - protein, 85 aa, Homo sapiens
WLCTLSYKRVLQKTKEQRKSLGSSHSNSSSSSLTEKDQHHPKHHHHHHHHHHRHSSSHHKISNLSPEEEQGLWKQSHKSSATIQN

SEQ ID NO: 3599 - protein, 85 aa, Homo sapiens
ETPKKKPKLESKPSNGDSSSINQSADSGGTDNFVLISQLKEEVMSLKRLLQQRDQTILEKDKKLTELKADFQYQESNLRTKMNSM

SEQ ID NO: 3600 - protein, 85 aa, Homo sapiens
EEDDSYVPSDLTAEERQELENIRRRKQELLADIQRLKDEIAEVANEIENLGSTEERKNMQRNKQVAMGRKKFNMDPKKGIQFLIE

SEQ ID NO: 3601 - protein, 85 aa, Homo sapiens
NDLLKNTCEDIAQFLYKGEGLNKTAIGDYLGERDEFNIQVLHAFVELHEFTDLNLVQALRQFLWSFRLPGEAQKIDRMMEAFAQR

SEQ ID NO: 3602 - protein, 85 aa, Homo sapiens
YCQCNNGVFQSTDTCYVLSFAIIMLNTSLHNPNVKDKPTVERFIAMNRGINDGGDLPEELLRNLYESIKNEPFKIPEDDGNDLTH

SEQ ID NO: 3603 - protein, 85 aa, Homo sapiens
TFFNPDREGWLLKLGGGRVKTWKRRWFILTDNCLYYFEYTTDKEPRGIIPLENLSIREVEDSKKPNCFELYIPDNKDQVIKACKT

SEQ ID NO: 3604 - protein, 84 aa, Homo sapiens
VEDSKKPNCFELYIPDNKDQVIKACKTEADGRVVEGNHTVYRISAPTPEEKEEWIKCIKAAISRDPFYEMLAARKKKVSSTKRH

SEQ ID NO: 3605 - protein, 85 aa, Homo sapiens
VANEIENLGSTEERKNMQRNKQVAMGRKKFNMDPKKGIQFLIENDLLKNTCEDIAQFLYKGEGLNKTAIGDYLGERDEFNIQVLH

SEQ ID NO: 3606 - protein, 85 aa, Homo sapiens
AFVELHEFTDLNLVQALRQFLWSFRLPGEAQKIDRMMEAFAQRYCQCNNGVFQSTDTCYVLSFAIIMLNTSLHNPNVKDKPTVER

SEQ ID NO: 3607 - protein, 85 aa, Homo sapiens
FIAMNRGINDGGDLPEELLRNLYESIKNEPFKIPEDDGNDLTHTFFNPDREGWLLKLGGGRVKTWKRRWFILTDNCLYYFEYTTD

SEQ ID NO: 3608 - protein, 85 aa, Homo sapiens
KEPRGIIPLENLSIREVEDSKKPNCFELYIPDNKDQVIKACKTEADGRVVEGNHTVYRISAPTPEEKEEWIKCIKAAISRDPFYE

SEQ ID NO: 3609 - protein, 85 aa, Homo sapiens
WSGLLPPGLNESDAESNSEDEATLENSGLNLQEDKEDESIRKTEIIDFSTDEPKTETESNVNAYEECPSGIPIDMWNKFQELHKK

SEQ ID NO: 3610 - protein, 85 aa, Homo sapiens
ECPSGIPIDMWNKFQELHKKHSEQKSTTSRFRGKRRKRSRKDKLKNEKELHSEPSSNETQWKELTQYFGVNDRFDPPVKRKKVEK

SEQ ID NO: 3611 - protein, 85 aa, Homo sapiens
TEIIDFSTDEPKTETESNVNAYEECPSGIPIDMWNKFQELHKKHSEQKSTTSRFRGKRRKRSRKDKLKNEKELHSEPSSNETQWK

SEQ ID NO: 3612 - protein, 85 aa, Homo sapiens
MLRGNLKQVRIEKNPARLRALESAVGESEPAAAAAMALALAGEPAPPAPAPPEDHPDEEMGFTIDIKSFLKPGEKTYTQRCRLFV

SEQ ID NO: 3613 - protein, 85 aa, Homo sapiens
GNLPTDITEEDFKRLFERYGEPSEVFINRDRGFGFIRLESRTLAEIAKAELDGTILKSRPLRIRFATHGAALTVKNLSPVVSNEL

SEQ ID NO: 3614 - protein, 85 aa, Homo sapiens
LEQAFSQFGPVEKAVVVVDDRGRATGKGFVEFAAKPPARKALERCGDGAFLLTTTPRPVIVEPMEQFDDEDGLPEKLMQKTQQYH

SEQ ID NO: 3615 - protein, 85 aa, Homo sapiens
KEREQPPRFAQPGTFEFEYASRWKALDEMEKQQREQVDRNIREAKEKLEAEMEAARHEHQLMLMRQDLMRRQEELRRLEELRNQE

SEQ ID NO: 3616 - protein, 85 aa, Homo sapiens
MQKRKQIQLRHEEEHRRREEEMIRHREQEELRRQQEGFKPNYMENREQEMRMGDMGPRGAINMGDAFSPAPAGNQGPPPMMGMNM

SEQ ID NO: 3617 - protein, 85 aa, Homo sapiens
NNRATIPGPPMGPGPAMGPEGAANMGTPMMPDNGAVHNDRFPQGPPSQMGSPMGSRTGSETPQAPMSGVGPVSGGPGGFGRGSQG

SEQ ID NO: 3618 - protein, 84 aa, Homo sapiens
GPAMGPEGAANMGTPMMPDNGAVHNDRFPQGPPSQMGSPMGSRTGSETPQAPMSGVGPVSGGPGGFGRGSQGGNFEGPNKRRRY

SEQ ID NO: 3619 - protein, 85 aa, Homo sapiens
EPAPPAPAPPEDHPDEEMGFTIDIKSFLKPGEKTYTQRCRLFVGNLPTDITEEDFKRLFERYGEPSEVFINRDRGFGFIRLESRT

SEQ ID NO: 3620 - protein, 85 aa, Homo sapiens
MAEIAKAELDGTILKSRPLRIRFATHGAALTVKNLSPVVSNELLEQAFSQFGPVEKAVVVVDDRGRATGKGFVEFAAKPPARKAL

SEQ ID NO: 3621 - protein, 85 aa, Homo sapiens
ERCGDGAFLLTTTPRPVIVEPMEQFDDEDGLPEKLMQKTQQYHKEREQPPRFAQPGTFEFEYASRWKALDEMEKQQREQVDRNIR

SEQ ID NO: 3622 - protein, 85 aa, Homo sapiens
EAKEKLEAEMEAARHEHQLMLMRQDLMRRQEELRRLEELRNQELQKRKQIQLRHEEEHRRREEEMIRHREQEELRRQQEGFKPNY

SEQ ID NO: 3623 - protein, 85 aa, Homo sapiens
MENREQEMRMGDMGPRGAINMGDAFSPAPAGNQGPPPMMGMNMNNRATIPGPPMGPGPAMGPEGAANMGTPMMPDNGAVHNDRFP

SEQ ID NO: 3624 - protein, 85 aa, Homo sapiens
SELPGDVRAFLREHPSLRLQTDARKVRCILTGHELPCRLPELQVYTRGKKYQRLVRASPAFDYAEFEPHIVPSTKNPHQLFCKLT

SEQ ID NO: 3625 - protein, 85 aa, Homo sapiens
MRHINKCPEHVLRHTQGRRYQRALCKYEECQKQGVEYVPACLVHRRRRREDQMDGDGPRPREAFWEPTSSDEGGAASDDSMTDLY

SEQ ID NO: 3626 - protein, 85 aa, Homo sapiens
PPELFTRKDLGSTEDGDGTDDFLTDKEDEKAKPPREKATDEGRRETTVYRGLVQKRGKKQLGSLKKKFKSHHRKPKSFSSCKQPG

SEQ ID NO: 3627 - protein, 84 aa, Homo sapiens
PELFTRKDLGSTEDGDGTDDFLTDKEDEKAKPPREKATDEGRRETTVYRGLVQKRGKKQLGSLKKKFKSHHRKPKSFSSCKQPG

SEQ ID NO: 3628 - protein, 85 aa, Homo sapiens
QVYTRGKKYQRLVRASPAFDYAEFEPHIVPSTKNPHQLFCKLTLRHINKCPEHVLRHTQGRRYQRALCKYEECQKQGVEYVPACL

SEQ ID NO: 3629 - protein, 85 aa, Homo sapiens
VHRRRRREDQMDGDGPRPREAFWEPTSSDEGGAASDDSMTDLYPPELFTRKDLGSTEDGDGTDDFLTDKEDEKAKPPREKATDEG

SEQ ID NO: 3630 - protein, 85 aa, Homo sapiens
AAPCEGQAFAVGVEKNWGAVVRSPEGTPQKIRQLIDEGIAPEEGGVDAKDTSATSQSVNGSPQAEQPSLESTSKEAFFSRVETFS

SEQ ID NO: 3631 - protein, 85 aa, Homo sapiens
SLKWAGKPFELSPLVCAKYGWVTVECDMLKCSSCQAFLCASLQPAFDFDRYKQRCAELKKALCTAHEKFCFWPDSPSPDRFGMLP

SEQ ID NO: 3632 - protein, 85 aa, Homo sapiens
MDEPAILVSEFLDRFQSLCHLDLQLPSLRPEDLKTMCLTEDKISLLLHLLEDELDHRTDERKTTIKLGSDIQVHVTACILSVCGW

SEQ ID NO: 3633 - protein, 85 aa, Homo sapiens
ACSSSLESMQLSLITCSQCMRKVGLWGFQQIESSMTDLDASFGLTSSPIPGLEGRPERLPLVPESPRRMMTRSQDATFSPGSEQA

SEQ ID NO: 3634 - protein, 85 aa, Homo sapiens
EKSPGPIVSRTRSWDSSSPVDRPEPEAASPTTRTRPVTRSMGTGDTPGLEVPSSPLRKAKRARLCSSSSSDTSSRSFFDPTSQHR

SEQ ID NO: 3635 - protein, 85 aa, Homo sapiens
EGGVDAKDTSATSQSVNGSPQAEQPSLESTSKEAFFSRVETFSSLKWAGKPFELSPLVCAKYGWVTVECDMLKCSSCQAFLCASL

SEQ ID NO: 3636 - protein, 85 aa, Homo sapiens
QPAFDFDRYKQRCAELKKALCTAHEKFCFWPDSPSPDRFGMLPLDEPAILVSEFLDRFQSLCHLDLQLPSLRPEDLKTMCLTEDK

SEQ ID NO: 3637 - protein, 85 aa, Homo sapiens
ISLLLHLLEDELDHRTDERKTTIKLGSDIQVHVTACILSVCGWACSSSLESMQLSLITCSQCMRKVGLWGFQQIESSMTDLDASF

SEQ ID NO: 3638 - protein, 85 aa, Homo sapiens
GLTSSPIPGLEGRPERLPLVPESPRRMMTRSQDATFSPGSEQAEKSPGPIVSRTRSWDSSSPVDRPEPEAASPTTRTRPVTRSMG

SEQ ID NO: 3639 - protein, 85 aa, Homo sapiens
TGDTPGLEVPSSPLRKAKRARLCSSSSSDTSSRSFFDPTSQHRDWCPWVNITLGKESRENGGTEPDASAPAEPGWKAVLTILLAH

SEQ ID NO: 3640 - protein, 85 aa, Homo sapiens
WPTRRLVTIKRSGVDGPHFPLSLSTCLFGRGIECDIRIQLPVVSKQHCKIEIHEQEAILHNFSSTNPTQVNGSVIDEPVRLKHGD

SEQ ID NO: 3641 - protein, 85 aa, Homo sapiens
VITIIDRSFRYENESLQNGRKSTEFPRKIREQEPARRVSRSSFSSDPDEKAQDSKAYSKITEGKVSGNPQVHIKNVKEDSTADDS

SEQ ID NO: 3642 - protein, 85 aa, Homo sapiens
KDSVAQGTTNVHSSEHAGRNGRNAADPISGDFKEISSVKLVSRYGELKSVPTTQCLDNSKKNESPFWKLYESVKKELDVKSQKEN

SEQ ID NO: 3643 - protein, 85 aa, Homo sapiens
VLQYCRKSGLQTDYATEKESADGLQGETQLLVSRKSRPKSGGSGHAVAEPASPEQELDQNKGKGRDVESVQTPSKAVGASFPLYE

SEQ ID NO: 3644 - protein, 85 aa, Homo sapiens
PAKMKTPVQYSQQQNSPQKHKNKDLYTTGRRESVNLGKSEGFKAGDKTLTPRKLSTRNRTPAKVEDAADSATKPENLSSKTRGSI

SEQ ID NO: 3645 - protein, 85 aa, Homo sapiens
PTDVEVLPTETEIHNEPFLTLWLTQVERKIQKDSLSKPEKLGTTAGQMCSGLPGLSSVDINNFGDSINESEGIPLKRRRVSFGGH

SEQ ID NO: 3646 - protein, 85 aa, Homo sapiens
LRPELFDENLPPNTPLKRGEAPTKRKSLVMHTPPVLKKIIKEQPQPSGKQESGSEIHVEVKAQSLVISPPAPSPRKTPVASDQRR

SEQ ID NO: 3647 - protein, 85 aa, Homo sapiens
RSCKTAPASSSKSQTEVPKRGGRKSGNLPSKRVSISRSQHDILQMICSKRRSGASEANLIVAKSWADVVKLGAKQTQTKVIKHGP

SEQ ID NO: 3648 - protein, 85 aa, Homo sapiens
QRSMNKRQRRPATPKKPVGEVHSQFSTGHANSPCTIIIGKAHTEKVHVPARPYRVLNNFISNQKMDFKEDLSGIAEMFKTPVKEQ

SEQ ID NO: 3649 - protein, 85 aa, Homo sapiens
PQLTSTCHIAISNSENLLGKQFQGTDSGEEPLLPTSESFGGNVFFSAQNAAKQPSDKCSASPPLRRQCIRENGNVAKTPRNTYKM

SEQ ID NO: 3650 - protein, 85 aa, Homo sapiens
TSLETKTSDTETEPSKTVSTANRSGRSTEFRNIQKLPVESKSEETNTEIVECILKRGQKATLLQQRREGEMKEIERPFETYKENI

SEQ ID NO: 3651 - protein, 85 aa, Homo sapiens
ELKENDEKMKAMKRSRTWGQKCAPMSDLTDLKSLPDTELMKDTARGQNLLQTQDHAKAPKSEKGKITKMPCQSLQPEPINTPTHT

SEQ ID NO: 3652 - protein, 85 aa, Homo sapiens
KQQLKASLGKVGVKEELLAVGKFTRTSGETTHTHREPAGDGKSIRTFKESPKQILDPAARVTGMKKWPRTPKEEAQSLEDLAGFK

SEQ ID NO: 3653 - protein, 85 aa, Homo sapiens
ELFQTPGPSEESMTDEKTTKIACKSPPPESVDTPTSTKQWPKRSLRKADVEEEFLALRKLTPSAGKAMLTPKPAGGDEKDIKAFM

SEQ ID NO: 3654 - protein, 85 aa, Homo sapiens
GTPVQKLDLAGTLPGSKRQLQTPKEKAQALEDLAGFKELFQTPGHTEELVAAGKTTKIPCDSPQSDPVDTPTSTKQRPKRSIRKA

SEQ ID NO: 3655 - protein, 85 aa, Homo sapiens
DVEGELLACRNLMPSAGKAMHTPKPSVGEEKDIIIFVGTPVQKLDLTENLTGSKRRPQTPKEEAQALEDLTGFKELFQTPGHTEE

SEQ ID NO: 3656 - protein, 85 aa, Homo sapiens
AVAAGKTTKMPCESSPPESADTPTSTRRQPKTPLEKRDVQKELSALKKLTQTSGETTHTDKVPGGEDKSINAFRETAKQKLDPAA

SEQ ID NO: 3657 - protein, 85 aa, Homo sapiens
SVTGSKRHPKTKEKAQPLEDLAGLKELFQTPVCTDKPTTHEKTTKIACRSQPDPVDTPTSSKPQSKRSLRKVDVEEEFFALRKRT

SEQ ID NO: 3658 - protein, 85 aa, Homo sapiens
PSAGKAMHTPKPAVSGEKNIYAFMGTPVQKLDLTENLTGSKRRLQTPKEKAQALEDLAGFKELFQTRGHTEESMTNDKTAKVACK

SEQ ID NO: 3659 - protein, 85 aa, Homo sapiens
SSQPDPDKNPASSKRRLKTSLGKVGVKEELLAVGKLTQTSGETTHTHTEPTGDGKSMKAFMESPKQILDSAASLTGSKRQLRTPK

SEQ ID NO: 3660 - protein, 85 aa, Homo sapiens
GKSEVPEDLAGFIELFQTPSHTKESMTNEKTTKVSYRASQPDLVDTPTSSKPQPKRSLRKADTEEEFLAFRKQTPSAGKAMHTPK

SEQ ID NO: 3661 - protein, 85 aa, Homo sapiens
PAVGEEKDINTFLGTPVQKLDQPGNLPGSNRRLQTRKEKAQALEELTGFRELFQTPCTDNPTTDEKTTKKILCKSPQSDPADTPT

SEQ ID NO: 3662 - protein, 85 aa, Homo sapiens
NTKQRPKRSLKKADVEEEFLAFRKLTPSAGKAMHTPKAAVGEEKDINTFVGTPVEKLDLLGNLPGSKRRPQTPKEKAKALEDLAG

SEQ ID NO: 3663 - protein, 85 aa, Homo sapiens
FKELFQTPGHTEESMTDDKITEVSCKSPQPDPVKTPTSSKQRLKISLGKVGVKEEVLPVGKLTQTSGKTTQTHRETAGDGKSIKA

SEQ ID NO: 3664 - protein, 85 aa, Homo sapiens
FKESAKQMLDPANYGTGMERWPRTPKEEAQSLEDLAGFKELFQTPDHTEESTTDDKTTKIACKSPPPESMDTPTSTRRRPKTPLG

SEQ ID NO: 3665 - protein, 85 aa, Homo sapiens
KRDIVEELSALKQLTQTTHTDKVPGDEDKGINVFRETAKQKLDPAASVTGSKRQPRTPKGKAQPLEDLAGLKELFQTPICTDKPT

SEQ ID NO: 3666 - protein, 85 aa, Homo sapiens
THEKTTKIACRSPQPDPVGTPTIFKPQSKRSLRKADVEEESLALRKRTPSVGKAMDTPKPAGGDEKDMKAFMGTPVQKLDLPGNL

SEQ ID NO: 3667 - protein, 85 aa, Homo sapiens
PGSKRWPQTPKEKAQALEDLAGFKELFQTPGTDKPTTDEKTTKIACKSPQPDPVDTPASTKQRPKRNLRKADVEEEFLALRKRTP

SEQ ID NO: 3668 - protein, 85 aa, Homo sapiens
SAGKAMDTPKPAVSDEKNINTFVETPVQKLDLLGNLPGSKRQPQTPKEKAEALEDLVGFKELFQTPGHTEESMTDDKITEVSCKS

SEQ ID NO: 3669 - protein, 85 aa, Homo sapiens
PQPESFKTSRSSKQRLKIPLVKVDMKEEPLAVSKLTRTSGETTQTHTEPTGDSKSIKAFKESPKQILDPAASVTGSRRQLRTRKE

SEQ ID NO: 3670 - protein, 85 aa, Homo sapiens
KARALEDLVDFKELFSAPGHTEESMTIDKNTKIPCKSPPPELTDTATSTKRCPKTRPRKEVKEELSAVERLTQTSGQSTHTHKEP

SEQ ID NO: 3671 - protein, 85 aa, Homo sapiens
ASGDEGIKVLKQRAKKKPNPVEEEPSRRRPRAPKEKAQPLEDLAGFTELSETSGHTQESLTAGKATKIPCESPPLEVVDTTASTK

SEQ ID NO: 3672 - protein, 85 aa, Homo sapiens
RHLRTRVQKVQVKEEPSAVKFTQTSGETTDADKEPAGEDKGIKALKESAKQTPAPAASVTGSRRRPRAPRESAQAIEDLAGFKDP

SEQ ID NO: 3673 - protein, 85 aa, Homo sapiens
AAGHTEESMTDDKTTKIPCKSSPELEDTATSSKRRPRTRAQKVEVKEELLAVGKLTQTSGETTHTDKEPVGEGKGTKAFKQPAKR

SEQ ID NO: 3674 - protein, 85 aa, Homo sapiens
KLDAEDVIGSRRQPRAPKEKAQPLEDLASFQELSQTPGHTEELANGAADSFTSAPKQTPDSGKPLKISRRVLRAPKVEPVGDVVS

SEQ ID NO: 3675 - protein, 85 aa, Homo sapiens
TRDPVKSQSKSNTSLPPLPFKRGGGKDGSVTGTKRLRCMPAPEEIVEELPASKKQRVAPRARGKSSEPVVIMKRSLRTSAKRIEP

SEQ ID NO: 3676 - protein, 85 aa, Homo sapiens
AEELNSNDMKTNKEEHKLQDSVPENKGISLRSRRQNKTEAEQQITEVFVLAERIEINRNEKKPMKTSPEMDIQNPDDGARKPIPR

SEQ ID NO: 3677 - protein, 85 aa, Homo sapiens
DKVTENKRCLRSARQNESSQPKVAEESGGQKSAKVLMQNQKGKGEAGNSDSMCLRSRKTKSQPAASTLESKSVQRVTRSVKRCAE

SEQ ID NO: 3678 - protein, 84 aa, Homo sapiens
SGGQKSAKVLMQNQKGKGEAGNSDSMCLRSRKTKSQPAASTLESKSVQRVTRSVKRCAENPKKAEDNVCVKKIRTRSHRDSEDI

SEQ ID NO: 3679 - protein, 85 aa, Homo sapiens
VSKQHCKIEIHEQEAILHNFSSTNPTQVNGSVIDEPVRLKHGDVITIIDRSFRYENESLQNGRKSTEFPRKIREQEPARRVSRSS

SEQ ID NO: 3680 - protein, 85 aa, Homo sapiens
FSSDPDEKAQDSKAYSKITEGKVSGNPQVHIKNVKEDSTADDSKDSVAQGTTNVHSSEHAGRNGRNAADPISGDFKEISSVKLVS

SEQ ID NO: 3681 - protein, 85 aa, Homo sapiens
RYGELKSVPTTQCLDNSKKNESPFWKLYESVKKELDVKSQKENVLQYCRKSGLQTDYATEKESADGLQGETQLLVSRKSRPKSGG

SEQ ID NO: 3682 - protein, 85 aa, Homo sapiens
SGHAVAEPASPEQELDQNKGKGRDVESVQTPSKAVGASFPLYEPAKMKTPVQYSQQQNSPQKHKNKDLYTTGRRESVNLGKSEGF

SEQ ID NO: 3683 - protein, 85 aa, Homo sapiens
KAGDKTLTPRKLSTRNRTPAKVEDAADSATKPENLSSKTRGSIPTDVEVLPTETEIHNEPFLTLWLTQVERKIQKDSLSKPEKLG

SEQ ID NO: 3684 - protein, 85 aa, Homo sapiens
TTAGQMCSGLPGLSSVDINNFGDSINESEGIPLKRRRVSFGGHLRPELFDENLPPNTPLKRGEAPTKRKSLVMHTPPVLKKIIKE

SEQ ID NO: 3685 - protein, 85 aa, Homo sapiens
QPQPSGKQESGSEIHVEVKAQSLVISPPAPSPRKTPVASDQRRRSCKTAPASSSKSQTEVPKRGGRKSGNLPSKRVSISRSQHDI

SEQ ID NO: 3686 - protein, 85 aa, Homo sapiens
LQMICSKRRSGASEANLIVAKSWADVVKLGAKQTQTKVIKHGPQRSMNKRQRRPATPKKPVGEVHSQFSTGHANSPCTIIIGKAH

SEQ ID NO: 3687 - protein, 85 aa, Homo sapiens
TEKVHVPARPYRVLNNFISNQKMDFKEDLSGIAEMFKTPVKEQPQLTSTCHIAISNSENLLGKQFQGTDSGEEPLLPTSESFGGN

SEQ ID NO: 3688 - protein, 85 aa, Homo sapiens
VFFSAQNAAKQPSDKCSASPPLRRQCIRENGNVAKTPRNTYKMTSLETKTSDTETEPSKTVSTANRSGRSTEFRNIQKLPVESKS

SEQ ID NO: 3689 - protein, 85 aa, Homo sapiens
EETNTEIVECILKRGQKATLLQQRREGEMKEIERPFETYKENIELKENDEKMKAMKRSRTWGQKCAPMSDLTDLKSLPDTELMKD

SEQ ID NO: 3690 - protein, 85 aa, Homo sapiens
TARGQNLLQTQDHAKAPKSEKGKITKMPCQSLQPEPINTPTHTKQQLKASLGKVGVKEELLAVGKFTRTSGETTHTHREPAGDGK

SEQ ID NO: 3691 - protein, 85 aa, Homo sapiens
SIRTFKESPKQILDPAARVTGMKKWPRTPKEEAQSLEDLAGFKELFQTPGPSEESMTDEKTTKIACKSPPPESVDTPTSTKQWPK

SEQ ID NO: 3692 - protein, 85 aa, Homo sapiens
RSLRKADVEEEFLALRKLTPSAGKAMLTPKPAGGDEKDIKAFMGTPVQKLDLAGTLPGSKRQLQTPKEKAQALEDLAGFKELFQT

SEQ ID NO: 3693 - protein, 85 aa, Homo sapiens
PGHTEELVAAGKTTKIPCDSPQSDPVDTPTSTKQRPKRSIRKADVEGELLACRNLMPSAGKAMHTPKPSVGEEKDIIIFVGTPVQ

SEQ ID NO: 3694 - protein, 85 aa, Homo sapiens
KLDLTENLTGSKRRPQTPKEEAQALEDLTGFKELFQTPGHTEEAVAAGKTTKMPCESSPPESADTPTSTRRQPKTPLEKRDVQKE

SEQ ID NO: 3695 - protein, 85 aa, Homo sapiens
LSALKKLTQTSGETTHTDKVPGGEDKSINAFRETAKQKLDPAASVTGSKRHPKTKEKAQPLEDLAGLKELFQTPVCTDKPTTHEK

SEQ ID NO: 3696 - protein, 85 aa, Homo sapiens
TTKIACRSQPDPVDTPTSSKPQSKRSLRKVDVEEEFFALRKRTPSAGKAMHTPKPAVSGEKNIYAFMGTPVQKLDLTENLTGSKR

SEQ ID NO: 3697 - protein, 85 aa, Homo sapiens
RLQTPKEKAQALEDLAGFKELFQTRGHTEESMTNDKTAKVACKSSQPDPDKNPASSKRRLKTSLGKVGVKEELLAVGKLTQTSGE

SEQ ID NO: 3698 - protein, 85 aa, Homo sapiens
TTHTHTEPTGDGKSMKAFMESPKQILDSAASLTGSKRQLRTPKGKSEVPEDLAGFIELFQTPSHTKESMTNEKTTKVSYRASQPD

SEQ ID NO: 3699 - protein, 85 aa, Homo sapiens
LVDTPTSSKPQPKRSLRKADTEEEFLAFRKQTPSAGKAMHTPKPAVGEEKDINTFLGTPVQKLDQPGNLPGSNRRLQTRKEKAQA

SEQ ID NO: 3700 - protein, 85 aa, Homo sapiens
LEELTGFRELFQTPCTDNPTTDEKTTKKILCKSPQSDPADTPTNTKQRPKRSLKKADVEEEFLAFRKLTPSAGKAMHTPKAAVGE

SEQ ID NO: 3701 - protein, 85 aa, Homo sapiens
EKDINTFVGTPVEKLDLLGNLPGSKRRPQTPKEKAKALEDLAGFKELFQTPGHTEESMTDDKITEVSCKSPQPDPVKTPTSSKQR

SEQ ID NO: 3702 - protein, 85 aa, Homo sapiens
LKISLGKVGVKEEVLPVGKLTQTSGKTTQTHRETAGDGKSIKAFKESAKQMLDPANYGTGMERWPRTPKEEAQSLEDLAGFKELF

SEQ ID NO: 3703 - protein, 85 aa, Homo sapiens
QTPDHTEESTTDDKTTKIACKSPPPESMDTPTSTRRRPKTPLGKRDIVEELSALKQLTQTTHTDKVPGDEDKGINVFRETAKQKL

SEQ ID NO: 3704 - protein, 85 aa, Homo sapiens
DPAASVTGSKRQPRTPKGKAQPLEDLAGLKELFQTPICTDKPTTHEKTTKIACRSPQPDPVGTPTIFKPQSKRSLRKADVEEESL

SEQ ID NO: 3705 - protein, 85 aa, Homo sapiens
ALRKRTPSVGKAMDTPKPAGGDEKDMKAFMGTPVQKLDLPGNLPGSKRWPQTPKEKAQALEDLAGFKELFQTPGTDKPTTDEKTT

SEQ ID NO: 3706 - protein, 85 aa, Homo sapiens
KIACKSPQPDPVDTPASTKQRPKRNLRKADVEEEFLALRKRTPSAGKAMDTPKPAVSDEKNINTFVETPVQKLDLLGNLPGSKRQ

SEQ ID NO: 3707 - protein, 85 aa, Homo sapiens
PQTPKEKAEALEDLVGFKELFQTPGHTEESMTDDKITEVSCKSPQPESFKTSRSSKQRLKIPLVKVDMKEEPLAVSKLTRTSGET

SEQ ID NO: 3708 - protein, 85 aa, Homo sapiens
TQTHTEPTGDSKSIKAFKESPKQILDPAASVTGSRRQLRTRKEKARALEDLVDFKELFSAPGHTEESMTIDKNTKIPCKSPPPEL

SEQ ID NO: 3709 - protein, 85 aa, Homo sapiens
TDTATSTKRCPKTRPRKEVKEELSAVERLTQTSGQSTHTHKEPASGDEGIKVLKQRAKKKPNPVEEEPSRRRPRAPKEKAQPLED

SEQ ID NO: 3710 - protein, 85 aa, Homo sapiens
MAGFTELSETSGHTQESLTAGKATKIPCESPPLEVVDTTASTKRHLRTRVQKVQVKEEPSAVKFTQTSGETTDADKEPAGEDKGI

SEQ ID NO: 3711 - protein, 85 aa, Homo sapiens
KALKESAKQTPAPAASVTGSRRRPRAPRESAQAIEDLAGFKDPAAGHTEESMTDDKTTKIPCKSSPELEDTATSSKRRPRTRAQK

SEQ ID NO: 3712 - protein, 85 aa, Homo sapiens
VEVKEELLAVGKLTQTSGETTHTDKEPVGEGKGTKAFKQPAKRKLDAEDVIGSRRQPRAPKEKAQPLEDLASFQELSQTPGHTEE

SEQ ID NO: 3713 - protein, 85 aa, Homo sapiens
MANGAADSFTSAPKQTPDSGKPLKISRRVLRAPKVEPVGDVVSTRDPVKSQSKSNTSLPPLPFKRGGGKDGSVTGTKRLRCMPAP

SEQ ID NO: 3714 - protein, 85 aa, Homo sapiens
EEIVEELPASKKQRVAPRARGKSSEPVVIMKRSLRTSAKRIEPAEELNSNDMKTNKEEHKLQDSVPENKGISLRSRRQNKTEAEQ

SEQ ID NO: 3715 - protein, 85 aa, Homo sapiens
QITEVFVLAERIEINRNEKKPMKTSPEMDIQNPDDGARKPIPRDKVTENKRCLRSARQNESSQPKVAEESGGQKSAKVLMQNQKG

SEQ ID NO: 3716 - protein, 85 aa, Homo sapiens
EDFIVISDDSGSESSGGARPGRSRRPRRALSRTSGALPRRTVNKGQKLEPIPHRRLRMVTNTIEENFPLGTVQFLMDFVSPQHYP

SEQ ID NO: 3717 - protein, 85 aa, Homo sapiens
PREIVAHIIQKILLSGSETVDVLKEAYMLLMKIQQLHPANAKTVEWDWKLLTYVMEEEGQTLPGRVLFLRYVVQTLEDDFQQTLR

SEQ ID NO: 3718 - protein, 85 aa, Homo sapiens
RQRQHLQQSIANMVLSCDKQPHNVRDVIKWLVKAVTEDGLTQPPNGNQTSSGTGILKASSSHPSSQPNLTKNTNQLIVCQLQRML

SEQ ID NO: 3719 - protein, 85 aa, Homo sapiens
SIAVEVDRTPTCSSNKIAEMMFGFVLDIPERSQREMFFTTMESHLLRCKVLEIIFLHSCETPTRLPLSLAQALYFLNNSTSLLKC

SEQ ID NO: 3720 - protein, 85 aa, Homo sapiens
QSDKSQWQTWDELVEHLQFLLSSYQHVLREHLRSSVIDRKDLIIKRIKPKPQQGDDITVVDVEKQIEAFRSRLIQMLGEPLVPQL

SEQ ID NO: 3721 - protein, 85 aa, Homo sapiens
NKGQKLEPIPHRRLRMVTNTIEENFPLGTVQFLMDFVSPQHYPPREIVAHIIQKILLSGSETVDVLKEAYMLLMKIQQLHPANAK

SEQ ID NO: 3722 - protein, 85 aa, Homo sapiens
TVEWDWKLLTYVMEEEGQTLPGRVLFLRYVVQTLEDDFQQTLRRQRQHLQQSIANMVLSCDKQPHNVRDVIKWLVKAVTEDGLTQ

SEQ ID NO: 3723 - protein, 85 aa, Homo sapiens
PPNGNQTSSGTGILKASSSHPSSQPNLTKNTNQLIVCQLQRMLSIAVEVDRTPTCSSNKIAEMMFGFVLDIPERSQREMFFTTME

SEQ ID NO: 3724 - protein, 85 aa, Homo sapiens
SHLLRCKVLEIIFLHSCETPTRLPLSLAQALYFLNNSTSLLKCQSDKSQWQTWDELVEHLQFLLSSYQHVLREHLRSSVIDRKDL

SEQ ID NO: 3725 - protein, 85 aa, Homo sapiens
MVLKVEELVTGKKNGNGEAGEFLPEDFRDGEYEAAVTLEKQEDLKTLLAHPVTLGEQQWKSEKQREAELKKKKLEQRSKLENLED

SEQ ID NO: 3726 - protein, 85 aa, Homo sapiens
LEIIIQLKKRKKYRKTKVPVVKEPEPEIITEPVDVPTFLKAALENKLPVVEKFLSDKNNPDVCDEYKRTALHRACLEGHLAIVEK

SEQ ID NO: 3727 - protein, 85 aa, Homo sapiens
LMEAGAQIEFRDMLESTAIHWASRGGNLDVLKLLLNKGAKISARDKLLSTALHVAVRTGHYECAEHLIACEADLNAKDREGDTPL

SEQ ID NO: 3728 - protein, 84 aa, Homo sapiens
EHLIACEADLNAKDREGDTPLHDAVRLNRYKMIRLLIMYGADLNIKNCAGKTPMDLVLHWQNGTKAIFDSLRENSYKTSRIATF

SEQ ID NO: 3729 - protein, 85 aa, Homo sapiens
DLKTLLAHPVTLGEQQWKSEKQREAELKKKKLEQRSKLENLEDLEIIIQLKKRKKYRKTKVPVVKEPEPEIITEPVDVPTFLKAA

SEQ ID NO: 3730 - protein, 85 aa, Homo sapiens
MENKLPVVEKFLSDKNNPDVCDEYKRTALHRACLEGHLAIVEKLMEAGAQIEFRDMLESTAIHWASRGGNLDVLKLLLNKGAKIS

SEQ ID NO: 3731 - protein, 85 aa, Homo sapiens
ARDKLLSTALHVAVRTGHYECAEHLIACEADLNAKDREGDTPLHDAVRLNRYKMIRLLIMYGADLNIKNCAGKTPMDLVLHWQNG

SEQ ID NO: 3732 - protein, 85 aa, Homo sapiens
EYMAESTDRSPGHILCCECGVPISPNPANICVACLRSKVDISQGIPKQVSISFCKQCQRYFQPPGTWIQCALESRELLALCLKKI

SEQ ID NO: 3733 - protein, 85 aa, Homo sapiens
KAPLSKVRLVDAGFVWTEPHSKRLKVKLTIQKEVMNGAILQQVFVVDYVVQSQMCGDCHRVEAKDFWKAVIQVRQKTLHKKTFYY

SEQ ID NO: 3734 - protein, 85 aa, Homo sapiens
MEQLILKYGMHQNTLRIKEIHDGLDFYYSSKQHAQKMVEFLQCTVPCRYKASQRLISQDIHSNTYNYKSTFSVEIVPICKDNVVC

SEQ ID NO: 3735 - protein, 85 aa, Homo sapiens
MSPKLAQSLGNMNQICVCIRVTSAIHLIDPNTLQVADIDGSTFWSHPFNSLCHPKQLEEFIVMECSIVQDIKRAAGAGMISKKHT

SEQ ID NO: 3736 - protein, 85 aa, Homo sapiens
LGEVWVQKTSEMNTDKQYFCRTHLGHLLNPGDLVLGFDLANCNLNDEHVNKMNSDRVPDVVLIKKSYDRTKRQRRRNWKLKELAR

SEQ ID NO: 3737 - protein, 84 aa, Homo sapiens
KLKELARERENMDTDDERQYQDFLEDLEEDEAIRKNVNIYRDSAIPVESDTDDEGAPRISLAEMLEDLHISQDATGEEGASMLT

SEQ ID NO: 3738 - protein, 85 aa, Homo sapiens
QGIPKQVSISFCKQCQRYFQPPGTWIQCALESRELLALCLKKIKAPLSKVRLVDAGFVWTEPHSKRLKVKLTIQKEVMNGAILQQ

SEQ ID NO: 3739 - protein, 85 aa, Homo sapiens
VFVVDYVVQSQMCGDCHRVEAKDFWKAVIQVRQKTLHKKTFYYLEQLILKYGMHQNTLRIKEIHDGLDFYYSSKQHAQKMVEFLQ

SEQ ID NO: 3740 - protein, 85 aa, Homo sapiens
CTVPCRYKASQRLISQDIHSNTYNYKSTFSVEIVPICKDNVVCLSPKLAQSLGNMNQICVCIRVTSAIHLIDPNTLQVADIDGST

SEQ ID NO: 3741 - protein, 85 aa, Homo sapiens
FWSHPFNSLCHPKQLEEFIVMECSIVQDIKRAAGAGMISKKHTLGEVWVQKTSEMNTDKQYFCRTHLGHLLNPGDLVLGFDLANC

SEQ ID NO: 3742 - protein, 85 aa, Homo sapiens
NLNDEHVNKMNSDRVPDVVLIKKSYDRTKRQRRRNWKLKELARERENMDTDDERQYQDFLEDLEEDEAIRKNVNIYRDSAIPVES

SEQ ID NO: 3743 - protein, 85 aa, Homo sapiens
CESYSRSLLRVSVAQICQALGWDSVQLSACHLLTDVLQRYLQQLGRGCHRYSELYGRTDPILDDVGEAFQLMGVSLHELEDYIHN

SEQ ID NO: 3744 - protein, 85 aa, Homo sapiens
IEPVTFPHQIPSFPVSKNNVLQFPQPGSKDAEERKEYIPDYLPPIVSSQEEEEEEQVPTDGGTSAEAMQVPLEEDDELEEEEIIN

SEQ ID NO: 3745 - protein, 85 aa, Homo sapiens
DENFLGKRPLDSPEAEELPAMKRPRLLSTKGDTLDVVLLEAREPLSSINTQKIPPMLSPVHVQDSTDLAPPSPEPPMLAPVAKSQ

SEQ ID NO: 3746 - protein, 85 aa, Homo sapiens
MPTAKPLETKSFTPKTKTKTSSPGQKTKSPKTAQSPAMVGSPIRSPKTVSKEKKSPGRSKSPKSPKSPKVTTHIPQTPVRPETPN

SEQ ID NO: 3747 - protein, 85 aa, Homo sapiens
RTPSATLSEKISKETIQVKQIQTPPDAGKLNSENQPKKAVVADKTIEASIDAVIARACAEREPDPFEFSSGSESEGDIFTSPKRI

SEQ ID NO: 3748 - protein, 85 aa, Homo sapiens
SGPECTTPKASTSANNFTKSGSTPLPLSGGTSSSDNSWTMDASIDEVVRKAKLGTPSNMPPNFPYISSPSVSPPTPEPLHKVYEE

SEQ ID NO: 3749 - protein, 85 aa, Homo sapiens
KTKLPSSVEVKKKLKKELKTKMKKKEKQRDREREKDKNKDKSKEKDKVKEKEKDKETGRETKYPWKEFLKEEEADPYKFKIKEFE

SEQ ID NO: 3750 - protein, 85 aa, Homo sapiens
DVDPKVKLKDGLVRKEKEKHKDKKKDREKGKKDKDKREKEKVKDKGREDKMKAPAPPLVLPPKELALPLFSPATASRVPAMLPSL

SEQ ID NO: 3751 - protein, 85 aa, Homo sapiens
MPVLPEKLFEEKEKVKEKEKKKDKKEKKKKKEKEKEKKEKEREKEKREREKREKEKEKHKHEKIKVEPVALAPSPVIPRLTLRVG

SEQ ID NO: 3752 - protein, 85 aa, Homo sapiens
AGQDKIVISKVVPAPEAKPAPSQNRPKTPPPAPAPAPGPMLVSPAPVPLPLLAQAAAGPALLPSPGPAASGASAKAPVRSVVTET

SEQ ID NO: 3753 - protein, 84 aa, Homo sapiens
SVVTETVSTYVIRDEWGNQIWICPGCNKPDDGSPMIGCDDCDDWYHWPCVGIMTAPPEEMQWFCPKCANKKKDKKHKKRKHRAH

SEQ ID NO: 3754 - protein, 85 aa, Homo sapiens
QLGRGCHRYSELYGRTDPILDDVGEAFQLMGVSLHELEDYIHNIEPVTFPHQIPSFPVSKNNVLQFPQPGSKDAEERKEYIPDYL

SEQ ID NO: 3755 - protein, 85 aa, Homo sapiens
PPIVSSQEEEEEEQVPTDGGTSAEAMQVPLEEDDELEEEEIINDENFLGKRPLDSPEAEELPAMKRPRLLSTKGDTLDVVLLEAR

SEQ ID NO: 3756 - protein, 85 aa, Homo sapiens
EPLSSINTQKIPPMLSPVHVQDSTDLAPPSPEPPMLAPVAKSQMPTAKPLETKSFTPKTKTKTSSPGQKTKSPKTAQSPAMVGSP

SEQ ID NO: 3757 - protein, 85 aa, Homo sapiens
IRSPKTVSKEKKSPGRSKSPKSPKSPKVTTHIPQTPVRPETPNRTPSATLSEKISKETIQVKQIQTPPDAGKLNSENQPKKAVVA

SEQ ID NO: 3758 - protein, 85 aa, Homo sapiens
DKTIEASIDAVIARACAEREPDPFEFSSGSESEGDIFTSPKRISGPECTTPKASTSANNFTKSGSTPLPLSGGTSSSDNSWTMDA

SEQ ID NO: 3759 - protein, 85 aa, Homo sapiens
SIDEVVRKAKLGTPSNMPPNFPYISSPSVSPPTPEPLHKVYEEKTKLPSSVEVKKKLKKELKTKMKKKEKQRDREREKDKNKDKS

SEQ ID NO: 3760 - protein, 85 aa, Homo sapiens
KEKDKVKEKEKDKETGRETKYPWKEFLKEEEADPYKFKIKEFEDVDPKVKLKDGLVRKEKEKHKDKKKDREKGKKDKDKREKEKV

SEQ ID NO: 3761 - protein, 85 aa, Homo sapiens
KDKGREDKMKAPAPPLVLPPKELALPLFSPATASRVPAMLPSLLPVLPEKLFEEKEKVKEKEKKKDKKEKKKKKEKEKEKKEKER

SEQ ID NO: 3762 - protein, 85 aa, Homo sapiens
EKEKREREKREKEKEKHKHEKIKVEPVALAPSPVIPRLTLRVGAGQDKIVISKVVPAPEAKPAPSQNRPKTPPPAPAPAPGPMLV

SEQ ID NO: 3763 - protein, 85 aa, Homo sapiens
SPAPVPLPLLAQAAAGPALLPSPGPAASGASAKAPVRSVVTETVSTYVIRDEWGNQIWICPGCNKPDDGSPMIGCDDCDDWYHWP

SEQ ID NO: 3764 - protein, 85 aa, Homo sapiens
SPKRIAKRRSPPADAIPKSKKVKDTRAAASRRVPGARSCQGACGPSPPDQKTRPVSHRSHSTEPGLVLTLGQGDVGQLGLGENVM

SEQ ID NO: 3765 - protein, 85 aa, Homo sapiens
ERKKPALVSIPEDVVQAEAGGMHTVCLSKSGQVYSFGCNDEGALGRDTSVEGSEMVPGKVELQEKVVQVSAGDSHTAALTDDGRV

SEQ ID NO: 3766 - protein, 85 aa, Homo sapiens
FLWGSFRDNNGVIGLLEPMKKSMVPVQVQLDVPVVKVASGNDHLVMLTADGDLYTLGCGEQGQLGRVPELFANRGGRQGLERLLV

SEQ ID NO: 3767 - protein, 85 aa, Homo sapiens
PKCVMLKSRGSRGHVRFQDAFCGAYFTFAISHEGHVYGFGLSNYHQLGTPGTESCFIPQNLTSFKNSTKSWVGFSGGQHHTVCMD

SEQ ID NO: 3768 - protein, 85 aa, Homo sapiens
SEGKAYSLGRAEYGRLGLGEGAEEKSIPTLISRLPAVSSVACGASVGYAVTKDGRVFAWGMGTNYQLGTGQDEDAWSPVEMMGKQ

SEQ ID NO: 3769 - protein, 84 aa, Homo sapiens
PTLISRLPAVSSVACGASVGYAVTKDGRVFAWGMGTNYQLGTGQDEDAWSPVEMMGKQLENRVVLSVSSGGQHTVLLVKDKEQS

SEQ ID NO: 3770 - protein, 85 aa, Homo sapiens
CGPSPPDQKTRPVSHRSHSTEPGLVLTLGQGDVGQLGLGENVMERKKPALVSIPEDVVQAEAGGMHTVCLSKSGQVYSFGCNDEG

SEQ ID NO: 3771 - protein, 85 aa, Homo sapiens
ALGRDTSVEGSEMVPGKVELQEKVVQVSAGDSHTAALTDDGRVFLWGSFRDNNGVIGLLEPMKKSMVPVQVQLDVPVVKVASGND

SEQ ID NO: 3772 - protein, 85 aa, Homo sapiens
HLVMLTADGDLYTLGCGEQGQLGRVPELFANRGGRQGLERLLVPKCVMLKSRGSRGHVRFQDAFCGAYFTFAISHEGHVYGFGLS

SEQ ID NO: 3773 - protein, 85 aa, Homo sapiens
NYHQLGTPGTESCFIPQNLTSFKNSTKSWVGFSGGQHHTVCMDSEGKAYSLGRAEYGRLGLGEGAEEKSIPTLISRLPAVSSVAC

SEQ ID NO: 3774 - protein, 85 aa, Homo sapiens
RLPSSEPDAPRLLPSPVTCTPKEGETPPAPAALSSPLAVPALSASSLSSRAPPPAEVRVQPQLSRTPQAAQQTEALASTGSQAQS

SEQ ID NO: 3775 - protein, 85 aa, Homo sapiens
APTPAWDEDTAQIGPKRIRKAAKRELMPCDFPGCGRIFSNRQYLNHHKKYQHIHQKSFSCPEPACGKSFNFKKHLKEHMKLHSDT

SEQ ID NO: 3776 - protein, 85 aa, Homo sapiens
RDYICEFCARSFRTSSNLVIHRRIHTGEKPLQCEICGFTCRQKASLNWHQRKHAETVAALRFPCEFCGKRFEKPDSVAAHRSKSH

SEQ ID NO: 3777 - protein, 85 aa, Homo sapiens
TPSEAPKPASLPHTTRRSWCSEATSGQELADLESEHDERTQEARLPSSEPDAPRLLPSPVTCTPKEGETPPAPAALSSPLAVPAL

SEQ ID NO: 3778 - protein, 85 aa, Homo sapiens
SASSLSSRAPPPAEVRVQPQLSRTPQAAQQTEALASTGSQAQSAPTPAWDEDTAQIGPKRIRKAAKRELMPCDFPGCGRIFSNRQ

SEQ ID NO: 3779 - protein, 85 aa, Homo sapiens
YLNHHKKYQHIHQKSFSCPEPACGKSFNFKKHLKEHMKLHSDTRDYICEFCARSFRTSSNLVIHRRIHTGEKPLQCEICGFTCRQ

SEQ ID NO: 3780 - protein, 85 aa, Homo sapiens
KASLNWHQRKHAETVAALRFPCEFCGKRFEKPDSVAAHRSKSHPALLLAPQESPSGPLEPCPSISAPGPLGSSEGSRPSASPQAP

SEQ ID NO: 3781 - protein, 85 aa, Homo sapiens
AAVAVLRNDSLQAFLQDRTPSASPDLGKHSPLALLAATCSRIGQPGAAAPPDFLQVPYDPALGSPSRLFHPWTADMPAHSPGALP

SEQ ID NO: 3782 - protein, 85 aa, Homo sapiens
PPHPSLGLTPQKTHLQPSFGAAHELPLTPPADPSYPYEFSPVKMLPSSMAALPASCAPAYVPYAAQAALPPGYSNLLPPPPPPPP

SEQ ID NO: 3783 - protein, 85 aa, Homo sapiens
PPTCRQLSPNPAPDDLPWWSIPQAGAGPGASGVPGSGLSGACAGAPHAPRFPASAAAAAAAAAALQRGLVLGPSDFAQYQSQIAA

SEQ ID NO: 3784 - protein, 85 aa, Homo sapiens
MLQTKAPLAATARRCRRCRCPNCQAAGGAPEAEPGKKKQHVCHVPGCGKVYGKTSHLKAHLRWHTGERPFVCNWLFCGKSFTRSD

SEQ ID NO: 3785 - protein, 84 aa, Homo sapiens
AHLRWHTGERPFVCNWLFCGKSFTRSDELQRHLRTHTGEKRFACPECGKRFMRSDHLAKHVKTHQNKKLKVAEAGVKREDARDL

SEQ ID NO: 3786 - protein, 85 aa, Homo sapiens
GQPGAAAPPDFLQVPYDPALGSPSRLFHPWTADMPAHSPGALPPPHPSLGLTPQKTHLQPSFGAAHELPLTPPADPSYPYEFSPV

SEQ ID NO: 3787 - protein, 85 aa, Homo sapiens
KMLPSSMAALPASCAPAYVPYAAQAALPPGYSNLLPPPPPPPPPPTCRQLSPNPAPDDLPWWSIPQAGAGPGASGVPGSGLSGAC

SEQ ID NO: 3788 - protein, 85 aa, Homo sapiens
AGAPHAPRFPASAAAAAAAAAALQRGLVLGPSDFAQYQSQIAALLQTKAPLAATARRCRRCRCPNCQAAGGAPEAEPGKKKQHVC

SEQ ID NO: 3789 - protein, 85 aa, Homo sapiens
HVPGCGKVYGKTSHLKAHLRWHTGERPFVCNWLFCGKSFTRSDELQRHLRTHTGEKRFACPECGKRFMRSDHLAKHVKTHQNKKL

SEQ ID NO: 3790 - protein, 85 aa, Homo sapiens
IREAVVWEAASMSQKRLIPHQVVTHLLALHADIPETCVHYVGGPLDALIQGLKEASSTKGRMVMSRGGELVMVPNVEAILEDFAV

SEQ ID NO: 3791 - protein, 84 aa, Homo sapiens
HQVVTHLLALHADIPETCVHYVGGPLDALIQGLKEASSTKGRMVMSRGGELVMVPNVEAILEDFAVLGEGLVQTVEARSERWTV

SEQ ID NO: 3792 - protein, 85 aa, Homo sapiens
AAPEAEVLSSAAVPDLEWYEKSEETHASQIELLETSSTQEPLNASEAFCPRDCMVPVVFPGPVSQEGCCQFTCELLKHIMYQRQQ

SEQ ID NO: 3793 - protein, 85 aa, Homo sapiens
LPLPYEQLKHFYRKPSPQAEEMLKKKPRATTEVSSRKCQQALAELESVLSHLEDFFARTLVPRVLILLGGNALSPKEFYELDLSL

SEQ ID NO: 3794 - protein, 85 aa, Homo sapiens
MAPYSVDQSLSTAACLRRLFRAIFMADAFSELQAPPLMGTVVMAQGHRNCGEDWFRPKLNYRVPSRGHKLTVTLSCGRPSIRTTA

SEQ ID NO: 3795 - protein, 84 aa, Homo sapiens
FRAIFMADAFSELQAPPLMGTVVMAQGHRNCGEDWFRPKLNYRVPSRGHKLTVTLSCGRPSIRTTAWEDYIWFQAPVTFKGFRE

SEQ ID NO: 3796 - protein, 85 aa, Homo sapiens
NASEAFCPRDCMVPVVFPGPVSQEGCCQFTCELLKHIMYQRQQLPLPYEQLKHFYRKPSPQAEEMLKKKPRATTEVSSRKCQQAL

SEQ ID NO: 3797 - protein, 85 aa, Homo sapiens
AELESVLSHLEDFFARTLVPRVLILLGGNALSPKEFYELDLSLLAPYSVDQSLSTAACLRRLFRAIFMADAFSELQAPPLMGTVV

SEQ ID NO: 3798 - protein, 85 aa, Homo sapiens
MRDTMKSWNDSQSDLCSTDQEEEEEMIFGENEDDLDEMMDLSDLPTSLFACSVHEAVFEAREQKERNMNFTREQSRHPAWWFMSV

SEQ ID NO: 3799 - protein, 84 aa, Homo sapiens
NEDDLDEMMDLSDLPTSLFACSVHEAVFEAREQKERNMNFTREQSRHPAWWFMSVKVKLKRKKRQKTPNRKLPRRGAPTLRPQR

SEQ ID NO: 3800 - protein, 85 aa, Homo sapiens
NVTPEVKSRGMKFAEEQLLKHGWTQGKGLGRKENGITQALRVTLKQDTHGVGHDPAKEFTNHWWNELFNKTAANLVVETGQDGVQ

SEQ ID NO: 3801 - protein, 85 aa, Homo sapiens
IRSLSKETTRYNHPKPNLLYQKFVKMATLTSGGEKPNKDLESCSDDDNQGSKSPKILTDEMLLQACEGRTAHKAARLGITMKAKL

SEQ ID NO: 3802 - protein, 85 aa, Homo sapiens
ARLEAQEQAFLARLKGQDPGAPQLQSESKPPKKKKKKRRQKEEEEATASERNDADEKHPEHAEQNIRKSKKKKRRHQEGKVSDER

SEQ ID NO: 3803 - protein, 85 aa, Homo sapiens
EGTTKGNEKEDAAGTSGLGELNSREQTNQSLRKGKKKKRWHHEEEKMGVLEEGGKGKEAAGSVRTEEVESRAYADPCSRRKKRQQ

SEQ ID NO: 3804 - protein, 84 aa, Homo sapiens
LRKGKKKKRWHHEEEKMGVLEEGGKGKEAAGSVRTEEVESRAYADPCSRRKKRQQQEEEDLNLEDRGEETFRWWNQGSREQSMQ

SEQ ID NO: 3805 - protein, 85 aa, Homo sapiens
TLKQDTHGVGHDPAKEFTNHWWNELFNKTAANLVVETGQDGVQIRSLSKETTRYNHPKPNLLYQKFVKMATLTSGGEKPNKDLES

SEQ ID NO: 3806 - protein, 85 aa, Homo sapiens
CSDDDNQGSKSPKILTDEMLLQACEGRTAHKAARLGITMKAKLARLEAQEQAFLARLKGQDPGAPQLQSESKPPKKKKKKRRQKE

SEQ ID NO: 3807 - protein, 85 aa, Homo sapiens
EEEATASERNDADEKHPEHAEQNIRKSKKKKRRHQEGKVSDEREGTTKGNEKEDAAGTSGLGELNSREQTNQSLRKGKKKKRWHH

SEQ ID NO: 3808 - protein, 85 aa, Homo sapiens
PGKLRSDAGLESDTAMKKGETLRKQTEEKEKKEKPKSDKTEEIAEEEETVFPKAKQVKKKAEPSEVDMNSPKSKKAKKKEEPSQN

SEQ ID NO: 3809 - protein, 85 aa, Homo sapiens
DISPKTKSLRKKKEPIEKKVVSSKTKKVTKNEEPSEEEIDAPKPKKMKKEKEMNGETREKSPKLKNGFPHPEPDCNPSEAASEES

SEQ ID NO: 3810 - protein, 85 aa, Homo sapiens
NSEIEQEIPVEQKEGAFSNFPISEETIKLLKGRGVTFLFPIQAKTFHHVYSGKDLIAQARTGTGKTFSFAIPLIEKLHGELQDRK

SEQ ID NO: 3811 - protein, 85 aa, Homo sapiens
RGRAPQVLVLAPTRELANQVSKDFSDITKKLSVACFYGGTPYGGQFERMRNGIDILVGTPGRIKDHIQNGKLDLTKLKHVVLDEV

SEQ ID NO: 3812 - protein, 85 aa, Homo sapiens
DQMLDMGFADQVEEILSVAYKKDSEDNPQTLLFSATCPHWVFNVAKKYMKSTYEQVDLIGKKTQKTAITVEHLAIKCHWTQRAAV

SEQ ID NO: 3813 - protein, 85 aa, Homo sapiens
IGDVIRVYSGHQGRTIIFCETKKEAQELSQNSAIKQDAQSLHGDIPQKQREITLKGFRNGSFGVLVATNVAARGLDIPEVDLVIQ

SEQ ID NO: 3814 - protein, 85 aa, Homo sapiens
SSPPKDVESYIHRSGRTGRAGRTGVCICFYQHKEEYQLVQVEQKAGIKFKRIGVPSATEIIKASSKDAIRLLDSVPPTAISHFKQ

SEQ ID NO: 3815 - protein, 85 aa, Homo sapiens
SAEKLIEEKGAVEALAAALAHISGATSVDQRSLINSNVGFVTMILQCSIEMPNISYAWKELKEQLGEEIDSKVKGMVFLKGKLGV

SEQ ID NO: 3816 - protein, 85 aa, Homo sapiens
CFDVPTASVTEIQEKWHDSRRWQLSVATEQPELEGPREGYGGFRGQREGSRGFRGQRDGNRRFRGQREGSRGPRGQRSGGGNKSN

SEQ ID NO: 3817 - protein, 84 aa, Homo sapiens
SRRWQLSVATEQPELEGPREGYGGFRGQREGSRGFRGQRDGNRRFRGQREGSRGPRGQRSGGGNKSNRSQNKGQKRSFSKAFGQ

SEQ ID NO: 3818 - protein, 85 aa, Homo sapiens
IAEEEETVFPKAKQVKKKAEPSEVDMNSPKSKKAKKKEEPSQNDISPKTKSLRKKKEPIEKKVVSSKTKKVTKNEEPSEEEIDAP

SEQ ID NO: 3819 - protein, 85 aa, Homo sapiens
KPKKMKKEKEMNGETREKSPKLKNGFPHPEPDCNPSEAASEESNSEIEQEIPVEQKEGAFSNFPISEETIKLLKGRGVTFLFPIQ

SEQ ID NO: 3820 - protein, 85 aa, Homo sapiens
AKTFHHVYSGKDLIAQARTGTGKTFSFAIPLIEKLHGELQDRKRGRAPQVLVLAPTRELANQVSKDFSDITKKLSVACFYGGTPY

SEQ ID NO: 3821 - protein, 85 aa, Homo sapiens
GGQFERMRNGIDILVGTPGRIKDHIQNGKLDLTKLKHVVLDEVDQMLDMGFADQVEEILSVAYKKDSEDNPQTLLFSATCPHWVF

SEQ ID NO: 3822 - protein, 85 aa, Homo sapiens
NVAKKYMKSTYEQVDLIGKKTQKTAITVEHLAIKCHWTQRAAVIGDVIRVYSGHQGRTIIFCETKKEAQELSQNSAIKQDAQSLH

SEQ ID NO: 3823 - protein, 85 aa, Homo sapiens
GDIPQKQREITLKGFRNGSFGVLVATNVAARGLDIPEVDLVIQSSPPKDVESYIHRSGRTGRAGRTGVCICFYQHKEEYQLVQVE

SEQ ID NO: 3824 - protein, 85 aa, Homo sapiens
QKAGIKFKRIGVPSATEIIKASSKDAIRLLDSVPPTAISHFKQSAEKLIEEKGAVEALAAALAHISGATSVDQRSLINSNVGFVT

SEQ ID NO: 3825 - protein, 85 aa, Homo sapiens
MILQCSIEMPNISYAWKELKEQLGEEIDSKVKGMVFLKGKLGVCFDVPTASVTEIQEKWHDSRRWQLSVATEQPELEGPREGYGG

SEQ ID NO: 3826 - protein, 85 aa, Homo sapiens
EKRTCALCPKDVEYNVLYFAQSENIAAHENCLLYSSGLVECEDQDPLNPDRSFDVESVKKEIQRGRKLKCKFCHKRGATVGCDLK

SEQ ID NO: 3827 - protein, 85 aa, Homo sapiens
NCNKNYHFFCAKKDDAVPQSDGVRGIYKLLCQQHAQFPIIAQSAKFSGVKRKRGRKKPLSGNHVQPPETMKCNTFIRQVKEEHGR

SEQ ID NO: 3828 - protein, 85 aa, Homo sapiens
HTDATVKVPFLKKCKEAGLLNYLLEEILDKVHSIPEKLMDETTSESDYEEIGSALFDCRLFEDTFVNFQAAIEKKIHASQQRWQQ

SEQ ID NO: 3829 - protein, 84 aa, Homo sapiens
LMDETTSESDYEEIGSALFDCRLFEDTFVNFQAAIEKKIHASQQRWQQLKEEIELLQDLKQTLCSFQENRDLMSSSTSISSLSY

SEQ ID NO: 3830 - protein, 85 aa, Homo sapiens
DQDPLNPDRSFDVESVKKEIQRGRKLKCKFCHKRGATVGCDLKNCNKNYHFFCAKKDDAVPQSDGVRGIYKLLCQQHAQFPIIAQ

SEQ ID NO: 3831 - protein, 85 aa, Homo sapiens
SAKFSGVKRKRGRKKPLSGNHVQPPETMKCNTFIRQVKEEHGRHTDATVKVPFLKKCKEAGLLNYLLEEILDKVHSIPEKLMDET

SEQ ID NO: 3832 - protein, 85 aa, Homo sapiens
SPKRIAKRRSPPADAIPKSKKVKVSHRSHSTEPGLVLTLGQGDVGQLGLGENVMERKKPALVSIPEDVVQAEAGGMHTVCLSKSG

SEQ ID NO: 3833 - protein, 85 aa, Homo sapiens
QVYSFGCNDEGALGRDTSVEGSEMVPGKVELQEKVVQVSAGDSHTAALTDDGRVFLWGSFRDNNGVIGLLEPMKKSMVPVQVQLD

SEQ ID NO: 3834 - protein, 85 aa, Homo sapiens
VPVVKVASGNDHLVMLTADGDLYTLGCGEQGQLGRVPELFANRGGRQGLERLLVPKCVMLKSRGSRGHVRFQDAFCGAYFTFAIS

SEQ ID NO: 3835 - protein, 85 aa, Homo sapiens
HEGHVYGFGLSNYHQLGTPGTESCFIPQNLTSFKNSTKSWVGFSGGQHHTVCMDSEGKAYSLGRAEYGRLGLGEGAEEKSIPTLI

SEQ ID NO: 3836 - protein, 85 aa, Homo sapiens
DVGQLGLGENVMERKKPALVSIPEDVVQAEAGGMHTVCLSKSGQVYSFGCNDEGALGRDTSVEGSEMVPGKVELQEKVVQVSAGD

SEQ ID NO: 3837 - protein, 85 aa, Homo sapiens
SHTAALTDDGRVFLWGSFRDNNGVIGLLEPMKKSMVPVQVQLDVPVVKVASGNDHLVMLTADGDLYTLGCGEQGQLGRVPELFAN

SEQ ID NO: 3838 - protein, 85 aa, Homo sapiens
RGGRQGLERLLVPKCVMLKSRGSRGHVRFQDAFCGAYFTFAISHEGHVYGFGLSNYHQLGTPGTESCFIPQNLTSFKNSTKSWVG

SEQ ID NO: 3839 - protein, 85 aa, Homo sapiens
FSGGQHHTVCMDSEGKAYSLGRAEYGRLGLGEGAEEKSIPTLISRLPAVSSVACGASVGYAVTKDGRVFAWGMGTNYQLGTGQDE

SEQ ID NO: 3840 - protein, 85 aa, Homo sapiens
EELKGQMLKFSSMAPDLDRLNELGYRLPLNDKEIKRMQNLNRHWSLISSQTTERFSKLQSFLLQHQTFLEKCETWMEFLVQTEQK

SEQ ID NO: 3841 - protein, 85 aa, Homo sapiens
LAVEISGNYQHLLEQQRAHELFQAEMFSRQQILHSIIIDGQRLLEQGQVDDRDEFNLKLTLLSNQWQGVIRRAQQRRGIIDSQIR

SEQ ID NO: 3842 - protein, 85 aa, Homo sapiens
QWQRYREMAEKLRKWLVEVSYLPMSGLGSVPIPLQQARTLFDEVQFKEKVFLRQQGSYILTVEAGKQLLLSADSGAEAALQAELA

SEQ ID NO: 3843 - protein, 85 aa, Homo sapiens
EIQEKWKSASMRLEEQKKKLAFLLKDWEKCEKGIADSLEKLRTFKKKLSQSLPDHHEELHAEQMRCKELENAVGSWTDDLTQLSL

SEQ ID NO: 3844 - protein, 85 aa, Homo sapiens
MKDTLSAYISADDISILNERVELLQRQWEELCHQLSLRRQQIGERLNEWAVFSEKNKELCEWLTQMESKVSQNGDILIEEMIEKL

SEQ ID NO: 3845 - protein, 85 aa, Homo sapiens
KKDYQEEIAIAQENKIQLQQMGERLAKASHESKASEIEYKLGKVNDRWQHLLDLIAARVKKLKETLVAVQQLDKNMSSLRTWLAH

SEQ ID NO: 3846 - protein, 85 aa, Homo sapiens
IESELAKPIVYDSCNSEEIQRKLNEQQELQRDIEKHSTGVASVLNLCEVLLHDCDACATDAECDSIQQATRNLDRRWRNICAMSM

SEQ ID NO: 3847 - protein, 85 aa, Homo sapiens
ERRLKIEETWRLWQKFLDDYSRFEDWLKSSERTAAFPSSSGVIYTVAKEELKKFEAFQRQVHECLTQLELINKQYRRLARENRTD

SEQ ID NO: 3848 - protein, 85 aa, Homo sapiens
SACSLKQMVHEGNQRWDNLQKRVTSILRRLKHFIGQREEFETARDSILVWLTEMDLQLTNIEHFSECDVQAKIKQLKAFQQEISL

SEQ ID NO: 3849 - protein, 85 aa, Homo sapiens
NHNKIEQIIAQGEQLIEKSEPLDAAIIEEELDELRRYCQEVFGRVERYHKKLIRLPLPDDEHDLSDRELELEDSAALSDLHWHDR

SEQ ID NO: 3850 - protein, 85 aa, Homo sapiens
SADSLLSPQPSSNLSLSLAQPLRSERSGRDTPASVDSIPLEWDHDYDLSRDLESAMSRALPSEDEEGQDDKDFYLRGAVGLSGDH

SEQ ID NO: 3851 - protein, 85 aa, Homo sapiens
SALESQIRQLGKALDDSRFQIQQTENIIRSKTPTGPELDTSYKGYMKLLGECSSSIDSVKRLEHKLKEEEESLPGFVNLHSTETQ

SEQ ID NO: 3852 - protein, 85 aa, Homo sapiens
TAGVIDRWELLQAQALSKELRMKQNLQKWQQFNSDLNSIWAWLGDTEEELEQLQRLELSTDIQTIELQIKKLKELQKAVDHRKAI

SEQ ID NO: 3853 - protein, 85 aa, Homo sapiens
ILSINLCSPEFTQADSKESRDLQDRLSQMNGRWDRVCSLLEEWRGLLQDALMQCQGFHEMSHGLLLMLENIDRRKNEIVPIDSNL

SEQ ID NO: 3854 - protein, 85 aa, Homo sapiens
DAEILQDHHKQLMQIKHELLESQLRVASLQDMSCQLLVNAEGTDCLEAKEKVHVIGNRLKLLLKEVSRHIKELEKLLDVSSSQQD

SEQ ID NO: 3855 - protein, 84 aa, Homo sapiens
TDCLEAKEKVHVIGNRLKLLLKEVSRHIKELEKLLDVSSSQQDLSSWSSADELDTSGSVSPTSGRSTPNRQKTVHKRWLRFLPF

SEQ ID NO: 3856 - protein, 85 aa, Homo sapiens
HWSLISSQTTERFSKLQSFLLQHQTFLEKCETWMEFLVQTEQKLAVEISGNYQHLLEQQRAHELFQAEMFSRQQILHSIIIDGQR

SEQ ID NO: 3857 - protein, 85 aa, Homo sapiens
LLEQGQVDDRDEFNLKLTLLSNQWQGVIRRAQQRRGIIDSQIRQWQRYREMAEKLRKWLVEVSYLPMSGLGSVPIPLQQARTLFD

SEQ ID NO: 3858 - protein, 85 aa, Homo sapiens
EVQFKEKVFLRQQGSYILTVEAGKQLLLSADSGAEAALQAELAEIQEKWKSASMRLEEQKKKLAFLLKDWEKCEKGIADSLEKLR

SEQ ID NO: 3859 - protein, 85 aa, Homo sapiens
TFKKKLSQSLPDHHEELHAEQMRCKELENAVGSWTDDLTQLSLLKDTLSAYISADDISILNERVELLQRQWEELCHQLSLRRQQI

SEQ ID NO: 3860 - protein, 85 aa, Homo sapiens
GERLNEWAVFSEKNKELCEWLTQMESKVSQNGDILIEEMIEKLKKDYQEEIAIAQENKIQLQQMGERLAKASHESKASEIEYKLG

SEQ ID NO: 3861 - protein, 85 aa, Homo sapiens
KVNDRWQHLLDLIAARVKKLKETLVAVQQLDKNMSSLRTWLAHIESELAKPIVYDSCNSEEIQRKLNEQQELQRDIEKHSTGVAS

SEQ ID NO: 3862 - protein, 85 aa, Homo sapiens
VLNLCEVLLHDCDACATDAECDSIQQATRNLDRRWRNICAMSMERRLKIEETWRLWQKFLDDYSRFEDWLKSSERTAAFPSSSGV

SEQ ID NO: 3863 - protein, 85 aa, Homo sapiens
IYTVAKEELKKFEAFQRQVHECLTQLELINKQYRRLARENRTDSACSLKQMVHEGNQRWDNLQKRVTSILRRLKHFIGQREEFET

SEQ ID NO: 3864 - protein, 85 aa, Homo sapiens
ARDSILVWLTEMDLQLTNIEHFSECDVQAKIKQLKAFQQEISLNHNKIEQIIAQGEQLIEKSEPLDAAIIEEELDELRRYCQEVF

SEQ ID NO: 3865 - protein, 85 aa, Homo sapiens
GRVERYHKKLIRLPLPDDEHDLSDRELELEDSAALSDLHWHDRSADSLLSPQPSSNLSLSLAQPLRSERSGRDTPASVDSIPLEW

SEQ ID NO: 3866 - protein, 85 aa, Homo sapiens
DHDYDLSRDLESAMSRALPSEDEEGQDDKDFYLRGAVGLSGDHSALESQIRQLGKALDDSRFQIQQTENIIRSKTPTGPELDTSY

SEQ ID NO: 3867 - protein, 85 aa, Homo sapiens
KGYMKLLGECSSSIDSVKRLEHKLKEEEESLPGFVNLHSTETQTAGVIDRWELLQAQALSKELRMKQNLQKWQQFNSDLNSIWAW

SEQ ID NO: 3868 - protein, 85 aa, Homo sapiens
MGDTEEELEQLQRLELSTDIQTIELQIKKLKELQKAVDHRKAIILSINLCSPEFTQADSKESRDLQDRLSQMNGRWDRVCSLLEE

SEQ ID NO: 3869 - protein, 85 aa, Homo sapiens
WRGLLQDALMQCQGFHEMSHGLLLMLENIDRRKNEIVPIDSNLDAEILQDHHKQLMQIKHELLESQLRVASLQDMSCQLLVNAEG

SEQ ID NO: 3870 - protein, 85 aa, Homo sapiens
DWQPDEQGLQQVLQLLKDSQSPNTATQRIVQDKLKQLNQFPDFNNYLIFVLTRLKSEDEPTRSLSGLILKNNVKAHYQSFPPPVA

SEQ ID NO: 3871 - protein, 85 aa, Homo sapiens
DFIKQECLNNIGDASSLIRATIGILITTIASKGELQMWPELLPQLCNLLNSEDYNTCEGAFGALQKICEDSSELLDSDALNRPLN

SEQ ID NO: 3872 - protein, 85 aa, Homo sapiens
IMIPKFLQFFKHCSPKIRSHAIACVNQFIMDRAQALMDNIDTFIEHLFALAVDDDPEVRKNVCRALVMLLEVRIDRLIPHMHSII

SEQ ID NO: 3873 - protein, 85 aa, Homo sapiens
QYMLQRTQDHDENVALEACEFWLTLAEQPICKEVLASHLVQLIPILVNGMKYSEIDIILLKGDVEEDEAVPDSEQDIKPRFHKSR

SEQ ID NO: 3874 - protein, 85 aa, Homo sapiens
TVTLPHEAERPDGSEDAEDDDDDDALSDWNLRKCSAAALDVLANVFREELLPHLLPLLKGLLFHPEWVVKESGILVLGAIAEGCM

SEQ ID NO: 3875 - protein, 85 aa, Homo sapiens
QGMVPYLPELIPHLIQCLSDKKALVRSIACWTLSRYAHWVVSQPPDMHLKPLMTELLKRILDGNKRVQEAACSAFATLEEEACTE

SEQ ID NO: 3876 - protein, 85 aa, Homo sapiens
MVPYLSYILDTLVFAFGKYQHKNLLILYDAIGTLADSVGHHLNQPEYIQKLMPPLIQKWNELKDEDKDLFPLLECLSSVATALQS

SEQ ID NO: 3877 - protein, 85 aa, Homo sapiens
GFLPYCEPVYQRCVTLVQKTLAQAMMYTQHPEQYEAPDKDFMIVALDLLSGLAEGLGGHVEQLVARSNIMTLLFQCMQDSMPEVR

SEQ ID NO: 3878 - protein, 85 aa, Homo sapiens
QSSFALLGDLTKACFIHVKPCIAEFMPILGTNLNPEFISVCNNATWAIGEICMQMGAEMQPYVQMVLNNLVEIINRPNTPKTLLE

SEQ ID NO: 3879 - protein, 85 aa, Homo sapiens
NTAITIGRLGYVCPQEVAPMLQQFIRPWCTSLRNIRDNEEKDSAFRGICMMIGVNPGGVVQDFIFFCDAVASWVSPKDDLRDMFY

SEQ ID NO: 3880 - protein, 84 aa, Homo sapiens
NEEKDSAFRGICMMIGVNPGGVVQDFIFFCDAVASWVSPKDDLRDMFYKILHGFKDQVGEDNWQQFSEQFPPLLKERLAAFYGV

SEQ ID NO: 3881 - protein, 85 aa, Homo sapiens
FNNYLIFVLTRLKSEDEPTRSLSGLILKNNVKAHYQSFPPPVADFIKQECLNNIGDASSLIRATIGILITTIASKGELQMWPELL

SEQ ID NO: 3882 - protein, 85 aa, Homo sapiens
PQLCNLLNSEDYNTCEGAFGALQKICEDSSELLDSDALNRPLNIMIPKFLQFFKHCSPKIRSHAIACVNQFIMDRAQALMDNIDT

SEQ ID NO: 3883 - protein, 85 aa, Homo sapiens
FIEHLFALAVDDDPEVRKNVCRALVMLLEVRIDRLIPHMHSIIQYMLQRTQDHDENVALEACEFWLTLAEQPICKEVLASHLVQL

SEQ ID NO: 3884 - protein, 85 aa, Homo sapiens
IPILVNGMKYSEIDIILLKGDVEEDEAVPDSEQDIKPRFHKSRTVTLPHEAERPDGSEDAEDDDDDDALSDWNLRKCSAAALDVL

SEQ ID NO: 3885 - protein, 85 aa, Homo sapiens
ANVFREELLPHLLPLLKGLLFHPEWVVKESGILVLGAIAEGCMQGMVPYLPELIPHLIQCLSDKKALVRSIACWTLSRYAHWVVS

SEQ ID NO: 3886 - protein, 85 aa, Homo sapiens
QPPDMHLKPLMTELLKRILDGNKRVQEAACSAFATLEEEACTELVPYLSYILDTLVFAFGKYQHKNLLILYDAIGTLADSVGHHL

SEQ ID NO: 3887 - protein, 85 aa, Homo sapiens
NQPEYIQKLMPPLIQKWNELKDEDKDLFPLLECLSSVATALQSGFLPYCEPVYQRCVTLVQKTLAQAMMYTQHPEQYEAPDKDFM

SEQ ID NO: 3888 - protein, 85 aa, Homo sapiens
IVALDLLSGLAEGLGGHVEQLVARSNIMTLLFQCMQDSMPEVRQSSFALLGDLTKACFIHVKPCIAEFMPILGTNLNPEFISVCN

SEQ ID NO: 3889 - protein, 85 aa, Homo sapiens
NATWAIGEICMQMGAEMQPYVQMVLNNLVEIINRPNTPKTLLENTAITIGRLGYVCPQEVAPMLQQFIRPWCTSLRNIRDNEEKD

SEQ ID NO: 3890 - protein, 85 aa, Homo sapiens
EELEQGLLMQPWAWLQLAENSLLAKVFITKQGYALLVSDLQQVWHEQVDTSVVSQRAKELNKRLTAPPAAFLCHLDNLLRPLLKD

SEQ ID NO: 3891 - protein, 85 aa, Homo sapiens
AAHPSEATFSCDCVADALILRVRSELSGLPFYWNFHCMLASPSLVSQHLIRPLMGMSLALQCQVRELATLLHMKDLEIQDYQESG

SEQ ID NO: 3892 - protein, 85 aa, Homo sapiens
ATLIRDRLKTEPFEENSFLEQFMIEKLPEACSIGDGKPFVMNLQDLYMAVTTQEVQVGQKHQGAGDPHTSNSASLQGIDSQCVNQ

SEQ ID NO: 3893 - protein, 84 aa, Homo sapiens
DLYMAVTTQEVQVGQKHQGAGDPHTSNSASLQGIDSQCVNQPEQLVSSAPTLSAPEKESTGTSGPLQRPQLSKVKRKKPRGLFS

SEQ ID NO: 3894 - protein, 85 aa, Homo sapiens
VWHEQVDTSVVSQRAKELNKRLTAPPAAFLCHLDNLLRPLLKDAAHPSEATFSCDCVADALILRVRSELSGLPFYWNFHCMLASP

SEQ ID NO: 3895 - protein, 85 aa, Homo sapiens
SLVSQHLIRPLMGMSLALQCQVRELATLLHMKDLEIQDYQESGATLIRDRLKTEPFEENSFLEQFMIEKLPEACSIGDGKPFVMN

SEQ ID NO: 3896 - protein, 85 aa, Homo sapiens
MQDLYMAVTTQEVQVGQKHQGAGDPHTSNSASLQGIDSQCVNQPEQLVSSAPTLSAPEKESTGTSGPLQRPQLSKVKRKKPRGLF

SEQ ID NO: 3897 - protein, 85 aa, Homo sapiens
ADEEAEQERLSCGEGGCVAELQRLGERLQELELQLRESRVPAVEAATDYCQQLCQTLLEYAEKWKTSEDPLPLLEVYTVAIQSYV

SEQ ID NO: 3898 - protein, 85 aa, Homo sapiens
KARPYLTSECENVALVLERLALSCVELLLCLPVELSDKQWEQFQTLVQVAHEKLMENGSCELHFLATLAQETGVWKNPVLCTILS

SEQ ID NO: 3899 - protein, 85 aa, Homo sapiens
QEPLDKDKAFEGPILLDMRIKHLIKTNQLSQATALAKLCSDHPEIGIKGSFKQTYLVCLCTSSPNGKLIEEISEVDCKDALEMIC

SEQ ID NO: 3900 - protein, 85 aa, Homo sapiens
NLESEGDEKSALVLCTAFLSRQLQQGDMYCAWELTLFWSKLQQRVEPSIQVYLERCRQLSLLTKTVYHIFFLIKVINSETEGAGL

SEQ ID NO: 3901 - protein, 85 aa, Homo sapiens
ATCIELCVKALRLESTENTEVKISICKTISCLLPDDLEVKRACQLSEFLIEPTVDAYYAVEMLYNQPDQKYDEENLPIPNSLRCE

SEQ ID NO: 3902 - protein, 85 aa, Homo sapiens
MLLVLKTQWPFDPEFWDWKTLKRQCLALMGEEASIVSSIDELNDSEVYEKVVDYQEESKETSMNGLSGGVGANSGLLKDIGDEKQ

SEQ ID NO: 3903 - protein, 85 aa, Homo sapiens
KKREIKQLRERGFISARFRNWQAYMQYCVLCDKEFLGHRIVRHAQKHYKDGIYSCPICAKNFNSKETFVPHVTLHVKQSSKERLA

SEQ ID NO: 3904 - protein, 85 aa, Homo sapiens
AMKPLRRLGRPPKITTTNENQKTNTVAKQEQRPIKKNSLYSTDFIVFNDNDGSDDENDDKDKSYEPEVIPVQKPVPVNEFNCPVT

SEQ ID NO: 3905 - protein, 85 aa, Homo sapiens
FCKKGFKYFKNLIAHVKGHKDNEDAKRFLEMQSKKVICQYCRRHFVSVTHLNDHLQMHCGSKPYICIQMKCKAGFNSYAELLTHR

SEQ ID NO: 3906 - protein, 85 aa, Homo sapiens
KEHQVFRAKCMFPKCGRIFSEAYLLYDHEAQHYNTYTCKFTGCGKVYRSQGELEKHLDDHSTPPEKVLPPEAQLNSSGDSIQPSE

SEQ ID NO: 3907 - protein, 85 aa, Homo sapiens
VNQNTAENIEKERSMLPSENNIENSLLADRSDAWDKSKAESAVTKQDQISASELRQANGPLSNGLENPATTPLLQSSEVAVSIKV

SEQ ID NO: 3908 - protein, 85 aa, Homo sapiens
SLNQGIEDNFGKQENSTVEGSGEALVTDLHTPVEDTCNDLCHPGFQERKEQDCFNDAHVTQNSLVNSETLKIGDLTPQNLERQVN

SEQ ID NO: 3909 - protein, 85 aa, Homo sapiens
NLMTFSVQNQAAFQNNLPTSKFECGDNVKTSSNLYNLPLKTLESIAFVPPQSDLSNSLGTPSVPPKAPVQKFSCQVEGCTRTYNS

SEQ ID NO: 3910 - protein, 85 aa, Homo sapiens
SQSIGKHMKTAHPDQYAAFKMQRKSKKGQKANNLNTPNNGKFVYFLPSPVNSSNPFFTSQTKANGNPACSAQLQHVSPPIFPAHL

SEQ ID NO: 3911 - protein, 85 aa, Homo sapiens
ASVSTPLLSSMESVINPNITSQDKNEQGGMLCSQMENLPSTALPAQMEDLTKTVLPLNIDSGSDPFLPLPAESSSMSLFPSPADS

SEQ ID NO: 3912 - protein, 85 aa, Homo sapiens
GTNSVFSQLENNTNHYSSQIEGNTNSSFLKGGNGENAVFPSQVNVANNFSSTNAQQSAPEKVKKDRGRGPNGKERKPKHNKRAKW

SEQ ID NO: 3913 - protein, 85 aa, Homo sapiens
PAIIRDGKFICSRCYRAFTNPRSLGGHLSKRSYCKPLDGAEIAQELLQSNGQPSLLASMILSTNAVNLQQPQQSTFNPEACFKDP

SEQ ID NO: 3914 - protein, 85 aa, Homo sapiens
SFLQLLAENRSPAFLPNTFPRSGVTNFNTSVSQEGSEIIKQALETAGIPSTFEGAEMLSHVSTGCVSDASQVNATVMPNPTVPPL

SEQ ID NO: 3915 - protein, 85 aa, Homo sapiens
MHTVCHPNTLLTNQNRTSNSKTSSIEECSSLPVFPTNDLLLKTVENGLCSSSFPNSGGPSQNFTSNSSRVSVISGPQNTRSSHLN

SEQ ID NO: 3916 - protein, 85 aa, Homo sapiens
KKGNSASKRRKKVAPPLIAPNASQNLVTSDLTTMGLIAKSVEIPTTNLHSNVIPTCEPQSLVENLTQKLNNVNNQLFMTDVKENF

SEQ ID NO: 3917 - protein, 85 aa, Homo sapiens
KTSLESHTVLAPLTLKTENGDSQMMALNSCTTSINSDLQISEDNVIQNFEKTLEIIKTAMNSQILEVKSGSQGAGETSQNAQINY

SEQ ID NO: 3918 - protein, 85 aa, Homo sapiens
NIQLPSVNTVQNNKLPDSSPFSSFISVMPTKSNIPQSEVSHKEDQIQEILEGLQKLKLENDLSTPASQCVLINTSVTLTPTPVKS

SEQ ID NO: 3919 - protein, 85 aa, Homo sapiens
TADITVIQPVSEMINIQFNDKVNKPFVCQNQGCNYSAMTKDALFKHYGKIHQYTPEMILEIKKNQLKFAPFKCVVPTCTKTFTRN

SEQ ID NO: 3920 - protein, 85 aa, Homo sapiens
SNLRAHCQLVHHFTTEEMVKLKIKRPYGRKSQSENVPASRSTQVKKQLAMTEENKKESQPALELRAETQNTHSNVAVIPEKQLVE

SEQ ID NO: 3921 - protein, 85 aa, Homo sapiens
KKSPDKTESSLQVITVTSEQCNTNALTNTQTKGRKIRRHKKEKEEKKRKKPVSQSLEFPTRYSPYRPYRCVHQGCFAAFTIQQNL

SEQ ID NO: 3922 - protein, 85 aa, Homo sapiens
ILHYQAVHKSDLPAFSAEVEEESEAGKESEETETKQTLKEFRCQVSDCSRIFQAITGLIQHYMKLHEMTPEEIESMTASVDVGKF

SEQ ID NO: 3923 - protein, 85 aa, Homo sapiens
PCDQLECKSSFTTYLNYVVHLEADHGIGLRASKTEEDGVYKCDCEGCDRIYATRSNLLRHIFNKHNDKHKAHLIRPRRLTPGQEN

SEQ ID NO: 3924 - protein, 85 aa, Homo sapiens
MSSKANQEKSKSKHRGTKHSRCGKEGIKMPKTKRKKKNNLENKNAKIVQIEENKPYSLKRGKHVYSIKARNDALSECTSRFVTQY

SEQ ID NO: 3925 - protein, 85 aa, Homo sapiens
PCMIKGCTSVVTSESNIIRHYKCHKLSKAFTSQHRNLLIVFKRCCNSQVKETSEQEGAKNDVKDSDTCVSESNDNSRTTATVSQK

SEQ ID NO: 3926 - protein, 85 aa, Homo sapiens
EVEKNEKDEMDELTELFITKLINEDSTSVETQANTSSNVSNDFQEDNLCQSERQKASNLKRVNKEKNVSQNKKRKVEKAEPASAA

SEQ ID NO: 3927 - protein, 85 aa, Homo sapiens
ELSSVRKEEETAVAIQTIEEHPASFDWSSFKPMGFEVSFLKFLEESAVKQKKNTDKDHPNTGNKKGSHSNSRKNIDKTAVTSGNH

SEQ ID NO: 3928 - protein, 84 aa, Homo sapiens
NHVCPCKESETFVQFANPSQLQCSDNVKIVLDKNLKDCTELVLKQLQEMKPTVSLKKLEVHSNDPDMSVMKDISIGKATGRGQY

SEQ ID NO: 3929 - protein, 85 aa, Homo sapiens
VEAATDYCQQLCQTLLEYAEKWKTSEDPLPLLEVYTVAIQSYVKARPYLTSECENVALVLERLALSCVELLLCLPVELSDKQWEQ

SEQ ID NO: 3930 - protein, 85 aa, Homo sapiens
FQTLVQVAHEKLMENGSCELHFLATLAQETGVWKNPVLCTILSQEPLDKDKAFEGPILLDMRIKHLIKTNQLSQATALAKLCSDH

SEQ ID NO: 3931 - protein, 85 aa, Homo sapiens
PEIGIKGSFKQTYLVCLCTSSPNGKLIEEISEVDCKDALEMICNLESEGDEKSALVLCTAFLSRQLQQGDMYCAWELTLFWSKLQ

SEQ ID NO: 3932 - protein, 85 aa, Homo sapiens
QRVEPSIQVYLERCRQLSLLTKTVYHIFFLIKVINSETEGAGLATCIELCVKALRLESTENTEVKISICKTISCLLPDDLEVKRA

SEQ ID NO: 3933 - protein, 85 aa, Homo sapiens
CQLSEFLIEPTVDAYYAVEMLYNQPDQKYDEENLPIPNSLRCELLLVLKTQWPFDPEFWDWKTLKRQCLALMGEEASIVSSIDEL

SEQ ID NO: 3934 - protein, 85 aa, Homo sapiens
NDSEVYEKVVDYQEESKETSMNGLSGGVGANSGLLKDIGDEKQKKREIKQLRERGFISARFRNWQAYMQYCVLCDKEFLGHRIVR

SEQ ID NO: 3935 - protein, 85 aa, Homo sapiens
HAQKHYKDGIYSCPICAKNFNSKETFVPHVTLHVKQSSKERLAAMKPLRRLGRPPKITTTNENQKTNTVAKQEQRPIKKNSLYST

SEQ ID NO: 3936 - protein, 85 aa, Homo sapiens
DFIVFNDNDGSDDENDDKDKSYEPEVIPVQKPVPVNEFNCPVTFCKKGFKYFKNLIAHVKGHKDNEDAKRFLEMQSKKVICQYCR

SEQ ID NO: 3937 - protein, 85 aa, Homo sapiens
RHFVSVTHLNDHLQMHCGSKPYICIQMKCKAGFNSYAELLTHRKEHQVFRAKCMFPKCGRIFSEAYLLYDHEAQHYNTYTCKFTG

SEQ ID NO: 3938 - protein, 85 aa, Homo sapiens
CGKVYRSQGELEKHLDDHSTPPEKVLPPEAQLNSSGDSIQPSEVNQNTAENIEKERSMLPSENNIENSLLADRSDAWDKSKAESA

SEQ ID NO: 3939 - protein, 85 aa, Homo sapiens
VTKQDQISASELRQANGPLSNGLENPATTPLLQSSEVAVSIKVSLNQGIEDNFGKQENSTVEGSGEALVTDLHTPVEDTCNDLCH

SEQ ID NO: 3940 - protein, 85 aa, Homo sapiens
PGFQERKEQDCFNDAHVTQNSLVNSETLKIGDLTPQNLERQVNNLMTFSVQNQAAFQNNLPTSKFECGDNVKTSSNLYNLPLKTL

SEQ ID NO: 3941 - protein, 85 aa, Homo sapiens
ESIAFVPPQSDLSNSLGTPSVPPKAPVQKFSCQVEGCTRTYNSSQSIGKHMKTAHPDQYAAFKMQRKSKKGQKANNLNTPNNGKF

SEQ ID NO: 3942 - protein, 85 aa, Homo sapiens
VYFLPSPVNSSNPFFTSQTKANGNPACSAQLQHVSPPIFPAHLASVSTPLLSSMESVINPNITSQDKNEQGGMLCSQMENLPSTA

SEQ ID NO: 3943 - protein, 85 aa, Homo sapiens
MPAQMEDLTKTVLPLNIDSGSDPFLPLPAESSSMSLFPSPADSGTNSVFSQLENNTNHYSSQIEGNTNSSFLKGGNGENAVFPSQ

SEQ ID NO: 3944 - protein, 85 aa, Homo sapiens
VNVANNFSSTNAQQSAPEKVKKDRGRGPNGKERKPKHNKRAKWPAIIRDGKFICSRCYRAFTNPRSLGGHLSKRSYCKPLDGAEI

SEQ ID NO: 3945 - protein, 85 aa, Homo sapiens
AQELLQSNGQPSLLASMILSTNAVNLQQPQQSTFNPEACFKDPSFLQLLAENRSPAFLPNTFPRSGVTNFNTSVSQEGSEIIKQA

SEQ ID NO: 3946 - protein, 85 aa, Homo sapiens
METAGIPSTFEGAEMLSHVSTGCVSDASQVNATVMPNPTVPPLLHTVCHPNTLLTNQNRTSNSKTSSIEECSSLPVFPTNDLLLK

SEQ ID NO: 3947 - protein, 85 aa, Homo sapiens
TVENGLCSSSFPNSGGPSQNFTSNSSRVSVISGPQNTRSSHLNKKGNSASKRRKKVAPPLIAPNASQNLVTSDLTTMGLIAKSVE

SEQ ID NO: 3948 - protein, 85 aa, Homo sapiens
IPTTNLHSNVIPTCEPQSLVENLTQKLNNVNNQLFMTDVKENFKTSLESHTVLAPLTLKTENGDSQMMALNSCTTSINSDLQISE

SEQ ID NO: 3949 - protein, 85 aa, Homo sapiens
DNVIQNFEKTLEIIKTAMNSQILEVKSGSQGAGETSQNAQINYNIQLPSVNTVQNNKLPDSSPFSSFISVMPTKSNIPQSEVSHK

SEQ ID NO: 3950 - protein, 85 aa, Homo sapiens
EDQIQEILEGLQKLKLENDLSTPASQCVLINTSVTLTPTPVKSTADITVIQPVSEMINIQFNDKVNKPFVCQNQGCNYSAMTKDA

SEQ ID NO: 3951 - protein, 85 aa, Homo sapiens
LFKHYGKIHQYTPEMILEIKKNQLKFAPFKCVVPTCTKTFTRNSNLRAHCQLVHHFTTEEMVKLKIKRPYGRKSQSENVPASRST

SEQ ID NO: 3952 - protein, 85 aa, Homo sapiens
QVKKQLAMTEENKKESQPALELRAETQNTHSNVAVIPEKQLVEKKSPDKTESSLQVITVTSEQCNTNALTNTQTKGRKIRRHKKE

SEQ ID NO: 3953 - protein, 85 aa, Homo sapiens
KEEKKRKKPVSQSLEFPTRYSPYRPYRCVHQGCFAAFTIQQNLILHYQAVHKSDLPAFSAEVEEESEAGKESEETETKQTLKEFR

SEQ ID NO: 3954 - protein, 85 aa, Homo sapiens
CQVSDCSRIFQAITGLIQHYMKLHEMTPEEIESMTASVDVGKFPCDQLECKSSFTTYLNYVVHLEADHGIGLRASKTEEDGVYKC

SEQ ID NO: 3955 - protein, 85 aa, Homo sapiens
DCEGCDRIYATRSNLLRHIFNKHNDKHKAHLIRPRRLTPGQENMSSKANQEKSKSKHRGTKHSRCGKEGIKMPKTKRKKKNNLEN

SEQ ID NO: 3956 - protein, 85 aa, Homo sapiens
KNAKIVQIEENKPYSLKRGKHVYSIKARNDALSECTSRFVTQYPCMIKGCTSVVTSESNIIRHYKCHKLSKAFTSQHRNLLIVFK

SEQ ID NO: 3957 - protein, 85 aa, Homo sapiens
RCCNSQVKETSEQEGAKNDVKDSDTCVSESNDNSRTTATVSQKEVEKNEKDEMDELTELFITKLINEDSTSVETQANTSSNVSND

SEQ ID NO: 3958 - protein, 85 aa, Homo sapiens
FQEDNLCQSERQKASNLKRVNKEKNVSQNKKRKVEKAEPASAAELSSVRKEEETAVAIQTIEEHPASFDWSSFKPMGFEVSFLKF

SEQ ID NO: 3959 - protein, 85 aa, Homo sapiens
LEESAVKQKKNTDKDHPNTGNKKGSHSNSRKNIDKTAVTSGNHVCPCKESETFVQFANPSQLQCSDNVKIVLDKNLKDCTELVLK

SEQ ID NO: 3960 - protein, 85 aa, Homo sapiens
DDEDDDDDDFDDEEAEEKAPVKKGQESFKKQEKTPKTPKGPSSVEDIKAKMQASIEKGGSLPKVEAKFINYVKNCFRMTDQEAIQ

SEQ ID NO: 3961 - protein, 84 aa, Homo sapiens
DDEEAEEKAPVKKGQESFKKQEKTPKTPKGPSSVEDIKAKMQASIEKGGSLPKVEAKFINYVKNCFRMTDQEAIQDLWQWRKSL

SEQ ID NO: 3962 - protein, 85 aa, Homo sapiens
EEEDVKLLSISGKRSAPGGGSKVPQKKVKLAADEDDDDDDEEDDDEDDDDDDFDDEEAEEKAPVKKGQESFKKQEKTPKTPKGPS

SEQ ID NO: 3963 - protein, 84 aa, Homo sapiens
AERVLGRPITAHLCTAKSPQQVMGSLVKDYFARQQNLSPEKIFHVIVAPCYDKKLEALQESLPPALHGSRGADCVLTSGESQAW

SEQ ID NO: 3964 - protein, 85 aa, Homo sapiens
PSGCRCLHLVCLLCILGAPGQPVRADDCSSHCDLAHGCCAPDGSCRCDPGWEGLHCERCVRMPGCQHGTCHQPWQCICHSGWAGK

SEQ ID NO: 3965 - protein, 85 aa, Homo sapiens
FCDKDEHICTTQSPCQNGGQCMYDGGGEYHCVCLPGFHGRDCERKAGPCEQAGSPCRNGGQCQDDQGFALNFTCRCLVGFVGARC

SEQ ID NO: 3966 - protein, 85 aa, Homo sapiens
EVNVDDCLMRPCANGATCLDGINRFSCLCPEGFAGRFCTINLDDCASRPCQRGARCRDRVHDFDCLCPSGYGGKTCELVLPVPDP

SEQ ID NO: 3967 - protein, 85 aa, Homo sapiens
PTTVDTPLGPTSAVVVPATGPAPHSAGAGLLRISVKEVVRRQEAGLGEPSLVALVVFGALTAALVLATVLLTLRAWRRGVCPPGP

SEQ ID NO: 3968 - protein, 84 aa, Homo sapiens
AGLGEPSLVALVVFGALTAALVLATVLLTLRAWRRGVCPPGPCCYPAPHYAPACQDQECQVSMLPAGLPLPRDLPPEPGKTTAL

SEQ ID NO: 3969 - protein, 85 aa, Homo sapiens
GSCRCDPGWEGLHCERCVRMPGCQHGTCHQPWQCICHSGWAGKFCDKDEHICTTQSPCQNGGQCMYDGGGEYHCVCLPGFHGRDC

SEQ ID NO: 3970 - protein, 85 aa, Homo sapiens
ERKAGPCEQAGSPCRNGGQCQDDQGFALNFTCRCLVGFVGARCEVNVDDCLMRPCANGATCLDGINRFSCLCPEGFAGRFCTINL

SEQ ID NO: 3971 - protein, 85 aa, Homo sapiens
DDCASRPCQRGARCRDRVHDFDCLCPSGYGGKTCELVLPVPDPPTTVDTPLGPTSAVVVPATGPAPHSAGAGLLRISVKEVVRRQ

SEQ ID NO: 3972 - protein, 85 aa, Homo sapiens
EAGLGEPSLVALVVFGALTAALVLATVLLTLRAWRRGVCPPGPCCYPAPHYAPACQDQECQVSMLPAGLPLPRDLPPEPGKTTAL

SEQ ID NO: 3973 - protein, 85 aa, Homo sapiens
MRDTMKSWNDSQSDLCSTDQEEEEEMIFGENEDDLDEMMDLSDLPTSLFACSVHEAVFEAREQKERFEALFTIYDDQVTFQLFKS

SEQ ID NO: 3974 - protein, 85 aa, Homo sapiens
FRRVRINFSKPEAAARARIELHETDFNGQKLKLYFAQVQMSGEVRDKSYLLPPQPVKQFLISPPASPPVGWKQSEDAMPVINYDL

SEQ ID NO: 3975 - protein, 84 aa, Homo sapiens
KQSEDAMPVINYDLLCAVSKLGPGEKYELHAGTESTPSVVVHVCESETEEEEETKNPKQKIAQTRRPDPPTAALNEPQTFDCAL

SEQ ID NO: 3976 - protein, 85 aa, Homo sapiens
DLPTSLFACSVHEAVFEAREQKERFEALFTIYDDQVTFQLFKSFRRVRINFSKPEAAARARIELHETDFNGQKLKLYFAQVQMSG

SEQ ID NO: 3977 - protein, 85 aa, Homo sapiens
EVRDKSYLLPPQPVKQFLISPPASPPVGWKQSEDAMPVINYDLLCAVSKLGPGEKYELHAGTESTPSVVVHVCESETEEEEETKN

SEQ ID NO: 3978 - protein, 85 aa, Homo sapiens
LEDISEEDIWEYKSKRKPKRVDPNNGSKNILKSVEKATDGKYQSKRSRNRKRAAEAKEVKDHEVPLGNAGCQTSVASSQNSSCGD

SEQ ID NO: 3979 - protein, 85 aa, Homo sapiens
GIQQTQDKETTPGKLCRTQKSQHVSPKIRPVYDGYCPNCQMPFSSLIGQTPRWHVFECLDSPPRSETECPDGLLCTSTIPFHYKR

SEQ ID NO: 3980 - protein, 85 aa, Homo sapiens
YTHFLLAQSRAGDHPFSSPSPASGGSFSETKSGVLCSLEERWSSYQNQTDNSVSNDPLLMTQYFKKSPSLTEASEKISTHIQTSQ

SEQ ID NO: 3981 - protein, 85 aa, Homo sapiens
QALQFTDFVENDKLVGVALRLANNSEHINLPLPENDFSDCEISYSPLQSDEDTHDIDEKPDDSQEQLFFTESSKDGSLEEDDDSC

SEQ ID NO: 3982 - protein, 85 aa, Homo sapiens
GFFKKRHGPLLKDQDESCPKVNSFLTRDKYDEGLYRFNSLNDLSQPISQNNESTLPYDLACTGGDFVLFPPALAGKLAASVHQAT

SEQ ID NO: 3983 - protein, 85 aa, Homo sapiens
KAKPDEPEFHSAQSNKQKQVIEESSVYNQVSLPLVKSLMLKPFESQVEGYLSSQPTQNTIRKLSSENLNAKNNTNSACFCRKALE

SEQ ID NO: 3984 - protein, 85 aa, Homo sapiens
GVPVGKATILNTENLSSTPAPKYLKILPSGLKYNARHPSTKVMKQMDIGVYFGLPPKRKEEKLLGESALEGINLNPVPSPNQKRS

SEQ ID NO: 3985 - protein, 85 aa, Homo sapiens
SQCKRKAEKSLSDLEFDASTLHESQLSVELSSERSQRQKKRCRKSNSLQEGACQKRSDHLINTESEAVNLSKVKVFTKSAHGGLQ

SEQ ID NO: 3986 - protein, 85 aa, Homo sapiens
RGNKKIPESSNVGGSRKKTCPFYKKIPGTGFTVDAFQYGVVEGCTAYFLTHFHSDHYAGLSKHFTFPVYCSEITGNLLKNKLHVQ

SEQ ID NO: 3987 - protein, 85 aa, Homo sapiens
EQYIHPLPLDTECIVNGVKVVLLDANHCPGAVMILFYLPNGTVILHTGDFRADPSMERSLLADQKVHMLYLDTTYCSPEYTFPSQ

SEQ ID NO: 3988 - protein, 85 aa, Homo sapiens
QEVIRFAINTAFEAVTLNPHALVVCGTYSIGKEKVFLAIADVLGSKVGMSQEKYKTLQCLNIPEINSLITTDMCSSLVHLLPMMQ

SEQ ID NO: 3989 - protein, 85 aa, Homo sapiens
INFKGLQSHLKKCGGKYNQILAFRPTGWTHSNKFTRIADVIPQTKGNISIYGIPYSEHSSYLEMKRFVQWLKPQKIIPTVNVGTW

SEQ ID NO: 3990 - protein, 84 aa, Homo sapiens
MAFRPTGWTHSNKFTRIADVIPQTKGNISIYGIPYSEHSSYLEMKRFVQWLKPQKIIPTVNVGTWKSRSTMEKYFREWKLEAGY

SEQ ID NO: 3991 - protein, 85 aa, Homo sapiens
QSKRSRNRKRAAEAKEVKDHEVPLGNAGCQTSVASSQNSSCGDGIQQTQDKETTPGKLCRTQKSQHVSPKIRPVYDGYCPNCQMP

SEQ ID NO: 3992 - protein, 85 aa, Homo sapiens
FSSLIGQTPRWHVFECLDSPPRSETECPDGLLCTSTIPFHYKRYTHFLLAQSRAGDHPFSSPSPASGGSFSETKSGVLCSLEERW

SEQ ID NO: 3993 - protein, 85 aa, Homo sapiens
SSYQNQTDNSVSNDPLLMTQYFKKSPSLTEASEKISTHIQTSQQALQFTDFVENDKLVGVALRLANNSEHINLPLPENDFSDCEI

SEQ ID NO: 3994 - protein, 85 aa, Homo sapiens
SYSPLQSDEDTHDIDEKPDDSQEQLFFTESSKDGSLEEDDDSCGFFKKRHGPLLKDQDESCPKVNSFLTRDKYDEGLYRFNSLND

SEQ ID NO: 3995 - protein, 85 aa, Homo sapiens
MSQPISQNNESTLPYDLACTGGDFVLFPPALAGKLAASVHQATKAKPDEPEFHSAQSNKQKQVIEESSVYNQVSLPLVKSLMLKP

SEQ ID NO: 3996 - protein, 85 aa, Homo sapiens
FESQVEGYLSSQPTQNTIRKLSSENLNAKNNTNSACFCRKALEGVPVGKATILNTENLSSTPAPKYLKILPSGLKYNARHPSTKV

SEQ ID NO: 3997 - protein, 85 aa, Homo sapiens
MKQMDIGVYFGLPPKRKEEKLLGESALEGINLNPVPSPNQKRSSQCKRKAEKSLSDLEFDASTLHESQLSVELSSERSQRQKKRC

SEQ ID NO: 3998 - protein, 85 aa, Homo sapiens
RKSNSLQEGACQKRSDHLINTESEAVNLSKVKVFTKSAHGGLQRGNKKIPESSNVGGSRKKTCPFYKKIPGTGFTVDAFQYGVVE

SEQ ID NO: 3999 - protein, 85 aa, Homo sapiens
GCTAYFLTHFHSDHYAGLSKHFTFPVYCSEITGNLLKNKLHVQEQYIHPLPLDTECIVNGVKVVLLDANHCPGAVMILFYLPNGT

SEQ ID NO: 4000 - protein, 85 aa, Homo sapiens
VILHTGDFRADPSMERSLLADQKVHMLYLDTTYCSPEYTFPSQQEVIRFAINTAFEAVTLNPHALVVCGTYSIGKEKVFLAIADV

SEQ ID NO: 4001 - protein, 85 aa, Homo sapiens
LGSKVGMSQEKYKTLQCLNIPEINSLITTDMCSSLVHLLPMMQINFKGLQSHLKKCGGKYNQILAFRPTGWTHSNKFTRIADVIP

SEQ ID NO: 4002 - protein, 85 aa, Homo sapiens
HSEQKSTTSRFRGKRRKRSRKDKLKNEKELHSEPSSNETQWKELTQYFGVNDRFDPPVKRKKVEKSGLEKRIDQAVEEWNIEKAE

SEQ ID NO: 4003 - protein, 84 aa, Homo sapiens
EKSGLEKRIDQAVEEWNIEKAEELSNQLATRELGVKIAKAVACHNFVKAKKEVENSQAARKKKKLAWGFEAKKRWETKSNMGYM

SEQ ID NO: 4004 - protein, 85 aa, Homo sapiens
ELTQYFGVNDRFDPPVKRKKVEKSGLEKRIDQAVEEWNIEKAEELSNQLATRELGVKIAKAVACHNFVKAKKEVENSQAARKKKK

SEQ ID NO: 4005 - protein, 85 aa, Homo sapiens
AMEMRLPVARKPLSERLGRDTKKHLVVPGDTITTDTGFMRGHGTYMGEEKLIASVAGSVERVNKLICVKALKTRYIGEVGDIVVG

SEQ ID NO: 4006 - protein, 85 aa, Homo sapiens
RITEVQQKRWKVETNSRLDSVLLLSSMNLPGGELRRRSAEDELAMRGFLQEGDLISAEVQAVFSDGAVSLHTRSLKYGKVSPSLV

SEQ ID NO: 4007 - protein, 85 aa, Homo sapiens
KRQKTHFHDLPCGASVILGNNGFIWIYPTPEHKEEEAGGFIANLEPVSLADREVISRLRNCIISLVTQRMMLYDTSILYCYEASL

SEQ ID NO: 4008 - protein, 84 aa, Homo sapiens
EHKEEEAGGFIANLEPVSLADREVISRLRNCIISLVTQRMMLYDTSILYCYEASLPHQIKDILKPEIMEEIVMETRQRLLEQEG

SEQ ID NO: 4009 - protein, 85 aa, Homo sapiens
GTYMGEEKLIASVAGSVERVNKLICVKALKTRYIGEVGDIVVGRITEVQQKRWKVETNSRLDSVLLLSSMNLPGGELRRRSAEDE

SEQ ID NO: 4010 - protein, 85 aa, Homo sapiens
LAMRGFLQEGDLISAEVQAVFSDGAVSLHTRSLKYGKVSPSLVKRQKTHFHDLPCGASVILGNNGFIWIYPTPEHKEEEAGGFIA

SEQ ID NO: 4011 - protein, 84 aa, Homo sapiens
GARRLARSLQKLGFQVIFTDFKVVNVLAVCNMPFEIRLPEFTKNNRPHASYEPELHPAVCYRIKSLRATLQIFSTGSITVTGIL

SEQ ID NO: 4012 - protein, 85 aa, Homo sapiens
EFKLEAHRIVSISLGKIYNSRVQRGGIKLHKNLLVSLVLRSARQVYLSDPCPGLYLAGPAGTPAPPPQQQPGEPAAGPPAGWGEP

SEQ ID NO: 4013 - protein, 85 aa, Homo sapiens
PPPAARASWPETEPQPERSSVSDAPRVGDEVPVATVTGVGDVFQGGEADATEAAWSRVEGPRQAAAREAEGTAGGWGVFPEVSRA

SEQ ID NO: 4014 - protein, 85 aa, Homo sapiens
ARRPCGCPLGGEDPPGTPAATPRAACCCAPQPAEDEPPAPPAVCPRKRCAAGVGGGPAGCPAPGSTPLKKPRRNLEQPPSGGEDD

SEQ ID NO: 4015 - protein, 84 aa, Homo sapiens
RNLEQPPSGGEDDDAEEMETGNVANLISIFGSSFSGLLRKSPGGGREEEEGEESGPEAAEPGQICCDKPVLRDMNPWSTAIVAF

SEQ ID NO: 4016 - protein, 85 aa, Homo sapiens
RQVYLSDPCPGLYLAGPAGTPAPPPQQQPGEPAAGPPAGWGEPPPPAARASWPETEPQPERSSVSDAPRVGDEVPVATVTGVGDV

SEQ ID NO: 4017 - protein, 85 aa, Homo sapiens
FQGGEADATEAAWSRVEGPRQAAAREAEGTAGGWGVFPEVSRAARRPCGCPLGGEDPPGTPAATPRAACCCAPQPAEDEPPAPPA

SEQ ID NO: 4018 - protein, 85 aa, Homo sapiens
VCPRKRCAAGVGGGPAGCPAPGSTPLKKPRRNLEQPPSGGEDDDAEEMETGNVANLISIFGSSFSGLLRKSPGGGREEEEGEESG

SEQ ID NO: 4019 - protein, 85 aa, Homo sapiens
SLNSSLSCRKELSNLTEEEGGEGGVIITQFIAIIVITIFVCLGNLVIVVTLYKKSYLLTLSNKFVFSLTLSNFLLSVLVLPFVVT

SEQ ID NO: 4020 - protein, 85 aa, Homo sapiens
SSIRREWIFGVVWCNFSALLYLLISSASMLTLGVIAIDRYYAVLYPMVYPMKITGNRAVMALVYIWLHSLIGCLPPLFGWSSVEF

SEQ ID NO: 4021 - protein, 85 aa, Homo sapiens
DEFKWMCVAAWHREPGYTAFWQIWCALFPFLVMLVCYGFIFRVARVKARKVHCGTVVIVEEDAQRTGRKNSSTSTSSSGSRRNAF

SEQ ID NO: 4022 - protein, 85 aa, Homo sapiens
QGVVYSANQCKALITILVVLGAFMVTWGPYMVVIASEALWGKSSVSPSLETWATWLSFASAVCHPLIYGLWNKTVRKELLGMCFG

SEQ ID NO: 4023 - protein, 85 aa, Homo sapiens
DRYYREPFVQRQRTSRLFSISNRITDLGLSPHLTALMAGGQPLGHSSSTGDTGFSCSQDSGTDMMLLEDYTSDDNPPSHCTCPPK

SEQ ID NO: 4024 - protein, 85 aa, Homo sapiens
RRSSVTFEDEVEQIKEAAKNSILHVKAEVHKSLDSYAASLAKAIEAEAKINLFGEEALPGVLVTARTVPGGGFGGRRGSRTLVSQ

SEQ ID NO: 4025 - protein, 85 aa, Homo sapiens
GNLVIVVTLYKKSYLLTLSNKFVFSLTLSNFLLSVLVLPFVVTSSIRREWIFGVVWCNFSALLYLLISSASMLTLGVIAIDRYYA

SEQ ID NO: 4026 - protein, 85 aa, Homo sapiens
VLYPMVYPMKITGNRAVMALVYIWLHSLIGCLPPLFGWSSVEFDEFKWMCVAAWHREPGYTAFWQIWCALFPFLVMLVCYGFIFR

SEQ ID NO: 4027 - protein, 85 aa, Homo sapiens
VARVKARKVHCGTVVIVEEDAQRTGRKNSSTSTSSSGSRRNAFQGVVYSANQCKALITILVVLGAFMVTWGPYMVVIASEALWGK

SEQ ID NO: 4028 - protein, 85 aa, Homo sapiens
SSVSPSLETWATWLSFASAVCHPLIYGLWNKTVRKELLGMCFGDRYYREPFVQRQRTSRLFSISNRITDLGLSPHLTALMAGGQP

SEQ ID NO: 4029 - protein, 85 aa, Homo sapiens
MGHSSSTGDTGFSCSQDSGTDMMLLEDYTSDDNPPSHCTCPPKRRSSVTFEDEVEQIKEAAKNSILHVKAEVHKSLDSYAASLAK

SEQ ID NO: 4030 - protein, 85 aa, Homo sapiens
ENMAEEELLPLEKEEVEVAQVQVPTPARDSAGVPAPAPDSALDSAPTPASAPAPAPALAQAPALSPSLASAPEEAKSKRHISIQR

SEQ ID NO: 4031 - protein, 85 aa, Homo sapiens
QLADLENLAFVTDGNFDSASSLNSDNLDAGNRQACPLCPKEKFRACNSHKLRRHLQNLHWKVSVEFEGYRMCICHLPCRPVKPNI

SEQ ID NO: 4032 - protein, 85 aa, Homo sapiens
IGEQITSKMGAHYHCIICSATITRRTDMLGHVRRHMNKGETKSSYIAASTAKPPKEILKEADTDVQVCPNYSIPQKTDSYFNPKM

SEQ ID NO: 4033 - protein, 85 aa, Homo sapiens
KLNRQLIFCTLAALAEERKPLECLDAFGATGIMGLQWAKHLGNAVKVTINDLNENSVTLIQENCHLNKLKVVVDSKEKEKSDDIL

SEQ ID NO: 4034 - protein, 85 aa, Homo sapiens
EEGEKNLGNIKVTKMDANVLMHLRSFDFIHLDPFGTSVNYLDSAFRNIRNLGIVSVTSTDISSLYAKAQHVARRHYGCNIVRTEY

SEQ ID NO: 4035 - protein, 85 aa, Homo sapiens
YKELAARIVVAAVARAAARCNKGIEVLFAVALEHFVLVVVRVLRGPTSADETAKKIQYLIHCQWCEERIFQKDGNMVEENPYRQL

SEQ ID NO: 4036 - protein, 85 aa, Homo sapiens
PCNCHGSMPGKTAIELGPLWSSSLFNTGFLKRMLFESLHHGLDDIQTLIKTLIFESECTPQSQFSIHASSNVNKQEENGVFIKTT

SEQ ID NO: 4037 - protein, 85 aa, Homo sapiens
DDTTTDNYIAQGKRKSNEMITNLGKKQKTDVSTEHPPFYYNIHRHSIKGMNMPKLKKFLCYLSQAGFRVSRTHFDPMGVRTDAPL

SEQ ID NO: 4038 - protein, 84 aa, Homo sapiens
KLKKFLCYLSQAGFRVSRTHFDPMGVRTDAPLMQFKSILLKYSTPTYTGGQSESHVQSASEDTVTERVEMSVNDKAEASGCRRW

SEQ ID NO: 4039 - protein, 85 aa, Homo sapiens
DSAPTPASAPAPAPALAQAPALSPSLASAPEEAKSKRHISIQRQLADLENLAFVTDGNFDSASSLNSDNLDAGNRQACPLCPKEK

SEQ ID NO: 4040 - protein, 85 aa, Homo sapiens
FRACNSHKLRRHLQNLHWKVSVEFEGYRMCICHLPCRPVKPNIIGEQITSKMGAHYHCIICSATITRRTDMLGHVRRHMNKGETK

SEQ ID NO: 4041 - protein, 85 aa, Homo sapiens
SSYIAASTAKPPKEILKEADTDVQVCPNYSIPQKTDSYFNPKMKLNRQLIFCTLAALAEERKPLECLDAFGATGIMGLQWAKHLG

SEQ ID NO: 4042 - protein, 85 aa, Homo sapiens
NAVKVTINDLNENSVTLIQENCHLNKLKVVVDSKEKEKSDDILEEGEKNLGNIKVTKMDANVLMHLRSFDFIHLDPFGTSVNYLD

SEQ ID NO: 4043 - protein, 85 aa, Homo sapiens
SAFRNIRNLGIVSVTSTDISSLYAKAQHVARRHYGCNIVRTEYYKELAARIVVAAVARAAARCNKGIEVLFAVALEHFVLVVVRV

SEQ ID NO: 4044 - protein, 85 aa, Homo sapiens
MRGPTSADETAKKIQYLIHCQWCEERIFQKDGNMVEENPYRQLPCNCHGSMPGKTAIELGPLWSSSLFNTGFLKRMLFESLHHGL

SEQ ID NO: 4045 - protein, 85 aa, Homo sapiens
DDIQTLIKTLIFESECTPQSQFSIHASSNVNKQEENGVFIKTTDDTTTDNYIAQGKRKSNEMITNLGKKQKTDVSTEHPPFYYNI

SEQ ID NO: 4046 - protein, 85 aa, Homo sapiens
HRHSIKGMNMPKLKKFLCYLSQAGFRVSRTHFDPMGVRTDAPLMQFKSILLKYSTPTYTGGQSESHVQSASEDTVTERVEMSVND

SEQ ID NO: 4047 - protein, 85 aa, Homo sapiens
ETSASATASEKQEAKSGILEAAGFPDPGKKASPLVVAAAAAAAVAAQGVPQHLLPPFHAPLPIDMRHQEGRYHYEPHSVHGVHGP

SEQ ID NO: 4048 - protein, 85 aa, Homo sapiens
PALSGSPVISDISLIRLSPHPAGPGESPFNAPHPYVNPHMEHYLRSVHSSPTLSMISAARGLSPADVAQEHLKERGLFGLPAPGT

SEQ ID NO: 4049 - protein, 85 aa, Homo sapiens
TPSDYYHQMTLVAGHPAPYGDLLMQSGGAASAPHLHDYLNPVDVSRFSSPRVTPRLSRKRALSISPLSDASLDLQRMIRTSPNSL

SEQ ID NO: 4050 - protein, 85 aa, Homo sapiens
VAYINNSRSSSAASGSYGHLSAGALSPAFTFPHPINPVAYQQILSQQRGLGSAFGHTPPLIQPSPTFLAQQPMALTSINATPTQL

SEQ ID NO: 4051 - protein, 85 aa, Homo sapiens
SSSSNCLSDTNQNKQSSESAVSSTVNPVAIHKRSKVKTEPEGLRPASPLALTQEQLADLKEDLDRDDCKQEAEVVIYETNCHWED

SEQ ID NO: 4052 - protein, 85 aa, Homo sapiens
CTKEYDTQEQLVHHINNEHIHGEKKEFVCRWQACTREQKPFKAQYMLVVHMRRHTGEKPHKCTFEGCSKAYSRLENLKTHLRSHT

SEQ ID NO: 4053 - protein, 85 aa, Homo sapiens
GEKPYVCEHEGCNKAFSNASDRAKHQNRTHSNEKPYICKIPGCTKRYTDPSSLRKHVKTVHGPDAHVTKKQRNDVHLRTPLLKEN

SEQ ID NO: 4054 - protein, 85 aa, Homo sapiens
GDSEAGTEPGGPESTEASSTSQAVEDCLHVRAIKTESSGLCQSSPGAQSSCSSEPSPLGSAPNNDSGVEMPGTGPGSLGDLTALD

SEQ ID NO: 4055 - protein, 85 aa, Homo sapiens
DTPPGADTSALAAPSAGGLQLRKHMTTMHRFEQLKKEKLKSLKDSCSWAGPTPHTRNTKLPPLPGSGSILENFSGSGGGGPAGLL

SEQ ID NO: 4056 - protein, 85 aa, Homo sapiens
PNPRLSELSASEVTMLSQLQERRDSSTSTVSSAYTVSRRSSGISPYFSSRRSSEASPLGAGRPHNASSADSYDPISTDASRRSSE

SEQ ID NO: 4057 - protein, 85 aa, Homo sapiens
ASQCSGGSGLLNLTPAQQYSLRAKYAAATGGPPPTPLPGLERMSLRTRLALLDAPERTLPAGCPRPLGPRRGSDGPTYGHGHAGA

SEQ ID NO: 4058 - protein, 85 aa, Homo sapiens
APAFPHEAPGGGARRASDPVRRPDALSLPRVQRFHSTHNVNPGPLPPCADRRGLRLQSHPSTDGGLARGAYSPRPPSISENVAME

SEQ ID NO: 4059 - protein, 85 aa, Homo sapiens
AVAAGVDGAGPEADLGLPEDDLVLPDDVVQYIKAHASGALDEGTGQVYPTESTGFSDNPRLPSPGLHGQRRMVAADSNVGPSAPM

SEQ ID NO: 4060 - protein, 85 aa, Homo sapiens
MGGCQLGFGAPSSLNKNNMPVQWNEVSSGTVDALASQVKPPPFPQGNLAVVQQKPAFGQYPGYSPQGLQASPGGLDSTQPHLQPR

SEQ ID NO: 4061 - protein, 85 aa, Homo sapiens
SGAPSQGIPRVNYMQQLRQPVAGSQCPGMTTTMSPHACYGQVHPQLSPSTISGALNQFPQSCSNMPAKPGHLGHPQQTEVAPDPT

SEQ ID NO: 4062 - protein, 85 aa, Homo sapiens
TMGNRHRELGVPDSALAGVPPPHPVQSYPQQSHHLAASMSQEGYHQVPSLLPARQPGFMEPQTGPMGVATAGFGLVQPRPPLEPS

SEQ ID NO: 4063 - protein, 85 aa, Homo sapiens
PTGRHRGVRAVQQQLAYARATGHAMAAMPSSQETAEAVPKGAMGNMGSVPPQPPPQDAGGAPDHSMLYYYGQIHMYEQDGGLENL

SEQ ID NO: 4064 - protein, 85 aa, Homo sapiens
GSCQVMRSQPPQPQACQDSIQPQPLPSPGVNQVSSTVDSQLLEAPQIDFDAIMDDGDHSSLFSGALSPSLLHSLSQNSSRLTTPR

SEQ ID NO: 4065 - protein, 84 aa, Homo sapiens
QLLEAPQIDFDAIMDDGDHSSLFSGALSPSLLHSLSQNSSRLTTPRNSLTLPSIPAGISNMAVGDMSSMLTSLAEESKFLNMMT

SEQ ID NO: 4066 - protein, 85 aa, Homo sapiens
AVAAQGVPQHLLPPFHAPLPIDMRHQEGRYHYEPHSVHGVHGPPALSGSPVISDISLIRLSPHPAGPGESPFNAPHPYVNPHMEH

SEQ ID NO: 4067 - protein, 85 aa, Homo sapiens
YLRSVHSSPTLSMISAARGLSPADVAQEHLKERGLFGLPAPGTTPSDYYHQMTLVAGHPAPYGDLLMQSGGAASAPHLHDYLNPV

SEQ ID NO: 4068 - protein, 85 aa, Homo sapiens
DVSRFSSPRVTPRLSRKRALSISPLSDASLDLQRMIRTSPNSLVAYINNSRSSSAASGSYGHLSAGALSPAFTFPHPINPVAYQQ

SEQ ID NO: 4069 - protein, 85 aa, Homo sapiens
ILSQQRGLGSAFGHTPPLIQPSPTFLAQQPMALTSINATPTQLSSSSNCLSDTNQNKQSSESAVSSTVNPVAIHKRSKVKTEPEG

SEQ ID NO: 4070 - protein, 85 aa, Homo sapiens
MRPASPLALTQEQLADLKEDLDRDDCKQEAEVVIYETNCHWEDCTKEYDTQEQLVHHINNEHIHGEKKEFVCRWQACTREQKPFK

SEQ ID NO: 4071 - protein, 85 aa, Homo sapiens
AQYMLVVHMRRHTGEKPHKCTFEGCSKAYSRLENLKTHLRSHTGEKPYVCEHEGCNKAFSNASDRAKHQNRTHSNEKPYICKIPG

SEQ ID NO: 4072 - protein, 85 aa, Homo sapiens
CTKRYTDPSSLRKHVKTVHGPDAHVTKKQRNDVHLRTPLLKENGDSEAGTEPGGPESTEASSTSQAVEDCLHVRAIKTESSGLCQ

SEQ ID NO: 4073 - protein, 85 aa, Homo sapiens
SSPGAQSSCSSEPSPLGSAPNNDSGVEMPGTGPGSLGDLTALDDTPPGADTSALAAPSAGGLQLRKHMTTMHRFEQLKKEKLKSL

SEQ ID NO: 4074 - protein, 85 aa, Homo sapiens
KDSCSWAGPTPHTRNTKLPPLPGSGSILENFSGSGGGGPAGLLPNPRLSELSASEVTMLSQLQERRDSSTSTVSSAYTVSRRSSG

SEQ ID NO: 4075 - protein, 85 aa, Homo sapiens
ISPYFSSRRSSEASPLGAGRPHNASSADSYDPISTDASRRSSEASQCSGGSGLLNLTPAQQYSLRAKYAAATGGPPPTPLPGLER

SEQ ID NO: 4076 - protein, 85 aa, Homo sapiens
MSLRTRLALLDAPERTLPAGCPRPLGPRRGSDGPTYGHGHAGAAPAFPHEAPGGGARRASDPVRRPDALSLPRVQRFHSTHNVNP

SEQ ID NO: 4077 - protein, 85 aa, Homo sapiens
GPLPPCADRRGLRLQSHPSTDGGLARGAYSPRPPSISENVAMEAVAAGVDGAGPEADLGLPEDDLVLPDDVVQYIKAHASGALDE

SEQ ID NO: 4078 - protein, 85 aa, Homo sapiens
GTGQVYPTESTGFSDNPRLPSPGLHGQRRMVAADSNVGPSAPMLGGCQLGFGAPSSLNKNNMPVQWNEVSSGTVDALASQVKPPP

SEQ ID NO: 4079 - protein, 85 aa, Homo sapiens
FPQGNLAVVQQKPAFGQYPGYSPQGLQASPGGLDSTQPHLQPRSGAPSQGIPRVNYMQQLRQPVAGSQCPGMTTTMSPHACYGQV

SEQ ID NO: 4080 - protein, 85 aa, Homo sapiens
HPQLSPSTISGALNQFPQSCSNMPAKPGHLGHPQQTEVAPDPTTMGNRHRELGVPDSALAGVPPPHPVQSYPQQSHHLAASMSQE

SEQ ID NO: 4081 - protein, 85 aa, Homo sapiens
GYHQVPSLLPARQPGFMEPQTGPMGVATAGFGLVQPRPPLEPSPTGRHRGVRAVQQQLAYARATGHAMAAMPSSQETAEAVPKGA

SEQ ID NO: 4082 - protein, 85 aa, Homo sapiens
MGNMGSVPPQPPPQDAGGAPDHSMLYYYGQIHMYEQDGGLENLGSCQVMRSQPPQPQACQDSIQPQPLPSPGVNQVSSTVDSQLL

SEQ ID NO: 4083 - protein, 85 aa, Homo sapiens
NPRQGYSLSGYYTHPFQGYEHRQLRYQQPGPGSSPSSFLLKQIEFLKGQLPEAPVIGKQTPSLPPSLPGLRPRFPVLLASSTRGR

SEQ ID NO: 4084 - protein, 85 aa, Homo sapiens
QVDIRGVPRGVHLRSQGLQRGFQHPSPRGRSLPQRGVDCLSSHFQELSIYQDQEQRILKFLEELGEGKATTAHDLSGKLGTPKKE

SEQ ID NO: 4085 - protein, 85 aa, Homo sapiens
INRVLYSLAKKGKLQKEAGTPPLWKIAVSTQAWNQHSGVVRPDGHSQGAPNSDPSLEPEDRNSTSVSEDLLEPFIAVSAQAWNQH

SEQ ID NO: 4086 - protein, 85 aa, Homo sapiens
SGVVRPDSHSQGSPNSDPGLEPEDSNSTSALEDPLEFLDMAEIKEKICDYLFNVSDSSALNLAKNIGLTKARDINAVLIDMERQG

SEQ ID NO: 4087 - protein, 85 aa, Homo sapiens
DVYRQGTTPPIWHLTDKKRERMQIKRNTNSVPETAPAAIPETKRNAEFLTCNIPTSNASNNMVTTEKVENGQEPVIKLENRQEAR

SEQ ID NO: 4088 - protein, 85 aa, Homo sapiens
PEPARLKPPVHYNGPSKAGYVDFENGQWATDDIPDDLNSIRAAPGEFRAIMEMPSFYSHGLPRCSPYKKLTECQLKNPISGLLEY

SEQ ID NO: 4089 - protein, 85 aa, Homo sapiens
AQFASQTCEFNMIEQSGPPHEPRFKFQVVINGREFPPAEAGSKKVAKQDAAMKAMTILLEEAKAKDSGKSEESSHYSTEKESEKT

SEQ ID NO: 4090 - protein, 85 aa, Homo sapiens
AESQTPTPSATSFFSGKSPVTTLLECMHKLGNSCEFRLLSKEGPAHEPKFQYCVAVGAQTFPSVSAPSKKVAKQMAAEEAMKALH

SEQ ID NO: 4091 - protein, 85 aa, Homo sapiens
GEATNSMASDNQPEGMISESLDNLESMMPNKVRKIGELVRYLNTNPVGGLLEYARSHGFAAEFKLVDQSGPPHEPKFVYQAKVGG

SEQ ID NO: 4092 - protein, 85 aa, Homo sapiens
RWFPAVCAHSKKQGKQEAADAALRVLIGENEKAERMGFTEVTPVTGASLRRTMLLLSRSPEAQPKTLPLTGSTFHDQIAMLSHRC

SEQ ID NO: 4093 - protein, 85 aa, Homo sapiens
FNTLTNSFQPSLLGRKILAAIIMKKDSEDMGVVVSLGTGNRCVKGDSLSLKGETVNDCHAEIISRRGFIRFLYSELMKYNSQTAK

SEQ ID NO: 4094 - protein, 85 aa, Homo sapiens
DSIFEPAKGGEKLQIKKTVSFHLYISTAPCGDGALFDKSCSDRAMESTESRHYPVFENPKQGKLRTKVENGEGTIPVESSDIVPT

SEQ ID NO: 4095 - protein, 85 aa, Homo sapiens
WDGIRLGERLRTMSCSDKILRWNVLGLQGALLTHFLQPIYLKSVTLGYLFSQGHLTRAICCRVTRDGSAFEDGLRHPFIVNHPKV

SEQ ID NO: 4096 - protein, 85 aa, Homo sapiens
GRVSIYDSKRQSGKTKETSVNWCLADGYDLEILDGTRGTVDGPRNELSRVSKKNIFLLFKKLCSFRYRRDLLRLSYGEAKKAARD

SEQ ID NO: 4097 - protein, 84 aa, Homo sapiens
RGTVDGPRNELSRVSKKNIFLLFKKLCSFRYRRDLLRLSYGEAKKAARDYETAKNYFKKGLKDMGYGNWISKPQEEKNFYLCPV

SEQ ID NO: 4098 - protein, 85 aa, Homo sapiens
IEFLKGQLPEAPVIGKQTPSLPPSLPGLRPRFPVLLASSTRGRQVDIRGVPRGVHLRSQGLQRGFQHPSPRGRSLPQRGVDCLSS

SEQ ID NO: 4099 - protein, 85 aa, Homo sapiens
HFQELSIYQDQEQRILKFLEELGEGKATTAHDLSGKLGTPKKEINRVLYSLAKKGKLQKEAGTPPLWKIAVSTQAWNQHSGVVRP

SEQ ID NO: 4100 - protein, 85 aa, Homo sapiens
DGHSQGAPNSDPSLEPEDRNSTSVSEDLLEPFIAVSAQAWNQHSGVVRPDSHSQGSPNSDPGLEPEDSNSTSALEDPLEFLDMAE

SEQ ID NO: 4101 - protein, 85 aa, Homo sapiens
IKEKICDYLFNVSDSSALNLAKNIGLTKARDINAVLIDMERQGDVYRQGTTPPIWHLTDKKRERMQIKRNTNSVPETAPAAIPET

SEQ ID NO: 4102 - protein, 85 aa, Homo sapiens
KRNAEFLTCNIPTSNASNNMVTTEKVENGQEPVIKLENRQEARPEPARLKPPVHYNGPSKAGYVDFENGQWATDDIPDDLNSIRA

SEQ ID NO: 4103 - protein, 85 aa, Homo sapiens
APGEFRAIMEMPSFYSHGLPRCSPYKKLTECQLKNPISGLLEYAQFASQTCEFNMIEQSGPPHEPRFKFQVVINGREFPPAEAGS

SEQ ID NO: 4104 - protein, 85 aa, Homo sapiens
KKVAKQDAAMKAMTILLEEAKAKDSGKSEESSHYSTEKESEKTAESQTPTPSATSFFSGKSPVTTLLECMHKLGNSCEFRLLSKE

SEQ ID NO: 4105 - protein, 85 aa, Homo sapiens
GPAHEPKFQYCVAVGAQTFPSVSAPSKKVAKQMAAEEAMKALHGEATNSMASDNQPEGMISESLDNLESMMPNKVRKIGELVRYL

SEQ ID NO: 4106 - protein, 85 aa, Homo sapiens
NTNPVGGLLEYARSHGFAAEFKLVDQSGPPHEPKFVYQAKVGGRWFPAVCAHSKKQGKQEAADAALRVLIGENEKAERMGFTEVT

SEQ ID NO: 4107 - protein, 85 aa, Homo sapiens
PVTGASLRRTMLLLSRSPEAQPKTLPLTGSTFHDQIAMLSHRCFNTLTNSFQPSLLGRKILAAIIMKKDSEDMGVVVSLGTGNRC

SEQ ID NO: 4108 - protein, 85 aa, Homo sapiens
VKGDSLSLKGETVNDCHAEIISRRGFIRFLYSELMKYNSQTAKDSIFEPAKGGEKLQIKKTVSFHLYISTAPCGDGALFDKSCSD

SEQ ID NO: 4109 - protein, 85 aa, Homo sapiens
RAMESTESRHYPVFENPKQGKLRTKVENGEGTIPVESSDIVPTWDGIRLGERLRTMSCSDKILRWNVLGLQGALLTHFLQPIYLK

SEQ ID NO: 4110 - protein, 85 aa, Homo sapiens
SVTLGYLFSQGHLTRAICCRVTRDGSAFEDGLRHPFIVNHPKVGRVSIYDSKRQSGKTKETSVNWCLADGYDLEILDGTRGTVDG

SEQ ID NO: 4111 - protein, 85 aa, Homo sapiens
RITERRRSAEDELAMRGFLQEGDLISAEVQAVFSDGAVSLHTRSLKYGKLGQGVLVQVSPSLVKRQKTHFHDLPCGASVILGNNG

SEQ ID NO: 4112 - protein, 85 aa, Homo sapiens
FIWIYPTPEHKEEEAGGFIANLEPVSLADREVISRLRNCIISLVTQRMMLYDTSILYCYEASLPHQIKDILKPEIMEEIVMETRQ

SEQ ID NO: 4113 - protein, 85 aa, Homo sapiens
GTYMGEEKLIASVAGSVERVNKLICVKALKTRYIGEVGDIVVGRITERRRSAEDELAMRGFLQEGDLISAEVQAVFSDGAVSLHT

SEQ ID NO: 4114 - protein, 85 aa, Homo sapiens
RSLKYGKLGQGVLVQVSPSLVKRQKTHFHDLPCGASVILGNNGFIWIYPTPEHKEEEAGGFIANLEPVSLADREVISRLRNCIIS

SEQ ID NO: 4115 - protein, 85 aa, Homo sapiens
EGVSALLARCPTAGLAGGLGVTACAAAGVLLYRIARRMKPTHTMVNCWFCNQDTLVPYGNRNCWDCPHCEQYNGFQENGDYNKPI

SEQ ID NO: 4116 - protein, 85 aa, Homo sapiens
PAQYLEHLNHVVSSAPSLRDPSQPQQWVSSQVLLCKRCNHHQTTKIKQLAAFAPREEGRYDEEVEVYRHHLEQMYKLCRPCQAAV

SEQ ID NO: 4117 - protein, 85 aa, Homo sapiens
EYYIKHQNRQLRALLLSHQFKRREADQTHAQNFSSAVKSPVQVILLRALAFLACAFLLTTALYGASGHFAPGTTVPLALPPGGNG

SEQ ID NO: 4118 - protein, 85 aa, Homo sapiens
SATPDNGTTPGAEGWRQLLGLLPEHMAEKLCEAWAFGQSHQTGVVALGLLTCLLAMLLAGRIRLRRIDAFCTCLWALLLGLHLAE

SEQ ID NO: 4119 - protein, 85 aa, Homo sapiens
QHLQAASPSWLDTLKFSTTSLCCLVGFTAAVATRKATGPRRFRPRRFFPGDSAGLFPTSPSLAIPHPSVGGSPASLFIPSPPSFL

SEQ ID NO: 4120 - protein, 85 aa, Homo sapiens
PLANQQLFRSPRRTSPSSLPGRLSRALSLGTIPSLTRADSGYLFSGSRPPSQVSRSGEFPVSDYFSLLSGSCPSSPLPSPAPSVA

SEQ ID NO: 4121 - protein, 85 aa, Homo sapiens
GSVASSSGSLRHRRPLISPARLNLKGQKLLLFPSPPGEAPTTPSSSDEHSPHNGSLFTMEPPHVPRKPPLQDVKHALDLRSKLER

SEQ ID NO: 4122 - protein, 84 aa, Homo sapiens
DVKHALDLRSKLERGSACSNRSIKKEDDSSQSSTCVVDTTTRGCSEEAATWRGRFGPSLVRGLLAVSLAANALFTSVFLYQSLR

SEQ ID NO: 4123 - protein, 85 aa, Homo sapiens
TMVNCWFCNQDTLVPYGNRNCWDCPHCEQYNGFQENGDYNKPIPAQYLEHLNHVVSSAPSLRDPSQPQQWVSSQVLLCKRCNHHQ

SEQ ID NO: 4124 - protein, 85 aa, Homo sapiens
TTKIKQLAAFAPREEGRYDEEVEVYRHHLEQMYKLCRPCQAAVEYYIKHQNRQLRALLLSHQFKRREADQTHAQNFSSAVKSPVQ

SEQ ID NO: 4125 - protein, 85 aa, Homo sapiens
VILLRALAFLACAFLLTTALYGASGHFAPGTTVPLALPPGGNGSATPDNGTTPGAEGWRQLLGLLPEHMAEKLCEAWAFGQSHQT

SEQ ID NO: 4126 - protein, 85 aa, Homo sapiens
GVVALGLLTCLLAMLLAGRIRLRRIDAFCTCLWALLLGLHLAEQHLQAASPSWLDTLKFSTTSLCCLVGFTAAVATRKATGPRRF

SEQ ID NO: 4127 - protein, 85 aa, Homo sapiens
RPRRFFPGDSAGLFPTSPSLAIPHPSVGGSPASLFIPSPPSFLPLANQQLFRSPRRTSPSSLPGRLSRALSLGTIPSLTRADSGY

SEQ ID NO: 4128 - protein, 85 aa, Homo sapiens
MFSGSRPPSQVSRSGEFPVSDYFSLLSGSCPSSPLPSPAPSVAGSVASSSGSLRHRRPLISPARLNLKGQKLLLFPSPPGEAPTT

SEQ ID NO: 4129 - protein, 85 aa, Homo sapiens
PSSSDEHSPHNGSLFTMEPPHVPRKPPLQDVKHALDLRSKLERGSACSNRSIKKEDDSSQSSTCVVDTTTRGCSEEAATWRGRFG

SEQ ID NO: 4130 - protein, 85 aa, Homo sapiens
PQNVAKTEPVSILQPQTTVNPDRIKQVKIIVPNSTAGLIIGKGGATVKAVMEQSGAWVQLSQKPDGINLQERVVTVSGEPEQNRK

SEQ ID NO: 4131 - protein, 85 aa, Homo sapiens
IKQVKIIVPNSTAGLIIGKGGATVKAVMEQSGAWVQLSQKPDGINLQERVVTVSGEPEQNRKAVELIIQKIQEDPQSGSCLNISY

SEQ ID NO: 4132 - protein, 85 aa, Homo sapiens
SRSSPSGKGHSRMAEPRFNNPYFWPPPPTMPSQLDNLVLINKIKEQLMAEKIRPPHLPPTSASSQQPLLVPPAPAESSQAVMSLP

SEQ ID NO: 4133 - protein, 85 aa, Homo sapiens
KLQQVPGLHPQAVPQPDVALHARPATSTVTGLGLSTRTPSVSTSESSAGAGTGTGTSTPSTPTTTSQSRLIASSPTLISGITSPP

SEQ ID NO: 4134 - protein, 85 aa, Homo sapiens
LLDSIKTIQGHGLLGPPKSERGRKKIKAENPGGPPVLVVPYPILASGETAKEGKTYRCKVCPLTFFTKSEMQIHSKSHTEAKPHK

SEQ ID NO: 4135 - protein, 85 aa, Homo sapiens
CPHCSKSFANASYLAQHLRIHLGVKPYHCSYCDKSFRQLSHLQQHTRIHTGDRPYKCPHPGCEKAFTQLSNLQSHQRQHNKDKPY

SEQ ID NO: 4136 - protein, 84 aa, Homo sapiens
KDKPYKCPNCYRAYSDSASLQIHLSAHAIKHAKAYCCSMCGRAYTSETYLMKHMSKHTVVEHLVSHHSPQRTESPGIPVRISLI

SEQ ID NO: 4137 - protein, 85 aa, Homo sapiens
IKEQLMAEKIRPPHLPPTSASSQQPLLVPPAPAESSQAVMSLPKLQQVPGLHPQAVPQPDVALHARPATSTVTGLGLSTRTPSVS

SEQ ID NO: 4138 - protein, 85 aa, Homo sapiens
TSESSAGAGTGTGTSTPSTPTTTSQSRLIASSPTLISGITSPPLLDSIKTIQGHGLLGPPKSERGRKKIKAENPGGPPVLVVPYP

SEQ ID NO: 4139 - protein, 85 aa, Homo sapiens
ILASGETAKEGKTYRCKVCPLTFFTKSEMQIHSKSHTEAKPHKCPHCSKSFANASYLAQHLRIHLGVKPYHCSYCDKSFRQLSHL

SEQ ID NO: 4140 - protein, 85 aa, Homo sapiens
QQHTRIHTGDRPYKCPHPGCEKAFTQLSNLQSHQRQHNKDKPYKCPNCYRAYSDSASLQIHLSAHAIKHAKAYCCSMCGRAYTSE

SEQ ID NO: 4141 - protein, 85 aa, Homo sapiens
FQGQRGWFCGSVSQDLRQFWVAEGGTISDPRAADFLFSCDASHPDTLRIYQSLDYIEDNATVFHAYYLSAVANAKIKNSVALGHF

SEQ ID NO: 4142 - protein, 85 aa, Homo sapiens
ILPPACLQKEIRRKIGSFIWEQDQHFLIEKHDEVTPNEIKTLRENSELATEHKKELSKSPEKHFIRTPVVEKQMYFPLQNYPVNN

SEQ ID NO: 4143 - protein, 84 aa, Homo sapiens
EHKKELSKSPEKHFIRTPVVEKQMYFPLQNYPVNNMVTGYISIDAMKKFLGELHDFIPGTSGYLAYHVQNEINMSAIKNKLKRK

SEQ ID NO: 4144 - protein, 85 aa, Homo sapiens
HPDTLRIYQSLDYIEDNATVFHAYYLSAVANAKIKNSVALGHFILPPACLQKEIRRKIGSFIWEQDQHFLIEKHDEVTPNEIKTL

SEQ ID NO: 4145 - protein, 85 aa, Homo sapiens
RENSELATEHKKELSKSPEKHFIRTPVVEKQMYFPLQNYPVNNMVTGYISIDAMKKFLGELHDFIPGTSGYLAYHVQNEINMSAI

SEQ ID NO: 4146 - protein, 85 aa, Homo sapiens
EIKKQITGMRRLLNDSTGRIYQRVGKEGEKLKEEPQDLDLVWPPRLNSSAEAPQSLHPSSRGVWNELPPQSGQFSGQYGTRSRTF

SEQ ID NO: 4147 - protein, 85 aa, Homo sapiens
QSQPHPTTSSNGELPVVNSSAGSNCCTCNCQSTLQAILQELKTMRKLMQIQAVGTQNRQQPPISLICSQRTAVSRKRNKKKKVPP

SEQ ID NO: 4148 - protein, 85 aa, Homo sapiens
KTVEPLTVKQKPSGSEMEKKSVVASELSALQAAEHTSPEESRVLGFGIVLESPSSDPEVQLAEGFDVFMPKSQLDSILSNYTRSG

SEQ ID NO: 4149 - protein, 85 aa, Homo sapiens
SLLFRKLVCAFFDDKTLANSLPNGKRKRGLNDNRKGLDQNIVGAIKVFTEKYCTANHVDKLPGPRDWVQILQDQIKLARRRLKRG

SEQ ID NO: 4150 - protein, 85 aa, Homo sapiens
SAEIADSDERLDGIALPPTGACGGPCTVLPGGSAAVTLVLQSSPQTMSQEKGQMAEPWEEQHLVLLNNLTRDRAETGALSQTSQD

SEQ ID NO: 4151 - protein, 84 aa, Homo sapiens
PQTMSQEKGQMAEPWEEQHLVLLNNLTRDRAETGALSQTSQDFKHHSFLITQVSATLHHQRGIRNFPTPGSAKSLTLHISCLSL

SEQ ID NO: 4152 - protein, 85 aa, Homo sapiens
PPRLNSSAEAPQSLHPSSRGVWNELPPQSGQFSGQYGTRSRTFQSQPHPTTSSNGELPVVNSSAGSNCCTCNCQSTLQAILQELK

SEQ ID NO: 4153 - protein, 85 aa, Homo sapiens
TMRKLMQIQAVGTQNRQQPPISLICSQRTAVSRKRNKKKKVPPKTVEPLTVKQKPSGSEMEKKSVVASELSALQAAEHTSPEESR

SEQ ID NO: 4154 - protein, 85 aa, Homo sapiens
VLGFGIVLESPSSDPEVQLAEGFDVFMPKSQLDSILSNYTRSGSLLFRKLVCAFFDDKTLANSLPNGKRKRGLNDNRKGLDQNIV

SEQ ID NO: 4155 - protein, 85 aa, Homo sapiens
GAIKVFTEKYCTANHVDKLPGPRDWVQILQDQIKLARRRLKRGSAEIADSDERLDGIALPPTGACGGPCTVLPGGSAAVTLVLQS

SEQ ID NO: 4156 - protein, 85 aa, Homo sapiens
SPQTMSQEKGQMAEPWEEQHLVLLNNLTRDRAETGALSQTSQDFKHHSFLITQVSATLHHQRGIRNFPTPGSAKSLTLHISCLSL

SEQ ID NO: 4157 - protein, 85 aa, Homo sapiens
EKYVAAMVLSAAGDALGYYNGKWEFLQDGEKIHRQLAQLGGLDALDVGRWRVSDDTVMHLATAEALVEAGKAPKLTQLYYLLAKH

SEQ ID NO: 4158 - protein, 85 aa, Homo sapiens
YQDCMEDMDGRAPGGASVHNAMQLKPGKPNGWRIPFNSHEGGCGAAMRAMCIGLRFPHHSQLDTLIQVSIESGRMTHHHPTGYLG

SEQ ID NO: 4159 - protein, 85 aa, Homo sapiens
ALASALFTAYAVNSRPPLQWGKGLMELLPEAKKYIVQSGYFVEENLQHWSYFQTKWENYLKLRGILDGESAPTFPESFGVKERDQ

SEQ ID NO: 4160 - protein, 85 aa, Homo sapiens
FYTSLSYSGWGGSSGHDAPMIAYDAVLAAGDSWKELAHRAFFHGGDSDSTAAIAGCWWGVMYGFKGVSPSNYEKLEYRNRLEETA

SEQ ID NO: 4161 - protein, 84 aa, Homo sapiens
APMIAYDAVLAAGDSWKELAHRAFFHGGDSDSTAAIAGCWWGVMYGFKGVSPSNYEKLEYRNRLEETARALYSLGSKEDTVISL

SEQ ID NO: 4162 - protein, 85 aa, Homo sapiens
DALDVGRWRVSDDTVMHLATAEALVEAGKAPKLTQLYYLLAKHYQDCMEDMDGRAPGGASVHNAMQLKPGKPNGWRIPFNSHEGG

SEQ ID NO: 4163 - protein, 85 aa, Homo sapiens
CGAAMRAMCIGLRFPHHSQLDTLIQVSIESGRMTHHHPTGYLGALASALFTAYAVNSRPPLQWGKGLMELLPEAKKYIVQSGYFV

SEQ ID NO: 4164 - protein, 85 aa, Homo sapiens
EENLQHWSYFQTKWENYLKLRGILDGESAPTFPESFGVKERDQFYTSLSYSGWGGSSGHDAPMIAYDAVLAAGDSWKELAHRAFF

SEQ ID NO: 4165 - protein, 85 aa, Homo sapiens
LQKPKSVKLRALRSPRKFGVAGRSCQEVLRKGCLRFQLPERGSRLCLYEDGTELTEDYFPSVPDNAELVLLTLGQAWQGCEWQGL

SEQ ID NO: 4166 - protein, 85 aa, Homo sapiens
WRMCLLLDRHLLFVPLVADVSDIRRFLSAFHEPQVGLIQAAQQLLCDEQAPQRQRLLADLLHNVSQNIAAETRAEDPPWFEGLES

SEQ ID NO: 4167 - protein, 85 aa, Homo sapiens
RFQSKSGYLRYSCESRIRSYLREVSSYPSTVGAEAQEEFLRVLGSMCQRLRSMQYNGSYFDRGAKGGSRLCTPEGWFSCQGPFDM

SEQ ID NO: 4168 - protein, 85 aa, Homo sapiens
DSCLSRHSINPYSNRESRILFSTWNLDHIIEKKRTIIPTLVEAIKEQDGREVDWEYFYGLLFTSENLKLVHIVCHKKTTHKLNCD

SEQ ID NO: 4169 - protein, 84 aa, Homo sapiens
TWNLDHIIEKKRTIIPTLVEAIKEQDGREVDWEYFYGLLFTSENLKLVHIVCHKKTTHKLNCDPSRIYKPQTRLKRKQPVRKRQ

SEQ ID NO: 4170 - protein, 85 aa, Homo sapiens
SRLCLYEDGTELTEDYFPSVPDNAELVLLTLGQAWQGCEWQGLWRMCLLLDRHLLFVPLVADVSDIRRFLSAFHEPQVGLIQAAQ

SEQ ID NO: 4171 - protein, 85 aa, Homo sapiens
QLLCDEQAPQRQRLLADLLHNVSQNIAAETRAEDPPWFEGLESRFQSKSGYLRYSCESRIRSYLREVSSYPSTVGAEAQEEFLRV

SEQ ID NO: 4172 - protein, 85 aa, Homo sapiens
LGSMCQRLRSMQYNGSYFDRGAKGGSRLCTPEGWFSCQGPFDMDSCLSRHSINPYSNRESRILFSTWNLDHIIEKKRTIIPTLVE

SEQ ID NO: 4173 - protein, 85 aa, Homo sapiens
GRNKKKKRDGDDRRPRLVLSFDEEKRREYLTGFHKRKVERKKAAIEEIKQRLKEEQRKLREERHQEYLKMLAEREEALEEADELD

SEQ ID NO: 4174 - protein, 85 aa, Homo sapiens
RLVTAKTESVQYDHPNHTVTVTTISDLDLSGARLLGLTPPEGGAGDRSEEEASSTEKPTKALPRKSRDPLLSQRISSLTASLHAH

SEQ ID NO: 4175 - protein, 84 aa, Homo sapiens
AGDRSEEEASSTEKPTKALPRKSRDPLLSQRISSLTASLHAHSRKKVKRKHPRRAQDSKKPPRAPRTSKAQRRRLTGKARHSGE

SEQ ID NO: 4176 - protein, 85 aa, Homo sapiens
AAIEEIKQRLKEEQRKLREERHQEYLKMLAEREEALEEADELDRLVTAKTESVQYDHPNHTVTVTTISDLDLSGARLLGLTPPEG

SEQ ID NO: 4177 - protein, 85 aa, Homo sapiens
GAGDRSEEEASSTEKPTKALPRKSRDPLLSQRISSLTASLHAHSRKKVKRKHPRRAQDSKKPPRAPRTSKAQRRRLTGKARHSGE

SEQ ID NO: 4178 - protein, 85 aa, Homo sapiens
TTDVVSEEVLVADCASEAVIDANGIPVDQQDDDKGNCEDYLMISCGTVDIVESEPENDHGVELLDQNSSIRVPREKMVYMTVNDS

SEQ ID NO: 4179 - protein, 85 aa, Homo sapiens
QPEDEDLNVAEIADEVYMEVIVGEEDAAAAAAAAAVHEQQMDDNEIKTFMPIAWAAAYGNNSDGIENRNGTASALLHIDESAGLG

SEQ ID NO: 4180 - protein, 85 aa, Homo sapiens
RLAKQKPKKRRRPDSRQYQTAIIIGPDGHPLTVYPCMICGKKFKSRGFLKRHMKNHPEHLAKKKYRCTDCDYTTNKKISLHNHLE

SEQ ID NO: 4181 - protein, 85 aa, Homo sapiens
SHKLTSKAEKAIECDECGKHFSHAGALFTHKMVHKEKGANKMHKCKFCEYETAEQGLLNRHLLAVHSKNFPHICVECGKGFRHPS

SEQ ID NO: 4182 - protein, 85 aa, Homo sapiens
ELKKHMRIHTGEKPYQCQYCEYRSADSSNLKTHVKTKHSKEMPFKCDICLLTFSDTKEVQQHALIHQESKTHQCLHCDHKSSNSS

SEQ ID NO: 4183 - protein, 85 aa, Homo sapiens
DLKRHIISVHTKDYPHKCDMCDKGFHRPSELKKHVAAHKGKKMHQCRHCDFKIADPFVLSRHILSVHTKDLPFRCKRCRKGFRQQ

SEQ ID NO: 4184 - protein, 85 aa, Homo sapiens
ISCGTVDIVESEPENDHGVELLDQNSSIRVPREKMVYMTVNDSQPEDEDLNVAEIADEVYMEVIVGEEDAAAAAAAAAVHEQQMD

SEQ ID NO: 4185 - protein, 85 aa, Homo sapiens
DNEIKTFMPIAWAAAYGNNSDGIENRNGTASALLHIDESAGLGRLAKQKPKKRRRPDSRQYQTAIIIGPDGHPLTVYPCMICGKK

SEQ ID NO: 4186 - protein, 85 aa, Homo sapiens
FKSRGFLKRHMKNHPEHLAKKKYRCTDCDYTTNKKISLHNHLESHKLTSKAEKAIECDECGKHFSHAGALFTHKMVHKEKGANKM

SEQ ID NO: 4187 - protein, 85 aa, Homo sapiens
HKCKFCEYETAEQGLLNRHLLAVHSKNFPHICVECGKGFRHPSELKKHMRIHTGEKPYQCQYCEYRSADSSNLKTHVKTKHSKEM

SEQ ID NO: 4188 - protein, 85 aa, Homo sapiens
PFKCDICLLTFSDTKEVQQHALIHQESKTHQCLHCDHKSSNSSDLKRHIISVHTKDYPHKCDMCDKGFHRPSELKKHVAAHKGKK

SEQ ID NO: 4189 - protein, 85 aa, Homo sapiens
MHQCRHCDFKIADPFVLSRHILSVHTKDLPFRCKRCRKGFRQQSELKKHMKTHSGRKVYQCEYCEYSTTDASGFKRHVISIHTKD

SEQ ID NO: 4190 - protein, 85 aa, Homo sapiens
ESQGVPPGPYRATKLWNEVTTSFRAGMPLRKHRQHFKKYGNCFTAGEAVDWLYDLLRNNSNFGPEVTRQQTIQLLRKFLKNHVIE

SEQ ID NO: 4191 - protein, 85 aa, Homo sapiens
DIKGRWGSENVDDNNQLFRFPATSPLKTLPRRYPELRKNNIENFSKDKDSIFKLRNLSRRTPKRHGLHLSQENGEKIKHEIINED

SEQ ID NO: 4192 - protein, 85 aa, Homo sapiens
QENAIDNRELSQEDVEEVWRYVILIYLQTILGVPSLEEVINPKQVIPQYIMYNMANTSKRGVVILQNKSDDLPHWVLSAMKCLAN

SEQ ID NO: 4193 - protein, 85 aa, Homo sapiens
WPRSNDMNNPTYVGFERDVFRTIADYFLDLPEPLLTFEYYELFVNILGLLQPHLERVAIDALQLCCLLLPPPNRRKLQLLMRMIS

SEQ ID NO: 4194 - protein, 85 aa, Homo sapiens
RMSQNVDMPKLHDAMGTRSLMIHTFSRCVLCCAEEVDLDELLAGRLVSFLMDHHQEILQVPSYLQTAVEKHLDYLKKGHIENPGD

SEQ ID NO: 4195 - protein, 85 aa, Homo sapiens
GLFAPLPTYSYCKQISAQEFDEQKVSTSQAAIAELLENIIKNRSLPLKEKRKKLKQFQKEYPLIYQKRFPTTESEAALFGDKPTI

SEQ ID NO: 4196 - protein, 84 aa, Homo sapiens
QEFDEQKVSTSQAAIAELLENIIKNRSLPLKEKRKKLKQFQKEYPLIYQKRFPTTESEAALFGDKPTIKQPMLILRKPKFRSLR

SEQ ID NO: 4197 - protein, 85 aa, Homo sapiens
FTAGEAVDWLYDLLRNNSNFGPEVTRQQTIQLLRKFLKNHVIEDIKGRWGSENVDDNNQLFRFPATSPLKTLPRRYPELRKNNIE

SEQ ID NO: 4198 - protein, 85 aa, Homo sapiens
NFSKDKDSIFKLRNLSRRTPKRHGLHLSQENGEKIKHEIINEDQENAIDNRELSQEDVEEVWRYVILIYLQTILGVPSLEEVINP

SEQ ID NO: 4199 - protein, 85 aa, Homo sapiens
KQVIPQYIMYNMANTSKRGVVILQNKSDDLPHWVLSAMKCLANWPRSNDMNNPTYVGFERDVFRTIADYFLDLPEPLLTFEYYEL

SEQ ID NO: 4200 - protein, 85 aa, Homo sapiens
FVNILGLLQPHLERVAIDALQLCCLLLPPPNRRKLQLLMRMISRMSQNVDMPKLHDAMGTRSLMIHTFSRCVLCCAEEVDLDELL

SEQ ID NO: 4201 - protein, 85 aa, Homo sapiens
AGRLVSFLMDHHQEILQVPSYLQTAVEKHLDYLKKGHIENPGDGLFAPLPTYSYCKQISAQEFDEQKVSTSQAAIAELLENIIKN

SEQ ID NO: 4202 - protein, 85 aa, Homo sapiens
SKYKLIMLRHGEGAWNKENRFCSWVDQKLNSEGMEEARNCGKQLKALNFEFDLVFTSVLNRSIHTAWLILEELGQEWVPVESSWR

SEQ ID NO: 4203 - protein, 85 aa, Homo sapiens
LNERHYGALIGLNREQMALNHGEEQVRLWRRSYNVTPPPIEESHPYYQEIYNDRRYKVCDVPLDQLPRSESLKDVLERLLPYWNE

SEQ ID NO: 4204 - protein, 85 aa, Homo sapiens
RIAPEVLRGKTILISAHGNSSRALLKHLEGISDEDIINITLPTGVPILLELDENLRAVGPHQFLGDQEAIQAAIKKVEDQGKVKQ

SEQ ID NO: 4205 - protein, 84 aa, Homo sapiens
EVLRGKTILISAHGNSSRALLKHLEGISDEDIINITLPTGVPILLELDENLRAVGPHQFLGDQEAIQAAIKKVEDQGKVKQAKK

SEQ ID NO: 4206 - protein, 85 aa, Homo sapiens
QLKALNFEFDLVFTSVLNRSIHTAWLILEELGQEWVPVESSWRLNERHYGALIGLNREQMALNHGEEQVRLWRRSYNVTPPPIEE

SEQ ID NO: 4207 - protein, 85 aa, Homo sapiens
SHPYYQEIYNDRRYKVCDVPLDQLPRSESLKDVLERLLPYWNERIAPEVLRGKTILISAHGNSSRALLKHLEGISDEDIINITLP

SEQ ID NO: 4208 - protein, 85 aa, Homo sapiens
EQPTSSTNGEKTKSPCESNNKKNDEMQEVPNRVLAPEQSLKNTKTSEYPIIFVYYLRKGKKINSNQLENEQSQENSINPIQKEED

SEQ ID NO: 4209 - protein, 84 aa, Homo sapiens
RKGKKINSNQLENEQSQENSINPIQKEEDEGVDLSEGSSNEDEDLGPCEGPSKEDKDLDSSEGSSQEDEDLGLSEGSSQDSGED

SEQ ID NO: 4210 - protein, 85 aa, Homo sapiens
TKTSEYPIIFVYYLRKGKKINSNQLENEQSQENSINPIQKEEDEGVDLSEGSSNEDEDLGPCEGPSKEDKDLDSSEGSSQEDEDL

SEQ ID NO: 4211 - protein, 85 aa, Homo sapiens
ARDLIGPALPPGFKARGTAEDEERDPSPGPALPPNYKSSSSDSSDSDEDSSSLYEEGNQESEEDDSGPTARKQRKNQDDDDDDDD

SEQ ID NO: 4212 - protein, 85 aa, Homo sapiens
GFFGPALPPGFKKQDDSPPRPIIGPALPPGFIKSTQKSDKGRDDPGQQETDSSEDEDIIGPMPAKGPVNYNVTTEFEKRAQRMKE

SEQ ID NO: 4213 - protein, 85 aa, Homo sapiens
KLTKGDDDSSKPIVRESWMTELPPEMKDFGLGPRTFKRRADDTSGDRSIWTDTPADRERKAKETQEARKSSSKKDEEHILSGRDK

SEQ ID NO: 4214 - protein, 84 aa, Homo sapiens
DKRLAEQVSSYNESKRSESLMDIHHKKLKSKAAEDKNKPQERIPFDRDKDLKVNRFDEAQKKALIKKSRELNTRFSHGKGNMFL

SEQ ID NO: 4215 - protein, 85 aa, Homo sapiens
SSDSDEDSSSLYEEGNQESEEDDSGPTARKQRKNQDDDDDDDDGFFGPALPPGFKKQDDSPPRPIIGPALPPGFIKSTQKSDKGR

SEQ ID NO: 4216 - protein, 85 aa, Homo sapiens
DDPGQQETDSSEDEDIIGPMPAKGPVNYNVTTEFEKRAQRMKEKLTKGDDDSSKPIVRESWMTELPPEMKDFGLGPRTFKRRADD

SEQ ID NO: 4217 - protein, 85 aa, Homo sapiens
TSGDRSIWTDTPADRERKAKETQEARKSSSKKDEEHILSGRDKRLAEQVSSYNESKRSESLMDIHHKKLKSKAAEDKNKPQERIP

SEQ ID NO: 4218 - protein, 85 aa, Homo sapiens
SGLDGVKRTTPLQTHSIIISDQVPSDQDAHQYLRLRDQSEATQVMAEPGEGGSETVALPPPPPSEEGGVPQDAAGRGGTPQIRVV

SEQ ID NO: 4219 - protein, 85 aa, Homo sapiens
GGRGHVAIKAGQEEGQPPAEGLAAASVVMAADRSLKKGVQGGEKALEICGAQRSASELTAGAEAEAEEVKTGKCATVSAAVAERE

SEQ ID NO: 4220 - protein, 85 aa, Homo sapiens
SAEVVKEGLAEKEVMEEQMEVEEQPPEGEEIEVAEEDRLEEEAREEEGPWPLHEALRMDPLEAIQLELDTVNAQADRAFQQLEHK

SEQ ID NO: 4221 - protein, 85 aa, Homo sapiens
FGRMRRHYLERRNYIIQNIPGFWMTAFRNHPQLSAMIRGQDAEMLRYITNLEVKELRHPRTGCKFKFFFRRNPYFRNKLIVKEYE

SEQ ID NO: 4222 - protein, 85 aa, Homo sapiens
VRSSGRVVSLSTPIIWRRGHEPQSFIRRNQDLICSFFTWFSDHSLPESDKIAEIIKEDLWPNPLQYYLLREGVRRARRRPLREPV

SEQ ID NO: 4223 - protein, 84 aa, Homo sapiens
PIIWRRGHEPQSFIRRNQDLICSFFTWFSDHSLPESDKIAEIIKEDLWPNPLQYYLLREGVRRARRRPLREPVEIPRPFGFQSG

SEQ ID NO: 4224 - protein, 85 aa, Homo sapiens
QVMAEPGEGGSETVALPPPPPSEEGGVPQDAAGRGGTPQIRVVGGRGHVAIKAGQEEGQPPAEGLAAASVVMAADRSLKKGVQGG

SEQ ID NO: 4225 - protein, 85 aa, Homo sapiens
EKALEICGAQRSASELTAGAEAEAEEVKTGKCATVSAAVAERESAEVVKEGLAEKEVMEEQMEVEEQPPEGEEIEVAEEDRLEEE

SEQ ID NO: 4226 - protein, 85 aa, Homo sapiens
AREEEGPWPLHEALRMDPLEAIQLELDTVNAQADRAFQQLEHKFGRMRRHYLERRNYIIQNIPGFWMTAFRNHPQLSAMIRGQDA

SEQ ID NO: 4227 - protein, 85 aa, Homo sapiens
EMLRYITNLEVKELRHPRTGCKFKFFFRRNPYFRNKLIVKEYEVRSSGRVVSLSTPIIWRRGHEPQSFIRRNQDLICSFFTWFSD

SEQ ID NO: 4228 - protein, 85 aa, Homo sapiens
FLLPACLYPFASCCAHTFSSMSPRMRHICYFLDYGALSLYSLVSWSWKALGSVRSSAQEPSPIHSCSTTSHSFIGSGCAGAGATA

SEQ ID NO: 4229 - protein, 84 aa, Homo sapiens
LYPFASCCAHTFSSMSPRMRHICYFLDYGALSLYSLVSWSWKALGSVRSSAQEPSPIHSCSTTSHSFIGSGCAGAGATAVGRRP

SEQ ID NO: 4230 - protein, 85 aa, Homo sapiens
AASRSTRVTRSTVGLNGLDESFCGRTLRNRSIAHPEEISSNSQVRSRSPKKRPEPVPIQKGNNNGRTTDLKQQSTRESWVSPRKR

SEQ ID NO: 4231 - protein, 85 aa, Homo sapiens
GLSSSEKDNIERQAIENCERRQTEPVSPVLKRIKRCLRSEAPNSSEEDSPIKSDKESVEQRSTVVDNDADFQGTKRACRCLILDD

SEQ ID NO: 4232 - protein, 85 aa, Homo sapiens
CEKREIKKVNVSEEGPLNSAVVEEITGYLAVNGVDDSDSAVINCDDCQPDGNTKQNSIGSYVLQEKSVAENGDTDTQTSMFLDSR

SEQ ID NO: 4233 - protein, 85 aa, Homo sapiens
KEDSYIDHKVPCTDSQVQVKLEDHKIVTACLPVEHVNQLTTEPATGPFSETQSSLRDSEEEVDVVGDSSASKEQCKENTNNELDT

SEQ ID NO: 4234 - protein, 85 aa, Homo sapiens
SLESMPASGEPEPSPVLDCVSAQMMSLSEPQEHRYTLRTSPRRAAPTRGSPTKNSSPYRENGQFEENNLSPNETNATVSDNVSQS

SEQ ID NO: 4235 - protein, 85 aa, Homo sapiens
PTNPGEISQNEKGICCDSQNNGSEGVSKPPSEARLNIGHLPSAKESASQHITEEEDDDPDVYYFESDHVALKHNKDYQRLLQTIA

SEQ ID NO: 4236 - protein, 85 aa, Homo sapiens
VLEAQRSQAVQDLESLGRHQREALKNPIGFVEKLQKKADIGLPYPQRVVQLPEIVWDQYTHSLGNFEREFKNRKRHTRRVKLVFD

SEQ ID NO: 4237 - protein, 85 aa, Homo sapiens
KVGLPARPKSPLDPKKDGESLSYSMLPLSDGPEGSSSRPQMIRGRLCDDTKPETFNQLWTVEEQKKLEQLLIKYPPEEVESRRWQ

SEQ ID NO: 4238 - protein, 85 aa, Homo sapiens
KIADELGNRTAKQVASRVQKYFIKLTKAGIPVPGRTPNLYIYSKKSSTSRRQHPLNKHLFKPSTFMTSHEPPVYMDEDDDRSCFH

SEQ ID NO: 4239 - protein, 85 aa, Homo sapiens
SHMNTAVEDASDDESIPIMYRNLPEYKELLQFKKLKKQKLQQMQAESGFVQHVGFKCDNCGIEPIQGVRWHCQDCPPEMSLDFCD

SEQ ID NO: 4240 - protein, 85 aa, Homo sapiens
QVRSRSPKKRPEPVPIQKGNNNGRTTDLKQQSTRESWVSPRKRGLSSSEKDNIERQAIENCERRQTEPVSPVLKRIKRCLRSEAP

SEQ ID NO: 4241 - protein, 85 aa, Homo sapiens
NSSEEDSPIKSDKESVEQRSTVVDNDADFQGTKRACRCLILDDCEKREIKKVNVSEEGPLNSAVVEEITGYLAVNGVDDSDSAVI

SEQ ID NO: 4242 - protein, 85 aa, Homo sapiens
NCDDCQPDGNTKQNSIGSYVLQEKSVAENGDTDTQTSMFLDSRKEDSYIDHKVPCTDSQVQVKLEDHKIVTACLPVEHVNQLTTE

SEQ ID NO: 4243 - protein, 85 aa, Homo sapiens
PATGPFSETQSSLRDSEEEVDVVGDSSASKEQCKENTNNELDTSLESMPASGEPEPSPVLDCVSAQMMSLSEPQEHRYTLRTSPR

SEQ ID NO: 4244 - protein, 85 aa, Homo sapiens
RAAPTRGSPTKNSSPYRENGQFEENNLSPNETNATVSDNVSQSPTNPGEISQNEKGICCDSQNNGSEGVSKPPSEARLNIGHLPS

SEQ ID NO: 4245 - protein, 85 aa, Homo sapiens
AKESASQHITEEEDDDPDVYYFESDHVALKHNKDYQRLLQTIAVLEAQRSQAVQDLESLGRHQREALKNPIGFVEKLQKKADIGL

SEQ ID NO: 4246 - protein, 85 aa, Homo sapiens
PYPQRVVQLPEIVWDQYTHSLGNFEREFKNRKRHTRRVKLVFDKVGLPARPKSPLDPKKDGESLSYSMLPLSDGPEGSSSRPQMI

SEQ ID NO: 4247 - protein, 85 aa, Homo sapiens
RGRLCDDTKPETFNQLWTVEEQKKLEQLLIKYPPEEVESRRWQKIADELGNRTAKQVASRVQKYFIKLTKAGIPVPGRTPNLYIY

SEQ ID NO: 4248 - protein, 85 aa, Homo sapiens
SKKSSTSRRQHPLNKHLFKPSTFMTSHEPPVYMDEDDDRSCFHSHMNTAVEDASDDESIPIMYRNLPEYKELLQFKKLKKQKLQQ

SEQ ID NO: 4249 - protein, 85 aa, Homo sapiens
MQAESGFVQHVGFKCDNCGIEPIQGVRWHCQDCPPEMSLDFCDSCSDCLHETDIHKEDHQLEPIYRSETFLDRDYCVSQGTSYNY

SEQ ID NO: 4250 - protein, 85 aa, Homo sapiens
GQESSKPVWPNPTGGYQSNTGRRYGRRHAYVSFRPPTSQRERIASQRKTNSEVPMHRSAPSQTTKRSRSPFSTTRRSWDDSESSG

SEQ ID NO: 4251 - protein, 85 aa, Homo sapiens
TNLNIDNEDYSSTSRWRDTANDNEGHSDGLARRGRGESSSGYPEPKYPEDKREARSDQVKPEKVPRRRRTMADPDFWTHSDDYYK

SEQ ID NO: 4252 - protein, 85 aa, Homo sapiens
YCDEDSDSDKEWIAALRRKYRSREQTLSSSGESWETLPGKEEREPPQAKVSASTGTSPGPGASASAGAGAGASAGSNGSNYLEEV

SEQ ID NO: 4253 - protein, 85 aa, Homo sapiens
REPSLQEEQASLEEGEIPWLQYHENDSSSEGDNDSGHELMQPGVFMLDGNNNLEDDSSVSEDLEVDWSLFDGFADGLGVAEAISY

SEQ ID NO: 4254 - protein, 85 aa, Homo sapiens
VDPQFLTYMALEERLAQAMETALAHLESLAVDVEVANPPASKESIDALPEILVTEDHGAVGQEMCCPICCSEYVKGEVATELPCH

SEQ ID NO: 4255 - protein, 84 aa, Homo sapiens
VDVEVANPPASKESIDALPEILVTEDHGAVGQEMCCPICCSEYVKGEVATELPCHHYFHKPCVSIWLQKSGTCPVCRCMFPPPL

SEQ ID NO: 4256 - protein, 85 aa, Homo sapiens
IASQRKTNSEVPMHRSAPSQTTKRSRSPFSTTRRSWDDSESSGTNLNIDNEDYSSTSRWRDTANDNEGHSDGLARRGRGESSSGY

SEQ ID NO: 4257 - protein, 85 aa, Homo sapiens
PEPKYPEDKREARSDQVKPEKVPRRRRTMADPDFWTHSDDYYKYCDEDSDSDKEWIAALRRKYRSREQTLSSSGESWETLPGKEE

SEQ ID NO: 4258 - protein, 85 aa, Homo sapiens
REPPQAKVSASTGTSPGPGASASAGAGAGASAGSNGSNYLEEVREPSLQEEQASLEEGEIPWLQYHENDSSSEGDNDSGHELMQP

SEQ ID NO: 4259 - protein, 85 aa, Homo sapiens
GVFMLDGNNNLEDDSSVSEDLEVDWSLFDGFADGLGVAEAISYVDPQFLTYMALEERLAQAMETALAHLESLAVDVEVANPPASK

SEQ ID NO: 4260 - protein, 84 aa, Homo sapiens
MLAMLLAGRIRLRRIDAFCTCLWALLLGLHLAEQHLQAASPSWLDTLKFSTTSLCCLVGFTAAVATRKATGPRRFRPRRSEKQP

SEQ ID NO: 4261 - protein, 12 aa, Homo sapiens
FRTRKKTSLALS

SEQ ID NO: 4262 - protein, 28 aa, Homo sapiens
WTIFRISKMIWKNRKGAYRNLALSPTNY

SEQ ID NO: 4263 - protein, 11 aa, Homo sapiens
FSSRRIEPMSC

SEQ ID NO: 4264 - protein, 21 aa, Homo sapiens
SANSRLHYRLEFLIMKPLPRV

SEQ ID NO: 4265 - protein, 8 aa, Homo sapiens
RKSKECRI

SEQ ID NO: 4266 - protein, 12 aa, Homo sapiens
FCTQSLLMGNVF

SEQ ID NO: 4267 - protein, 28 aa, Homo sapiens
YHCNKQGPSLMKCSSKKKCFCGNKAATS

SEQ ID NO: 4268 - protein, 34 aa, Homo sapiens
QIPWRNYELSKRSFRSLSRITMKSSMQNKCVARN

SEQ ID NO: 4269 - protein, 5 aa, Homo sapiens
ATSSP

SEQ ID NO: 4270 - protein, 27 aa, Homo sapiens
AKHLRLNTSWERSTTGGSISWTSLQPG

SEQ ID NO: 4271 - protein, 55 aa, Homo sapiens
RSTVQVLHLSSTCVKSCCTTVTPVPLMPSVTLYSRLRETWTGGGETFVLCPWKGG

SEQ ID NO: 4272 - protein, 10 aa, Homo sapiens
GQLLFPALLG

SEQ ID NO: 4273 - protein, 41 aa, Homo sapiens
ILLASVRSLRLRGTAFWSGSQRWICSSLILNIFLSVMFKLK

SEQ ID NO: 4274 - protein, 20 aa, Homo sapiens
MSSDGTARRSSGVWKDTIRN

SEQ ID NO: 4275 - protein, 52 aa, Homo sapiens
RLVWTPSPWSGITTMTSVGTWSLQCPELCPLRMKKVRMTKISTSGELLAYQM

SEQ ID NO: 4276 - protein, 29 aa, Homo sapiens
NWAKPWMIAVFRYSKPKISFAAKLPRGRS

SEQ ID NO: 4277 - protein, 7 aa, Homo sapiens
SFSRPRH

SEQ ID NO: 4278 - protein, 20 aa, Homo sapiens
MSSPRLTARRAGTCRIACRR

SEQ ID NO: 4279 - protein, 6 aa, Homo sapiens
TNSLCK

SEQ ID NO: 4280 - protein, 15 aa, Homo sapiens
QCLTNGVVTKWPLTR

SEQ ID NO: 4281 - protein, 4 aa, Homo sapiens
KKST

SEQ ID NO: 4282 - protein, 13 aa, Homo sapiens
KIPSFFSMSWESN

SEQ ID NO: 4283 - protein, 19 aa, Homo sapiens
THLTSPQSRKGWKNLRDRC

SEQ ID NO: 4284 - protein, 5 aa, Homo sapiens
HGWNS

SEQ ID NO: 4285 - protein, 35 aa, Homo sapiens
SRGGGSLTARFASGSAIGRWQKSFVNGWLKCPTSP

SEQ ID NO: 4286 - protein, 31 aa, Homo sapiens
VALRPPCRPNSLKSKRNGNQPACGWKNRRKN

SEQ ID NO: 4287 - protein, 6 aa, Homo sapiens
GAGQMT

SEQ ID NO: 4288 - protein, 7 aa, Homo sapiens
ETFSLKK

SEQ ID NO: 4289 - protein, 14 aa, Homo sapiens
GPGSLTSSQSWPSQ

SEQ ID NO: 4290 - protein, 15 aa, Homo sapiens
TGGGETFVLCPWKGG

SEQ ID NO: 4291 - protein, 84 aa, Homo sapiens
STAAWPGRTALIQHVASNRWFTKATRDGTTCKSVSPPSCADSSILLASVRSLRLRGTAFWSGSQRWICSSLILNIFLSVMFKLK

SEQ ID NO: 4292 - protein, 11 aa, Homo sapiens
SNSRPSSRKFH

SEQ ID NO: 4293 - protein, 85 aa, Homo sapiens
MQLCRTCTGTTALQTACFLHSLPPISPSRSLSPSGASGQDETPRLVWTPSPWSGITTMTSVGTWSLQCPELCPLRMKKVRMTKIS

SEQ ID NO: 4294 - protein, 10 aa, Homo sapiens
TSGELLAYQM

SEQ ID NO: 4295 - protein, 5 aa, Homo sapiens
NAVAV

SEQ ID NO: 4296 - protein, 63 aa, Homo sapiens
NSSSVWNSALTSRPSSSRSKSSRSSRKLWTTAKPSSSPSISAALSSPRLTARRAGTCRIACRR

SEQ ID NO: 4297 - protein, 8 aa, Homo sapiens
CSARVSMK

SEQ ID NO: 4298 - protein, 85 aa, Homo sapiens
AELMLLSEIADPTRFFTDNLLSPEDWGLQNSTLYSGLDEVAEEQTQLFRCPEQDVPFDGSSLDVGMDVSPSEPPWELLPIFPDLQ

SEQ ID NO: 4299 - protein, 85 aa, Homo sapiens
VKSEPSSPCSSSSLSSESSRLSTEPSSEALGVGEVLHVKTESLAPPLCLLGDDPTSSFETVQINVIPTSDDSSDVQTKIEPVSPC

SEQ ID NO: 4300 - protein, 85 aa, Homo sapiens
SSVNSEASLLSADSSSQAFIGEEVLEVKTESLSPSGCLLWDVPAPSLGAVQISMGPSLDGSSGKALPTRKPPLQPKPVVLTTVPM

SEQ ID NO: 4301 - protein, 85 aa, Homo sapiens
PSRAVPPSTTVLLQSLVQPPPVSPVVLIQGAIRVQPEGPAPSLPRPERKSIVPAPMPGNSCPPEVDAKLLKRQQRMIKNRESACQ

SEQ ID NO: 4302 - protein, 85 aa, Homo sapiens
SRRKKKEYLQGLEARLQAVLADNQQLRRENAALRRRLEALLAENSELKLGSGNRKVVCIMVFLLFIAFNFGPVSISEPPSAPISP

SEQ ID NO: 4303 - protein, 85 aa, Homo sapiens
RMNKGEPQPRRHLLGFSEQEPVQGVEPLQGSSQGPKEPQPSPTDQPSFSNLTAFPGGAKELLLRDLDQLFLSSDCRHFNRTESLR

SEQ ID NO: 4304 - protein, 85 aa, Homo sapiens
LADELSGWVQRHQRGRRKIPQRAQERQKSQPRKKSPPVKAVPIQPPGPPERDSVGQLQLYRHPDRSQPAFLDAIDRREDTFYVVS

SEQ ID NO: 4305 - protein, 85 aa, Homo sapiens
FRRDHLLLPAISHNKTSRPKMSLVMPAMAPNETLSGRGAPGDYEEMMQIECEVMDTRVIHIKTSTVPPSLRKQPSPTPGNATGGP

SEQ ID NO: 4306 - protein, 84 aa, Homo sapiens
VMPAMAPNETLSGRGAPGDYEEMMQIECEVMDTRVIHIKTSTVPPSLRKQPSPTPGNATGGPLPVSAASQAHQASHQPLYLNHP

SEQ ID NO: 4307 - protein, 85 aa, Homo sapiens
EQTQLFRCPEQDVPFDGSSLDVGMDVSPSEPPWELLPIFPDLQVKSEPSSPCSSSSLSSESSRLSTEPSSEALGVGEVLHVKTES

SEQ ID NO: 4308 - protein, 85 aa, Homo sapiens
MAPPLCLLGDDPTSSFETVQINVIPTSDDSSDVQTKIEPVSPCSSVNSEASLLSADSSSQAFIGEEVLEVKTESLSPSGCLLWDV

SEQ ID NO: 4309 - protein, 85 aa, Homo sapiens
PAPSLGAVQISMGPSLDGSSGKALPTRKPPLQPKPVVLTTVPMPSRAVPPSTTVLLQSLVQPPPVSPVVLIQGAIRVQPEGPAPS

SEQ ID NO: 4310 - protein, 85 aa, Homo sapiens
LPRPERKSIVPAPMPGNSCPPEVDAKLLKRQQRMIKNRESACQSRRKKKEYLQGLEARLQAVLADNQQLRRENAALRRRLEALLA

SEQ ID NO: 4311 - protein, 85 aa, Homo sapiens
ENSELKLGSGNRKVVCIMVFLLFIAFNFGPVSISEPPSAPISPRMNKGEPQPRRHLLGFSEQEPVQGVEPLQGSSQGPKEPQPSP

SEQ ID NO: 4312 - protein, 85 aa, Homo sapiens
TDQPSFSNLTAFPGGAKELLLRDLDQLFLSSDCRHFNRTESLRLADELSGWVQRHQRGRRKIPQRAQERQKSQPRKKSPPVKAVP

SEQ ID NO: 4313 - protein, 85 aa, Homo sapiens
IQPPGPPERDSVGQLQLYRHPDRSQPAFLDAIDRREDTFYVVSFRRDHLLLPAISHNKTSRPKMSLVMPAMAPNETLSGRGAPGD

SEQ ID NO: 4314 - protein, 85 aa, Homo sapiens
PPKGKSGSGKAGKGGAASGSDSADKKAQGPKGGGNAVKVRHILCEKHGKIMEAMEKLKSGMRFNEVAAQYSEDKARQGGDLGWMT

SEQ ID NO: 4315 - protein, 84 aa, Homo sapiens
HGKIMEAMEKLKSGMRFNEVAAQYSEDKARQGGDLGWMTRGSMVGPFQEAAFALPVSGMDKPVFTDPPVKTKFGYHIIMVEGRK

SEQ ID NO: 4316 - protein, 85 aa, Homo sapiens
LCEKHGKIMEAMEKLKSGMRFNEVAAQYSEDKARQGGDLGWMTRGSMVGPFQEAAFALPVSGMDKPVFTDPPVKTKFGYHIIMVE

SEQ ID NO: 4317 - protein, 85 aa, Homo sapiens
AQVPGEVDNMEGLPAPNNNPAARWESPDRGWEREQPAASTAAASLFECSRIKALADEREAVQKKTFTKWVNSHLARVGCHIGDLY

SEQ ID NO: 4318 - protein, 85 aa, Homo sapiens
VDLRDGFVLTRLLEVLSGEQLPRPTRGRMRIHSLENVDKALQFLKEQRVHLENVGSHDIVDGNHRLTLGLVWTIILRFQIQVIKI

SEQ ID NO: 4319 - protein, 85 aa, Homo sapiens
ETEDNRETRSAKDALLLWCQMKTAGYPEVNIQNFTTSWRDGLAFNALIHRHRPDLVDFSKLTKSNANYNLQRAFRTAEQHLGLAR

SEQ ID NO: 4320 - protein, 85 aa, Homo sapiens
MLDPEDVNMEAPDEKSIITYVVSFYHYFSKMKALAVEGKRIGKVLDQVLEVGKIIERYEELAAELLAWIHRTVGLISNQKFANSL

SEQ ID NO: 4321 - protein, 85 aa, Homo sapiens
SGVQQQLQAFTAYCTLEKPVKFQEKGNLEVLLFSIQSKLRACNRRLFVPREGCGIWDIDKAWGELEKAEHEREAALRAELIRQEK

SEQ ID NO: 4322 - protein, 85 aa, Homo sapiens
MELLAQRFDHKVAMRESWLNENQRLVSQDNFGYELPAVEAAMKKHEAIEADIAAYEERVQGVAELAQALAAEGYYDIRRVAAQRD

SEQ ID NO: 4323 - protein, 85 aa, Homo sapiens
SVLRQWALLTGLVGARRTRLEQNLALQKVFQEMVYMVDWMEEMQAQLLSRECGQHLVEADDLLQKHGLLEGDIAAQSERVEALNA

SEQ ID NO: 4324 - protein, 85 aa, Homo sapiens
AALRFSQLQGYQPCDPQVICNRVNHVHGCLAELQEQAARRRAELEASRSLWALLQELEEAESWARDKERLLEAAGGGGAAGAAGA

SEQ ID NO: 4325 - protein, 85 aa, Homo sapiens
AGTAGGAHDLSSTARLLAQHKILQGELGGRRALLQQALRCGEELVAAGGAVGPGADTVHLVGLAERAASARRRWQRLEEAAARRE

SEQ ID NO: 4326 - protein, 85 aa, Homo sapiens
RRLQEARALHQFGADLDGLLDWLRDAYRLAAAGDFGHDEASSRRLARQHRALTGEVEAHRGPVSGLRRQLATLGGASGAGPLVVA

SEQ ID NO: 4327 - protein, 85 aa, Homo sapiens
MQVRVVEAEQLFAEVTEVAALRRQWLRDALAVYRMFGEVHACELWIGEKEQWLLSMRVPDSLDDVEVVQHRFESLDQEMNSLMGR

SEQ ID NO: 4328 - protein, 85 aa, Homo sapiens
VLDVNHTVQELVEGGHPSSDEVRSCQDHLNSRWNRIVELVEQRKEEMSAVLLVENHVLEVAEVRAQVREKRRAVESAPRAGGALQ

SEQ ID NO: 4329 - protein, 85 aa, Homo sapiens
WRLSGLEAALQALEPRQAALLEEAALLAERFPAQAARLHQGAEELGAEWGALASAAQACGEAVAAAGRLQRFLHDLDAFLDWLVR

SEQ ID NO: 4330 - protein, 85 aa, Homo sapiens
AQEAAGGSEGPLPNSLEEADALLARHAALKEEVDQREEDYARIVAASEALLAADGAELGPGLALDEWLPHLELGWHKLLGLWEAR

SEQ ID NO: 4331 - protein, 85 aa, Homo sapiens
REALVQAHIYQLFLRDLRQALVVLRNQEMALSGAELPGTVESVEEALKQHRDFLTTMELSQQKMQVAVQAAEGLLRQGNIYGEQA

SEQ ID NO: 4332 - protein, 85 aa, Homo sapiens
QEAVTRLLEKNQENQLRAQQWMQKLHDQLELQHFLRDCHELDGWIHEKMLMARDGTREDNHKLHKRWLRHQAFMAELAQNKEWLE

SEQ ID NO: 4333 - protein, 85 aa, Homo sapiens
KIEREGQQLMQEKPELAASVRKKLGEIRQCWAELESTTQAKARQLFEASKADQLVQSFAELDKKLLHMESQLQDVDPGGDLATVN

SEQ ID NO: 4334 - protein, 85 aa, Homo sapiens
SQLKKLQSMESQVEEWYREVGELQAQTAALPLEPASKELVGERQNAVGERLVRLLEPLQERRRLLLASKELHQVAHDWTTSWAWV

SEQ ID NO: 4335 - protein, 85 aa, Homo sapiens
QERLPLAMQTERGNGLQAVQQHIKKNQGLRREIQAHGPRLEEVLERAGALASLRSPEAEAVRRGLEQLQSAWAGLREAAERRQQV

SEQ ID NO: 4336 - protein, 85 aa, Homo sapiens
MDAAFQVEQYYFDVAEVEAWLGEQELLMMSEDKGKDEQSTLQLLKKHLQLEQGVENYEESIAQLSRQCRALLEMGHPDSEQISRR

SEQ ID NO: 4337 - protein, 85 aa, Homo sapiens
QSQVDRLYVALKELGEERRVALEQQYWLYQLSRQVSELEHWIAEKEVVAGSPELGQDFEHVSVLQEKFSEFASETGMAGRERLAA

SEQ ID NO: 4338 - protein, 85 aa, Homo sapiens
VNQMVDELIECGHTAAATMAEWKDGLNEAWAELLELMGTRAQLLAASRELHKFFSDARELQGQIEEKRRRLPRLTTPPEPRPSAS

SEQ ID NO: 4339 - protein, 85 aa, Homo sapiens
SMQRTLRAFEHDLQLLVSQVRQLQEGAAQLRTVYAGEHAEAIASREQEVLQGWKELLSACEDARLHVSSTADALRFHSQVRDLLS

SEQ ID NO: 4340 - protein, 85 aa, Homo sapiens
WMDGIASQIGAADKPRDVSSVEVLMNYHQGLKTELEARVPELTTCQELGRSLLLNKSAMADEIQAQLDKLGTRKEEVSEKWDRHW

SEQ ID NO: 4341 - protein, 85 aa, Homo sapiens
EWLQQMLEVHQFAQEAVVADAWLTAQEPLLQSRELGSSVDEVEQLIRRHEAFRKAAAAWEERFSSLRRLTTIEKIKAEQSKQPPT

SEQ ID NO: 4342 - protein, 85 aa, Homo sapiens
PLLGRKFFGDPTELAAKAAPLLRPGGYERGLEPLARRASDTLSAEVRTRVGYVRQELKPERLQPRIDRLPEIPGRVEPAALPAAP

SEQ ID NO: 4343 - protein, 85 aa, Homo sapiens
EDAAETPATPAAAEQVRPRPERQESADRAEELPRRRRPERQESVDQSEEAARRRRPERQESAEHEAAHSLTLGRYEQMERRRERR

SEQ ID NO: 4344 - protein, 85 aa, Homo sapiens
ERRLERQESSEQEMPIRGDLVKGKATLADIVEQLQEKEAGPGLPAGPSLPQPRELPPGRLPNGLELPERTPRPDRPRARDRPKPR

SEQ ID NO: 4345 - protein, 85 aa, Homo sapiens
RRPRPREGGEGGGSRRSRSAPAQGGSAPAPPPPPTHTVQHEGFLLRKRELDANRKSSNRSWVSLYCVLSKGELGFYKDSKGPASG

SEQ ID NO: 4346 - protein, 85 aa, Homo sapiens
STHGGEPLLSLHKATSEVASDYKKKKHVFKLQTQDGSEFLLQAKDEEEMNGWLEAVASSVAEHAEIARWGQTLPTTSSTDEGNPK

SEQ ID NO: 4347 - protein, 84 aa, Homo sapiens
TSEVASDYKKKKHVFKLQTQDGSEFLLQAKDEEEMNGWLEAVASSVAEHAEIARWGQTLPTTSSTDEGNPKREGGDRRASGRRK

SEQ ID NO: 4348 - protein, 85 aa, Homo sapiens
ASLFECSRIKALADEREAVQKKTFTKWVNSHLARVGCHIGDLYVDLRDGFVLTRLLEVLSGEQLPRPTRGRMRIHSLENVDKALQ

SEQ ID NO: 4349 - protein, 85 aa, Homo sapiens
FLKEQRVHLENVGSHDIVDGNHRLTLGLVWTIILRFQIQVIKIETEDNRETRSAKDALLLWCQMKTAGYPEVNIQNFTTSWRDGL

SEQ ID NO: 4350 - protein, 85 aa, Homo sapiens
AFNALIHRHRPDLVDFSKLTKSNANYNLQRAFRTAEQHLGLARLLDPEDVNMEAPDEKSIITYVVSFYHYFSKMKALAVEGKRIG

SEQ ID NO: 4351 - protein, 85 aa, Homo sapiens
KVLDQVLEVGKIIERYEELAAELLAWIHRTVGLISNQKFANSLSGVQQQLQAFTAYCTLEKPVKFQEKGNLEVLLFSIQSKLRAC

SEQ ID NO: 4352 - protein, 85 aa, Homo sapiens
NRRLFVPREGCGIWDIDKAWGELEKAEHEREAALRAELIRQEKLELLAQRFDHKVAMRESWLNENQRLVSQDNFGYELPAVEAAM

SEQ ID NO: 4353 - protein, 85 aa, Homo sapiens
KKHEAIEADIAAYEERVQGVAELAQALAAEGYYDIRRVAAQRDSVLRQWALLTGLVGARRTRLEQNLALQKVFQEMVYMVDWMEE

SEQ ID NO: 4354 - protein, 85 aa, Homo sapiens
MQAQLLSRECGQHLVEADDLLQKHGLLEGDIAAQSERVEALNAAALRFSQLQGYQPCDPQVICNRVNHVHGCLAELQEQAARRRA

SEQ ID NO: 4355 - protein, 85 aa, Homo sapiens
ELEASRSLWALLQELEEAESWARDKERLLEAAGGGGAAGAAGAAGTAGGAHDLSSTARLLAQHKILQGELGGRRALLQQALRCGE

SEQ ID NO: 4356 - protein, 85 aa, Homo sapiens
ELVAAGGAVGPGADTVHLVGLAERAASARRRWQRLEEAAARRERRLQEARALHQFGADLDGLLDWLRDAYRLAAAGDFGHDEASS

SEQ ID NO: 4357 - protein, 85 aa, Homo sapiens
RRLARQHRALTGEVEAHRGPVSGLRRQLATLGGASGAGPLVVALQVRVVEAEQLFAEVTEVAALRRQWLRDALAVYRMFGEVHAC

SEQ ID NO: 4358 - protein, 85 aa, Homo sapiens
ELWIGEKEQWLLSMRVPDSLDDVEVVQHRFESLDQEMNSLMGRVLDVNHTVQELVEGGHPSSDEVRSCQDHLNSRWNRIVELVEQ

SEQ ID NO: 4359 - protein, 85 aa, Homo sapiens
RKEEMSAVLLVENHVLEVAEVRAQVREKRRAVESAPRAGGALQWRLSGLEAALQALEPRQAALLEEAALLAERFPAQAARLHQGA

SEQ ID NO: 4360 - protein, 85 aa, Homo sapiens
EELGAEWGALASAAQACGEAVAAAGRLQRFLHDLDAFLDWLVRAQEAAGGSEGPLPNSLEEADALLARHAALKEEVDQREEDYAR

SEQ ID NO: 4361 - protein, 85 aa, Homo sapiens
IVAASEALLAADGAELGPGLALDEWLPHLELGWHKLLGLWEARREALVQAHIYQLFLRDLRQALVVLRNQEMALSGAELPGTVES

SEQ ID NO: 4362 - protein, 85 aa, Homo sapiens
VEEALKQHRDFLTTMELSQQKMQVAVQAAEGLLRQGNIYGEQAQEAVTRLLEKNQENQLRAQQWMQKLHDQLELQHFLRDCHELD

SEQ ID NO: 4363 - protein, 85 aa, Homo sapiens
GWIHEKMLMARDGTREDNHKLHKRWLRHQAFMAELAQNKEWLEKIEREGQQLMQEKPELAASVRKKLGEIRQCWAELESTTQAKA

SEQ ID NO: 4364 - protein, 85 aa, Homo sapiens
RQLFEASKADQLVQSFAELDKKLLHMESQLQDVDPGGDLATVNSQLKKLQSMESQVEEWYREVGELQAQTAALPLEPASKELVGE

SEQ ID NO: 4365 - protein, 85 aa, Homo sapiens
RQNAVGERLVRLLEPLQERRRLLLASKELHQVAHDWTTSWAWVQERLPLAMQTERGNGLQAVQQHIKKNQGLRREIQAHGPRLEE

SEQ ID NO: 4366 - protein, 85 aa, Homo sapiens
VLERAGALASLRSPEAEAVRRGLEQLQSAWAGLREAAERRQQVLDAAFQVEQYYFDVAEVEAWLGEQELLMMSEDKGKDEQSTLQ

SEQ ID NO: 4367 - protein, 85 aa, Homo sapiens
MLKKHLQLEQGVENYEESIAQLSRQCRALLEMGHPDSEQISRRQSQVDRLYVALKELGEERRVALEQQYWLYQLSRQVSELEHWI

SEQ ID NO: 4368 - protein, 85 aa, Homo sapiens
AEKEVVAGSPELGQDFEHVSVLQEKFSEFASETGMAGRERLAAVNQMVDELIECGHTAAATMAEWKDGLNEAWAELLELMGTRAQ

SEQ ID NO: 4369 - protein, 85 aa, Homo sapiens
MLAASRELHKFFSDARELQGQIEEKRRRLPRLTTPPEPRPSASSMQRTLRAFEHDLQLLVSQVRQLQEGAAQLRTVYAGEHAEAI

SEQ ID NO: 4370 - protein, 85 aa, Homo sapiens
ASREQEVLQGWKELLSACEDARLHVSSTADALRFHSQVRDLLSWMDGIASQIGAADKPRDVSSVEVLMNYHQGLKTELEARVPEL

SEQ ID NO: 4371 - protein, 85 aa, Homo sapiens
TTCQELGRSLLLNKSAMADEIQAQLDKLGTRKEEVSEKWDRHWEWLQQMLEVHQFAQEAVVADAWLTAQEPLLQSRELGSSVDEV

SEQ ID NO: 4372 - protein, 85 aa, Homo sapiens
EQLIRRHEAFRKAAAAWEERFSSLRRLTTIEKIKAEQSKQPPTPLLGRKFFGDPTELAAKAAPLLRPGGYERGLEPLARRASDTL

SEQ ID NO: 4373 - protein, 85 aa, Homo sapiens
SAEVRTRVGYVRQELKPERLQPRIDRLPEIPGRVEPAALPAAPEDAAETPATPAAAEQVRPRPERQESADRAEELPRRRRPERQE

SEQ ID NO: 4374 - protein, 85 aa, Homo sapiens
SVDQSEEAARRRRPERQESAEHEAAHSLTLGRYEQMERRRERRERRLERQESSEQEMPIRGDLVKGKATLADIVEQLQEKEAGPG

SEQ ID NO: 4375 - protein, 85 aa, Homo sapiens
MPAGPSLPQPRELPPGRLPNGLELPERTPRPDRPRARDRPKPRRRPRPREGGEGGGSRRSRSAPAQGGSAPAPPPPPTHTVQHEG

SEQ ID NO: 4376 - protein, 85 aa, Homo sapiens
FLLRKRELDANRKSSNRSWVSLYCVLSKGELGFYKDSKGPASGSTHGGEPLLSLHKATSEVASDYKKKKHVFKLQTQDGSEFLLQ

SEQ ID NO: 4377 - protein, 85 aa, Homo sapiens
ARKCNETAKSYCVNGGVCYYIEGINQLSCKCPVGYTGDRCQQFAMVNFSKHLGFELKEAEELYQKRVLTITGICVALLVVGIVCV

SEQ ID NO: 4378 - protein, 85 aa, Homo sapiens
VAYCKTKKQRKQMHNHLRQNMCPAHQNRSLANGPSHPRLDPEEIQMADYISKNVPATDHVIRRETETTFSGSHSCSPSHHCSTAT

SEQ ID NO: 4379 - protein, 85 aa, Homo sapiens
PTSSHRHESHTWSLERSESLTSDSQSGIMLSSVGTSKCNSPACVEARARRAAAYNLEERRRATAPPYHDSVDSLRDSPHSERYVS

SEQ ID NO: 4380 - protein, 85 aa, Homo sapiens
ALTTPARLSPVDFHYSLATQVPTFEITSPNSAHAVSLPPAAPISYRLAEQQPLLRHPAPPGPGPGPGPGPGPGADMQRSYDSYYY

SEQ ID NO: 4381 - protein, 85 aa, Homo sapiens
PAAGPGPRRGTCALGGSLGSLPASPFRIPEDDEYETTQECAPPPPPRPRARGASRRTSAGPRRWRRSRLNGLAAQRARAARDSLS

SEQ ID NO: 4382 - protein, 85 aa, Homo sapiens
MSSGSGGGSASASDDDADDADGALAAESTPFLGLRGAHDALRSDSPPLCPAADSRTYYSLDSHSTRASSRHSRGPPPRAKQDSAP

SEQ ID NO: 4383 - protein, 85 aa, Homo sapiens
FAMVNFSKHLGFELKEAEELYQKRVLTITGICVALLVVGIVCVVAYCKTKKQRKQMHNHLRQNMCPAHQNRSLANGPSHPRLDPE

SEQ ID NO: 4384 - protein, 85 aa, Homo sapiens
EIQMADYISKNVPATDHVIRRETETTFSGSHSCSPSHHCSTATPTSSHRHESHTWSLERSESLTSDSQSGIMLSSVGTSKCNSPA

SEQ ID NO: 4385 - protein, 85 aa, Homo sapiens
CVEARARRAAAYNLEERRRATAPPYHDSVDSLRDSPHSERYVSALTTPARLSPVDFHYSLATQVPTFEITSPNSAHAVSLPPAAP

SEQ ID NO: 4386 - protein, 85 aa, Homo sapiens
ISYRLAEQQPLLRHPAPPGPGPGPGPGPGPGADMQRSYDSYYYPAAGPGPRRGTCALGGSLGSLPASPFRIPEDDEYETTQECAP

SEQ ID NO: 4387 - protein, 85 aa, Homo sapiens
PPPPRPRARGASRRTSAGPRRWRRSRLNGLAAQRARAARDSLSLSSGSGGGSASASDDDADDADGALAAESTPFLGLRGAHDALR

SEQ ID NO: 4388 - protein, 85 aa, Homo sapiens
TNLNIDNEDYSRYPPREYRASGSRRGMAYGHIDSYGADDSEEEGAGPVERPPVRGKTGKFKDDKLYDPEKGARSLAGPPPHFSSF

SEQ ID NO: 4389 - protein, 85 aa, Homo sapiens
SRDVREERDKLDPVPAARCSASRADFLPQSSVASQSSSEGKLATKGDSSERERREQNLPARPSRAPVSICGGGENTSKSAEEPVV

SEQ ID NO: 4390 - protein, 85 aa, Homo sapiens
RPKIRNLASPNCVKPKIFFDTDDDDDMPHSTSRWRDTANDNEGHSDGLARRGRGESSSGYPEPKYPEDKREARSDQVKPEKVPRR

SEQ ID NO: 4391 - protein, 85 aa, Homo sapiens
RRTMADPDFWTHSDDYYKYCDEDSDSDKEWIAALRRKYRSREQTLSSSGESWETLPGKEEREPPQAKVSASTGTSPGPGASASAG

SEQ ID NO: 4392 - protein, 85 aa, Homo sapiens
AGAGASAGSNGSNYLEEVREPSLQEEQASLEEGEIPWLQYHENDSSSEGDNDSGHELMQPGVFMLDGNNNLEDDSSVSEDLEVDW

SEQ ID NO: 4393 - protein, 85 aa, Homo sapiens
SLFDGFADGLGVAEAISYVDPQFLTYMALEERLAQAMETALAHLESLAVDVEVANPPASKESIDALPEILVTEDHGAVGQEMCCP

SEQ ID NO: 4394 - protein, 85 aa, Homo sapiens
IASQRKTNSEVPMHRSAPSQTTKRSRSPFSTTRRSWDDSESSGTNLNIDNEDYSRYPPREYRASGSRRGMAYGHIDSYGADDSEE

SEQ ID NO: 4395 - protein, 85 aa, Homo sapiens
EGAGPVERPPVRGKTGKFKDDKLYDPEKGARSLAGPPPHFSSFSRDVREERDKLDPVPAARCSASRADFLPQSSVASQSSSEGKL

SEQ ID NO: 4396 - protein, 85 aa, Homo sapiens
ATKGDSSERERREQNLPARPSRAPVSICGGGENTSKSAEEPVVRPKIRNLASPNCVKPKIFFDTDDDDDMPHSTSRWRDTANDNE

SEQ ID NO: 4397 - protein, 85 aa, Homo sapiens
GHSDGLARRGRGESSSGYPEPKYPEDKREARSDQVKPEKVPRRRRTMADPDFWTHSDDYYKYCDEDSDSDKEWIAALRRKYRSRE

SEQ ID NO: 4398 - protein, 85 aa, Homo sapiens
QTLSSSGESWETLPGKEEREPPQAKVSASTGTSPGPGASASAGAGAGASAGSNGSNYLEEVREPSLQEEQASLEEGEIPWLQYHE

SEQ ID NO: 4399 - protein, 85 aa, Homo sapiens
NDSSSEGDNDSGHELMQPGVFMLDGNNNLEDDSSVSEDLEVDWSLFDGFADGLGVAEAISYVDPQFLTYMALEERLAQAMETALA

SEQ ID NO: 4400 - protein, 85 aa, Homo sapiens
HLESLAVDVEVANPPASKESIDALPEILVTEDHGAVGQEMCCPICCSEYVKGEVATELPCHHYFHKPCVSIWLQKSGTCPVCRCM

SEQ ID NO: 4401 - protein, 85 aa, Homo sapiens
QAARVDLTLDPDTAHPALMLSPDRRGVRLAERRQEVADHPKRFSADCCVLGAQGFRSGRHYWEEPKEPSWPPAQPSLTYYVCPTD

SEQ ID NO: 4402 - protein, 84 aa, Homo sapiens
MDPDTAHPALMLSPDRRGVRLAERRQEVADHPKRFSADCCVLGAQGFRSGRHYWEEPKEPSWPPAQPSLTYYVCPTDRPEFSFT

SEQ ID NO: 4403 - protein, 85 aa, Homo sapiens
VCVLVLAAAAGAVAVFLILRIWVVLRSMDVTPRESLSILVVAGSGGHTTEILRLLGSLSNAYSPRHYVIADTDEMSANKINSFEL

SEQ ID NO: 4404 - protein, 85 aa, Homo sapiens
DRADRDPSNMYTKYYIHRIPRSREVQQSWPSTVFTTLHSMWLSFPLIHRVKPDLVLCNGPGTCVPICVSALLLGILGIKKVIIVY

SEQ ID NO: 4405 - protein, 84 aa, Homo sapiens
IHRVKPDLVLCNGPGTCVPICVSALLLGILGIKKVIIVYVESICRVETLSMSGKILFHLSDYFIVQWPALKEKYPKSVYLGRIV

SEQ ID NO: 4406 - protein, 85 aa, Homo sapiens
GSGGHTTEILRLLGSLSNAYSPRHYVIADTDEMSANKINSFELDRADRDPSNMYTKYYIHRIPRSREVQQSWPSTVFTTLHSMWL

SEQ ID NO: 4407 - protein, 85 aa, Homo sapiens
SFPLIHRVKPDLVLCNGPGTCVPICVSALLLGILGIKKVIIVYVESICRVETLSMSGKILFHLSDYFIVQWPALKEKYPKSVYLG

SEQ ID NO: 4408 - protein, 85 aa, Homo sapiens
ATVPVYCVCRLPYDVTRFMIECDACKDWFHGSCVGVEEEEAPDIDIYHCPNCEKTHGKSTLKKKRTWHKHGPGQAPDVKPVQNGS

SEQ ID NO: 4409 - protein, 85 aa, Homo sapiens
QLFIKELRSRTFPSAEDVVARVPGSQLTLGYMEEHGFTEPILVPKKDGLGLAVPAPTFYVSDVENYVGPERSVDVTDVTKQKDCK

SEQ ID NO: 4410 - protein, 85 aa, Homo sapiens
MKLKEFVDYYYSTNRKRVLNVTNLEFSDTRMSSFVEPPDIVKKLSWVENYWPDDALLAKPKVTKYCLICVKDSYTDFHIDSGGAS

SEQ ID NO: 4411 - protein, 85 aa, Homo sapiens
AWYHVLKGEKTFYLIRPASANISLYERWRSASNHSEMFFADQVDKCYKCIVKQGQTLFIPSGWIYATLTPVDCLAFAGHFLHSLS

SEQ ID NO: 4412 - protein, 85 aa, Homo sapiens
VEMQMRAYEVERRLKLGSLTQFPNFETACWYMGKHLLEAFKGSHKSGKQLPPHLVQGAKILNGAFRSWTKKQALAEHEDELPEHF

SEQ ID NO: 4413 - protein, 85 aa, Homo sapiens
KPSQLIKDLAKEIRLSENASKAVRPEVNTVASSDEVCDGDREKEEPPSPIEATPPQSLLEKVSKKKTPKTVKMPKPSKIPKPPKP

SEQ ID NO: 4414 - protein, 85 aa, Homo sapiens
PKPPRPPKTLKLKDGGKKKGKKSRESASPTIPNLDLLEAHTKEALTKMEPPKKGKATKSVLSVPNKDVVHMQNDVERLEIREQTK

SEQ ID NO: 4415 - protein, 85 aa, Homo sapiens
SKSEAKWKYKNSKPDSLLKMEEEQKLEKSPLAGNKDNKFSFSFSNKKLLGSKALRPPTSPGVFGALQNFKEDKPKPVRDEYEYVS

SEQ ID NO: 4416 - protein, 85 aa, Homo sapiens
DDGELKIDEFPIRRKKNAPKRDLSFLLDKKAVLPTPVTKPKLDSAAYKSDDSSDEGSLHIDTDTKPGRNARVKKESGSSAAGILD

SEQ ID NO: 4417 - protein, 85 aa, Homo sapiens
MLQASEEVGALEYNPSSQPPASPSTQEAIQGMLSMANLQASDSCLQTTWGAGQAKGSSLAAHGARKNGGGSGKSAGKRLLKRAAK

SEQ ID NO: 4418 - protein, 85 aa, Homo sapiens
NSVDLDDYEEEQDHLDACFKDSDYVYPSLESDEDNPIFKSRSKKRKGSDDAPYSPTARVGPSVPRQDRPVREGTRVASIETGLAA

SEQ ID NO: 4419 - protein, 85 aa, Homo sapiens
AAAKLSQQEEQKSKKKKSAKRKLTPNTTSPSTSTSISAGTTSTSTTPASTTPASTTPASTSTASSQASQEGSSPEPPPESHSSSL

SEQ ID NO: 4420 - protein, 84 aa, Homo sapiens
PPESHSSSLADHEYTAAGTFTGAQAGRTSQPMAPGVFLTQRRPSASSPNNNTAAKGKRTKKGMATAKQRLGKILKIHRNGKLLL

SEQ ID NO: 4421 - protein, 85 aa, Homo sapiens
DIDIYHCPNCEKTHGKSTLKKKRTWHKHGPGQAPDVKPVQNGSQLFIKELRSRTFPSAEDVVARVPGSQLTLGYMEEHGFTEPIL

SEQ ID NO: 4422 - protein, 85 aa, Homo sapiens
VPKKDGLGLAVPAPTFYVSDVENYVGPERSVDVTDVTKQKDCKMKLKEFVDYYYSTNRKRVLNVTNLEFSDTRMSSFVEPPDIVK

SEQ ID NO: 4423 - protein, 85 aa, Homo sapiens
KLSWVENYWPDDALLAKPKVTKYCLICVKDSYTDFHIDSGGASAWYHVLKGEKTFYLIRPASANISLYERWRSASNHSEMFFADQ

SEQ ID NO: 4424 - protein, 85 aa, Homo sapiens
VDKCYKCIVKQGQTLFIPSGWIYATLTPVDCLAFAGHFLHSLSVEMQMRAYEVERRLKLGSLTQFPNFETACWYMGKHLLEAFKG

SEQ ID NO: 4425 - protein, 85 aa, Homo sapiens
SHKSGKQLPPHLVQGAKILNGAFRSWTKKQALAEHEDELPEHFKPSQLIKDLAKEIRLSENASKAVRPEVNTVASSDEVCDGDRE

SEQ ID NO: 4426 - protein, 85 aa, Homo sapiens
KEEPPSPIEATPPQSLLEKVSKKKTPKTVKMPKPSKIPKPPKPPKPPRPPKTLKLKDGGKKKGKKSRESASPTIPNLDLLEAHTK

SEQ ID NO: 4427 - protein, 85 aa, Homo sapiens
EALTKMEPPKKGKATKSVLSVPNKDVVHMQNDVERLEIREQTKSKSEAKWKYKNSKPDSLLKMEEEQKLEKSPLAGNKDNKFSFS

SEQ ID NO: 4428 - protein, 85 aa, Homo sapiens
FSNKKLLGSKALRPPTSPGVFGALQNFKEDKPKPVRDEYEYVSDDGELKIDEFPIRRKKNAPKRDLSFLLDKKAVLPTPVTKPKL

SEQ ID NO: 4429 - protein, 85 aa, Homo sapiens
DSAAYKSDDSSDEGSLHIDTDTKPGRNARVKKESGSSAAGILDLLQASEEVGALEYNPSSQPPASPSTQEAIQGMLSMANLQASD

SEQ ID NO: 4430 - protein, 85 aa, Homo sapiens
SCLQTTWGAGQAKGSSLAAHGARKNGGGSGKSAGKRLLKRAAKNSVDLDDYEEEQDHLDACFKDSDYVYPSLESDEDNPIFKSRS

SEQ ID NO: 4431 - protein, 85 aa, Homo sapiens
KKRKGSDDAPYSPTARVGPSVPRQDRPVREGTRVASIETGLAAAAAKLSQQEEQKSKKKKSAKRKLTPNTTSPSTSTSISAGTTS

SEQ ID NO: 4432 - protein, 85 aa, Homo sapiens
TSTTPASTTPASTTPASTSTASSQASQEGSSPEPPPESHSSSLADHEYTAAGTFTGAQAGRTSQPMAPGVFLTQRRPSASSPNNN

SEQ ID NO: 4433 - protein, 85 aa, Homo sapiens
SGHPGSWEMNSVAFEDVAVNFTQEEWALLDPSQKNLYRDVMQETFRNLASIGNKGEDQSIEDQYKNSSRNLSSFQIHQRNHTGEK

SEQ ID NO: 4434 - protein, 85 aa, Homo sapiens
PYECMECGKALGFSRSLNRHKRIHTGEKRYECKQCGKAFSRSSHLRDHERTHTGEKPYECKHCGKAFRYSNCLHYHERTHTGEKP

SEQ ID NO: 4435 - protein, 85 aa, Homo sapiens
YVCMECGKAFSCLSSLQGHIKAHAGEEPYPCKQCGKAFRYASSLQKHEKTHIAQKPYVCNNCGKGFRCSSSLRDHERTHTGEKPY

SEQ ID NO: 4436 - protein, 84 aa, Homo sapiens
GKAFRYASSLQKHEKTHIAQKPYVCNNCGKGFRCSSSLRDHERTHTGEKPYECQKCGKAFSRASTLWKHKKTHTGEKPYKCKKM

SEQ ID NO: 4437 - protein, 85 aa, Homo sapiens
ETFRNLASIGNKGEDQSIEDQYKNSSRNLSSFQIHQRNHTGEKPYECMECGKALGFSRSLNRHKRIHTGEKRYECKQCGKAFSRS

SEQ ID NO: 4438 - protein, 85 aa, Homo sapiens
SHLRDHERTHTGEKPYECKHCGKAFRYSNCLHYHERTHTGEKPYVCMECGKAFSCLSSLQGHIKAHAGEEPYPCKQCGKAFRYAS

SEQ ID NO: 4439 - protein, 85 aa, Homo sapiens
ALLLSVLRVLLGGFFALVGLAKLSEEISAPVSERMNALFVQFAEVFPLKVFGYQPDPLNYQIAVGFLELLAGLLLVMGPPMLQEI

SEQ ID NO: 4440 - protein, 84 aa, Homo sapiens
MAGLLLVMGPPMLQEISNLFLILLMMGAIFTLAALKESLSTCIPAIVCLGFLLLLNVGQLLAQTKKVVRPTRKKTLSTFKESWK

SEQ ID NO: 4441 - protein, 85 aa, Homo sapiens
AEVFPLKVFGYQPDPLNYQIAVGFLELLAGLLLVMGPPMLQEISNLFLILLMMGAIFTLAALKESLSTCIPAIVCLGFLLLLNVG

SEQ ID NO: 4442 - protein, 85 aa, Homo sapiens
RITEVQQKRWKVETNSRLDSVLLLSSMNLPGGELRRRSAEDELAMRGFLQEGDLISAEVQAVFSDGAVSLHTRSLKYGKLGQGVL

SEQ ID NO: 4443 - protein, 85 aa, Homo sapiens
VQVSPSLVKRQKTHFHDLPCGASVILGNNGFIWIYPTPEHKEEEAGGFIANLEPVSLADREVISRLRNCIISLVTQRMMLYDTSI

SEQ ID NO: 4444 - protein, 85 aa, Homo sapiens
LAMRGFLQEGDLISAEVQAVFSDGAVSLHTRSLKYGKLGQGVLVQVSPSLVKRQKTHFHDLPCGASVILGNNGFIWIYPTPEHKE

SEQ ID NO: 4445 - protein, 85 aa, Homo sapiens
RLAGPLRIVVLVVSVGVTWIVVSILLGGPGSGFPRIQQLFTSPESSVTAAPRARKYKCGLPQPCPEEHLAFRVVSGAANVIGPKI

SEQ ID NO: 4446 - protein, 85 aa, Homo sapiens
CLEDKMLMSSVKDNVGRGLNIALVNGVSGELIEARAFDMWAGDVNDLLKFIRPLHEGTLVFVASYDDPATKMNEETRKLFSELGS

SEQ ID NO: 4447 - protein, 85 aa, Homo sapiens
PESSVTAAPRARKYKCGLPQPCPEEHLAFRVVSGAANVIGPKICLEDKMLMSSVKDNVGRGLNIALVNGVSGELIEARAFDMWAG

SEQ ID NO: 4448 - protein, 85 aa, Homo sapiens
DVNDLLKFIRPLHEGTLVFVASYDDPATKMNEETRKLFSELGSRNAKELAFRDSWVFVGAKGVQNKSPFEQHVKNSKHSNKYEGW

SEQ ID NO: 4449 - protein, 85 aa, Homo sapiens
LREEAAQKRKEKEPGMALPQGHLTFRDVAIEFSLEEWKCLDPTQRALYRAMMLENYRNLHSVDISSKCMMKKFSSTAQGNTEVDT

SEQ ID NO: 4450 - protein, 85 aa, Homo sapiens
GTLERHESHHIGDFCFQKIGKDIHDFEFQWQEDKRNSHEATMTQIKKLTGSTDRYDRRHPGNKPIKDQLGLSFHSHLPELHIFQT

SEQ ID NO: 4451 - protein, 85 aa, Homo sapiens
KGKVGNQVEKSINDASSVLTSQRISSRPKIHISNNYENNFFHSSLLTLKQEVHIREKSFQCNESGKAFNCSSLLRKHQIIYLGGK

SEQ ID NO: 4452 - protein, 85 aa, Homo sapiens
QYKCDVCGKVFNQKRYLACHHRCHTGEKPYKCNECGKVFNQQSNLASHHRLHTGEKPYKCEECDKVFSRKSNLERHRRIHTGEKP

SEQ ID NO: 4453 - protein, 85 aa, Homo sapiens
YKCKVCEKAFRRDSHLTQHTRIHTGEKPYKCNECGKAFSGQSTLIHHQAIHGIGKLYKCNDCHKVFSNATTIANHWRIHNEERSY

SEQ ID NO: 4454 - protein, 85 aa, Homo sapiens
KCNKCGKFFRRRSYLVVHWRTHTGEKPYKCNECGKTFHHNSALVIHKAIHTGEKPYKCNECGKTFRHNSALVIHKAIHTGEKPYK

SEQ ID NO: 4455 - protein, 85 aa, Homo sapiens
CNECGKVFNQQATLARHHRLHTGEKPYKCEECDTVFSRKSHHETHKRIHTGEKPYKCDDFDEAFSQASSYAKQRRIHMGEKHHKC

SEQ ID NO: 4456 - protein, 84 aa, Homo sapiens
RKSHHETHKRIHTGEKPYKCDDFDEAFSQASSYAKQRRIHMGEKHHKCDDCGKAFTSHSHRIRHQRIHTGQKSYKCHKRGKVFS

SEQ ID NO: 4457 - protein, 85 aa, Homo sapiens
TQRALYRAMMLENYRNLHSVDISSKCMMKKFSSTAQGNTEVDTGTLERHESHHIGDFCFQKIGKDIHDFEFQWQEDKRNSHEATM

SEQ ID NO: 4458 - protein, 85 aa, Homo sapiens
TQIKKLTGSTDRYDRRHPGNKPIKDQLGLSFHSHLPELHIFQTKGKVGNQVEKSINDASSVLTSQRISSRPKIHISNNYENNFFH

SEQ ID NO: 4459 - protein, 85 aa, Homo sapiens
SSLLTLKQEVHIREKSFQCNESGKAFNCSSLLRKHQIIYLGGKQYKCDVCGKVFNQKRYLACHHRCHTGEKPYKCNECGKVFNQQ

SEQ ID NO: 4460 - protein, 85 aa, Homo sapiens
SNLASHHRLHTGEKPYKCEECDKVFSRKSNLERHRRIHTGEKPYKCKVCEKAFRRDSHLTQHTRIHTGEKPYKCNECGKAFSGQS

SEQ ID NO: 4461 - protein, 85 aa, Homo sapiens
TLIHHQAIHGIGKLYKCNDCHKVFSNATTIANHWRIHNEERSYKCNKCGKFFRRRSYLVVHWRTHTGEKPYKCNECGKTFHHNSA

SEQ ID NO: 4462 - protein, 85 aa, Homo sapiens
LVIHKAIHTGEKPYKCNECGKTFRHNSALVIHKAIHTGEKPYKCNECGKVFNQQATLARHHRLHTGEKPYKCEECDTVFSRKSHH

SEQ ID NO: 4463 - protein, 85 aa, Homo sapiens
VRFKHRYLLCELVSDDPRCRLSLDDRVLSSLVRDTIARVHGTFGAAACSIGFAGTIRTCQKFLIQYNRRQLLILLQNCTDEGERE

SEQ ID NO: 4464 - protein, 84 aa, Homo sapiens
SSLVRDTIARVHGTFGAAACSIGFAGTIRTCQKFLIQYNRRQLLILLQNCTDEGEREAIQKSVTRSCLLEEEEESGEEAAEAME

SEQ ID NO: 4465 - protein, 85 aa, Homo sapiens
ELRFAIQNKHLCHRMSSALESVTVSDRPLGVSITKAEVAPEEDERKKRRRERNKIAAAKCRNKKKEKTECLQKLPRPFWVQKTCI

SEQ ID NO: 4466 - protein, 85 aa, Homo sapiens
KPHLKQWRQRMLFGIFAWGLLFLLIFIYFTDSNPAEPVPSSLSFLETRRLLPVQGKQRAIMGAAHEPSPPGGLDARQALPRAHPA

SEQ ID NO: 4467 - protein, 85 aa, Homo sapiens
GSFHAGPGDLQKWAQSQDGFEHKEFFSSQVGRKSQSAFYPEDDDYFFAAGQPGWHSHTQGTLGFPSPGEPGPREGAFPAAQVQRR

SEQ ID NO: 4468 - protein, 85 aa, Homo sapiens
RVKKRHRRQRRSHVLEEGDDGDRLYSSMSRAFLYRLWKGNVSSKMLNPRLQKAMKDYLTANKHGVRFRGKREAGLSRAQLLCQLR

SEQ ID NO: 4469 - protein, 85 aa, Homo sapiens
SRARVRTLDGTEAPFSALGWRRLVPAVPLSQLHPRGLRSCAVVMSAGAILNSSLGEEIDSHDAVLRFNSAPTRGYEKDVGNKTTI

SEQ ID NO: 4470 - protein, 85 aa, Homo sapiens
RIINSQILTNPSHHFIDSSLYKDVILVAWDPAPYSANLNLWYKKPDYNLFTPYIQHRQRNPNQPFYILHPKFIWQLWDIIQENTK

SEQ ID NO: 4471 - protein, 85 aa, Homo sapiens
EKIQPNPPSSGFIGILIMMSMCREVHVYEYIPSVRQTELCHYHELYYDAACTLGAYHPLLYEKLLVQRLNMGTQGDLHRKGKVVL

SEQ ID NO: 4472 - protein, 84 aa, Homo sapiens
SMCREVHVYEYIPSVRQTELCHYHELYYDAACTLGAYHPLLYEKLLVQRLNMGTQGDLHRKGKVVLPGFQAVHCPAPSPVIPHS

SEQ ID NO: 4473 - protein, 85 aa, Homo sapiens
SFLETRRLLPVQGKQRAIMGAAHEPSPPGGLDARQALPRAHPAGSFHAGPGDLQKWAQSQDGFEHKEFFSSQVGRKSQSAFYPED

SEQ ID NO: 4474 - protein, 85 aa, Homo sapiens
DDYFFAAGQPGWHSHTQGTLGFPSPGEPGPREGAFPAAQVQRRRVKKRHRRQRRSHVLEEGDDGDRLYSSMSRAFLYRLWKGNVS

SEQ ID NO: 4475 - protein, 85 aa, Homo sapiens
SKMLNPRLQKAMKDYLTANKHGVRFRGKREAGLSRAQLLCQLRSRARVRTLDGTEAPFSALGWRRLVPAVPLSQLHPRGLRSCAV

SEQ ID NO: 4476 - protein, 85 aa, Homo sapiens
VMSAGAILNSSLGEEIDSHDAVLRFNSAPTRGYEKDVGNKTTIRIINSQILTNPSHHFIDSSLYKDVILVAWDPAPYSANLNLWY

SEQ ID NO: 4477 - protein, 85 aa, Homo sapiens
KKPDYNLFTPYIQHRQRNPNQPFYILHPKFIWQLWDIIQENTKEKIQPNPPSSGFIGILIMMSMCREVHVYEYIPSVRQTELCHY

SEQ ID NO: 4478 - protein, 85 aa, Homo sapiens
TRGNQRELARQKNMKKQSDSVKGKRRDDGLSAAARKQSAPSSLPPGTRRSCSRSRKRQTRRRRNPSSFVASCPTLLPFACVPGAS

SEQ ID NO: 4479 - protein, 84 aa, Homo sapiens
RSCSRSRKRQTRRRRNPSSFVASCPTLLPFACVPGASPTTLAFPPVVLTGPSTDGIPFALSLQRVPFVLPSPQVASLPLGHSRG

SEQ ID NO: 4480 - protein, 85 aa, Homo sapiens
LPPGTRRSCSRSRKRQTRRRRNPSSFVASCPTLLPFACVPGASPTTLAFPPVVLTGPSTDGIPFALSLQRVPFVLPSPQVASLPL

SEQ ID NO: 4481 - protein, 85 aa, Homo sapiens
GDPGSEIIESVPPAGPEASESTTDENEDDIQFVSEGPSRPVLEYIDLVCGDDENPSAYYSDILFPKMPKRQGDFLHFLNVKKVKT

SEQ ID NO: 4482 - protein, 85 aa, Homo sapiens
DTENNEVSKNHCRLSKAKEPHFEYIEQPIIEEKPSLSSKKEIDNLVLPDCWNEKQAFMFTEQYKWLEIKEGKLGCKDCSAVRHLG

SEQ ID NO: 4483 - protein, 85 aa, Homo sapiens
SKAEKHVHVSKEWIAYLVTPNGSNKTTRQASLRKKIREHDVSKAHGKIQDLLKESTNDSICNLVHKQNNKNIDATVKVFNTVYSL

SEQ ID NO: 4484 - protein, 85 aa, Homo sapiens
VKHNRPLSDIEGARELQEKNGEVNCLNTRYSATRIAEHIAKEMKMKIFKNIIEENAKICIIIDEASTVSKKTTLVIYLQCTIQSA

SEQ ID NO: 4485 - protein, 85 aa, Homo sapiens
PAPVMLFVALKELVSTIAECIVNTLLTTLNDCGFTNEYLKANLIAFCSDGANTILGRKSGVATKLLENFPEIIIWNCLNHRLQLS

SEQ ID NO: 4486 - protein, 85 aa, Homo sapiens
LDDSISEIKQINHLKIFIDKIYSIYHQPNKNQTKLLGTVAKELETEIIKIGRVMGPRWAACSLQAATAVWHAYPILYMHFSHSYS

SEQ ID NO: 4487 - protein, 85 aa, Homo sapiens
GLAKRLANINFLQDLALMIDILEEFSVLSTALQSRSTNIKKAQKLIKRTIRALENLKIGTGKYESQIEDLIKSDKFKDIPFNKNN

SEQ ID NO: 4488 - protein, 85 aa, Homo sapiens
KFNALPRSILLDNIIQHMNLRLLSDRNHEDIFNYFDLLEPSTWPYEEITSPWIAGEKTLFHLCKILKYEVDLNDFREFVNNNIKS

SEQ ID NO: 4489 - protein, 85 aa, Homo sapiens
NNVSIPTTIYKAKKIVSTIAINSAEAERGFNLMNIICTRVRNSLTIDHVSDLMTINLLGKELADWDATPFVKSWSNCNHRLATDT

SEQ ID NO: 4490 - protein, 84 aa, Homo sapiens
SAEAERGFNLMNIICTRVRNSLTIDHVSDLMTINLLGKELADWDATPFVKSWSNCNHRLATDTRVRQKSTKVFHENQLAIWNLK

SEQ ID NO: 4491 - protein, 85 aa, Homo sapiens
EYIDLVCGDDENPSAYYSDILFPKMPKRQGDFLHFLNVKKVKTDTENNEVSKNHCRLSKAKEPHFEYIEQPIIEEKPSLSSKKEI

SEQ ID NO: 4492 - protein, 85 aa, Homo sapiens
DNLVLPDCWNEKQAFMFTEQYKWLEIKEGKLGCKDCSAVRHLGSKAEKHVHVSKEWIAYLVTPNGSNKTTRQASLRKKIREHDVS

SEQ ID NO: 4493 - protein, 85 aa, Homo sapiens
KAHGKIQDLLKESTNDSICNLVHKQNNKNIDATVKVFNTVYSLVKHNRPLSDIEGARELQEKNGEVNCLNTRYSATRIAEHIAKE

SEQ ID NO: 4494 - protein, 85 aa, Homo sapiens
MKMKIFKNIIEENAKICIIIDEASTVSKKTTLVIYLQCTIQSAPAPVMLFVALKELVSTIAECIVNTLLTTLNDCGFTNEYLKAN

SEQ ID NO: 4495 - protein, 85 aa, Homo sapiens
LIAFCSDGANTILGRKSGVATKLLENFPEIIIWNCLNHRLQLSLDDSISEIKQINHLKIFIDKIYSIYHQPNKNQTKLLGTVAKE

SEQ ID NO: 4496 - protein, 85 aa, Homo sapiens
LETEIIKIGRVMGPRWAACSLQAATAVWHAYPILYMHFSHSYSGLAKRLANINFLQDLALMIDILEEFSVLSTALQSRSTNIKKA

SEQ ID NO: 4497 - protein, 85 aa, Homo sapiens
QKLIKRTIRALENLKIGTGKYESQIEDLIKSDKFKDIPFNKNNKFNALPRSILLDNIIQHMNLRLLSDRNHEDIFNYFDLLEPST

SEQ ID NO: 4498 - protein, 85 aa, Homo sapiens
WPYEEITSPWIAGEKTLFHLCKILKYEVDLNDFREFVNNNIKSNNVSIPTTIYKAKKIVSTIAINSAEAERGFNLMNIICTRVRN

SEQ ID NO: 4499 - protein, 85 aa, Homo sapiens
EEDEFIGEKTFQRYCAEFIKHSQQIGDSWEWRPSKDCSDGYMCKIHFQIKNGSVMSHLGASTHGQTCLPMEVKSCSVTQAGVQLR

SEQ ID NO: 4500 - protein, 84 aa, Homo sapiens
YMCKIHFQIKNGSVMSHLGASTHGQTCLPMEVKSCSVTQAGVQLRDLSSLQPPPSGFKQFSCLSLPSNWDYRGSPLHLANFLYF

SEQ ID NO: 4501 - protein, 85 aa, Homo sapiens
ATSRGASRCPRDIANVMQRLQDEQEIVQKRTFTKWINSHLAKRKPPMVVDDLFEDMKDGVKLLALLEVLSGQKLPCEQGRRMKRI

SEQ ID NO: 4502 - protein, 85 aa, Homo sapiens
HAVANIGTALKFLEGRKIKLVNINSTDIADGRPSIVLGLMWTIILYFQIEELTSNLPQLQSLSSSASSVDSIVSSETPSPPSKRK

SEQ ID NO: 4503 - protein, 85 aa, Homo sapiens
VTTKIQGNAKKALLKWVQYTAGKQTGIEVKDFGKSWRSGVAFHSVIHAIRPELVDLETVKGRSNRENLEDAFTIAETELGIPRLL

SEQ ID NO: 4504 - protein, 85 aa, Homo sapiens
DPEDVDVDKPDEKSIMTYVAQFLKHYPDIHNASTDGQEDDEILPGFPSFANSVQNFKREDRVIFKEMKVWIEQFERDLTRAQMVE

SEQ ID NO: 4505 - protein, 85 aa, Homo sapiens
SNLQDKYQSFKHFRVQYEMKRKQIEHLIQPLHRDGKLSLDQALVKQSWDRVTSRLFDWHIQLDKSLPAPLGTIGAWLYRAEVALR

SEQ ID NO: 4506 - protein, 85 aa, Homo sapiens
EEITVQQVHEETANTIQRKLEQHKDLLQNTDAHKRAFHEIYRTRSVNGIPVPPDQLEDMAERFHFVSSTSELHLMKMEFLELKYR

SEQ ID NO: 4507 - protein, 85 aa, Homo sapiens
MLSLLVLAESKLKSWIIKYGRRESVEQLLQNYVSFIENSKFFEQYEVTYQILKQTAEMYVKADGSVEEAENVMKFMNETTAQWRN

SEQ ID NO: 4508 - protein, 85 aa, Homo sapiens
LSVEVRSVRSMLEEVISNWDRYGNTVASLQAWLEDAEKMLNQSENAKKDFFRNLPHWIQQHTAMNDAGNFLIETCDEMVSRDLKQ

SEQ ID NO: 4509 - protein, 85 aa, Homo sapiens
QLLLLNGRWRELFMEVKQYAQADEMDRMKKEYTDCVVTLSAFATEAHKKLSEPLEVSFMNVKLLIQDLEDIEQRVPVMDAQYKII

SEQ ID NO: 4510 - protein, 85 aa, Homo sapiens
TKTAHLITKESPQEEGKEMFATMSKLKEQLTKVKECYSPLLYESQQLLIPLEELEKQMTSFYDSLGKINEIITVLEREAQSSALF

SEQ ID NO: 4511 - protein, 85 aa, Homo sapiens
KQKHQELLACQENCKKTLTLIEKGSQSVQKFVTLSNVLKHFDQTRLQRQIADIHVAFQSMVKKTGDWKKHVETNSRLMKKFEESR

SEQ ID NO: 4512 - protein, 85 aa, Homo sapiens
AELEKVLRIAQEGLEEKGDPEELLRRHTEFFSQLDQRVLNAFLKACDELTDILPEQEQQGLQEAVRKLHKQWKDLQGEAPYHLLH

SEQ ID NO: 4513 - protein, 85 aa, Homo sapiens
MKIDVEKNRFLASVEECRTELDRETKLMPQEGSEKIIKEHRVFFSDKGPHHLCEKRLQLIEELCVKLPVRDPVRDTPGTCHVTLK

SEQ ID NO: 4514 - protein, 85 aa, Homo sapiens
ELRAAIDSTYRKLMEDPDKWKDYTSRFSEFSSWISTNETQLKGIKGEAIDTANHGEVKRAVEEIRNGVTKRGETLSWLKSRLKVL

SEQ ID NO: 4515 - protein, 85 aa, Homo sapiens
TEVSSENEAQKQGDELAKLSSSFKALVTLLSEVEKMLSNFGDCVQYKEIVKNSLEELISGSKEVQEQAEKILDTENLFEAQQLLL

SEQ ID NO: 4516 - protein, 85 aa, Homo sapiens
HHQQKTKRISAKKRDVQQQIAQAQQGEGGLPDRGHEELRKLESTLDGLERSRERQERRIQVTLRKWERFETNKETVVRYLFQTGS

SEQ ID NO: 4517 - protein, 85 aa, Homo sapiens
SHERFLSFSSLESLSSELEQTKEFSKRTESIAVQAENLVKEASEIPLGPQNKQLLQQQAKSIKEQVKKLEDTLEEDIKTMEMVKT

SEQ ID NO: 4518 - protein, 85 aa, Homo sapiens
KWDHFGSNFETLSVWITEKEKELNALETSSSAMDMQISQIKVTIQEIESKLSSIVGLEEEAQSFAQFVTTGESARIKAKLTQIRR

SEQ ID NO: 4519 - protein, 85 aa, Homo sapiens
YGEELREHAQCLEGTILGHLSQQQKFEENLRKIQQSVSEFEDKLAVPIKICSSATETYKVLQEHMDLCQALESLSSAITAFSASA

SEQ ID NO: 4520 - protein, 85 aa, Homo sapiens
RKVVNRDSCVQEAAALQQQYEDILRRAKERQTALENLLAHWQRLEKELSSFLTWLERGEAKASSPEMDISADRVKVEGELQLIQA

SEQ ID NO: 4521 - protein, 85 aa, Homo sapiens
MQNEVVSQASFYSKLLQLKESLFSVASKDDVKMMKLHLEQLDERWRDLPQIINKRINFLQSVVAEHQQFDELLLSFSVWIKLFLS

SEQ ID NO: 4522 - protein, 85 aa, Homo sapiens
ELQTTSEISIMDHQVALTRHKDHAAEVESKKGELQSLQGHLAKLGSLGRAEDLHLLQGKAEDCFQLFEEASQVVERRQLALSHLA

SEQ ID NO: 4523 - protein, 85 aa, Homo sapiens
EFLQSHASLSGILRQLRQTVEATNSMNKNESDLIEKDLNDALQNAKALESAAVSLDGILSKAQYHLKIGSSEQRTSCRATADQLC

SEQ ID NO: 4524 - protein, 85 aa, Homo sapiens
GEVERIQNLLGTKQSEADALAVLKKAFQDQKEELLKSIEDIEERTDKERLKEPTRQALQQRLRVFNQLEDELNSHEHELCWLKDK

SEQ ID NO: 4525 - protein, 85 aa, Homo sapiens
AKQIAQKDVAFAPEVDREINRLEVTWDDTKRLIHENQGQCCGLIDLMREYQNLKSAVSKVLENASSVIVTRTTIKDQEDLKWAFS

SEQ ID NO: 4526 - protein, 85 aa, Homo sapiens
KHETAKNKMNYKQKDLDNFTSKGKHLLSELKKIHSSDFSLVKTDMESTVDKWLDVSEKLEENMDRLRVSLSIWDDVLSTRDEIEG

SEQ ID NO: 4527 - protein, 85 aa, Homo sapiens
WSNNCVPQMAENISNLDNHLRAEELLKEFESEVKNKALRLEELHSKVNDLKELTKNLETPPDLQFIEADLMQKLEHAKEITEVAK

SEQ ID NO: 4528 - protein, 85 aa, Homo sapiens
GTLKDFTAQSTQVEKFINDITTWFTKVEESLMNCAQNETCEALKKVKDIQKELQSQQSNISSTQENLNSLCRKYHSAELESLGRA

SEQ ID NO: 4529 - protein, 85 aa, Homo sapiens
MTGLIKKHEAVSQLCSKTQASLQESLEKHFSESMQEFQEWFLGAKAAAKESSDRTGDSKVLEAKLHDLQNILDSVSDGQSKLDAV

SEQ ID NO: 4530 - protein, 85 aa, Homo sapiens
TQEGQTLYAHLSKQIVSSIQEQITKANEEFQAFLKQCLKDKQALQDCASELGSFEDQHRKLNLWIHEMEERFNTENLGESKQHIP

SEQ ID NO: 4531 - protein, 85 aa, Homo sapiens
EKKNEVHKVEMFLGELLAARESLDKLSQRGQLLSEEGHGAGQEGRLCSQLLTSHQNLLRMTKEKLRSCQVALQEHEALEEALQSM

SEQ ID NO: 4532 - protein, 85 aa, Homo sapiens
WFWVKAIQDRLACAESTLGSKDTLEKRLSQIQDILLMKGEGEVKLNMAIGKGEQALRSSNKEGQRVIQTQLETLKEVWADIMSSS

SEQ ID NO: 4533 - protein, 85 aa, Homo sapiens
VHAQSTLESVISQWNDYVERKNQLEQWMESVDQKIEHPLQPQPGLKEKFVLLDHLQSILSEAEDHTRALHRLIAKSRELYEKTED

SEQ ID NO: 4534 - protein, 85 aa, Homo sapiens
ESFKDTAQEELKTQFNDIMTVAKEKMRKVEEIVKDHLMYLDAVHEFTDWLHSAKEELHRWSDMSGDSSATQKKLSKIKELIDSRE

SEQ ID NO: 4535 - protein, 85 aa, Homo sapiens
IGASRLSRVESLAPEVKQNTTASGCELMHTEMQALRADWKQWEDSVFQTQSCLENLVSQMALSEQEFSGQVAQLEQALEQFSALL

SEQ ID NO: 4536 - protein, 85 aa, Homo sapiens
KTWAQQLTLLEGKNTDEEIVECWHKGQEILDALQKAEPRTEDLKSQLNELCRFSRDLSTYSGKVSGLIKEYNCLCLQASKGCQNK

SEQ ID NO: 4537 - protein, 85 aa, Homo sapiens
EQILQQRFRKAFRDFQQWLVNAKITTAKCFDIPQNISEVSTSLQKIQEFLSESENGQHKLNMMLSKGELLSTLLTKEKAKGIQAK

SEQ ID NO: 4538 - protein, 85 aa, Homo sapiens
VTAAKEDWKNFHSNLHQKESALENLKIQMKDFEVSAEPIQDWLSKTEKMVHESSNRLYDLPAKRREQQKLQSVLEEIHCYEPQLN

SEQ ID NO: 4539 - protein, 85 aa, Homo sapiens
RLKEKAQQLWEGQAASKSFRHRVSQLSSQYLALSNLTKEKVSRLDRIVAEHNQFSLGIKELQDWMTDAIHMLDSYCHPTSDKSVL

SEQ ID NO: 4540 - protein, 85 aa, Homo sapiens
DSRTLKLEALLSVKQEKEIQMKMIVTRGESVLQNTSPEGIPTIQQQLQSVKDMWASLLSAGIRCKSQLEGALSKWTSYQDGVRQF

SEQ ID NO: 4541 - protein, 85 aa, Homo sapiens
SGWMDSMEANLNESERQHAELRDKTTMLGKAKLLNEEVLSYSSLLETIEVKGAGMTEHYVTQLELQDLQERYRAIQERAKEAVTK

SEQ ID NO: 4542 - protein, 85 aa, Homo sapiens
SEKLVRLHQEYQRDLKAFEVWLGQEQEKLDQYSVLEGDAHTHETTLRDLQELQVHCAEGQALLNSVLHTREDVIPSGIPQAEDRA

SEQ ID NO: 4543 - protein, 85 aa, Homo sapiens
LESLRQDWQAYQHRLSETRTQFNNVVNKLRLMEQKFQQVDEWLKTAEEKVSPRTRRQSNRATKEIQLHQMKKWHEEVTAYRDEVE

SEQ ID NO: 4544 - protein, 85 aa, Homo sapiens
EVGARAQEILDESHVNSRMGCQATQLTSRYQALLLQVLEQIKFLEEEIQSLEESESSLSSYSDWYGSTHKNFKNVATKIDKVDTV

SEQ ID NO: 4545 - protein, 85 aa, Homo sapiens
MMGKKLKTLEVLLKDMEKGHSLLKSAREKGERAVKYLEEGEAERLRKEIHDHMEQLKELTSTVRKEHMTLEKGLHLAKEFSDKCK

SEQ ID NO: 4546 - protein, 85 aa, Homo sapiens
ALTQWIAEYQEILHVPEEPKMELYEKKAQLSKYKSLQQTVLSHEPSVKSVREKGEALLELVQDVTLKDKIDQLQSDYQDLCSIGK

SEQ ID NO: 4547 - protein, 85 aa, Homo sapiens
EHVFSLEAKVKDHEDYNSELQEVEKWLLQMSGRLVAPDLLETSSLETITQQLAHHKAMMEEIAGFEDRLNNLQMKGDTLIGQCAD

SEQ ID NO: 4548 - protein, 85 aa, Homo sapiens
HLQAKLKQNVHAHLQGTKDSYSAICSTAQRMYQSLEHELQKHVSRQDTLQQCQAWLSAVQPDLEPSPQPPLSRAEAIKQVKHFRA

SEQ ID NO: 4549 - protein, 85 aa, Homo sapiens
MQEQARTYLDLLCSMCDLSNASVKTTAKDIQQTEQTIEQKLVQAQNLTQGWEEIKHLKSELWIYLQDADQQLQNMKRRHSELELN

SEQ ID NO: 4550 - protein, 85 aa, Homo sapiens
IAQNMVSQVKDFVKKLQSKQASVNTIIEKVNKLTKKEESPEHKEINHLNDQWLDLCRQSNNLCLQREEDLQRTRDYHDCMNVVEV

SEQ ID NO: 4551 - protein, 85 aa, Homo sapiens
FLEKFTTEWDNLARSDAESTAVHLEALKKLALALQERKYAIEDLKDQKQKMIEHLNLDDKELVKEQTSHLEQRWFQLEDLIKRKI

SEQ ID NO: 4552 - protein, 85 aa, Homo sapiens
QVSVTNLEELNVVQSRFQELMEWAEEQQPNIAEALKQSPPPDMAQNLLMDHLAICSELEAKQMLLKSLIKDADRVMADLGLNERQ

SEQ ID NO: 4553 - protein, 85 aa, Homo sapiens
VIQKALSDAQSHVNCLSDLVGQRRKYLNKALSEKTQFLMAVFQATSQIQQHERKIMFREHICLLPDDVSKQVKTCKSAQASLKTY

SEQ ID NO: 4554 - protein, 85 aa, Homo sapiens
QNEVTGLWAQGRELMKEVTEQEKSEVLGKLQELQSVYDSVLQKCSHRLQELEKNLVSRKHFKEDFDKACHWLKQADIVTFPEINL

SEQ ID NO: 4555 - protein, 85 aa, Homo sapiens
MNESSELHTQLAKYQNILEQSPEYENLLLTLQRTGQTILPSLNEVDHSYLSEKLNALPRQFNVIVALAKDKFYKVQEAILARKEY

SEQ ID NO: 4556 - protein, 85 aa, Homo sapiens
ASLIELTTQSLSELEAQFLRMSKVPTDLAVEEALSLQDGCRAILDEVAGLGEAVDELNQKKEGFRSTGQPWQPDKMLHLVTLYHR

SEQ ID NO: 4557 - protein, 85 aa, Homo sapiens
MKRQTEQRVSLLEDTTSAYQEHEKMCQQLERQLKSVKEEQSKVNEETLPAEEKLKMYHSLAGSLQDSGIVLKRVTIHLEDLAPHL

SEQ ID NO: 4558 - protein, 85 aa, Homo sapiens
DPLAYEKARHQIQSWQGELKLLTSAIGETVTECESRMVQSIDFQTEMSRSLDWLRRVKAELSGPVYLDLNLQDIQEEIRKIQIHQ

SEQ ID NO: 4559 - protein, 85 aa, Homo sapiens
EEVQSSLRIMNALSHKEKEKFTKAKELISADLEHSLAELSELDGDIQEALRTRQATLTEIYSQCQRYYQVFQAANDWLEDAQELL

SEQ ID NO: 4560 - protein, 85 aa, Homo sapiens
QLAGNGLDVESAEENLKSHMEFFSTEDQFHSNLEELHSLVATLDPLIKPTGKEDLEQKVASLELRSQRMSRDSGAQVDLLQRCTA

SEQ ID NO: 4561 - protein, 85 aa, Homo sapiens
QWHDYQKAREEVIELMNDTEKKLSEFSLLKTSSSHEAEEKLSEHKALVSVVNSFHEKIVALEEKASQLEKTGNDASKATLSRSMT

SEQ ID NO: 4562 - protein, 85 aa, Homo sapiens
TVWQRWTRLRAVAQDQEKILEDAVDEWTGFNNKVKKATEMIDQLQDKLPGSSAEKASKAELLTLLEYHDTFVLELEQQQSALGML

SEQ ID NO: 4563 - protein, 85 aa, Homo sapiens
RQQTLSMLQDGAAPTPGEEPPLMQEITAMQDRCLNMQEKVKTNGKLVKQELKDREMVETQINSVKCWVQETKEYLGNPTIEIDAQ

SEQ ID NO: 4564 - protein, 85 aa, Homo sapiens
LEELQILLTEATNHRQNIEKMAEEQKEKYLGLYTILPSELSLQLAEVALDLKIRDQIQDKIKEVEQSKATSQELSRQIQKLAKDL

SEQ ID NO: 4565 - protein, 85 aa, Homo sapiens
TTILTKLKAKTDNVVQAKTDQKVLGEELDGCNSKLMELDAAVQKFLEQNGQLGKPLAKKIGKLTELHQQTIRQAENRLSKLNQAA

SEQ ID NO: 4566 - protein, 85 aa, Homo sapiens
SHLEEYNEMLELILKWIEKAKVLAHGTIAWNSASQLREQYILHQTLLEESKEIDSELEAMTEKLQYLTSVYCTEKMSQQVAELGR

SEQ ID NO: 4567 - protein, 85 aa, Homo sapiens
ETEELRQMIKIRLQNLQDAAKDMKKFEAELKKLQAALEQAQATLTSPEVGRLSLKEQLSHRQHLLSEMESLKPKVQAVQLCQSAL

SEQ ID NO: 4568 - protein, 85 aa, Homo sapiens
RIPEDVVASLPLCHAALRLQEEASRLQHTAIQQCNIMQEAVVQYEQYEQEMKHLQQLIEGAHREIEDKPVATSNIQELQAQISRH

SEQ ID NO: 4569 - protein, 85 aa, Homo sapiens
EELAQKIKGYQEQIASLNSKCKMLTMKAKHATMLLTVTEVEGLAEGTEDLDGELLPTPSAHPSVVMMTAGRCHTLLSPVTEESGE

SEQ ID NO: 4570 - protein, 85 aa, Homo sapiens
EGTNSEISSPPACRSPSPVANTDASVNQDIAYYQALSAERLQTDAAKIHPSTSASQEFYEPGLEPSATAKLGDLQRSWETLKNVI

SEQ ID NO: 4571 - protein, 85 aa, Homo sapiens
SEKQRTLYEALERQQKYQDSLQSISTKMEAIELKLSESPEPGRSPESQMAEHQALMDEILMLQDEINELQSSLAEELVSESCEAD

SEQ ID NO: 4572 - protein, 85 aa, Homo sapiens
PAEQLALQSTLTVLAERMSTIRMKASGKRQLLEEKLNDQLEEQRQEQALQRYRCEADELDSWLLSTKATLDTALSPPKEPMDMEA

SEQ ID NO: 4573 - protein, 85 aa, Homo sapiens
QLMDCQNMLVEIEQKVVALSELSVHNENLLLEGKAHTKDEAEQLAGKLRRLKGSLLELQRALHDKQLNMQGTAQEKEESDVDLTA

SEQ ID NO: 4574 - protein, 85 aa, Homo sapiens
TQSPGVQEWLAQARTTWTQQRQSSLQQQKELEQELAEQKSLLRSVASRGEEILIQHSAAETSGDAGEKPDVLSQELGMEGEKSSA

SEQ ID NO: 4575 - protein, 85 aa, Homo sapiens
EDQMRMKWESLHQEFSTKQKLLQNVLEQEQEQVLYSRPNRLLSGVPLYKGDVPTQDKSAVTSLLDGLNQAFEEVSSQSGGAKRQS

SEQ ID NO: 4576 - protein, 85 aa, Homo sapiens
IHLEQKLYDGVSATSTWLDDVEERLFVATALLPEETETCLFNQEILAKDIKEMSEEMDKNKNLFSQAFPENGDNRDVIEDTLGCL

SEQ ID NO: 4577 - protein, 85 aa, Homo sapiens
MGRLSLLDSVVNQRCHQMKERLQQILNFQNDLKVLFTSLADNKYIILQKLANVFEQPVAEQIEAIQQAEDGLKEFDAGIIELKRR

SEQ ID NO: 4578 - protein, 85 aa, Homo sapiens
GDKLQVEQPSMQELSKLQDMYDELMMIIGSRRSGLNQNLTLKSQYERALQDLADLLETGQEKMAGDQKIIVSSKEEIQQLLDKHK

SEQ ID NO: 4579 - protein, 85 aa, Homo sapiens
EYFQGLESHMILTETLFRKIISFAVQKETQFHTELMAQASAVLKRAHKRGVELEYILETWSHLDEDQQELSRQLEVVESSIPSVG

SEQ ID NO: 4580 - protein, 85 aa, Homo sapiens
MVEENEDRLIDRITLYQHLKSSLNEYQPKLYQVLDDGKRLLISISCSDLESQLNQLGECWLSNTNKMSKELHRLETILKHWTRYQ

SEQ ID NO: 4581 - protein, 85 aa, Homo sapiens
SESADLIHWLQSAKDRLEFWTQQSVTVPQELEMVRDHLNAFLEFSKEVDAQSSLKSSVLSTGNQLLRLKKVDTATLRSELSRIDS

SEQ ID NO: 4582 - protein, 85 aa, Homo sapiens
QWTDLLTNIPAVQEKLHQLQMDKLPSRHAISEVMSWISLMENVIQKDEDNIKNSIGYKAIHEYLQKYKGFKIDINCKQLTVDFVN

SEQ ID NO: 4583 - protein, 85 aa, Homo sapiens
QSVLQISSQDVESKRSDKTDFAEQLGAMNKSWQILQGLVTEKIQLLEGLLESWSEYENNVQCLKTWFETQEKRLKQQHRIGDQAS

SEQ ID NO: 4584 - protein, 85 aa, Homo sapiens
VQNALKDCQDLEDLIKAKEKEVEKIEQNGLALIQNKKEDVSSIVMSTLRELGQTWANLDHMVGQLKILLKSVLDQWSSHKVAFDK

SEQ ID NO: 4585 - protein, 85 aa, Homo sapiens
INSYLMEARYSLSRFRLLTGSLEAVQVQVDNLQNLQDDLEKQERSLQKFGSITNQLLKECHPPVTETLTNTLKEVNMRWNNLLEE

SEQ ID NO: 4586 - protein, 85 aa, Homo sapiens
IAEQLQSSKALLQLWQRYKDYSKQCASTVQQQEDRTNELLKAATNKDIADDEVATWIQDCNDLLKGLGTVKDSLFFLHELGEQLK

SEQ ID NO: 4587 - protein, 85 aa, Homo sapiens
QQVDASAASAIQSDQLSLSQHLCALEQALCKQQTSLQAGVLDYETFAKSLEALEAWIVEAEEILQGQDPSHSSDLSTIQERMEEL

SEQ ID NO: 4588 - protein, 85 aa, Homo sapiens
KGQMLKFSSMAPDLDRLNELGYRLPLNDKEIKRMQNLNRHWSLISSQTTERFSKLQSFLLQHQTFLEKCETWMEFLVQTEQKLAV

SEQ ID NO: 4589 - protein, 85 aa, Homo sapiens
EISGNYQHLLEQQRAHELFQAEMFSRQQILHSIIIDGQRLLEQGQVDDRDEFNLKLTLLSNQWQGVIRRAQQRRGIIDSQIRQWQ

SEQ ID NO: 4590 - protein, 85 aa, Homo sapiens
RYREMAEKLRKWLVEVSYLPMSGLGSVPIPLQQARTLFDEVQFKEKVFLRQQGSYILTVEAGKQLLLSADSGAEAALQAELAEIQ

SEQ ID NO: 4591 - protein, 85 aa, Homo sapiens
EKWKSASMRLEEQKKKLAFLLKDWEKCEKGIADSLEKLRTFKKKLSQSLPDHHEELHAEQMRCKELENAVGSWTDDLTQLSLLKD

SEQ ID NO: 4592 - protein, 85 aa, Homo sapiens
TLSAYISADDISILNERVELLQRQWEELCHQLSLRRQQIGERLNEWAVFSEKNKELCEWLTQMESKVSQNGDILIEEMIEKLKKD

SEQ ID NO: 4593 - protein, 85 aa, Homo sapiens
YQEEIAIAQENKIQLQQMGERLAKASHESKASEIEYKLGKVNDRWQHLLDLIAARVKKLKETLVAVQQLDKNMSSLRTWLAHIES

SEQ ID NO: 4594 - protein, 85 aa, Homo sapiens
ELAKPIVYDSCNSEEIQRKLNEQQELQRDIEKHSTGVASVLNLCEVLLHDCDACATDAECDSIQQATRNLDRRWRNICAMSMERR

SEQ ID NO: 4595 - protein, 85 aa, Homo sapiens
MKIEETWRLWQKFLDDYSRFEDWLKSSERTAAFPSSSGVIYTVAKEELKKFEAFQRQVHECLTQLELINKQYRRLARENRTDSAC

SEQ ID NO: 4596 - protein, 85 aa, Homo sapiens
SLKQMVHEGNQRWDNLQKRVTSILRRLKHFIGQREEFETARDSILVWLTEMDLQLTNIEHFSECDVQAKIKQLKAFQQEISLNHN

SEQ ID NO: 4597 - protein, 85 aa, Homo sapiens
KIEQIIAQGEQLIEKSEPLDAAIIEEELDELRRYCQEVFGRVERYHKKLIRLPLPDDEHDLSDRELELEDSAALSDLHWHDRSAD

SEQ ID NO: 4598 - protein, 85 aa, Homo sapiens
SLLSPQPSSNLSLSLAQPLRSERSGRDTPASVDSIPLEWDHDYDLSRDLESAMSRALPSEDEEGQDDKDFYLRGAVGLSGDHSAL

SEQ ID NO: 4599 - protein, 85 aa, Homo sapiens
ESQIRQLGKALDDSRFQIQQTENIIRSKTPTGPELDTSYKGYMKLLGECSSSIDSVKRLEHKLKEEEESLPGFVNLHSTETQTAG

SEQ ID NO: 4600 - protein, 85 aa, Homo sapiens
VIDRWELLQAQALSKELRMKQNLQKWQQFNSDLNSIWAWLGDTEEELEQLQRLELSTDIQTIELQIKKLKELQKAVDHRKAIILS

SEQ ID NO: 4601 - protein, 85 aa, Homo sapiens
INLCSPEFTQADSKESRDLQDRLSQMNGRWDRVCSLLEEWRGLLQDALMQCQGFHEMSHGLLLMLENIDRRKNEIVPIDSNLDAE

SEQ ID NO: 4602 - protein, 85 aa, Homo sapiens
ILQDHHKQLMQIKHELLESQLRVASLQDMSCQLLVNAEGTDCLEAKEKVHVIGNRLKLLLKEVSRHIKELEKLLDVSSSQQDLSS

SEQ ID NO: 4603 - protein, 85 aa, Homo sapiens
WSSADELDTSGSVSPTSGRSTPNRQKTPRGKCSLSQPGPSVSSPHSRSTKGGSDSSLSEPGPGRSGRGFLFRVLRAALPLQLLLL

SEQ ID NO: 4604 - protein, 84 aa, Homo sapiens
SPHSRSTKGGSDSSLSEPGPGRSGRGFLFRVLRAALPLQLLLLLLIGLACLVPMSEEDYSCALSNNFARSFHPMLRYTNGPPPL

SEQ ID NO: 4605 - protein, 85 aa, Homo sapiens
RKPPMVVDDLFEDMKDGVKLLALLEVLSGQKLPCEQGRRMKRIHAVANIGTALKFLEGRKIKLVNINSTDIADGRPSIVLGLMWT

SEQ ID NO: 4606 - protein, 85 aa, Homo sapiens
IILYFQIEELTSNLPQLQSLSSSASSVDSIVSSETPSPPSKRKVTTKIQGNAKKALLKWVQYTAGKQTGIEVKDFGKSWRSGVAF

SEQ ID NO: 4607 - protein, 85 aa, Homo sapiens
HSVIHAIRPELVDLETVKGRSNRENLEDAFTIAETELGIPRLLDPEDVDVDKPDEKSIMTYVAQFLKHYPDIHNASTDGQEDDEI

SEQ ID NO: 4608 - protein, 85 aa, Homo sapiens
LPGFPSFANSVQNFKREDRVIFKEMKVWIEQFERDLTRAQMVESNLQDKYQSFKHFRVQYEMKRKQIEHLIQPLHRDGKLSLDQA

SEQ ID NO: 4609 - protein, 85 aa, Homo sapiens
MVKQSWDRVTSRLFDWHIQLDKSLPAPLGTIGAWLYRAEVALREEITVQQVHEETANTIQRKLEQHKDLLQNTDAHKRAFHEIYR

SEQ ID NO: 4610 - protein, 85 aa, Homo sapiens
TRSVNGIPVPPDQLEDMAERFHFVSSTSELHLMKMEFLELKYRLLSLLVLAESKLKSWIIKYGRRESVEQLLQNYVSFIENSKFF

SEQ ID NO: 4611 - protein, 85 aa, Homo sapiens
EQYEVTYQILKQTAEMYVKADGSVEEAENVMKFMNETTAQWRNLSVEVRSVRSMLEEVISNWDRYGNTVASLQAWLEDAEKMLNQ

SEQ ID NO: 4612 - protein, 85 aa, Homo sapiens
SENAKKDFFRNLPHWIQQHTAMNDAGNFLIETCDEMVSRDLKQQLLLLNGRWRELFMEVKQYAQADEMDRMKKEYTDCVVTLSAF

SEQ ID NO: 4613 - protein, 85 aa, Homo sapiens
ATEAHKKLSEPLEVSFMNVKLLIQDLEDIEQRVPVMDAQYKIITKTAHLITKESPQEEGKEMFATMSKLKEQLTKVKECYSPLLY

SEQ ID NO: 4614 - protein, 85 aa, Homo sapiens
ESQQLLIPLEELEKQMTSFYDSLGKINEIITVLEREAQSSALFKQKHQELLACQENCKKTLTLIEKGSQSVQKFVTLSNVLKHFD

SEQ ID NO: 4615 - protein, 85 aa, Homo sapiens
QTRLQRQIADIHVAFQSMVKKTGDWKKHVETNSRLMKKFEESRAELEKVLRIAQEGLEEKGDPEELLRRHTEFFSQLDQRVLNAF

SEQ ID NO: 4616 - protein, 85 aa, Homo sapiens
MKACDELTDILPEQEQQGLQEAVRKLHKQWKDLQGEAPYHLLHLKIDVEKNRFLASVEECRTELDRETKLMPQEGSEKIIKEHRV

SEQ ID NO: 4617 - protein, 85 aa, Homo sapiens
FFSDKGPHHLCEKRLQLIEELCVKLPVRDPVRDTPGTCHVTLKELRAAIDSTYRKLMEDPDKWKDYTSRFSEFSSWISTNETQLK

SEQ ID NO: 4618 - protein, 85 aa, Homo sapiens
GIKGEAIDTANHGEVKRAVEEIRNGVTKRGETLSWLKSRLKVLTEVSSENEAQKQGDELAKLSSSFKALVTLLSEVEKMLSNFGD

SEQ ID NO: 4619 - protein, 85 aa, Homo sapiens
CVQYKEIVKNSLEELISGSKEVQEQAEKILDTENLFEAQQLLLHHQQKTKRISAKKRDVQQQIAQAQQGEGGLPDRGHEELRKLE

SEQ ID NO: 4620 - protein, 85 aa, Homo sapiens
STLDGLERSRERQERRIQVTLRKWERFETNKETVVRYLFQTGSSHERFLSFSSLESLSSELEQTKEFSKRTESIAVQAENLVKEA

SEQ ID NO: 4621 - protein, 85 aa, Homo sapiens
SEIPLGPQNKQLLQQQAKSIKEQVKKLEDTLEEDIKTMEMVKTKWDHFGSNFETLSVWITEKEKELNALETSSSAMDMQISQIKV

SEQ ID NO: 4622 - protein, 85 aa, Homo sapiens
TIQEIESKLSSIVGLEEEAQSFAQFVTTGESARIKAKLTQIRRYGEELREHAQCLEGTILGHLSQQQKFEENLRKIQQSVSEFED

SEQ ID NO: 4623 - protein, 85 aa, Homo sapiens
KLAVPIKICSSATETYKVLQEHMDLCQALESLSSAITAFSASARKVVNRDSCVQEAAALQQQYEDILRRAKERQTALENLLAHWQ

SEQ ID NO: 4624 - protein, 85 aa, Homo sapiens
RLEKELSSFLTWLERGEAKASSPEMDISADRVKVEGELQLIQALQNEVVSQASFYSKLLQLKESLFSVASKDDVKMMKLHLEQLD

SEQ ID NO: 4625 - protein, 85 aa, Homo sapiens
ERWRDLPQIINKRINFLQSVVAEHQQFDELLLSFSVWIKLFLSELQTTSEISIMDHQVALTRHKDHAAEVESKKGELQSLQGHLA

SEQ ID NO: 4626 - protein, 85 aa, Homo sapiens
KLGSLGRAEDLHLLQGKAEDCFQLFEEASQVVERRQLALSHLAEFLQSHASLSGILRQLRQTVEATNSMNKNESDLIEKDLNDAL

SEQ ID NO: 4627 - protein, 85 aa, Homo sapiens
QNAKALESAAVSLDGILSKAQYHLKIGSSEQRTSCRATADQLCGEVERIQNLLGTKQSEADALAVLKKAFQDQKEELLKSIEDIE

SEQ ID NO: 4628 - protein, 85 aa, Homo sapiens
ERTDKERLKEPTRQALQQRLRVFNQLEDELNSHEHELCWLKDKAKQIAQKDVAFAPEVDREINRLEVTWDDTKRLIHENQGQCCG

SEQ ID NO: 4629 - protein, 85 aa, Homo sapiens
LIDLMREYQNLKSAVSKVLENASSVIVTRTTIKDQEDLKWAFSKHETAKNKMNYKQKDLDNFTSKGKHLLSELKKIHSSDFSLVK

SEQ ID NO: 4630 - protein, 85 aa, Homo sapiens
TDMESTVDKWLDVSEKLEENMDRLRVSLSIWDDVLSTRDEIEGWSNNCVPQMAENISNLDNHLRAEELLKEFESEVKNKALRLEE

SEQ ID NO: 4631 - protein, 85 aa, Homo sapiens
MHSKVNDLKELTKNLETPPDLQFIEADLMQKLEHAKEITEVAKGTLKDFTAQSTQVEKFINDITTWFTKVEESLMNCAQNETCEA

SEQ ID NO: 4632 - protein, 85 aa, Homo sapiens
MKKVKDIQKELQSQQSNISSTQENLNSLCRKYHSAELESLGRAMTGLIKKHEAVSQLCSKTQASLQESLEKHFSESMQEFQEWFL

SEQ ID NO: 4633 - protein, 85 aa, Homo sapiens
GAKAAAKESSDRTGDSKVLEAKLHDLQNILDSVSDGQSKLDAVTQEGQTLYAHLSKQIVSSIQEQITKANEEFQAFLKQCLKDKQ

SEQ ID NO: 4634 - protein, 85 aa, Homo sapiens
ALQDCASELGSFEDQHRKLNLWIHEMEERFNTENLGESKQHIPEKKNEVHKVEMFLGELLAARESLDKLSQRGQLLSEEGHGAGQ

SEQ ID NO: 4635 - protein, 85 aa, Homo sapiens
EGRLCSQLLTSHQNLLRMTKEKLRSCQVALQEHEALEEALQSMWFWVKAIQDRLACAESTLGSKDTLEKRLSQIQDILLMKGEGE

SEQ ID NO: 4636 - protein, 85 aa, Homo sapiens
VKLNMAIGKGEQALRSSNKEGQRVIQTQLETLKEVWADIMSSSVHAQSTLESVISQWNDYVERKNQLEQWMESVDQKIEHPLQPQ

SEQ ID NO: 4637 - protein, 85 aa, Homo sapiens
PGLKEKFVLLDHLQSILSEAEDHTRALHRLIAKSRELYEKTEDESFKDTAQEELKTQFNDIMTVAKEKMRKVEEIVKDHLMYLDA

SEQ ID NO: 4638 - protein, 85 aa, Homo sapiens
VHEFTDWLHSAKEELHRWSDMSGDSSATQKKLSKIKELIDSREIGASRLSRVESLAPEVKQNTTASGCELMHTEMQALRADWKQW

SEQ ID NO: 4639 - protein, 85 aa, Homo sapiens
EDSVFQTQSCLENLVSQMALSEQEFSGQVAQLEQALEQFSALLKTWAQQLTLLEGKNTDEEIVECWHKGQEILDALQKAEPRTED

SEQ ID NO: 4640 - protein, 85 aa, Homo sapiens
LKSQLNELCRFSRDLSTYSGKVSGLIKEYNCLCLQASKGCQNKEQILQQRFRKAFRDFQQWLVNAKITTAKCFDIPQNISEVSTS

SEQ ID NO: 4641 - protein, 85 aa, Homo sapiens
LQKIQEFLSESENGQHKLNMMLSKGELLSTLLTKEKAKGIQAKVTAAKEDWKNFHSNLHQKESALENLKIQMKDFEVSAEPIQDW

SEQ ID NO: 4642 - protein, 85 aa, Homo sapiens
MSKTEKMVHESSNRLYDLPAKRREQQKLQSVLEEIHCYEPQLNRLKEKAQQLWEGQAASKSFRHRVSQLSSQYLALSNLTKEKVS

SEQ ID NO: 4643 - protein, 85 aa, Homo sapiens
RLDRIVAEHNQFSLGIKELQDWMTDAIHMLDSYCHPTSDKSVLDSRTLKLEALLSVKQEKEIQMKMIVTRGESVLQNTSPEGIPT

SEQ ID NO: 4644 - protein, 85 aa, Homo sapiens
IQQQLQSVKDMWASLLSAGIRCKSQLEGALSKWTSYQDGVRQFSGWMDSMEANLNESERQHAELRDKTTMLGKAKLLNEEVLSYS

SEQ ID NO: 4645 - protein, 85 aa, Homo sapiens
SLLETIEVKGAGMTEHYVTQLELQDLQERYRAIQERAKEAVTKSEKLVRLHQEYQRDLKAFEVWLGQEQEKLDQYSVLEGDAHTH

SEQ ID NO: 4646 - protein, 85 aa, Homo sapiens
ETTLRDLQELQVHCAEGQALLNSVLHTREDVIPSGIPQAEDRALESLRQDWQAYQHRLSETRTQFNNVVNKLRLMEQKFQQVDEW

SEQ ID NO: 4647 - protein, 85 aa, Homo sapiens
LKTAEEKVSPRTRRQSNRATKEIQLHQMKKWHEEVTAYRDEVEEVGARAQEILDESHVNSRMGCQATQLTSRYQALLLQVLEQIK

SEQ ID NO: 4648 - protein, 85 aa, Homo sapiens
FLEEEIQSLEESESSLSSYSDWYGSTHKNFKNVATKIDKVDTVMMGKKLKTLEVLLKDMEKGHSLLKSAREKGERAVKYLEEGEA

SEQ ID NO: 4649 - protein, 85 aa, Homo sapiens
ERLRKEIHDHMEQLKELTSTVRKEHMTLEKGLHLAKEFSDKCKALTQWIAEYQEILHVPEEPKMELYEKKAQLSKYKSLQQTVLS

SEQ ID NO: 4650 - protein, 85 aa, Homo sapiens
HEPSVKSVREKGEALLELVQDVTLKDKIDQLQSDYQDLCSIGKEHVFSLEAKVKDHEDYNSELQEVEKWLLQMSGRLVAPDLLET

SEQ ID NO: 4651 - protein, 85 aa, Homo sapiens
SSLETITQQLAHHKAMMEEIAGFEDRLNNLQMKGDTLIGQCADHLQAKLKQNVHAHLQGTKDSYSAICSTAQRMYQSLEHELQKH

SEQ ID NO: 4652 - protein, 85 aa, Homo sapiens
VSRQDTLQQCQAWLSAVQPDLEPSPQPPLSRAEAIKQVKHFRALQEQARTYLDLLCSMCDLSNASVKTTAKDIQQTEQTIEQKLV

SEQ ID NO: 4653 - protein, 85 aa, Homo sapiens
QAQNLTQGWEEIKHLKSELWIYLQDADQQLQNMKRRHSELELNIAQNMVSQVKDFVKKLQSKQASVNTIIEKVNKLTKKEESPEH

SEQ ID NO: 4654 - protein, 85 aa, Homo sapiens
KEINHLNDQWLDLCRQSNNLCLQREEDLQRTRDYHDCMNVVEVFLEKFTTEWDNLARSDAESTAVHLEALKKLALALQERKYAIE

SEQ ID NO: 4655 - protein, 85 aa, Homo sapiens
DLKDQKQKMIEHLNLDDKELVKEQTSHLEQRWFQLEDLIKRKIQVSVTNLEELNVVQSRFQELMEWAEEQQPNIAEALKQSPPPD

SEQ ID NO: 4656 - protein, 85 aa, Homo sapiens
MAQNLLMDHLAICSELEAKQMLLKSLIKDADRVMADLGLNERQVIQKALSDAQSHVNCLSDLVGQRRKYLNKALSEKTQFLMAVF

SEQ ID NO: 4657 - protein, 85 aa, Homo sapiens
QATSQIQQHERKIMFREHICLLPDDVSKQVKTCKSAQASLKTYQNEVTGLWAQGRELMKEVTEQEKSEVLGKLQELQSVYDSVLQ

SEQ ID NO: 4658 - protein, 85 aa, Homo sapiens
KCSHRLQELEKNLVSRKHFKEDFDKACHWLKQADIVTFPEINLMNESSELHTQLAKYQNILEQSPEYENLLLTLQRTGQTILPSL

SEQ ID NO: 4659 - protein, 85 aa, Homo sapiens
NEVDHSYLSEKLNALPRQFNVIVALAKDKFYKVQEAILARKEYASLIELTTQSLSELEAQFLRMSKVPTDLAVEEALSLQDGCRA

SEQ ID NO: 4660 - protein, 85 aa, Homo sapiens
ILDEVAGLGEAVDELNQKKEGFRSTGQPWQPDKMLHLVTLYHRLKRQTEQRVSLLEDTTSAYQEHEKMCQQLERQLKSVKEEQSK

SEQ ID NO: 4661 - protein, 85 aa, Homo sapiens
VNEETLPAEEKLKMYHSLAGSLQDSGIVLKRVTIHLEDLAPHLDPLAYEKARHQIQSWQGELKLLTSAIGETVTECESRMVQSID

SEQ ID NO: 4662 - protein, 85 aa, Homo sapiens
FQTEMSRSLDWLRRVKAELSGPVYLDLNLQDIQEEIRKIQIHQEEVQSSLRIMNALSHKEKEKFTKAKELISADLEHSLAELSEL

SEQ ID NO: 4663 - protein, 85 aa, Homo sapiens
DGDIQEALRTRQATLTEIYSQCQRYYQVFQAANDWLEDAQELLQLAGNGLDVESAEENLKSHMEFFSTEDQFHSNLEELHSLVAT

SEQ ID NO: 4664 - protein, 85 aa, Homo sapiens
MDPLIKPTGKEDLEQKVASLELRSQRMSRDSGAQVDLLQRCTAQWHDYQKAREEVIELMNDTEKKLSEFSLLKTSSSHEAEEKLS

SEQ ID NO: 4665 - protein, 85 aa, Homo sapiens
EHKALVSVVNSFHEKIVALEEKASQLEKTGNDASKATLSRSMTTVWQRWTRLRAVAQDQEKILEDAVDEWTGFNNKVKKATEMID

SEQ ID NO: 4666 - protein, 85 aa, Homo sapiens
QLQDKLPGSSAEKASKAELLTLLEYHDTFVLELEQQQSALGMLRQQTLSMLQDGAAPTPGEEPPLMQEITAMQDRCLNMQEKVKT

SEQ ID NO: 4667 - protein, 85 aa, Homo sapiens
NGKLVKQELKDREMVETQINSVKCWVQETKEYLGNPTIEIDAQLEELQILLTEATNHRQNIEKMAEEQKEKYLGLYTILPSELSL

SEQ ID NO: 4668 - protein, 85 aa, Homo sapiens
QLAEVALDLKIRDQIQDKIKEVEQSKATSQELSRQIQKLAKDLTTILTKLKAKTDNVVQAKTDQKVLGEELDGCNSKLMELDAAV

SEQ ID NO: 4669 - protein, 85 aa, Homo sapiens
QKFLEQNGQLGKPLAKKIGKLTELHQQTIRQAENRLSKLNQAASHLEEYNEMLELILKWIEKAKVLAHGTIAWNSASQLREQYIL

SEQ ID NO: 4670 - protein, 85 aa, Homo sapiens
HQTLLEESKEIDSELEAMTEKLQYLTSVYCTEKMSQQVAELGRETEELRQMIKIRLQNLQDAAKDMKKFEAELKKLQAALEQAQA

SEQ ID NO: 4671 - protein, 85 aa, Homo sapiens
TLTSPEVGRLSLKEQLSHRQHLLSEMESLKPKVQAVQLCQSALRIPEDVVASLPLCHAALRLQEEASRLQHTAIQQCNIMQEAVV

SEQ ID NO: 4672 - protein, 85 aa, Homo sapiens
QYEQYEQEMKHLQQLIEGAHREIEDKPVATSNIQELQAQISRHEELAQKIKGYQEQIASLNSKCKMLTMKAKHATMLLTVTEVEG

SEQ ID NO: 4673 - protein, 85 aa, Homo sapiens
MAEGTEDLDGELLPTPSAHPSVVMMTAGRCHTLLSPVTEESGEEGTNSEISSPPACRSPSPVANTDASVNQDIAYYQALSAERLQ

SEQ ID NO: 4674 - protein, 85 aa, Homo sapiens
TDAAKIHPSTSASQEFYEPGLEPSATAKLGDLQRSWETLKNVISEKQRTLYEALERQQKYQDSLQSISTKMEAIELKLSESPEPG

SEQ ID NO: 4675 - protein, 85 aa, Homo sapiens
RSPESQMAEHQALMDEILMLQDEINELQSSLAEELVSESCEADPAEQLALQSTLTVLAERMSTIRMKASGKRQLLEEKLNDQLEE

SEQ ID NO: 4676 - protein, 85 aa, Homo sapiens
QRQEQALQRYRCEADELDSWLLSTKATLDTALSPPKEPMDMEAQLMDCQNMLVEIEQKVVALSELSVHNENLLLEGKAHTKDEAE

SEQ ID NO: 4677 - protein, 85 aa, Homo sapiens
QLAGKLRRLKGSLLELQRALHDKQLNMQGTAQEKEESDVDLTATQSPGVQEWLAQARTTWTQQRQSSLQQQKELEQELAEQKSLL

SEQ ID NO: 4678 - protein, 85 aa, Homo sapiens
RSVASRGEEILIQHSAAETSGDAGEKPDVLSQELGMEGEKSSAEDQMRMKWESLHQEFSTKQKLLQNVLEQEQEQVLYSRPNRLL

SEQ ID NO: 4679 - protein, 85 aa, Homo sapiens
SGVPLYKGDVPTQDKSAVTSLLDGLNQAFEEVSSQSGGAKRQSIHLEQKLYDGVSATSTWLDDVEERLFVATALLPEETETCLFN

SEQ ID NO: 4680 - protein, 85 aa, Homo sapiens
QEILAKDIKEMSEEMDKNKNLFSQAFPENGDNRDVIEDTLGCLLGRLSLLDSVVNQRCHQMKERLQQILNFQNDLKVLFTSLADN

SEQ ID NO: 4681 - protein, 85 aa, Homo sapiens
KYIILQKLANVFEQPVAEQIEAIQQAEDGLKEFDAGIIELKRRGDKLQVEQPSMQELSKLQDMYDELMMIIGSRRSGLNQNLTLK

SEQ ID NO: 4682 - protein, 85 aa, Homo sapiens
SQYERALQDLADLLETGQEKMAGDQKIIVSSKEEIQQLLDKHKEYFQGLESHMILTETLFRKIISFAVQKETQFHTELMAQASAV

SEQ ID NO: 4683 - protein, 85 aa, Homo sapiens
MKRAHKRGVELEYILETWSHLDEDQQELSRQLEVVESSIPSVGLVEENEDRLIDRITLYQHLKSSLNEYQPKLYQVLDDGKRLLI

SEQ ID NO: 4684 - protein, 85 aa, Homo sapiens
SISCSDLESQLNQLGECWLSNTNKMSKELHRLETILKHWTRYQSESADLIHWLQSAKDRLEFWTQQSVTVPQELEMVRDHLNAFL

SEQ ID NO: 4685 - protein, 85 aa, Homo sapiens
EFSKEVDAQSSLKSSVLSTGNQLLRLKKVDTATLRSELSRIDSQWTDLLTNIPAVQEKLHQLQMDKLPSRHAISEVMSWISLMEN

SEQ ID NO: 4686 - protein, 85 aa, Homo sapiens
VIQKDEDNIKNSIGYKAIHEYLQKYKGFKIDINCKQLTVDFVNQSVLQISSQDVESKRSDKTDFAEQLGAMNKSWQILQGLVTEK

SEQ ID NO: 4687 - protein, 85 aa, Homo sapiens
IQLLEGLLESWSEYENNVQCLKTWFETQEKRLKQQHRIGDQASVQNALKDCQDLEDLIKAKEKEVEKIEQNGLALIQNKKEDVSS

SEQ ID NO: 4688 - protein, 85 aa, Homo sapiens
IVMSTLRELGQTWANLDHMVGQLKILLKSVLDQWSSHKVAFDKINSYLMEARYSLSRFRLLTGSLEAVQVQVDNLQNLQDDLEKQ

SEQ ID NO: 4689 - protein, 85 aa, Homo sapiens
ERSLQKFGSITNQLLKECHPPVTETLTNTLKEVNMRWNNLLEEIAEQLQSSKALLQLWQRYKDYSKQCASTVQQQEDRTNELLKA

SEQ ID NO: 4690 - protein, 85 aa, Homo sapiens
ATNKDIADDEVATWIQDCNDLLKGLGTVKDSLFFLHELGEQLKQQVDASAASAIQSDQLSLSQHLCALEQALCKQQTSLQAGVLD

SEQ ID NO: 4691 - protein, 85 aa, Homo sapiens
YETFAKSLEALEAWIVEAEEILQGQDPSHSSDLSTIQERMEELKGQMLKFSSMAPDLDRLNELGYRLPLNDKEIKRMQNLNRHWS

SEQ ID NO: 4692 - protein, 85 aa, Homo sapiens
MISSQTTERFSKLQSFLLQHQTFLEKCETWMEFLVQTEQKLAVEISGNYQHLLEQQRAHELFQAEMFSRQQILHSIIIDGQRLLE

SEQ ID NO: 4693 - protein, 85 aa, Homo sapiens
QGQVDDRDEFNLKLTLLSNQWQGVIRRAQQRRGIIDSQIRQWQRYREMAEKLRKWLVEVSYLPMSGLGSVPIPLQQARTLFDEVQ

SEQ ID NO: 4694 - protein, 85 aa, Homo sapiens
FKEKVFLRQQGSYILTVEAGKQLLLSADSGAEAALQAELAEIQEKWKSASMRLEEQKKKLAFLLKDWEKCEKGIADSLEKLRTFK

SEQ ID NO: 4695 - protein, 85 aa, Homo sapiens
KKLSQSLPDHHEELHAEQMRCKELENAVGSWTDDLTQLSLLKDTLSAYISADDISILNERVELLQRQWEELCHQLSLRRQQIGER

SEQ ID NO: 4696 - protein, 85 aa, Homo sapiens
MNEWAVFSEKNKELCEWLTQMESKVSQNGDILIEEMIEKLKKDYQEEIAIAQENKIQLQQMGERLAKASHESKASEIEYKLGKVN

SEQ ID NO: 4697 - protein, 85 aa, Homo sapiens
DRWQHLLDLIAARVKKLKETLVAVQQLDKNMSSLRTWLAHIESELAKPIVYDSCNSEEIQRKLNEQQELQRDIEKHSTGVASVLN

SEQ ID NO: 4698 - protein, 85 aa, Homo sapiens
MCEVLLHDCDACATDAECDSIQQATRNLDRRWRNICAMSMERRLKIEETWRLWQKFLDDYSRFEDWLKSSERTAAFPSSSGVIYT

SEQ ID NO: 4699 - protein, 85 aa, Homo sapiens
VAKEELKKFEAFQRQVHECLTQLELINKQYRRLARENRTDSACSLKQMVHEGNQRWDNLQKRVTSILRRLKHFIGQREEFETARD

SEQ ID NO: 4700 - protein, 85 aa, Homo sapiens
SILVWLTEMDLQLTNIEHFSECDVQAKIKQLKAFQQEISLNHNKIEQIIAQGEQLIEKSEPLDAAIIEEELDELRRYCQEVFGRV

SEQ ID NO: 4701 - protein, 85 aa, Homo sapiens
ERYHKKLIRLPLPDDEHDLSDRELELEDSAALSDLHWHDRSADSLLSPQPSSNLSLSLAQPLRSERSGRDTPASVDSIPLEWDHD

SEQ ID NO: 4702 - protein, 85 aa, Homo sapiens
YDLSRDLESAMSRALPSEDEEGQDDKDFYLRGAVGLSGDHSALESQIRQLGKALDDSRFQIQQTENIIRSKTPTGPELDTSYKGY

SEQ ID NO: 4703 - protein, 85 aa, Homo sapiens
MKLLGECSSSIDSVKRLEHKLKEEEESLPGFVNLHSTETQTAGVIDRWELLQAQALSKELRMKQNLQKWQQFNSDLNSIWAWLGD

SEQ ID NO: 4704 - protein, 85 aa, Homo sapiens
TEEELEQLQRLELSTDIQTIELQIKKLKELQKAVDHRKAIILSINLCSPEFTQADSKESRDLQDRLSQMNGRWDRVCSLLEEWRG

SEQ ID NO: 4705 - protein, 85 aa, Homo sapiens
MLQDALMQCQGFHEMSHGLLLMLENIDRRKNEIVPIDSNLDAEILQDHHKQLMQIKHELLESQLRVASLQDMSCQLLVNAEGTDC

SEQ ID NO: 4706 - protein, 85 aa, Homo sapiens
LEAKEKVHVIGNRLKLLLKEVSRHIKELEKLLDVSSSQQDLSSWSSADELDTSGSVSPTSGRSTPNRQKTPRGKCSLSQPGPSVS

SEQ ID NO: 4707 - protein, 85 aa, Homo sapiens
EKCDDEAVAEICTEMLRQFTGNPNIPKPRRILRSAWGSNPYFRGSYSYTQVGSSGADVEKLAKPLPYTESSKTAPMQVLFSGEAT

SEQ ID NO: 4708 - protein, 85 aa, Homo sapiens
SGFNFGGTGAPTGGFTFGTAKTATTTPATGFSFSTSGTGGFNFGAPFQPATSTPSTGLFSLATQTPATQTTGFTFGTATLASGGT

SEQ ID NO: 4709 - protein, 85 aa, Homo sapiens
GFSLGIGASKLNLSNTAATPAMANPSGFGLGSSNLTNAISSTVTSSQGTAPTGFVFGPSTTSVAPATTSGGFSFTGGSTAQPSGF

SEQ ID NO: 4710 - protein, 85 aa, Homo sapiens
NIGSAGNSAQPTAPATLPFTPATPAATTAGATQPAAPTPTATITSTGPSLFASIATAPTSSATTGLSLCTPVTTAGAPTAGTQGF

SEQ ID NO: 4711 - protein, 85 aa, Homo sapiens
SLKAPGAASGTSTTTSTAATATATTTSSSSTTGFALNLKPLAPAGIPSNTAAAVTAPPGPGAAAGAAASSAMTYAQLESLINKWS

SEQ ID NO: 4712 - protein, 85 aa, Homo sapiens
MELEDQERHFLQQATQVNAWDRTLIENGEKITSLHREVEKVKLDQKRLDQELDFILSQQKELEDLLSPLEELVKEQSGTIYLQHA

SEQ ID NO: 4713 - protein, 85 aa, Homo sapiens
DEEREKTYKLAENIDAQLKRMAQDLKDIIEHLNTSGAPADTSDPLQQICKILNAHMDSLQWIDQNSALLQRKVEEVTKVCEGRRK

SEQ ID NO: 4714 - protein, 84 aa, Homo sapiens
NIDAQLKRMAQDLKDIIEHLNTSGAPADTSDPLQQICKILNAHMDSLQWIDQNSALLQRKVEEVTKVCEGRRKEQERSFRITFD

SEQ ID NO: 4715 - protein, 85 aa, Homo sapiens
FGAPFQPATSTPSTGLFSLATQTPATQTTGFTFGTATLASGGTGFSLGIGASKLNLSNTAATPAMANPSGFGLGSSNLTNAISST

SEQ ID NO: 4716 - protein, 85 aa, Homo sapiens
VTSSQGTAPTGFVFGPSTTSVAPATTSGGFSFTGGSTAQPSGFNIGSAGNSAQPTAPATLPFTPATPAATTAGATQPAAPTPTAT

SEQ ID NO: 4717 - protein, 85 aa, Homo sapiens
ITSTGPSLFASIATAPTSSATTGLSLCTPVTTAGAPTAGTQGFSLKAPGAASGTSTTTSTAATATATTTSSSSTTGFALNLKPLA

SEQ ID NO: 4718 - protein, 85 aa, Homo sapiens
PAGIPSNTAAAVTAPPGPGAAAGAAASSAMTYAQLESLINKWSLELEDQERHFLQQATQVNAWDRTLIENGEKITSLHREVEKVK

SEQ ID NO: 4719 - protein, 85 aa, Homo sapiens
MDQKRLDQELDFILSQQKELEDLLSPLEELVKEQSGTIYLQHADEEREKTYKLAENIDAQLKRMAQDLKDIIEHLNTSGAPADTS

SEQ ID NO: 4720 - protein, 85 aa, Homo sapiens
ERARKFSGSGLAMGLGSASASAWRRASQRWAWPLRSLRPGGDAREPRKIILHKGSTGLGFNIVGGEDGEGIFVSFILAGGPADLS

SEQ ID NO: 4721 - protein, 85 aa, Homo sapiens
GELRRGDRILSVNGVNLRNATHEQAAAALKRAGQSVTIVAQYRPEEYSRFESKIHDLREQMMNSSMSSGSGSLRTSEKRSLYVRA

SEQ ID NO: 4722 - protein, 85 aa, Homo sapiens
MFDYDRTRDSCLPSQGLSFSYGDILHVINASDDEWWQARLVTPHGESEQIGVIPSKKRVEKKERARLKTVKFHARTGMIESNRSI

SEQ ID NO: 4723 - protein, 85 aa, Homo sapiens
KTKRKKSFRLSRKFPFYKSKENMAQESSIQEQGVTSNTSDSESSSKGQEDAILSYEPVTRQEIHYARPVIILGPMKDRVNDDLIS

SEQ ID NO: 4724 - protein, 85 aa, Homo sapiens
EFPHKFGSCVPHTTRPRRDNEVDGQDYHFVVSREQMEKDIQDNKFIEAGQFNDNLYGTSIQSVRAVAERGKHCILDVSGNAIKRL

SEQ ID NO: 4725 - protein, 85 aa, Homo sapiens
QQAQLYPIAIFIKPKSIEALMEMNRRQTYEQANKIYDKAMKLEQEFGEYFTAIVQGDSLEEIYNKIKQIIEDQSGHYIWVPSPEK

SEQ ID NO: 4726 - protein, 85 aa, Homo sapiens
AREPRKIILHKGSTGLGFNIVGGEDGEGIFVSFILAGGPADLSGELRRGDRILSVNGVNLRNATHEQAAAALKRAGQSVTIVAQY

SEQ ID NO: 4727 - protein, 85 aa, Homo sapiens
RPEEYSRFESKIHDLREQMMNSSMSSGSGSLRTSEKRSLYVRALFDYDRTRDSCLPSQGLSFSYGDILHVINASDDEWWQARLVT

SEQ ID NO: 4728 - protein, 85 aa, Homo sapiens
PHGESEQIGVIPSKKRVEKKERARLKTVKFHARTGMIESNRSIKTKRKKSFRLSRKFPFYKSKENMAQESSIQEQGVTSNTSDSE

SEQ ID NO: 4729 - protein, 85 aa, Homo sapiens
SSSKGQEDAILSYEPVTRQEIHYARPVIILGPMKDRVNDDLISEFPHKFGSCVPHTTRPRRDNEVDGQDYHFVVSREQMEKDIQD

SEQ ID NO: 4730 - protein, 85 aa, Homo sapiens
NKFIEAGQFNDNLYGTSIQSVRAVAERGKHCILDVSGNAIKRLQQAQLYPIAIFIKPKSIEALMEMNRRQTYEQANKIYDKAMKL

SEQ ID NO: 4731 - protein, 85 aa, Homo sapiens
DHCGALFLCLCLLTLQNATTETWEELLSYMENMQVSRGRSSVFSSRQLHQLEQMLLNTSFPGYNLTLQTPTIQSLAFKLSCDFSG

SEQ ID NO: 4732 - protein, 85 aa, Homo sapiens
LSLTSATLKRVPQAGGQHARGQHAMQFPAELTRDACKTRPRELRLICIYFSNTHFFKDENNSSLLNNYVLGAQLSHGHVNNLRDP

SEQ ID NO: 4733 - protein, 85 aa, Homo sapiens
VNISFWHNQSLEGYTLTCVFWKEGARKQPWGGWSPEGCRTEQPSHSQVLCRCNHLTYFAVLMQLSPALVPAELLAPLTYISLVGC

SEQ ID NO: 4734 - protein, 85 aa, Homo sapiens
SISIVASLITVLLHFHFRKQSDSLTRIHMNLHASVLLLNIAFLLSPAFAMSPVPGSACTALAAALHYALLSCLTWMAIEGFNLYL

SEQ ID NO: 4735 - protein, 85 aa, Homo sapiens
LLGRVYNIYIRRYVFKLGVLGWGAPALLVLLSLSVKSSVYGPCTIPVFDSWENGTGFQNMSICWVRSPVVHSVLVMGYGGLTSLF

SEQ ID NO: 4736 - protein, 85 aa, Homo sapiens
NLVVLAWALWTLRRLRERADAPSVRACHDTVTVLGLTVLLGTTWALAFFSFGVFLLPQLFLFTILNSLYGFFLFLWFCSQRCRSE

SEQ ID NO: 4737 - protein, 84 aa, Homo sapiens
ADAPSVRACHDTVTVLGLTVLLGTTWALAFFSFGVFLLPQLFLFTILNSLYGFFLFLWFCSQRCRSEAEAKAQIEAFSSSQTTQ

SEQ ID NO: 4738 - protein, 85 aa, Homo sapiens
FSSRQLHQLEQMLLNTSFPGYNLTLQTPTIQSLAFKLSCDFSGLSLTSATLKRVPQAGGQHARGQHAMQFPAELTRDACKTRPRE

SEQ ID NO: 4739 - protein, 85 aa, Homo sapiens
MRLICIYFSNTHFFKDENNSSLLNNYVLGAQLSHGHVNNLRDPVNISFWHNQSLEGYTLTCVFWKEGARKQPWGGWSPEGCRTEQ

SEQ ID NO: 4740 - protein, 85 aa, Homo sapiens
PSHSQVLCRCNHLTYFAVLMQLSPALVPAELLAPLTYISLVGCSISIVASLITVLLHFHFRKQSDSLTRIHMNLHASVLLLNIAF

SEQ ID NO: 4741 - protein, 85 aa, Homo sapiens
MLSPAFAMSPVPGSACTALAAALHYALLSCLTWMAIEGFNLYLLLGRVYNIYIRRYVFKLGVLGWGAPALLVLLSLSVKSSVYGP

SEQ ID NO: 4742 - protein, 85 aa, Homo sapiens
CTIPVFDSWENGTGFQNMSICWVRSPVVHSVLVMGYGGLTSLFNLVVLAWALWTLRRLRERADAPSVRACHDTVTVLGLTVLLGT

SEQ ID NO: 4743 - protein, 85 aa, Homo sapiens
SSKRAKAKTTKKRPQRATSNVFAMFDQSQIQEFKEAFNMIDQNRDGFIDKEDLHDMLASLGFIHEDHLRELLTTMGDRFTDEEVD

SEQ ID NO: 4744 - protein, 84 aa, Homo sapiens
KEAFNMIDQNRDGFIDKEDLHDMLASLGFIHEDHLRELLTTMGDRFTDEEVDEMYREAPIDKKGNFNYVEFTRILKHGAKDKDD

SEQ ID NO: 4745 - protein, 85 aa, Homo sapiens
GATGDAEQPRGPSGAERGGLELGDAGAAGQLVLTNPWNIMIKHRQVQRRGRRSQMTTSFTDPAISMDLLRAVLQPSINEEIQTVF

SEQ ID NO: 4746 - protein, 85 aa, Homo sapiens
NKYMKFFQKAALNVRDNVGEEVDAEQLIQEACRSCLEQAKLLFSDGEKVIPRLTHELPGIKRGRQAEEECAHRGSPLPKKRKGRP

SEQ ID NO: 4747 - protein, 85 aa, Homo sapiens
PGHILSSDRAAAGMVWKPKSCEPIRREGPKWDPARLNESTTFVLGSRANKALGMGGTRGRIYIKHPHLFKYAADPQDKHWLAEQH

SEQ ID NO: 4748 - protein, 84 aa, Homo sapiens
PQDKHWLAEQHHMRATGGKMAYLLIEEDIRDLAASDDYRGCLDLKLEELKSFVLPSWMVEKMRKYMETLRTENEHRAVEAPPQT

SEQ ID NO: 4749 - protein, 85 aa, Homo sapiens
HRQVQRRGRRSQMTTSFTDPAISMDLLRAVLQPSINEEIQTVFNKYMKFFQKAALNVRDNVGEEVDAEQLIQEACRSCLEQAKLL

SEQ ID NO: 4750 - protein, 85 aa, Homo sapiens
FSDGEKVIPRLTHELPGIKRGRQAEEECAHRGSPLPKKRKGRPPGHILSSDRAAAGMVWKPKSCEPIRREGPKWDPARLNESTTF

SEQ ID NO: 4751 - protein, 85 aa, Homo sapiens
VLGSRANKALGMGGTRGRIYIKHPHLFKYAADPQDKHWLAEQHHMRATGGKMAYLLIEEDIRDLAASDDYRGCLDLKLEELKSFV

SEQ ID NO: 4752 - protein, 85 aa, Homo sapiens
MLATLLLLLLGGALAHPDRIIFPNHACEDPPAVLLEVQGTLQRPLVRDSRTSPANCTWLILGSKEQTVTIRFQKLHLACGSERLT

SEQ ID NO: 4753 - protein, 85 aa, Homo sapiens
LRSPLQPLISLCEAPPSPLQLPGGNVTITYSYAGARAPMGQGFLLSYSQDWLMCLQEEFQCLNHRCVSAVQRCDGVDACGDGSDE

SEQ ID NO: 4754 - protein, 85 aa, Homo sapiens
AGCSSDPFPGLTPRPVPSLPCNVTLEDFYGVFSSPGYTHLASVSHPQSCHWLLDPHDGRRLAVRFTALDLGFGDAVHVYDGPGPP

SEQ ID NO: 4755 - protein, 85 aa, Homo sapiens
ESSRLLRSLTHFSNGKAVTVETLSGQAVVSYHTVAWSNGRGFNATYHVRGYCLPWDRPCGLGSGLGAGEGLGERCYSEAQRCDGS

SEQ ID NO: 4756 - protein, 85 aa, Homo sapiens
WDCADGTDEEDCPGCPPGHFPCGAAGTSGATACYLPADRCNYQTFCADGADERRCRHCQPGNFRCRDEKCVYETWVCDGQPDCAD

SEQ ID NO: 4757 - protein, 85 aa, Homo sapiens
GSDEWDCSYVLPRKVITAAVIGSLVCGLLLVIALGCTCKLYAIRTQEYSIFAPLSRMEAEIVQQQAPPSYGQLIAQGAIPPVEDF

SEQ ID NO: 4758 - protein, 85 aa, Homo sapiens
PTENPNDNSVLGNLRSLLQILRQDMTPGGGPGARRRQRGRLMRRLVRRLRRWGLLPRTNTPARASEARSQVTPSAAPLEALDGGT

SEQ ID NO: 4759 - protein, 85 aa, Homo sapiens
GPAREGGAVGGQDGEQAPPLPIKAPLPSASTSPAPTTVPEAPGPLPSLPLEPSLLSGVVQALRGRLLPSLGPPGPTRSPPGPHTA

SEQ ID NO: 4760 - protein, 84 aa, Homo sapiens
APTTVPEAPGPLPSLPLEPSLLSGVVQALRGRLLPSLGPPGPTRSPPGPHTAVLALEDEDDVLLVPLAEPGVWVAEAEDEPLLT

SEQ ID NO: 4761 - protein, 85 aa, Homo sapiens
RPLVRDSRTSPANCTWLILGSKEQTVTIRFQKLHLACGSERLTLRSPLQPLISLCEAPPSPLQLPGGNVTITYSYAGARAPMGQG

SEQ ID NO: 4762 - protein, 85 aa, Homo sapiens
FLLSYSQDWLMCLQEEFQCLNHRCVSAVQRCDGVDACGDGSDEAGCSSDPFPGLTPRPVPSLPCNVTLEDFYGVFSSPGYTHLAS

SEQ ID NO: 4763 - protein, 85 aa, Homo sapiens
VSHPQSCHWLLDPHDGRRLAVRFTALDLGFGDAVHVYDGPGPPESSRLLRSLTHFSNGKAVTVETLSGQAVVSYHTVAWSNGRGF

SEQ ID NO: 4764 - protein, 85 aa, Homo sapiens
NATYHVRGYCLPWDRPCGLGSGLGAGEGLGERCYSEAQRCDGSWDCADGTDEEDCPGCPPGHFPCGAAGTSGATACYLPADRCNY

SEQ ID NO: 4765 - protein, 85 aa, Homo sapiens
QTFCADGADERRCRHCQPGNFRCRDEKCVYETWVCDGQPDCADGSDEWDCSYVLPRKVITAAVIGSLVCGLLLVIALGCTCKLYA

SEQ ID NO: 4766 - protein, 85 aa, Homo sapiens
IRTQEYSIFAPLSRMEAEIVQQQAPPSYGQLIAQGAIPPVEDFPTENPNDNSVLGNLRSLLQILRQDMTPGGGPGARRRQRGRLM

SEQ ID NO: 4767 - protein, 85 aa, Homo sapiens
RRLVRRLRRWGLLPRTNTPARASEARSQVTPSAAPLEALDGGTGPAREGGAVGGQDGEQAPPLPIKAPLPSASTSPAPTTVPEAP

SEQ ID NO: 4768 - protein, 85 aa, Homo sapiens
ASNERDAISWYQKKIGAYDQQIWEKSIEQTQIKGLKNKPKKMGHIKPDLIDVDLIRGSTFAKAKPEIPWTSLTRKGLVRVVFFPL

SEQ ID NO: 4769 - protein, 85 aa, Homo sapiens
FSNWWIQVTSLRIFVWLLLLYFMQVIAIVLYLMMPIVNISEVLGPLCLMLLMGTVHCQIVSTQITRPSGNNGNRRRRKLRKTVNG

SEQ ID NO: 4770 - protein, 85 aa, Homo sapiens
DGSRENGNNSSDKVRGIETLESVPIIGGFWETIFGNRIKRVKLISNKGTETDNDPSCVHPIIKRRQCRPEIRMWQTREKAKFSDG

SEQ ID NO: 4771 - protein, 85 aa, Homo sapiens
EKCRREAFRRLGNGVSDDLSSEEDGEARTQMILLRRSVEGASSDNGCEVKNRKSILSRHLNSQVKKTTTRWCHIVRDSDSLAESE

SEQ ID NO: 4772 - protein, 85 aa, Homo sapiens
FESAAFSQGSRSGVSGGSRSLNMSRRDSESTRHDSETEDMLWDDLLHGPECRSSVTSDSEGAHVNTLHSGTKRDPKEDVFQQNHL

SEQ ID NO: 4773 - protein, 85 aa, Homo sapiens
FWLQNSSPSSDRVSAIIWEGNECKKMDMSVLEISGIIMSRVNAYQQGVGYQMLGNVVTIGLAFFPFLHRLFREKSLDQLKSISAE

SEQ ID NO: 4774 - protein, 85 aa, Homo sapiens
EILTLFCGAPPVTPIIVLSIINFFERLCLTWMFFFMMCVAERTYKQRFLFAKLFSHITSARKARKYEIPHFRLKKVENIKIWLSL

SEQ ID NO: 4775 - protein, 85 aa, Homo sapiens
RSYLKRRGPQRSVDVVVSSVFLLTLSIAFICCAQVLQGHKTFLNDAYNWEFLIWETALLLFLLRLASLGSETNKKYSNVSILLTE

SEQ ID NO: 4776 - protein, 84 aa, Homo sapiens
LTEQINLYLKMEKKPNKKEQLTLVNNVLKLSTKLLKELDTPFRLYGLTMNPLIYNITRVVILSAVSGVISDLLGFNIRLWKIKS

SEQ ID NO: 4777 - protein, 85 aa, Homo sapiens
GHIKPDLIDVDLIRGSTFAKAKPEIPWTSLTRKGLVRVVFFPLFSNWWIQVTSLRIFVWLLLLYFMQVIAIVLYLMMPIVNISEV

SEQ ID NO: 4778 - protein, 85 aa, Homo sapiens
LGPLCLMLLMGTVHCQIVSTQITRPSGNNGNRRRRKLRKTVNGDGSRENGNNSSDKVRGIETLESVPIIGGFWETIFGNRIKRVK

SEQ ID NO: 4779 - protein, 85 aa, Homo sapiens
LISNKGTETDNDPSCVHPIIKRRQCRPEIRMWQTREKAKFSDGEKCRREAFRRLGNGVSDDLSSEEDGEARTQMILLRRSVEGAS

SEQ ID NO: 4780 - protein, 85 aa, Homo sapiens
SDNGCEVKNRKSILSRHLNSQVKKTTTRWCHIVRDSDSLAESEFESAAFSQGSRSGVSGGSRSLNMSRRDSESTRHDSETEDMLW

SEQ ID NO: 4781 - protein, 85 aa, Homo sapiens
DDLLHGPECRSSVTSDSEGAHVNTLHSGTKRDPKEDVFQQNHLFWLQNSSPSSDRVSAIIWEGNECKKMDMSVLEISGIIMSRVN

SEQ ID NO: 4782 - protein, 85 aa, Homo sapiens
AYQQGVGYQMLGNVVTIGLAFFPFLHRLFREKSLDQLKSISAEEILTLFCGAPPVTPIIVLSIINFFERLCLTWMFFFMMCVAER

SEQ ID NO: 4783 - protein, 85 aa, Homo sapiens
TYKQRFLFAKLFSHITSARKARKYEIPHFRLKKVENIKIWLSLRSYLKRRGPQRSVDVVVSSVFLLTLSIAFICCAQVLQGHKTF

SEQ ID NO: 4784 - protein, 85 aa, Homo sapiens
MNDAYNWEFLIWETALLLFLLRLASLGSETNKKYSNVSILLTEQINLYLKMEKKPNKKEQLTLVNNVLKLSTKLLKELDTPFRLY

SEQ ID NO: 4785 - protein, 85 aa, Homo sapiens
GKSEKIALPHGQLVHGIHLYEQPKINRQKSKYNLPLTKITSAKRNENNFWQDSVSSDRIQKQEKKPFKNTENIKNSHLKKSAFLT

SEQ ID NO: 4786 - protein, 85 aa, Homo sapiens
KRNENNFWQDSVSSDRIQKQEKKPFKNTENIKNSHLKKSAFLTEVSQKENYAGAKFSDPPSPSVLPKPPSHWMGSTVENSNQNRE

SEQ ID NO: 4787 - protein, 85 aa, Homo sapiens
AQISSGGGGQSRCLLFALGSEMGSEKEQSPEPHLPEEGEGGKPWRVDDSEGSWIPPGEKEHGQESLSDELQETHPKKPWQKVTVR

SEQ ID NO: 4788 - protein, 85 aa, Homo sapiens
ARELGDPIAHPRHEADEKPFICAQCGKTFNNTSNLRTHQRIHTGEKPYKCSECGKSFSRSSNRIRHERIHLEEKHYKCPKCQESF

SEQ ID NO: 4789 - protein, 85 aa, Homo sapiens
RRRSDLTTHQQDHLGKRPYRCDICGKSFSQSATLAVHHRTHLEPAPYICCECGKSFSNSSSFGVHHRTHTGERPYECTECGRTFS

SEQ ID NO: 4790 - protein, 84 aa, Homo sapiens
CGKSFSNSSSFGVHHRTHTGERPYECTECGRTFSDISNFGAHQRTHRGEKPYRCTVCGKHFSRSSNLIRHQKTHLGEQAGKDSS

SEQ ID NO: 4791 - protein, 85 aa, Homo sapiens
PWRVDDSEGSWIPPGEKEHGQESLSDELQETHPKKPWQKVTVRARELGDPIAHPRHEADEKPFICAQCGKTFNNTSNLRTHQRIH

SEQ ID NO: 4792 - protein, 85 aa, Homo sapiens
TGEKPYKCSECGKSFSRSSNRIRHERIHLEEKHYKCPKCQESFRRRSDLTTHQQDHLGKRPYRCDICGKSFSQSATLAVHHRTHL

SEQ ID NO: 4793 - protein, 85 aa, Homo sapiens
EPAPYICCECGKSFSNSSSFGVHHRTHTGERPYECTECGRTFSDISNFGAHQRTHRGEKPYRCTVCGKHFSRSSNLIRHQKTHLG

SEQ ID NO: 4794 - protein, 85 aa, Homo sapiens
PSGCRCLHLVCLLCILGAPGQPVRADDCSSHCDLAHGCCAPDGSCRCDPGWEGLHCERCVRMPGCQHGTCHQPWQCICHSGWADE

SEQ ID NO: 4795 - protein, 85 aa, Homo sapiens
HICTTQSPCQNGGQCMYDGGGEYHCVCLPGFHGRDCERKAGPCEQAGSPCRNGGQCQDDQGFALNFTCRCLVGFVGARCEVNVDD

SEQ ID NO: 4796 - protein, 85 aa, Homo sapiens
CLMRPCANGATCLDGINRFSCLCPEGFAGRFCTINLDDCASRPCQRGARCRDRVHDFDCLCPSGYGGKTCELVLPVPDPPTTVDT

SEQ ID NO: 4797 - protein, 85 aa, Homo sapiens
PLGPTSAVVVPATGPAPHSAGAGLLRISVKEVVRRQEAGLGEPSLVALVVFGALTAALVLATVLLTLRAWRRGVCPPGPCCYPAP

SEQ ID NO: 4798 - protein, 85 aa, Homo sapiens
GSCRCDPGWEGLHCERCVRMPGCQHGTCHQPWQCICHSGWADEHICTTQSPCQNGGQCMYDGGGEYHCVCLPGFHGRDCERKAGP

SEQ ID NO: 4799 - protein, 85 aa, Homo sapiens
CEQAGSPCRNGGQCQDDQGFALNFTCRCLVGFVGARCEVNVDDCLMRPCANGATCLDGINRFSCLCPEGFAGRFCTINLDDCASR

SEQ ID NO: 4800 - protein, 85 aa, Homo sapiens
PCQRGARCRDRVHDFDCLCPSGYGGKTCELVLPVPDPPTTVDTPLGPTSAVVVPATGPAPHSAGAGLLRISVKEVVRRQEAGLGE

SEQ ID NO: 4801 - protein, 85 aa, Homo sapiens
GSEKEQSPEPHLPEEGEGGKPWRVDDSEGSWIPPGEKEHGQESLSDELQETHPKKPWQKVTVRARELGDPIAHPRHEADEKPFIC

SEQ ID NO: 4802 - protein, 85 aa, Homo sapiens
AQCGKTFNNTSNLRTHQRIHTGEKPYKCSECGKSFSRSSNRIRHERIHLEEKHYKCPKCQESFRRRSDLTTHQQDHLGKRPYRCD

SEQ ID NO: 4803 - protein, 85 aa, Homo sapiens
ICGKSFSQSATLAVHHRTHLEPAPYICCECGKSFSNSSSFGVHHRTHTGERPYECTECGRTFSDISNFGAHQRTHRGEKPYRCTV

SEQ ID NO: 4804 - protein, 85 aa, Homo sapiens
SLSDELQETHPKKPWQKVTVRARELGDPIAHPRHEADEKPFICAQCGKTFNNTSNLRTHQRIHTGEKPYKCSECGKSFSRSSNRI

SEQ ID NO: 4805 - protein, 85 aa, Homo sapiens
RHERIHLEEKHYKCPKCQESFRRRSDLTTHQQDHLGKRPYRCDICGKSFSQSATLAVHHRTHLEPAPYICCECGKSFSNSSSFGV

SEQ ID NO: 4806 - protein, 84 aa, Homo sapiens
RAKERQTALENLLAHWQRLEKELSSFLTWLERGEAKASSPEMDISADRVKVEGELQLIQASSRKCEEGKNKMLFVTVTLFKIIK

SEQ ID NO: 4807 - protein, 85 aa, Homo sapiens
AKQKRKVPEVTEKKNKKLKKASAEGPLLGPEAAPSGEGAGSKGEAVLRPGLDAEPELSPEEQRVLERKLKKERKKEERQRLREAG

SEQ ID NO: 4808 - protein, 85 aa, Homo sapiens
LVAQHPPARRSGAELALDYLCRWAQKHKNWRFQKTRQTWLLLHMYDSDKVPDEHFSTLLAYLEGLQGRARELTVQKAEALMRELD

SEQ ID NO: 4809 - protein, 84 aa, Homo sapiens
QKHKNWRFQKTRQTWLLLHMYDSDKVPDEHFSTLLAYLEGLQGRARELTVQKAEALMRELDEEGSDPPLPGRAQRIRQVLQLLS

SEQ ID NO: 4810 - protein, 85 aa, Homo sapiens
GEAVLRPGLDAEPELSPEEQRVLERKLKKERKKEERQRLREAGLVAQHPPARRSGAELALDYLCRWAQKHKNWRFQKTRQTWLLL

SEQ ID NO: 4811 - protein, 85 aa, Homo sapiens
AELMLLSEIADPTRFFTDNLLSPEDWDSTLYSGLDEVAEEQTQLFRCPEQDVPFDGSSLDVGMDVSPSEPPWELLPIFPDLQVKS

SEQ ID NO: 4812 - protein, 85 aa, Homo sapiens
EPSSPCSSSSLSSESSRLSTEPSSEALGVGEVLHVKTESLAPPLCLLGDDPTSSFETVQINVIPTSDDSSDVQTKIEPVSPCSSV

SEQ ID NO: 4813 - protein, 85 aa, Homo sapiens
NSEASLLSADSSSQAFIGEEVLEVKTESLSPSGCLLWDVPAPSLGAVQISMGPSLDGSSGKALPTRKPPLQPKPVVLTTVPMPSR

SEQ ID NO: 4814 - protein, 85 aa, Homo sapiens
AVPPSTTVLLQSLVQPPPVSPVVLIQGAIRVQPEGPAPSLPRPERKSIVPAPMPGNSCPPEVDAKLLKRQQRMIKNRESACQSRR

SEQ ID NO: 4815 - protein, 85 aa, Homo sapiens
KKKEYLQGLEARLQAVLADNQQLRRENAALRRRLEALLAENSELKLGSGNRKVVCIMVFLLFIAFNFGPVSISEPPSAPISPRMN

SEQ ID NO: 4816 - protein, 85 aa, Homo sapiens
KGEPQPRRHLLGFSEQEPVQGVEPLQGSSQGPKEPQPSPTDQPSFSNLTAFPGGAKELLLRDLDQLFLSSDCRHFNRTESLRLAD

SEQ ID NO: 4817 - protein, 85 aa, Homo sapiens
ELSGWVQRHQRGRRKIPQRAQERQKSQPRKKSPPVKAVPIQPPGPPERDSVGQLQLYRHPDRSQPAFLDAIDRREDTFYVVSFRR

SEQ ID NO: 4818 - protein, 85 aa, Homo sapiens
DHLLLPAISHNKTSRPKMSLVMPAMAPNETLSGRGAPGDYEEMMQIECEVMDTRVIHIKTSTVPPSLRKQPSPTPGNATGGPLPV

SEQ ID NO: 4819 - protein, 85 aa, Homo sapiens
QLFRCPEQDVPFDGSSLDVGMDVSPSEPPWELLPIFPDLQVKSEPSSPCSSSSLSSESSRLSTEPSSEALGVGEVLHVKTESLAP

SEQ ID NO: 4820 - protein, 85 aa, Homo sapiens
PLCLLGDDPTSSFETVQINVIPTSDDSSDVQTKIEPVSPCSSVNSEASLLSADSSSQAFIGEEVLEVKTESLSPSGCLLWDVPAP

SEQ ID NO: 4821 - protein, 85 aa, Homo sapiens
SLGAVQISMGPSLDGSSGKALPTRKPPLQPKPVVLTTVPMPSRAVPPSTTVLLQSLVQPPPVSPVVLIQGAIRVQPEGPAPSLPR

SEQ ID NO: 4822 - protein, 85 aa, Homo sapiens
PERKSIVPAPMPGNSCPPEVDAKLLKRQQRMIKNRESACQSRRKKKEYLQGLEARLQAVLADNQQLRRENAALRRRLEALLAENS

SEQ ID NO: 4823 - protein, 85 aa, Homo sapiens
ELKLGSGNRKVVCIMVFLLFIAFNFGPVSISEPPSAPISPRMNKGEPQPRRHLLGFSEQEPVQGVEPLQGSSQGPKEPQPSPTDQ

SEQ ID NO: 4824 - protein, 85 aa, Homo sapiens
PSFSNLTAFPGGAKELLLRDLDQLFLSSDCRHFNRTESLRLADELSGWVQRHQRGRRKIPQRAQERQKSQPRKKSPPVKAVPIQP

SEQ ID NO: 4825 - protein, 85 aa, Homo sapiens
PGPPERDSVGQLQLYRHPDRSQPAFLDAIDRREDTFYVVSFRRDHLLLPAISHNKTSRPKMSLVMPAMAPNETLSGRGAPGDYEE

SEQ ID NO: 4826 - protein, 85 aa, Homo sapiens
AAAALRDPAQVPVAADLLTDHEEQGYVTFEDVAVYFSQEEWRLLDDAQRLLYRNVMLENFTLLASLGCWHGAEAEEAPEQIASVG

SEQ ID NO: 4827 - protein, 85 aa, Homo sapiens
MLSSNIQQHQKQHCGEKPLKRQEGRVPVLRSCKVHLSEKSLQSREVGKALLISSGVLKHQVTHTGEKSHRSSKSREAFHAGKRHY

SEQ ID NO: 4828 - protein, 85 aa, Homo sapiens
KCSECGKAFGQKYLLVQHQRLHAGKKTYECSECGKLFRDMSNLFIHQIVHTGERPYGCSNCGKSFSRNAHLIEHQRVHTGEKPFT

SEQ ID NO: 4829 - protein, 85 aa, Homo sapiens
CSECGKAFRHNSTLVQHHKIHTGVRPYECSECGKLFSFNSSLMKHQRIHTGERPYKCSECGKFYSHKSNLIKHWRVHTGERPYKC

SEQ ID NO: 4830 - protein, 85 aa, Homo sapiens
SDCGKFFTQCSSLMQHQKVHTGEKPFKCNECGRFFRENSTLVRHQRVHTGAKPYECRECGKFFSQSSTLMQHRKVHIGEKPFKCN

SEQ ID NO: 4831 - protein, 85 aa, Homo sapiens
MLDDAQRLLYRNVMLENFTLLASLGCWHGAEAEEAPEQIASVGLLSSNIQQHQKQHCGEKPLKRQEGRVPVLRSCKVHLSEKSLQ

SEQ ID NO: 4832 - protein, 85 aa, Homo sapiens
SREVGKALLISSGVLKHQVTHTGEKSHRSSKSREAFHAGKRHYKCSECGKAFGQKYLLVQHQRLHAGKKTYECSECGKLFRDMSN

SEQ ID NO: 4833 - protein, 85 aa, Homo sapiens
LFIHQIVHTGERPYGCSNCGKSFSRNAHLIEHQRVHTGEKPFTCSECGKAFRHNSTLVQHHKIHTGVRPYECSECGKLFSFNSSL

SEQ ID NO: 4834 - protein, 85 aa, Homo sapiens
MKHQRIHTGERPYKCSECGKFYSHKSNLIKHWRVHTGERPYKCSDCGKFFTQCSSLMQHQKVHTGEKPFKCNECGRFFRENSTLV

SEQ ID NO: 4835 - protein, 85 aa, Homo sapiens
RHQRVHTGAKPYECRECGKFFSQSSTLMQHRKVHIGEKPFKCNECGRLFRENSSLVKHQRVHTGAKPYECRECGKFFRHNSSLFK

SEQ ID NO: 4836 - protein, 85 aa, Homo sapiens [sequence omitted]

SEQ ID NO: 4837 - protein, 85 aa, Homo sapiens
GLTKQYLRYVASAVFGVIGSQKGNIVFVTLRGEKGRYVAVPACEHVFIWDLRKGEKILILQGLKQEVTCLCPSPDGLHLAVGYED

SEQ ID NO: 4838 - protein, 85 aa, Homo sapiens
GSIRIFSLLSGEGNVTFNGHKAAITTLKYDQLGGRLASGSKDTDIIVWDVINESGLYRLKGHKDAITQALFLREKNLLVTSGKDT

SEQ ID NO: 4839 - protein, 85 aa, Homo sapiens
MVKWWDLDTQHCFKTMVGHRTEVWGLVLLSEEKRLITGASDSELRVWDIAYLQEIEDPEEPDPKKIKGSSPGIQDTLEAEDGAFE

SEQ ID NO: 4840 - protein, 85 aa, Homo sapiens
TDEAPEDRILSCRKAGSIMREGRDRVVNLAVDKTGRILACHGTDSVLELFCILSKKEIQKKMDKKMKKARKKAKLHSSKGEEEDP

SEQ ID NO: 4841 - protein, 85 aa, Homo sapiens
EVNVEMSLQDEIQRVTNIKTSAKIKSFDLIHSPHGELKAVFLLQNNLVELYSLNPSLPTPQPVRTSRITIGGHRSDVRTLSFSSD

SEQ ID NO: 4842 - protein, 85 aa, Homo sapiens
NIAVLSAAADSIKIWNRSTLQCIRTMTCEYALCSFFVPGDRQVVIGTKTGKLQLYDLASGNLLETIDAHDGALWSMSLSPDQRGF

SEQ ID NO: 4843 - protein, 85 aa, Homo sapiens
VTGGADKSVKFWDFELVKDENSTQKRLSVKQTRTLQLDEDVLCVSYSPNQKLLAVSLLDCTVKIFYVDTLKFFLSLYGHKLPVIC

SEQ ID NO: 4844 - protein, 85 aa, Homo sapiens
MDISHDGALIATGSADRNVKIWGLDFGDCHKSLFAHDDSVMYLQFVPKSHLFFTAGKDHKIKQWDADKFEHIQTLEGHHQEIWCL

SEQ ID NO: 4845 - protein, 85 aa, Homo sapiens
AVSPSGDYVVSSSHDKSLRLWERTREPLILEEEREMEREAEYEESVAKEDQPAVPGETQGDSYFTGKKTIETVKAAERIMEAIEL

SEQ ID NO: 4846 - protein, 85 aa, Homo sapiens
YREETAKMKEHKAICKAAGKEVPLPSNPILMAYGSISPSAYVLEIFKGIKSSELEESLLVLPFSYVPDILKLFNEFIQLGSDVEL

SEQ ID NO: 4847 - protein, 85 aa, Homo sapiens
ICRCLFFLLRIHFGQITSNQMLVPVIEKLRETTISKVSQVRDVIGFNMAGLDYLKRECEAKSEVMFFADATSHLEEKKRKRKKRE

SEQ ID NO: 4848 - protein, 84 aa, Homo sapiens
LRIHFGQITSNQMLVPVIEKLRETTISKVSQVRDVIGFNMAGLDYLKRECEAKSEVMFFADATSHLEEKKRKRKKREKLILTLT

SEQ ID NO: 4849 - protein, 85 aa, Homo sapiens
CEHVFIWDLRKGEKILILQGLKQEVTCLCPSPDGLHLAVGYEDGSIRIFSLLSGEGNVTFNGHKAAITTLKYDQLGGRLASGSKD

SEQ ID NO: 4850 - protein, 85 aa, Homo sapiens
TDIIVWDVINESGLYRLKGHKDAITQALFLREKNLLVTSGKDTMVKWWDLDTQHCFKTMVGHRTEVWGLVLLSEEKRLITGASDS

SEQ ID NO: 4851 - protein, 85 aa, Homo sapiens
ELRVWDIAYLQEIEDPEEPDPKKIKGSSPGIQDTLEAEDGAFETDEAPEDRILSCRKAGSIMREGRDRVVNLAVDKTGRILACHG

SEQ ID NO: 4852 - protein, 85 aa, Homo sapiens
TDSVLELFCILSKKEIQKKMDKKMKKARKKAKLHSSKGEEEDPEVNVEMSLQDEIQRVTNIKTSAKIKSFDLIHSPHGELKAVFL

SEQ ID NO: 4853 - protein, 85 aa, Homo sapiens
MQNNLVELYSLNPSLPTPQPVRTSRITIGGHRSDVRTLSFSSDNIAVLSAAADSIKIWNRSTLQCIRTMTCEYALCSFFVPGDRQ

SEQ ID NO: 4854 - protein, 85 aa, Homo sapiens
VVIGTKTGKLQLYDLASGNLLETIDAHDGALWSMSLSPDQRGFVTGGADKSVKFWDFELVKDENSTQKRLSVKQTRTLQLDEDVL

SEQ ID NO: 4855 - protein, 85 aa, Homo sapiens
CVSYSPNQKLLAVSLLDCTVKIFYVDTLKFFLSLYGHKLPVICMDISHDGALIATGSADRNVKIWGLDFGDCHKSLFAHDDSVMY

SEQ ID NO: 4856 - protein, 85 aa, Homo sapiens
LQFVPKSHLFFTAGKDHKIKQWDADKFEHIQTLEGHHQEIWCLAVSPSGDYVVSSSHDKSLRLWERTREPLILEEEREMEREAEY

SEQ ID NO: 4857 - protein, 85 aa, Homo sapiens
EESVAKEDQPAVPGETQGDSYFTGKKTIETVKAAERIMEAIELYREETAKMKEHKAICKAAGKEVPLPSNPILMAYGSISPSAYV

SEQ ID NO: 4858 - protein, 85 aa, Homo sapiens
LEIFKGIKSSELEESLLVLPFSYVPDILKLFNEFIQLGSDVELICRCLFFLLRIHFGQITSNQMLVPVIEKLRETTISKVSQVRD

SEQ ID NO: 4859 - protein, 85 aa, Homo sapiens
SLFGTTSGFGTSGTSMFGSATTDNHNPMKDIEVTSSPDDSIGCLSFSPPTLPGNFLIAGSWANDVRCWEVQDSGQTIPKAQQMHT

SEQ ID NO: 4860 - protein, 85 aa, Homo sapiens
GPVLDVCWSDDGSKVFTASCDKTAKMWDLSSNQAIQIAQHDAPVKTIHWIKAPNYSCVMTGSWDKTLKFWDTRSSNPMMVLQLPE

SEQ ID NO: 4861 - protein, 85 aa, Homo sapiens
RCYCADVIYPMAVVATAERGLIVYQLENQPSEFRRIESPLKHQHRCVAIFKDKQNKPTGFALGSIEGRVAIHYINPPNPAKDNFT

SEQ ID NO: 4862 - protein, 85 aa, Homo sapiens
FKCHRSNGTNTSAPQDIYAVNGIAFHPVHGTLATVGSDGRFSFWDKDARTKLKTSEQLDQPISACCFNHNGNIFAYASSYDWSKG

SEQ ID NO: 4863 - protein, 84 aa, Homo sapiens
HGTLATVGSDGRFSFWDKDARTKLKTSEQLDQPISACCFNHNGNIFAYASSYDWSKGHEFYNPQKKNYIFLRNAAEELKPRNKK

SEQ ID NO: 4864 - protein, 85 aa, Homo sapiens
CLSFSPPTLPGNFLIAGSWANDVRCWEVQDSGQTIPKAQQMHTGPVLDVCWSDDGSKVFTASCDKTAKMWDLSSNQAIQIAQHDA

SEQ ID NO: 4865 - protein, 85 aa, Homo sapiens
PVKTIHWIKAPNYSCVMTGSWDKTLKFWDTRSSNPMMVLQLPERCYCADVIYPMAVVATAERGLIVYQLENQPSEFRRIESPLKH

SEQ ID NO: 4866 - protein, 85 aa, Homo sapiens
QHRCVAIFKDKQNKPTGFALGSIEGRVAIHYINPPNPAKDNFTFKCHRSNGTNTSAPQDIYAVNGIAFHPVHGTLATVGSDGRFS

SEQ ID NO: 4867 - protein, 85 aa, Homo sapiens
HRSAPSQTTKRSRSPFSTTRRSWDDSESSGTNLNIDNEDYSRYPPREYRASGSRRGMAYGHIDSYGADDSEEEGAGPVERPPVRG

SEQ ID NO: 4868 - protein, 85 aa, Homo sapiens
KTGKFKDDKLYDPEKGARSLAGPPPHFSSFSRDVREERDKLDPVPAARCSASRADFLPQSSVASQSSSEGKLATKGDSSERERRE

SEQ ID NO: 4869 - protein, 85 aa, Homo sapiens
QNLPARPSRAPVSICGGGENTSKSAEEPVVRPKIRNLASPNCVKPKIFFDTDDDDDMPHSTSRWRDTANDNEGHSDGLARRGRGE

SEQ ID NO: 4870 - protein, 85 aa, Homo sapiens
SSSGYPEPKYPEDKREARSDQVKPEKVPRRRRTMADPDFWTHSDDYYKYCDEDSDSDKEWIAALRRKYRSREQTLSSSGESWETL

SEQ ID NO: 4871 - protein, 85 aa, Homo sapiens
PGKEEREPPQAKVSASTGTSPGPGASASAGAGAGASAGSNGSNYLEEVREPSLQEEQASLEEGEIPWLQYHENDSSSEGDNDSGH

SEQ ID NO: 4872 - protein, 85 aa, Homo sapiens
ELMQPGVFMLDGNNNLEDDSSVSEDLEVDWSLFDGFADGLGVAEAISYVDPQFLTYMALEERLAQAMETALAHLESLAVDVEVAN

SEQ ID NO: 4873 - protein, 85 aa, Homo sapiens
YPPREYRASGSRRGMAYGHIDSYGADDSEEEGAGPVERPPVRGKTGKFKDDKLYDPEKGARSLAGPPPHFSSFSRDVREERDKLD

SEQ ID NO: 4874 - protein, 85 aa, Homo sapiens
PVPAARCSASRADFLPQSSVASQSSSEGKLATKGDSSERERREQNLPARPSRAPVSICGGGENTSKSAEEPVVRPKIRNLASPNC

SEQ ID NO: 4875 - protein, 85 aa, Homo sapiens
VKPKIFFDTDDDDDMPHSTSRWRDTANDNEGHSDGLARRGRGESSSGYPEPKYPEDKREARSDQVKPEKVPRRRRTMADPDFWTH

SEQ ID NO: 4876 - protein, 85 aa, Homo sapiens
SDDYYKYCDEDSDSDKEWIAALRRKYRSREQTLSSSGESWETLPGKEEREPPQAKVSASTGTSPGPGASASAGAGAGASAGSNGS

SEQ ID NO: 4877 - protein, 85 aa, Homo sapiens
NYLEEVREPSLQEEQASLEEGEIPWLQYHENDSSSEGDNDSGHELMQPGVFMLDGNNNLEDDSSVSEDLEVDWSLFDGFADGLGV

SEQ ID NO: 4878 - protein, 85 aa, Homo sapiens
AEAISYVDPQFLTYMALEERLAQAMETALAHLESLAVDVEVANPPASKESIDALPEILVTEDHGAVGQEMCCPICCSEYVKGEVA

SEQ ID NO: 4879 - protein, 8 aa, Homo sapiens
MLQHPGQS

SEQ ID NO: 4880 - protein, 42 aa, Homo sapiens
PLKKMKGKRGDEKEIRLQLQSAETRRRRRRSACRKSRRSWKV

SEQ ID NO: 4881 - protein, 85 aa, Homo sapiens
DLCKNRLVSGGRDCQVKVWDVDTGKCLKTFRHKDPILATRINDTYIVSSCERGLVKVWHIAMAQLVKTLSGHEGAVKCLFFDQWH

SEQ ID NO: 4882 - protein, 85 aa, Homo sapiens
LLSGSTDGLVMAWSMVGKYERCLMAFKHPKEVLDVSLLFLRVISACADGKIRIYNFFNGNCMKVIKANGRGDPVLSFFIQGNRIS

SEQ ID NO: 4883 - protein, 84 aa, Homo sapiens
RISVCHISTFAKRINVGWNGIEPSATAQGGNASLTECAHVRLHIAGHLPASRLPVAAVQPMTGGMAPTTAPTHVLAMLILFSGV

SEQ ID NO: 4884 - protein, 85 aa, Homo sapiens
DTYIVSSCERGLVKVWHIAMAQLVKTLSGHEGAVKCLFFDQWHLLSGSTDGLVMAWSMVGKYERCLMAFKHPKEVLDVSLLFLRV

SEQ ID NO: 4885 - protein, 85 aa, Homo sapiens
ISACADGKIRIYNFFNGNCMKVIKANGRGDPVLSFFIQGNRISVCHISTFAKRINVGWNGIEPSATAQGGNASLTECAHVRLHIA

SEQ ID NO: 4886 - protein, 85 aa, Homo sapiens
ADAEVIILPKKHKKKKERKSLPEEDVAEIQHAEEFLIKPESKVAKLDTSQWPLLLKNFDKLNVRTTHYTPLACGSNPLKREIGDY

SEQ ID NO: 4887 - protein, 85 aa, Homo sapiens
IRTGFINLDKPSNPSSHEVVAWIRRILRVEKTGHSGTLDPKVTGCLIVCIERATRLVKSQQSAGKEYVGIVRLHNAIEGGTQLSR

SEQ ID NO: 4888 - protein, 85 aa, Homo sapiens
ALETLTGALFQRPPLIAAVKRQLRVRTIYESKMIEYDPERRLGIFWVSCEAGTYIRTLCVHLGLLLGVGGQMQELRRVRSGVMSE

SEQ ID NO: 4889 - protein, 85 aa, Homo sapiens
KDHMVTMHDVLDAQWLYDNHKDESYLRRVVYPLEKLLTSHKRLVMKDSAVNAICYGAKIMLPGVLRYEDGIEVNQEIVVITTKGE

SEQ ID NO: 4890 - protein, 85 aa, Homo sapiens
AICMAIALMTTAVISTCDHGIVAKIKRVIMERDTYPRKWGLGPKASQKKLMIKQGLLDKHGKPTDSTPATWKQEYVDYSESAKKE

SEQ ID NO: 4891 - protein, 85 aa, Homo sapiens
VVAEVVKAPQVVAEAAKTAKRKRESESESDETPPAAPQLIKKEKKKSKKDKKAKAGLESGAEPGDGDSDTTKKKKKKKKAKEVEL

SEQ ID NO: 4892 - protein, 84 aa, Homo sapiens
VVKAPQVVAEAAKTAKRKRESESESDETPPAAPQLIKKEKKKSKKDKKAKAGLESGAEPGDGDSDTTKKKKKKKKAKEVELVSE

SEQ ID NO: 4893 - protein, 85 aa, Homo sapiens
VAKLDTSQWPLLLKNFDKLNVRTTHYTPLACGSNPLKREIGDYIRTGFINLDKPSNPSSHEVVAWIRRILRVEKTGHSGTLDPKV

SEQ ID NO: 4894 - protein, 85 aa, Homo sapiens
TGCLIVCIERATRLVKSQQSAGKEYVGIVRLHNAIEGGTQLSRALETLTGALFQRPPLIAAVKRQLRVRTIYESKMIEYDPERRL

SEQ ID NO: 4895 - protein, 85 aa, Homo sapiens
GIFWVSCEAGTYIRTLCVHLGLLLGVGGQMQELRRVRSGVMSEKDHMVTMHDVLDAQWLYDNHKDESYLRRVVYPLEKLLTSHKR

SEQ ID NO: 4896 - protein, 85 aa, Homo sapiens
MVMKDSAVNAICYGAKIMLPGVLRYEDGIEVNQEIVVITTKGEAICMAIALMTTAVISTCDHGIVAKIKRVIMERDTYPRKWGLG

SEQ ID NO: 4897 - protein, 85 aa, Homo sapiens
PKASQKKLMIKQGLLDKHGKPTDSTPATWKQEYVDYSESAKKEVVAEVVKAPQVVAEAAKTAKRKRESESESDETPPAAPQLIKK

SEQ ID NO: 4898 - protein, 85 aa, Homo sapiens
MDICLEKRVGTTLAAPKCNSSTVRFQGLAEGTKGTMKMDMEDADMTLWTEAEFEEKCTYIVNDHPWDSGADGGTSVQAEASLPRN

SEQ ID NO: 4899 - protein, 85 aa, Homo sapiens
MLFKYATNSEEVIGVMSKEYIPKGTRFGPLIGEIYTNDTVPKNANRKYFWRIYSRGELHHFIDGFNEEKSNWMRYVNPAHSPREQ

SEQ ID NO: 4900 - protein, 85 aa, Homo sapiens
NLAACQNGMNIYFYTIKPIPANQELLVWYCRDFAERLHYPYPGELTMMNLTQTQSSLKQPSTEKNELCPKNVPKREYSVKEILKL

SEQ ID NO: 4901 - protein, 85 aa, Homo sapiens
DSNPSKGKDLYRSNISPLTSEKDLDDFRRRGSPEMPFYPRVVYPIRAPLPEDFLKASLAYGIERPTYITRSPIPSSTTPSPSARS

SEQ ID NO: 4902 - protein, 85 aa, Homo sapiens
SPDQSLKSSSPHSSPGNTVSPVGPGSQEHRDSYAYLNASYGTEGLGSYPGYAPLPHLPPAFIPSYNAHYPKFLLPPYGMNCNGLS

SEQ ID NO: 4903 - protein, 85 aa, Homo sapiens
AVSSMNGINNFGLFPRLCPVYSNLLGGGSLPHPMLNPTSLPSSLPSDGARRLLQPEHPREVLVPAPHSAFSFTGAAASMKDKACS

SEQ ID NO: 4904 - protein, 85 aa, Homo sapiens
PTSGSPTAGTAATAEHVVQPKATSAAMAAPSSDEAMNLIKNKRNMTGYKTLPYPLKKQNGKIKYECNVCAKTFGQLSNLKVHLRV

SEQ ID NO: 4905 - protein, 85 aa, Homo sapiens
HSGERPFKCQTCNKGFTQLAHLQKHYLVHTGEKPHECQVCHKRFSSTSNLKTHLRLHSGEKPYQCKVCPAKFTQFVHLKLHKRLH

SEQ ID NO: 4906 - protein, 85 aa, Homo sapiens
TRERPHKCSQCHKNYIHLCSLKVHLKGNCAAAPAPGLPLEDLTRINEEIEKFDISDNADRLEDVEDDISVISVVEKEILAVVRKE

SEQ ID NO: 4907 - protein, 84 aa, Homo sapiens
LEDVEDDISVISVVEKEILAVVRKEKEETGLKVSLQRNMGNGLLSSGCSLYESSDLPLMKLPPSNPLPLVPVKVKQETVEPMDP

SEQ ID NO: 4908 - protein, 85 aa, Homo sapiens
ADMTLWTEAEFEEKCTYIVNDHPWDSGADGGTSVQAEASLPRNLLFKYATNSEEVIGVMSKEYIPKGTRFGPLIGEIYTNDTVPK

SEQ ID NO: 4909 - protein, 85 aa, Homo sapiens
NANRKYFWRIYSRGELHHFIDGFNEEKSNWMRYVNPAHSPREQNLAACQNGMNIYFYTIKPIPANQELLVWYCRDFAERLHYPYP

SEQ ID NO: 4910 - protein, 85 aa, Homo sapiens
GELTMMNLTQTQSSLKQPSTEKNELCPKNVPKREYSVKEILKLDSNPSKGKDLYRSNISPLTSEKDLDDFRRRGSPEMPFYPRVV

SEQ ID NO: 4911 - protein, 85 aa, Homo sapiens
YPIRAPLPEDFLKASLAYGIERPTYITRSPIPSSTTPSPSARSSPDQSLKSSSPHSSPGNTVSPVGPGSQEHRDSYAYLNASYGT

SEQ ID NO: 4912 - protein, 85 aa, Homo sapiens
EGLGSYPGYAPLPHLPPAFIPSYNAHYPKFLLPPYGMNCNGLSAVSSMNGINNFGLFPRLCPVYSNLLGGGSLPHPMLNPTSLPS

SEQ ID NO: 4913 - protein, 85 aa, Homo sapiens
SLPSDGARRLLQPEHPREVLVPAPHSAFSFTGAAASMKDKACSPTSGSPTAGTAATAEHVVQPKATSAAMAAPSSDEAMNLIKNK

SEQ ID NO: 4914 - protein, 85 aa, Homo sapiens
RNMTGYKTLPYPLKKQNGKIKYECNVCAKTFGQLSNLKVHLRVHSGERPFKCQTCNKGFTQLAHLQKHYLVHTGEKPHECQVCHK

SEQ ID NO: 4915 - protein, 85 aa, Homo sapiens
RFSSTSNLKTHLRLHSGEKPYQCKVCPAKFTQFVHLKLHKRLHTRERPHKCSQCHKNYIHLCSLKVHLKGNCAAAPAPGLPLEDL

SEQ ID NO: 4916 - protein, 85 aa, Homo sapiens
TRINEEIEKFDISDNADRLEDVEDDISVISVVEKEILAVVRKEKEETGLKVSLQRNMGNGLLSSGCSLYESSDLPLMKLPPSNPL

SEQ ID NO: 4917 - protein, 85 aa, Homo sapiens
QRLQDEQEIVQKRTFTKWINSHLAKRKPPMVVDDLFEDMKDGVKLLALLEVLSGQKLPCEQGRRMKRIHAVANIGTALKFLEGRK

SEQ ID NO: 4918 - protein, 85 aa, Homo sapiens
IKLVNINSTDIADGRPSIVLGLMWTIILYFQIEELTSNLPQLQSLSSSASSVDSIVSSETPSPPSKRKVTTKIQGNAKKALLKWV

SEQ ID NO: 4919 - protein, 85 aa, Homo sapiens
QYTAGKQTGIEVKDFGKSWRSGVAFHSVIHAIRPELVDLETVKGRSNRENLEDAFTIAETELGIPRLLDPEDVDVDKPDEKSIMT

SEQ ID NO: 4920 - protein, 85 aa, Homo sapiens
YVAQFLKHYPDIHNASTDGQEDDEILPGFPSFANSVQNFKREDRVIFKEMKVWIEQFERDLTRAQMVESNLQDKYQSFKHFRVQY

SEQ ID NO: 4921 - protein, 85 aa, Homo sapiens
EMKRKQIEHLIQPLHRDGKLSLDQALVKQSWDRVTSRLFDWHIQLDKSLPAPLGTIGAWLYRAEVALREEITVQQVHEETANTIQ

SEQ ID NO: 4922 - protein, 85 aa, Homo sapiens
RKLEQHKRKCQTIMDLLQNTDAHKRAFHEIYRTRSVNGIPVPPDQLEDMAERFHFVSSTSELHLMKMEFLELKYRLLSLLVLAES

SEQ ID NO: 4923 - protein, 85 aa, Homo sapiens
KLKSWIIKYGRRESVEQLLQNYVSFIENSKFFEQYEVTYQILKQTAEMYVKADGSVEEAENVMKFMNETTAQWRNLSVEVRSVRS

SEQ ID NO: 4924 - protein, 85 aa, Homo sapiens
MLEEVISNWDRYGNTVASLQAWLEDAEKMLNQSENAKKDFFRNLPHWIQQHTAMNDAGNFLIETCDEMVSRDLKQQLLLLNGRWR

SEQ ID NO: 4925 - protein, 85 aa, Homo sapiens
ELFMEVKQYAQADEMDRMKKEYTDCVVTLSAFATEAHKKLSEPLEVSFMNVKLLIQDLEDIEQRVPVMDAQYKIITKTAHLITKE

SEQ ID NO: 4926 - protein, 85 aa, Homo sapiens
SPQEEGKEMFATMSKLKEQLTKVKECYSPLLYESQQLLIPLEELEKQMTSFYDSLGKINEIITVLEREAQSSALFKQKHQLRILK

SEQ ID NO: 4927 - protein, 85 aa, Homo sapiens
CKWCNSSQKMTLCLVLGSMISMLSTAKITIAGYKSEVEVSELLACQENCKKTLTLIEKGSQSVQKFVTLSNVLKHFDQTRLQTDC

SEQ ID NO: 4928 - protein, 85 aa, Homo sapiens
RYSCCFSVMRKQHHIMIVFHIKSMVKKTGDWKKHVETNSRLMKKFEESRAELEKVLRIAQEGLEEKGDPEELLRRHTEFFSQLDQ

SEQ ID NO: 4929 - protein, 85 aa, Homo sapiens
RVLNAFLKACDELTDILPEQEQQGLQEAVRKLHKQWKDLQGEAPYHLLHLKIDVEKNRFLASVEECRTELDRETKLMPQEGSEKI

SEQ ID NO: 4930 - protein, 85 aa, Homo sapiens
IKEHRVFFSDKGPHHLCEKRLQLIEELCVKLPVRDPVRDTPGTCHVTLKELRAAIDSTYRKLMEDPDKWKDYTSRFSEFSSWIST

SEQ ID NO: 4931 - protein, 85 aa, Homo sapiens
NETQLKGIKGEAIDTANHGEVKRAVEEIRNGVTKRGETLSWLKSRLKVLTEVSSENEAQKQGDELAKLSSSFKALVTLLSEVEKM

SEQ ID NO: 4932 - protein, 85 aa, Homo sapiens
LSNFGDCVQYKEIVKNSLEELISGSKEVQEQAEKILDTENLFEAQQLLLHHQQKTKRISAKKRDVQQQIAQAQQGEGGLPDRGHE

SEQ ID NO: 4933 - protein, 85 aa, Homo sapiens
ELRKLESTLDGLERSRERQERRIQVTLRKWERFETNKETVVRYLFQTGSSHERFLSFSSLESLSSELEQTKEFSKRTESIAVQAE

SEQ ID NO: 4934 - protein, 85 aa, Homo sapiens
NLVKEASEIPLGPQNKQLLQQQAKSIKEQVKKLEDTLEEEYVIDNKTMEMVKTKWDHFGSNFETLSVWITEKEKELNALETSSSA

SEQ ID NO: 4935 - protein, 85 aa, Homo sapiens
MDMQISQIKVTIQEIESKLSSIVGLEEEAQSFAQFVTTGESARIKAKLTQIRRYGEELREHAQCLEGTILGHLSQQQKFEENLRK

SEQ ID NO: 4936 - protein, 85 aa, Homo sapiens
IQQSVSEFEDKLAVPIKICSSATETYKVLQEHMDLCQALESLSSAITAFSASARKVVNRDSCVQEAAALQQQYEDILRRAKERQT

SEQ ID NO: 4937 - protein, 85 aa, Homo sapiens
ALENLLAHWQRLEKELSSFLTWLERGEAKASSPEMDISADRVKVEASKDDVKMMKLHLEQLDERWRDLPQIINKRINFLQSVVAE

SEQ ID NO: 4938 - protein, 85 aa, Homo sapiens
HQQFDELLLSFSVWIKLFLSELQTTSEISIMDHQVALTRHKDHAAEVESKKGELQSLQGHLAKLGSLGRAEDLHLLQGKAEDCFQ

SEQ ID NO: 4939 - protein, 85 aa, Homo sapiens
MFEEASQVVERRQLALSHLAEFLQSHASLSGILRQLRQTVEATNSMNKNESDLIEKDLNDALQNAKALESAAVSLDGILSKAQYH

SEQ ID NO: 4940 - protein, 85 aa, Homo sapiens
MKIGSSEQRTSCRATADQLCGEVERIQNLLGTKQSEADALAVLKKAFQDQKEELLKSIEDIEERTDKERLKEPTRQALQQRLRVF

SEQ ID NO: 4941 - protein, 85 aa, Homo sapiens
NQLEDELNSHEHELCWLKDKAKQIAQKDVAFAPEVDREINRLEVTWDDTKRLIHENQGQCCGLIDLMREYQNLKSAVSKVLENAS

SEQ ID NO: 4942 - protein, 85 aa, Homo sapiens
SVIVTRTTIKDQEDLKWAFSKHETAKNKMNYKQKDLDNFTSKGKHLLSELKKIHSSDFSLVKTDMESTVDKWLDVSEKLEENMDR

SEQ ID NO: 4943 - protein, 85 aa, Homo sapiens
MRVSLSIWDDVLSTRDEIEGWSNNCVPQMAENISNLDNHLRAEELLKEFESEVKNKALRLEELHSKVNDLKELTKNLETPPDLQF

SEQ ID NO: 4944 - protein, 85 aa, Homo sapiens
IEADLMQKLEHAKEITEVAKGTLKDFTAQSTQVEKFINDITTWFTKVEESLMNCAQNETCEALKKVKDIQKELQSQQSNISSTQE

SEQ ID NO: 4945 - protein, 85 aa, Homo sapiens
NLNSLCRKYHSAELESLGRAMTGLIKKHEAVSQLCSKTQASLQESLEKHFSEESMQEFQEWFLGAKAAAKESSDRTGDSKVLEAK

SEQ ID NO: 4946 - protein, 85 aa, Homo sapiens
LHDLQQNILDSVSDGQSKLDAVTQEGQTLYAHLSKQIVSSIQEQITKANEEFQAFLKQCLKDKQALQDCASELGSFEDQHRKLNL

SEQ ID NO: 4947 - protein, 85 aa, Homo sapiens
WIHEMEERFNTENLGESKQHIPEKKNEVHKVEMFLGELLAARESLDKLSQRGQLLSEEGHGAGQEGRLCSQLLTSHQNLLRMTKE

SEQ ID NO: 4948 - protein, 85 aa, Homo sapiens
KLRSCQVALQEHEALEEALQSMWFWVKAIQDRLACAESTLGSKDTLEKRLSQIQDILLMKGEGEVKLNMAIGKGEQALRSSNKEG

SEQ ID NO: 4949 - protein, 85 aa, Homo sapiens
QRVIQTQLETLKEVWADIMSSSVHAQSTLESVISQWNDYVERKNQLEQWMESVDQKIEHPLQPQPGLKEKFVLLDHLQSILSEAE

SEQ ID NO: 4950 - protein, 85 aa, Homo sapiens
DHTRALHRLIAKSRELYEKTEDESFKDTAQEELKTQFNDIMTVAKEKMRKVEEIVKDHLMYLDAVHEFTDWLHSAKEELHRWSDM

SEQ ID NO: 4951 - protein, 85 aa, Homo sapiens
SGDSSATQKKLSKIKELIDSREIGASRLSRVESLAPEVKQNTTASGCELMHTEMQALRADWKQWEDSVFQTQSCLENLVSQMALS

SEQ ID NO: 4952 - protein, 85 aa, Homo sapiens
EQEFSGQVAQLEQALEQFSALLKTWAQQLTLLEGKNTDEEIVECWHKGQEILDALQKAEPRTEDLKSQLNELCRFSRDLSTYSGK

SEQ ID NO: 4953 - protein, 85 aa, Homo sapiens
VSGLIKEYNCLCLQASKGCQNKEQILQQRFRKAFRDFQQWLVNAKITTAKCFDIPQNISEVSTSLQKIQEFLSESENGQHKLNMM

SEQ ID NO: 4954 - protein, 85 aa, Homo sapiens
MSKGELLSTLLTKEKAKGIQAKVTAAKEDWKNFHSNLHQKESALENLKIQMKDFEVSAEPIQDWLSKTEKMVHESSNRLYDLPAK

SEQ ID NO: 4955 - protein, 85 aa, Homo sapiens
RREQQKLQSVLEEIHCYEPQLNRLKEKAQQLWEGQAASKSFRHRVSQLSSQYLALSNLTKEKVSRLDRIVAEHNQFSLGIKELQD

SEQ ID NO: 4956 - protein, 85 aa, Homo sapiens
WMTDAIHMLDSYCHPTSDKSVLDSRTLKLEALLSVKQEKEIQMKMIVTRGESVLQNTSPEGIPTIQQQLQSVKDMWASLLSAGIR

SEQ ID NO: 4957 - protein, 85 aa, Homo sapiens
CKRVRLPCAYIALKLRVHQHAELRDKTTMLGKAKEAVTKSEKLVRLHQEYQRDLKAFEVWLGQEQEKLDQYSVLEGDAHTHETTL

SEQ ID NO: 4958 - protein, 85 aa, Homo sapiens
RDLQELQVHCAEGQALLNSVLHTREDVIPSGIPQAEDRALESLRQDWQAYQHRLSETRTQFNNVVNKLRLMEQKFQQVDEWLKTA

SEQ ID NO: 4959 - protein, 85 aa, Homo sapiens
EEKVSPRTRRQSNRATKEIQLHQMKKWHEEVTAYRDEVEEVGARAQEILDESHVNSRMGCQATQLTSRYQALLLQVLEQIKFLEE

SEQ ID NO: 4960 - protein, 85 aa, Homo sapiens
EIQSLEESESSLSSYSDWYGSTHKNFKNVATKIDKVDTVMMGKKLKTLEVLLKDMEKGHSLLKSAREKGERAVKYLEEGEAERLR

SEQ ID NO: 4961 - protein, 85 aa, Homo sapiens
KEIHDHMEQLKELTSTVRKEHMTLEKSLQQTVLSHEPSVKSVREKGEALLELVQDVTLKDKIDQLQSDYQDLCSIGKEHVFSLEA

SEQ ID NO: 4962 - protein, 85 aa, Homo sapiens
KVKDHEDYNSELQEVEKWLLQMSGRLVAPDLLETSSLETITQQLAHHKMYQSLEHELQKHVSRQDTLQQCQAWLSAVQPDLEPSP

SEQ ID NO: 4963 - protein, 85 aa, Homo sapiens
QPPLSRAEAIKQVKHFRALQEQARTYLDLLCSMCDLSNASVKTTAKDIQQTEQTIEQKLVQAQNLTQGWEEIKHLKSELWIYLQD

SEQ ID NO: 4964 - protein, 85 aa, Homo sapiens
ADQQLQNMKRRHSELELNIAQNMVSQVKDFVKKLQSKQASVNTIIEKVNKLTKKEESPEHKEINHLNDQWLDLCRQSNNLCLQRE

SEQ ID NO: 4965 - protein, 85 aa, Homo sapiens
EDLQRTRDYHDCMNVVEVFLEKFTTEWDNLARSDAESTAVHLEALKKLALALQERKYAIEDLKDQKQKMIEHLNLDDKELVKEQT

SEQ ID NO: 4966 - protein, 85 aa, Homo sapiens
SHLEQRWFQLEDLIKRKIQVSVTNLEELNVVQSRFQELMEWAEEQQPNIAEALKQSPPPDMAQNLLMDHLAICSELEAKQMLLKS

SEQ ID NO: 4967 - protein, 85 aa, Homo sapiens
LIKDADRVMADLGLNERQVIQKALSDAQSHVNCLSDLVGQRRKKHFKEDFDKACHWLKQADIVTFPEINLMNESSELHTQLAKYQ

SEQ ID NO: 4968 - protein, 85 aa, Homo sapiens
NILEQSPEYENLLLTLQRTGQTILPSLNEVDHSYLSEKLNALPRQFNVIVALAKDKFYKVQEAILARKEYASLIELTTQSLSELE

SEQ ID NO: 4969 - protein, 85 aa, Homo sapiens
AQFLRMSKVPTDLAVEEALSLQDGCRAILDEVAGLGEAVDELNQKKEGFRSTGQPWQPDKMLHLVTLYHRLKRQTEQRVSLLEDT

SEQ ID NO: 4970 - protein, 85 aa, Homo sapiens
TSAYQEHEKMCQQLERQLKSVKEEQSKVNEETLPAEEKLKMYHSLAGSLQDSGIVLKRVTIHLEDLAPHLDPLAYEKARHQIQSW

SEQ ID NO: 4971 - protein, 85 aa, Homo sapiens
QGELKLLTSAIGETVTECESRMVQSIDFQTEMSRSLDWLRRVKAELSGPVYLDLNLQDIQEEIRKIQIHQEEVQSSLRIMNALSH

SEQ ID NO: 4972 - protein, 85 aa, Homo sapiens
KEKEKFTKAKELISADLEHSLAELSELDGDIQEALRTRQATLTEIYSQCQRYYQVFQAANDWLEDAQELLQLAGNGLDVESAEEN

SEQ ID NO: 4973 - protein, 85 aa, Homo sapiens
LKSHMEFFSTEDQFHSNLEELHSLVATLDPLIKPTGKEDLEQKVASLELRSQRMSRDSGAQALVSVVNSFHEKIVALEEKASQLE

SEQ ID NO: 4974 - protein, 85 aa, Homo sapiens
KTGNDASKATLSRSMTTVWQRWTRLRAVAQDQEKILEDAVDEWTGFNNKVKKATEMIDQLQDKLPGSSAEKASKAELLTLLEYHD

SEQ ID NO: 4975 - protein, 85 aa, Homo sapiens
TFVLELEQQQSALGMLRQQTLSMLQDGAAPTPGEEPPLMQEITAMQDRCLKMVETQINSVKCWVQETKEYLGNPTIEIDAQLEEL

SEQ ID NO: 4976 - protein, 85 aa, Homo sapiens
QILLTEATNHRQNIEKMAEEQKEKYLGLYTILPSELSLQLAEVALDLKIRDQIQDKIKEVEQSKATSQELSRQIQKLAKDLTTIL

SEQ ID NO: 4977 - protein, 85 aa, Homo sapiens
TKLKAKTDNVVQAKTDQKAASHLEEYNEMLELILKWIEKAKVLAHGTIAWNSASQLREQYILHQTLLEESKEIDSELEAMTEKLQ

SEQ ID NO: 4978 - protein, 85 aa, Homo sapiens
YLTSVYCTEKMSQQVAELGRETEELRQMIKIRLQNLQDAAKDMKKFEAELKKLQAALEQAQATLTSPEVGRLSLKEQLSHRQHLL

SEQ ID NO: 4979 - protein, 85 aa, Homo sapiens
SEMESLKPKVQAVQLCQSALRIPEDVVASLPLCHAALRLQEEASRLQHTAIQQCNIMQEAVVQYEQYEQEMKHLQQLIEGAHREI

SEQ ID NO: 4980 - protein, 85 aa, Homo sapiens
EDKPVATSNIQELQAQISRHEELAQKIKGYQEQIASLNSKCKMLTMKAKHATMLLTVTEVEGLAEGTEDLDGELLPTPSAHPSVV

SEQ ID NO: 4981 - protein, 85 aa, Homo sapiens
MMTAGRCHTLLSPVTEESGEEGTNSEISSPPACRSPSPVANTDASVNQDIAYYQALSAERLQTDAAKIHPSTSASQEFYEPGLEP

SEQ ID NO: 4982 - protein, 85 aa, Homo sapiens
SATAKLGDLQRSWETLKNVISEKQRTLYEALERQQKYQDSLQSISTKMEAIELKLSESPEPGRSPESQMAEHQALMDEILMLQDE

SEQ ID NO: 4983 - protein, 85 aa, Homo sapiens
INELQSSLAEELVSESCEADPAEQLALQSTLTVLAERMSTIRMKASGKRQLLEEKLNDQLEEQRQEQALQRYRCEADELDSWLLS

SEQ ID NO: 4984 - protein, 85 aa, Homo sapiens
TKATLDTALSPPKEPMDMEAQLMDCQNMLVEIEQKVVALSELSVHNENLLLEGKAHTKDEAEQLAGKLRRLKGSLLELQRALHDK

SEQ ID NO: 4985 - protein, 85 aa, Homo sapiens
QLNMQGTAQEKEESDVDLTATQSPGVQEWLAQARTTWTQQRQSSLQQQKELEQELAEQKSLLRSVASRGEEILIQHSAAETSGDA

SEQ ID NO: 4986 - protein, 85 aa, Homo sapiens
GEKPDVLSQELGMEGEKSSAEDQMRMKWESLHQEFSTKQKLLQNVLEQEQEQVLYSRPNRLLSGVPLYKGDVPTQDKSAVTSLLD

SEQ ID NO: 4987 - protein, 85 aa, Homo sapiens
GLNQAFEEVSSQSGGAKRQSIHLEQKLYDGVSATSTWLDDVEERLFVATALLPEETETCLFNQEILAKDIKEMSEEMDKNKNLFS

SEQ ID NO: 4988 - protein, 85 aa, Homo sapiens
QAFPENGDNRDVIEDTLGCLLGRLSLLDSVVNQRCHQMKERLQQILNFQNDLKVLFTSLADNKYIILQKLANVFEQPVAEQIEAI

SEQ ID NO: 4989 - protein, 85 aa, Homo sapiens
QQAEDGLKEFDAGIIELKRRGDKLQVEQPSMQELSKLQDMYDELMMIIGSRRSGLNQNLTLKSQYERALQDLADLLETGQEKMAG

SEQ ID NO: 4990 - protein, 85 aa, Homo sapiens
DQKIIVSSKEEIQQLLDKHKEYFQGLESHMILTETLFRKIISFAVQKETQFHTELMAQASAVLKRAHKRGVELEYILETWSHLDE

SEQ ID NO: 4991 - protein, 85 aa, Homo sapiens
DQQELSRQLEVVESSIPSVGLVEENEDRLIDRITLYQHLKSSLNEYQPKLYQVLDDGKRLLISISCSDLESQLNQLGECWLSNTN

SEQ ID NO: 4992 - protein, 85 aa, Homo sapiens
KMSKELHRLETILKHWTRYQSESADLIHWLQSAKDRLEFWTQQSVTVPQELEMVRDHLNAFLEFSKEVDAQSSLKSSVLSTGNQL

SEQ ID NO: 4993 - protein, 85 aa, Homo sapiens
LRLKKVDTATLRSELSRIDSQWTDLLTNIPAVQEKLHQLQMDKLPSRHAISEVMSWISLMENVIQKDEDNIKNSIGYKAIHEYLQ

SEQ ID NO: 4994 - protein, 85 aa, Homo sapiens
KYKGFKIDINCKQLTVDFVNQSVLQISSQDVESKRSDKTDFAEQLGAMNKSWQILQGLVTEKIQLLEGLLESWSEYENNVQCLKT

SEQ ID NO: 4995 - protein, 85 aa, Homo sapiens
WFETQEKRLKQQHRIGDQASVQNALKDCQDLEDLIKAKEKEVEKIEQNGLALIQNKKEDVSSIVMSTLRELGQTWANLDHMVGQL

SEQ ID NO: 4996 - protein, 85 aa, Homo sapiens
KILLKSVLDQWSSHKVAFDKINSYLMEARYSLSRFRLLTGSLEAVQVQVDNLQNLQDDLEKQERSLQKFGSITNQLLKECHPPVT

SEQ ID NO: 4997 - protein, 85 aa, Homo sapiens
ETLTNTLKEVNMRWNNLLEEIAEQLQSSKALLQLWQRYKDYSKQCASTVQQQEDRTNELLKAATNKDIADDEVATWIQDCNDLLK

SEQ ID NO: 4998 - protein, 85 aa, Homo sapiens
GLGTVKDSLFFLHELGEQLKQQVDASAASAIQSDQLSLSQHLCALEQALCKQQTSLQAGVLDYETFAKSLEALEAWIVEAEEILQ

SEQ ID NO: 4999 - protein, 85 aa, Homo sapiens
GQDPSHSSDLSTIQERMEELKGQMLKFSSMAPDLDRLNELGYRLPLNDKEIKRMQNLNRHWSLISSQTTERFSKLQSFLLQHQTF

SEQ ID NO: 5000 - protein, 85 aa, Homo sapiens
MEKCETWMEFLVQTEQKLAVEISGNYQHLLEQQRAHELFQAEMFSRQQILHSIIIDGQRLLEQGQVDDRDEFNLKLTLLSNQWQG

SEQ ID NO: 5001 - protein, 85 aa, Homo sapiens
VIRRAQQRRGIIDSQIRQWQRYREMAEKLRKWLVEVSYLPMSGLGSVPIPLQQARTLFDEVQFKEKVFLRQQGSYILTVEAGKQL

SEQ ID NO: 5002 - protein, 85 aa, Homo sapiens
LLSADSGAEAALQAELAEIQEKWKSASMRLEEQKKKLAFLLKDWEKCEKGIADSLEKLRTFKKKLSQSLPDHHEELHAEQMRCKE

SEQ ID NO: 5003 - protein, 85 aa, Homo sapiens
LENAVGSWTDDLTQLSLLKDTLSAYISADDISILNERVELLQRQWEELCHQLSLRRQQIGERLNEWAVFSEKNKELCEWLTQMES

SEQ ID NO: 5004 - protein, 85 aa, Homo sapiens
KVSQNGDILIEEMIEKLKKDYQEEIAIAQENKIQLQQMGERLAKASHESKASEIEYKLGKVNDRWQHLLDLIAARVKKLKETLVA

SEQ ID NO: 5005 - protein, 85 aa, Homo sapiens
VQQLDKNMSSLRTWLAHIESELAKPIVYDSCNSEEIQRKLNEQQELQRDIEKHSTGVASVLNLCEVLLHDCDACATDAECDSIQQ

SEQ ID NO: 5006 - protein, 85 aa, Homo sapiens
ATRNLDRRWRNICAMSMERRLKIEETWRLWQKFLDDYSRFEDWLKSSERTAAFPSSSGVIYTVAKEELKKFEAFQRQVHECLTQL

SEQ ID NO: 5007 - protein, 85 aa, Homo sapiens
ELINKQYRRLARENRTDSACSLKQMVHEGNQRWDNLQKRVTSILRRLKHFIGQREEFETARDSILVWLTEMDLQLTNIEHFSECD

SEQ ID NO: 5008 - protein, 85 aa, Homo sapiens
VQAKIKQLKAFQQEISLNHNKIEQIIAQGEQLIEKSEPLDAAIIEEELDELRRYCQEVFGRVERYHKKLIRLPLPDDEHDLSDRE

SEQ ID NO: 5009 - protein, 85 aa, Homo sapiens
MELEDSAALSDLHWHDRSADSLLSPQPSSNLSLSLAQPLRSERSGRDTPASVDSIPLEWDHDYDLSRDLESAMSRALPSEDEEGQ

SEQ ID NO: 5010 - protein, 85 aa, Homo sapiens
DDKDFYLRGAVGLSGDHSALESQIRQLGKALDDSRFQIQQTENIIRSKTPTGPELDTSYKGYMKLLGECSSSIDSVKRLEHKLKE

SEQ ID NO: 5011 - protein, 85 aa, Homo sapiens
EEESLPGFVNLHSTETQTAGVIDRWELLQAQALSKELRMKQNLQKWQQFNSDLNSIWAWLGDTEEELEQLQRLELSTDIQTIELQ

SEQ ID NO: 5012 - protein, 85 aa, Homo sapiens
IKKLKELQKAVDHRKAIILSINLCSPEFTQADSKESRDLQDRLSQMNGRWDRVCSLLEEWRGLLQDALMQCQGFHEMSHGLLLML

SEQ ID NO: 5013 - protein, 85 aa, Homo sapiens
ENIDRRKNEIVPIDSNLDAEILQDHHKQLMQIKHELLESQLRVASLQDMSCQLLVNAEGTDCLEAKEKVHVIGNRLKLLLKEVSR

SEQ ID NO: 5014 - protein, 85 aa, Homo sapiens
HIKELEKLLDVSSSQQDLSSWSSADELDTSGSVSPTSGRSTPNRQKTPRGKCSLSQPGPSVSSPHSRSTKGGSDSSLSEPGPGRS

SEQ ID NO: 5015 - protein, 85 aa, Homo sapiens
VKLLALLEVLSGQKLPCEQGRRMKRIHAVANIGTALKFLEGRKIKLVNINSTDIADGRPSIVLGLMWTIILYFQIEELTSNLPQL

SEQ ID NO: 5016 - protein, 85 aa, Homo sapiens
QSLSSSASSVDSIVSSETPSPPSKRKVTTKIQGNAKKALLKWVQYTAGKQTGIEVKDFGKSWRSGVAFHSVIHAIRPELVDLETV

SEQ ID NO: 5017 - protein, 85 aa, Homo sapiens
KGRSNRENLEDAFTIAETELGIPRLLDPEDVDVDKPDEKSIMTYVAQFLKHYPDIHNASTDGQEDDEILPGFPSFANSVQNFKRE

SEQ ID NO: 5018 - protein, 85 aa, Homo sapiens
DRVIFKEMKVWIEQFERDLTRAQMVESNLQDKYQSFKHFRVQYEMKRKQIEHLIQPLHRDGKLSLDQALVKQSWDRVTSRLFDWH

SEQ ID NO: 5019 - protein, 85 aa, Homo sapiens
IQLDKSLPAPLGTIGAWLYRAEVALREEITVQQVHEETANTIQRKLEQHKRKCQTIMDLLQNTDAHKRAFHEIYRTRSVNGIPVP

SEQ ID NO: 5020 - protein, 85 aa, Homo sapiens
PDQLEDMAERFHFVSSTSELHLMKMEFLELKYRLLSLLVLAESKLKSWIIKYGRRESVEQLLQNYVSFIENSKFFEQYEVTYQIL

SEQ ID NO: 5021 - protein, 85 aa, Homo sapiens
KQTAEMYVKADGSVEEAENVMKFMNETTAQWRNLSVEVRSVRSMLEEVISNWDRYGNTVASLQAWLEDAEKMLNQSENAKKDFFR

SEQ ID NO: 5022 - protein, 85 aa, Homo sapiens
NLPHWIQQHTAMNDAGNFLIETCDEMVSRDLKQQLLLLNGRWRELFMEVKQYAQADEMDRMKKEYTDCVVTLSAFATEAHKKLSE

SEQ ID NO: 5023 - protein, 85 aa, Homo sapiens
PLEVSFMNVKLLIQDLEDIEQRVPVMDAQYKIITKTAHLITKESPQEEGKEMFATMSKLKEQLTKVKECYSPLLYESQQLLIPLE

SEQ ID NO: 5024 - protein, 85 aa, Homo sapiens
ELEKQMTSFYDSLGKINEIITVLEREAQSSALFKQKHQLRILKCKWCNSSQKMTLCLVLGSMISMLSTAKITIAGYKSEVEVSEL

SEQ ID NO: 5025 - protein, 85 aa, Homo sapiens
LACQENCKKTLTLIEKGSQSVQKFVTLSNVLKHFDQTRLQTDCRYSCCFSVMRKQHHIMIVFHIKSMVKKTGDWKKHVETNSRLM

SEQ ID NO: 5026 - protein, 85 aa, Homo sapiens
KKFEESRAELEKVLRIAQEGLEEKGDPEELLRRHTEFFSQLDQRVLNAFLKACDELTDILPEQEQQGLQEAVRKLHKQWKDLQGE

SEQ ID NO: 5027 - protein, 85 aa, Homo sapiens
APYHLLHLKIDVEKNRFLASVEECRTELDRETKLMPQEGSEKIIKEHRVFFSDKGPHHLCEKRLQLIEELCVKLPVRDPVRDTPG

SEQ ID NO: 5028 - protein, 85 aa, Homo sapiens
TCHVTLKELRAAIDSTYRKLMEDPDKWKDYTSRFSEFSSWISTNETQLKGIKGEAIDTANHGEVKRAVEEIRNGVTKRGETLSWL

SEQ ID NO: 5029 - protein, 85 aa, Homo sapiens
KSRLKVLTEVSSENEAQKQGDELAKLSSSFKALVTLLSEVEKMLSNFGDCVQYKEIVKNSLEELISGSKEVQEQAEKILDTENLF

SEQ ID NO: 5030 - protein, 85 aa, Homo sapiens
EAQQLLLHHQQKTKRISAKKRDVQQQIAQAQQGEGGLPDRGHEELRKLESTLDGLERSRERQERRIQVTLRKWERFETNKETVVR

SEQ ID NO: 5031 - protein, 85 aa, Homo sapiens
YLFQTGSSHERFLSFSSLESLSSELEQTKEFSKRTESIAVQAENLVKEASEIPLGPQNKQLLQQQAKSIKEQVKKLEDTLEEEYV

SEQ ID NO: 5032 - protein, 85 aa, Homo sapiens
IDNKTMEMVKTKWDHFGSNFETLSVWITEKEKELNALETSSSAMDMQISQIKVTIQEIESKLSSIVGLEEEAQSFAQFVTTGESA

SEQ ID NO: 5033 - protein, 85 aa, Homo sapiens
RIKAKLTQIRRYGEELREHAQCLEGTILGHLSQQQKFEENLRKIQQSVSEFEDKLAVPIKICSSATETYKVLQEHMDLCQALESL

SEQ ID NO: 5034 - protein, 85 aa, Homo sapiens
SSAITAFSASARKVVNRDSCVQEAAALQQQYEDILRRAKERQTALENLLAHWQRLEKELSSFLTWLERGEAKASSPEMDISADRV

SEQ ID NO: 5035 - protein, 85 aa, Homo sapiens
KVEASKDDVKMMKLHLEQLDERWRDLPQIINKRINFLQSVVAEHQQFDELLLSFSVWIKLFLSELQTTSEISIMDHQVALTRHKD

SEQ ID NO: 5036 - protein, 85 aa, Homo sapiens
HAAEVESKKGELQSLQGHLAKLGSLGRAEDLHLLQGKAEDCFQLFEEASQVVERRQLALSHLAEFLQSHASLSGILRQLRQTVEA

SEQ ID NO: 5037 - protein, 85 aa, Homo sapiens
TNSMNKNESDLIEKDLNDALQNAKALESAAVSLDGILSKAQYHLKIGSSEQRTSCRATADQLCGEVERIQNLLGTKQSEADALAV

SEQ ID NO: 5038 - protein, 85 aa, Homo sapiens
MKKAFQDQKEELLKSIEDIEERTDKERLKEPTRQALQQRLRVFNQLEDELNSHEHELCWLKDKAKQIAQKDVAFAPEVDREINRL

SEQ ID NO: 5039 - protein, 85 aa, Homo sapiens
EVTWDDTKRLIHENQGQCCGLIDLMREYQNLKSAVSKVLENASSVIVTRTTIKDQEDLKWAFSKHETAKNKMNYKQKDLDNFTSK

SEQ ID NO: 5040 - protein, 85 aa, Homo sapiens
GKHLLSELKKIHSSDFSLVKTDMESTVDKWLDVSEKLEENMDRLRVSLSIWDDVLSTRDEIEGWSNNCVPQMAENISNLDNHLRA

SEQ ID NO: 5041 - protein, 85 aa, Homo sapiens
EELLKEFESEVKNKALRLEELHSKVNDLKELTKNLETPPDLQFIEADLMQKLEHAKEITEVAKGTLKDFTAQSTQVEKFINDITT

SEQ ID NO: 5042 - protein, 85 aa, Homo sapiens
WFTKVEESLMNCAQNETCEALKKVKDIQKELQSQQSNISSTQENLNSLCRKYHSAELESLGRAMTGLIKKHEAVSQLCSKTQASL

SEQ ID NO: 5043 - protein, 85 aa, Homo sapiens
QESLEKHFSEESMQEFQEWFLGAKAAAKESSDRTGDSKVLEAKLHDLQQNILDSVSDGQSKLDAVTQEGQTLYAHLSKQIVSSIQ

SEQ ID NO: 5044 - protein, 85 aa, Homo sapiens
EQITKANEEFQAFLKQCLKDKQALQDCASELGSFEDQHRKLNLWIHEMEERFNTENLGESKQHIPEKKNEVHKVEMFLGELLAAR

SEQ ID NO: 5045 - protein, 85 aa, Homo sapiens
ESLDKLSQRGQLLSEEGHGAGQEGRLCSQLLTSHQNLLRMTKEKLRSCQVALQEHEALEEALQSMWFWVKAIQDRLACAESTLGS

SEQ ID NO: 5046 - protein, 85 aa, Homo sapiens
KDTLEKRLSQIQDILLMKGEGEVKLNMAIGKGEQALRSSNKEGQRVIQTQLETLKEVWADIMSSSVHAQSTLESVISQWNDYVER

SEQ ID NO: 5047 - protein, 85 aa, Homo sapiens
KNQLEQWMESVDQKIEHPLQPQPGLKEKFVLLDHLQSILSEAEDHTRALHRLIAKSRELYEKTEDESFKDTAQEELKTQFNDIMT

SEQ ID NO: 5048 - protein, 85 aa, Homo sapiens
VAKEKMRKVEEIVKDHLMYLDAVHEFTDWLHSAKEELHRWSDMSGDSSATQKKLSKIKELIDSREIGASRLSRVESLAPEVKQNT

SEQ ID NO: 5049 - protein, 85 aa, Homo sapiens
TASGCELMHTEMQALRADWKQWEDSVFQTQSCLENLVSQMALSEQEFSGQVAQLEQALEQFSALLKTWAQQLTLLEGKNTDEEIV

SEQ ID NO: 5050 - protein, 85 aa, Homo sapiens
ECWHKGQEILDALQKAEPRTEDLKSQLNELCRFSRDLSTYSGKVSGLIKEYNCLCLQASKGCQNKEQILQQRFRKAFRDFQQWLV

SEQ ID NO: 5051 - protein, 85 aa, Homo sapiens
NAKITTAKCFDIPQNISEVSTSLQKIQEFLSESENGQHKLNMMLSKGELLSTLLTKEKAKGIQAKVTAAKEDWKNFHSNLHQKES

SEQ ID NO: 5052 - protein, 85 aa, Homo sapiens
ALENLKIQMKDFEVSAEPIQDWLSKTEKMVHESSNRLYDLPAKRREQQKLQSVLEEIHCYEPQLNRLKEKAQQLWEGQAASKSFR

SEQ ID NO: 5053 - protein, 85 aa, Homo sapiens
HRVSQLSSQYLALSNLTKEKVSRLDRIVAEHNQFSLGIKELQDWMTDAIHMLDSYCHPTSDKSVLDSRTLKLEALLSVKQEKEIQ

SEQ ID NO: 5054 - protein, 85 aa, Homo sapiens
MKMIVTRGESVLQNTSPEGIPTIQQQLQSVKDMWASLLSAGIRCKRVRLPCAYIALKLRVHQHAELRDKTTMLGKAKEAVTKSEK

SEQ ID NO: 5055 - protein, 85 aa, Homo sapiens
LVRLHQEYQRDLKAFEVWLGQEQEKLDQYSVLEGDAHTHETTLRDLQELQVHCAEGQALLNSVLHTREDVIPSGIPQAEDRALES

SEQ ID NO: 5056 - protein, 85 aa, Homo sapiens
LRQDWQAYQHRLSETRTQFNNVVNKLRLMEQKFQQVDEWLKTAEEKVSPRTRRQSNRATKEIQLHQMKKWHEEVTAYRDEVEEVG

SEQ ID NO: 5057 - protein, 85 aa, Homo sapiens
ARAQEILDESHVNSRMGCQATQLTSRYQALLLQVLEQIKFLEEEIQSLEESESSLSSYSDWYGSTHKNFKNVATKIDKVDTVMMG

SEQ ID NO: 5058 - protein, 85 aa, Homo sapiens
KKLKTLEVLLKDMEKGHSLLKSAREKGERAVKYLEEGEAERLRKEIHDHMEQLKELTSTVRKEHMTLEKSLQQTVLSHEPSVKSV

SEQ ID NO: 5059 - protein, 85 aa, Homo sapiens
REKGEALLELVQDVTLKDKIDQLQSDYQDLCSIGKEHVFSLEAKVKDHEDYNSELQEVEKWLLQMSGRLVAPDLLETSSLETITQ

SEQ ID NO: 5060 - protein, 85 aa, Homo sapiens
QLAHHKMYQSLEHELQKHVSRQDTLQQCQAWLSAVQPDLEPSPQPPLSRAEAIKQVKHFRALQEQARTYLDLLCSMCDLSNASVK

SEQ ID NO: 5061 - protein, 85 aa, Homo sapiens
TTAKDIQQTEQTIEQKLVQAQNLTQGWEEIKHLKSELWIYLQDADQQLQNMKRRHSELELNIAQNMVSQVKDFVKKLQSKQASVN

SEQ ID NO: 5062 - protein, 85 aa, Homo sapiens
TIIEKVNKLTKKEESPEHKEINHLNDQWLDLCRQSNNLCLQREEDLQRTRDYHDCMNVVEVFLEKFTTEWDNLARSDAESTAVHL

SEQ ID NO: 5063 - protein, 85 aa, Homo sapiens
EALKKLALALQERKYAIEDLKDQKQKMIEHLNLDDKELVKEQTSHLEQRWFQLEDLIKRKIQVSVTNLEELNVVQSRFQELMEWA

SEQ ID NO: 5064 - protein, 85 aa, Homo sapiens
EEQQPNIAEALKQSPPPDMAQNLLMDHLAICSELEAKQMLLKSLIKDADRVMADLGLNERQVIQKALSDAQSHVNCLSDLVGQRR

SEQ ID NO: 5065 - protein, 85 aa, Homo sapiens
KKHFKEDFDKACHWLKQADIVTFPEINLMNESSELHTQLAKYQNILEQSPEYENLLLTLQRTGQTILPSLNEVDHSYLSEKLNAL

SEQ ID NO: 5066 - protein, 85 aa, Homo sapiens
PRQFNVIVALAKDKFYKVQEAILARKEYASLIELTTQSLSELEAQFLRMSKVPTDLAVEEALSLQDGCRAILDEVAGLGEAVDEL

SEQ ID NO: 5067 - protein, 85 aa, Homo sapiens
NQKKEGFRSTGQPWQPDKMLHLVTLYHRLKRQTEQRVSLLEDTTSAYQEHEKMCQQLERQLKSVKEEQSKVNEETLPAEEKLKMY

SEQ ID NO: 5068 - protein, 85 aa, Homo sapiens
HSLAGSLQDSGIVLKRVTIHLEDLAPHLDPLAYEKARHQIQSWQGELKLLTSAIGETVTECESRMVQSIDFQTEMSRSLDWLRRV

SEQ ID NO: 5069 - protein, 85 aa, Homo sapiens
KAELSGPVYLDLNLQDIQEEIRKIQIHQEEVQSSLRIMNALSHKEKEKFTKAKELISADLEHSLAELSELDGDIQEALRTRQATL

SEQ ID NO: 5070 - protein, 85 aa, Homo sapiens
TEIYSQCQRYYQVFQAANDWLEDAQELLQLAGNGLDVESAEENLKSHMEFFSTEDQFHSNLEELHSLVATLDPLIKPTGKEDLEQ

SEQ ID NO: 5071 - protein, 85 aa, Homo sapiens
KVASLELRSQRMSRDSGAQALVSVVNSFHEKIVALEEKASQLEKTGNDASKATLSRSMTTVWQRWTRLRAVAQDQEKILEDAVDE

SEQ ID NO: 5072 - protein, 85 aa, Homo sapiens
WTGFNNKVKKATEMIDQLQDKLPGSSAEKASKAELLTLLEYHDTFVLELEQQQSALGMLRQQTLSMLQDGAAPTPGEEPPLMQEI

SEQ ID NO: 5073 - protein, 85 aa, Homo sapiens
TAMQDRCLKMVETQINSVKCWVQETKEYLGNPTIEIDAQLEELQILLTEATNHRQNIEKMAEEQKEKYLGLYTILPSELSLQLAE

SEQ ID NO: 5074 - protein, 85 aa, Homo sapiens
VALDLKIRDQIQDKIKEVEQSKATSQELSRQIQKLAKDLTTILTKLKAKTDNVVQAKTDQKAASHLEEYNEMLELILKWIEKAKV

SEQ ID NO: 5075 - protein, 85 aa, Homo sapiens
MAHGTIAWNSASQLREQYILHQTLLEESKEIDSELEAMTEKLQYLTSVYCTEKMSQQVAELGRETEELRQMIKIRLQNLQDAAKD

SEQ ID NO: 5076 - protein, 85 aa, Homo sapiens
MKKFEAELKKLQAALEQAQATLTSPEVGRLSLKEQLSHRQHLLSEMESLKPKVQAVQLCQSALRIPEDVVASLPLCHAALRLQEE

SEQ ID NO: 5077 - protein, 85 aa, Homo sapiens
ASRLQHTAIQQCNIMQEAVVQYEQYEQEMKHLQQLIEGAHREIEDKPVATSNIQELQAQISRHEELAQKIKGYQEQIASLNSKCK

SEQ ID NO: 5078 - protein, 85 aa, Homo sapiens
MLTMKAKHATMLLTVTEVEGLAEGTEDLDGELLPTPSAHPSVVMMTAGRCHTLLSPVTEESGEEGTNSEISSPPACRSPSPVANT

SEQ ID NO: 5079 - protein, 85 aa, Homo sapiens
DASVNQDIAYYQALSAERLQTDAAKIHPSTSASQEFYEPGLEPSATAKLGDLQRSWETLKNVISEKQRTLYEALERQQKYQDSLQ

SEQ ID NO: 5080 - protein, 85 aa, Homo sapiens
SISTKMEAIELKLSESPEPGRSPESQMAEHQALMDEILMLQDEINELQSSLAEELVSESCEADPAEQLALQSTLTVLAERMSTIR

SEQ ID NO: 5081 - protein, 85 aa, Homo sapiens
MKASGKRQLLEEKLNDQLEEQRQEQALQRYRCEADELDSWLLSTKATLDTALSPPKEPMDMEAQLMDCQNMLVEIEQKVVALSEL

SEQ ID NO: 5082 - protein, 85 aa, Homo sapiens
SVHNENLLLEGKAHTKDEAEQLAGKLRRLKGSLLELQRALHDKQLNMQGTAQEKEESDVDLTATQSPGVQEWLAQARTTWTQQRQ

SEQ ID NO: 5083 - protein, 85 aa, Homo sapiens
SSLQQQKELEQELAEQKSLLRSVASRGEEILIQHSAAETSGDAGEKPDVLSQELGMEGEKSSAEDQMRMKWESLHQEFSTKQKLL

SEQ ID NO: 5084 - protein, 85 aa, Homo sapiens
QNVLEQEQEQVLYSRPNRLLSGVPLYKGDVPTQDKSAVTSLLDGLNQAFEEVSSQSGGAKRQSIHLEQKLYDGVSATSTWLDDVE

SEQ ID NO: 5085 - protein, 85 aa, Homo sapiens
ERLFVATALLPEETETCLFNQEILAKDIKEMSEEMDKNKNLFSQAFPENGDNRDVIEDTLGCLLGRLSLLDSVVNQRCHQMKERL

SEQ ID NO: 5086 - protein, 85 aa, Homo sapiens
QQILNFQNDLKVLFTSLADNKYIILQKLANVFEQPVAEQIEAIQQAEDGLKEFDAGIIELKRRGDKLQVEQPSMQELSKLQDMYD

SEQ ID NO: 5087 - protein, 85 aa, Homo sapiens
ELMMIIGSRRSGLNQNLTLKSQYERALQDLADLLETGQEKMAGDQKIIVSSKEEIQQLLDKHKEYFQGLESHMILTETLFRKIIS

SEQ ID NO: 5088 - protein, 85 aa, Homo sapiens
FAVQKETQFHTELMAQASAVLKRAHKRGVELEYILETWSHLDEDQQELSRQLEVVESSIPSVGLVEENEDRLIDRITLYQHLKSS

SEQ ID NO: 5089 - protein, 85 aa, Homo sapiens
LNEYQPKLYQVLDDGKRLLISISCSDLESQLNQLGECWLSNTNKMSKELHRLETILKHWTRYQSESADLIHWLQSAKDRLEFWTQ

SEQ ID NO: 5090 - protein, 85 aa, Homo sapiens
QSVTVPQELEMVRDHLNAFLEFSKEVDAQSSLKSSVLSTGNQLLRLKKVDTATLRSELSRIDSQWTDLLTNIPAVQEKLHQLQMD

SEQ ID NO: 5091 - protein, 85 aa, Homo sapiens
KLPSRHAISEVMSWISLMENVIQKDEDNIKNSIGYKAIHEYLQKYKGFKIDINCKQLTVDFVNQSVLQISSQDVESKRSDKTDFA

SEQ ID NO: 5092 - protein, 85 aa, Homo sapiens
EQLGAMNKSWQILQGLVTEKIQLLEGLLESWSEYENNVQCLKTWFETQEKRLKQQHRIGDQASVQNALKDCQDLEDLIKAKEKEV

SEQ ID NO: 5093 - protein, 85 aa, Homo sapiens
EKIEQNGLALIQNKKEDVSSIVMSTLRELGQTWANLDHMVGQLKILLKSVLDQWSSHKVAFDKINSYLMEARYSLSRFRLLTGSL

SEQ ID NO: 5094 - protein, 85 aa, Homo sapiens
EAVQVQVDNLQNLQDDLEKQERSLQKFGSITNQLLKECHPPVTETLTNTLKEVNMRWNNLLEEIAEQLQSSKALLQLWQRYKDYS

SEQ ID NO: 5095 - protein, 85 aa, Homo sapiens
KQCASTVQQQEDRTNELLKAATNKDIADDEVATWIQDCNDLLKGLGTVKDSLFFLHELGEQLKQQVDASAASAIQSDQLSLSQHL

SEQ ID NO: 5096 - protein, 85 aa, Homo sapiens
CALEQALCKQQTSLQAGVLDYETFAKSLEALEAWIVEAEEILQGQDPSHSSDLSTIQERMEELKGQMLKFSSMAPDLDRLNELGY

SEQ ID NO: 5097 - protein, 85 aa, Homo sapiens
RLPLNDKEIKRMQNLNRHWSLISSQTTERFSKLQSFLLQHQTFLEKCETWMEFLVQTEQKLAVEISGNYQHLLEQQRAHELFQAE

SEQ ID NO: 5098 - protein, 85 aa, Homo sapiens
MFSRQQILHSIIIDGQRLLEQGQVDDRDEFNLKLTLLSNQWQGVIRRAQQRRGIIDSQIRQWQRYREMAEKLRKWLVEVSYLPMS

SEQ ID NO: 5099 - protein, 85 aa, Homo sapiens
GLGSVPIPLQQARTLFDEVQFKEKVFLRQQGSYILTVEAGKQLLLSADSGAEAALQAELAEIQEKWKSASMRLEEQKKKLAFLLK

SEQ ID NO: 5100 - protein, 85 aa, Homo sapiens
DWEKCEKGIADSLEKLRTFKKKLSQSLPDHHEELHAEQMRCKELENAVGSWTDDLTQLSLLKDTLSAYISADDISILNERVELLQ

SEQ ID NO: 5101 - protein, 85 aa, Homo sapiens
RQWEELCHQLSLRRQQIGERLNEWAVFSEKNKELCEWLTQMESKVSQNGDILIEEMIEKLKKDYQEEIAIAQENKIQLQQMGERL

SEQ ID NO: 5102 - protein, 85 aa, Homo sapiens
AKASHESKASEIEYKLGKVNDRWQHLLDLIAARVKKLKETLVAVQQLDKNMSSLRTWLAHIESELAKPIVYDSCNSEEIQRKLNE

SEQ ID NO: 5103 - protein, 85 aa, Homo sapiens
QQELQRDIEKHSTGVASVLNLCEVLLHDCDACATDAECDSIQQATRNLDRRWRNICAMSMERRLKIEETWRLWQKFLDDYSRFED

SEQ ID NO: 5104 - protein, 85 aa, Homo sapiens
WLKSSERTAAFPSSSGVIYTVAKEELKKFEAFQRQVHECLTQLELINKQYRRLARENRTDSACSLKQMVHEGNQRWDNLQKRVTS

SEQ ID NO: 5105 - protein, 85 aa, Homo sapiens
ILRRLKHFIGQREEFETARDSILVWLTEMDLQLTNIEHFSECDVQAKIKQLKAFQQEISLNHNKIEQIIAQGEQLIEKSEPLDAA

SEQ ID NO: 5106 - protein, 85 aa, Homo sapiens
IIEEELDELRRYCQEVFGRVERYHKKLIRLPLPDDEHDLSDRELELEDSAALSDLHWHDRSADSLLSPQPSSNLSLSLAQPLRSE

SEQ ID NO: 5107 - protein, 85 aa, Homo sapiens
RSGRDTPASVDSIPLEWDHDYDLSRDLESAMSRALPSEDEEGQDDKDFYLRGAVGLSGDHSALESQIRQLGKALDDSRFQIQQTE

SEQ ID NO: 5108 - protein, 85 aa, Homo sapiens
NIIRSKTPTGPELDTSYKGYMKLLGECSSSIDSVKRLEHKLKEEEESLPGFVNLHSTETQTAGVIDRWELLQAQALSKELRMKQN

SEQ ID NO: 5109 - protein, 85 aa, Homo sapiens
LQKWQQFNSDLNSIWAWLGDTEEELEQLQRLELSTDIQTIELQIKKLKELQKAVDHRKAIILSINLCSPEFTQADSKESRDLQDR

SEQ ID NO: 5110 - protein, 85 aa, Homo sapiens
MSQMNGRWDRVCSLLEEWRGLLQDALMQCQGFHEMSHGLLLMLENIDRRKNEIVPIDSNLDAEILQDHHKQLMQIKHELLESQLR

SEQ ID NO: 5111 - protein, 85 aa, Homo sapiens
VASLQDMSCQLLVNAEGTDCLEAKEKVHVIGNRLKLLLKEVSRHIKELEKLLDVSSSQQDLSSWSSADELDTSGSVSPTSGRSTP

SEQ ID NO: 5112 - protein, 85 aa, Homo sapiens
NRQKTPRGKCSLSQPGPSVSSPHSRSTKGGSDSSLSEPGPGRSGRGFLFRVLRAALPLQLLLLLLIGLACLVPMSEEDYSCALSN

SEQ ID NO: 5113 - protein, 85 aa, Homo sapiens
EPGTNSFRVEFPDFSSTILQKLNQQRQQGQLCDVSIVVQGHIFRAHKAVLAASSPYFCDQVLLKNSRRIVLPDVMNPRVFENILL

SEQ ID NO: 5114 - protein, 85 aa, Homo sapiens
SSYTGRLVMPAPEIVSYLTAASFLQMWHVVDKCTEVLEGNPTVLCQKLNHGSDHQSPSSSSYNGLVESFELGSGGHTDFPKAQEL

SEQ ID NO: 5115 - protein, 85 aa, Homo sapiens
RDGENEEESTKDELSSQLTEHEYLPSNSSTEHDRLSTEMASQDGEEGASDSAEFHYTRPMYSKPSIMAHKRWIHVKPERLEQACE

SEQ ID NO: 5116 - protein, 85 aa, Homo sapiens
GMDVHATYDEHQVTESINTVQTEHTVQPSGVEEDFHIGEKKVEAEFDEQADESNYDEQVDFYGSSMEEFSGERSDGNLIGHRQEA

SEQ ID NO: 5117 - protein, 85 aa, Homo sapiens
ALAAGYSENIEMVTGIKEEASHLGFSATDKLYPCQCGKSFTHKSQRDRHMSMHLGLRPYGCGVCGKKFKMKHHLVGHMKIHTGIK

SEQ ID NO: 5118 - protein, 84 aa, Homo sapiens
KSQRDRHMSMHLGLRPYGCGVCGKKFKMKHHLVGHMKIHTGIKPYECNICAKRFMWRDSFHRHVTSCTKSYEAAKAEQNTTEAN

SEQ ID NO: 5119 - protein, 85 aa, Homo sapiens
FRAHKAVLAASSPYFCDQVLLKNSRRIVLPDVMNPRVFENILLSSYTGRLVMPAPEIVSYLTAASFLQMWHVVDKCTEVLEGNPT

SEQ ID NO: 5120 - protein, 85 aa, Homo sapiens
VLCQKLNHGSDHQSPSSSSYNGLVESFELGSGGHTDFPKAQELRDGENEEESTKDELSSQLTEHEYLPSNSSTEHDRLSTEMASQ

SEQ ID NO: 5121 - protein, 85 aa, Homo sapiens
DGEEGASDSAEFHYTRPMYSKPSIMAHKRWIHVKPERLEQACEGMDVHATYDEHQVTESINTVQTEHTVQPSGVEEDFHIGEKKV

SEQ ID NO: 5122 - protein, 85 aa, Homo sapiens
EAEFDEQADESNYDEQVDFYGSSMEEFSGERSDGNLIGHRQEAALAAGYSENIEMVTGIKEEASHLGFSATDKLYPCQCGKSFTH

SEQ ID NO: 5123 - protein, 85 aa, Homo sapiens
CGIFAYLNYHVPRTRREILETLIKGLQRLEYRGYDSAGVGFDGGNDKDWEANACKIQLIKKKGKVKALDEEVHKQQDMDLDIEFD

SEQ ID NO: 5124 - protein, 85 aa, Homo sapiens
VHLGIAHTRWATHGEPSPVNSHPQRSDKNNEFIVIHNGIITNYKDLKKFLESKGYDFESETDTETIAKLVKYMYDNRESQDTSFT

SEQ ID NO: 5125 - protein, 85 aa, Homo sapiens
TLVERVIQQLEGAFALVFKSVHFPGQAVGTRRGSPLLIGVRSEHKLSTDHIPILYRTGKDKKGSCNLSRVDSTTCLFPVEEKAVE

SEQ ID NO: 5126 - protein, 85 aa, Homo sapiens
YYFASDASAVIEHTNRVIFLEDDDVAAVVDGRLSIHRIKRTAGDHPGRAVQTLQMELQQIMKGNFSSFMQKEIFEQPESVVNTMR

SEQ ID NO: 5127 - protein, 85 aa, Homo sapiens
GRVNFDDYTVNLGGLKDHIKEIQRCRRLILIACGTSYHAGVATRQVLEELTELPVMVELASDFLDRNTPVFRDDVCFFLSQSGET

SEQ ID NO: 5128 - protein, 85 aa, Homo sapiens
ADTLMGLRYCKERGALTVGITNTVGSSISRETDCGVHINAGPEIGVASTKAYTSQFVSLVMFALMMCDDRISMQERRKEIMLGLK

SEQ ID NO: 5129 - protein, 85 aa, Homo sapiens
RLPDLIKEVLSMDDEIQKLATELYHQKSVLIMGRGYHYATCLEGALKIKEITYMHSEGILAGELKHGPLALVDKLMPVIMIIMRD

SEQ ID NO: 5130 - protein, 85 aa, Homo sapiens
HTYAKCQNALQQVVARQGRPVVICDKEDTETIKNTKRTIKVPHSVDCLQGILSVIPLQLLAFHLAVLRGYDVDFPRNLAKSVTVE

SEQ ID NO: 5131 - protein, 84 aa, Homo sapiens
TYAKCQNALQQVVARQGRPVVICDKEDTETIKNTKRTIKVPHSVDCLQGILSVIPLQLLAFHLAVLRGYDVDFPRNLAKSVTVE

SEQ ID NO: 5132 - protein, 85 aa, Homo sapiens
GGNDKDWEANACKIQLIKKKGKVKALDEEVHKQQDMDLDIEFDVHLGIAHTRWATHGEPSPVNSHPQRSDKNNEFIVIHNGIITN

SEQ ID NO: 5133 - protein, 85 aa, Homo sapiens
YKDLKKFLESKGYDFESETDTETIAKLVKYMYDNRESQDTSFTTLVERVIQQLEGAFALVFKSVHFPGQAVGTRRGSPLLIGVRS

SEQ ID NO: 5134 - protein, 85 aa, Homo sapiens
EHKLSTDHIPILYRTGKDKKGSCNLSRVDSTTCLFPVEEKAVEYYFASDASAVIEHTNRVIFLEDDDVAAVVDGRLSIHRIKRTA

SEQ ID NO: 5135 - protein, 85 aa, Homo sapiens
GDHPGRAVQTLQMELQQIMKGNFSSFMQKEIFEQPESVVNTMRGRVNFDDYTVNLGGLKDHIKEIQRCRRLILIACGTSYHAGVA

SEQ ID NO: 5136 - protein, 85 aa, Homo sapiens
TRQVLEELTELPVMVELASDFLDRNTPVFRDDVCFFLSQSGETADTLMGLRYCKERGALTVGITNTVGSSISRETDCGVHINAGP

SEQ ID NO: 5137 - protein, 85 aa, Homo sapiens
EIGVASTKAYTSQFVSLVMFALMMCDDRISMQERRKEIMLGLKRLPDLIKEVLSMDDEIQKLATELYHQKSVLIMGRGYHYATCL

SEQ ID NO: 5138 - protein, 85 aa, Homo sapiens
EGALKIKEITYMHSEGILAGELKHGPLALVDKLMPVIMIIMRDHTYAKCQNALQQVVARQGRPVVICDKEDTETIKNTKRTIKVP

SEQ ID NO: 5139 - protein, 85 aa, Homo sapiens
TLVERVIQQLEGAFALVFKSVHFPGQAVGTRRGSPLLIGVRSEHKLSTDHIPILYRTARTQIGSKFTRWGSQGERGKDKKGSCNL

SEQ ID NO: 5140 - protein, 85 aa, Homo sapiens
SRVDSTTCLFPVEEKAVEYYFASDASAVIEHTNRVIFLEDDDVAAVVDGRLSIHRIKRTAGDHPGRAVQTLQMELQQIMKGNFSS

SEQ ID NO: 5141 - protein, 85 aa, Homo sapiens
FMQKEIFEQPESVVNTMRGRVNFDDYTVNLGGLKDHIKEIQRCRRLILIACGTSYHAGVATRQVLEELTELPVMVELASDFLDRN

SEQ ID NO: 5142 - protein, 85 aa, Homo sapiens
TPVFRDDVCFFLSQSGETADTLMGLRYCKERGALTVGITNTVGSSISRETDCGVHINAGPEIGVASTKAYTSQFVSLVMFALMMC

SEQ ID NO: 5143 - protein, 85 aa, Homo sapiens
DDRISMQERRKEIMLGLKRLPDLIKEVLSMDDEIQKLATELYHQKSVLIMGRGYHYATCLEGALKIKEITYMHSEGILAGELKHG

SEQ ID NO: 5144 - protein, 85 aa, Homo sapiens
PLALVDKLMPVIMIIMRDHTYAKCQNALQQVVARQGRPVVICDKEDTETIKNTKRTIKVPHSVDCLQGILSVIPLQLLAFHLAVL

SEQ ID NO: 5145 - protein, 85 aa, Homo sapiens
EHKLSTDHIPILYRTARTQIGSKFTRWGSQGERGKDKKGSCNLSRVDSTTCLFPVEEKAVEYYFASDASAVIEHTNRVIFLEDDD

SEQ ID NO: 5146 - protein, 85 aa, Homo sapiens
VAAVVDGRLSIHRIKRTAGDHPGRAVQTLQMELQQIMKGNFSSFMQKEIFEQPESVVNTMRGRVNFDDYTVNLGGLKDHIKEIQR

SEQ ID NO: 5147 - protein, 85 aa, Homo sapiens
CRRLILIACGTSYHAGVATRQVLEELTELPVMVELASDFLDRNTPVFRDDVCFFLSQSGETADTLMGLRYCKERGALTVGITNTV

SEQ ID NO: 5148 - protein, 85 aa, Homo sapiens
GSSISRETDCGVHINAGPEIGVASTKAYTSQFVSLVMFALMMCDDRISMQERRKEIMLGLKRLPDLIKEVLSMDDEIQKLATELY

SEQ ID NO: 5149 - protein, 85 aa, Homo sapiens
HQKSVLIMGRGYHYATCLEGALKIKEITYMHSEGILAGELKHGPLALVDKLMPVIMIIMRDHTYAKCQNALQQVVARQGRPVVIC

SEQ ID NO: 5150 - protein, 85 aa, Homo sapiens
TTTTTFKGVDPNSRNSSRVLRPPGGGSNFSLGFDEPTEQPVRKNKMASNIFGTPEENQASWAKSAGAKSSGGREDLESSGLQRRN

SEQ ID NO: 5151 - protein, 85 aa, Homo sapiens
SSEASSGDFLDLKKMWTQTCQAAWGRVKRSPCLLRLCPARWPRPQCHPEEIPLAASPASSWVSSDCPERCRSVCFLHACELHNLS

SEQ ID NO: 5152 - protein, 84 aa, Homo sapiens
MKKMWTQTCQAAWGRVKRSPCLLRLCPARWPRPQCHPEEIPLAASPASSWVSSDCPERCRSVCFLHACELHNLSLTVHLLDLFH

SEQ ID NO: 5153 - protein, 85 aa, Homo sapiens
KNKMASNIFGTPEENQASWAKSAGAKSSGGREDLESSGLQRRNSSEASSGDFLDLKKMWTQTCQAAWGRVKRSPCLLRLCPARWP

SEQ ID NO: 5154 - protein, 85 aa, Homo sapiens
ERRAAGPGWAAYERLTAEEMDEQRRQNVAYQYLCRLEEAKRWMEACLKEELPSPVELEESLRNGVLLAKLGHCFAPSVVPLKKIY

SEQ ID NO: 5155 - protein, 85 aa, Homo sapiens
DVEQLRYQATGLHFRHTDNINFWLSAIAHIGLPSTFFPETTDIYDKKNMPRVVYCIHALSLFLFRLGLAPQIHDLYGKVKFTAEE

SEQ ID NO: 5156 - protein, 85 aa, Homo sapiens
LSNMASELAKYGLQLPAFSKIGGILANELSVDEAAVHAAVLAINEAVERGVVEDTLAALQNPSALLENLREPLAAVYQEMLAQAK

SEQ ID NO: 5157 - protein, 85 aa, Homo sapiens
MEKAANARNHDDRESQDIYDHYLTQAEIQGNINHVNVHGALEVVDDALERQSPEALLKALQDPALALRGVRRDFADWYLEQLNSD

SEQ ID NO: 5158 - protein, 85 aa, Homo sapiens
REQKAQELGLVELLEKEEVQAGVAAANTKGDQEQAMLHAVQRINKAIRRRVAADTVKELMCPEAQLPPVYPVASSMYQLELAVLQ

SEQ ID NO: 5159 - protein, 85 aa, Homo sapiens
QQQGELGQEELFVAVEMLSAVVLINRALEARDASGFWSSLVNPATGLAEVEGENAQRYFDALLKLRQERGMGEDFLSWNDLQATV

SEQ ID NO: 5160 - protein, 85 aa, Homo sapiens
SQVNAQTQEETDRVLAVSLINEALDKGSPEKTLSALLLPAAGLDDVSLPVAPRYHLLLVAAKRQKAQVTGDPGAVLWLEEIRQGV

SEQ ID NO: 5161 - protein, 85 aa, Homo sapiens
VRANQDTNTAQRMALGVAAINQAIKEGKAAQTERVLRNPAVALRGVVPDCANGYQRALESAMAKKQRPADTAFWVQHDMKDGTAY

SEQ ID NO: 5162 - protein, 85 aa, Homo sapiens
YFHLQTFQGIWEQPPGCPLNTSHLTREEIQSAVTKVTAAYDRQQLWKANVGFVIQLQARLRGFLVRQKFAEHSHFLRTWLPAVIK

SEQ ID NO: 5163 - protein, 85 aa, Homo sapiens
IQAHWRGYRQRKIYLEWLQYFKANLDAIIKIQAWARMWAARRQYLRRLHYFQKNVNSIVKIQAFFRARKAQDDYRILVHAPHPPL

SEQ ID NO: 5164 - protein, 85 aa, Homo sapiens
SVVRRFAHLLNQSQQDFLAEAELLKLQEEVVRKIRSNQQLEQDLNIMDIKIGLLVKNRITLQEVVSHCKKLTKRNKEQLSDMMVL

SEQ ID NO: 5165 - protein, 85 aa, Homo sapiens
DKQKGLKSLSKEKRQKLEAYQHLFYLLQTQPIYLAKLIFQMPQNKTTKFMEAVIFSLYNYASSRREAYLLLQLFKTALQEEIKSK

SEQ ID NO: 5166 - protein, 85 aa, Homo sapiens
VEQPQDVVTGNPTVVRLVVRFYRNGRGQSALQEILGKVIQDVLEDKVLSVHTDPVHLYKNWINQTEAQTGQRSHLPYDVTPEQAL

SEQ ID NO: 5167 - protein, 85 aa, Homo sapiens
SHPEVQRRLDIALRNLLAMTDKFLLAITSSVDQIPYGMRYVAKVLKATLAEKFPDATDSEVYKVVGNLLYYRFLNPAVVAPDAFD

SEQ ID NO: 5168 - protein, 85 aa, Homo sapiens
IVAMAAGGALAAPQRHALGAVAQLLQHAAAGKAFSGQSQHLRVLNDYLEETHLKFRKFIHRACQVPEPEERFAVDEYSDMVAVAK

SEQ ID NO: 5169 - protein, 85 aa, Homo sapiens
PMVYITVGELVNTHRLLLEHQDCIAPDHQDPLHELLEDLGELPTIPDLIGESIAADGHTDLSKLEVSLTLTNKFEGLEADADDSN

SEQ ID NO: 5170 - protein, 85 aa, Homo sapiens
TRSLLLSTKQLLADIIQFHPGDTLKEILSLSASREQEAAHKQLMSRRQACTAQTPEPLRRHRSLTAHSLLPLAEKQRRVLRNLRR

SEQ ID NO: 5171 - protein, 85 aa, Homo sapiens
LEALGLVSARNGYQGLVDELAKDIRNQHRHRHRRKAELVKLQATLQGLSTKTTFYEEQGDYYSQYIRACLDHLAPDSKSSGKGKK

SEQ ID NO: 5172 - protein, 85 aa, Homo sapiens
QPSLHYTAAQLLEKGVLVEIEDLPASHFRNVIFDITPGDEAGKFEVNAKFLGVDMERFQLHYQDLLQLQYEGVAVMKLFNKAKVN

SEQ ID NO: 5173 - protein, 84 aa, Homo sapiens [sequence omitted]

SEQ ID NO: 5174 - protein, 85 aa, Homo sapiens
MEACLKEELPSPVELEESLRNGVLLAKLGHCFAPSVVPLKKIYDVEQLRYQATGLHFRHTDNINFWLSAIAHIGLPSTFFPETTD

SEQ ID NO: 5175 - protein, 85 aa, Homo sapiens
IYDKKNMPRVVYCIHALSLFLFRLGLAPQIHDLYGKVKFTAEELSNMASELAKYGLQLPAFSKIGGILANELSVDEAAVHAAVLA

SEQ ID NO: 5176 - protein, 85 aa, Homo sapiens
INEAVERGVVEDTLAALQNPSALLENLREPLAAVYQEMLAQAKMEKAANARNHDDRESQDIYDHYLTQAEIQGNINHVNVHGALE

SEQ ID NO: 5177 - protein, 85 aa, Homo sapiens
VVDDALERQSPEALLKALQDPALALRGVRRDFADWYLEQLNSDREQKAQELGLVELLEKEEVQAGVAAANTKGDQEQAMLHAVQR

SEQ ID NO: 5178 - protein, 85 aa, Homo sapiens
INKAIRRRVAADTVKELMCPEAQLPPVYPVASSMYQLELAVLQQQQGELGQEELFVAVEMLSAVVLINRALEARDASGFWSSLVN

SEQ ID NO: 5179 - protein, 85 aa, Homo sapiens
PATGLAEVEGENAQRYFDALLKLRQERGMGEDFLSWNDLQATVSQVNAQTQEETDRVLAVSLINEALDKGSPEKTLSALLLPAAG

SEQ ID NO: 5180 - protein, 85 aa, Homo sapiens
LDDVSLPVAPRYHLLLVAAKRQKAQVTGDPGAVLWLEEIRQGVVRANQDTNTAQRMALGVAAINQAIKEGKAAQTERVLRNPAVA

SEQ ID NO: 5181 - protein, 85 aa, Homo sapiens
LRGVVPDCANGYQRALESAMAKKQRPADTAFWVQHDMKDGTAYYFHLQTFQGIWEQPPGCPLNTSHLTREEIQSAVTKVTAAYDR

SEQ ID NO: 5182 - protein, 85 aa, Homo sapiens
QQLWKANVGFVIQLQARLRGFLVRQKFAEHSHFLRTWLPAVIKIQAHWRGYRQRKIYLEWLQYFKANLDAIIKIQAWARMWAARR

SEQ ID NO: 5183 - protein, 85 aa, Homo sapiens
QYLRRLHYFQKNVNSIVKIQAFFRARKAQDDYRILVHAPHPPLSVVRRFAHLLNQSQQDFLAEAELLKLQEEVVRKIRSNQQLEQ

SEQ ID NO: 5184 - protein, 85 aa, Homo sapiens
DLNIMDIKIGLLVKNRITLQEVVSHCKKLTKRNKEQLSDMMVLDKQKGLKSLSKEKRQKLEAYQHLFYLLQTQPIYLAKLIFQMP

SEQ ID NO: 5185 - protein, 85 aa, Homo sapiens
QNKTTKFMEAVIFSLYNYASSRREAYLLLQLFKTALQEEIKSKVEQPQDVVTGNPTVVRLVVRFYRNGRGQSALQEILGKVIQDV

SEQ ID NO: 5186 - protein, 85 aa, Homo sapiens
LEDKVLSVHTDPVHLYKNWINQTEAQTGQRSHLPYDVTPEQALSHPEVQRRLDIALRNLLAMTDKFLLAITSSVDQIPYGMRYVA

SEQ ID NO: 5187 - protein, 85 aa, Homo sapiens
KVLKATLAEKFPDATDSEVYKVVGNLLYYRFLNPAVVAPDAFDIVAMAAGGALAAPQRHALGAVAQLLQHAAAGKAFSGQSQHLR

SEQ ID NO: 5188 - protein, 85 aa, Homo sapiens
VLNDYLEETHLKFRKFIHRACQVPEPEERFAVDEYSDMVAVAKPMVYITVGELVNTHRLLLEHQDCIAPDHQDPLHELLEDLGEL

SEQ ID NO: 5189 - protein, 85 aa, Homo sapiens
PTIPDLIGESIAADGHTDLSKLEVSLTLTNKFEGLEADADDSNTRSLLLSTKQLLADIIQFHPGDTLKEILSLSASREQEAAHKQ

SEQ ID NO: 5190 - protein, 85 aa, Homo sapiens
MMSRRQACTAQTPEPLRRHRSLTAHSLLPLAEKQRRVLRNLRRLEALGLVSARNGYQGLVDELAKDIRNQHRHRHRRKAELVKLQ

SEQ ID NO: 5191 - protein, 85 aa, Homo sapiens
ATLQGLSTKTTFYEEQGDYYSQYIRACLDHLAPDSKSSGKGKKQPSLHYTAAQLLEKGVLVEIEDLPASHFRNVIFDITPGDEAG

SEQ ID NO: 5192 - protein, 85 aa, Homo sapiens
GSASPGLSSVSPSHLLLPPDTVSRTGLEKAAAGAVGLERRDWSPSPPATPEQGLSAFYLSYFDMLYPEDSSWAAKAPGASSREEP

SEQ ID NO: 5193 - protein, 85 aa, Homo sapiens
PEEPEQCPVIDSQAPAGSLDLVPGGLTLEEHSLEQVQSMVVGEVLKDIETACKLLNITADPMDWSPSNVQKWLLWTEHQYRLPPM

SEQ ID NO: 5194 - protein, 85 aa, Homo sapiens
GKAFQELAGKELCAMSEEQFRQRSPLGGDVLHAHLDIWKSAAWMKERTSPGAIHYCASTSEESWTDSEVDSSCSGQPIHLWQFLK

SEQ ID NO: 5195 - protein, 84 aa, Homo sapiens
WQFLKELLLKPHSYGRFIRWLNKEKGIFKIEDSAQVARLWGIRKNRPAMNYDKLSRSIRQYYKKGIIRKPDISQRLVYQFVHPI

SEQ ID NO: 5196 - protein, 85 aa, Homo sapiens
SPSPPATPEQGLSAFYLSYFDMLYPEDSSWAAKAPGASSREEPPEEPEQCPVIDSQAPAGSLDLVPGGLTLEEHSLEQVQSMVVG

SEQ ID NO: 5197 - protein, 85 aa, Homo sapiens
EVLKDIETACKLLNITADPMDWSPSNVQKWLLWTEHQYRLPPMGKAFQELAGKELCAMSEEQFRQRSPLGGDVLHAHLDIWKSAA

SEQ ID NO: 5198 - protein, 85 aa, Homo sapiens
WMKERTSPGAIHYCASTSEESWTDSEVDSSCSGQPIHLWQFLKELLLKPHSYGRFIRWLNKEKGIFKIEDSAQVARLWGIRKNRP

SEQ ID NO: 5199 - protein, 85 aa, Homo sapiens
ATPMHRLIARRQAFDTELQPVKTFWILIQPSIVISEANKQHVRCQKCLEFGHWTYECTGKRKYLHRPSRTAELKKALKEKENRLL

SEQ ID NO: 5200 - protein, 85 aa, Homo sapiens
MQQSIGETNVERKAKKKSSSSSSSDSSASDSSSESEETSTSSSSEDSDTDESSSSSSSSASSTTSSSSSDSDSDSSSSSSSSTST

SEQ ID NO: 5201 - protein, 84 aa, Homo sapiens
KSSSSSSSDSSASDSSSESEETSTSSSSEDSDTDESSSSSSSSASSTTSSSSSDSDSDSSSSSSSSTSTDSSSDDEPPKKKKKK

SEQ ID NO: 5202 - protein, 85 aa, Homo sapiens
RCQKCLEFGHWTYECTGKRKYLHRPSRTAELKKALKEKENRLLLQQSIGETNVERKAKKKSSSSSSSDSSASDSSSESEETSTSS

SEQ ID NO: 5203 - protein, 85 aa, Homo sapiens
VRGARQPQQPRSRLAPRLTGTVEKPPRKRRSSIRGSGDSSHSQSQGERYQHFTEKTEFALKEIMSSGGAEDDIPQGERKTVTDFC

SEQ ID NO: 5204 - protein, 85 aa, Homo sapiens
YLLDKSKQLFNGLRDLPQYGQKQWQSYFGRTFDVYTKLWKFQQQHRQVLDNRYGLKRWQIGEIASKIGQLYYHYYLRTSETSYLN

SEQ ID NO: 5205 - protein, 85 aa, Homo sapiens
EAFSFYSAIRQRSYYSQVNKEDRPELVVKKLRYYARFIVVCLLLNKMDVVKDLVKELSDEIEDYTHRFNTEDQVEWNLVLQEVAA

SEQ ID NO: 5206 - protein, 85 aa, Homo sapiens
FIEADPVMVLNDDNTIVITSNRLAETGAPLLEQGMIVGQLSLADALIIGNCNNQVKFSELTVDMFRMLQALEREPMNLASQMNKP

SEQ ID NO: 5207 - protein, 85 aa, Homo sapiens
GMQESADKPTRRENPHKYLLYKPTFSQLYTFLAASFKELPANSVLLIYLSATGVFPTGRSDSEGPYDFGGVLTNSNRDIINGDAI

SEQ ID NO: 5208 - protein, 85 aa, Homo sapiens
HKRNQSHKEMHCLHPGDLYPFTRKPLFIIVDSSNSVAYKNFTNLFGQPLVCLLSPTAYPKALQDQSQRGSLFTLFLNNPLMAFLF

SEQ ID NO: 5209 - protein, 85 aa, Homo sapiens
VSGLSSMRRGLWEKCQEYLRKINRDIAQLLTHSRSIDQAFLQFFGDEFLRLLLTRFIFCSATMRMHKIFRETRNYPESYPQLPRD

SEQ ID NO: 5210 - protein, 85 aa, Homo sapiens
QSQGERYQHFTEKTEFALKEIMSSGGAEDDIPQGERKTVTDFCYLLDKSKQLFNGLRDLPQYGQKQWQSYFGRTFDVYTKLWKFQ

SEQ ID NO: 5211 - protein, 85 aa, Homo sapiens
QQHRQVLDNRYGLKRWQIGEIASKIGQLYYHYYLRTSETSYLNEAFSFYSAIRQRSYYSQVNKEDRPELVVKKLRYYARFIVVCL

SEQ ID NO: 5212 - protein, 85 aa, Homo sapiens
LLNKMDVVKDLVKELSDEIEDYTHRFNTEDQVEWNLVLQEVAAFIEADPVMVLNDDNTIVITSNRLAETGAPLLEQGMIVGQLSL

SEQ ID NO: 5213 - protein, 85 aa, Homo sapiens
ADALIIGNCNNQVKFSELTVDMFRMLQALEREPMNLASQMNKPGMQESADKPTRRENPHKYLLYKPTFSQLYTFLAASFKELPAN

SEQ ID NO: 5214 - protein, 85 aa, Homo sapiens
SVLLIYLSATGVFPTGRSDSEGPYDFGGVLTNSNRDIINGDAIHKRNQSHKEMHCLHPGDLYPFTRKPLFIIVDSSNSVAYKNFT

SEQ ID NO: 5215 - protein, 85 aa, Homo sapiens
NLFGQPLVCLLSPTAYPKALQDQSQRGSLFTLFLNNPLMAFLFVSGLSSMRRGLWEKCQEYLRKINRDIAQLLTHSRSIDQAFLQ

SEQ ID NO: 5216 - protein, 85 aa, Homo sapiens
EVTSFAAINKFQPFNVAVSSNVLFLLIYQSLFLRGLSLVGWYHSHPHSPALPSLQDIDAQMDYQLRLQGSSNGFQPCLALLCSPY

SEQ ID NO: 5217 - protein, 85 aa, Homo sapiens
YSGNPGPESKISPFWVMPPPEQRPSDYGIPMDVEMAYVQDSFLTNDILHEMMLLVEFYKGSPDLVRLQEPWSQEHTYLDKLKISL

SEQ ID NO: 5218 - protein, 84 aa, Homo sapiens
YGIPMDVEMAYVQDSFLTNDILHEMMLLVEFYKGSPDLVRLQEPWSQEHTYLDKLKISLASRTPKDQSLCHVLEQVCGVLKQGS

SEQ ID NO: 5219 - protein, 85 aa, Homo sapiens
SPSEPAHPEATTPGKRVDSKIRVPVRYCMLGSRDLARNPHTLVEVTSFAAINKFQPFNVAVSSNVLFLLIYQSLFLRGLSLVGWY

SEQ ID NO: 5220 - protein, 85 aa, Homo sapiens
HSHPHSPALPSLQDIDAQMDYQLRLQGSSNGFQPCLALLCSPYYSGNPGPESKISPFWVMPPPEQRPSDYGIPMDVEMAYVQDSF

SEQ ID NO: 5221 - protein, 85 aa, Homo sapiens
RLWNKISRWMLGCYDALQKKYLRMVVLATISECYQFKFKYTNNGPLMDFISKNQSNESSMLSTDTKKASILLIRKIYILMQNLGP

SEQ ID NO: 5222 - protein, 85 aa, Homo sapiens
LPNDVCLTMKLFYYDEVTPPDYQPPGFKDGDCEGVIFEGEPMYLNVGEVSTPFHIFKVKVTTERERMENIDSTILSPKQIKTPFQ

SEQ ID NO: 5223 - protein, 85 aa, Homo sapiens
KILRDKDVEDEQEHYTSDDLDIETKMEEQEKNPASSELEEPSLVCEEDEIMRSKESPDLSISHSQVEQLVNKTSELDMSESKTRS

SEQ ID NO: 5224 - protein, 85 aa, Homo sapiens
NGPLMDFISKNQSNESSMLSTDTKKASILLIRKIYILMQNLGPLPNDVCLTMKLFYYDEVTPPDYQPPGFKDGDCEGVIFEGEPM

SEQ ID NO: 5225 - protein, 85 aa, Homo sapiens
YLNVGEVSTPFHIFKVKVTTERERMENIDSTILSPKQIKTPFQKILRDKDVEDEQEHYTSDDLDIETKMEEQEKNPASSELEEPS

SEQ ID NO: 5226 - protein, 85 aa, Homo sapiens
LVCEEDEIMRSKESPDLSISHSQVEQLVNKTSELDMSESKTRSGKVFQNKMANGNQPVKSSKENRKRSQHESGRIVLHHFDSSSQ

SEQ ID NO: 5227 - protein, 85 aa, Homo sapiens
KVKIKCWNGVATWLWVANDENCGICRMAFNGCCPDCPLHGESISRCLGWCPQPVPVLGGRAHPQVPINTASPTPGQHTGSLMSRE

SEQ ID NO: 5228 - protein, 85 aa, Homo sapiens
ESSRSPDPTPPALDQETSSLLRCTSPWCLDHSCDLFGITDQVSADGPRACRQGARRRLPAGVGPVLPLLPHALHPQVAARTAGAA

SEQ ID NO: 5229 - protein, 84 aa, Homo sapiens
WCLDHSCDLFGITDQVSADGPRACRQGARRRLPAGVGPVLPLLPHALHPQVAARTAGAAALPHVPPGMEVQGVRPDLALAGGAS

SEQ ID NO: 5230 - protein, 85 aa, Homo sapiens
ISRCLGWCPQPVPVLGGRAHPQVPINTASPTPGQHTGSLMSREESSRSPDPTPPALDQETSSLLRCTSPWCLDHSCDLFGITDQV

SEQ ID NO: 5231 - protein, 85 aa, Homo sapiens
AKPSHSSYVLQQLNNQREWGFLCDCCIAIDDIYFQAHKAVLAACSSYFRMFFMNHQHSTAQLNLSNMKISAECFDLILQFMYLGK

SEQ ID NO: 5232 - protein, 85 aa, Homo sapiens
IMTAPSSFEQFKVAMNYLQLYNVPDCLEDIQDADCSSSKCSSSASSKQNSKMIFGVRMYEDTVARNGNEANRWCAEPSSTVNTPH

SEQ ID NO: 5233 - protein, 85 aa, Homo sapiens
NREADEESLQLGNFPEPLFDVCKKSSVSKLSTPKERVSRRFGRSFTCDSCGFGFSCEKLLDEHVLTCTNRHLYQNTRSYHRIVDI

SEQ ID NO: 5234 - protein, 85 aa, Homo sapiens
RDGKDSNIKAEFGEKDSSKTFSAQTDKYRGDTSQAADDSASTTGSRKSSTVESEIASEEKSRAAERKRIIIKMEPEDIPTDELKD

SEQ ID NO: 5235 - protein, 85 aa, Homo sapiens
FNIIKVTDKDCNESTDNDELEDEPEEPFYRYYVEEDVSIKKSGRKTLKPRMSVSADERGGLENMRPPNNSSPVQEDAENASCELC

SEQ ID NO: 5236 - protein, 85 aa, Homo sapiens
GLTITEEDLSSHYLAKHIENICACGKCGQILVKGRQLQEHAQRCGEPQDLTMNGLGNTEEKMDLEENPDEQSEIRDMFVEMLDDF

SEQ ID NO: 5237 - protein, 85 aa, Homo sapiens
RDNHYQINSIQKKQLFKHSACPFRCPNCGQRFETENLVVEHMSSCLDQDMFKSAIMEENERDHRRKHFCNLCGKGFYQRCHLREH

SEQ ID NO: 5238 - protein, 84 aa, Homo sapiens
MFKSAIMEENERDHRRKHFCNLCGKGFYQRCHLREHYTVHTKEKQFVCQTCGKQFLRERQLRLHNDMHKGMASGEIGPSKPVEK

SEQ ID NO: 5239 - protein, 85 aa, Homo sapiens
ACSSYFRMFFMNHQHSTAQLNLSNMKISAECFDLILQFMYLGKIMTAPSSFEQFKVAMNYLQLYNVPDCLEDIQDADCSSSKCSS

SEQ ID NO: 5240 - protein, 85 aa, Homo sapiens
SASSKQNSKMIFGVRMYEDTVARNGNEANRWCAEPSSTVNTPHNREADEESLQLGNFPEPLFDVCKKSSVSKLSTPKERVSRRFG

SEQ ID NO: 5241 - protein, 85 aa, Homo sapiens
RSFTCDSCGFGFSCEKLLDEHVLTCTNRHLYQNTRSYHRIVDIRDGKDSNIKAEFGEKDSSKTFSAQTDKYRGDTSQAADDSAST

SEQ ID NO: 5242 - protein, 85 aa, Homo sapiens
TGSRKSSTVESEIASEEKSRAAERKRIIIKMEPEDIPTDELKDFNIIKVTDKDCNESTDNDELEDEPEEPFYRYYVEEDVSIKKS

SEQ ID NO: 5243 - protein, 85 aa, Homo sapiens
GRKTLKPRMSVSADERGGLENMRPPNNSSPVQEDAENASCELCGLTITEEDLSSHYLAKHIENICACGKCGQILVKGRQLQEHAQ

SEQ ID NO: 5244 - protein, 85 aa, Homo sapiens
RCGEPQDLTMNGLGNTEEKMDLEENPDEQSEIRDMFVEMLDDFRDNHYQINSIQKKQLFKHSACPFRCPNCGQRFETENLVVEHM

SEQ ID NO: 5245 - protein, 85 aa, Homo sapiens
SSCLDQDMFKSAIMEENERDHRRKHFCNLCGKGFYQRCHLREHYTVHTKEKQFVCQTCGKQFLRERQLRLHNDMHKGMASGEIGP

SEQ ID NO: 5246 - protein, 85 aa, Homo sapiens
ASNERDAISWYQKKIGAYDQQIWEKSIEQTQIKGLKNKPKKMGHIKPDLIDVDLIRVIAIVLYLMMPIVNISEVLGPLCLMLLMG

SEQ ID NO: 5247 - protein, 85 aa, Homo sapiens
TVHCQIVSTQITRPSGNNGNRRRRKLRKTVNGDGSRENGNNSSDKVRGIETLESVPIIGGFWETIFGNRIKRVKLISNKGTETDN

SEQ ID NO: 5248 - protein, 85 aa, Homo sapiens
DPSCVHPIIKRRQCRPEIRMWQTREKAKFSDGEKCRREAFRRLGNGVSDDLSSEEDGEARTQMILLRRSVEGASSDNGCEVKNRK

SEQ ID NO: 5249 - protein, 85 aa, Homo sapiens
SILSRHLNSQVKKTTTRWCHIVRDSDSLAESEFESAAFSQGSRSGVSGGSRSLNMSRRDSESTRHDSETEDMLWDDLLHGPECRS

SEQ ID NO: 5250 - protein, 85 aa, Homo sapiens
SVTSDSEGAHVNTLHSGTKRDPKEDVFQQNHLFWLQNSSPSSDRVSAIIWEGNECKKMDMSVLEISGIIMSRVNAYQQGVGYQML

SEQ ID NO: 5251 - protein, 85 aa, Homo sapiens
GNVVTIGLAFFPFLHRLFREKSLDQLKSISAEEILTLFCGAPPVTPIIVLSIINFFERLCLTWMFFFMMCVAERTYKQRFLFAKL

SEQ ID NO: 5252 - protein, 85 aa, Homo sapiens
FSHITSARKARKYEIPHFRLKKVENIKIWLSLRSYLKRRGPQRSVDVVVSSVFLLTLSIAFICCAQVLQGHKTFLNDAYNWEFLI

SEQ ID NO: 5253 - protein, 85 aa, Homo sapiens
WETALLLFLLRLASLGSETNKKYSNVSILLTEQINLYLKMEKKPNKKEQLTLVNNVLKLSTKLLKELDTPFRLYGLTMNPLIYNI

SEQ ID NO: 5254 - protein, 85 aa, Homo sapiens
GHIKPDLIDVDLIRVIAIVLYLMMPIVNISEVLGPLCLMLLMGTVHCQIVSTQITRPSGNNGNRRRRKLRKTVNGDGSRENGNNS

SEQ ID NO: 5255 - protein, 85 aa, Homo sapiens
SDKVRGIETLESVPIIGGFWETIFGNRIKRVKLISNKGTETDNDPSCVHPIIKRRQCRPEIRMWQTREKAKFSDGEKCRREAFRR

SEQ ID NO: 5256 - protein, 85 aa, Homo sapiens
MGNGVSDDLSSEEDGEARTQMILLRRSVEGASSDNGCEVKNRKSILSRHLNSQVKKTTTRWCHIVRDSDSLAESEFESAAFSQGS

SEQ ID NO: 5257 - protein, 85 aa, Homo sapiens
RSGVSGGSRSLNMSRRDSESTRHDSETEDMLWDDLLHGPECRSSVTSDSEGAHVNTLHSGTKRDPKEDVFQQNHLFWLQNSSPSS

SEQ ID NO: 5258 - protein, 85 aa, Homo sapiens
DRVSAIIWEGNECKKMDMSVLEISGIIMSRVNAYQQGVGYQMLGNVVTIGLAFFPFLHRLFREKSLDQLKSISAEEILTLFCGAP

SEQ ID NO: 5259 - protein, 85 aa, Homo sapiens
PVTPIIVLSIINFFERLCLTWMFFFMMCVAERTYKQRFLFAKLFSHITSARKARKYEIPHFRLKKVENIKIWLSLRSYLKRRGPQ

SEQ ID NO: 5260 - protein, 85 aa, Homo sapiens
RSVDVVVSSVFLLTLSIAFICCAQVLQGHKTFLNDAYNWEFLIWETALLLFLLRLASLGSETNKKYSNVSILLTEQINLYLKMEK

SEQ ID NO: 5261 - protein, 85 aa, Homo sapiens
GCDGGTIPKRHELVKGPKKVEKVDKDAELVAQWNYCTLSQEILRRPIVACELGRLYNKDAVIEFLLDKSAEKALGKAASHIKSIK

SEQ ID NO: 5262 - protein, 85 aa, Homo sapiens
NVTELKLSDNPAWEGDKGNTKGDKHDDLQRARFICPVVGLEMNGRHRFCFLRCCGCVFSERALKEIKAEVCHTCGAAFQEDDVIM

SEQ ID NO: 5263 - protein, 85 aa, Homo sapiens
LNGTKEDVDVLKTRMEERRLRAKLEKKTKKPKAAESVSKPDVSEEAPGPSKVKTGKPEEASLDSREKKTNLAPKSTAMNESSSGK

SEQ ID NO: 5264 - protein, 85 aa, Homo sapiens
LRRPIVACELGRLYNKDAVIEFLLDKSAEKALGKAASHIKSIKNVTELKLSDNPAWEGDKGNTKGDKHDDLQRARFICPVVGLEM

SEQ ID NO: 5265 - protein, 85 aa, Homo sapiens
NGRHRFCFLRCCGCVFSERALKEIKAEVCHTCGAAFQEDDVIMLNGTKEDVDVLKTRMEERRLRAKLEKKTKKPKAAESVSKPDV

SEQ ID NO: 5266 - protein, 85 aa, Homo sapiens
SEEAPGPSKVKTGKPEEASLDSREKKTNLAPKSTAMNESSSGKAGKPPCGATKRSIADSEESEAYKSLFTTHSSAKRSKEESAHW

SEQ ID NO: 5267 - protein, 85 aa, Homo sapiens
DRRNDYGYRVPLFQSKHLNGDERSGSNYRRIPWGRRPAPPRDVAILQERANKLVKYLLVKDQTKIPIKRSDMLRDVIQEYDEYFP

SEQ ID NO: 5268 - protein, 85 aa, Homo sapiens
EIIERASYTLEKMFRVNLKEIDKQSSLYILISTQESSAGILGTTKDTPKLGLLMVILSVIFMNGNKASEAVIWEVLRKLGLRPGV

SEQ ID NO: 5269 - protein, 85 aa, Homo sapiens
RHSLFGEVRKLITDEFVKQKYLEYKRVPNSRPPEYEFFWGLRSYHETSKMKVLKFACRVQKKDPKDWAVQYREAVEMEVQAAAVA

SEQ ID NO: 5270 - protein, 85 aa, Homo sapiens
VAEAEARAEARAQMGIGEEAVAGPWNWDDMDIDCLTREELGDDAQAWSRFSFEIEARAQENADASTNVNFSRGASTRAGFSDGAS

SEQ ID NO: 5271 - protein, 85 aa, Homo sapiens
ISFNGAPSSSGGFSGGPGITFGVAPSTSASFSNTASISFGGTLSTSSSFSSAASISFGCAHSTSTSFSSEASISFGGMPCTSASF

SEQ ID NO: 5272 - protein, 85 aa, Homo sapiens
SGGVSSSFSGPLSTSATFSGGASSGFGGTLSTTAGFSGVLSTSTSFGSAPTTSTVFSSALSTSTGFGGILSTSVCFGGSPSSSGS

SEQ ID NO: 5273 - protein, 85 aa, Homo sapiens
FGGTLSTSICFGGSPCTSTGFGGTLSTSVSFGGSSSTSANFGGTLSTSICFDGSPSTGAGFGGALNTSASFGSVLNTSTGFGGAM

SEQ ID NO: 5274 - protein, 85 aa, Homo sapiens
STSADFGGTLSTSVCFGGSPGTSVSFGSALNTNAGYGGAVSTNTDFGGTLSTSVCFGGSPSTSAGFGGALNTNASFGCAVSTSAS

SEQ ID NO: 5275 - protein, 85 aa, Homo sapiens
FSGAVSTSACFSGAPITNPGFGGAFSTSAGFGGALSTAADFGGTPSNSIGFGAAPSTSVSFGGAHGTSLCFGGAPSTSLCFGSAS

SEQ ID NO: 5276 - protein, 85 aa, Homo sapiens
NTNLCFGGPPSTSACFSGATSPSFCDGPSTSTGFSFGNGLSTNAGFGGGLNTSAGFGGGLGTSAGFSGGLSTSSGFDGGLGTSAG

SEQ ID NO: 5277 - protein, 85 aa, Homo sapiens
FGGGPGTSTGFGGGLGTSAGFSGGLGTSAGFGGGLVTSDGFGGGLGTNASFGSTLGTSAGFSGGLSTSDGFGSRPNASFDRGLST

SEQ ID NO: 5278 - protein, 85 aa, Homo sapiens
IIGFGSGSNTSTGFTGEPSTSTGFSSGPSSIVGFSGGPSTGVGFCSGPSTSGFSGGPSTGAGFGGGPNTGAGFGGGPSTSAGFGS

SEQ ID NO: 5279 - protein, 85 aa, Homo sapiens
VAILQERANKLVKYLLVKDQTKIPIKRSDMLRDVIQEYDEYFPEIIERASYTLEKMFRVNLKEIDKQSSLYILISTQESSAGILG

SEQ ID NO: 5280 - protein, 85 aa, Homo sapiens
TTKDTPKLGLLMVILSVIFMNGNKASEAVIWEVLRKLGLRPGVRHSLFGEVRKLITDEFVKQKYLEYKRVPNSRPPEYEFFWGLR

SEQ ID NO: 5281 - protein, 85 aa, Homo sapiens
SYHETSKMKVLKFACRVQKKDPKDWAVQYREAVEMEVQAAAVAVAEAEARAEARAQMGIGEEAVAGPWNWDDMDIDCLTREELGD

SEQ ID NO: 5282 - protein, 85 aa, Homo sapiens
DAQAWSRFSFEIEARAQENADASTNVNFSRGASTRAGFSDGASISFNGAPSSSGGFSGGPGITFGVAPSTSASFSNTASISFGGT

SEQ ID NO: 5283 - protein, 85 aa, Homo sapiens
MSTSSSFSSAASISFGCAHSTSTSFSSEASISFGGMPCTSASFSGGVSSSFSGPLSTSATFSGGASSGFGGTLSTTAGFSGVLST

SEQ ID NO: 5284 - protein, 85 aa, Homo sapiens
STSFGSAPTTSTVFSSALSTSTGFGGILSTSVCFGGSPSSSGSFGGTLSTSICFGGSPCTSTGFGGTLSTSVSFGGSSSTSANFG

SEQ ID NO: 5285 - protein, 85 aa, Homo sapiens
GTLSTSICFDGSPSTGAGFGGALNTSASFGSVLNTSTGFGGAMSTSADFGGTLSTSVCFGGSPGTSVSFGSALNTNAGYGGAVST

SEQ ID NO: 5286 - protein, 85 aa, Homo sapiens
NTDFGGTLSTSVCFGGSPSTSAGFGGALNTNASFGCAVSTSASFSGAVSTSACFSGAPITNPGFGGAFSTSAGFGGALSTAADFG

SEQ ID NO: 5287 - protein, 85 aa, Homo sapiens
GTPSNSIGFGAAPSTSVSFGGAHGTSLCFGGAPSTSLCFGSASNTNLCFGGPPSTSACFSGATSPSFCDGPSTSTGFSFGNGLST

SEQ ID NO: 5288 - protein, 85 aa, Homo sapiens
NAGFGGGLNTSAGFGGGLGTSAGFSGGLSTSSGFDGGLGTSAGFGGGPGTSTGFGGGLGTSAGFSGGLGTSAGFGGGLVTSDGFG

SEQ ID NO: 5289 - protein, 85 aa, Homo sapiens
GGLGTNASFGSTLGTSAGFSGGLSTSDGFGSRPNASFDRGLSTIIGFGSGSNTSTGFTGEPSTSTGFSSGPSSIVGFSGGPSTGV

SEQ ID NO: 5290 - protein, 85 aa, Homo sapiens
SQLKKLQSMESQVEEWYREVGELQAQTAALPLEPASKELVGERQNAVGERLVRLLEPLQERRRLLLASKELHQVAHDLDDELAWV

SEQ ID NO: 5291 - protein, 85 aa, Homo sapiens
RQNAVGERLVRLLEPLQERRRLLLASKELHQVAHDLDDELAWVQERLPLAMQTERGNGLQAVQQHIKKNQGLRREIQAHGPRLEE

SEQ ID NO: 5292 - protein, 85 aa, Homo sapiens
AERPEDLNLPNAVITRIIKEALPDGVNISKEARSAISRAASVFVLYATSCANNFAMKGKRKTLNASDVLSAMEEMEFQRFVTPLK

SEQ ID NO: 5293 - protein, 84 aa, Homo sapiens [sequence omitted]

SEQ ID NO: 5294 - protein, 85 aa, Homo sapiens
FVLYATSCANNFAMKGKRKTLNASDVLSAMEEMEFQRFVTPLKEALEAYRREQKGKKEASEQKKKDKDKKTDSEEQDKSRDEDND

SEQ ID NO: 5295 - protein, 85 aa, Homo sapiens
VVFINAKIKSLIKLFKKKTVSNLDEESRWTVHYTAPWHQQENVFLPTTRPPCVEDLHRQAKLNLKSVLRECDKLRHDGYRSSQYY

SEQ ID NO: 5296 - protein, 85 aa, Homo sapiens
SQGPTFAANASPFCDDYQDEDEETDQKCSLSSSEEERFISIRRPKTPASSDFSDLNTQTNWTKSLPLPTPEEKMRQQAQTVQADV

SEQ ID NO: 5297 - protein, 85 aa, Homo sapiens
VPINITGENFDRQASLRRSLIYTDTLVRRPKKVKRRKTITGVPDNIQKELASGTGQDDADGHSVYTPDHYSTLGRFNSCRSAGQR

SEQ ID NO: 5298 - protein, 85 aa, Homo sapiens
SETRDSSCQTEDVKVVPPSMRRIRAQKGQGIAAQMGHFSGSSGNMSVLSDSAGIVFPSRLDSDAGFHSLPRSGARANIQSLEPRL

SEQ ID NO: 5299 - protein, 85 aa, Homo sapiens
GALGPAGDMNGTFLYQRGHPQADENLGHLGGASGTGTLLRPKSQELRHFESENIMSPACVVSPHATYSTSIIPNATLSSSSEVIA

SEQ ID NO: 5300 - protein, 85 aa, Homo sapiens
IPTAQSAGQRESKSSGSSHARIKSRDHLISRHAVKGDPQSPGRHWNEGHATILSQDLDPHSPGEPALLSLCDSAVPLNAPANREN

SEQ ID NO: 5301 - protein, 85 aa, Homo sapiens
GSQAMPYNCRNNLAFPAHPQDVDGKSESSYSGGGGHSSSEPWEYKSSGNGRASPLKPHLATPGYSTPTSNMSSCSLDQTSNKEDA

SEQ ID NO: 5302 - protein, 85 aa, Homo sapiens
GSLYSEDHDGYCASVHTDSGHGSGNLCNSSDGFGNPRHSVINVFVGRAQKNQGDRSNYQDKSLSRNISLKKAKKPPLPPSRTDSL

SEQ ID NO: 5303 - protein, 85 aa, Homo sapiens
RRIPKKSSQCNGQVLNESLIATLQHSLQLSLPGKSGSSPSQSPCSDLEEPWLPRSRSQSTVSAGSSMTSATTPNVYSLCGATPSQ

SEQ ID NO: 5304 - protein, 85 aa, Homo sapiens
SDTSSVKSEYTDPWGYYIDYTGMQEDPGNPAGGCSTSSGVPTGNGPVRHVQEGSRATMPQVPGGSVKPKIMSPEKSHRVISPSSG

SEQ ID NO: 5305 - protein, 85 aa, Homo sapiens
YSSQSNTPTALTPVPVFLKSVSPANGKGKPKPKVPERKSSLISSVSISSSSTSLSSSTSTEGSGTMKKLDPAVGSPPAPPPPPVP

SEQ ID NO: 5306 - protein, 85 aa, Homo sapiens
SPPFPCPADRSPFLPPPPPVTDCSQGSPLPHSPVFPPPPPEALIPFCSPPDWCLSPPRPALSPILPDSPVSLPLPPPLLPSSEPP

SEQ ID NO: 5307 - protein, 85 aa, Homo sapiens
PAPPLDPKFMKDTRPPFTNSGQPESSRGSLRPPSTKEETSRPPMPLITTEALQMVQLRPVRKNSGAEAAQLSERTAQEQRTPVAP

SEQ ID NO: 5308 - protein, 85 aa, Homo sapiens
QYHLKPSAFLKSRNSTNEMESESQPASVTSSLPTPAKSSSQGDHGSAAERGGPVSRSPGAPSAGEAEARPSPSTTPLPDSSPSRK

SEQ ID NO: 5309 - protein, 85 aa, Homo sapiens
PPPISKKPKLFLVVPPPQKDFAVEPAENVSEALRAVPSPTTGEEGSVHSREAKESSAAQAGSHATHPGTSVLEGGAAGSMSPSRV

SEQ ID NO: 5310 - protein, 85 aa, Homo sapiens
EANVPMVQPDVSPAPKQEEPAENSADTGGDGESCLSQQDGAAGVPETNAAGSSSEACDFLKEDGNDEVMTPSRPRTTEDLFAAIH

SEQ ID NO: 5311 - protein, 85 aa, Homo sapiens
RSKRKVLGRRDSDDDHSRNHSPSPPVTPTGAAPSLASPKQVGSIQRSIRKSSTSSDNFKALLLKKGSRSDTSARMSAAEMLKNTD

SEQ ID NO: 5312 - protein, 85 aa, Homo sapiens
PRFQRSRSEPSPDAPESPSSCSPSKNRRAQEEWAKNEGLMPRSLSFSGPRYGRSRTPPSAASSRYSMRNRIQSSPMTVISEGEGE

SEQ ID NO: 5313 - protein, 84 aa, Homo sapiens
TVISEGEGEAVEPVDSIARGALGAAEGCSLDGLAREEMDEGGLLCGEGPAASLQPQAPGPVDGTASAEGREPSPQCGGSLSEES

SEQ ID NO: 5314 - protein, 85 aa, Homo sapiens
VFLPTTRPPCVEDLHRQAKLNLKSVLRECDKLRHDGYRSSQYYSQGPTFAANASPFCDDYQDEDEETDQKCSLSSSEEERFISIR

SEQ ID NO: 5315 - protein, 85 aa, Homo sapiens
RPKTPASSDFSDLNTQTNWTKSLPLPTPEEKMRQQAQTVQADVVPINITGENFDRQASLRRSLIYTDTLVRRPKKVKRRKTITGV

SEQ ID NO: 5316 - protein, 85 aa, Homo sapiens
PDNIQKELASGTGQDDADGHSVYTPDHYSTLGRFNSCRSAGQRSETRDSSCQTEDVKVVPPSMRRIRAQKGQGIAAQMGHFSGSS

SEQ ID NO: 5317 - protein, 85 aa, Homo sapiens
GNMSVLSDSAGIVFPSRLDSDAGFHSLPRSGARANIQSLEPRLGALGPAGDMNGTFLYQRGHPQADENLGHLGGASGTGTLLRPK

SEQ ID NO: 5318 - protein, 85 aa, Homo sapiens
SQELRHFESENIMSPACVVSPHATYSTSIIPNATLSSSSEVIAIPTAQSAGQRESKSSGSSHARIKSRDHLISRHAVKGDPQSPG

SEQ ID NO: 5319 - protein, 85 aa, Homo sapiens
RHWNEGHATILSQDLDPHSPGEPALLSLCDSAVPLNAPANRENGSQAMPYNCRNNLAFPAHPQDVDGKSESSYSGGGGHSSSEPW

SEQ ID NO: 5320 - protein, 85 aa, Homo sapiens
EYKSSGNGRASPLKPHLATPGYSTPTSNMSSCSLDQTSNKEDAGSLYSEDHDGYCASVHTDSGHGSGNLCNSSDGFGNPRHSVIN

SEQ ID NO: 5321 - protein, 85 aa, Homo sapiens
VFVGRAQKNQGDRSNYQDKSLSRNISLKKAKKPPLPPSRTDSLRRIPKKSSQCNGQVLNESLIATLQHSLQLSLPGKSGSSPSQS

SEQ ID NO: 5322 - protein, 85 aa, Homo sapiens
PCSDLEEPWLPRSRSQSTVSAGSSMTSATTPNVYSLCGATPSQSDTSSVKSEYTDPWGYYIDYTGMQEDPGNPAGGCSTSSGVPT

SEQ ID NO: 5323 - protein, 85 aa, Homo sapiens
GNGPVRHVQEGSRATMPQVPGGSVKPKIMSPEKSHRVISPSSGYSSQSNTPTALTPVPVFLKSVSPANGKGKPKPKVPERKSSLI

SEQ ID NO: 5324 - protein, 85 aa, Homo sapiens
SSVSISSSSTSLSSSTSTEGSGTMKKLDPAVGSPPAPPPPPVPSPPFPCPADRSPFLPPPPPVTDCSQGSPLPHSPVFPPPPPEA

SEQ ID NO: 5325 - protein, 85 aa, Homo sapiens
LIPFCSPPDWCLSPPRPALSPILPDSPVSLPLPPPLLPSSEPPPAPPLDPKFMKDTRPPFTNSGQPESSRGSLRPPSTKEETSRP

SEQ ID NO: 5326 - protein, 85 aa, Homo sapiens
PMPLITTEALQMVQLRPVRKNSGAEAAQLSERTAQEQRTPVAPQYHLKPSAFLKSRNSTNEMESESQPASVTSSLPTPAKSSSQG

SEQ ID NO: 5327 - protein, 85 aa, Homo sapiens
DHGSAAERGGPVSRSPGAPSAGEAEARPSPSTTPLPDSSPSRKPPPISKKPKLFLVVPPPQKDFAVEPAENVSEALRAVPSPTTG

SEQ ID NO: 5328 - protein, 85 aa, Homo sapiens
EEGSVHSREAKESSAAQAGSHATHPGTSVLEGGAAGSMSPSRVEANVPMVQPDVSPAPKQEEPAENSADTGGDGESCLSQQDGAA

SEQ ID NO: 5329 - protein, 85 aa, Homo sapiens
GVPETNAAGSSSEACDFLKEDGNDEVMTPSRPRTTEDLFAAIHRSKRKVLGRRDSDDDHSRNHSPSPPVTPTGAAPSLASPKQVG

SEQ ID NO: 5330 - protein, 85 aa, Homo sapiens
SIQRSIRKSSTSSDNFKALLLKKGSRSDTSARMSAAEMLKNTDPRFQRSRSEPSPDAPESPSSCSPSKNRRAQEEWAKNEGLMPR

SEQ ID NO: 5331 - protein, 85 aa, Homo sapiens
SLSFSGPRYGRSRTPPSAASSRYSMRNRIQSSPMTVISEGEGEAVEPVDSIARGALGAAEGCSLDGLAREEMDEGGLLCGEGPAA

SEQ ID NO: 5332 - protein, 85 aa, Homo sapiens
PVRYPSYLAPEVIAQGIFKTTDHMPSKKPLPSGPKSDVWSLGIILFELCVGRKLFQSLDISERLKFLLTLDCVDDTLIVLAEEHG

SEQ ID NO: 5333 - protein, 85 aa, Homo sapiens
CLDIIKELPETVIDLLNKCLTFHPSKRPTPDQLMKDKVFSEVSPLYTPFTKPASLFSSSLRCADLTLPEDISQLCKDINNDYLAE

SEQ ID NO: 5334 - protein, 85 aa, Homo sapiens
RSIEEVYYLWCLAGGDLEKELVNKEIIRSKPPICTLPNFLFEDGESFGQGRDRSSLLDDTTVTLSLCQLRNRLKDVGGEAFYPLL

SEQ ID NO: 5335 - protein, 85 aa, Homo sapiens
EDDQSNLPHSNSNNELSAAATLPLIIREKDTEYQLNRIILFDRLLKAYPYKKNQIWKEARVDIPPLMRGLTWAALLGVEGAIHAK

SEQ ID NO: 5336 - protein, 85 aa, Homo sapiens
YDAIDKDTPIPTDRQIEVDIPRCHQYDELLSSPEGHAKFRRVLKAWVVSHPDLVYWQGLDSLCAPFLYLNFNNEALAYACMSAFI

SEQ ID NO: 5337 - protein, 85 aa, Homo sapiens
PKYLYNFFLKDNSHVIQEYLTVFSQMIAFHDPELSNHLNEIGFIPDLYAIPWFLTMFTHVFPLHKIFHLWDTLLLGNSSFPFCIG

SEQ ID NO: 5338 - protein, 85 aa, Homo sapiens
VAILQQLRDRLLANGFNECILLFSDLPEIDIERCVRESINLFCWTPKSATYRQHAQPPKPSSDSSGGRSSAPYFSAECPDPPKTD

SEQ ID NO: 5339 - protein, 85 aa, Homo sapiens
MSRESIPLNDLKSEVSPRISAEDLIDLCELTVTGHFKTPSKKTKSSKPKLLVVDIRNSEDFIRGHISGSINIPFSAAFTAEGELT

SEQ ID NO: 5340 - protein, 85 aa, Homo sapiens
ILKTITHPRLCQYVDISRGKHERLVVVAEHCERSLEDLLRERKPVRYPSYLAPEVIAQGIFKTTDHMPSKKPLPSGPKSDVWSLG

SEQ ID NO: 5341 - protein, 85 aa, Homo sapiens
IILFELCVGRKLFQSLDISERLKFLLTLDCVDDTLIVLAEEHGCLDIIKELPETVIDLLNKCLTFHPSKRPTPDQLMKDKVFSEV

SEQ ID NO: 5342 - protein, 85 aa, Homo sapiens
SPLYTPFTKPASLFSSSLRCADLTLPEDISQLCKDINNDYLAERSIEEVYYLWCLAGGDLEKELVNKEIIRSKPPICTLPNFLFE

SEQ ID NO: 5343 - protein, 85 aa, Homo sapiens
DGESFGQGRDRSSLLDDTTVTLSLCQLRNRLKDVGGEAFYPLLEDDQSNLPHSNSNNELSAAATLPLIIREKDTEYQLNRIILFD

SEQ ID NO: 5344 - protein, 85 aa, Homo sapiens
RLLKAYPYKKNQIWKEARVDIPPLMRGLTWAALLGVEGAIHAKYDAIDKDTPIPTDRQIEVDIPRCHQYDELLSSPEGHAKFRRV

SEQ ID NO: 5345 - protein, 85 aa, Homo sapiens
LKAWVVSHPDLVYWQGLDSLCAPFLYLNFNNEALAYACMSAFIPKYLYNFFLKDNSHVIQEYLTVFSQMIAFHDPELSNHLNEIG

SEQ ID NO: 5346 - protein, 85 aa, Homo sapiens
FIPDLYAIPWFLTMFTHVFPLHKIFHLWDTLLLGNSSFPFCIGVAILQQLRDRLLANGFNECILLFSDLPEIDIERCVRESINLF

SEQ ID NO: 5347 - protein, 85 aa, Homo sapiens
CWTPKSATYRQHAQPPKPSSDSSGGRSSAPYFSAECPDPPKTDLSRESIPLNDLKSEVSPRISAEDLIDLCELTVTGHFKTPSKK

SEQ ID NO: 5348 - protein, 85 aa, Homo sapiens
TKSSKPKLLVVDIRNSEDFIRGHISGSINIPFSAAFTAEGELTQGPYTAMLQNFKGKVIVIVGHVAKHTAEFAAHLVKMKYPRIC

SEQ ID NO: 5349 - protein, 85 aa, Homo sapiens
AQPGTLNLNNEVVKMRKEVKRIRVLVIRKLVRSVGRLKSKKGTEDALLKNQRRAQRLLEEIHAMKELKPDIVTKSALGDDINFEK

SEQ ID NO: 5350 - protein, 85 aa, Homo sapiens
IFKKPDSTATERAIARLAVHPLLKKKIDVLKAAVQAFKEARQNVAEVESSKNASEDNHSENTLYSNDNGSNLQREATVISEQKVK

SEQ ID NO: 5351 - protein, 85 aa, Homo sapiens
ETKILAKKPIHNSKEKIAKMEHGPKAVTIANSPSKPSEKDSVVSLESQKTPADPKLKTLSQTKKNKGSDSSLSGNSDGGEEFCEE

SEQ ID NO: 5352 - protein, 85 aa, Homo sapiens
EKEYFDDSTEERFYKQSSMSEDSDSGDDFFIGKVRRTRKKESSCHSSVKEQKPLEKVFLKEDTGETHGDTRNDKIKPSTETRKLE

SEQ ID NO: 5353 - protein, 85 aa, Homo sapiens
SVFFHSLSGSKSSRRNFKEQAPKTRSLDFPQNEPQIKNQFNKKLSGRLENTKQQLQLPLHPSWEASRRRKEQQSNIAVFQGKKIT

SEQ ID NO: 5354 - protein, 84 aa, Homo sapiens
HSLSGSKSSRRNFKEQAPKTRSLDFPQNEPQIKNQFNKKLSGRLENTKQQLQLPLHPSWEASRRRKEQQSNIAVFQGKKITFDD

SEQ ID NO: 5355 - protein, 85 aa, Homo sapiens
TEDALLKNQRRAQRLLEEIHAMKELKPDIVTKSALGDDINFEKIFKKPDSTATERAIARLAVHPLLKKKIDVLKAAVQAFKEARQ

SEQ ID NO: 5356 - protein, 85 aa, Homo sapiens
NVAEVESSKNASEDNHSENTLYSNDNGSNLQREATVISEQKVKETKILAKKPIHNSKEKIAKMEHGPKAVTIANSPSKPSEKDSV

SEQ ID NO: 5357 - protein, 85 aa, Homo sapiens
VSLESQKTPADPKLKTLSQTKKNKGSDSSLSGNSDGGEEFCEEEKEYFDDSTEERFYKQSSMSEDSDSGDDFFIGKVRRTRKKES

SEQ ID NO: 5358 - protein, 85 aa, Homo sapiens
SCHSSVKEQKPLEKVFLKEDTGETHGDTRNDKIKPSTETRKLESVFFHSLSGSKSSRRNFKEQAPKTRSLDFPQNEPQIKNQFNK

SEQ ID NO: 5359 - protein, 85 aa, Homo sapiens
VRGWEPPPGLDCAISEGHKSEGTMPPNKEASGLSSSPAGLICLPPISEELQLVWTQAAQTSELDSNEHLLKTFSYFPYPSLADIA

SEQ ID NO: 5360 - protein, 85 aa, Homo sapiens
LLCLRYGLQMEKVKTWFMAQRLRCGISWSSEEIEETRARVVYRRDQLHFKSLLSFTHHAGRPPEEVPPPPVPAPEQVGIGIGPPT

SEQ ID NO: 5361 - protein, 85 aa, Homo sapiens
LSKPTQTKGLKVEPEEPSQMPPLPQSHQKLKESLMTPGSGAFPYQSDFWQHLQSSGLSKEQAGRGPNQSHGIGTASWNHSTTVPQ

SEQ ID NO: 5362 - protein, 85 aa, Homo sapiens
PQARDKPPPIALIASSCKEESASSVTPSSSSTSSSFQVLANGATAASKPLQPLGCVPQSVSPSEQALPPHLEPAWPQGLRHNSVP

SEQ ID NO: 5363 - protein, 85 aa, Homo sapiens
GRVGPTEYLSPDMQRQRKTKRKTKEQLAILKSFFLQCQWARREDYQKLEQITGLPRPEIIQWFGDTRYALKHGQLKWFRDNAVPG

SEQ ID NO: 5364 - protein, 85 aa, Homo sapiens
APSFQDPAIPTPPPSTRSLNERAETPPLPIPPPPPDIQPLERYWAAHQQLRETDIPQLSQASRLSTQQVLDWFDSRLPQPAEVVV

SEQ ID NO: 5365 - protein, 84 aa, Homo sapiens
ERYWAAHQQLRETDIPQLSQASRLSTQQVLDWFDSRLPQPAEVVVCLDEEEEEEEEELPEDDEEEEEEEEEDDDDDDDDVIIQD

SEQ ID NO: 5366 - protein, 85 aa, Homo sapiens
LPPISEELQLVWTQAAQTSELDSNEHLLKTFSYFPYPSLADIALLCLRYGLQMEKVKTWFMAQRLRCGISWSSEEIEETRARVVY

SEQ ID NO: 5367 - protein, 85 aa, Homo sapiens
RRDQLHFKSLLSFTHHAGRPPEEVPPPPVPAPEQVGIGIGPPTLSKPTQTKGLKVEPEEPSQMPPLPQSHQKLKESLMTPGSGAF

SEQ ID NO: 5368 - protein, 85 aa, Homo sapiens
PYQSDFWQHLQSSGLSKEQAGRGPNQSHGIGTASWNHSTTVPQPQARDKPPPIALIASSCKEESASSVTPSSSSTSSSFQVLANG

SEQ ID NO: 5369 - protein, 85 aa, Homo sapiens
ATAASKPLQPLGCVPQSVSPSEQALPPHLEPAWPQGLRHNSVPGRVGPTEYLSPDMQRQRKTKRKTKEQLAILKSFFLQCQWARR

SEQ ID NO: 5370 - protein, 85 aa, Homo sapiens
EDYQKLEQITGLPRPEIIQWFGDTRYALKHGQLKWFRDNAVPGAPSFQDPAIPTPPPSTRSLNERAETPPLPIPPPPPDIQPLER

SEQ ID NO: 5371 - protein, 85 aa, Homo sapiens
DPSADTWDLFSPLISLWINRFYIYLGFAVSISLWICVQIVIKTQGKNLQEKSVPKAAQDLMTNGYVSLQEKDIFVSGVKIFYGSQ

SEQ ID NO: 5372 - protein, 85 aa, Homo sapiens
TGTAKGFATVLAEAVTSLDLPVAIINLKEYDPDDHLIEEVTSKNVCVFLVATYTDGLPTESAEWFCKWLEEASIDFRFGKTYLKG

SEQ ID NO: 5373 - protein, 85 aa, Homo sapiens
MRYAVFGLGNSAYASHFNKVGKNVDKWLWMLGAHRVMSRGEGDCDVVKSKHGSIEADFRAWKTKFISQLQALQKGERKKSCGGHC

SEQ ID NO: 5374 - protein, 85 aa, Homo sapiens
KKGKCESHQHGSEEREEGSHEQDELHHRDTEEEEPFESSSEEEFGGEDHQSLNSIVDVEDLGKIMDHVKKEKREKEQQEEKSGLF

SEQ ID NO: 5375 - protein, 84 aa, Homo sapiens
GGEDHQSLNSIVDVEDLGKIMDHVKKEKREKEQQEEKSGLFRNMGRNEDGERRAMITPALREALTKQVHAPRERRLLQTHILWN

SEQ ID NO: 5376 - protein, 85 aa, Homo sapiens
TQGKNLQEKSVPKAAQDLMTNGYVSLQEKDIFVSGVKIFYGSQTGTAKGFATVLAEAVTSLDLPVAIINLKEYDPDDHLIEEVTS

SEQ ID NO: 5377 - protein, 85 aa, Homo sapiens
KNVCVFLVATYTDGLPTESAEWFCKWLEEASIDFRFGKTYLKGMRYAVFGLGNSAYASHFNKVGKNVDKWLWMLGAHRVMSRGEG

SEQ ID NO: 5378 - protein, 85 aa, Homo sapiens
DCDVVKSKHGSIEADFRAWKTKFISQLQALQKGERKKSCGGHCKKGKCESHQHGSEEREEGSHEQDELHHRDTEEEEPFESSSEE

SEQ ID NO: 5379 - protein, 85 aa, Homo sapiens
EFGGEDHQSLNSIVDVEDLGKIMDHVKKEKREKEQQEEKSGLFRNMGRNEDGERRAMITPALREALTKQVHAPRERRLLQTHILW

SEQ ID NO: 5380 - protein, 85 aa, Homo sapiens
DALESLLDEVALEGLDGLCLPALWSRLETRVPPFPLPLEPCTQEFLWRALATHPGISFYEEPRERPDLQLQDRYEEIDLETGILE

SEQ ID NO: 5381 - protein, 85 aa, Homo sapiens
SRRDPVALEDVYPIHMILENKDGIQGSCRYFKERKNITNDIRTKSLQPRCTMVEAFDRWGKKLIIVASQAMRYRALIGQEGDPDL

SEQ ID NO: 5382 - protein, 85 aa, Homo sapiens
KLPDFSYCILERLGRSRWQGELQRDLHTTAFKVDAGKLHYHRKILNKNGLITMQSHVIRLPTGAQQHSILLLLNRFHVDRRSKYD

SEQ ID NO: 5383 - protein, 85 aa, Homo sapiens
ILMEKLSVMLSTRTNHIETLGKLREELGLCERTFKRLYQYMLNAGLAKVVSLRLQEIHPECGPCKTKKGTDVMVRCLKLLKEFKR

SEQ ID NO: 5384 - protein, 85 aa, Homo sapiens
NDHDDDEDEEVISKTVPPVDIVFERDMLTQTYDLIERRGTKGISQAEIRVAMNVGKLEARMLCRLLQRFKVVKGFMEDEGRQRTT

SEQ ID NO: 5385 - protein, 85 aa, Homo sapiens
KYISCVFAEESDLSRQYQREKARSELLTTVSLASMQEESLLPEGEDTFLSESDSEEERSSSKRRGRGSQKDTRASANLRPKTQPH

SEQ ID NO: 5386 - protein, 85 aa, Homo sapiens
HSTPTKGGWKVVNLHPLKKQPPSFPGAAEERACQSLASRDSLLDTSSVSEPNVSFVSHCADSNSGDIAVIEEVRMENPKESSSSL

SEQ ID NO: 5387 - protein, 85 aa, Homo sapiens
KTGRHSSGQDKPHETYRLLKRRNLIIEAVTNLRLIESLFTIQKMIMDQEKQEGVSTKCCKKSIVRLVRNLSEEGLLRLYRTTVIQ

SEQ ID NO: 5388 - protein, 85 aa, Homo sapiens
DGIKKKVDLVVHPSMDQNDPLVRSAIEQVRFRISNSSTANRVKTSQPPVPQGEAEEDSQGKEGPSGSGDSQLSASSRSESGRMKK

SEQ ID NO: 5389 - protein, 85 aa, Homo sapiens
SDNKMGITPLRNYHPIVVPGLGRSLGFLPKMPRLRVVHMFLWYLIYGHPASNTVEKPSFISERRTIKQESGRAGVRPSSSGSAWE

SEQ ID NO: 5390 - protein, 85 aa, Homo sapiens
ACSEAPSKGSQDGVTWEAEVELATETVYVDDASWMRYIPPIPVHRDFGFGWALVSDILLCLPLSIFIQIVQVSYKVDNLEEFLND

SEQ ID NO: 5391 - protein, 85 aa, Homo sapiens
PLKKHTLIRFLPRPIRQQLLYKRRYIFSVVENLQRLCYMGLLQFGPTEKFQDKDQVFIFLKKNAVIVDTTICDPHYNLARSSRPF

SEQ ID NO: 5392 - protein, 85 aa, Homo sapiens
ERRLYVLNSMQDVENYWFDLQCVCLNTPLGVVRCPRVRKNSSTDQGSDEEGSLQKEQESAMDKHNLERKCAMLEYTTGSREVVDE

SEQ ID NO: 5393 - protein, 85 aa, Homo sapiens
GLIPGDGLGAAGLDSSFYGHLKRNWIWTSYIINQAKKENTAAENGLTVRLQTFLSKRPMPLSARGNSRLNIWGEARVGSELCAGW

SEQ ID NO: 5394 - protein, 85 aa, Homo sapiens
EEQFEVDREPSLDRNRRVRGGKSQKRKRLKKDPGKKIKRKKKGEFPGEKSKRLRYHDEADQSALQRMTRLRVTWSMQEDGLLVLC

SEQ ID NO: 5395 - protein, 85 aa, Homo sapiens
RIASNVLNTKVKGPFVTWQVVRDILHATFEESLDKTSHSVGRRARYIVKNPQAYLNYKVCLAEVYQDKALVGDFMNRRGDYDDPK

SEQ ID NO: 5396 - protein, 85 aa, Homo sapiens
VCANEFKEFVEKLKEKFSSALRNSNLEIPDTLQELFARYRVLAIGDEKDQTRKEDELNSVDDIHFLVLQNLIQSTLALSDSQMKS

SEQ ID NO: 5397 - protein, 85 aa, Homo sapiens
YQSFQTFRLYREYKDHVLVKAFMECQKRSLVNRRRVNHTLGPKKNRALPFVPMSYQLSQTYYRIFTWRFPSTICTESFQFLDRMR

SEQ ID NO: 5398 - protein, 85 aa, Homo sapiens
AAGKLDQPDRFSFKDQDNNEPTNDMVAFSLDGPGGNCVAVLTLFSLGLISVDVRIPEQIIVVDSSMVENEVIKSLGKDGSLEDDE

SEQ ID NO: 5399 - protein, 85 aa, Homo sapiens
DEEDDLDEGVGGKRRSMEVKPAQASHTNYLLMRGYYSPGIVSTRNLNPNDSIVVNSCQMKFQLRCTPVPARLRPAAAPLEELTMG

SEQ ID NO: 5400 - protein, 85 aa, Homo sapiens
TSCLPDTFTKLINPQENTCSLEEFVLQLELSGYSPEDLTAALEILEAIIATGCFGIDKEELRRRFSALEKAGGGRTRTFADCIQA

SEQ ID NO: 5401 - protein, 85 aa, Homo sapiens
LLEQHQVLEVGGNTARLVAMGSAWPWLLHSVRLKDREDADIQREDPQARPLEGSSSEDSPPEGQAPPSHSPRGTKRRASWASENG

SEQ ID NO: 5402 - protein, 85 aa, Homo sapiens
ETDAEGTQMTPAKRPALQDSNLAPSLGPGAEDGAEAQAPSPPPALEDTAAAGAAQEDQEGVGEFSSPGQEQLSGQAQPPEGSEDP

SEQ ID NO: 5403 - protein, 85 aa, Homo sapiens
RGFTESFGAANISQAARERDCESVCFIGRPWRVVDGHLNLPVCKGMMEAMLYHIMTRPGIPESSLLRHYQGVLQPVAVLELLQGL

SEQ ID NO: 5404 - protein, 84 aa, Homo sapiens
QGVLQPVAVLELLQGLESLGCIRKRWLRKPRPVSLFSTPVVEEVEVPSSLDESPMAFYEPTLDCTLRLGRVFPHEVNWNKWIHL

SEQ ID NO: 5405 - protein, 85 aa, Homo sapiens
QEFLWRALATHPGISFYEEPRERPDLQLQDRYEEIDLETGILESRRDPVALEDVYPIHMILENKDGIQGSCRYFKERKNITNDIR

SEQ ID NO: 5406 - protein, 85 aa, Homo sapiens
TKSLQPRCTMVEAFDRWGKKLIIVASQAMRYRALIGQEGDPDLKLPDFSYCILERLGRSRWQGELQRDLHTTAFKVDAGKLHYHR

SEQ ID NO: 5407 - protein, 85 aa, Homo sapiens
KILNKNGLITMQSHVIRLPTGAQQHSILLLLNRFHVDRRSKYDILMEKLSVMLSTRTNHIETLGKLREELGLCERTFKRLYQYML

SEQ ID NO: 5408 - protein, 85 aa, Homo sapiens
NAGLAKVVSLRLQEIHPECGPCKTKKGTDVMVRCLKLLKEFKRNDHDDDEDEEVISKTVPPVDIVFERDMLTQTYDLIERRGTKG

SEQ ID NO: 5409 - protein, 85 aa, Homo sapiens
ISQAEIRVAMNVGKLEARMLCRLLQRFKVVKGFMEDEGRQRTTKYISCVFAEESDLSRQYQREKARSELLTTVSLASMQEESLLP

SEQ ID NO: 5410 - protein, 85 aa, Homo sapiens
EGEDTFLSESDSEEERSSSKRRGRGSQKDTRASANLRPKTQPHHSTPTKGGWKVVNLHPLKKQPPSFPGAAEERACQSLASRDSL

SEQ ID NO: 5411 - protein, 85 aa, Homo sapiens
LDTSSVSEPNVSFVSHCADSNSGDIAVIEEVRMENPKESSSSLKTGRHSSGQDKPHETYRLLKRRNLIIEAVTNLRLIESLFTIQ

SEQ ID NO: 5412 - protein, 85 aa, Homo sapiens
KMIMDQEKQEGVSTKCCKKSIVRLVRNLSEEGLLRLYRTTVIQDGIKKKVDLVVHPSMDQNDPLVRSAIEQVRFRISNSSTANRV

SEQ ID NO: 5413 - protein, 85 aa, Homo sapiens
KTSQPPVPQGEAEEDSQGKEGPSGSGDSQLSASSRSESGRMKKSDNKMGITPLRNYHPIVVPGLGRSLGFLPKMPRLRVVHMFLW

SEQ ID NO: 5414 - protein, 85 aa, Homo sapiens
YLIYGHPASNTVEKPSFISERRTIKQESGRAGVRPSSSGSAWEACSEAPSKGSQDGVTWEAEVELATETVYVDDASWMRYIPPIP

SEQ ID NO: 5415 - protein, 85 aa, Homo sapiens
VHRDFGFGWALVSDILLCLPLSIFIQIVQVSYKVDNLEEFLNDPLKKHTLIRFLPRPIRQQLLYKRRYIFSVVENLQRLCYMGLL

SEQ ID NO: 5416 - protein, 85 aa, Homo sapiens
QFGPTEKFQDKDQVFIFLKKNAVIVDTTICDPHYNLARSSRPFERRLYVLNSMQDVENYWFDLQCVCLNTPLGVVRCPRVRKNSS

SEQ ID NO: 5417 - protein, 85 aa, Homo sapiens
TDQGSDEEGSLQKEQESAMDKHNLERKCAMLEYTTGSREVVDEGLIPGDGLGAAGLDSSFYGHLKRNWIWTSYIINQAKKENTAA

SEQ ID NO: 5418 - protein, 85 aa, Homo sapiens
ENGLTVRLQTFLSKRPMPLSARGNSRLNIWGEARVGSELCAGWEEQFEVDREPSLDRNRRVRGGKSQKRKRLKKDPGKKIKRKKK

SEQ ID NO: 5419 - protein, 85 aa, Homo sapiens
GEFPGEKSKRLRYHDEADQSALQRMTRLRVTWSMQEDGLLVLCRIASNVLNTKVKGPFVTWQVVRDILHATFEESLDKTSHSVGR

SEQ ID NO: 5420 - protein, 85 aa, Homo sapiens
RARYIVKNPQAYLNYKVCLAEVYQDKALVGDFMNRRGDYDDPKVCANEFKEFVEKLKEKFSSALRNSNLEIPDTLQELFARYRVL

SEQ ID NO: 5421 - protein, 85 aa, Homo sapiens
AIGDEKDQTRKEDELNSVDDIHFLVLQNLIQSTLALSDSQMKSYQSFQTFRLYREYKDHVLVKAFMECQKRSLVNRRRVNHTLGP

SEQ ID NO: 5422 - protein, 85 aa, Homo sapiens
KKNRALPFVPMSYQLSQTYYRIFTWRFPSTICTESFQFLDRMRAAGKLDQPDRFSFKDQDNNEPTNDMVAFSLDGPGGNCVAVLT

SEQ ID NO: 5423 - protein, 85 aa, Homo sapiens
LFSLGLISVDVRIPEQIIVVDSSMVENEVIKSLGKDGSLEDDEDEEDDLDEGVGGKRRSMEVKPAQASHTNYLLMRGYYSPGIVS

SEQ ID NO: 5424 - protein, 85 aa, Homo sapiens
TRNLNPNDSIVVNSCQMKFQLRCTPVPARLRPAAAPLEELTMGTSCLPDTFTKLINPQENTCSLEEFVLQLELSGYSPEDLTAAL

SEQ ID NO: 5425 - protein, 85 aa, Homo sapiens
EILEAIIATGCFGIDKEELRRRFSALEKAGGGRTRTFADCIQALLEQHQVLEVGGNTARLVAMGSAWPWLLHSVRLKDREDADIQ

SEQ ID NO: 5426 - protein, 85 aa, Homo sapiens
REDPQARPLEGSSSEDSPPEGQAPPSHSPRGTKRRASWASENGETDAEGTQMTPAKRPALQDSNLAPSLGPGAEDGAEAQAPSPP

SEQ ID NO: 5427 - protein, 85 aa, Homo sapiens
PALEDTAAAGAAQEDQEGVGEFSSPGQEQLSGQAQPPEGSEDPRGFTESFGAANISQAARERDCESVCFIGRPWRVVDGHLNLPV

SEQ ID NO: 5428 - protein, 85 aa, Homo sapiens
CKGMMEAMLYHIMTRPGIPESSLLRHYQGVLQPVAVLELLQGLESLGCIRKRWLRKPRPVSLFSTPVVEEVEVPSSLDESPMAFY

SEQ ID NO: 5429 - protein, 85 aa, Homo sapiens
EAKAGEGTYALDSESCMEKLAALSASLARVVVPATEEEAEVDEFPTDGEMSAQEEDRRKELEAQEKHKKLFEGLKFFLNREVPRE

SEQ ID NO: 5430 - protein, 85 aa, Homo sapiens
ALAFIIRSFGGEVSWDKSLCIGATYDVTDSRITHQIVDRPGQQTSVIGRCYVQPQWVFDSVNARLLLPVAEYFSGVQLPPHLSPF

SEQ ID NO: 5431 - protein, 85 aa, Homo sapiens
VTEKEGDYVPPEKLKLLALQRGEDPGNLNESEEEEEEDDNNEGDGDEEGENEEEEEDAEAGSEKEEEARLAALEEQRMEGKKPRV

SEQ ID NO: 5432 - protein, 85 aa, Homo sapiens
EFPTDGEMSAQEEDRRKELEAQEKHKKLFEGLKFFLNREVPREALAFIIRSFGGEVSWDKSLCIGATYDVTDSRITHQIVDRPGQ

SEQ ID NO: 5433 - protein, 85 aa, Homo sapiens
QTSVIGRCYVQPQWVFDSVNARLLLPVAEYFSGVQLPPHLSPFVTEKEGDYVPPEKLKLLALQRGEDPGNLNESEEEEEEDDNNE

SEQ ID NO: 5434 - protein, 85 aa, Homo sapiens
GDGDEEGENEEEEEDAEAGSEKEEEARLAALEEQRMEGKKPRVMAGTLKLEDKQRLAQEEESEAKRLAIMMMKKREKYLYQKIMF

SEQ ID NO: 5435 - protein, 85 aa, Homo sapiens
SESRRRGRGRGKKHPEGRKREREPDPGEKATRPKLKKMKSQTGQVGEKQSLKCEAAAGNPQPSYRWFKDGKELNRSRDIRIKYGN

SEQ ID NO: 5436 - protein, 85 aa, Homo sapiens
GRKNSRLQFNKVKVEDAGEYVCEAENILGKDTVRGRLYVNSVSTTLSSWSGHARKCNETAKSYCVNGGVCYYIEGINQLSCKCPN

SEQ ID NO: 5437 - protein, 85 aa, Homo sapiens
GFFGQRCLEKLPLRLYMPDPKQKAEELYQKRVLTITGICVALLVVGIVCVVAYCKTKKQRKQMHNHLRQNMCPAHQNRSLANGPS

SEQ ID NO: 5438 - protein, 85 aa, Homo sapiens
HPRLDPEEIQMADYISKNVPATDHVIRRETETTFSGSHSCSPSHHCSTATPTSSHRHESHTWSLERSESLTSDSQSGIMLSSVGT

SEQ ID NO: 5439 - protein, 85 aa, Homo sapiens
SKCNSPACVEARARRAAAYNLEERRRATAPPYHDSVDSLRDSPHSERYVSALTTPARLSPVDFHYSLATQVPTFEITSPNSAHAV

SEQ ID NO: 5440 - protein, 85 aa, Homo sapiens
SLPPAAPISYRLAEQQPLLRHPAPPGPGPGPGPGPGPGADMQRSYDSYYYPAAGPGPRRGTCALGGSLGSLPASPFRIPEDDEYE

SEQ ID NO: 5441 - protein, 85 aa, Homo sapiens
TTQECAPPPPPRPRARGASRRTSAGPRRWRRSRLNGLAAQRARAARDSLSLSSGSGGGSASASDDDADDADGALAAESTPFLGLR

SEQ ID NO: 5442 - protein, 85 aa, Homo sapiens
GQVGEKQSLKCEAAAGNPQPSYRWFKDGKELNRSRDIRIKYGNGRKNSRLQFNKVKVEDAGEYVCEAENILGKDTVRGRLYVNSV

SEQ ID NO: 5443 - protein, 85 aa, Homo sapiens
STTLSSWSGHARKCNETAKSYCVNGGVCYYIEGINQLSCKCPNGFFGQRCLEKLPLRLYMPDPKQKAEELYQKRVLTITGICVAL

SEQ ID NO: 5444 - protein, 85 aa, Homo sapiens
MVVGIVCVVAYCKTKKQRKQMHNHLRQNMCPAHQNRSLANGPSHPRLDPEEIQMADYISKNVPATDHVIRRETETTFSGSHSCSP

SEQ ID NO: 5445 - protein, 85 aa, Homo sapiens
SHHCSTATPTSSHRHESHTWSLERSESLTSDSQSGIMLSSVGTSKCNSPACVEARARRAAAYNLEERRRATAPPYHDSVDSLRDS

SEQ ID NO: 5446 - protein, 85 aa, Homo sapiens
PHSERYVSALTTPARLSPVDFHYSLATQVPTFEITSPNSAHAVSLPPAAPISYRLAEQQPLLRHPAPPGPGPGPGPGPGPGADMQ

SEQ ID NO: 5447 - protein, 85 aa, Homo sapiens
RSYDSYYYPAAGPGPRRGTCALGGSLGSLPASPFRIPEDDEYETTQECAPPPPPRPRARGASRRTSAGPRRWRRSRLNGLAAQRA

SEQ ID NO: 5448 - protein, 85 aa, Homo sapiens
RAARDSLSLSSGSGGGSASASDDDADDADGALAAESTPFLGLRGAHDALRSDSPPLCPAADSRTYYSLDSHSTRASSRHSRGPPP

SEQ ID NO: 5449 - protein, 85 aa, Homo sapiens
VNEYKKILLLKGFELMDDYHFTSIKSLLAYDLGLTTKMQEEYNRIKITDLMEKKFQGVACLDKLIELAKDMPSLKNLVNNLRKEK

SEQ ID NO: 5450 - protein, 85 aa, Homo sapiens
SKVAKKIKTQEKAPVKKINQEEVGLAAPAPTARNKLTSEARGRIPVAQKRKTPNKEKTEAKRNKVSQEQSKPPGPSGASTSAAVD

SEQ ID NO: 5451 - protein, 85 aa, Homo sapiens
HPPLPQTSSSTPSNTSFTPNQETQAQRQVDARRNVPQNDPVTVVVLKATAPFKYESPENGKSTMFHATVASKTQYFHVKVFDINL

SEQ ID NO: 5452 - protein, 85 aa, Homo sapiens
KEKFVRKKVITISDYSECKGVMEIKEASSVSDFNQNFEVPNRIIEIANKTPKISQLYKQASGTMVYGLFMLQKKSVHKKNTIYEI

SEQ ID NO: 5453 - protein, 84 aa, Homo sapiens
MFMLQKKSVHKKNTIYEIQDNTGSMDVVGSGKWHNIKCEKGDKLRLFCLQLRTVDRKLKLVCGSHSFIKVIKAKKNKEGPMNVN

SEQ ID NO: 5454 - protein, 85 aa, Homo sapiens
NRIKITDLMEKKFQGVACLDKLIELAKDMPSLKNLVNNLRKEKSKVAKKIKTQEKAPVKKINQEEVGLAAPAPTARNKLTSEARG

SEQ ID NO: 5455 - protein, 85 aa, Homo sapiens
RIPVAQKRKTPNKEKTEAKRNKVSQEQSKPPGPSGASTSAAVDHPPLPQTSSSTPSNTSFTPNQETQAQRQVDARRNVPQNDPVT

SEQ ID NO: 5456 - protein, 85 aa, Homo sapiens
VVVLKATAPFKYESPENGKSTMFHATVASKTQYFHVKVFDINLKEKFVRKKVITISDYSECKGVMEIKEASSVSDFNQNFEVPNR

SEQ ID NO: 5457 - protein, 85 aa, Homo sapiens
IIEIANKTPKISQLYKQASGTMVYGLFMLQKKSVHKKNTIYEIQDNTGSMDVVGSGKWHNIKCEKGDKLRLFCLQLRTVDRKLKL

SEQ ID NO: 5458 - protein, 85 aa, Homo sapiens
HAVANIGTALKFLEGRKSMHRGSPIKLVNINSTDIADGRPSIVLGLMWTIILYFQIEELTSNLPQLQSLSSSASSVDSIVSSETP

SEQ ID NO: 5459 - protein, 85 aa, Homo sapiens
SPPSKRKVTTKIQGNAKKALLKWVQYTAGKQTGIEVKDFGKSWRSGVAFHSVIHAIRPELVDLETVKGRSNRENLEDAFTIAETE

SEQ ID NO: 5460 - protein, 85 aa, Homo sapiens
MGIPRLLDPEDVDVDKPDEKSIMTYVAQFLKHYPDIHNASTDGQEDDREDRVIFKEMKVWIEQFERDLTRAQMVESNLQDKYQSF

SEQ ID NO: 5461 - protein, 85 aa, Homo sapiens
KHFRVQYEMKRKQIEHLIQPLHRDGKLSLDQALVKQSWDRVTSRLFDWHIQLDKSLPAPLGTIGAWLYRAEVALREEITVQQVHE

SEQ ID NO: 5462 - protein, 85 aa, Homo sapiens
ETANTIQRKLEQHKDLLQNTDAHKRAFHEIYRTRSVNGIPVPPDQLEDMAERFHFVSSTSELHLMKMEFLELKYRLLSLLVLAES

SEQ ID NO: 5463 - protein, 85 aa, Homo sapiens
SPQEEGKEMFATMSKLKEQLTKVKECYSPLLYESQQLLIPLEELEKQMTSFYDSLGKINEIITVLEREAQSSALFKQKHQELLAC

SEQ ID NO: 5464 - protein, 85 aa, Homo sapiens
QENCKKTLTLIEKGSQSVQKFVTLSNVLKHFDQTRLQRQIADIHVAFQSMVKKTGDWKKHVETNSRLMKKFEESRAELEKVLRIA

SEQ ID NO: 5465 - protein, 85 aa, Homo sapiens
QEGLEEKGDPEELLRRHTEFFSQLDQRVLNAFLKACDELTDILPEQEQQGLQEAVRKLHKQWKDLQGEAPYHLLHLKIDVEKNRF

SEQ ID NO: 5466 - protein, 85 aa, Homo sapiens
LASVEECRTELDRETKLMPQEGSEKIIKEHRVFFSDKGPHHLCEKRLQLIEELCVKLPVRDPVRDTPGTCHVTLKELRAAIDSTY

SEQ ID NO: 5467 - protein, 85 aa, Homo sapiens
RKLMEDPDKWKDYTSRFSEFSSWISTNETQLKGIKGEAIDTANHGEVKRAVEEIRNGVTKRGETLSWLKSRLKVLTEVSSENEAQ

SEQ ID NO: 5468 - protein, 85 aa, Homo sapiens
KQGDELAKLSSSFKALVTLLSEVEKMLSNFGDCVQYKEIVKNSLEELISGSKEVQEQAEKILDTENLFEAQQLLLHHQQKTKRIS

SEQ ID NO: 5469 - protein, 85 aa, Homo sapiens
AKKRDVQQQIAQAQQGEGGLPDRGHEELRKLESTLDGLERSRERQERRIQVTLRKWERFETNKETVVRYLFQTGSSHERFLSFSS

SEQ ID NO: 5470 - protein, 84 aa, Homo sapiens
GSSHERFLSFSSLESLSSELEQTKEFSKRTESIAVQAENLVKEASEIPLGPQNKQLLQQQAKSIKEQVKKLEDTLEEEYVIDKS

SEQ ID NO: 5471 - protein, 85 aa, Homo sapiens
RKPPMVVDDLFEDMKDGVKLLALLEVLSGQKLPCEQGRRMKRIHAVANIGTALKFLEGRKSMHRGSPIKLVNINSTDIADGRPSI

SEQ ID NO: 5472 - protein, 85 aa, Homo sapiens
VLGLMWTIILYFQIEELTSNLPQLQSLSSSASSVDSIVSSETPSPPSKRKVTTKIQGNAKKALLKWVQYTAGKQTGIEVKDFGKS

SEQ ID NO: 5473 - protein, 85 aa, Homo sapiens
WRSGVAFHSVIHAIRPELVDLETVKGRSNRENLEDAFTIAETELGIPRLLDPEDVDVDKPDEKSIMTYVAQFLKHYPDIHNASTD

SEQ ID NO: 5474 - protein, 85 aa, Homo sapiens
GQEDDREDRVIFKEMKVWIEQFERDLTRAQMVESNLQDKYQSFKHFRVQYEMKRKQIEHLIQPLHRDGKLSLDQALVKQSWDRVT

SEQ ID NO: 5475 - protein, 85 aa, Homo sapiens
SRLFDWHIQLDKSLPAPLGTIGAWLYRAEVALREEITVQQVHEETANTIQRKLEQHKDLLQNTDAHKRAFHEIYRTRSVNGIPVP

SEQ ID NO: 5476 - protein, 85 aa, Homo sapiens
ELEKQMTSFYDSLGKINEIITVLEREAQSSALFKQKHQELLACQENCKKTLTLIEKGSQSVQKFVTLSNVLKHFDQTRLQRQIAD

SEQ ID NO: 5477 - protein, 85 aa, Homo sapiens
IHVAFQSMVKKTGDWKKHVETNSRLMKKFEESRAELEKVLRIAQEGLEEKGDPEELLRRHTEFFSQLDQRVLNAFLKACDELTDI

SEQ ID NO: 5478 - protein, 85 aa, Homo sapiens
LPEQEQQGLQEAVRKLHKQWKDLQGEAPYHLLHLKIDVEKNRFLASVEECRTELDRETKLMPQEGSEKIIKEHRVFFSDKGPHHL

SEQ ID NO: 5479 - protein, 85 aa, Homo sapiens
CEKRLQLIEELCVKLPVRDPVRDTPGTCHVTLKELRAAIDSTYRKLMEDPDKWKDYTSRFSEFSSWISTNETQLKGIKGEAIDTA

SEQ ID NO: 5480 - protein, 85 aa, Homo sapiens
NHGEVKRAVEEIRNGVTKRGETLSWLKSRLKVLTEVSSENEAQKQGDELAKLSSSFKALVTLLSEVEKMLSNFGDCVQYKEIVKN

SEQ ID NO: 5481 - protein, 85 aa, Homo sapiens
SLEELISGSKEVQEQAEKILDTENLFEAQQLLLHHQQKTKRISAKKRDVQQQIAQAQQGEGGLPDRGHEELRKLESTLDGLERSR

SEQ ID NO: 5482 - protein, 85 aa, Homo sapiens
ERQERRIQVTLRKWERFETNKETVVRYLFQTGSSHERFLSFSSLESLSSELEQTKEFSKRTESIAVQAENLVKEASEIPLGPQNK

SEQ ID NO: 5483 - protein, 85 aa, Homo sapiens
DDDKPFQPKNISKMAELFMECEEEELEPWQKKVEETQDEDDDELIFVGEISSSKPAISNILNRGHSSSSSKGIKSEPHSPGIPEI

SEQ ID NO: 5484 - protein, 85 aa, Homo sapiens
FRTASQRCRDPPSNPVAASPRFHLVSKSSQSSVTVENASKPDFTKNSQVGSDNSSILLFDSTQESLPPSQDIPAIFREGMKNTSY

SEQ ID NO: 5485 - protein, 85 aa, Homo sapiens
VLKHPSTSKVNSVTPKKPKTSEDVPQINPSTSLPLIGSPPVTSSQVMLSKGTNTSSPYDAGADYLRACPKCNVQFNLLDPLKYHM

SEQ ID NO: 5486 - protein, 85 aa, Homo sapiens
KHCCPDMITKFLGVIVKSERPCDEDKTDSETGKLIMLVNEFYYGRHEGVTEKEPKTYTTFKCFSCSKVLKNNIRFMNHMKHHLEL

SEQ ID NO: 5487 - protein, 85 aa, Homo sapiens
EKQNNESWENHTTCQHCYRQYPTPFQLQCHIESTHTPHEFSTICKICELSFETEHILLQHMKDTHKPGEMPYVCQVCQFRSSTFS

SEQ ID NO: 5488 - protein, 85 aa, Homo sapiens
DVEAHFRAAHENTKNLLCPFCLKVSKMATPYMNHYMKHQKKGVHRCPKCRLQFLTSKEKAEHKAQHRTFIKPKELEGLPPGAKVT

SEQ ID NO: 5489 - protein, 85 aa, Homo sapiens
IRASLGPLQSKLPTAPFGCAPGTSFLQVTPPTSQNTTARNPRKSNASRSKTSKLHATTSTASKVNTSKPRGRIAKSKAKPSYKQK

SEQ ID NO: 5490 - protein, 85 aa, Homo sapiens
RQRNRKNKMSLALKNIRCRRGIHKCIECHSKIKDFASHFSIYIHCSFCKYNTNCNKAFVNHMMSSHSNHPGKRFCIFKKHSGTLR

SEQ ID NO: 5491 - protein, 84 aa, Homo sapiens
FVNHMMSSHSNHPGKRFCIFKKHSGTLRGITLVCLKCDFLADSSGLDRMAKHLSQRKTHTCQVIIENVSKSTSTSEPTTGCSLK

SEQ ID NO: 5492 - protein, 85 aa, Homo sapiens
ELIFVGEISSSKPAISNILNRGHSSSSSKGIKSEPHSPGIPEIFRTASQRCRDPPSNPVAASPRFHLVSKSSQSSVTVENASKPD

SEQ ID NO: 5493 - protein, 85 aa, Homo sapiens
FTKNSQVGSDNSSILLFDSTQESLPPSQDIPAIFREGMKNTSYVLKHPSTSKVNSVTPKKPKTSEDVPQINPSTSLPLIGSPPVT

SEQ ID NO: 5494 - protein, 85 aa, Homo sapiens
SSQVMLSKGTNTSSPYDAGADYLRACPKCNVQFNLLDPLKYHMKHCCPDMITKFLGVIVKSERPCDEDKTDSETGKLIMLVNEFY

SEQ ID NO: 5495 - protein, 85 aa, Homo sapiens
YGRHEGVTEKEPKTYTTFKCFSCSKVLKNNIRFMNHMKHHLELEKQNNESWENHTTCQHCYRQYPTPFQLQCHIESTHTPHEFST

SEQ ID NO: 5496 - protein, 85 aa, Homo sapiens
ICKICELSFETEHILLQHMKDTHKPGEMPYVCQVCQFRSSTFSDVEAHFRAAHENTKNLLCPFCLKVSKMATPYMNHYMKHQKKG

SEQ ID NO: 5497 - protein, 85 aa, Homo sapiens
VHRCPKCRLQFLTSKEKAEHKAQHRTFIKPKELEGLPPGAKVTIRASLGPLQSKLPTAPFGCAPGTSFLQVTPPTSQNTTARNPR

SEQ ID NO: 5498 - protein, 85 aa, Homo sapiens
KSNASRSKTSKLHATTSTASKVNTSKPRGRIAKSKAKPSYKQKRQRNRKNKMSLALKNIRCRRGIHKCIECHSKIKDFASHFSIY

SEQ ID NO: 5499 - protein, 85 aa, Homo sapiens
IHCSFCKYNTNCNKAFVNHMMSSHSNHPGKRFCIFKKHSGTLRGITLVCLKCDFLADSSGLDRMAKHLSQRKTHTCQVIIENVSK

SEQ ID NO: 5500 - protein, 85 aa, Homo sapiens
RNMGRNEDGERRAMITPALREALTKQGYQLIGSHSGVKLCRWTKSMLRGRGGCYKHTFYGIESHRCMETTPSLACANKCVFCWRH

SEQ ID NO: 5501 - protein, 85 aa, Homo sapiens
HTNPVGTEWRWKMDQPEMILKEAIENHQNMIKQFKGVPGVKAERFEEGMTVKHCALSLVGEPIMYPEINRFLKLLHQCKISSFLV

SEQ ID NO: 5502 - protein, 85 aa, Homo sapiens
TNAQFPAEIRNLEPVTQLYVSVDASTKDSLKKIDRPLFKDFWQRFLDSLKALAVKQQRTVYRLTLVKAWNVDELQAYAQLVSLGN

SEQ ID NO: 5503 - protein, 85 aa, Homo sapiens
PDFIEVKGVTYCGESSASSLTMAHVPWHEEVVQFVHELVDLIPEYEIACEHEHSNCLLIAHRKFKIGGEWWTWIDYNRFQELIQE

SEQ ID NO: 5504 - protein, 84 aa, Homo sapiens
HSNCLLIAHRKFKIGGEWWTWIDYNRFQELIQEYEDSGGSKTFSAKDYMARTPHWALFGASERGFDPKDTRHQRKNKSKAISGC

SEQ ID NO: 5505 - protein, 85 aa, Homo sapiens
EFGGEDHQSLNSIVDVEDLGKIMDHVKKEKREKEQQEEKSGLFRNMGRNEDGERRAMITPALREALTKQGYQLIGSHSGVKLCRW

SEQ ID NO: 5506 - protein, 85 aa, Homo sapiens
TKSMLRGRGGCYKHTFYGIESHRCMETTPSLACANKCVFCWRHHTNPVGTEWRWKMDQPEMILKEAIENHQNMIKQFKGVPGVKA

SEQ ID NO: 5507 - protein, 85 aa, Homo sapiens
ERFEEGMTVKHCALSLVGEPIMYPEINRFLKLLHQCKISSFLVTNAQFPAEIRNLEPVTQLYVSVDASTKDSLKKIDRPLFKDFW

SEQ ID NO: 5508 - protein, 85 aa, Homo sapiens
QRFLDSLKALAVKQQRTVYRLTLVKAWNVDELQAYAQLVSLGNPDFIEVKGVTYCGESSASSLTMAHVPWHEEVVQFVHELVDLI

SEQ ID NO: 5509 - protein, 85 aa, Homo sapiens
PEYEIACEHEHSNCLLIAHRKFKIGGEWWTWIDYNRFQELIQEYEDSGGSKTFSAKDYMARTPHWALFGASERGFDPKDTRHQRK

SEQ ID NO: 5510 - protein, 85 aa, Homo sapiens
MAAAPIQQNGTHTGVPIDLDPPDSRKRPLEAPPEAGSTKRTNTGEDGQYFLKVLIPSYAAGSIIGKGGQTIVQLQKETGATIKLS

SEQ ID NO: 5511 - protein, 85 aa, Homo sapiens
KSKDFYPGTTERVCLIQGTVEALNAVHGFIAEKIREMPQNVAKTEPVSILQPQTTVNPDRIKQTLPSSPTTTKSSPSDPMTTSRA

SEQ ID NO: 5512 - protein, 84 aa, Homo sapiens
RVCLIQGTVEALNAVHGFIAEKIREMPQNVAKTEPVSILQPQTTVNPDRIKQTLPSSPTTTKSSPSDPMTTSRANQKHNISWIS

SEQ ID NO: 5513 - protein, 85 aa, Homo sapiens
TGEDGQYFLKVLIPSYAAGSIIGKGGQTIVQLQKETGATIKLSKSKDFYPGTTERVCLIQGTVEALNAVHGFIAEKIREMPQNVA

SEQ ID NO: 5514 - protein, 85 aa, Homo sapiens
VVAEDLSALRMAEDSCVDADLPDCNCDVTRVKKLKETLVAVQQLDKNMSSLRTWLAHIESELAKPIVYDSCNSEEIQRKLNEQQE

SEQ ID NO: 5515 - protein, 85 aa, Homo sapiens
LQRDIEKHSTGVASVLNLCEVLLHDCDACATDAECDSIQQATRNLDRRWRNICAMSMERRLKIEETWRLWQKFLDDYSRFEDWLK

SEQ ID NO: 5516 - protein, 85 aa, Homo sapiens
SSERTAAFPSSSGVIYTVAKEELKKFEAFQRQVHECLTQLELINKQYRRLARENRTDSACSLKQMVHEGNQRWDNLQKRVTSILR

SEQ ID NO: 5517 - protein, 85 aa, Homo sapiens
RLKHFIGQREEFETARDSILVWLTEMDLQLTNIEHFSECDVQAKIKQLKAFQQEISLNHNKIEQIIAQGEQLIEKSEPLDAAIIE

SEQ ID NO: 5518 - protein, 85 aa, Homo sapiens
EELDELRRYCQEVFGRVERYHKKLIRLPLPDDEHDLSDRELELEDSAALSDLHWHDRSADSLLSPQPSSNLSLSLAQPLRSERSG

SEQ ID NO: 5519 - protein, 85 aa, Homo sapiens
RDTPASVDSIPLEWDHDYDLSRDLESAMSRALPSEDEEGQDDKDFYLRGAVGLSDVMIPESPEAYVKLTENAIKNTSGDHSALES

SEQ ID NO: 5520 - protein, 85 aa, Homo sapiens
QIRQLGKALDDSRFQIQQTENIIRSKTPTGPELDTSYKGYMKLLGECSSSIDSVKRLEHKLKEEEESLPGFVNLHSTETQTAGVI

SEQ ID NO: 5521 - protein, 85 aa, Homo sapiens
DRWELLQAQALSKELRMKQNLQKWQQFNSDLNSIWAWLGDTEEELEQLQRLELSTDIQTIELQIKKLKELQKAVDHRKAIILSIN

SEQ ID NO: 5522 - protein, 85 aa, Homo sapiens
LCSPEFTQADSKESRDLQDRLSQMNGRWDRVCSLLEEWRGLLQDALMQCQGFHEMSHGLLLMLENIDRRKNEIVPIDSNLDAEIL

SEQ ID NO: 5523 - protein, 85 aa, Homo sapiens
QDHHKQLMQIKHELLESQLRVASLQDMSCQLLVNAEGTDCLEAKEKVHVIGNRLKLLLKEVSRHIKELEKLLDVSSSQQDLSSWS

SEQ ID NO: 5524 - protein, 85 aa, Homo sapiens
SADELDTSGSVSPTSGRSTPNRQKTPRGKCSLSQPGPSVSSPHSRSTKGGSDSSLSEPGPGRSGRGFLFRVLRAALPLQLLLLLL

SEQ ID NO: 5525 - protein, 85 aa, Homo sapiens
QLDKNMSSLRTWLAHIESELAKPIVYDSCNSEEIQRKLNEQQELQRDIEKHSTGVASVLNLCEVLLHDCDACATDAECDSIQQAT

SEQ ID NO: 5526 - protein, 85 aa, Homo sapiens
RNLDRRWRNICAMSMERRLKIEETWRLWQKFLDDYSRFEDWLKSSERTAAFPSSSGVIYTVAKEELKKFEAFQRQVHECLTQLEL

SEQ ID NO: 5527 - protein, 85 aa, Homo sapiens
INKQYRRLARENRTDSACSLKQMVHEGNQRWDNLQKRVTSILRRLKHFIGQREEFETARDSILVWLTEMDLQLTNIEHFSECDVQ

SEQ ID NO: 5528 - protein, 85 aa, Homo sapiens
AKIKQLKAFQQEISLNHNKIEQIIAQGEQLIEKSEPLDAAIIEEELDELRRYCQEVFGRVERYHKKLIRLPLPDDEHDLSDRELE

SEQ ID NO: 5529 - protein, 85 aa, Homo sapiens
MEDSAALSDLHWHDRSADSLLSPQPSSNLSLSLAQPLRSERSGRDTPASVDSIPLEWDHDYDLSRDLESAMSRALPSEDEEGQDD

SEQ ID NO: 5530 - protein, 85 aa, Homo sapiens
KDFYLRGAVGLSDVMIPESPEAYVKLTENAIKNTSGDHSALESQIRQLGKALDDSRFQIQQTENIIRSKTPTGPELDTSYKGYMK

SEQ ID NO: 5531 - protein, 85 aa, Homo sapiens
MLGECSSSIDSVKRLEHKLKEEEESLPGFVNLHSTETQTAGVIDRWELLQAQALSKELRMKQNLQKWQQFNSDLNSIWAWLGDTE

SEQ ID NO: 5532 - protein, 85 aa, Homo sapiens
EELEQLQRLELSTDIQTIELQIKKLKELQKAVDHRKAIILSINLCSPEFTQADSKESRDLQDRLSQMNGRWDRVCSLLEEWRGLL

SEQ ID NO: 5533 - protein, 85 aa, Homo sapiens
QDALMQCQGFHEMSHGLLLMLENIDRRKNEIVPIDSNLDAEILQDHHKQLMQIKHELLESQLRVASLQDMSCQLLVNAEGTDCLE

SEQ ID NO: 5534 - protein, 85 aa, Homo sapiens
AKEKVHVIGNRLKLLLKEVSRHIKELEKLLDVSSSQQDLSSWSSADELDTSGSVSPTSGRSTPNRQKTPRGKCSLSQPGPSVSSP

SEQ ID NO: 5535 - protein, 85 aa, Homo sapiens
AAQAAGVSRQRAATQGLGSNQNALKYLGQDFKTLRQQCLDSGVLFKDPEFPACPSALGYKDLGPGSPQTQGIIWKRPTELCPSPQ

SEQ ID NO: 5536 - protein, 85 aa, Homo sapiens
FIVGGATRTDICQGGLGDCWLLAAIASLTLNEELLYRVVPRDQDFQENYAGIFHFQFWQYGEWVEVVIDDRLPTKNGQLLFLHSE

SEQ ID NO: 5537 - protein, 85 aa, Homo sapiens
QGNEFWSALLEKAYAKLNGCYEALAGGSTVEGFEDFTGGISEFYDLKKPPANLYQIIRKALCAGSLLGCSIDVSSAAEAEAITSQ

SEQ ID NO: 5538 - protein, 85 aa, Homo sapiens
KLVKSHAYSVTGVEEVNFQGHPEKLIRLRNPWGEVEWSGAWSDDAPEWNHIDPRRKEELDKKVEDGEFWMSLSDFVRQFSRLEIC

SEQ ID NO: 5539 - protein, 84 aa, Homo sapiens
SDDAPEWNHIDPRRKEELDKKVEDGEFWMSLSDFVRQFSRLEICNLSPDSLSSEEVHKWNLVLFNGHWTRGSTAGGCQNYPGSS

SEQ ID NO: 5540 - protein, 85 aa, Homo sapiens
VLFKDPEFPACPSALGYKDLGPGSPQTQGIIWKRPTELCPSPQFIVGGATRTDICQGGLGDCWLLAAIASLTLNEELLYRVVPRD

SEQ ID NO: 5541 - protein, 85 aa, Homo sapiens
QDFQENYAGIFHFQFWQYGEWVEVVIDDRLPTKNGQLLFLHSEQGNEFWSALLEKAYAKLNGCYEALAGGSTVEGFEDFTGGISE

SEQ ID NO: 5542 - protein, 85 aa, Homo sapiens
FYDLKKPPANLYQIIRKALCAGSLLGCSIDVSSAAEAEAITSQKLVKSHAYSVTGVEEVNFQGHPEKLIRLRNPWGEVEWSGAWS

SEQ ID NO: 5543 - protein, 85 aa, Homo sapiens
AEGSVMFSDVSIDFSQEEWDCLDPVQRDLYRDVMLENYGNLVSMGLYTPKPQVISLLEQGKEPWMVGRELTRGLCSDLESMCETK

SEQ ID NO: 5544 - protein, 85 aa, Homo sapiens
LLSLKKEVYEIELCQREIMGLTKHGLEYSSFGDVLEYRSHLAKQLGYPNGHFSQEIFTPEYMPTFIQQTFLTLHQIINNEDRPYE

SEQ ID NO: 5545 - protein, 85 aa, Homo sapiens
CKKCGKAFSQNSQFIQHQRIHIGEKSYECKECGKFFSCGSHVTRHLKIHTGEKPFECKECGKAFSCSSYLSQHQRIHTGKKPYEC

SEQ ID NO: 5546 - protein, 85 aa, Homo sapiens
KECGKAFSYCSNLIDHQRIHTGEKPYECKVCGKAFTKSSQLFQHARIHTGEKPYECKECGKAFTQSSKLVQHQRIHTGEKPYECK

SEQ ID NO: 5547 - protein, 85 aa, Homo sapiens
ECGKAFSSGSALTNHQRIHTGEKPYDCKECGKAFTQSSQLRQHQRIHAGEKPFECLECGKAFTQNSQLFQHQRIHTDEKPYECNE

SEQ ID NO: 5548 - protein, 84 aa, Homo sapiens
KPFECLECGKAFTQNSQLFQHQRIHTDEKPYECNECGKAFNKCSNLTRHLRIHTGEKPYNCKECGKAFSSGSDLIRHQGIHTNK

SEQ ID NO: 5549 - protein, 85 aa, Homo sapiens
SMGLYTPKPQVISLLEQGKEPWMVGRELTRGLCSDLESMCETKLLSLKKEVYEIELCQREIMGLTKHGLEYSSFGDVLEYRSHLA

SEQ ID NO: 5550 - protein, 85 aa, Homo sapiens
KQLGYPNGHFSQEIFTPEYMPTFIQQTFLTLHQIINNEDRPYECKKCGKAFSQNSQFIQHQRIHIGEKSYECKECGKFFSCGSHV

SEQ ID NO: 5551 - protein, 85 aa, Homo sapiens
TRHLKIHTGEKPFECKECGKAFSCSSYLSQHQRIHTGKKPYECKECGKAFSYCSNLIDHQRIHTGEKPYECKVCGKAFTKSSQLF

SEQ ID NO: 5552 - protein, 85 aa, Homo sapiens
QHARIHTGEKPYECKECGKAFTQSSKLVQHQRIHTGEKPYECKECGKAFSSGSALTNHQRIHTGEKPYDCKECGKAFTQSSQLRQ

SEQ ID NO: 5553 - protein, 85 aa, Homo sapiens
HQRIHAGEKPFECLECGKAFTQNSQLFQHQRIHTDEKPYECNECGKAFNKCSNLTRHLRIHTGEKPYNCKECGKAFSSGSDLIRH

SEQ ID NO: 5554 - protein, 85 aa, Homo sapiens
SARGEGAGQPSTSAQGQPAAPAPQKRGRGRPRKQQQEPTGEPSPKRPRGRPKGSKNKSPSKAAQKKAEATGEKRPRGRPRKWDNL

SEQ ID NO: 5555 - protein, 84 aa, Homo sapiens
APQKRGRGRPRKQQQEPTGEPSPKRPRGRPKGSKNKSPSKAAQKKAEATGEKRPRGRPRKWDNLLPRTSSKKKTSLGNSTKRSH

SEQ ID NO: 5556 - protein, 85 aa, Homo sapiens
PKRKAEGDAKGDKAKVKDEPQRRSARLSAKPAPPKPEPKPKKAPAKKGEKVPKGKKGKADAGKEGNNPAENGDAKTDQAQKAEGA

SEQ ID NO: 5557 - protein, 84 aa, Homo sapiens
EGDAKGDKAKVKDEPQRRSARLSAKPAPPKPEPKPKKAPAKKGEKVPKGKKGKADAGKEGNNPAENGDAKTDQAQKAEGAGDAK

SEQ ID NO: 5558 - protein, 85 aa, Homo sapiens
SRRKQGNPQHLSQRELITPEADHVEAAILEEDEGLEIEEPSGLGLMVGGPDPDLLTCGQCQMNFPLGDILVFIEHKRKQCGGSLG

SEQ ID NO: 5559 - protein, 85 aa, Homo sapiens
ACYDKALDKDSPPPSSRSELRKVSEPVEIGIQVTPDEDDHLLSPTKGICPKQENIAGKDEPSSYICTTCKQPFNSAWFLLQHAQN

SEQ ID NO: 5560 - protein, 85 aa, Homo sapiens
THGFRIYLEPGPASSSLTPRLTIPPPLGPEAVAQSPLMNFLGDSNPFNLLRMTGPILRDHPGFGEGRLPGTPPLFSPPPRHHLDP

SEQ ID NO: 5561 - protein, 85 aa, Homo sapiens
HRLSAEEMGLVAQHPSAFDRVMRLNPMAIDSPAMDFSRRLRELAGNSSTPPPVSPGRGNPMHRLLNPFQPSPKSPFLSTPPLPPM

SEQ ID NO: 5562 - protein, 85 aa, Homo sapiens
PPGGTPPPQPPAKSKSCEFCGKTFKFQSNLIVHRRSHTGEKPYKCQLCDHACSQASKLKRHMKTHMHKAGSLAGRSDDGLSAASS

SEQ ID NO: 5563 - protein, 85 aa, Homo sapiens
PEPGTSELAGEGLKAADGDFRHHESDPSLGHEPEEEDEEEEEEEEELLLENESRPESSFSMDSELSRNRENGGGGVPGVPGAGGG

SEQ ID NO: 5564 - protein, 85 aa, Homo sapiens
AAKALADEKALVLGKVMENVGLGALPQYGELLADKQKRGAFLKRAAGGGDAGDDDDAGGCGDAGAGGAVNGRGGGFAPGTEPFPG

SEQ ID NO: 5565 - protein, 85 aa, Homo sapiens
LFPRKPAPLPSPGLNSAAKRIKVEKDLELPPAALIPSENVYSQWLVGYAASRHFMKDPFLGFTDARQSPFATSSEHSSENGSLRF

SEQ ID NO: 5566 - protein, 85 aa, Homo sapiens
STPPGDLLDGGLSGRSGTASGGSTPHLGGPGPGRPSSKEGRRSDTCEYCGKVFKNCSNLTVHRRSHTGERPYKCELCNYACAQSS

SEQ ID NO: 5567 - protein, 84 aa, Homo sapiens [sequence omitted]

SEQ ID NO: 5568 - protein, 85 aa, Homo sapiens
MGLMVGGPDPDLLTCGQCQMNFPLGDILVFIEHKRKQCGGSLGACYDKALDKDSPPPSSRSELRKVSEPVEIGIQVTPDEDDHLL

SEQ ID NO: 5569 - protein, 85 aa, Homo sapiens
SPTKGICPKQENIAGKDEPSSYICTTCKQPFNSAWFLLQHAQNTHGFRIYLEPGPASSSLTPRLTIPPPLGPEAVAQSPLMNFLG

SEQ ID NO: 5570 - protein, 85 aa, Homo sapiens
DSNPFNLLRMTGPILRDHPGFGEGRLPGTPPLFSPPPRHHLDPHRLSAEEMGLVAQHPSAFDRVMRLNPMAIDSPAMDFSRRLRE

SEQ ID NO: 5571 - protein, 85 aa, Homo sapiens
MAGNSSTPPPVSPGRGNPMHRLLNPFQPSPKSPFLSTPPLPPMPPGGTPPPQPPAKSKSCEFCGKTFKFQSNLIVHRRSHTGEKP

SEQ ID NO: 5572 - protein, 85 aa, Homo sapiens
YKCQLCDHACSQASKLKRHMKTHMHKAGSLAGRSDDGLSAASSPEPGTSELAGEGLKAADGDFRHHESDPSLGHEPEEEDEEEEE

SEQ ID NO: 5573 - protein, 85 aa, Homo sapiens
EEEELLLENESRPESSFSMDSELSRNRENGGGGVPGVPGAGGGAAKALADEKALVLGKVMENVGLGALPQYGELLADKQKRGAFL

SEQ ID NO: 5574 - protein, 85 aa, Homo sapiens
KRAAGGGDAGDDDDAGGCGDAGAGGAVNGRGGGFAPGTEPFPGLFPRKPAPLPSPGLNSAAKRIKVEKDLELPPAALIPSENVYS

SEQ ID NO: 5575 - protein, 85 aa, Homo sapiens
QWLVGYAASRHFMKDPFLGFTDARQSPFATSSEHSSENGSLRFSTPPGDLLDGGLSGRSGTASGGSTPHLGGPGPGRPSSKEGRR

SEQ ID NO: 5576 - protein, 85 aa, Homo sapiens
SDTCEYCGKVFKNCSNLTVHRRSHTGERPYKCELCNYACAQSSKLTRHMKTHGQIGKEVYRCDICQMPFSVYSTLEKHMKKWHGE

SEQ ID NO: 5577 - protein, 85 aa, Homo sapiens
ACYDKALDKDSPPPSSRSELRKVSEPVEIGIQVTPDEDDHLLSPTKGICPKQENIAGPCRPAQLPAVAPIAASSHPHSSVITSPL

SEQ ID NO: 5578 - protein, 85 aa, Homo sapiens
RALGALPPCLPLPCCSARPVSGDGTQGEGQTEAPFGCQCQLSGKDEPSSYICTTCKQPFNSAWFLLQHAQNTHGFRIYLEPGPAS

SEQ ID NO: 5579 - protein, 85 aa, Homo sapiens
SSLTPRLTIPPPLGPEAVAQSPLMNFLGDSNPFNLLRMTGPILRDHPGFGEGRLPGTPPLFSPPPRHHLDPHRLSAEEMGLVAQH

SEQ ID NO: 5580 - protein, 85 aa, Homo sapiens
PSAFDRVMRLNPMAIDSPAMDFSRRLRELAGNSSTPPPVSPGRGNPMHRLLNPFQPSPKSPFLSTPPLPPMPPGGTPPPQPPAKS

SEQ ID NO: 5581 - protein, 85 aa, Homo sapiens
KSCEFCGKTFKFQSNLIVHRRSHTGEKPYKCQLCDHACSQASKLKRHMKTHMHKAGSLAGRSDDGLSAASSPEPGTSELAGEGLK

SEQ ID NO: 5582 - protein, 85 aa, Homo sapiens
AADGDFRHHESDPSLGHEPEEEDEEEEEEEEELLLENESRPESSFSMDSELSRNRENGGGGVPGVPGAGGGAAKALADEKALVLG

SEQ ID NO: 5583 - protein, 85 aa, Homo sapiens
KVMENVGLGALPQYGELLADKQKRGAFLKRAAGGGDAGDDDDAGGCGDAGAGGAVNGRGGGFAPGTEPFPGLFPRKPAPLPSPGL

SEQ ID NO: 5584 - protein, 85 aa, Homo sapiens
NSAAKRIKVEKDLELPPAALIPSENVYSQWLVGYAASRHFMKDPFLGFTDARQSPFATSSEHSSENGSLRFSTPPGDLLDGGLSG

SEQ ID NO: 5585 - protein, 85 aa, Homo sapiens
RSGTASGGSTPHLGGPGPGRPSSKEGRRSDTCEYCGKVFKNCSNLTVHRRSHTGERPYKCELCNYACAQSSKLTRHMKTHGQIGK

SEQ ID NO: 5586 - protein, 85 aa, Homo sapiens
SPTKGICPKQENIAGPCRPAQLPAVAPIAASSHPHSSVITSPLRALGALPPCLPLPCCSARPVSGDGTQGEGQTEAPFGCQCQLS

SEQ ID NO: 5587 - protein, 85 aa, Homo sapiens
GKDEPSSYICTTCKQPFNSAWFLLQHAQNTHGFRIYLEPGPASSSLTPRLTIPPPLGPEAVAQSPLMNFLGDSNPFNLLRMTGPI

SEQ ID NO: 5588 - protein, 85 aa, Homo sapiens
MRDHPGFGEGRLPGTPPLFSPPPRHHLDPHRLSAEEMGLVAQHPSAFDRVMRLNPMAIDSPAMDFSRRLRELAGNSSTPPPVSPG

SEQ ID NO: 5589 - protein, 85 aa, Homo sapiens
RGNPMHRLLNPFQPSPKSPFLSTPPLPPMPPGGTPPPQPPAKSKSCEFCGKTFKFQSNLIVHRRSHTGEKPYKCQLCDHACSQAS

SEQ ID NO: 5590 - protein, 85 aa, Homo sapiens
KLKRHMKTHMHKAGSLAGRSDDGLSAASSPEPGTSELAGEGLKAADGDFRHHESDPSLGHEPEEEDEEEEEEEEELLLENESRPE

SEQ ID NO: 5591 - protein, 85 aa, Homo sapiens
SSFSMDSELSRNRENGGGGVPGVPGAGGGAAKALADEKALVLGKVMENVGLGALPQYGELLADKQKRGAFLKRAAGGGDAGDDDD

SEQ ID NO: 5592 - protein, 85 aa, Homo sapiens
AGGCGDAGAGGAVNGRGGGFAPGTEPFPGLFPRKPAPLPSPGLNSAAKRIKVEKDLELPPAALIPSENVYSQWLVGYAASRHFMK

SEQ ID NO: 5593 - protein, 85 aa, Homo sapiens
DPFLGFTDARQSPFATSSEHSSENGSLRFSTPPGDLLDGGLSGRSGTASGGSTPHLGGPGPGRPSSKEGRRSDTCEYCGKVFKNC

SEQ ID NO: 5594 - protein, 85 aa, Homo sapiens
SNLTVHRRSHTGERPYKCELCNYACAQSSKLTRHMKTHGQIGKEVYRCDICQMPFSVYSTLEKHMKKWHGEHLLTNDVKIEQAER

SEQ ID NO: 5595 - protein, 85 aa, Homo sapiens
CPGATIGCDVKTCHRTYHYHCALHDKAQIREKPSQGIYMVYCRKHKKTAHNSEAADLEESFNEHELEPSSPKSKKKSRKGRPRKT

SEQ ID NO: 5596 - protein, 85 aa, Homo sapiens
NFKGLSEDTRSTSSHGTDEMESSSYRDRSPHRSSPSDTRPKCGFCHVGEEENEARGKLHIFNAKKAAAHYKCMLFSSGTVQLTTT

SEQ ID NO: 5597 - protein, 84 aa, Homo sapiens
YKCMLFSSGTVQLTTTSRAEFGDFDIKTVLQEIKRGKRMKCTLCSQPGATIGCEIKACVKTYHYHCGVQDKAKYIENMSRGIYK

SEQ ID NO: 5598 - protein, 85 aa, Homo sapiens
RKHKKTAHNSEAADLEESFNEHELEPSSPKSKKKSRKGRPRKTNFKGLSEDTRSTSSHGTDEMESSSYRDRSPHRSSPSDTRPKC

SEQ ID NO: 5599 - protein, 85 aa, Homo sapiens
GFCHVGEEENEARGKLHIFNAKKAAAHYKCMLFSSGTVQLTTTSRAEFGDFDIKTVLQEIKRGKRMKCTLCSQPGATIGCEIKAC

SEQ ID NO: 5600 - protein, 85 aa, Homo sapiens
VIFRWWKISLRSEYRSTKPGEAKETHEDFLENSHLQGQTALIFGARILDYVINLCKGKFDFLERLSDDLLLTIISYLDLEDIARL

SEQ ID NO: 5601 - protein, 85 aa, Homo sapiens
FGARILDYVINLCKGKFDFLERLSDDLLLTIISYLDLEDIARLCQTSHRFAKLCMSDKLWEQIVQSTCDTITPDVRALAEDTGWR

SEQ ID NO: 5602 - protein, 85 aa, Homo sapiens
PHIDNDVKLDFKDVLLRPKRSTLKSRSEVDLTRSFSFRNSKQTYSGVPIIAANMDTVGTFEMAKVLCKFSLFTAVHKHYSLVQWQ

SEQ ID NO: 5603 - protein, 85 aa, Homo sapiens
EFAGQNPDCLEHLAASSGTGSSDFEQLEQILEAIPQVKYICLDVANGYSEHFVEFVKDVRKRFPQHTIMAGNVVTGEMVEELILS

SEQ ID NO: 5604 - protein, 85 aa, Homo sapiens
GADIIKVGIGPGSVCTTRKKTGVGYPQLSAVMECADAAHGLKGHIISDGGCSCPGDVAKAFGAGADFVMLGGMLAGHSESGGELI

SEQ ID NO: 5605 - protein, 85 aa, Homo sapiens
ERDGKKYKLFYGMSSEMAMKKYAGGVAEYRASEGKTVEVPFKGDVEHTIRDILGGIRSTCTYVGAAKLKELSRRTTFIRVTQQVN

SEQ ID NO: 5606 - protein, 84 aa, Homo sapiens
LFYGMSSEMAMKKYAGGVAEYRASEGKTVEVPFKGDVEHTIRDILGGIRSTCTYVGAAKLKELSRRTTFIRVTQQVNPIFSEAC

SEQ ID NO: 5607 - protein, 85 aa, Homo sapiens
TYSGVPIIAANMDTVGTFEMAKVLCKFSLFTAVHKHYSLVQWQEFAGQNPDCLEHLAASSGTGSSDFEQLEQILEAIPQVKYICL

SEQ ID NO: 5608 - protein, 85 aa, Homo sapiens
DVANGYSEHFVEFVKDVRKRFPQHTIMAGNVVTGEMVEELILSGADIIKVGIGPGSVCTTRKKTGVGYPQLSAVMECADAAHGLK

SEQ ID NO: 5609 - protein, 85 aa, Homo sapiens
GHIISDGGCSCPGDVAKAFGAGADFVMLGGMLAGHSESGGELIERDGKKYKLFYGMSSEMAMKKYAGGVAEYRASEGKTVEVPFK

SEQ ID NO: 5610 - protein, 85 aa, Homo sapiens
SETAPAAPAAAPPAEKAPVKKKAAKKAGGTPRKASGPPVSELITKAVAASKERSGVSLAALKKALAAAGYDVEKNNSRIKLGLKS

SEQ ID NO: 5611 - protein, 85 aa, Homo sapiens
MVSKGTLVQTKGTGASGSFKLNKKAASGEAKPKVKKAGGTKPKKPVGAAKKPKKAAGGATPKKSAKKTPKKAKKPAAATVTKKVA

SEQ ID NO: 5612 - protein, 84 aa, Homo sapiens
KPVGAAKKPKKAAGGATPKKSAKKTPKKAKKPAAATVTKKVAKSPKKAKVAKPKKAAKSAAKAVKPKAAKPKVVKPKKAAPKKK

SEQ ID NO: 5613 - protein, 85 aa, Homo sapiens
ITKAVAASKERSGVSLAALKKALAAAGYDVEKNNSRIKLGLKSLVSKGTLVQTKGTGASGSFKLNKKAASGEAKPKVKKAGGTKP

SEQ ID NO: 5614 - protein, 85 aa, Homo sapiens
KKPVGAAKKPKKAAGGATPKKSAKKTPKKAKKPAAATVTKKVAKSPKKAKVAKPKKAAKSAAKAVKPKAAKPKVVKPKKAAPKKK

SEQ ID NO: 5615 - protein, 85 aa, Homo sapiens
VDELVLLLHALLMRHRALSIENSQLMEQLRLLVCERASLLRQVRPPSCPVPFPETFNGESSRLPEFIVQTASYMLVNENRFCNDA

SEQ ID NO: 5616 - protein, 84 aa, Homo sapiens
RLPEFIVQTASYMLVNENRFCNDAMKVAFLISLLTGEAEEWVVPYIEMDSPILGDYRAFLDEMKQCFGWDDDEDDDDEEEEDDY

SEQ ID NO: 5617 - protein, 85 aa, Homo sapiens
VRPPSCPVPFPETFNGESSRLPEFIVQTASYMLVNENRFCNDAMKVAFLISLLTGEAEEWVVPYIEMDSPILGDYRAFLDEMKQC

SEQ ID NO: 5618 - protein, 85 aa, Homo sapiens
TAAGHHAEVVVDPEDERAIEMFMNKNPPARRTLADIIMEKLTEKQTEVETVMSEVSGFPMPQLDPRVLEVYRGVREVLSKYRSGK

SEQ ID NO: 5619 - protein, 85 aa, Homo sapiens
MPKAFKIIPALSNWEQILYVTEPEAWTAAAMYQATRIFASNLKERMAQRFYNLVLLPRVRDDVAEYKRLNFHLYMALKKALFKPG

SEQ ID NO: 5620 - protein, 84 aa, Homo sapiens
ALSNWEQILYVTEPEAWTAAAMYQATRIFASNLKERMAQRFYNLVLLPRVRDDVAEYKRLNFHLYMALKKALFKPGAWFKVAAL

SEQ ID NO: 5621 - protein, 85 aa, Homo sapiens
EKQTEVETVMSEVSGFPMPQLDPRVLEVYRGVREVLSKYRSGKLPKAFKIIPALSNWEQILYVTEPEAWTAAAMYQATRIFASNL

SEQ ID NO: 5622 - protein, 85 aa, Homo sapiens
EERGDSEPTPGCSGLGPGGVRGFGDGGGAPSWAPEDAWMGTHPKYLEMMELDIGDATQVYVAFLVYLDLMESKSWHEVNCVGLPE

SEQ ID NO: 5623 - protein, 85 aa, Homo sapiens
LQLICLVGTEIEGEGLQTVVPTPITASLSHNRIREILKASRKLQGDPDLPMSFTLAIVESDSTIVYYKLTDGFMLPDPQVSFENI

SEQ ID NO: 5624 - protein, 84 aa, Homo sapiens
LVGTEIEGEGLQTVVPTPITASLSHNRIREILKASRKLQGDPDLPMSFTLAIVESDSTIVYYKLTDGFMLPDPQVSFENISLRR

SEQ ID NO: 5625 - protein, 85 aa, Homo sapiens
PKYLEMMELDIGDATQVYVAFLVYLDLMESKSWHEVNCVGLPELQLICLVGTEIEGEGLQTVVPTPITASLSHNRIREILKASRK

SEQ ID NO: 5626 - protein, 85 aa, Homo sapiens
ARKCNETAKSYCVNGGVCYYIEGINQLSCKCPNGFFGQRCLEKLPLRLYMPDPKQKAEELYQKRVLTITGICVALLVVGIVCVVA

SEQ ID NO: 5627 - protein, 85 aa, Homo sapiens
YCKTKKQRKQMHNHLRQNMCPAHQNRSLANGPSHPRLDPEEIQMADYISKNVPATDHVIRRETETTFSGSHSCSPSHHCSTATPT

SEQ ID NO: 5628 - protein, 85 aa, Homo sapiens
SSHRHESHTWSLERSESLTSDSQSGIMLSSVGTSKCNSPACVEARARRAAAYNLEERRRATAPPYHDSVDSLRDSPHSERYVSAL

SEQ ID NO: 5629 - protein, 85 aa, Homo sapiens
TTPARLSPVDFHYSLATQVPTFEITSPNSAHAVSLPPAAPISYRLAEQQPLLRHPAPPGPGPGPGPGPGPGADMQRSYDSYYYPA

SEQ ID NO: 5630 - protein, 85 aa, Homo sapiens
AGPGPRRGTCALGGSLGSLPASPFRIPEDDEYETTQECAPPPPPRPRARGASRRTSAGPRRWRRSRLNGLAAQRARAARDSLSLS

SEQ ID NO: 5631 - protein, 85 aa, Homo sapiens
KLPLRLYMPDPKQKAEELYQKRVLTITGICVALLVVGIVCVVAYCKTKKQRKQMHNHLRQNMCPAHQNRSLANGPSHPRLDPEEI

SEQ ID NO: 5632 - protein, 85 aa, Homo sapiens
QMADYISKNVPATDHVIRRETETTFSGSHSCSPSHHCSTATPTSSHRHESHTWSLERSESLTSDSQSGIMLSSVGTSKCNSPACV

SEQ ID NO: 5633 - protein, 85 aa, Homo sapiens
EARARRAAAYNLEERRRATAPPYHDSVDSLRDSPHSERYVSALTTPARLSPVDFHYSLATQVPTFEITSPNSAHAVSLPPAAPIS

SEQ ID NO: 5634 - protein, 85 aa, Homo sapiens
YRLAEQQPLLRHPAPPGPGPGPGPGPGPGADMQRSYDSYYYPAAGPGPRRGTCALGGSLGSLPASPFRIPEDDEYETTQECAPPP

SEQ ID NO: 5635 - protein, 85 aa, Homo sapiens
PPRPRARGASRRTSAGPRRWRRSRLNGLAAQRARAARDSLSLSSGSGGGSASASDDDADDADGALAAESTPFLGLRGAHDALRSD

SEQ ID NO: 5636 - protein, 85 aa, Homo sapiens
VITIIDRSFRYENESLQNGRKSTEFPRKIREQEPARRVSRSSFSSDPDESEGIPLKRRRVSFGGHLRPELFDENLPPNTPLKRGE

SEQ ID NO: 5637 - protein, 85 aa, Homo sapiens
APTKRKSLVMHTPPVLKKIIKEQPQPSGKQESGSEIHVEVKAQSLVISPPAPSPRKTPVASDQRRRSCKTAPASSSKSQTEVPKR

SEQ ID NO: 5638 - protein, 85 aa, Homo sapiens
GGRKSGNLPSKRVSISRSQHDILQMICSKRRSGASEANLIVAKSWADVVKLGAKQTQTKVIKHGPQRSMNKRQRRPATPKKPVGE

SEQ ID NO: 5639 - protein, 85 aa, Homo sapiens
VHSQFSTGHANSPCTIIIGKAHTEKVHVPARPYRVLNNFISNQKMDFKEDLSGIAEMFKTPVKEQPQLTSTCHIAISNSENLLGK

SEQ ID NO: 5640 - protein, 85 aa, Homo sapiens
QFQGTDSGEEPLLPTSESFGGNVFFSAQNAAKQPSDKCSASPPLRRQCIRENGNVAKTPRNTYKMTSLETKTSDTETEPSKTVST

SEQ ID NO: 5641 - protein, 85 aa, Homo sapiens
ANRSGRSTEFRNIQKLPVESKSEETNTEIVECILKRGQKATLLQQRREGEMKEIERPFETYKENIELKENDEKMKAMKRSRTWGQ

SEQ ID NO: 5642 - protein, 85 aa, Homo sapiens
KCAPMSDLTDLKSLPDTELMKDTARGQNLLQTQDHAKAPKSEKGKITKMPCQSLQPEPINTPTHTKQQLKASLGKVGVKEELLAV

SEQ ID NO: 5643 - protein, 85 aa, Homo sapiens
GKFTRTSGETTHTHREPAGDGKSIRTFKESPKQILDPAARVTGMKKWPRTPKEEAQSLEDLAGFKELFQTPGPSEESMTDEKTTK

SEQ ID NO: 5644 - protein, 85 aa, Homo sapiens
IACKSPPPESVDTPTSTKQWPKRSLRKADVEEEFLALRKLTPSAGKAMLTPKPAGGDEKDIKAFMGTPVQKLDLAGTLPGSKRQL

SEQ ID NO: 5645 - protein, 85 aa, Homo sapiens
QTPKEKAQALEDLAGFKELFQTPGHTEELVAAGKTTKIPCDSPQSDPVDTPTSTKQRPKRSIRKADVEGELLACRNLMPSAGKAM

SEQ ID NO: 5646 - protein, 85 aa, Homo sapiens
HTPKPSVGEEKDIIIFVGTPVQKLDLTENLTGSKRRPQTPKEEAQALEDLTGFKELFQTPGHTEEAVAAGKTTKMPCESSPPESA

SEQ ID NO: 5647 - protein, 85 aa, Homo sapiens
DTPTSTRRQPKTPLEKRDVQKELSALKKLTQTSGETTHTDKVPGGEDKSINAFRETAKQKLDPAASVTGSKRHPKTKEKAQPLED

SEQ ID NO: 5648 - protein, 85 aa, Homo sapiens
MAGLKELFQTPVCTDKPTTHEKTTKIACRSQPDPVDTPTSSKPQSKRSLRKVDVEEEFFALRKRTPSAGKAMHTPKPAVSGEKNI

SEQ ID NO: 5649 - protein, 85 aa, Homo sapiens
YAFMGTPVQKLDLTENLTGSKRRLQTPKEKAQALEDLAGFKELFQTRGHTEESMTNDKTAKVACKSSQPDPDKNPASSKRRLKTS

SEQ ID NO: 5650 - protein, 85 aa, Homo sapiens
MGKVGVKEELLAVGKLTQTSGETTHTHTEPTGDGKSMKAFMESPKQILDSAASLTGSKRQLRTPKGKSEVPEDLAGFIELFQTPS

SEQ ID NO: 5651 - protein, 85 aa, Homo sapiens
HTKESMTNEKTTKVSYRASQPDLVDTPTSSKPQPKRSLRKADTEEEFLAFRKQTPSAGKAMHTPKPAVGEEKDINTFLGTPVQKL

SEQ ID NO: 5652 - protein, 85 aa, Homo sapiens
DQPGNLPGSNRRLQTRKEKAQALEELTGFRELFQTPCTDNPTTDEKTTKKILCKSPQSDPADTPTNTKQRPKRSLKKADVEEEFL

SEQ ID NO: 5653 - protein, 85 aa, Homo sapiens
AFRKLTPSAGKAMHTPKAAVGEEKDINTFVGTPVEKLDLLGNLPGSKRRPQTPKEKAKALEDLAGFKELFQTPGHTEESMTDDKI

SEQ ID NO: 5654 - protein, 85 aa, Homo sapiens
TEVSCKSPQPDPVKTPTSSKQRLKISLGKVGVKEEVLPVGKLTQTSGKTTQTHRETAGDGKSIKAFKESAKQMLDPANYGTGMER

SEQ ID NO: 5655 - protein, 85 aa, Homo sapiens
WPRTPKEEAQSLEDLAGFKELFQTPDHTEESTTDDKTTKIACKSPPPESMDTPTSTRRRPKTPLGKRDIVEELSALKQLTQTTHT

SEQ ID NO: 5656 - protein, 85 aa, Homo sapiens
DKVPGDEDKGINVFRETAKQKLDPAASVTGSKRQPRTPKGKAQPLEDLAGLKELFQTPICTDKPTTHEKTTKIACRSPQPDPVGT

SEQ ID NO: 5657 - protein, 85 aa, Homo sapiens
PTIFKPQSKRSLRKADVEEESLALRKRTPSVGKAMDTPKPAGGDEKDMKAFMGTPVQKLDLPGNLPGSKRWPQTPKEKAQALEDL

SEQ ID NO: 5658 - protein, 85 aa, Homo sapiens
AGFKELFQTPGTDKPTTDEKTTKIACKSPQPDPVDTPASTKQRPKRNLRKADVEEEFLALRKRTPSAGKAMDTPKPAVSDEKNIN

SEQ ID NO: 5659 - protein, 85 aa, Homo sapiens
TFVETPVQKLDLLGNLPGSKRQPQTPKEKAEALEDLVGFKELFQTPGHTEESMTDDKITEVSCKSPQPESFKTSRSSKQRLKIPL

SEQ ID NO: 5660 - protein, 85 aa, Homo sapiens
VKVDMKEEPLAVSKLTRTSGETTQTHTEPTGDSKSIKAFKESPKQILDPAASVTGSRRQLRTRKEKARALEDLVDFKELFSAPGH

SEQ ID NO: 5661 - protein, 85 aa, Homo sapiens
TEESMTIDKNTKIPCKSPPPELTDTATSTKRCPKTRPRKEVKEELSAVERLTQTSGQSTHTHKEPASGDEGIKVLKQRAKKKPNP

SEQ ID NO: 5662 - protein, 85 aa, Homo sapiens
VEEEPSRRRPRAPKEKAQPLEDLAGFTELSETSGHTQESLTAGKATKIPCESPPLEVVDTTASTKRHLRTRVQKVQVKEEPSAVK

SEQ ID NO: 5663 - protein, 85 aa, Homo sapiens
FTQTSGETTDADKEPAGEDKGIKALKESAKQTPAPAASVTGSRRRPRAPRESAQAIEDLAGFKDPAAGHTEESMTDDKTTKIPCK

SEQ ID NO: 5664 - protein, 85 aa, Homo sapiens
SSPELEDTATSSKRRPRTRAQKVEVKEELLAVGKLTQTSGETTHTDKEPVGEGKGTKAFKQPAKRKLDAEDVIGSRRQPRAPKEK

SEQ ID NO: 5665 - protein, 85 aa, Homo sapiens
AQPLEDLASFQELSQTPGHTEELANGAADSFTSAPKQTPDSGKPLKISRRVLRAPKVEPVGDVVSTRDPVKSQSKSNTSLPPLPF

SEQ ID NO: 5666 - protein, 85 aa, Homo sapiens
KRGGGKDGSVTGTKRLRCMPAPEEIVEELPASKKQRVAPRARGKSSEPVVIMKRSLRTSAKRIEPAEELNSNDMKTNKEEHKLQD

SEQ ID NO: 5667 - protein, 85 aa, Homo sapiens
SVPENKGISLRSRRQNKTEAEQQITEVFVLAERIEINRNEKKPMKTSPEMDIQNPDDGARKPIPRDKVTENKRCLRSARQNESSQ

SEQ ID NO: 5668 - protein, 85 aa, Homo sapiens
PKVAEESGGQKSAKVLMQNQKGKGEAGNSDSMCLRSRKTKSQPAASTLESKSVQRVTRSVKRCAENPKKAEDNVCVKKIRTRSHR

SEQ ID NO: 5669 - protein, 85 aa, Homo sapiens
FSSDPDESEGIPLKRRRVSFGGHLRPELFDENLPPNTPLKRGEAPTKRKSLVMHTPPVLKKIIKEQPQPSGKQESGSEIHVEVKA

SEQ ID NO: 5670 - protein, 85 aa, Homo sapiens
QSLVISPPAPSPRKTPVASDQRRRSCKTAPASSSKSQTEVPKRGGRKSGNLPSKRVSISRSQHDILQMICSKRRSGASEANLIVA

SEQ ID NO: 5671 - protein, 85 aa, Homo sapiens
KSWADVVKLGAKQTQTKVIKHGPQRSMNKRQRRPATPKKPVGEVHSQFSTGHANSPCTIIIGKAHTEKVHVPARPYRVLNNFISN

SEQ ID NO: 5672 - protein, 85 aa, Homo sapiens
QKMDFKEDLSGIAEMFKTPVKEQPQLTSTCHIAISNSENLLGKQFQGTDSGEEPLLPTSESFGGNVFFSAQNAAKQPSDKCSASP

SEQ ID NO: 5673 - protein, 85 aa, Homo sapiens
PLRRQCIRENGNVAKTPRNTYKMTSLETKTSDTETEPSKTVSTANRSGRSTEFRNIQKLPVESKSEETNTEIVECILKRGQKATL

SEQ ID NO: 5674 - protein, 85 aa, Homo sapiens
LQQRREGEMKEIERPFETYKENIELKENDEKMKAMKRSRTWGQKCAPMSDLTDLKSLPDTELMKDTARGQNLLQTQDHAKAPKSE

SEQ ID NO: 5675 - protein, 85 aa, Homo sapiens
KGKITKMPCQSLQPEPINTPTHTKQQLKASLGKVGVKEELLAVGKFTRTSGETTHTHREPAGDGKSIRTFKESPKQILDPAARVT

SEQ ID NO: 5676 - protein, 85 aa, Homo sapiens
GMKKWPRTPKEEAQSLEDLAGFKELFQTPGPSEESMTDEKTTKIACKSPPPESVDTPTSTKQWPKRSLRKADVEEEFLALRKLTP

SEQ ID NO: 5677 - protein, 85 aa, Homo sapiens
SAGKAMLTPKPAGGDEKDIKAFMGTPVQKLDLAGTLPGSKRQLQTPKEKAQALEDLAGFKELFQTPGHTEELVAAGKTTKIPCDS

SEQ ID NO: 5678 - protein, 85 aa, Homo sapiens
PQSDPVDTPTSTKQRPKRSIRKADVEGELLACRNLMPSAGKAMHTPKPSVGEEKDIIIFVGTPVQKLDLTENLTGSKRRPQTPKE

SEQ ID NO: 5679 - protein, 85 aa, Homo sapiens
EAQALEDLTGFKELFQTPGHTEEAVAAGKTTKMPCESSPPESADTPTSTRRQPKTPLEKRDVQKELSALKKLTQTSGETTHTDKV

SEQ ID NO: 5680 - protein, 85 aa, Homo sapiens
PGGEDKSINAFRETAKQKLDPAASVTGSKRHPKTKEKAQPLEDLAGLKELFQTPVCTDKPTTHEKTTKIACRSQPDPVDTPTSSK

SEQ ID NO: 5681 - protein, 85 aa, Homo sapiens
PQSKRSLRKVDVEEEFFALRKRTPSAGKAMHTPKPAVSGEKNIYAFMGTPVQKLDLTENLTGSKRRLQTPKEKAQALEDLAGFKE

SEQ ID NO: 5682 - protein, 85 aa, Homo sapiens
LFQTRGHTEESMTNDKTAKVACKSSQPDPDKNPASSKRRLKTSLGKVGVKEELLAVGKLTQTSGETTHTHTEPTGDGKSMKAFME

SEQ ID NO: 5683 - protein, 85 aa, Homo sapiens
SPKQILDSAASLTGSKRQLRTPKGKSEVPEDLAGFIELFQTPSHTKESMTNEKTTKVSYRASQPDLVDTPTSSKPQPKRSLRKAD

SEQ ID NO: 5684 - protein, 85 aa, Homo sapiens
TEEEFLAFRKQTPSAGKAMHTPKPAVGEEKDINTFLGTPVQKLDQPGNLPGSNRRLQTRKEKAQALEELTGFRELFQTPCTDNPT

SEQ ID NO: 5685 - protein, 85 aa, Homo sapiens
TDEKTTKKILCKSPQSDPADTPTNTKQRPKRSLKKADVEEEFLAFRKLTPSAGKAMHTPKAAVGEEKDINTFVGTPVEKLDLLGN

SEQ ID NO: 5686 - protein, 85 aa, Homo sapiens
LPGSKRRPQTPKEKAKALEDLAGFKELFQTPGHTEESMTDDKITEVSCKSPQPDPVKTPTSSKQRLKISLGKVGVKEEVLPVGKL

SEQ ID NO: 5687 - protein, 85 aa, Homo sapiens
TQTSGKTTQTHRETAGDGKSIKAFKESAKQMLDPANYGTGMERWPRTPKEEAQSLEDLAGFKELFQTPDHTEESTTDDKTTKIAC

SEQ ID NO: 5688 - protein, 85 aa, Homo sapiens
KSPPPESMDTPTSTRRRPKTPLGKRDIVEELSALKQLTQTTHTDKVPGDEDKGINVFRETAKQKLDPAASVTGSKRQPRTPKGKA

SEQ ID NO: 5689 - protein, 85 aa, Homo sapiens
QPLEDLAGLKELFQTPICTDKPTTHEKTTKIACRSPQPDPVGTPTIFKPQSKRSLRKADVEEESLALRKRTPSVGKAMDTPKPAG

SEQ ID NO: 5690 - protein, 85 aa, Homo sapiens
GDEKDMKAFMGTPVQKLDLPGNLPGSKRWPQTPKEKAQALEDLAGFKELFQTPGTDKPTTDEKTTKIACKSPQPDPVDTPASTKQ

SEQ ID NO: 5691 - protein, 85 aa, Homo sapiens
RPKRNLRKADVEEEFLALRKRTPSAGKAMDTPKPAVSDEKNINTFVETPVQKLDLLGNLPGSKRQPQTPKEKAEALEDLVGFKEL

SEQ ID NO: 5692 - protein, 85 aa, Homo sapiens
FQTPGHTEESMTDDKITEVSCKSPQPESFKTSRSSKQRLKIPLVKVDMKEEPLAVSKLTRTSGETTQTHTEPTGDSKSIKAFKES

SEQ ID NO: 5693 - protein, 85 aa, Homo sapiens
PKQILDPAASVTGSRRQLRTRKEKARALEDLVDFKELFSAPGHTEESMTIDKNTKIPCKSPPPELTDTATSTKRCPKTRPRKEVK

SEQ ID NO: 5694 - protein, 85 aa, Homo sapiens
EELSAVERLTQTSGQSTHTHKEPASGDEGIKVLKQRAKKKPNPVEEEPSRRRPRAPKEKAQPLEDLAGFTELSETSGHTQESLTA

SEQ ID NO: 5695 - protein, 85 aa, Homo sapiens
GKATKIPCESPPLEVVDTTASTKRHLRTRVQKVQVKEEPSAVKFTQTSGETTDADKEPAGEDKGIKALKESAKQTPAPAASVTGS

SEQ ID NO: 5696 - protein, 85 aa, Homo sapiens
RRRPRAPRESAQAIEDLAGFKDPAAGHTEESMTDDKTTKIPCKSSPELEDTATSSKRRPRTRAQKVEVKEELLAVGKLTQTSGET

SEQ ID NO: 5697 - protein, 85 aa, Homo sapiens
THTDKEPVGEGKGTKAFKQPAKRKLDAEDVIGSRRQPRAPKEKAQPLEDLASFQELSQTPGHTEELANGAADSFTSAPKQTPDSG

SEQ ID NO: 5698 - protein, 85 aa, Homo sapiens
KPLKISRRVLRAPKVEPVGDVVSTRDPVKSQSKSNTSLPPLPFKRGGGKDGSVTGTKRLRCMPAPEEIVEELPASKKQRVAPRAR

SEQ ID NO: 5699 - protein, 85 aa, Homo sapiens
GKSSEPVVIMKRSLRTSAKRIEPAEELNSNDMKTNKEEHKLQDSVPENKGISLRSRRQNKTEAEQQITEVFVLAERIEINRNEKK

SEQ ID NO: 5700 - protein, 85 aa, Homo sapiens
PMKTSPEMDIQNPDDGARKPIPRDKVTENKRCLRSARQNESSQPKVAEESGGQKSAKVLMQNQKGKGEAGNSDSMCLRSRKTKSQ

SEQ ID NO: 5701 - protein, 85 aa, Homo sapiens
NLSPDSLSSEEVHKWNLVLFNGHWTRGSTAGGCQNYPATYWTNPQFKIRLDEVDEDQEESIGEPCCTVLLGLMQKNRRWRKRIGQ

SEQ ID NO: 5702 - protein, 85 aa, Homo sapiens
GMLSIGYAVYQVPKELESHTDAHLGRDFFLAYQPSARTSTYVNLREVSGRARLPPGEYLVVPSTFEPFKDGEFCLRVFSEKKAQA

SEQ ID NO: 5703 - protein, 85 aa, Homo sapiens
LEIGDVVAGNPYEPHPSEVDQEDDQFRRLFEKLAGKDSEITANALKILLNEAFSKRTDIKFDGFNINTCREMISLLDSNGTGTLG

SEQ ID NO: 5704 - protein, 85 aa, Homo sapiens
AVEFKTLWLKIQKYLEIYWETDYNHSGTIDAHEMRTALRKAGFTLNSQVQQTIALRYACSKLGINFDSFVACMIRLETLFKLFSL

SEQ ID NO: 5705 - protein, 84 aa, Homo sapiens
NHSGTIDAHEMRTALRKAGFTLNSQVQQTIALRYACSKLGINFDSFVACMIRLETLFKLFSLLDEDKDGMVQLSLAEWLCCVLV

SEQ ID NO: 5706 - protein, 85 aa, Homo sapiens
DDAPEWNHIDPRRKEELDKKVEDGEFWMSLSDFVRQFSRLEICNLSPDSLSSEEVHKWNLVLFNGHWTRGSTAGGCQNYPATYWT

SEQ ID NO: 5707 - protein, 85 aa, Homo sapiens
NPQFKIRLDEVDEDQEESIGEPCCTVLLGLMQKNRRWRKRIGQGMLSIGYAVYQVPKELESHTDAHLGRDFFLAYQPSARTSTYV

SEQ ID NO: 5708 - protein, 85 aa, Homo sapiens
NLREVSGRARLPPGEYLVVPSTFEPFKDGEFCLRVFSEKKAQALEIGDVVAGNPYEPHPSEVDQEDDQFRRLFEKLAGKDSEITA

SEQ ID NO: 5709 - protein, 85 aa, Homo sapiens
NALKILLNEAFSKRTDIKFDGFNINTCREMISLLDSNGTGTLGAVEFKTLWLKIQKYLEIYWETDYNHSGTIDAHEMRTALRKAG

SEQ ID NO: 5710 - protein, 85 aa, Homo sapiens
SNRNNNKLPSNLPQLQNLIKRDPPAYIEEFLQQYNHYKSNVEIFKLQPNKPSKELAELVMFMAQISHCYPEYLSNFPQEVKDLLS

SEQ ID NO: 5711 - protein, 85 aa, Homo sapiens
CNHTVLDPDLRMTFCKALILLRNKNLINPSSLLELFFELFRCHDKLLRKTLYTHIVTDIKNINAKHKNNKVNVVLQNFMYTMLRD

SEQ ID NO: 5712 - protein, 85 aa, Homo sapiens
SNATAAKMSLDVMIELYRRNIWNDAKTVNVITTACFSKVTKILVAALTFFLGKDEDEKQDSDSESEDDGPTARDLLVQYATGKKS

SEQ ID NO: 5713 - protein, 85 aa, Homo sapiens
SKNKKKLEKAMKVLKKQKKKKKPEVFNFSAIHLIHDPQDFAEKLLKQLECCKERFEVKMMLMNLISRLVGIHELFLFNFYPFLQR

SEQ ID NO: 5714 - protein, 85 aa, Homo sapiens
FLQPHQREVTKILLFAAQASHHLVPPEIIQSLLMTVANNFVTDKNSGEVMTVGINAIKEITARCPLAMTEELLQDLAQYKTHKDK

SEQ ID NO: 5715 - protein, 85 aa, Homo sapiens
NVMMSARTLIHLFRTLNPQMLQKKFRGKPTEASIEARVQEYGELDAKDYIPGAEVLEVEKEENAENDEDGWESTSLSEEEDADGE

SEQ ID NO: 5716 - protein, 85 aa, Homo sapiens
WIDVQHSSDEEQQEISKKLNSMPMEERKAKAAAISTSRVLTQEDFQKIRMAQMRKELDAAPGKSQKRKYIEIDSDEEPRGELLSL

SEQ ID NO: 5717 - protein, 85 aa, Homo sapiens
RDIERLHKKPKSDKETRLATAMAGKTDRKEFVRKKTKTNPFSSSTNKEKKKQKNFMMMRYSQNVRSKNKRSFREKQLALRDALLK

SEQ ID NO: 5718 - protein, 84 aa, Homo sapiens
KKPKSDKETRLATAMAGKTDRKEFVRKKTKTNPFSSSTNKEKKKQKNFMMMRYSQNVRSKNKRSFREKQLALRDALLKKRKRMK

SEQ ID NO: 5719 - protein, 85 aa, Homo sapiens
IFKLQPNKPSKELAELVMFMAQISHCYPEYLSNFPQEVKDLLSCNHTVLDPDLRMTFCKALILLRNKNLINPSSLLELFFELFRC

SEQ ID NO: 5720 - protein, 85 aa, Homo sapiens
HDKLLRKTLYTHIVTDIKNINAKHKNNKVNVVLQNFMYTMLRDSNATAAKMSLDVMIELYRRNIWNDAKTVNVITTACFSKVTKI

SEQ ID NO: 5721 - protein, 85 aa, Homo sapiens
LVAALTFFLGKDEDEKQDSDSESEDDGPTARDLLVQYATGKKSSKNKKKLEKAMKVLKKQKKKKKPEVFNFSAIHLIHDPQDFAE

SEQ ID NO: 5722 - protein, 85 aa, Homo sapiens
KLLKQLECCKERFEVKMMLMNLISRLVGIHELFLFNFYPFLQRFLQPHQREVTKILLFAAQASHHLVPPEIIQSLLMTVANNFVT

SEQ ID NO: 5723 - protein, 85 aa, Homo sapiens
DKNSGEVMTVGINAIKEITARCPLAMTEELLQDLAQYKTHKDKNVMMSARTLIHLFRTLNPQMLQKKFRGKPTEASIEARVQEYG

SEQ ID NO: 5724 - protein, 85 aa, Homo sapiens
ELDAKDYIPGAEVLEVEKEENAENDEDGWESTSLSEEEDADGEWIDVQHSSDEEQQEISKKLNSMPMEERKAKAAAISTSRVLTQ

SEQ ID NO: 5725 - protein, 85 aa, Homo sapiens
EDFQKIRMAQMRKELDAAPGKSQKRKYIEIDSDEEPRGELLSLRDIERLHKKPKSDKETRLATAMAGKTDRKEFVRKKTKTNPFS

SEQ ID NO: 5726 - protein, 85 aa, Homo sapiens
AEIKEKICDYLFNVSDSSALNLAKNIGLTKARDINAVLIDMERQGDVYRQGTTPPIWHLTDKKRERMQIKRNTNSVPETAPAAIP

SEQ ID NO: 5727 - protein, 85 aa, Homo sapiens
ETKRNAEFLTCNIPTSNASNNMVTTEKVENGQEPVIKLENRQEARPEPARLKPPVHYNGPSKAGYVDFENGQWATDDIPDDLNSI

SEQ ID NO: 5728 - protein, 85 aa, Homo sapiens
RAAPGEFRAIMEMPSFYSHGLPRCSPYKKLTECQLKNPISGLLEYAQFASQTCEFNMIEQSGPPHEPRFKFQVVINGREFPPAEA

SEQ ID NO: 5729 - protein, 85 aa, Homo sapiens
GSKKVAKQDAAMKAMTILLEEAKAKDSGKSEESSHYSTEKESEKTAESQTPTPSATSFFSGKSPVTTLLECMHKLGNSCEFRLLS

SEQ ID NO: 5730 - protein, 85 aa, Homo sapiens
KEGPAHEPKFQYCVAVGAQTFPSVSAPSKKVAKQMAAEEAMKALHGEATNSMASDNQPEGMISESLDNLESMMPNKVRKIGELVR

SEQ ID NO: 5731 - protein, 85 aa, Homo sapiens
YLNTNPVGGLLEYARSHGFAAEFKLVDQSGPPHEPKFVYQAKVGGRWFPAVCAHSKKQGKQEAADAALRVLIGENEKAERMGFTE

SEQ ID NO: 5732 - protein, 85 aa, Homo sapiens
VTPVTGASLRRTMLLLSRSPEAQPKTLPLTGSTFHDQIAMLSHRCFNTLTNSFQPSLLGRKILAAIIMKKDSEDMGVVVSLGTGN

SEQ ID NO: 5733 - protein, 85 aa, Homo sapiens
RCVKGDSLSLKGETVNDCHAEIISRRGFIRFLYSELMKYNSQTAKDSIFEPAKGGEKLQIKKTVSFHLYISTAPCGDGALFDKSC

SEQ ID NO: 5734 - protein, 85 aa, Homo sapiens
SDRAMESTESRHYPVFENPKQGKLRTKVENGEGTIPVESSDIVPTWDGIRLGERLRTMSCSDKILRWNVLGLQGALLTHFLQPIY

SEQ ID NO: 5735 - protein, 85 aa, Homo sapiens
LKSVTLGYLFSQGHLTRAICCRVTRDGSAFEDGLRHPFIVNHPKVGRVSIYDSKRQSGKTKETSVNWCLADGYDLEILDGTRGTV

SEQ ID NO: 5736 - protein, 85 aa, Homo sapiens
RQGDVYRQGTTPPIWHLTDKKRERMQIKRNTNSVPETAPAAIPETKRNAEFLTCNIPTSNASNNMVTTEKVENGQEPVIKLENRQ

SEQ ID NO: 5737 - protein, 85 aa, Homo sapiens
EARPEPARLKPPVHYNGPSKAGYVDFENGQWATDDIPDDLNSIRAAPGEFRAIMEMPSFYSHGLPRCSPYKKLTECQLKNPISGL

SEQ ID NO: 5738 - protein, 85 aa, Homo sapiens
LEYAQFASQTCEFNMIEQSGPPHEPRFKFQVVINGREFPPAEAGSKKVAKQDAAMKAMTILLEEAKAKDSGKSEESSHYSTEKES

SEQ ID NO: 5739 - protein, 85 aa, Homo sapiens
EKTAESQTPTPSATSFFSGKSPVTTLLECMHKLGNSCEFRLLSKEGPAHEPKFQYCVAVGAQTFPSVSAPSKKVAKQMAAEEAMK

SEQ ID NO: 5740 - protein, 85 aa, Homo sapiens
ALHGEATNSMASDNQPEGMISESLDNLESMMPNKVRKIGELVRYLNTNPVGGLLEYARSHGFAAEFKLVDQSGPPHEPKFVYQAK

SEQ ID NO: 5741 - protein, 85 aa, Homo sapiens
VGGRWFPAVCAHSKKQGKQEAADAALRVLIGENEKAERMGFTEVTPVTGASLRRTMLLLSRSPEAQPKTLPLTGSTFHDQIAMLS

SEQ ID NO: 5742 - protein, 85 aa, Homo sapiens
HRCFNTLTNSFQPSLLGRKILAAIIMKKDSEDMGVVVSLGTGNRCVKGDSLSLKGETVNDCHAEIISRRGFIRFLYSELMKYNSQ

SEQ ID NO: 5743 - protein, 85 aa, Homo sapiens
TAKDSIFEPAKGGEKLQIKKTVSFHLYISTAPCGDGALFDKSCSDRAMESTESRHYPVFENPKQGKLRTKVENGEGTIPVESSDI

SEQ ID NO: 5744 - protein, 85 aa, Homo sapiens
VPTWDGIRLGERLRTMSCSDKILRWNVLGLQGALLTHFLQPIYLKSVTLGYLFSQGHLTRAICCRVTRDGSAFEDGLRHPFIVNH

SEQ ID NO: 5745 - protein, 85 aa, Homo sapiens
PKVGRVSIYDSKRQSGKTKETSVNWCLADGYDLEILDGTRGTVDGPRNELSRVSKKNIFLLFKKLCSFRYRRDLLRLSYGEAKKA

SEQ ID NO: 5746 - protein, 85 aa, Homo sapiens
KSKGIAYIEFKTEADAEKTFEEKQGTEIDGRSISLYYTGEKGQNQDYRGGKNSTWSDDSRKTDQSSAYVRTTSRTLQHVLGESKT

SEQ ID NO: 5747 - protein, 85 aa, Homo sapiens
MVLSNLSYSATEETLQEVFEKATFIKVPQNQNGKSKGYAFIEFASFEDAKEALNSCNKREIEGRAIRLELQGPRGSPNARSQPSK

SEQ ID NO: 5748 - protein, 85 aa, Homo sapiens
TLFVKGLSEDTTEETLKESFDGSVRARIVTDRETGSSKGFGFVDFNSEEDAKAAKEAMEDGEIDGNKVTLDWAKPKGEGGFGGRG

SEQ ID NO: 5749 - protein, 85 aa, Homo sapiens
QNQDYRGGKNSTWSDDSRKTDQSSAYVRTTSRTLQHVLGESKTLVLSNLSYSATEETLQEVFEKATFIKVPQNQNGKSKGYAFIE

SEQ ID NO: 5750 - protein, 85 aa, Homo sapiens
FASFEDAKEALNSCNKREIEGRAIRLELQGPRGSPNARSQPSKTLFVKGLSEDTTEETLKESFDGSVRARIVTDRETGSSKGFGF

SEQ ID NO: 5751 - protein, 85 aa, Homo sapiens
VDFNSEEDAKAAKEAMEDGEIDGNKVTLDWAKPKGEGGFGGRGGGRGGFGGRGGGRGGRGGFGGRGRGGFGGRGGFRGGRGGGGD

SEQ ID NO: 5752 - protein, 85 aa, Homo sapiens
SGYRRPTSSALDCVLSSFQMTNETVNIWTHFLPTWYFLWRLLALAGGPGFRAEPYHWPLLVFLLPACLYPFASCCAHTFSSMSPR

SEQ ID NO: 5753 - protein, 85 aa, Homo sapiens
MRHICYFLDYGALSLYSLGCAFPYAAYSMPASWLHGHLHQFFVPAAALNSFLCTGLSCYSRFLELESPGLSKVLRTGAFAYPFLF

SEQ ID NO: 5754 - protein, 85 aa, Homo sapiens
DNLPLFYRLGLCWGRGHGCGQEALSTSHGYHLFCALLTGFLFASHLPERLAPGRFDYIGHSHQLFHICAVLGTHFQLEAVLADMG

SEQ ID NO: 5755 - protein, 85 aa, Homo sapiens
ALAGGPGFRAEPYHWPLLVFLLPACLYPFASCCAHTFSSMSPRMRHICYFLDYGALSLYSLGCAFPYAAYSMPASWLHGHLHQFF

SEQ ID NO: 5756 - protein, 85 aa, Homo sapiens
VPAAALNSFLCTGLSCYSRFLELESPGLSKVLRTGAFAYPFLFDNLPLFYRLGLCWGRGHGCGQEALSTSHGYHLFCALLTGFLF

SEQ ID NO: 5757 - protein, 85 aa, Homo sapiens
ASHLPERLAPGRFDYIGHSHQLFHICAVLGTHFQLEAVLADMGSRRAWLATQEPALGLAGTVATLVLAAAGNLLIIAAFTATLLR

SEQ ID NO: 5758 - protein, 85 aa, Homo sapiens
ADGKGDAAAVAGAGAEAPAVAGAGDGVETESMVRGHRPVSPAPGASGLRPCLWQLETELREQEVSEVSSLNYCRSFCQTLLQYAS

SEQ ID NO: 5759 - protein, 85 aa, Homo sapiens
NKNASEHIVYLLEVYRLAIQSFASARPYLTTECEDVLLVLGRLVLSCFELLLSVSESELPCEVWLPFLQSLQESHDALLEFGNNN

SEQ ID NO: 5760 - protein, 85 aa, Homo sapiens
LQILVHVTKEGVWKNPVLLKILSQQPVETEEVNKLIAQEGPSFLQMRIKHLLKSNCIPQATALSKLCAESKEISNVSSFQQAYIT

SEQ ID NO: 5761 - protein, 85 aa, Homo sapiens
CLCSMLPNEDAIKEIAKVDCKEVLDIICNLESEGQDNTAFVLCTTYLTQQLQTASVYCSWELTLFWSKLQRRIDPSLDTFLERCR

SEQ ID NO: 5762 - protein, 85 aa, Homo sapiens
QFGVIAKTQQHLFCLIRVIQTEAQDAGLGVSILLCVRALQLRSSEDEEMKASVCKTIACLLPEDLEVRRACQLTEFLIEPSLDGF

SEQ ID NO: 5763 - protein, 85 aa, Homo sapiens
NMLEELYLQPDQKFDEENAPVPNSLRCELLLALKAHWPFDPEFWDWKTLKRHCHQLLGQEASDSDDDLSGYEMSINDTDVLESFL

SEQ ID NO: 5764 - protein, 85 aa, Homo sapiens
SDYDEGKEDKQYRRRDLTDQHKEKRDKKPIGSSERYQRWLQYKFFCLLCKRECIEARILHHSKMHMEDGIYTCPVCIKKFKRKEM

SEQ ID NO: 5765 - protein, 85 aa, Homo sapiens
FVPHVMEHVKMPPSRRDRSKKKLLLKGSQKGICPKSPSAIPEQNHSLNDQAKGESHEYVTFSKLEDCHLQDRDLYPCPGTDCSRV

SEQ ID NO: 5766 - protein, 85 aa, Homo sapiens
FKQFKYLSVHLKAEHQNNDENAKHYLDMKNRREKCTYCRRHFMSAFHLREHEQVHCGPQPYMCVSIDCYARFGSVNELLNHKQKH

SEQ ID NO: 5767 - protein, 85 aa, Homo sapiens
DDLRYKCELNGCNIVFSDLGQLYHHEAQHFRDASYTCNFLGCKKFYYSKIEYQNHLSMHNVENSNGDIKKSVKLEESATGEKQDC

SEQ ID NO: 5768 - protein, 85 aa, Homo sapiens
INQPHLLNQTDKSHLPEDLFCAESANSQIDTETAENLKENSDSNSSDQLSHSSSASMNEELIDTLDHSETMQDVLLSNEKVFGPS

SEQ ID NO: 5769 - protein, 85 aa, Homo sapiens
SLKEKCSSMAVCFDGTKFTCGFDGCGSTYKNARGMQKHLRKVHPYHFKPKKIKTKDLFPSLGNEHNQTTEKLDAEPKPCSDTNSD

SEQ ID NO: 5770 - protein, 85 aa, Homo sapiens
SPDEGLDHNIHIKCKREHQGYSSESSICASKRPCTEDTMLELLLRLKHLSLKNSITHGSFSGSLQGYPSSGAKSLQSVSSISDLN

SEQ ID NO: 5771 - protein, 85 aa, Homo sapiens
FQNQDENMPSQYLAQLAAKPFFCELQGCKYEFVTREALLMHYLKKHNYSKEKVLQLTMFQHRYSPFQCHICQRSFTRKTHLRIHY

SEQ ID NO: 5772 - protein, 85 aa, Homo sapiens
KNKHQIGSDRATHKLLDNEKCDHEGPCSVDRLKGDCSAELGGDPSSNSEKPHCHPKKDECSSETDLESSCEETESKTSDISSPIG

SEQ ID NO: 5773 - protein, 85 aa, Homo sapiens
SHREEQEGREGRGSRRTVAKGNLCYILNKYHKPFHCIHKTCNSSFTNLKGLIRHYRTVHQYNKEQLCLEKDKARTKRELVKCKKI

SEQ ID NO: 5774 - protein, 85 aa, Homo sapiens
FACKYKECNKRFLCSKALAKHCSDSHNLDHIEEPKVLSEAGSAARFSCNQPQCPAVFYTFNKLKHHLMEQHNIEGEIHSDYEIHC

SEQ ID NO: 5775 - protein, 85 aa, Homo sapiens
DLNGCGQIFTHRSNYSQHVYYRHKDYYDDLFRSQKVANERLLRSEKVCQTADTQGHEHQTTRRSFNAKSKKCGLIKEKKAPISFK

SEQ ID NO: 5776 - protein, 85 aa, Homo sapiens
TRAEALHMCVEHSEHTQYPCMVQGCLSVVKLESSIVRHYKRTHQMSSAYLEQQMENLVVCVKYGTKIKEEPPSEADPCIKKEENR

SEQ ID NO: 5777 - protein, 85 aa, Homo sapiens
SCESERTEHSHSPGDSSAPIQNTDCCHSSERDGGQKGCIESSSVFDADTLLYRGTLKCNHSSKTTSLEQCNIVQPPPPCKIENSI

SEQ ID NO: 5778 - protein, 85 aa, Homo sapiens
PNPNGTESGTYFTSFQLPLPRIKESETRQHSSGQENTVKNPTHVPKENFRKHSQPRSFDLKTYKPMGFESSFLKFIQESEEKEDD

SEQ ID NO: 5779 - protein, 85 aa, Homo sapiens
FDDWEPSEHLTLSNSSQSSNDLTGNVVANNMVNDSEPEVDIPHSSSDSTIHENLTAIPPLIVAETTTVPSLENLRVVLDKALTDC

SEQ ID NO: 5780 - protein, 84 aa, Homo sapiens
SSDSTIHENLTAIPPLIVAETTTVPSLENLRVVLDKALTDCGELALKQLHYLRPVVVLERSKFSTPILDLFPTKKTDELCVGSS

SEQ ID NO: 5781 - protein, 85 aa, Homo sapiens
PGASGLRPCLWQLETELREQEVSEVSSLNYCRSFCQTLLQYASNKNASEHIVYLLEVYRLAIQSFASARPYLTTECEDVLLVLGR

SEQ ID NO: 5782 - protein, 85 aa, Homo sapiens
LVLSCFELLLSVSESELPCEVWLPFLQSLQESHDALLEFGNNNLQILVHVTKEGVWKNPVLLKILSQQPVETEEVNKLIAQEGPS

SEQ ID NO: 5783 - protein, 85 aa, Homo sapiens
FLQMRIKHLLKSNCIPQATALSKLCAESKEISNVSSFQQAYITCLCSMLPNEDAIKEIAKVDCKEVLDIICNLESEGQDNTAFVL

SEQ ID NO: 5784 - protein, 85 aa, Homo sapiens
CTTYLTQQLQTASVYCSWELTLFWSKLQRRIDPSLDTFLERCRQFGVIAKTQQHLFCLIRVIQTEAQDAGLGVSILLCVRALQLR

SEQ ID NO: 5785 - protein, 85 aa, Homo sapiens
SSEDEEMKASVCKTIACLLPEDLEVRRACQLTEFLIEPSLDGFNMLEELYLQPDQKFDEENAPVPNSLRCELLLALKAHWPFDPE

SEQ ID NO: 5786 - protein, 85 aa, Homo sapiens
FWDWKTLKRHCHQLLGQEASDSDDDLSGYEMSINDTDVLESFLSDYDEGKEDKQYRRRDLTDQHKEKRDKKPIGSSERYQRWLQY

SEQ ID NO: 5787 - protein, 85 aa, Homo sapiens
KFFCLLCKRECIEARILHHSKMHMEDGIYTCPVCIKKFKRKEMFVPHVMEHVKMPPSRRDRSKKKLLLKGSQKGICPKSPSAIPE

SEQ ID NO: 5788 - protein, 85 aa, Homo sapiens
QNHSLNDQAKGESHEYVTFSKLEDCHLQDRDLYPCPGTDCSRVFKQFKYLSVHLKAEHQNNDENAKHYLDMKNRREKCTYCRRHF

SEQ ID NO: 5789 - protein, 85 aa, Homo sapiens
MSAFHLREHEQVHCGPQPYMCVSIDCYARFGSVNELLNHKQKHDDLRYKCELNGCNIVFSDLGQLYHHEAQHFRDASYTCNFLGC

SEQ ID NO: 5790 - protein, 85 aa, Homo sapiens
KKFYYSKIEYQNHLSMHNVENSNGDIKKSVKLEESATGEKQDCINQPHLLNQTDKSHLPEDLFCAESANSQIDTETAENLKENSD

SEQ ID NO: 5791 - protein, 85 aa, Homo sapiens
SNSSDQLSHSSSASMNEELIDTLDHSETMQDVLLSNEKVFGPSSLKEKCSSMAVCFDGTKFTCGFDGCGSTYKNARGMQKHLRKV

SEQ ID NO: 5792 - protein, 85 aa, Homo sapiens
HPYHFKPKKIKTKDLFPSLGNEHNQTTEKLDAEPKPCSDTNSDSPDEGLDHNIHIKCKREHQGYSSESSICASKRPCTEDTMLEL

SEQ ID NO: 5793 - protein, 85 aa, Homo sapiens
MLRLKHLSLKNSITHGSFSGSLQGYPSSGAKSLQSVSSISDLNFQNQDENMPSQYLAQLAAKPFFCELQGCKYEFVTREALLMHY

SEQ ID NO: 5794 - protein, 85 aa, Homo sapiens
LKKHNYSKEKVLQLTMFQHRYSPFQCHICQRSFTRKTHLRIHYKNKHQIGSDRATHKLLDNEKCDHEGPCSVDRLKGDCSAELGG

SEQ ID NO: 5795 - protein, 85 aa, Homo sapiens
DPSSNSEKPHCHPKKDECSSETDLESSCEETESKTSDISSPIGSHREEQEGREGRGSRRTVAKGNLCYILNKYHKPFHCIHKTCN

SEQ ID NO: 5796 - protein, 85 aa, Homo sapiens
SSFTNLKGLIRHYRTVHQYNKEQLCLEKDKARTKRELVKCKKIFACKYKECNKRFLCSKALAKHCSDSHNLDHIEEPKVLSEAGS

SEQ ID NO: 5797 - protein, 85 aa, Homo sapiens
AARFSCNQPQCPAVFYTFNKLKHHLMEQHNIEGEIHSDYEIHCDLNGCGQIFTHRSNYSQHVYYRHKDYYDDLFRSQKVANERLL

SEQ ID NO: 5798 - protein, 85 aa, Homo sapiens
RSEKVCQTADTQGHEHQTTRRSFNAKSKKCGLIKEKKAPISFKTRAEALHMCVEHSEHTQYPCMVQGCLSVVKLESSIVRHYKRT

SEQ ID NO: 5799 - protein, 85 aa, Homo sapiens
HQMSSAYLEQQMENLVVCVKYGTKIKEEPPSEADPCIKKEENRSCESERTEHSHSPGDSSAPIQNTDCCHSSERDGGQKGCIESS

SEQ ID NO: 5800 - protein, 85 aa, Homo sapiens
SVFDADTLLYRGTLKCNHSSKTTSLEQCNIVQPPPPCKIENSIPNPNGTESGTYFTSFQLPLPRIKESETRQHSSGQENTVKNPT

SEQ ID NO: 5801 - protein, 85 aa, Homo sapiens
HVPKENFRKHSQPRSFDLKTYKPMGFESSFLKFIQESEEKEDDFDDWEPSEHLTLSNSSQSSNDLTGNVVANNMVNDSEPEVDIP

SEQ ID NO: 5802 - protein, 85 aa, Homo sapiens
HSSSDSTIHENLTAIPPLIVAETTTVPSLENLRVVLDKALTDCGELALKQLHYLRPVVVLERSKFSTPILDLFPTKKTDELCVGS

SEQ ID NO: 5803 - protein, 12 aa, Homo sapiens
KTLTTVQFMYKD

SEQ ID NO: 5804 - protein, 10 aa, Homo sapiens
KSPLLGRSLQ

SEQ ID NO: 5805 - protein, 10 aa, Homo sapiens
ILQLVISAVM

SEQ ID NO: 5806 - protein, 53 aa, Homo sapiens
STSTWTRKQESPKAMPQCPMKTHPLPRLPWNGLMGKIFKGANLKSPLLGRSLQ

SEQ ID NO: 5807 - protein, 53 aa, Homo sapiens
PWVAWEAVEEIEEASLQEDPGVPEGTPLEEETSSTELETGSVPILQLVISAVM

SEQ ID NO: 5808 - protein, 53 aa, Homo sapiens
GEEEVASWIVVVPVECSEVAVVETEVASVVAGAWTEVALVEEDEVALGGPLDL

SEQ ID NO: 5809 - protein, 85 aa, Homo sapiens
REIILPKGLDLDRPKRTRTSFTAEQLYRLEMEFQRCQYVVGRERTELARQLNLSETQVKVWFQNRRTKQKKDQGKDSELRSVVSE

SEQ ID NO: 5810 - protein, 85 aa, Homo sapiens
TAATCSVLRLLEQGRLLSPPGLPALLPPCATGALGSALRGPSLPALGAGAAAGSAAAAAAAAPGPAGAASPHPPAVGGAPGPGPA

SEQ ID NO: 5811 - protein, 84 aa, Homo sapiens
PGPGPAGPGGLHAGAPAAGHSLFSLPVPSLLGSVASRLSSAPLTMAGSLAGNLQELSARYLSSSAFEPYSRTNNKEGAEKKALD

SEQ ID NO: 5812 - protein, 85 aa, Homo sapiens
ERTELARQLNLSETQVKVWFQNRRTKQKKDQGKDSELRSVVSETAATCSVLRLLEQGRLLSPPGLPALLPPCATGALGSALRGPS

SEQ ID NO: 5813 - protein, 85 aa, Homo sapiens
MPALGAGAAAGSAAAAAAAAPGPAGAASPHPPAVGGAPGPGPAGPGGLHAGAPAAGHSLFSLPVPSLLGSVASRLSSAPLTMAGS

SEQ ID NO: 5814 - protein, 85 aa, Homo sapiens
AHCVTLVQLSISCDHLIDKDIGSKSDPLCVLLQDVGGGSWAELGRTERVRNCSSPEFSKTLQLEYRFETVQKLRFGIYDIDNKTP

SEQ ID NO: 5815 - protein, 85 aa, Homo sapiens
ELRDDDFLGGAECSLGQIVSSQVLTLPLMLKPGKPAGRGTITVSAQELKDNRVVTMEVEARNLDKKDFLGKSDPFLEFFRQGDGK

SEQ ID NO: 5816 - protein, 85 aa, Homo sapiens
WHLVYRSEVIKNNLNPTWKRFSVPVQHFCGGNPSTPIQVQCSDYDSDGSHDLIGTFHTSLAQLQAVPAEFECIHPEKQQKKKSYK

SEQ ID NO: 5817 - protein, 85 aa, Homo sapiens
NSGTIRVKICRVETEYSFLDYVMGGCQINFTVGVDFTGSNGDPSSPDSLHYLSPTGVNEYLMALWSVGSVVQDYDSDKLFPAFGF

SEQ ID NO: 5818 - protein, 85 aa, Homo sapiens
GAQVPPDWQVSHEFALNFNPSNPYCAGIQGIVDAYRQALPQVRLYGPTNFAPIINHVARFAAQAAHQGTASQYFMLLLLTDGAVT

SEQ ID NO: 5819 - protein, 85 aa, Homo sapiens
DVEATREAVVRASNLPMSVIIVGVGGADFEAMEQLDADGGPLHTRSGQAAARDIVQFVPYRRFQNAPREALAQTVLAEVPTQLVS

SEQ ID NO: 5820 - protein, 85 aa, Homo sapiens
LGRTERVRNCSSPEFSKTLQLEYRFETVQKLRFGIYDIDNKTPELRDDDFLGGAECSLGQIVSSQVLTLPLMLKPGKPAGRGTIT

SEQ ID NO: 5821 - protein, 85 aa, Homo sapiens
VSAQELKDNRVVTMEVEARNLDKKDFLGKSDPFLEFFRQGDGKWHLVYRSEVIKNNLNPTWKRFSVPVQHFCGGNPSTPIQVQCS

SEQ ID NO: 5822 - protein, 85 aa, Homo sapiens
DYDSDGSHDLIGTFHTSLAQLQAVPAEFECIHPEKQQKKKSYKNSGTIRVKICRVETEYSFLDYVMGGCQINFTVGVDFTGSNGD

SEQ ID NO: 5823 - protein, 85 aa, Homo sapiens
PSSPDSLHYLSPTGVNEYLMALWSVGSVVQDYDSDKLFPAFGFGAQVPPDWQVSHEFALNFNPSNPYCAGIQGIVDAYRQALPQV

SEQ ID NO: 5824 - protein, 85 aa, Homo sapiens
RLYGPTNFAPIINHVARFAAQAAHQGTASQYFMLLLLTDGAVTDVEATREAVVRASNLPMSVIIVGVGGADFEAMEQLDADGGPL

SEQ ID NO: 5825 - protein, 85 aa, Homo sapiens
SCKKQRSRKHSVNEKCNMKIEHYFSPVSKEQQNNCSTSLMRMESRGDPRATTNTQAQRFHSPKKNPEDQTMPQNRTIYVTLKVNH

SEQ ID NO: 5826 - protein, 85 aa, Homo sapiens
RRNQDMKLKLTHSENSSLYMALNTLQAVRKEIETHQGQEMLVRGTEGIKEYINLGMPLSCFPEGGQVVITFSQSKSKQKEDNHIF

SEQ ID NO: 5827 - protein, 85 aa, Homo sapiens
GRQDKASTECVKFYIHAIGIGKCKRRIVKCGKLHKKGRKLCVYAFKGETIKDALCKDGRFLSFLENDDWKLIENNDTILESTQPV

SEQ ID NO: 5828 - protein, 85 aa, Homo sapiens
DELEGRYFQVEVEKRMVPSAAASQNPESEKRNTCVLREQIVAQYPSLKRESEKIIENFKKKMKVKNGETLFELHRTTFGKVTKNS

SEQ ID NO: 5829 - protein, 85 aa, Homo sapiens
SSIKVVKLLVRLSDSVGYLFWDSATTGYATCFVFKGLFILTCRHVIDSIVGDGIEPSKWATIIGQCVRVTFGYEELKDKETNYFF

SEQ ID NO: 5830 - protein, 85 aa, Homo sapiens
VEPWFEIHNEELDYAVLKLKENGQQVPMELYNGITPVPLSGLIHIIGHPYGEKKQIDACAVIPQGQRAKKCQERVQSKKAESPEY

SEQ ID NO: 5831 - protein, 85 aa, Homo sapiens
VHMYTQRSFQKIVHNPDVITYDTEFFFGASGSPVFDSKGSLVAMHAAGFAYTYQNETRSIIEFGSTMESILLDIKQRHKPWYEEV

SEQ ID NO: 5832 - protein, 84 aa, Homo sapiens
DVITYDTEFFFGASGSPVFDSKGSLVAMHAAGFAYTYQNETRSIIEFGSTMESILLDIKQRHKPWYEEVFVNQQDVEMMSDEDL

SEQ ID NO: 5833 - protein, 85 aa, Homo sapiens
ESRGDPRATTNTQAQRFHSPKKNPEDQTMPQNRTIYVTLKVNHRRNQDMKLKLTHSENSSLYMALNTLQAVRKEIETHQGQEMLV

SEQ ID NO: 5834 - protein, 85 aa, Homo sapiens
RGTEGIKEYINLGMPLSCFPEGGQVVITFSQSKSKQKEDNHIFGRQDKASTECVKFYIHAIGIGKCKRRIVKCGKLHKKGRKLCV

SEQ ID NO: 5835 - protein, 85 aa, Homo sapiens
YAFKGETIKDALCKDGRFLSFLENDDWKLIENNDTILESTQPVDELEGRYFQVEVEKRMVPSAAASQNPESEKRNTCVLREQIVA

SEQ ID NO: 5836 - protein, 85 aa, Homo sapiens
QYPSLKRESEKIIENFKKKMKVKNGETLFELHRTTFGKVTKNSSSIKVVKLLVRLSDSVGYLFWDSATTGYATCFVFKGLFILTC

SEQ ID NO: 5837 - protein, 85 aa, Homo sapiens
RHVIDSIVGDGIEPSKWATIIGQCVRVTFGYEELKDKETNYFFVEPWFEIHNEELDYAVLKLKENGQQVPMELYNGITPVPLSGL

SEQ ID NO: 5838 - protein, 85 aa, Homo sapiens
IHIIGHPYGEKKQIDACAVIPQGQRAKKCQERVQSKKAESPEYVHMYTQRSFQKIVHNPDVITYDTEFFFGASGSPVFDSKGSLV

SEQ ID NO: 5839 - protein, 85 aa, Homo sapiens
PKAPKGKSAGREKKVIHPYSRKAAQITREAHKQEKKEKLKNEKALRLNLVGEKLQWFQNHLDPQKKRYSKKDACELIERYLNRFS

SEQ ID NO: 5840 - protein, 85 aa, Homo sapiens
SELEQIELHNSIRDRQGRRHCSRETVIKQTMERERQQFEGYGLEIPDILNASNLKTFREWDFDLKKLPNIKMRKICANDAIPKTC

SEQ ID NO: 5841 - protein, 84 aa, Homo sapiens
ERQQFEGYGLEIPDILNASNLKTFREWDFDLKKLPNIKMRKICANDAIPKTCKRKTIITVDQDLGELELNDESSDSDEEMTAVA

SEQ ID NO: 5842 - protein, 85 aa, Homo sapiens
KALRLNLVGEKLQWFQNHLDPQKKRYSKKDACELIERYLNRFSSELEQIELHNSIRDRQGRRHCSRETVIKQTMERERQQFEGYG

SEQ ID NO: 5843 - protein, 85 aa, Homo sapiens
GTQDLLHFPTKEQFDEAEPATLNGLDQPEQTTIPIPQLPQETQSSLEHEPETHTLHLQPQHEESVVPTQSTLTADDMRRAKRIRN

SEQ ID NO: 5844 - protein, 85 aa, Homo sapiens
AALQHLFIRKSFRPFKCLQCGKAFREKDKLDQHLRFHGREGNCPLTCDLCNKGFISSTSLESHMKLHSDQKTYSCIFCPESFDRL

SEQ ID NO: 5845 - protein, 85 aa, Homo sapiens
DLLKDHVAIHINDGYFTCPTCKKRFPDFIQVKKHVRSFHSEKIYQCTECDKAFCRPDKLRLHMLRHSDRKDFLCSTCGKQFKRKD

SEQ ID NO: 5846 - protein, 85 aa, Homo sapiens
KLREHMQRMHNPEREAKKADRISRSKTFKPRITSTDYDSFTFKCRLCMMGFRRRGMLVNHLSKRHPDMKIEEVPELTLPIIKPNR

SEQ ID NO: 5847 - protein, 85 aa, Homo sapiens
DYFCQYCDKVYKSASKRKAHILKNHPGAELPPSIRKLRPAGPGEPDPMLSTHTQLTGTIATPPVCCPHCSKQYSSKTKMVQHIRK

SEQ ID NO: 5848 - protein, 85 aa, Homo sapiens
KHPEFAQLSNTIHTPLTTAVISATPAVLTTDSATGETVVTTDLLTQAMTELSQTLTTDYRTPQGDYQRIQYIPVSQSASGLQQPQ

SEQ ID NO: 5849 - protein, 85 aa, Homo sapiens
HIQLQVVQVASATSPHQSQQSTVDVGQLHDPQPYPQHAIQVQHIQVSEPTASAPSSAQVSGQPLSPSAQQAQQGLSPSHIQGSSS

SEQ ID NO: 5850 - protein, 85 aa, Homo sapiens
TQGQALQQQQQQQQNSSVQHTYLPSAWNSFRGYSSEIQMMTLPPGQFVITDSGVATPVTTGQVKAVTSGHYVLSESQSELEEKQT

SEQ ID NO: 5851 - protein, 85 aa, Homo sapiens
QSSLEHEPETHTLHLQPQHEESVVPTQSTLTADDMRRAKRIRNAALQHLFIRKSFRPFKCLQCGKAFREKDKLDQHLRFHGREGN

SEQ ID NO: 5852 - protein, 85 aa, Homo sapiens
CPLTCDLCNKGFISSTSLESHMKLHSDQKTYSCIFCPESFDRLDLLKDHVAIHINDGYFTCPTCKKRFPDFIQVKKHVRSFHSEK

SEQ ID NO: 5853 - protein, 85 aa, Homo sapiens
IYQCTECDKAFCRPDKLRLHMLRHSDRKDFLCSTCGKQFKRKDKLREHMQRMHNPEREAKKADRISRSKTFKPRITSTDYDSFTF

SEQ ID NO: 5854 - protein, 85 aa, Homo sapiens
KCRLCMMGFRRRGMLVNHLSKRHPDMKIEEVPELTLPIIKPNRDYFCQYCDKVYKSASKRKAHILKNHPGAELPPSIRKLRPAGP

SEQ ID NO: 5855 - protein, 85 aa, Homo sapiens
GEPDPMLSTHTQLTGTIATPPVCCPHCSKQYSSKTKMVQHIRKKHPEFAQLSNTIHTPLTTAVISATPAVLTTDSATGETVVTTD

SEQ ID NO: 5856 - protein, 85 aa, Homo sapiens
MLTQAMTELSQTLTTDYRTPQGDYQRIQYIPVSQSASGLQQPQHIQLQVVQVASATSPHQSQQSTVDVGQLHDPQPYPQHAIQVQ

SEQ ID NO: 5857 - protein, 85 aa, Homo sapiens
HIQVSEPTASAPSSAQVSGQPLSPSAQQAQQGLSPSHIQGSSSTQGQALQQQQQQQQNSSVQHTYLPSAWNSFRGYSSEIQMMTL

SEQ ID NO: 5858 - protein, 85 aa, Homo sapiens
PPGQFVITDSGVATPVTTGQVKAVTSGHYVLSESQSELEEKQTSALSGGVQVEPPAHSDSLDPQTNSQQQTTQYIITTTTNGNGS

SEQ ID NO: 5859 - protein, 85 aa, Homo sapiens
FCLKAVSNLDEESRWTVHYTAPWHQQENVFLPTTRPPCVEDLHRQAKLNLKSVLRECDKLRHDGYRSSQYYSQGPTFAANASPFC

SEQ ID NO: 5860 - protein, 85 aa, Homo sapiens
DDYQDEDEETDQKCSLSSSEEERFISIRRPKTPASSDFSDLNTQTNWTKSLPLPTPEEKMRQQAQTVQADVVPINITASGTGQDD

SEQ ID NO: 5861 - protein, 85 aa, Homo sapiens
LPLPTPEEKMRQQAQTVQADVVPINITASGTGQDDADGHSVYTPDHYSTLGRFNSCRSAGQRSETRDSSCQTEDVKVVPPSMRRI

SEQ ID NO: 5862 - protein, 85 aa, Homo sapiens
HRQAKLNLKSVLRECDKLRHDGYRSSQYYSQGPTFAANASPFCDDYQDEDEETDQKCSLSSSEEERFISIRRPKTPASSDFSDLN

SEQ ID NO: 5863 - protein, 85 aa, Homo sapiens
TQTNWTKSLPLPTPEEKMRQQAQTVQADVVPINITASGTGQDDADGHSVYTPDHYSTLGRFNSCRSAGQRSETRDSSCQTEDVKV

SEQ ID NO: 5864 - protein, 85 aa, Homo sapiens
STYQNNSWGDFLLDTISGLVFDTAKEDVELRTGIPRQLLLVESTTVATRRLSGFLRTLADRLEGTKELLSSDMKKDFIMHRLPPY

SEQ ID NO: 5865 - protein, 85 aa, Homo sapiens
SAGDGAELSTPGGKLPRLDSVVRLQFKDHIVLTVLPDQDQSDEAQEKMVYIYHSLKNSRETHMMGNEEETEFHGLRFPLSHLDAL

SEQ ID NO: 5866 - protein, 85 aa, Homo sapiens
EERIGRPVHEFMLKPGDLLYFPRGTIHQADTPAGLAHSTHVTISTYQNNSWGDFLLDTISGLVFDTAKEDVELRTGIPRQLLLVE

SEQ ID NO: 5867 - protein, 85 aa, Homo sapiens
STTVATRRLSGFLRTLADRLEGTKELLSSDMKKDFIMHRLPPYSAGDGAELSTPGGKLPRLDSVVRLQFKDHIVLTVLPDQDQSD

SEQ ID NO: 5868 - protein, 85 aa, Homo sapiens
TESASSTSGQEFDVFSVMDWKDGVGTLPGSDLKFRVNEFGALEVITDENEMENVKKATATTTWMVPTAQEVFSEKTGMPFRLKDP

SEQ ID NO: 5869 - protein, 85 aa, Homo sapiens
VKVEGLQFCENCCQYGNVDECLSGGNYCSQNCARHIKDKDQKEERDVEEDNEEEDPKCSRKKKPKLSLKADTKEDGEERDDEMEN

SEQ ID NO: 5870 - protein, 85 aa, Homo sapiens
KQDVRILRGSQRARRKRRGDSAVLKQGLPPKGKKAWCWASYLEEEKAVAVPAKLFKEHQSFPYNKNGFKVGMKLEGVDPEHQSVY

SEQ ID NO: 5871 - protein, 85 aa, Homo sapiens
CVLTVAEVCGYRIKLHFDGYSDCYDFWVNADALDIHPVGWCEKTGHKLHPPKGYKEEEFNWQTYLKTCKAQAAPKSLFENQNITV

SEQ ID NO: 5872 - protein, 85 aa, Homo sapiens
IPSGFRVGMKLEAVDKKNPSFICVATVTDMVDNRFLVHFDNWDESYDYWCEASSPHIHPVGWCKEHRRTLITPPGYPNVKHFSWD

SEQ ID NO: 5873 - protein, 85 aa, Homo sapiens
KYLEETNSLPAPARAFKVKPPHGFQKKMKLEVVDKRNPMFIRVATVADTDDHRVKVHFDGWNNCYDYWIDADSPDIHPVGWCSKT

SEQ ID NO: 5874 - protein, 85 aa, Homo sapiens
GHPLQPPLSPLELMEASEHGGCSTPGCKGIGHFKRARHLGPHSAANCPYSEINLNKDRIFPDRLSGEMPPASPSFPRNKRTDANE

SEQ ID NO: 5875 - protein, 85 aa, Homo sapiens
SSSSPEIRDQHADDVKEDFEERTESEMRTSHEARGAREEPTVQQAQRRSAVFLSFKSPIPCLPLRWEQQSKLLPTVAGIPASKVS

SEQ ID NO: 5876 - protein, 84 aa, Homo sapiens
VAGIPASKVSKWSTDEVSEFIQSLPGCEEHGKVFKDEQIDGEAFLLMTQTDIVKIMSIKLGPALKIFNSILMFKAAEKNSHNEL

SEQ ID NO: 5877 - protein, 85 aa, Homo sapiens
EVITDENEMENVKKATATTTWMVPTAQEVFSEKTGMPFRLKDPVKVEGLQFCENCCQYGNVDECLSGGNYCSQNCARHIKDKDQK

SEQ ID NO: 5878 - protein, 85 aa, Homo sapiens
EERDVEEDNEEEDPKCSRKKKPKLSLKADTKEDGEERDDEMENKQDVRILRGSQRARRKRRGDSAVLKQGLPPKGKKAWCWASYL

SEQ ID NO: 5879 - protein, 85 aa, Homo sapiens
EEEKAVAVPAKLFKEHQSFPYNKNGFKVGMKLEGVDPEHQSVYCVLTVAEVCGYRIKLHFDGYSDCYDFWVNADALDIHPVGWCE

SEQ ID NO: 5880 - protein, 85 aa, Homo sapiens
KTGHKLHPPKGYKEEEFNWQTYLKTCKAQAAPKSLFENQNITVIPSGFRVGMKLEAVDKKNPSFICVATVTDMVDNRFLVHFDNW

SEQ ID NO: 5881 - protein, 85 aa, Homo sapiens
DESYDYWCEASSPHIHPVGWCKEHRRTLITPPGYPNVKHFSWDKYLEETNSLPAPARAFKVKPPHGFQKKMKLEVVDKRNPMFIR

SEQ ID NO: 5882 - protein, 85 aa, Homo sapiens
VATVADTDDHRVKVHFDGWNNCYDYWIDADSPDIHPVGWCSKTGHPLQPPLSPLELMEASEHGGCSTPGCKGIGHFKRARHLGPH

SEQ ID NO: 5883 - protein, 85 aa, Homo sapiens
SAANCPYSEINLNKDRIFPDRLSGEMPPASPSFPRNKRTDANESSSSPEIRDQHADDVKEDFEERTESEMRTSHEARGAREEPTV

SEQ ID NO: 5884 - protein, 85 aa, Homo sapiens
QQAQRRSAVFLSFKSPIPCLPLRWEQQSKLLPTVAGIPASKVSKWSTDEVSEFIQSLPGCEEHGKVFKDEQIDGEAFLLMTQTDI

SEQ ID NO: 5885 - protein, 85 aa, Homo sapiens
MMMALSKTFGQKPVKFQLEDDGEFYMIGSEVGNYLRMFRGSLYKRYPSLWRRLATVEERKKIVASSHDHGYTTLATSVTLLKASE

SEQ ID NO: 5886 - protein, 85 aa, Homo sapiens
VEEILDGNDEKYKAVSISTEPPTYLREQKAKRNSQWVPTLPNSSHHLDAVPCSTTINRNRMGRDKKRTFPLWCGCIAALTLRADS

SEQ ID NO: 5887 - protein, 85 aa, Homo sapiens
ALVLHFDDHDPAVIHENASQPEVLVPIRLDMEIDGQKLRDAFTWNMNEKLMTPEMFSEILCDDLDLNPLTFVPAIASAIRQQIES

SEQ ID NO: 5888 - protein, 85 aa, Homo sapiens
YPTDSILEDQSDQRVIIKLNIHVGNISLVDQFEWDMSEKENSPEKFALKLCSELGLGGEFVTTIAYSIRGQLSWHQKTYAFSENP

SEQ ID NO: 5889 - protein, 85 aa, Homo sapiens
YKRYPSLWRRLATVEERKKIVASSHDHGYTTLATSVTLLKASEVEEILDGNDEKYKAVSISTEPPTYLREQKAKRNSQWVPTLPN

SEQ ID NO: 5890 - protein, 85 aa, Homo sapiens
SSHHLDAVPCSTTINRNRMGRDKKRTFPLWCGCIAALTLRADSALVLHFDDHDPAVIHENASQPEVLVPIRLDMEIDGQKLRDAF

SEQ ID NO: 5891 - protein, 85 aa, Homo sapiens
TWNMNEKLMTPEMFSEILCDDLDLNPLTFVPAIASAIRQQIESYPTDSILEDQSDQRVIIKLNIHVGNISLVDQFEWDMSEKENS

SEQ ID NO: 5892 - protein, 85 aa, Homo sapiens
PEKFALKLCSELGLGGEFVTTIAYSIRGQLSWHQKTYAFSENPLPTVEIAIRNTGDADQWCPLLETLTDAEMEKKIRDQDRNTRR

SEQ ID NO: 5893 - protein, 85 aa, Homo sapiens
VYPMKITGNRAVMALVYIWLHSLIGCLPPLFGWSSVEFDEFKWMCVAAWHREPGYTAFWQIWCALFPFLVMLVCYGFIFRVARVK

SEQ ID NO: 5894 - protein, 85 aa, Homo sapiens
ARKVHCGTVVIVEEDAQRTGRKNSSTSTSSSGSRRNAFQGVVYSANQCKALITILVVLGAFMVTWGPYMVVIASEALWGKSSVSP

SEQ ID NO: 5895 - protein, 85 aa, Homo sapiens
SLETWATWLSFASAVCHPLIYGLWNKTVRKELLGMCFGDRYYREPFVQRQRTSRLFSISNRITDLGLSPHLTALMAGGQPLGHSS

SEQ ID NO: 5896 - protein, 85 aa, Homo sapiens
STGDTGFSCSQDSGTDMMLLEDYTSDDNPPSHCTCPPKRRSSVTFEDEVEQIKEAAKNSILHVKAEVHKSLDSYAASLAKAIEAE

SEQ ID NO: 5897 - protein, 85 aa, Homo sapiens
WMCVAAWHREPGYTAFWQIWCALFPFLVMLVCYGFIFRVARVKARKVHCGTVVIVEEDAQRTGRKNSSTSTSSSGSRRNAFQGVV

SEQ ID NO: 5898 - protein, 85 aa, Homo sapiens
YSANQCKALITILVVLGAFMVTWGPYMVVIASEALWGKSSVSPSLETWATWLSFASAVCHPLIYGLWNKTVRKELLGMCFGDRYY

SEQ ID NO: 5899 - protein, 85 aa, Homo sapiens
REPFVQRQRTSRLFSISNRITDLGLSPHLTALMAGGQPLGHSSSTGDTGFSCSQDSGTDMMLLEDYTSDDNPPSHCTCPPKRRSS

SEQ ID NO: 5900 - protein, 85 aa, Homo sapiens
VTFEDEVEQIKEAAKNSILHVKAEVHKSLDSYAASLAKAIEAEAKINLFGEEALPGVLVTARTVPGGGFGGRRGSRTLVSQRLQL

SEQ ID NO: 5901 - protein, 85 aa, Homo sapiens
AAAVPDEAVARDVQRLLVQFQDEGGQLLGSPFDVPVDITPDRLQLVCNALLAQEDPLPLAFFVHDAEIVSSLGKTLESQAVETEK

SEQ ID NO: 5902 - protein, 85 aa, Homo sapiens
VLDIIYQPQAIFRVRAVTRCTSSLEGHSEAVISVAFSPTGKYLASGSGDTTILLWDPSTGKQVGRTLAGHSKWITGLSWEPLHAN

SEQ ID NO: 5903 - protein, 85 aa, Homo sapiens
PECRYVASSSKDGSVRIWDTTAGRCERILTGHTQSVTCLRWGGDGLLYSASQDRTIKVWRAHDGVLCRTLQGHGHWVNTMALSTD

SEQ ID NO: 5904 - protein, 85 aa, Homo sapiens
YALRTGAFEPAEASVNPQDLQGSLQELKERALSRYNLVRGQGPERLVSGSDDFTLFLWSPAEDKKPLTRMTGHQALINQVLFSPD

SEQ ID NO: 5905 - protein, 85 aa, Homo sapiens
SRIVASASFDKSIKLWDGRTGKYLASLRGHVAAVYQIAWSADSRLLVSGSSDSTLKVWDVKAQKLAMDLPGHADEVYAVDWSPDG

SEQ ID NO: 5906 - protein, 84 aa, Homo sapiens
RTGKYLASLRGHVAAVYQIAWSADSRLLVSGSSDSTLKVWDVKAQKLAMDLPGHADEVYAVDWSPDGQRVASGGKDKCLRIWRR

SEQ ID NO: 5907 - protein, 85 aa, Homo sapiens
MQLVCNALLAQEDPLPLAFFVHDAEIVSSLGKTLESQAVETEKVLDIIYQPQAIFRVRAVTRCTSSLEGHSEAVISVAFSPTGKY

SEQ ID NO: 5908 - protein, 85 aa, Homo sapiens
MASGSGDTTILLWDPSTGKQVGRTLAGHSKWITGLSWEPLHANPECRYVASSSKDGSVRIWDTTAGRCERILTGHTQSVTCLRWG

SEQ ID NO: 5909 - protein, 85 aa, Homo sapiens
GDGLLYSASQDRTIKVWRAHDGVLCRTLQGHGHWVNTMALSTDYALRTGAFEPAEASVNPQDLQGSLQELKERALSRYNLVRGQG

SEQ ID NO: 5910 - protein, 85 aa, Homo sapiens
PERLVSGSDDFTLFLWSPAEDKKPLTRMTGHQALINQVLFSPDSRIVASASFDKSIKLWDGRTGKYLASLRGHVAAVYQIAWSAD

SEQ ID NO: 5911 - protein, 85 aa, Homo sapiens
LSLKLPQLLQVHQVFWEDGIMSGYRRPTSSALDCVLSSFQMTNETVNIWTHFLPTWYFLWRLLALAGGPGFRAEPYHWPLLVFLL

SEQ ID NO: 5912 - protein, 85 aa, Homo sapiens
PACLYPFASCCAHTFSSMSPRMRHICYFLDYGALSLYSLGCAFPYAAYSMPASWLHGHLHQFFVPAAALNSFLCTGLSCYSRFLE

SEQ ID NO: 5913 - protein, 85 aa, Homo sapiens
MESPGLSKVLRTGAFAYPFLFDNLPLFYRLGLCWGRGHGCGQEALSTSHGYHLFCALLTGFLFASHLPERLAPGRFDYIGHSHQL

SEQ ID NO: 5914 - protein, 85 aa, Homo sapiens
FHICAVLGTHFQLEAVLADMGSRRAWLATQEPALGLAGTVATLVLAAAGNLLIIAAFTATLLRAPSTCPLLQGGPLEGGTQAKQQ

SEQ ID NO: 5915 - protein, 85 aa, Homo sapiens
NETVNIWTHFLPTWYFLWRLLALAGGPGFRAEPYHWPLLVFLLPACLYPFASCCAHTFSSMSPRMRHICYFLDYGALSLYSLGCA

SEQ ID NO: 5916 - protein, 85 aa, Homo sapiens
FPYAAYSMPASWLHGHLHQFFVPAAALNSFLCTGLSCYSRFLELESPGLSKVLRTGAFAYPFLFDNLPLFYRLGLCWGRGHGCGQ

SEQ ID NO: 5917 - protein, 85 aa, Homo sapiens
EALSTSHGYHLFCALLTGFLFASHLPERLAPGRFDYIGHSHQLFHICAVLGTHFQLEAVLADMGSRRAWLATQEPALGLAGTVAT

SEQ ID NO: 5918 - protein, 85 aa, Homo sapiens
EKIYSRGELHHFIDGFNEEKSNWMRYVNPAHSPREQNLAACQNGMNIYFYTIKPIPANQELLVWYCRDFAERLHYPYPGELTMMN

SEQ ID NO: 5919 - protein, 85 aa, Homo sapiens
LTQTQSSLKQPSTEKNELCPKNVPKREYSVKEILKLDSNPSKGKDLYRSNISPLTSEKDLDDFRRRGSPEMPFYPRVVYPIRAPL

SEQ ID NO: 5920 - protein, 85 aa, Homo sapiens
PEDFLKASLAYGIERPTYITRSPIPSSTTPSPSARSSPDQSLKSSSPHSSPGNTVSPVGPGSQEHRDSYAYLNASYGTEGLGSYP

SEQ ID NO: 5921 - protein, 85 aa, Homo sapiens
GYAPLPHLPPAFIPSYNAHYPKFLLPPYGMNCNGLSAVSSMNGINNFGLFPRLCPVYSNLLGGGSLPHPMLNPTSLPSSLPSDGA

SEQ ID NO: 5922 - protein, 85 aa, Homo sapiens
RRLLQPEHPREVLVPAPHSAFSFTGAAASMKDKACSPTSGSPTAGTAATAEHVVQPKATSAAMAAPSSDEAMNLIKNKRNMTGYK

SEQ ID NO: 5923 - protein, 85 aa, Homo sapiens
TLPYPLKKQNGKIKYECNVCAKTFGQLSNLKVHLRVHSGERPFKCQTCNKGFTQLAHLQKHYLVHTGEKPHECQVCHKRFSSTSN

SEQ ID NO: 5924 - protein, 85 aa, Homo sapiens
LKTHLRLHSGEKPYQCKVCPAKFTQFVHLKLHKRLHTRERPHKCSQCHKNYIHLCSLKVHLKGNCAAAPAPGLPLEDLTRINEEI

SEQ ID NO: 5925 - protein, 85 aa, Homo sapiens
EKFDISDNADRLEDVEDDISVISVVEKEILAVVRKEKEETGLKVSLQRNMGNGLLSSGCSLYESSDLPLMKLPPSNPLPLVPVKV

SEQ ID NO: 5926 - protein, 85 aa, Homo sapiens
NGMNIYFYTIKPIPANQELLVWYCRDFAERLHYPYPGELTMMNLTQTQSSLKQPSTEKNELCPKNVPKREYSVKEILKLDSNPSK

SEQ ID NO: 5927 - protein, 85 aa, Homo sapiens
GKDLYRSNISPLTSEKDLDDFRRRGSPEMPFYPRVVYPIRAPLPEDFLKASLAYGIERPTYITRSPIPSSTTPSPSARSSPDQSL

SEQ ID NO: 5928 - protein, 85 aa, Homo sapiens
KSSSPHSSPGNTVSPVGPGSQEHRDSYAYLNASYGTEGLGSYPGYAPLPHLPPAFIPSYNAHYPKFLLPPYGMNCNGLSAVSSMN

SEQ ID NO: 5929 - protein, 85 aa, Homo sapiens
GINNFGLFPRLCPVYSNLLGGGSLPHPMLNPTSLPSSLPSDGARRLLQPEHPREVLVPAPHSAFSFTGAAASMKDKACSPTSGSP

SEQ ID NO: 5930 - protein, 85 aa, Homo sapiens
TAGTAATAEHVVQPKATSAAMAAPSSDEAMNLIKNKRNMTGYKTLPYPLKKQNGKIKYECNVCAKTFGQLSNLKVHLRVHSGERP

SEQ ID NO: 5931 - protein, 85 aa, Homo sapiens
FKCQTCNKGFTQLAHLQKHYLVHTGEKPHECQVCHKRFSSTSNLKTHLRLHSGEKPYQCKVCPAKFTQFVHLKLHKRLHTRERPH

SEQ ID NO: 5932 - protein, 85 aa, Homo sapiens
KCSQCHKNYIHLCSLKVHLKGNCAAAPAPGLPLEDLTRINEEIEKFDISDNADRLEDVEDDISVISVVEKEILAVVRKEKEETGL

SEQ ID NO: 5933 - protein, 85 aa, Homo sapiens
SRSRHARPSRLVRKEDVNKKKKNSQLRKTTKGANKNVASVKTLSPGKLKQLIQERDVKKKTEPKPPVPVRSLLTRAGAARMNLDR

SEQ ID NO: 5934 - protein, 85 aa, Homo sapiens
TEVLFQNPESLTCNGFTMALRSTSLSRRLSQPPLVVAKSKKVPLSKGLEKQHDCDYKILPALGVKHSENDSVPMQDTQVLPDIET

SEQ ID NO: 5935 - protein, 85 aa, Homo sapiens
LIGVQNPSLLKGKSQETTQFWSQRVEDSKINIPTHSGPAAEILPGPLEGTRCGEGLFSEETLNDTSGSPKMFAQDTVCAPFPQRA

SEQ ID NO: 5936 - protein, 85 aa, Homo sapiens
TPKVTSQGNPSIQLEELGSRVESLKLSDSYLDPIKSEHDCYPTSSLNKVIPDLNLRNCLALGGSTSPTSVIKFLLAGSKQATLGA

SEQ ID NO: 5937 - protein, 85 aa, Homo sapiens
KPDHQEAFEATANQQEVSDTTSFLGQAFGAIPHQWELPGADPVHGEALGETPDLPEIPGAIPVQGEVFGTILDQQETLGMSGSVV

SEQ ID NO: 5938 - protein, 85 aa, Homo sapiens
PDLPVFLPVPPNPIATFNAPSKWPEPQSTVSYGLAVQGAIQILPLGSGHTPQSSSNSEKNSLPPVMAISNVENEKQVHISFLPAN

SEQ ID NO: 5939 - protein, 85 aa, Homo sapiens
TQGFPLAPERGLFHASLGIAQLSQAGPSKSDRGSSQVSVTSTVHVVNTTVVTMPVPMVSTSSSSYTTLLPTLEKKKRKRCGVCEP

SEQ ID NO: 5940 - protein, 85 aa, Homo sapiens
CQQKTNCGECTYCKNRKNSHQICKKRKCEELKKKPSVVVPLEVIKENKRPQREKKPKVLKADFDNKPVNGPKSESMDYSRCGHGE

SEQ ID NO: 5941 - protein, 85 aa, Homo sapiens
EQKLELNPHTVENVTKNEDSMTGIEVEKWTQNKKSQLTDHVKGDFSANVPEAEKSKNSEVDKKRTKSPKLFVQTVRNGIKHVHCL

SEQ ID NO: 5942 - protein, 85 aa, Homo sapiens
PAETNVSFKKFNIEEFGKTLENNSYKFLKDTANHKNAMSSVATDMSCDHLKGRSNVLVFQQPGFNCSSIPHSSHSIINHHASIHN

SEQ ID NO: 5943 - protein, 85 aa, Homo sapiens
EGDQPKTPENIPSKEPKDGSPVQPSLLSLMKDRRLTLEQVVAIEALTQLSEAPSENSSPSKSEKDEESEQRTASLLNSCKAILYT

SEQ ID NO: 5944 - protein, 85 aa, Homo sapiens
VRKDLQDPNLQGEPPKLNHCPSLEKQSSCNTVVFNGQTTTLSNSHINSATNQASTKSHEYSKVTNSLSLFIPKSNSSKIDTNKSI

SEQ ID NO: 5945 - protein, 85 aa, Homo sapiens
AQGIITLDNCSNDLHQLPPRNNEVEYCNQLLDSSKKLDSDDLSCQDATHTQIEEDVATQLTQLASIIKINYIKPEDKKVESTPTS

SEQ ID NO: 5946 - protein, 85 aa, Homo sapiens
LVTCNVQQKYNQEKGTIQQKPPSSVHNNHGSSLTKQKNPTQKKTKSTPSRDRRKKKPTVVSYQENDRQKWEKLSYMYGTICDIWI

SEQ ID NO: 5947 - protein, 85 aa, Homo sapiens
ASKFQNFGQFCPHDFPTVFGKISSSTKIWKPLAQTRSIMQPKTVFPPLTQIKLQRYPESAEEKVKVEPLDSLSLFHLKTESNGKA

SEQ ID NO: 5948 - protein, 85 aa, Homo sapiens
FTDKAYNSQVQLTVNANQKAHPLTQPSSPPNQCANVMAGDDQIRFQQVVKEQLMHQRLPTLPGISHETPLPESALTLRNVNVVCS

SEQ ID NO: 5949 - protein, 85 aa, Homo sapiens
GGITVVSTKSEEEVCSSSFGTSEFSTVDSAQKNFNDYAMNFFTNPTKNLVSITKDSELPTCSCLDRVIQKDKGPYYTHLGAGPSV

SEQ ID NO: 5950 - protein, 85 aa, Homo sapiens
AAVREIMENRYGQKGNAIRIEIVVYTGKEGKSSHGCPIAKWVLRRSSDEEKVLCLVRQRTGHHCPTAVMVVLIMVWDGIPLPMAD

SEQ ID NO: 5951 - protein, 85 aa, Homo sapiens
RLYTELTENLKSYNGHPTDRRCTLNENRTCTCQGIDPETCGASFSFGCSWSMYFNGCKFGRSPSPRRFRIDPSSPLHEKNLEDNL

SEQ ID NO: 5952 - protein, 85 aa, Homo sapiens
QSLATRLAPIYKQYAPVAYQNQVEYENVARECRLGSKEGRPFSGVTACLDFCAHPHRDIHNMNNGSTVVCTLTREDNRSLGVIPQ

SEQ ID NO: 5953 - protein, 85 aa, Homo sapiens
DEQLHVLPLYKLSDTDEFGSKEGMEAKIKSGAIEVLAPRRKKRTCFTQPVPRSGKKRAAMMTEVLAHKIRAVEKKPIPRIKRKNN

SEQ ID NO: 5954 - protein, 85 aa, Homo sapiens
STTTNNSKPSSLPTLGSNTETVQPEVKSETEPHFILKSSDNTKTYSLMPSAPHPVKEASPGFSWSPKTASATPAPLKNDATASCG

SEQ ID NO: 5955 - protein, 85 aa, Homo sapiens
FSERSSTPHCTMPSGRLSGANAAAADGPGISQLGEVAPLPTLSAPVMEPLINSEPSTGVTEPLTPHQPNHQPSFLTSPQDLASSP

SEQ ID NO: 5956 - protein, 85 aa, Homo sapiens
MEEDEQHSEADEPPSDEPLSDDPLSPAEEKLPHIDEYWSDSEHIFLDANIGGVAIAPAHGSVLIECARRELHATTPVEHPNRNHP

SEQ ID NO: 5957 - protein, 85 aa, Homo sapiens
TRLSLVFYQHKNLNKPQHGFELNKIKFEAKEAKNKKMKASEQKDQAANEGPEQSSEVNELNQIPSHKALTLTHDNVVTVSPYALT

SEQ ID NO: 5958 - protein, 84 aa, Homo sapiens
NLNKPQHGFELNKIKFEAKEAKNKKMKASEQKDQAANEGPEQSSEVNELNQIPSHKALTLTHDNVVTVSPYALTHVAGPYNHWV

SEQ ID NO: 5959 - protein, 85 aa, Homo sapiens
LSPGKLKQLIQERDVKKKTEPKPPVPVRSLLTRAGAARMNLDRTEVLFQNPESLTCNGFTMALRSTSLSRRLSQPPLVVAKSKKV

SEQ ID NO: 5960 - protein, 85 aa, Homo sapiens
PLSKGLEKQHDCDYKILPALGVKHSENDSVPMQDTQVLPDIETLIGVQNPSLLKGKSQETTQFWSQRVEDSKINIPTHSGPAAEI

SEQ ID NO: 5961 - protein, 85 aa, Homo sapiens
LPGPLEGTRCGEGLFSEETLNDTSGSPKMFAQDTVCAPFPQRATPKVTSQGNPSIQLEELGSRVESLKLSDSYLDPIKSEHDCYP

SEQ ID NO: 5962 - protein, 85 aa, Homo sapiens
TSSLNKVIPDLNLRNCLALGGSTSPTSVIKFLLAGSKQATLGAKPDHQEAFEATANQQEVSDTTSFLGQAFGAIPHQWELPGADP

SEQ ID NO: 5963 - protein, 85 aa, Homo sapiens
VHGEALGETPDLPEIPGAIPVQGEVFGTILDQQETLGMSGSVVPDLPVFLPVPPNPIATFNAPSKWPEPQSTVSYGLAVQGAIQI

SEQ ID NO: 5964 - protein, 85 aa, Homo sapiens
MPLGSGHTPQSSSNSEKNSLPPVMAISNVENEKQVHISFLPANTQGFPLAPERGLFHASLGIAQLSQAGPSKSDRGSSQVSVTST

SEQ ID NO: 5965 - protein, 85 aa, Homo sapiens
VHVVNTTVVTMPVPMVSTSSSSYTTLLPTLEKKKRKRCGVCEPCQQKTNCGECTYCKNRKNSHQICKKRKCEELKKKPSVVVPLE

SEQ ID NO: 5966 - protein, 85 aa, Homo sapiens
VIKENKRPQREKKPKVLKADFDNKPVNGPKSESMDYSRCGHGEEQKLELNPHTVENVTKNEDSMTGIEVEKWTQNKKSQLTDHVK

SEQ ID NO: 5967 - protein, 85 aa, Homo sapiens
GDFSANVPEAEKSKNSEVDKKRTKSPKLFVQTVRNGIKHVHCLPAETNVSFKKFNIEEFGKTLENNSYKFLKDTANHKNAMSSVA

SEQ ID NO: 5968 - protein, 85 aa, Homo sapiens
TDMSCDHLKGRSNVLVFQQPGFNCSSIPHSSHSIINHHASIHNEGDQPKTPENIPSKEPKDGSPVQPSLLSLMKDRRLTLEQVVA

SEQ ID NO: 5969 - protein, 85 aa, Homo sapiens
IEALTQLSEAPSENSSPSKSEKDEESEQRTASLLNSCKAILYTVRKDLQDPNLQGEPPKLNHCPSLEKQSSCNTVVFNGQTTTLS

SEQ ID NO: 5970 - protein, 85 aa, Homo sapiens
NSHINSATNQASTKSHEYSKVTNSLSLFIPKSNSSKIDTNKSIAQGIITLDNCSNDLHQLPPRNNEVEYCNQLLDSSKKLDSDDL

SEQ ID NO: 5971 - protein, 85 aa, Homo sapiens
SCQDATHTQIEEDVATQLTQLASIIKINYIKPEDKKVESTPTSLVTCNVQQKYNQEKGTIQQKPPSSVHNNHGSSLTKQKNPTQK

SEQ ID NO: 5972 - protein, 85 aa, Homo sapiens
KTKSTPSRDRRKKKPTVVSYQENDRQKWEKLSYMYGTICDIWIASKFQNFGQFCPHDFPTVFGKISSSTKIWKPLAQTRSIMQPK

SEQ ID NO: 5973 - protein, 85 aa, Homo sapiens
TVFPPLTQIKLQRYPESAEEKVKVEPLDSLSLFHLKTESNGKAFTDKAYNSQVQLTVNANQKAHPLTQPSSPPNQCANVMAGDDQ

SEQ ID NO: 5974 - protein, 85 aa, Homo sapiens
IRFQQVVKEQLMHQRLPTLPGISHETPLPESALTLRNVNVVCSGGITVVSTKSEEEVCSSSFGTSEFSTVDSAQKNFNDYAMNFF

SEQ ID NO: 5975 - protein, 85 aa, Homo sapiens
TNPTKNLVSITKDSELPTCSCLDRVIQKDKGPYYTHLGAGPSVAAVREIMENRYGQKGNAIRIEIVVYTGKEGKSSHGCPIAKWV

SEQ ID NO: 5976 - protein, 85 aa, Homo sapiens
LRRSSDEEKVLCLVRQRTGHHCPTAVMVVLIMVWDGIPLPMADRLYTELTENLKSYNGHPTDRRCTLNENRTCTCQGIDPETCGA

SEQ ID NO: 5977 - protein, 85 aa, Homo sapiens
SFSFGCSWSMYFNGCKFGRSPSPRRFRIDPSSPLHEKNLEDNLQSLATRLAPIYKQYAPVAYQNQVEYENVARECRLGSKEGRPF

SEQ ID NO: 5978 - protein, 85 aa, Homo sapiens
SGVTACLDFCAHPHRDIHNMNNGSTVVCTLTREDNRSLGVIPQDEQLHVLPLYKLSDTDEFGSKEGMEAKIKSGAIEVLAPRRKK

SEQ ID NO: 5979 - protein, 85 aa, Homo sapiens
RTCFTQPVPRSGKKRAAMMTEVLAHKIRAVEKKPIPRIKRKNNSTTTNNSKPSSLPTLGSNTETVQPEVKSETEPHFILKSSDNT

SEQ ID NO: 5980 - protein, 85 aa, Homo sapiens
KTYSLMPSAPHPVKEASPGFSWSPKTASATPAPLKNDATASCGFSERSSTPHCTMPSGRLSGANAAAADGPGISQLGEVAPLPTL

SEQ ID NO: 5981 - protein, 85 aa, Homo sapiens
SAPVMEPLINSEPSTGVTEPLTPHQPNHQPSFLTSPQDLASSPMEEDEQHSEADEPPSDEPLSDDPLSPAEEKLPHIDEYWSDSE

SEQ ID NO: 5982 - protein, 85 aa, Homo sapiens
HIFLDANIGGVAIAPAHGSVLIECARRELHATTPVEHPNRNHPTRLSLVFYQHKNLNKPQHGFELNKIKFEAKEAKNKKMKASEQ

SEQ ID NO: 5983 - protein, 84 aa, Homo sapiens
GPPPDAVQTSLMDEGASSEKKRQSSADGSQPPKKKPKTTNIELQGVPNDEVHPLLGVKGDGKSKKKQAGRPKGSKAGGAISELL

SEQ ID NO: 5984 - protein, 85 aa, Homo sapiens
MRVVSWNINGIRRPLQGVANQEPSNCAAVAVGRILDELDADIVCLQETKVTRDALTEPLAIVEGYNSYFSFSRNRSGYSGVATFC

SEQ ID NO: 5985 - protein, 85 aa, Homo sapiens
KDNATPVAAEEGLSGLFATQNGDVGCYGNMDEFTQEELRALDSEGRALLTQHKIRTWEGKEKTLTLINVYCPHADPGRPERLVFK

SEQ ID NO: 5986 - protein, 85 aa, Homo sapiens
MRFYRLLQIRAEALLAAGSHVIILGDLNTAHRPIDHWDAVNLECFEEDPGRKWMDSLLSNLGCQSASHVGPFIDSYRCFQPKQEG

SEQ ID NO: 5987 - protein, 85 aa, Homo sapiens
AFTCWSAVTGARHLNYGSRLDYVLGDRTLVIDTFQASFLLPEVMGSDHCPVGAVLSVSSVPAKQCPPLCTRFLPEFAGTQLKILR

SEQ ID NO: 5988 - protein, 85 aa, Homo sapiens
FLVPLEQSPVLEQSTLQHNNQTRVQTCQNKAQVRSTRPQPSQVGSSRGQKNLKSYFQPSPSCPQASPDIELPSLPLMSALMTPKT

SEQ ID NO: 5989 - protein, 85 aa, Homo sapiens
PEEKAVAKVVKGQAKTSEAKDEKELRTSFWKSVLAGPLRTPLCGGHREPCVMRTVKKPGPNLGRRFYMCARPRGPPTDPSSRCNF

SEQ ID NO: 5990 - protein, 84 aa, Homo sapiens
VVKGQAKTSEAKDEKELRTSFWKSVLAGPLRTPLCGGHREPCVMRTVKKPGPNLGRRFYMCARPRGPPTDPSSRCNFFLWSRPS

SEQ ID NO: 5991 - protein, 85 aa, Homo sapiens
VCLQETKVTRDALTEPLAIVEGYNSYFSFSRNRSGYSGVATFCKDNATPVAAEEGLSGLFATQNGDVGCYGNMDEFTQEELRALD

SEQ ID NO: 5992 - protein, 85 aa, Homo sapiens
SEGRALLTQHKIRTWEGKEKTLTLINVYCPHADPGRPERLVFKMRFYRLLQIRAEALLAAGSHVIILGDLNTAHRPIDHWDAVNL

SEQ ID NO: 5993 - protein, 85 aa, Homo sapiens
ECFEEDPGRKWMDSLLSNLGCQSASHVGPFIDSYRCFQPKQEGAFTCWSAVTGARHLNYGSRLDYVLGDRTLVIDTFQASFLLPE

SEQ ID NO: 5994 - protein, 85 aa, Homo sapiens
VMGSDHCPVGAVLSVSSVPAKQCPPLCTRFLPEFAGTQLKILRFLVPLEQSPVLEQSTLQHNNQTRVQTCQNKAQVRSTRPQPSQ

SEQ ID NO: 5995 - protein, 85 aa, Homo sapiens
VGSSRGQKNLKSYFQPSPSCPQASPDIELPSLPLMSALMTPKTPEEKAVAKVVKGQAKTSEAKDEKELRTSFWKSVLAGPLRTPL

SEQ ID NO: 5996 - protein, 85 aa, Homo sapiens
ASLLAKDAYLQSLAKKICSHSAPEQQARTRAGKTQGSETAGPPKKKRKKTQKKFRKREEKAAEHKAKSLGEKSPAASGARRPEAA

SEQ ID NO: 5997 - protein, 85 aa, Homo sapiens
KEEAAWASSSAGNPADGLATEPESVFALDVLRQRLHEKIQEARGQGSAKELSPAALEKRRRRKQERDRKKRKRKELRAKEKARKA

SEQ ID NO: 5998 - protein, 85 aa, Homo sapiens
EEATEAQEVVEATPEGACTEPREPPGLIFNKVEVSEDEPASKAQRRKEKRQRVKGNLTPLTGRNYRQLLERLQARQSRLDELRGQ

SEQ ID NO: 5999 - protein, 85 aa, Homo sapiens
DEGKAQELEAKMKWTNLLYKAEGVKIRDDERLLQEALKRKEKRRAQRQRRWEKRTAGVVEKMQQRQDRRRQNLRRKKAARAERRL

SEQ ID NO: 6000 - protein, 84 aa, Homo sapiens
EGVKIRDDERLLQEALKRKEKRRAQRQRRWEKRTAGVVEKMQQRQDRRRQNLRRKKAARAERRLLRARKKGRILPQDLERAGLV

SEQ ID NO: 6001 - protein, 85 aa, Homo sapiens
PKKKRKKTQKKFRKREEKAAEHKAKSLGEKSPAASGARRPEAAKEEAAWASSSAGNPADGLATEPESVFALDVLRQRLHEKIQEA

SEQ ID NO: 6002 - protein, 85 aa, Homo sapiens
RGQGSAKELSPAALEKRRRRKQERDRKKRKRKELRAKEKARKAEEATEAQEVVEATPEGACTEPREPPGLIFNKVEVSEDEPASK

SEQ ID NO: 6003 - protein, 85 aa, Homo sapiens
AQRRKEKRQRVKGNLTPLTGRNYRQLLERLQARQSRLDELRGQDEGKAQELEAKMKWTNLLYKAEGVKIRDDERLLQEALKRKEK

SEQ ID NO: 6004 - protein, 84 aa, Homo sapiens
TYKQRFLFAKLFSHITSARKARKYEIPHFRLKKVENIKIWLSLRSYLKRRGPQRSVDVVVSSVFLLTLSIAFICCAQVKVSHLL

SEQ ID NO: 6005 - protein, 85 aa, Homo sapiens
SRPVRNRKVVDYSQFQESDDADEDYGRDSGPPTKKIRSSPREAKNKRRSGKNSQEDSEDSEDKDVKTKKDDSHSAEDSEDEKEDH

SEQ ID NO: 6006 - protein, 85 aa, Homo sapiens
KNVRQQRQAASKAASKQREMLMEDVGSEEEQEEEDEAPFQEKDSGSDEDFLMEDDDDSDYGSSKKKNKKMVKKSKPERKEKKMPK

SEQ ID NO: 6007 - protein, 84 aa, Homo sapiens
SKPERKEKKMPKPRLKATVTPSPVKGKGKVGRPTASKASKEKTPSPKEEDEEPESPPEKKTSTSPPPEKSGDEGSEDEAPSGED

SEQ ID NO: 6008 - protein, 85 aa, Homo sapiens
AKNKRRSGKNSQEDSEDSEDKDVKTKKDDSHSAEDSEDEKEDHKNVRQQRQAASKAASKQREMLMEDVGSEEEQEEEDEAPFQEK

SEQ ID NO: 6009 - protein, 85 aa, Homo sapiens
DSGSDEDFLMEDDDDSDYGSSKKKNKKMVKKSKPERKEKKMPKPRLKATVTPSPVKGKGKVGRPTASKASKEKTPSPKEEDEEPE

SEQ ID NO: 6010 - protein, 85 aa, Homo sapiens
DRTCEERPAEDGSDEEDPDSMEAPTRIRDTPEDIVLEAPASGLAFHPARDLLAAGDVDGDVFVFSYSCQEGETKELWSSGHHLKA

SEQ ID NO: 6011 - protein, 85 aa, Homo sapiens
CRAVAFSEDGQKLITVSKDKAIHVLDVEQGQLERRVSKAHGAPINSLLLVDENVLATGDDTGGICLWDQRKEGPLMDMRQHEEYI

SEQ ID NO: 6012 - protein, 85 aa, Homo sapiens
ADMALDPAKKLLLTASGDGCLGIFNIKRRRFELLSEPQSGDLTSVTLMKWGKKVACGSSEGTIYLFNWNGFGATSDRFALRAESI

SEQ ID NO: 6013 - protein, 85 aa, Homo sapiens
DCMVPVTESLLCTGSTDGVIRAVNILPNRVVGSVGQHTGEPVEELALSHCGRFLASSGHDQRLKFWDMAQLRAVVVDDYRRRKKK

SEQ ID NO: 6014 - protein, 84 aa, Homo sapiens
ELALSHCGRFLASSGHDQRLKFWDMAQLRAVVVDDYRRRKKKGGPLRALSSKTWSTDDFFAGLREEGEDSMAQEEKEETGDDSD

SEQ ID NO: 6015 - protein, 85 aa, Homo sapiens
MAFHPARDLLAAGDVDGDVFVFSYSCQEGETKELWSSGHHLKACRAVAFSEDGQKLITVSKDKAIHVLDVEQGQLERRVSKAHGA

SEQ ID NO: 6016 - protein, 85 aa, Homo sapiens
PINSLLLVDENVLATGDDTGGICLWDQRKEGPLMDMRQHEEYIADMALDPAKKLLLTASGDGCLGIFNIKRRRFELLSEPQSGDL

SEQ ID NO: 6017 - protein, 85 aa, Homo sapiens
TSVTLMKWGKKVACGSSEGTIYLFNWNGFGATSDRFALRAESIDCMVPVTESLLCTGSTDGVIRAVNILPNRVVGSVGQHTGEPV

SEQ ID NO: 6018 - protein, 85 aa, Homo sapiens
EELALSHCGRFLASSGHDQRLKFWDMAQLRAVVVDDYRRRKKKGGPLRALSSKTWSTDDFFAGLREEGEDSMAQEEKEETGDDSD

SEQ ID NO: 6019 - protein, 85 aa, Homo sapiens
ASSLNEDPEGSRITYVKGDLFACPKTDSLAHCISEDCRMGAGIAVLFKKKFGGVQELLNQQKKSGEVAVLKRDGRYIYYLDWMWS

SEQ ID NO: 6020 - protein, 84 aa, Homo sapiens
SSLNEDPEGSRITYVKGDLFACPKTDSLAHCISEDCRMGAGIAVLFKKKFGGVQELLNQQKKSGEVAVLKRDGRYIYYLDWMWS

SEQ ID NO: 6021 - protein, 85 aa, Homo sapiens
EFAGQNPELCFSHSIWLPAQAQALLTLSSWNRSWKLFPRSICLDVANGYSEHFVEFVKDVRKRFPQHTIMAGNVVTGEMVEELIL

SEQ ID NO: 6022 - protein, 85 aa, Homo sapiens
SGADIIKVGIGPGSVCTTRKKTGVGYPQLSAVMECADAAHGLKGHIISDGGCSCPGDVAKAFGAGADFVMLGGMLAGHSESGGEL

SEQ ID NO: 6023 - protein, 85 aa, Homo sapiens
IERDGKKYKLFYGMSSEMAMKKYAGGVAEYRASEGKTVEVPFKGDVEHTIRDILGGIRSTCTYVGAAKLKELSRRTTFIRVTQQV

SEQ ID NO: 6024 - protein, 85 aa, Homo sapiens
TYSGVPIIAANMDTVGTFEMAKVLCKFSLFTAVHKHYSLVQWQEFAGQNPELCFSHSIWLPAQAQALLTLSSWNRSWKLFPRSIC

SEQ ID NO: 6025 - protein, 85 aa, Homo sapiens
MDVANGYSEHFVEFVKDVRKRFPQHTIMAGNVVTGEMVEELILSGADIIKVGIGPGSVCTTRKKTGVGYPQLSAVMECADAAHGL

SEQ ID NO: 6026 - protein, 85 aa, Homo sapiens
KGHIISDGGCSCPGDVAKAFGAGADFVMLGGMLAGHSESGGELIERDGKKYKLFYGMSSEMAMKKYAGGVAEYRASEGKTVEVPF

SEQ ID NO: 6027 - protein, 85 aa, Homo sapiens
NPIYHLAEANGLLEETTDGERSVGRISLYSKNGVACYLTNHGRRIPKDVVEEFSDLYNEPMQVLFSGEATHRKYYSTTHGALLSG

SEQ ID NO: 6028 - protein, 84 aa, Homo sapiens
RSVGRISLYSKNGVACYLTNHGRRIPKDVVEEFSDLYNEPMQVLFSGEATHRKYYSTTHGALLSGQREAARLIEMYRDLFQQGT

SEQ ID NO: 6029 - protein, 85 aa, Homo sapiens
TESASSTSGQEFDVFSVMDWKDGVGTLPGSDLKFRVNEFGALEVITDENEMENVKKATATTTWMVPTAQEAPTSPPSSRPVFPPA

SEQ ID NO: 6030 - protein, 85 aa, Homo sapiens
YWTSPPGCPTVFSEKTGMPFRLKDPVKVEGLQFCENCCQYGNVDECLSGGNYCSQNCARHIKDKDQKEERDVEEDNEEEDPKCSR

SEQ ID NO: 6031 - protein, 85 aa, Homo sapiens
KKKPKLSLKADTKEDGEERDDEMENKQDVRILRGSQRARRKRRGDSAVLKQGLPPKGKKAWCWASYLEEEKAVAVPAKLFKEHQS

SEQ ID NO: 6032 - protein, 85 aa, Homo sapiens
FPYNKNGFKVGMKLEGVDPEHQSVYCVLTVAEVCGYRIKLHFDGYSDCYDFWVNADALDIHPVGWCEKTGHKLHPPKGYKEEEFN

SEQ ID NO: 6033 - protein, 85 aa, Homo sapiens
WQTYLKTCKAQAAPKSLFENQNITVIPSGFRVGMKLEAVDKKNPSFICVATVTDMVDNRFLVHFDNWDESYDYWCEASSPHIHPV

SEQ ID NO: 6034 - protein, 85 aa, Homo sapiens
GWCKEHRRTLITPPGYPNVKHFSWDKYLEETNSLPAPARAFKVKPPHGFQKKMKLEVVDKRNPMFIRVATVADTDDHRVKVHFDG

SEQ ID NO: 6035 - protein, 85 aa, Homo sapiens
WNNCYDYWIDADSPDIHPVGWCSKTGHPLQPPLSPLELMEASEHGGCSTPGCKGIGHFKRARHLGPHSAANCPYSEINLNKDRIF

SEQ ID NO: 6036 - protein, 85 aa, Homo sapiens
PDRLSGEMPPASPSFPRNKRTDANESSSSPEIRDQHADDVKEDFEERTESEMRTSHEARGAREEPTVQQAQRRSAVFLSFKSPIP

SEQ ID NO: 6037 - protein, 85 aa, Homo sapiens
CLPLRWEQQSKLLPTVAGIPASKVSKWSTDEVSEFIQSLPGCEEHGKVFKDEQIDGEAFLLMTQTDIVKIMSIKLGPALKIFNSI

SEQ ID NO: 6038 - protein, 85 aa, Homo sapiens
EVITDENEMENVKKATATTTWMVPTAQEAPTSPPSSRPVFPPAYWTSPPGCPTVFSEKTGMPFRLKDPVKVEGLQFCENCCQYGN

SEQ ID NO: 6039 - protein, 85 aa, Homo sapiens
VDECLSGGNYCSQNCARHIKDKDQKEERDVEEDNEEEDPKCSRKKKPKLSLKADTKEDGEERDDEMENKQDVRILRGSQRARRKR

SEQ ID NO: 6040 - protein, 85 aa, Homo sapiens
RGDSAVLKQGLPPKGKKAWCWASYLEEEKAVAVPAKLFKEHQSFPYNKNGFKVGMKLEGVDPEHQSVYCVLTVAEVCGYRIKLHF

SEQ ID NO: 6041 - protein, 85 aa, Homo sapiens
DGYSDCYDFWVNADALDIHPVGWCEKTGHKLHPPKGYKEEEFNWQTYLKTCKAQAAPKSLFENQNITVIPSGFRVGMKLEAVDKK

SEQ ID NO: 6042 - protein, 85 aa, Homo sapiens
NPSFICVATVTDMVDNRFLVHFDNWDESYDYWCEASSPHIHPVGWCKEHRRTLITPPGYPNVKHFSWDKYLEETNSLPAPARAFK

SEQ ID NO: 6043 - protein, 85 aa, Homo sapiens
VKPPHGFQKKMKLEVVDKRNPMFIRVATVADTDDHRVKVHFDGWNNCYDYWIDADSPDIHPVGWCSKTGHPLQPPLSPLELMEAS

SEQ ID NO: 6044 - protein, 85 aa, Homo sapiens
EHGGCSTPGCKGIGHFKRARHLGPHSAANCPYSEINLNKDRIFPDRLSGEMPPASPSFPRNKRTDANESSSSPEIRDQHADDVKE

SEQ ID NO: 6045 - protein, 85 aa, Homo sapiens
DFEERTESEMRTSHEARGAREEPTVQQAQRRSAVFLSFKSPIPCLPLRWEQQSKLLPTVAGIPASKVSKWSTDEVSEFIQSLPGC

SEQ ID NO: 6046 - protein, 85 aa, Homo sapiens
AGEEINEDYPVEIHEYLSAFENSIGAVDEMLKTMMSVSRNELLQKLDPLEQAKVDLVSAYTLNSMFWVYLATQGVNPKEHPVKQE

SEQ ID NO: 6047 - protein, 84 aa, Homo sapiens
VSAYTLNSMFWVYLATQGVNPKEHPVKQELERIRVYMNRVKEITDKKKAGKLDRGAASRFVKNALWEPKSKNASKVANKGKSKS

SEQ ID NO: 6048 - protein, 85 aa, Homo sapiens
MQKLDPLEQAKVDLVSAYTLNSMFWVYLATQGVNPKEHPVKQELERIRVYMNRVKEITDKKKAGKLDRGAASRFVKNALWEPKSK

SEQ ID NO: 6049 - protein, 85 aa, Homo sapiens
AAPVKGNRKQSTEGDALDPPASPKPAGKQNGIQNPISLEDSPEAGGEREEEQEREEEQAFLVSLYKFMKERHTPIERVPHLGFKQ

SEQ ID NO: 6050 - protein, 85 aa, Homo sapiens
INLWKIYKAVEKLGAYELVTGRRLWKNVYDELGGSPGSTSAATCTRRHYERLVLPYVRHLKGEDDKPLPTSKPRKQYKMAKENRG

SEQ ID NO: 6051 - protein, 85 aa, Homo sapiens
DDGATERPKKAKEERRMDQMMPGKTKADAADPAPLPSQEPPRNSTEQQGLASGSSVSFVGASGCPEAYKRLLSSFYCKGTHGIMS

SEQ ID NO: 6052 - protein, 85 aa, Homo sapiens
PLAKKKLLAQVSKVEALQCQEEGCRHGAEPQASPAVHLPESPQSPKGLTENSRHRLTPQEGLQAPGGSLREEAQAGPCPAAPIFK

SEQ ID NO: 6053 - protein, 85 aa, Homo sapiens
GCFYTHPTEVLKPVSQHPRDFFSRLKDGVLLGPPGKEGLSVKEPQLVWGGDANRPSAFHKGGSRKGILYPKPKACWVSPMAKVPA

SEQ ID NO: 6054 - protein, 85 aa, Homo sapiens
ESPTLPPTFPSSPGLGSKRSLEEEGAAHSGKRLRAVSPFLKEADAKKCGAKPAGSGLVSCLLGPALGPVPPEAYRGTMLHCPLNF

SEQ ID NO: 6055 - protein, 84 aa, Homo sapiens
FTGTPGPLKGQAALPFSPLVIPAFPAHFLATAGPSPMAAGLMHFPPTSFDSALRHRLCPASSAWHAPPVTTYAAPHFFHLNTKL

SEQ ID NO: 6056 - protein, 85 aa, Homo sapiens
EAGGEREEEQEREEEQAFLVSLYKFMKERHTPIERVPHLGFKQINLWKIYKAVEKLGAYELVTGRRLWKNVYDELGGSPGSTSAA

SEQ ID NO: 6057 - protein, 85 aa, Homo sapiens
TCTRRHYERLVLPYVRHLKGEDDKPLPTSKPRKQYKMAKENRGDDGATERPKKAKEERRMDQMMPGKTKADAADPAPLPSQEPPR

SEQ ID NO: 6058 - protein, 85 aa, Homo sapiens
NSTEQQGLASGSSVSFVGASGCPEAYKRLLSSFYCKGTHGIMSPLAKKKLLAQVSKVEALQCQEEGCRHGAEPQASPAVHLPESP

SEQ ID NO: 6059 - protein, 85 aa, Homo sapiens
QSPKGLTENSRHRLTPQEGLQAPGGSLREEAQAGPCPAAPIFKGCFYTHPTEVLKPVSQHPRDFFSRLKDGVLLGPPGKEGLSVK

SEQ ID NO: 6060 - protein, 85 aa, Homo sapiens
EPQLVWGGDANRPSAFHKGGSRKGILYPKPKACWVSPMAKVPAESPTLPPTFPSSPGLGSKRSLEEEGAAHSGKRLRAVSPFLKE

SEQ ID NO: 6061 - protein, 85 aa, Homo sapiens
ADAKKCGAKPAGSGLVSCLLGPALGPVPPEAYRGTMLHCPLNFTGTPGPLKGQAALPFSPLVIPAFPAHFLATAGPSPMAAGLMH

SEQ ID NO: 6062 - protein, 85 aa, Homo sapiens
EDFLLSNGYQLGKTIGEGTYSKVKEAFSKKHQRKVAIKVIDKMGGPEEFIQRFLPRELQIVRTLDHKNIIQVYEMLESADGKICL

SEQ ID NO: 6063 - protein, 85 aa, Homo sapiens
VMELAEGGDVFDCVLNGGPLPESRAKALFRQMVEAIRYCHGCGVAHRDLKCENALLQGFNLKLTDFGFAKVLPKSHRELSQTFCG

SEQ ID NO: 6064 - protein, 85 aa, Homo sapiens
STAYAAPEVLQGIPHDSKKGDVWSMGVVLYVMLCASLPFDDTDIPKMLWQQQKGVSFPTHLSISADCQDLLKRLLEPDMILRPSI

SEQ ID NO: 6065 - protein, 84 aa, Homo sapiens
PHDSKKGDVWSMGVVLYVMLCASLPFDDTDIPKMLWQQQKGVSFPTHLSISADCQDLLKRLLEPDMILRPSIEEVSWHPWLAST

SEQ ID NO: 6066 - protein, 85 aa, Homo sapiens
MGGPEEFIQRFLPRELQIVRTLDHKNIIQVYEMLESADGKICLVMELAEGGDVFDCVLNGGPLPESRAKALFRQMVEAIRYCHGC

SEQ ID NO: 6067 - protein, 85 aa, Homo sapiens
GVAHRDLKCENALLQGFNLKLTDFGFAKVLPKSHRELSQTFCGSTAYAAPEVLQGIPHDSKKGDVWSMGVVLYVMLCASLPFDDT

SEQ ID NO: 6068 - protein, 85 aa, Homo sapiens
DVRFYPPPAQPAAAPDAPCLGPSPCLDPYYCNKFDGENMYMSMTEPSQDYVPASQSYPGPSLESEDFNIPPITPPSLPDHSLVHL

SEQ ID NO: 6069 - protein, 85 aa, Homo sapiens
NEVESGYHSLCHPMNHNGLLPFHPQNMDLPEITVSNMLGQDGTLLSNSISVMPDIRNPEGTQYSSHPQMAAMRPRGQPADIRQQP

SEQ ID NO: 6070 - protein, 85 aa, Homo sapiens
GMMPHGQLTTINQSQLSAQLGLNMGGSNVPHNSPSPPGSKSATPSPSSSVHEDEGDDTSKINGGEKRPASDMGKKPKTPKKKKKK

SEQ ID NO: 6071 - protein, 85 aa, Homo sapiens
DPNEPQKPVSAYALFFRDTQAAIKGQNPNATFGEVSKIVASMWDGLGEEQKQVYKKKTEAAKKEYLKQLAAYRASLVSKSYSEPV

SEQ ID NO: 6072 - protein, 85 aa, Homo sapiens
DVKTSQPPQLINSKPSVFHGPSQAHSALYLSSHYHQQPGMNPHLTAMHPSLPRNIAPKPNNQMPVTVSIANMAVSPPPPLQISPP

SEQ ID NO: 6073 - protein, 85 aa, Homo sapiens
LHQHLNMQQHQPLTMQQPLGNQLPMQVQSALHSPTMQQGFTLQPDYQTIINPTSTAAQVVTQAMEYVRSGCRNPPPQPVDWNNDY

SEQ ID NO: 6074 - protein, 84 aa, Homo sapiens
QPLGNQLPMQVQSALHSPTMQQGFTLQPDYQTIINPTSTAAQVVTQAMEYVRSGCRNPPPQPVDWNNDYCSSGGMQRDKALYLT

SEQ ID NO: 6075 - protein, 85 aa, Homo sapiens
MTEPSQDYVPASQSYPGPSLESEDFNIPPITPPSLPDHSLVHLNEVESGYHSLCHPMNHNGLLPFHPQNMDLPEITVSNMLGQDG

SEQ ID NO: 6076 - protein, 85 aa, Homo sapiens
TLLSNSISVMPDIRNPEGTQYSSHPQMAAMRPRGQPADIRQQPGMMPHGQLTTINQSQLSAQLGLNMGGSNVPHNSPSPPGSKSA

SEQ ID NO: 6077 - protein, 85 aa, Homo sapiens
TPSPSSSVHEDEGDDTSKINGGEKRPASDMGKKPKTPKKKKKKDPNEPQKPVSAYALFFRDTQAAIKGQNPNATFGEVSKIVASM

SEQ ID NO: 6078 - protein, 85 aa, Homo sapiens
WDGLGEEQKQVYKKKTEAAKKEYLKQLAAYRASLVSKSYSEPVDVKTSQPPQLINSKPSVFHGPSQAHSALYLSSHYHQQPGMNP

SEQ ID NO: 6079 - protein, 85 aa, Homo sapiens
HLTAMHPSLPRNIAPKPNNQMPVTVSIANMAVSPPPPLQISPPLHQHLNMQQHQPLTMQQPLGNQLPMQVQSALHSPTMQQGFTL

SEQ ID NO: 6080 - protein, 85 aa, Homo sapiens
NVATTLPIRNKAASKQKSSSHLPANSQDVQGYITNQSPESIVEEAQGKLTELEQRIKEAIEKNAQLQSLELAHADQLTKEKIEEL

SEQ ID NO: 6081 - protein, 85 aa, Homo sapiens
NKTREEQIQKKQKILEELQKVERELQLKTQQQLKKQYLEVKAQRIQLQQQQQQSCQHLGLLTPVGVGEQLSEGDYARLQQVDPVL

SEQ ID NO: 6082 - protein, 85 aa, Homo sapiens
LKDEPQQTAAQMGFAPIQPLAMPQALPLAAGPLPPGSIANLTELQGVIVGQPVLGQAQLAGLGQGILTETQQGLMVASPAQTLND

SEQ ID NO: 6083 - protein, 85 aa, Homo sapiens
TLDDIMAAVSGRASAMSNTPTHSIAASISQPQTPTPSPIISPSAMLPIYPAIDIDAQTESNHDTALTLACAGGHEELVQTLLERG

SEQ ID NO: 6084 - protein, 85 aa, Homo sapiens
ASIEHRDKKGFTPLILAATAGHVGVVEILLDNGADIEAQSERTKDTPLSLACSGGRQEVVELLLARGANKEHRNVSDYTPLSLAA

SEQ ID NO: 6085 - protein, 85 aa, Homo sapiens
SGGYVNIIKILLNAGAEINSRTGSKLGISPLMLAAMNGHTAAVKLLLDMGSDINAQIETNRNTALTLACFQGRTEVVSLLLDRKA

SEQ ID NO: 6086 - protein, 85 aa, Homo sapiens
NVEHRAKTGLTPLMEAASGGYAEVGRVLLDKGADVNAPPVPSSRDTALTIAADKGHYKFCELLIGRGAHIDVRNKKGNTPLWLAA

SEQ ID NO: 6087 - protein, 85 aa, Homo sapiens
NGGHLDVVQLLVQAGADVDAADNRKITPLMAAFRKGHVKVVRYLVKEVNQFPSDSECMRYIATITDKEMLKKCHLCMESIVQAKD

SEQ ID NO: 6088 - protein, 85 aa, Homo sapiens
RQAAEANKNASILLEELDLEKLREESRRLALAAKREKRKEKRRKKKEEQRRKLEEIEAKNKENFELQAAQEKEKLKVEDEPEVLT

SEQ ID NO: 6089 - protein, 85 aa, Homo sapiens
EPPSATTTTTIGISATWTTLAGSHGKRNNTITTTSSKRKNRKNKITPENVQIIFDDPLPISYSQPEKVNGESKSSSTSESGDSDN

SEQ ID NO: 6090 - protein, 85 aa, Homo sapiens
MRISSCSDESSNSNSSRKSDNHSPAVVTTTVSSKKQPSVLVTFPKEERKSVSGKASIKLSETISEGTSNSLSTCTKSGPSPLSSP

SEQ ID NO: 6091 - protein, 85 aa, Homo sapiens
NGKLTVASPKRGQKREEGWKEVVRRSKKVSVPSTVISRVIGRGGCNINAIREFTGAHIDIDKQKDKTGDRIITIRGGTESTRQAT

SEQ ID NO: 6092 - protein, 85 aa, Homo sapiens
QLINALIKDPDKEIDELIPKNRLKSSSANSKIGSSAPTTTAANTSLMGIKMTTVALSSTSQTATALTVPAISSASTHKTIKNPVN

SEQ ID NO: 6093 - protein, 85 aa, Homo sapiens
NVRPGFPVSLPLAYPPPQFAHALLAAQTFQQIRPPRLPMTHFGGTFPPAQSTWGPFPVRPLSPARATNSPKPHMVPRHSNQNSSG

SEQ ID NO: 6094 - protein, 85 aa, Homo sapiens
SQVNSAGSLTSSPTTTTSSSASTVPGTSTNGSPSSPSVRRQLFVTVVKTSNATTTTVTTTASNNNTAPTNATYPMPTAKEHYPVS

SEQ ID NO: 6095 - protein, 85 aa, Homo sapiens
SPSSPSPPAQPGGVSRNSPLDCGSASPNKVASSSEQEAGSPPVVETTNTRPPNSSSSSGSSSAHSNQQQPPGSVSQEPRPPLQQS

SEQ ID NO: 6096 - protein, 85 aa, Homo sapiens
QVPPPEVRMTVPPLATSSAPVAVPSTAPVTYPMPQTPMGCPQPTPKMETPAIRPPPHGTTAPHKNSASVQNSSVAVLSVNHIKRP

SEQ ID NO: 6097 - protein, 85 aa, Homo sapiens
HSVPSSVQLPSTLSTQSACQNSVHPANKPIAPNFSAPLPFGPFSTLFENSPTSAHAFWGGSVVSSQSTPESMLSGKSSYLPNSDP

SEQ ID NO: 6098 - protein, 85 aa, Homo sapiens
LHQSDTSKAPGFRPPLQRPAPSPSGIVNMDSPYGSVTPSSTHLGNFASNISGGQMYGPGAPLGGAPAAANFNRQHFSPLSLLTPC

SEQ ID NO: 6099 - protein, 85 aa, Homo sapiens
SSASNDSSAQSVSSGVRAPSPAPSSVPLGSEKPSNVSQDRKVPVPIGTERSARIRQTGTSAPSVIGSNLSTSVGHSGIWSFEGIG

SEQ ID NO: 6100 - protein, 85 aa, Homo sapiens
GNQDKVDWCNPGMGNPMIHRPMSDPGVFSQHQAMERDSTGIVTPSGTFHQHVPAGYMDFPKVGGMPFSVYGNAMIPPVAPIPDGA

SEQ ID NO: 6101 - protein, 85 aa, Homo sapiens
LSAPPPDVTQLTPPSHDLNRAPRVPVQALPMVVPPQEPDKPPANVATTLPIRNKAASKQKSSSHLPANSQDVQGYITNQSPESIV

SEQ ID NO: 6102 - protein, 85 aa, Homo sapiens
EEAQGKLTELEQRIKEAIEKNAQLQSLELAHADQLTKEKIEELNKTREEQIQKKQKILEELQKVERELQLKTQQQLKKQYLEVKA

SEQ ID NO: 6103 - protein, 85 aa, Homo sapiens
QRIQLQQQQQQSCQHLGLLTPVGVGEQLSEGDYARLQQVDPVLLKDEPQQTAAQMGFAPIQPLAMPQALPLAAGPLPPGSIANLT

SEQ ID NO: 6104 - protein, 85 aa, Homo sapiens
ELQGVIVGQPVLGQAQLAGLGQGILTETQQGLMVASPAQTLNDTLDDIMAAVSGRASAMSNTPTHSIAASISQPQTPTPSPIISP

SEQ ID NO: 6105 - protein, 85 aa, Homo sapiens
SAMLPIYPAIDIDAQTESNHDTALTLACAGGHEELVQTLLERGASIEHRDKKGFTPLILAATAGHVGVVEILLDNGADIEAQSER

SEQ ID NO: 6106 - protein, 85 aa, Homo sapiens
TKDTPLSLACSGGRQEVVELLLARGANKEHRNVSDYTPLSLAASGGYVNIIKILLNAGAEINSRTGSKLGISPLMLAAMNGHTAA

SEQ ID NO: 6107 - protein, 85 aa, Homo sapiens
VKLLLDMGSDINAQIETNRNTALTLACFQGRTEVVSLLLDRKANVEHRAKTGLTPLMEAASGGYAEVGRVLLDKGADVNAPPVPS

SEQ ID NO: 6108 - protein, 85 aa, Homo sapiens
SRDTALTIAADKGHYKFCELLIGRGAHIDVRNKKGNTPLWLAANGGHLDVVQLLVQAGADVDAADNRKITPLMAAFRKGHVKVVR

SEQ ID NO: 6109 - protein, 85 aa, Homo sapiens
YLVKEVNQFPSDSECMRYIATITDKEMLKKCHLCMESIVQAKDRQAAEANKNASILLEELDLEKLREESRRLALAAKREKRKEKR

SEQ ID NO: 6110 - protein, 85 aa, Homo sapiens
RKKKEEQRRKLEEIEAKNKENFELQAAQEKEKLKVEDEPEVLTEPPSATTTTTIGISATWTTLAGSHGKRNNTITTTSSKRKNRK

SEQ ID NO: 6111 - protein, 85 aa, Homo sapiens
NKITPENVQIIFDDPLPISYSQPEKVNGESKSSSTSESGDSDNMRISSCSDESSNSNSSRKSDNHSPAVVTTTVSSKKQPSVLVT

SEQ ID NO: 6112 - protein, 85 aa, Homo sapiens
FPKEERKSVSGKASIKLSETISEGTSNSLSTCTKSGPSPLSSPNGKLTVASPKRGQKREEGWKEVVRRSKKVSVPSTVISRVIGR

SEQ ID NO: 6113 - protein, 85 aa, Homo sapiens
GGCNINAIREFTGAHIDIDKQKDKTGDRIITIRGGTESTRQATQLINALIKDPDKEIDELIPKNRLKSSSANSKIGSSAPTTTAA

SEQ ID NO: 6114 - protein, 85 aa, Homo sapiens
NTSLMGIKMTTVALSSTSQTATALTVPAISSASTHKTIKNPVNNVRPGFPVSLPLAYPPPQFAHALLAAQTFQQIRPPRLPMTHF

SEQ ID NO: 6115 - protein, 85 aa, Homo sapiens
GGTFPPAQSTWGPFPVRPLSPARATNSPKPHMVPRHSNQNSSGSQVNSAGSLTSSPTTTTSSSASTVPGTSTNGSPSSPSVRRQL

SEQ ID NO: 6116 - protein, 85 aa, Homo sapiens
FVTVVKTSNATTTTVTTTASNNNTAPTNATYPMPTAKEHYPVSSPSSPSPPAQPGGVSRNSPLDCGSASPNKVASSSEQEAGSPP

SEQ ID NO: 6117 - protein, 85 aa, Homo sapiens
VVETTNTRPPNSSSSSGSSSAHSNQQQPPGSVSQEPRPPLQQSQVPPPEVRMTVPPLATSSAPVAVPSTAPVTYPMPQTPMGCPQ

SEQ ID NO: 6118 - protein, 85 aa, Homo sapiens
PTPKMETPAIRPPPHGTTAPHKNSASVQNSSVAVLSVNHIKRPHSVPSSVQLPSTLSTQSACQNSVHPANKPIAPNFSAPLPFGP

SEQ ID NO: 6119 - protein, 85 aa, Homo sapiens
FSTLFENSPTSAHAFWGGSVVSSQSTPESMLSGKSSYLPNSDPLHQSDTSKAPGFRPPLQRPAPSPSGIVNMDSPYGSVTPSSTH

SEQ ID NO: 6120 - protein, 85 aa, Homo sapiens
MGNFASNISGGQMYGPGAPLGGAPAAANFNRQHFSPLSLLTPCSSASNDSSAQSVSSGVRAPSPAPSSVPLGSEKPSNVSQDRKV

SEQ ID NO: 6121 - protein, 85 aa, Homo sapiens
PVPIGTERSARIRQTGTSAPSVIGSNLSTSVGHSGIWSFEGIGGNQDKVDWCNPGMGNPMIHRPMSDPGVFSQHQAMERDSTGIV

SEQ ID NO: 6122 - protein, 85 aa, Homo sapiens
TPSGTFHQHVPAGYMDFPKVGGMPFSVYGNAMIPPVAPIPDGAGGPIFNGPHAADPSWNSLIKMVSSSTENNGPQTVWTGPWAPH

SEQ ID NO: 6123 - protein, 85 aa, Homo sapiens
PKPVPGKSTPKLNGSGPSWWPECTCTNRDWYEQVNGSDGMFKYEEIVLERGNSGLGFSIAGGIDNPHVPDDPGIFITKIIPGGAA

SEQ ID NO: 6124 - protein, 85 aa, Homo sapiens
AMDGRLGVNDCVLRVNEVDVSEVVHSRAVEALKEAGPVVRLVVRRRQPPPETIMEVNLLKGPKGLGFSIAGGIGNQHIPGDNSIY

SEQ ID NO: 6125 - protein, 85 aa, Homo sapiens
ITKIIEGGAAQKDGRLQIGDRLLAVNNTNLQDVRHEEAVASLKNTSDMVYLKVAKPGSLHLNDMYAPPDYASTFTALADNHISHN

SEQ ID NO: 6126 - protein, 85 aa, Homo sapiens
SSLGYLGAVESKVSYPAPPQVPPTRYSPIPRHMLAEEDFTREPRKIILHKGSTGLGFNIVGGEDGEGIFVSFILAGGPADLSGEL

SEQ ID NO: 6127 - protein, 85 aa, Homo sapiens
RRGDRILSVNGVNLRNATHEQAAAALKRAGQSVTIVAQYRPEEYSRFESKIHDLREQMMNSSMSSGSGSLRTSEKRSLYVRALFD

SEQ ID NO: 6128 - protein, 85 aa, Homo sapiens
YDRTRDSCLPSQGLSFSYGDILHVINASDDEWWQARLVTPHGESEQIGVIPSKKRVEKKERARLKTVKFHARTGMIESNRDFPGL

SEQ ID NO: 6129 - protein, 85 aa, Homo sapiens
SDDYYGAKNLKGQEDAILSYEPVTRQEIHYARPVIILGPMKDRVNDDLISEFPHKFGSCVPHTTRPRRDNEVDGQDYHFVVSREQ

SEQ ID NO: 6130 - protein, 85 aa, Homo sapiens
MEKDIQDNKFIEAGQFNDNLYGTSIQSVRAVAERGKHCILDVSGNAIKRLQQAQLYPIAIFIKPKSIEALMEMNRRQTYEQANKI

SEQ ID NO: 6131 - protein, 85 aa, Homo sapiens
GNGASAGYGGYSSQTLPSQAGATPTPRTKAKLIPTGRDVGPVPPKPVPGKSTPKLNGSGPSWWPECTCTNRDWYEQVNGSDGMFK

SEQ ID NO: 6132 - protein, 85 aa, Homo sapiens
YEEIVLERGNSGLGFSIAGGIDNPHVPDDPGIFITKIIPGGAAAMDGRLGVNDCVLRVNEVDVSEVVHSRAVEALKEAGPVVRLV

SEQ ID NO: 6133 - protein, 85 aa, Homo sapiens
VRRRQPPPETIMEVNLLKGPKGLGFSIAGGIGNQHIPGDNSIYITKIIEGGAAQKDGRLQIGDRLLAVNNTNLQDVRHEEAVASL

SEQ ID NO: 6134 - protein, 85 aa, Homo sapiens
KNTSDMVYLKVAKPGSLHLNDMYAPPDYASTFTALADNHISHNSSLGYLGAVESKVSYPAPPQVPPTRYSPIPRHMLAEEDFTRE

SEQ ID NO: 6135 - protein, 85 aa, Homo sapiens
PRKIILHKGSTGLGFNIVGGEDGEGIFVSFILAGGPADLSGELRRGDRILSVNGVNLRNATHEQAAAALKRAGQSVTIVAQYRPE

SEQ ID NO: 6136 - protein, 85 aa, Homo sapiens
EYSRFESKIHDLREQMMNSSMSSGSGSLRTSEKRSLYVRALFDYDRTRDSCLPSQGLSFSYGDILHVINASDDEWWQARLVTPHG

SEQ ID NO: 6137 - protein, 85 aa, Homo sapiens
ESEQIGVIPSKKRVEKKERARLKTVKFHARTGMIESNRDFPGLSDDYYGAKNLKGQEDAILSYEPVTRQEIHYARPVIILGPMKD

SEQ ID NO: 6138 - protein, 85 aa, Homo sapiens
RVNDDLISEFPHKFGSCVPHTTRPRRDNEVDGQDYHFVVSREQMEKDIQDNKFIEAGQFNDNLYGTSIQSVRAVAERGKHCILDV

SEQ ID NO: 6139 - protein, 85 aa, Homo sapiens
SGNAIKRLQQAQLYPIAIFIKPKSIEALMEMNRRQTYEQANKIYDKAMKLEQEFGEYFTAIVQGDSLEEIYNKIKQIIEDQSGHY

SEQ ID NO: 6140 - protein, 85 aa, Homo sapiens
YSSPLCLTQDEFHPFIEALLPHVRAFAYTWFNLQARKRKYFKKHEKRMSKDEERAVKDELLGEKPEVKQKWASRLLAKLRKDIRP

SEQ ID NO: 6141 - protein, 85 aa, Homo sapiens
ECREDFVLSITGKKAPGCVLSNPDQKGKMRRIDCLRQADKVWRLDLVMVILFKGIPLESTDGERLVKAAQCGHPVLCVQPHHIGV

SEQ ID NO: 6142 - protein, 85 aa, Homo sapiens
AVKELDLYLAYFVRERDAEQSGSPRTGMGSDQEDSKPITLDTTDFQESFVTSGVFSVTELIQVSRTPVVTGTGPNFSLGELQGHL

SEQ ID NO: 6143 - protein, 85 aa, Homo sapiens
AYDLNPASTGLRRTLPSTSSSGSKRHKSGSMEEDVDTSPGGDYYTSPSSPTSSSRNWTEDMEGGISSPVKKTEMDKSPFNSPSPQ

SEQ ID NO: 6144 - protein, 85 aa, Homo sapiens
DSPRLSSFTQHHRPVIAVHSGIARSPHPSSALHFPTTSILPQTASTYFPHTAIRYPPHLNPQDPLKDLVSLACDPASQQPGPSWY

SEQ ID NO: 6145 - protein, 84 aa, Homo sapiens
RLSSFTQHHRPVIAVHSGIARSPHPSSALHFPTTSILPQTASTYFPHTAIRYPPHLNPQDPLKDLVSLACDPASQQPGPSWYLG

SEQ ID NO: 6146 - protein, 85 aa, Homo sapiens
KHEKRMSKDEERAVKDELLGEKPEVKQKWASRLLAKLRKDIRPECREDFVLSITGKKAPGCVLSNPDQKGKMRRIDCLRQADKVW

SEQ ID NO: 6147 - protein, 85 aa, Homo sapiens
RLDLVMVILFKGIPLESTDGERLVKAAQCGHPVLCVQPHHIGVAVKELDLYLAYFVRERDAEQSGSPRTGMGSDQEDSKPITLDT

SEQ ID NO: 6148 - protein, 85 aa, Homo sapiens
TDFQESFVTSGVFSVTELIQVSRTPVVTGTGPNFSLGELQGHLAYDLNPASTGLRRTLPSTSSSGSKRHKSGSMEEDVDTSPGGD

SEQ ID NO: 6149 - protein, 85 aa, Homo sapiens
YYTSPSSPTSSSRNWTEDMEGGISSPVKKTEMDKSPFNSPSPQDSPRLSSFTQHHRPVIAVHSGIARSPHPSSALHFPTTSILPQ

SEQ ID NO: 6150 - protein, 85 aa, Homo sapiens
NGDDAFVRRPRVGSQIPEKMQKAFDDIAKYFSEKEWEKMKASEKIIYVYMKRKYEAMTKLGFKATLPPFMRNKRVADFQGNDFDN

SEQ ID NO: 6151 - protein, 85 aa, Homo sapiens
DPNRGNQVEHPQMTFGRLQGIFPKITPEKPAEEGNDSKGVPEASGPQNNGKQLRPSGKLNTSEKVNKTSGPKRGKHAWTHRVRER

SEQ ID NO: 6152 - protein, 85 aa, Homo sapiens
EKIIYVYMKRKYEAMTKLGFKATLPPFMRNKRVADFQGNDFDNDPNRGNQVEHPQMTFGRLQGIFPKITPEKPAEEGNDSKGVPE

SEQ ID NO: 6153 - protein, 85 aa, Homo sapiens
AAGVAGWGVEAEEFEDAPDVEPLEPTLSNIIEQRSLKWIFVGGKGGVGKTTCSCSLAVQLSKGRESVLIISTDPAHNISDAFDQK

SEQ ID NO: 6154 - protein, 85 aa, Homo sapiens
FSKVPTKVKGYDNLFAMEIDPSLGVAELPDEFFEEDNMLSMGKKMMQEAMSAFPGIDEAMSYAEVMRLVKGMNFSVVVFDTAPTG

SEQ ID NO: 6155 - protein, 85 aa, Homo sapiens
HTLRLLNFPTIVERGLGRLMQIKNQISPFISQMCNMLGLGDMNADQLASKLEETLPVIRSVSEQFKDPEQTTFICVCIAEFLSLY

SEQ ID NO: 6156 - protein, 85 aa, Homo sapiens
ETERLIQELAKCKIDTHNIIVNQLVFPDPEKPCKMCEARHKIQAKYLDQMEDLYEDFHIVKLPLLPHEVRGADKVNTFSALLLEP

SEQ ID NO: 6157 - protein, 84 aa, Homo sapiens
MAKCKIDTHNIIVNQLVFPDPEKPCKMCEARHKIQAKYLDQMEDLYEDFHIVKLPLLPHEVRGADKVNTFSALLLEPYKPPSAQ

SEQ ID NO: 6158 - protein, 85 aa, Homo sapiens
GKGGVGKTTCSCSLAVQLSKGRESVLIISTDPAHNISDAFDQKFSKVPTKVKGYDNLFAMEIDPSLGVAELPDEFFEEDNMLSMG

SEQ ID NO: 6159 - protein, 85 aa, Homo sapiens
KKMMQEAMSAFPGIDEAMSYAEVMRLVKGMNFSVVVFDTAPTGHTLRLLNFPTIVERGLGRLMQIKNQISPFISQMCNMLGLGDM

SEQ ID NO: 6160 - protein, 85 aa, Homo sapiens
NADQLASKLEETLPVIRSVSEQFKDPEQTTFICVCIAEFLSLYETERLIQELAKCKIDTHNIIVNQLVFPDPEKPCKMCEARHKI

SEQ ID NO: 6161 - protein, 85 aa, Homo sapiens
VCSPVTVRIAPPDRRFSRSAIPEQIISSTLSSPSSNAPDPCAKETVLSALKEKEKKRTVEEEDQIFLDGQENKRRRHDSSGSGHS

SEQ ID NO: 6162 - protein, 85 aa, Homo sapiens
AFEPLVANGVPASFVPKPGSLKRGLNSQSSDDHLNKRSRSSSMSSLTGAYASGIPSSSRNAITSSYSSTRGISQLWKRNGPSSSP

SEQ ID NO: 6163 - protein, 85 aa, Homo sapiens
FSSPASSRSQTPERPAKKIREEELCHHSSSSTPLAADRESQGEKAADTTPRKKQNSNSQSTPGSSGQRKRKVQLLPSRRGEQLTL

SEQ ID NO: 6164 - protein, 85 aa, Homo sapiens
PPPPQLGYSITAEDLDLEKKASLQWFNQALEDKSDAASNSVTETPPITQPSFTFTLPAAAPASPPTSLLAPSTNPLLESLKKMQT

SEQ ID NO: 6165 - protein, 85 aa, Homo sapiens
PPSLPPCPESAGAATTEALSPPKTPSLLPPLGLSQSGPPGLLPSPSFDSKPPTTLLGLIPAPSMVPATDTKAPPTLQAETATKPQ

SEQ ID NO: 6166 - protein, 85 aa, Homo sapiens
ATSAPSPAPKQSFLFGTQNTSPSSPAAPAASSAPPMFKPIFTAPPKSEKEGPTPPGPSVTATAPSSSSLPTTTSTTAPTFQPVFS

SEQ ID NO: 6167 - protein, 85 aa, Homo sapiens
SMGPPASVPLPAPFFKQTTTPATAPTTTAPLFTGLASATSAVAPITSASPSTDSASKPAFGFGINSVSSSSVSTTTSTATAASQP

SEQ ID NO: 6168 - protein, 85 aa, Homo sapiens
FLFGAPQASAASFTPAMGSIFQFGKPPALPTTTTVTTFSQSLHTAVPTATSSSAADFSGFGSTLATSAPATSSQPTLTFSNTSTP

SEQ ID NO: 6169 - protein, 85 aa, Homo sapiens
TFNIPFGSSAKSPLPSYPGANPQPAFGAAEGQPPGAAKPALAPSFGSSFTFGNSAAPAAAPTPAPPSMIKVVPAYVPTPIHPIFG

SEQ ID NO: 6170 - protein, 85 aa, Homo sapiens
GATHSAFGLKATASAFGAPASSQPAFGGSTAVFFGAATSSGFGATTQTASSGSSSSVFGSTTPSPFTFGGSAAPAGSGSFGINVA

SEQ ID NO: 6171 - protein, 85 aa, Homo sapiens
TPGSSTTTGAFSFGAGQSGSTATSTPFAGGLGQNALGTTGQSTPFAFNVSSTTESKPVFGGTATPTFGLNTPAPGVGTSGSSLSF

SEQ ID NO: 6172 - protein, 84 aa, Homo sapiens
SSTTESKPVFGGTATPTFGLNTPAPGVGTSGSSLSFGASSAPAQGFVGVAPFGSAALSFSIGAGSKTPGARQRLQARRQHTRKK

SEQ ID NO: 6173 - protein, 85 aa, Homo sapiens
KETVLSALKEKEKKRTVEEEDQIFLDGQENKRRRHDSSGSGHSAFEPLVANGVPASFVPKPGSLKRGLNSQSSDDHLNKRSRSSS

SEQ ID NO: 6174 - protein, 85 aa, Homo sapiens
MSSLTGAYASGIPSSSRNAITSSYSSTRGISQLWKRNGPSSSPFSSPASSRSQTPERPAKKIREEELCHHSSSSTPLAADRESQG

SEQ ID NO: 6175 - protein, 85 aa, Homo sapiens
EKAADTTPRKKQNSNSQSTPGSSGQRKRKVQLLPSRRGEQLTLPPPPQLGYSITAEDLDLEKKASLQWFNQALEDKSDAASNSVT

SEQ ID NO: 6176 - protein, 85 aa, Homo sapiens
ETPPITQPSFTFTLPAAAPASPPTSLLAPSTNPLLESLKKMQTPPSLPPCPESAGAATTEALSPPKTPSLLPPLGLSQSGPPGLL

SEQ ID NO: 6177 - protein, 85 aa, Homo sapiens
PSPSFDSKPPTTLLGLIPAPSMVPATDTKAPPTLQAETATKPQATSAPSPAPKQSFLFGTQNTSPSSPAAPAASSAPPMFKPIFT

SEQ ID NO: 6178 - protein, 85 aa, Homo sapiens
APPKSEKEGPTPPGPSVTATAPSSSSLPTTTSTTAPTFQPVFSSMGPPASVPLPAPFFKQTTTPATAPTTTAPLFTGLASATSAV

SEQ ID NO: 6179 - protein, 85 aa, Homo sapiens
APITSASPSTDSASKPAFGFGINSVSSSSVSTTTSTATAASQPFLFGAPQASAASFTPAMGSIFQFGKPPALPTTTTVTTFSQSL

SEQ ID NO: 6180 - protein, 85 aa, Homo sapiens
HTAVPTATSSSAADFSGFGSTLATSAPATSSQPTLTFSNTSTPTFNIPFGSSAKSPLPSYPGANPQPAFGAAEGQPPGAAKPALA

SEQ ID NO: 6181 - protein, 85 aa, Homo sapiens
PSFGSSFTFGNSAAPAAAPTPAPPSMIKVVPAYVPTPIHPIFGGATHSAFGLKATASAFGAPASSQPAFGGSTAVFFGAATSSGF

SEQ ID NO: 6182 - protein, 85 aa, Homo sapiens
GATTQTASSGSSSSVFGSTTPSPFTFGGSAAPAGSGSFGINVATPGSSTTTGAFSFGAGQSGSTATSTPFAGGLGQNALGTTGQS

SEQ ID NO: 6183 - protein, 85 aa, Homo sapiens
TPFAFNVSSTTESKPVFGGTATPTFGLNTPAPGVGTSGSSLSFGASSAPAQGFVGVAPFGSAALSFSIGAGSKTPGARQRLQARR

SEQ ID NO: 6184 - protein, 85 aa, Homo sapiens
GKAKVPASKRAPSSPVAKPGPVKTLTRKKNKKKKRFWKSKAREVSKKPASGPGAVVRPPKAPEDFSQNWKALQEVPRWTGGRQYL

SEQ ID NO: 6185 - protein, 85 aa, Homo sapiens
APRPVEQSTIRKEPRKGQMVILFQNEGTSSIRSGKLRRQPQPHPPREELEVVQKEVAEMLKGRILVGHALHNDLKVLFLDHPKKK

SEQ ID NO: 6186 - protein, 85 aa, Homo sapiens
EVSKKPASGPGAVVRPPKAPEDFSQNWKALQEVPRWTGGRQYLAPRPVEQSTIRKEPRKGQMVILFQNEGTSSIRSGKLRRQPQP

SEQ ID NO: 6187 - protein, 85 aa, Homo sapiens
HPPREELEVVQKEVAEMLKGRILVGHALHNDLKVLFLDHPKKKIRDTQKYKPFKSQVKSGRPSLRLLSEKILGLQVQQAEHCSIQ

SEQ ID NO: 6188 - protein, 84 aa, Homo sapiens
YPKENDSSSNNKAMTDPSRKYLTSSREKQLSLKQSEENRTSGLLPLQSSSFYGSRAGSKEHSSGGTNLDRFIGYKYIRYLLSTC

SEQ ID NO: 6189 - protein, 85 aa, Homo sapiens
ELNEDYPKENDSSSNNKAMTDPSRKYLTSSREKQLSLKQSEENRTSGLLPLQSSSFYGSRAGSKEHSSGGTNLDRFIGYKYIRYL

SEQ ID NO: 6190 - protein, 85 aa, Homo sapiens
WLWEDQGGLLGPFSFLLLVLLLVTRSPVNACLLTGSLFVLLRVFSFEPVPSCRALQVLKPRDRISAIAHRGGSHDAPENTLAAIR

SEQ ID NO: 6191 - protein, 85 aa, Homo sapiens
QAAKNGATGVELDIEFTSDGIPVLMHDNTVDRTTDGTGRLCDLTFEQIRKLNPAANHRLRNDFPDEKIPTLREAVAECLNHNLTI

SEQ ID NO: 6192 - protein, 85 aa, Homo sapiens
FFDVKGHAHKATEALKKMYMEFPQLYNNSVVCSFLPEVIYKMRQTDRDVITALTHRPWSLSHTGDGKPRYDTFWKHFIFVMMDIL

SEQ ID NO: 6193 - protein, 84 aa, Homo sapiens
FIFVMMDILLDWSMHNILWYLCGISAFLMQKDFVSPAYLKKWSAKGIQVVGWTVNTFDEKSYYESHLGSSYITDSMVEDCEPHF

SEQ ID NO: 6194 - protein, 85 aa, Homo sapiens
VFSFEPVPSCRALQVLKPRDRISAIAHRGGSHDAPENTLAAIRQAAKNGATGVELDIEFTSDGIPVLMHDNTVDRTTDGTGRLCD

SEQ ID NO: 6195 - protein, 85 aa, Homo sapiens
MTFEQIRKLNPAANHRLRNDFPDEKIPTLREAVAECLNHNLTIFFDVKGHAHKATEALKKMYMEFPQLYNNSVVCSFLPEVIYKM

SEQ ID NO: 6196 - protein, 85 aa, Homo sapiens
RQTDRDVITALTHRPWSLSHTGDGKPRYDTFWKHFIFVMMDILLDWSMHNILWYLCGISAFLMQKDFVSPAYLKKWSAKGIQVVG

SEQ ID NO: 6197 - protein, 85 aa, Homo sapiens
SGDHLHNDSQIEADFRLNDSHKHKDKHKDREHRHKEHKKEKDREKSKHSNSEHKDSEKKHKEKEKTKHKDGSSEKHKDKHKDRDK

SEQ ID NO: 6198 - protein, 85 aa, Homo sapiens
EKRKEEKVRASGDAKIKKEKENGFSSPPQIKDEPEDDGYFVPPKEDIKPLKRPRDEDDADYKPKKIKTEDTKKEKKRKLEEEEDG

SEQ ID NO: 6199 - protein, 85 aa, Homo sapiens
KLKKPKNKDKDKKVPEPDNKKKKPKKEEEQKWKWWEEERYPEGIKWKFLEHKGPVFAPPYEPLPENVKFYYDGKVMKLSPKAEEV

SEQ ID NO: 6200 - protein, 85 aa, Homo sapiens
ATFFAKMLDHEYTTKEIFRKNFFKDWRKEMTNEEKNIITNLSKCDFTQMSQYFKAQTEARKQMSKEEKLKIKEENEKLLKEYGFC

SEQ ID NO: 6201 - protein, 85 aa, Homo sapiens
IMDNHKERIANFKIEPPGLFRGRGNHPKMGMLKRRIMPEDIIINCSKDAKVPSPPPGHKWKEVRHDNKVTWLVSWTENIQGSIKY

SEQ ID NO: 6202 - protein, 85 aa, Homo sapiens
IMLNPSSRIKGEKDWQKYETARRLKKCVDKIRNQYREDWKSKEMKVRQRAVALYFIDKLALRAGNEKEEGETADTVGCCSLRVEH

SEQ ID NO: 6203 - protein, 85 aa, Homo sapiens
INLHPELDGQEYVVEFDFLGKDSIRYYNKVPVEKRVFKNLQLFMENKQPEDDLFDRLNTGILNKHLQDLMEGLTAKVFRTYNASI

SEQ ID NO: 6204 - protein, 85 aa, Homo sapiens
TLQQQLKELTAPDENIPAKILSYNRANRAVAILCNHQRAPPKTFEKSMMNLQTKIDAKKEQLADARRDLKSAKADAKVMKDAKTK

SEQ ID NO: 6205 - protein, 84 aa, Homo sapiens
KVVESKKKAVQRLEEQLMKLEVQATDREENKQIALGTSKLNYLDPRITVAWCKKWGVPIEKIYNKTQREKFAWAIDMADEDYEF

SEQ ID NO: 6206 - protein, 85 aa, Homo sapiens
REKSKHSNSEHKDSEKKHKEKEKTKHKDGSSEKHKDKHKDRDKEKRKEEKVRASGDAKIKKEKENGFSSPPQIKDEPEDDGYFVP

SEQ ID NO: 6207 - protein, 85 aa, Homo sapiens
PKEDIKPLKRPRDEDDADYKPKKIKTEDTKKEKKRKLEEEEDGKLKKPKNKDKDKKVPEPDNKKKKPKKEEEQKWKWWEEERYPE

SEQ ID NO: 6208 - protein, 85 aa, Homo sapiens
GIKWKFLEHKGPVFAPPYEPLPENVKFYYDGKVMKLSPKAEEVATFFAKMLDHEYTTKEIFRKNFFKDWRKEMTNEEKNIITNLS

SEQ ID NO: 6209 - protein, 85 aa, Homo sapiens
KCDFTQMSQYFKAQTEARKQMSKEEKLKIKEENEKLLKEYGFCIMDNHKERIANFKIEPPGLFRGRGNHPKMGMLKRRIMPEDII

SEQ ID NO: 6210 - protein, 85 aa, Homo sapiens
INCSKDAKVPSPPPGHKWKEVRHDNKVTWLVSWTENIQGSIKYIMLNPSSRIKGEKDWQKYETARRLKKCVDKIRNQYREDWKSK

SEQ ID NO: 6211 - protein, 85 aa, Homo sapiens
EMKVRQRAVALYFIDKLALRAGNEKEEGETADTVGCCSLRVEHINLHPELDGQEYVVEFDFLGKDSIRYYNKVPVEKRVFKNLQL

SEQ ID NO: 6212 - protein, 85 aa, Homo sapiens
FMENKQPEDDLFDRLNTGILNKHLQDLMEGLTAKVFRTYNASITLQQQLKELTAPDENIPAKILSYNRANRAVAILCNHQRAPPK

SEQ ID NO: 6213 - protein, 85 aa, Homo sapiens
TFEKSMMNLQTKIDAKKEQLADARRDLKSAKADAKVMKDAKTKKVVESKKKAVQRLEEQLMKLEVQATDREENKQIALGTSKLNY

SEQ ID NO: 6214 - protein, 85 aa, Homo sapiens
AQGSGDQRAVGVADPEESSPNMIVYCKIEDIITKMQDDKTGGVPIRTVKSFLSKIPSVVTGTDIVQWLMKNLSIEDPVEAIHLGS

SEQ ID NO: 6215 - protein, 85 aa, Homo sapiens
LIAAQGYIFPISDHVLTMKDDGTFYRFQAPYFWPSNCWEPENTDYAIYLCKRTMQNKARLELADYEAENLARLQRAFARKWEFIF

SEQ ID NO: 6216 - protein, 85 aa, Homo sapiens
MQAEAQVKIDRKKDKTERKILDSQERAFWDVHRPVPGCVNTTEMDIRKCRRLKNPQKVKKSVYGVTEESQAQSPVHVLSQPIRKT

SEQ ID NO: 6217 - protein, 85 aa, Homo sapiens
TKEDIRKQITFLNAQIDRHCLKMSKVAESLIAYTEQYVEYDPLITPAEPSNPWISDDVALWDIEMSKEPSQQRVKRWGFSFDEIL

SEQ ID NO: 6218 - protein, 85 aa, Homo sapiens
KDQVGRDQFLRFLESEFSSENLRFWLAVQDLKKQPLQDVAKRVEEIWQEFLAPGAPSAINLDSHSYEITSQNVKDGGRYTFEDAQ

SEQ ID NO: 6219 - protein, 84 aa, Homo sapiens
LQDVAKRVEEIWQEFLAPGAPSAINLDSHSYEITSQNVKDGGRYTFEDAQEHIYKLMKSDSYARFLRSNAYQDLLLAKKKVWLL

SEQ ID NO: 6220 - protein, 85 aa, Homo sapiens
VPIRTVKSFLSKIPSVVTGTDIVQWLMKNLSIEDPVEAIHLGSLIAAQGYIFPISDHVLTMKDDGTFYRFQAPYFWPSNCWEPEN

SEQ ID NO: 6221 - protein, 85 aa, Homo sapiens
TDYAIYLCKRTMQNKARLELADYEAENLARLQRAFARKWEFIFMQAEAQVKIDRKKDKTERKILDSQERAFWDVHRPVPGCVNTT

SEQ ID NO: 6222 - protein, 85 aa, Homo sapiens
EMDIRKCRRLKNPQKVKKSVYGVTEESQAQSPVHVLSQPIRKTTKEDIRKQITFLNAQIDRHCLKMSKVAESLIAYTEQYVEYDP

SEQ ID NO: 6223 - protein, 85 aa, Homo sapiens
MITPAEPSNPWISDDVALWDIEMSKEPSQQRVKRWGFSFDEILKDQVGRDQFLRFLESEFSSENLRFWLAVQDLKKQPLQDVAKR

SEQ ID NO: 6224 - protein, 85 aa, Homo sapiens
ADFLKGLPVYNKSNFSRFHADSVCKASNRRPSVYLPTREYPSEQIIVTEKTNILLRYLHQQWDKKNAAKKRDQEQVELEGESSAP

SEQ ID NO: 6225 - protein, 84 aa, Homo sapiens
FHADSVCKASNRRPSVYLPTREYPSEQIIVTEKTNILLRYLHQQWDKKNAAKKRDQEQVELEGESSAPPRKVARTDSPDMHEDT

SEQ ID NO: 6226 - protein, 85 aa, Homo sapiens
APAMQPAEIQFAQRLASSEKGIRDRAVKKLRQYISVKTQRETGGFSQEELLKIWKGLFYCMWVQDEPLLQEELANTIAQLVHAVN

SEQ ID NO: 6227 - protein, 85 aa, Homo sapiens
NSAAQHLFIQTFWQTMNREWKGIDRLRLDKYYMLIRLVLRQSFEVLKRNGWEESRIKVFLDVLMKEVLCPESQSPNGVRFHFIDI

SEQ ID NO: 6228 - protein, 85 aa, Homo sapiens
YLDELSKVGGKELLADQNLKFIDPFCKIAAKTKDHTLVQTIARGVFEAIVDQSPFVPEETMEEQKTKVGDGDLSAEEIPENEVSL

SEQ ID NO: 6229 - protein, 85 aa, Homo sapiens
RRAVSKKKTALGKNHSRKDGLSDERGRDDCGTFEDTGPLLQFDYKAVADRLLEMTSRKNTPHFNRKRLSKLIKKFQDLSEGSSIS

SEQ ID NO: 6230 - protein, 85 aa, Homo sapiens
QLSFAEDISADEDDQILSQGKHKKKGNKLLEKTNLEKEKGSRVFCVEEEDSESSLQKRRRKKKKKHHLQPENPGPGGAAPSLEQN

SEQ ID NO: 6231 - protein, 85 aa, Homo sapiens
RGREPEASGLKALKARVAEPGAEATSSTGEESGSEHPPAVPMHNKRKRPRKKSPRAHREMLESAVLPPEDMSQSGPSGSHPQGPR

SEQ ID NO: 6232 - protein, 85 aa, Homo sapiens
GSPTGGAQLLKRKRKLGVVPVNGSGLSTPAWPPLQQEGPPTGPAEGANSHTTLPQRRRLQKKKAGPGSLELCGLPSQKTASLKKR

SEQ ID NO: 6233 - protein, 85 aa, Homo sapiens
KKMRVMSNLVEHNGVLESEAGQPQALGSSGTCSSLKKQKLRAESDFVKFDTPFLPKPLFFRRAKSSTATHPPGPAVQLNKTPSSS

SEQ ID NO: 6234 - protein, 84 aa, Homo sapiens
NKTPSSSKKVTFGLNRNMTAEFKKTDKSILVSPTGPSRVAFDPEQKPLHGVLKTPTSSPASSPLVAKKPLTTTPRRRPRAMDFF

SEQ ID NO: 6235 - protein, 85 aa, Homo sapiens
GGFSQEELLKIWKGLFYCMWVQDEPLLQEELANTIAQLVHAVNNSAAQHLFIQTFWQTMNREWKGIDRLRLDKYYMLIRLVLRQS

SEQ ID NO: 6236 - protein, 85 aa, Homo sapiens
FEVLKRNGWEESRIKVFLDVLMKEVLCPESQSPNGVRFHFIDIYLDELSKVGGKELLADQNLKFIDPFCKIAAKTKDHTLVQTIA

SEQ ID NO: 6237 - protein, 85 aa, Homo sapiens
RGVFEAIVDQSPFVPEETMEEQKTKVGDGDLSAEEIPENEVSLRRAVSKKKTALGKNHSRKDGLSDERGRDDCGTFEDTGPLLQF

SEQ ID NO: 6238 - protein, 85 aa, Homo sapiens
DYKAVADRLLEMTSRKNTPHFNRKRLSKLIKKFQDLSEGSSISQLSFAEDISADEDDQILSQGKHKKKGNKLLEKTNLEKEKGSR

SEQ ID NO: 6239 - protein, 85 aa, Homo sapiens
VFCVEEEDSESSLQKRRRKKKKKHHLQPENPGPGGAAPSLEQNRGREPEASGLKALKARVAEPGAEATSSTGEESGSEHPPAVPM

SEQ ID NO: 6240 - protein, 85 aa, Homo sapiens
HNKRKRPRKKSPRAHREMLESAVLPPEDMSQSGPSGSHPQGPRGSPTGGAQLLKRKRKLGVVPVNGSGLSTPAWPPLQQEGPPTG

SEQ ID NO: 6241 - protein, 85 aa, Homo sapiens
PAEGANSHTTLPQRRRLQKKKAGPGSLELCGLPSQKTASLKKRKKMRVMSNLVEHNGVLESEAGQPQALGSSGTCSSLKKQKLRA

SEQ ID NO: 6242 - protein, 85 aa, Homo sapiens
ESDFVKFDTPFLPKPLFFRRAKSSTATHPPGPAVQLNKTPSSSKKVTFGLNRNMTAEFKKTDKSILVSPTGPSRVAFDPEQKPLH

SEQ ID NO: 6243 - protein, 85 aa, Homo sapiens
KEKLTKGDDDSSKPIVRESWMTELPPEMKDFGLGPRTFKRRADDTSGDRSIWTDTPADRERKAKETQEARKSSSKKDEEHILSGR

SEQ ID NO: 6244 - protein, 85 aa, Homo sapiens
DDTSGDRSIWTDTPADRERKAKETQEARKSSSKKDEEHILSGRDKRLAEQVSSYNESKRSESLMDIHHKKLKSKAAEDKNKPQER

SEQ ID NO: 6245 - protein, 85 aa, Homo sapiens
FSNWWIQVTSLRIFVWLLLLYFMQVIAIVLYLMMPIVNISEVLGPLCLMLLMGTVHCQIVSTQITRPSGNNGNRRRRIKRVKLIS

SEQ ID NO: 6246 - protein, 85 aa, Homo sapiens
NKGTETDNDPSCVHPIIKRRQCRPEIRMWQTREKAKFSDGEKCRREAFRRLGNGVSDDLSSEEDGEARTQMILLRRSVEGASSDN

SEQ ID NO: 6247 - protein, 85 aa, Homo sapiens
GCEVKNRKSILSRHLNSQVKKTTTRWCHIVRDSDSLAESEFESAAFSQGSRSGVSGGSRSLNMSRRDSESTRHDSETEDMLWDDL

SEQ ID NO: 6248 - protein, 85 aa, Homo sapiens
LHGPECRSSVTSDSEGAHVNTLHSGTKRDPKEDVFQQNHLFWLQNSSPSSDRVSAIIWEGNECKKMDMSVLEISGIIMSRVNAYQ

SEQ ID NO: 6249 - protein, 85 aa, Homo sapiens
QGVGYQMLGNVVTIGLAFFPFLHRLFREKSLDQLKSISAEEILTLFCGAPPVTPIIVLSIINFFERLCLTWMFFFMMCVAERTYK

SEQ ID NO: 6250 - protein, 85 aa, Homo sapiens
QRFLFAKLFSHITSARKARKYEIPHFRLKKVENIKIWLSLRSYLKRRGPQRSVDVVVSSVFLLTLSIAFICCAQVLQGHKTFLND

SEQ ID NO: 6251 - protein, 85 aa, Homo sapiens
AYNWEFLIWETALLLFLLRLASLGSETNKKYSNVSILLTEQINLYLKMEKKPNKKEQLTLVNNVLKLSTKLLKELDTPFRLYGLT

SEQ ID NO: 6252 - protein, 85 aa, Homo sapiens
LGPLCLMLLMGTVHCQIVSTQITRPSGNNGNRRRRIKRVKLISNKGTETDNDPSCVHPIIKRRQCRPEIRMWQTREKAKFSDGEK

SEQ ID NO: 6253 - protein, 85 aa, Homo sapiens
CRREAFRRLGNGVSDDLSSEEDGEARTQMILLRRSVEGASSDNGCEVKNRKSILSRHLNSQVKKTTTRWCHIVRDSDSLAESEFE

SEQ ID NO: 6254 - protein, 85 aa, Homo sapiens
SAAFSQGSRSGVSGGSRSLNMSRRDSESTRHDSETEDMLWDDLLHGPECRSSVTSDSEGAHVNTLHSGTKRDPKEDVFQQNHLFW

SEQ ID NO: 6255 - protein, 85 aa, Homo sapiens
LQNSSPSSDRVSAIIWEGNECKKMDMSVLEISGIIMSRVNAYQQGVGYQMLGNVVTIGLAFFPFLHRLFREKSLDQLKSISAEEI

SEQ ID NO: 6256 - protein, 85 aa, Homo sapiens
MTLFCGAPPVTPIIVLSIINFFERLCLTWMFFFMMCVAERTYKQRFLFAKLFSHITSARKARKYEIPHFRLKKVENIKIWLSLRS

SEQ ID NO: 6257 - protein, 85 aa, Homo sapiens
YLKRRGPQRSVDVVVSSVFLLTLSIAFICCAQVLQGHKTFLNDAYNWEFLIWETALLLFLLRLASLGSETNKKYSNVSILLTEQI

SEQ ID NO: 6258 - protein, 85 aa, Homo sapiens
CLEDKMLMSSVKDNVGRGLNIALVNGPLPPDTGVSGELIEARAFDMWAGDVNDLLKFIRPLHEGTLVFVASYDDPATKMNEETRK

SEQ ID NO: 6259 - protein, 85 aa, Homo sapiens
PESSVTAAPRARKYKCGLPQPCPEEHLAFRVVSGAANVIGPKICLEDKMLMSSVKDNVGRGLNIALVNGPLPPDTGVSGELIEAR

SEQ ID NO: 6260 - protein, 85 aa, Homo sapiens
AFDMWAGDVNDLLKFIRPLHEGTLVFVASYDDPATKMNEETRKLFSELGSRNAKELAFRDSWVFVGAKGVQNKSPFEQHVKNSKH

SEQ ID NO: 6261 - protein, 85 aa, Homo sapiens
SLCSPTHSAEMSLFLQGPEEMLPLSSEGSEMGSEKEQSPEPHLPEEGEGGKPWRVDDSEGSWIPPGEKEHGQESLSDELQETHPK

SEQ ID NO: 6262 - protein, 85 aa, Homo sapiens
KPWQKVTVRARELGDPIAHPRHEADEKPFICAQCGKTFNNTSNLRTHQRIHTGEKPYKCSECGKSFSRSSNRIRHERIHLEEKHY

SEQ ID NO: 6263 - protein, 85 aa, Homo sapiens
KCPKCQESFRRRSDLTTHQQDHLGKRPYRCDICGKSFSQSATLAVHHRTHLEPAPYICCECGKSFSNSSSFGVHHRTHTGERPYE

SEQ ID NO: 6264 - protein, 85 aa, Homo sapiens
MPEEGEGGKPWRVDDSEGSWIPPGEKEHGQESLSDELQETHPKKPWQKVTVRARELGDPIAHPRHEADEKPFICAQCGKTFNNTS

SEQ ID NO: 6265 - protein, 85 aa, Homo sapiens
NLRTHQRIHTGEKPYKCSECGKSFSRSSNRIRHERIHLEEKHYKCPKCQESFRRRSDLTTHQQDHLGKRPYRCDICGKSFSQSAT

SEQ ID NO: 6266 - protein, 85 aa, Homo sapiens
LAVHHRTHLEPAPYICCECGKSFSNSSSFGVHHRTHTGERPYECTECGRTFSDISNFGAHQRTHRGEKPYRCTVCGKHFSRSSNL

SEQ ID NO: 6267 - protein, 85 aa, Homo sapiens
NLKDGNIYSGLPDYSVSFLGKIYCLSSEEALKPFLLNPRPYLLPPMPGPPCKVFILGPQYSGKTTLCNMLAENYKGKVVDYAQLV

SEQ ID NO: 6268 - protein, 85 aa, Homo sapiens
QPRFDKARETLVENTIAEATAAAIKVVKEKLLRELQARKQAETALREFQRQYEKMEFGVFPMEATHSSIDEEGYIQGSQRDRGSS

SEQ ID NO: 6269 - protein, 85 aa, Homo sapiens
LVDTEEAKTKSENVLHDQAAKVDKDDGKETGETFTFKRHSQDASQDVKLYSDTAPTEDLIEEVTADHPEVVTMIEETIKMSQDIN

SEQ ID NO: 6270 - protein, 85 aa, Homo sapiens
FEQPYEKHAEILQEVLGEVMEENKDRFPGAPKYGGWIVDNCPIVKELWMALIKKGIIPDLVIYLSDTENNGKCLFNRIYLQKKSE

SEQ ID NO: 6271 - protein, 84 aa, Homo sapiens
IPDLVIYLSDTENNGKCLFNRIYLQKKSEIDSKILERLLEELQKKKKEEEEARKATEEELRLEEENRRLLELMKVKAKGKHRLL

SEQ ID NO: 6272 - protein, 85 aa, Homo sapiens
LPPMPGPPCKVFILGPQYSGKTTLCNMLAENYKGKVVDYAQLVQPRFDKARETLVENTIAEATAAAIKVVKEKLLRELQARKQAE

SEQ ID NO: 6273 - protein, 85 aa, Homo sapiens
TALREFQRQYEKMEFGVFPMEATHSSIDEEGYIQGSQRDRGSSLVDTEEAKTKSENVLHDQAAKVDKDDGKETGETFTFKRHSQD

SEQ ID NO: 6274 - protein, 85 aa, Homo sapiens
ASQDVKLYSDTAPTEDLIEEVTADHPEVVTMIEETIKMSQDINFEQPYEKHAEILQEVLGEVMEENKDRFPGAPKYGGWIVDNCP

SEQ ID NO: 6275 - protein, 85 aa, Homo sapiens
IVKELWMALIKKGIIPDLVIYLSDTENNGKCLFNRIYLQKKSEIDSKILERLLEELQKKKKEEEEARKATEEELRLEEENRRLLE

SEQ ID NO: 6276 - protein, 85 aa, Homo sapiens
AVAVPPGRAAGSGWAWRPVARDALLARAFHSCTELRGRFYLVGGLLAGGAREPSSDTVVFDPARGQAVRLGARGSPPRSHHDAAP

SEQ ID NO: 6277 - protein, 85 aa, Homo sapiens
VDGRWLCVVGGWDGSRRLATVTALDTERGVWEAWTGTPGDCPPAGLSSHTCTRISDRELQVAGREGGIHTQRRYGSIYTLRLDPS

SEQ ID NO: 6278 - protein, 85 aa, Homo sapiens
ARTYCYKQEGCHTASRSGHCAALLQTPGPHPGHQLLLFGGCNLAEPEVAGHWSHGKIKEEPPVAPHLMEQLARLVSSGQGSQKGP

SEQ ID NO: 6279 - protein, 85 aa, Homo sapiens
HGLRHHSCSVVGPFAVLFGGETLTRARDTICNDLYIYDTRTSPPLWFHFPCADRGMKRMGHRTCLWNDQLYLVGGFGEDGRTASP

SEQ ID NO: 6280 - protein, 84 aa, Homo sapiens
VVGPFAVLFGGETLTRARDTICNDLYIYDTRTSPPLWFHFPCADRGMKRMGHRTCLWNDQLYLVGGFGEDGRTASPQVCILDFI

SEQ ID NO: 6281 - protein, 85 aa, Homo sapiens
GGLLAGGAREPSSDTVVFDPARGQAVRLGARGSPPRSHHDAAPVDGRWLCVVGGWDGSRRLATVTALDTERGVWEAWTGTPGDCP

SEQ ID NO: 6282 - protein, 85 aa, Homo sapiens
PAGLSSHTCTRISDRELQVAGREGGIHTQRRYGSIYTLRLDPSARTYCYKQEGCHTASRSGHCAALLQTPGPHPGHQLLLFGGCN

SEQ ID NO: 6283 - protein, 85 aa, Homo sapiens
LAEPEVAGHWSHGKIKEEPPVAPHLMEQLARLVSSGQGSQKGPHGLRHHSCSVVGPFAVLFGGETLTRARDTICNDLYIYDTRTS

SEQ ID NO: 6284 - protein, 85 aa, Homo sapiens
ACSSSLESMQLSLITCSQCMRKVGLWGFQQIESSMTDLDASFGLTSSPIPGLEGRPERLPLVPESPRRMMTRSQDATFSPGSEQD

SEQ ID NO: 6285 - protein, 85 aa, Homo sapiens
TSSRSFFDPTSQHRDWCPWVNITLGKESRENGGTEPDASAPAEPGWKAVLTILLAHKQSSQPAETDSMSLSEKSRKVFRIFRQWE

SEQ ID NO: 6286 - protein, 85 aa, Homo sapiens
GLTSSPIPGLEGRPERLPLVPESPRRMMTRSQDATFSPGSEQDTSSRSFFDPTSQHRDWCPWVNITLGKESRENGGTEPDASAPA

SEQ ID NO: 6287 - protein, 85 aa, Homo sapiens
KFSPFLQTAEDNTQDEVAGAPADHHGPSDEEQGSPPEDKLLRAKRNSYTNCLQKITCPHCPRVFPWASSLQRHMLTHTDSQSDAE

SEQ ID NO: 6288 - protein, 85 aa, Homo sapiens
TAAAAGEVLDLTSRDREQPSEGATELRQVAGDAPVEQATAETASPVHREEHGRGESHEPEEEHGTEESTGDADGAEEDASSNQSL

SEQ ID NO: 6289 - protein, 85 aa, Homo sapiens
DLDFATKLMDFKLAEGDGEAGAGGAASQEQKLACDTCGKSFKFLGTLSRHRKAHGRQEPKDEKGDGASTAEEGPQPAPEQEEKPP

SEQ ID NO: 6290 - protein, 85 aa, Homo sapiens
ETPAEVVESAPGAGEAPAEKLAEETEGPSDGESAAEKRSSEKSDDDKKPKTDSPKSVASKADKRKKVCSVCNKRFWSLQDLTRHM

SEQ ID NO: 6291 - protein, 85 aa, Homo sapiens
RSHTGERPYKCQTCERTFTLKHSLVRHQRIHQKARHAKHHGKDSDKEERGEEDSENESTHSGNNAVSENEAELAPNASNHMAVTR

SEQ ID NO: 6292 - protein, 85 aa, Homo sapiens
AKRNSYTNCLQKITCPHCPRVFPWASSLQRHMLTHTDSQSDAETAAAAGEVLDLTSRDREQPSEGATELRQVAGDAPVEQATAET

SEQ ID NO: 6293 - protein, 85 aa, Homo sapiens
ASPVHREEHGRGESHEPEEEHGTEESTGDADGAEEDASSNQSLDLDFATKLMDFKLAEGDGEAGAGGAASQEQKLACDTCGKSFK

SEQ ID NO: 6294 - protein, 85 aa, Homo sapiens
FLGTLSRHRKAHGRQEPKDEKGDGASTAEEGPQPAPEQEEKPPETPAEVVESAPGAGEAPAEKLAEETEGPSDGESAAEKRSSEK

SEQ ID NO: 6295 - protein, 85 aa, Homo sapiens
SDDDKKPKTDSPKSVASKADKRKKVCSVCNKRFWSLQDLTRHMRSHTGERPYKCQTCERTFTLKHSLVRHQRIHQKARHAKHHGK

SEQ ID NO: 6296 - protein, 85 aa, Homo sapiens
DSDKEERGEEDSENESTHSGNNAVSENEAELAPNASNHMAVTRSRKEGLASATKDCSHREEKVTAGWPSEPGQGDLNPESPAALG

SEQ ID NO: 6297 - protein, 85 aa, Homo sapiens
KCEHCTRKECSKKTKTDDQENVSADAPSPAQENGEKCDTSKHKVLVVSVCPQSLPYFAAKFNLSVTDASRRLCGFLKSLGVHYVF

SEQ ID NO: 6298 - protein, 85 aa, Homo sapiens
DTTIAADFSILESQKEFVRRYRQHSEEERTLPMLTSACPGWVRYAERVLGRPITAHLCTAKSPQQVMGSLVKDYFARQQNLSPEK

SEQ ID NO: 6299 - protein, 85 aa, Homo sapiens
IFHVIVAPCYDKKLEALQESLPPALHGSRGADCVLTSGEIAQIMEQGDLSVRDAAVDTLFGDLKEDKVTRHDGASSDGHLAHIFR

SEQ ID NO: 6300 - protein, 85 aa, Homo sapiens
HAAKELFNEDVEEVTYRALRNKDFQEVTLEKNGEVVLRFAAAYGFRNIQNMILKLKKGKFPFHFVEVLACAGGCLNGRGQAQTPD

SEQ ID NO: 6301 - protein, 85 aa, Homo sapiens
KVLVVSVCPQSLPYFAAKFNLSVTDASRRLCGFLKSLGVHYVFDTTIAADFSILESQKEFVRRYRQHSEEERTLPMLTSACPGWV

SEQ ID NO: 6302 - protein, 85 aa, Homo sapiens
RYAERVLGRPITAHLCTAKSPQQVMGSLVKDYFARQQNLSPEKIFHVIVAPCYDKKLEALQESLPPALHGSRGADCVLTSGEIAQ

SEQ ID NO: 6303 - protein, 85 aa, Homo sapiens
IMEQGDLSVRDAAVDTLFGDLKEDKVTRHDGASSDGHLAHIFRHAAKELFNEDVEEVTYRALRNKDFQEVTLEKNGEVVLRFAAA

SEQ ID NO: 6304 - protein, 85 aa, Homo sapiens
YGFRNIQNMILKLKKGKFPFHFVEVLACAGGCLNGRGQAQTPDGHADKALLRQMEGIYADIPVRRPESSAHVQELYQEWLEGINS

SEQ ID NO: 6305 - protein, 85 aa, Homo sapiens
PLPAGWEMAKTSSGQRYFLNHIDQTTTWQDPRKAMLSQMNVTAPTSPPVQQNMMNSASAMNQRISQSAPVKQPPPLAPQSPQGGV

SEQ ID NO: 6306 - protein, 85 aa, Homo sapiens
MGGSNSNQQQQMRLQQLQMEKERLRLKQQELLRQVRPQAMRNINPSTANSPKCQELALRSQLPTLEQDGGTQNPVSSPGMSQELR

SEQ ID NO: 6307 - protein, 85 aa, Homo sapiens
TMTTNSSDPFLNSGTYHSRDESTDSGLSMSSYSVPRTPDDFLNSVDEMDTGDTINQSTLPSQQNRFPDYLEAIPGTNVDLGTLEG

SEQ ID NO: 6308 - protein, 85 aa, Homo sapiens
APTSPPVQQNMMNSASAMNQRISQSAPVKQPPPLAPQSPQGGVMGGSNSNQQQQMRLQQLQMEKERLRLKQQELLRQVRPQAMRN

SEQ ID NO: 6309 - protein, 85 aa, Homo sapiens
INPSTANSPKCQELALRSQLPTLEQDGGTQNPVSSPGMSQELRTMTTNSSDPFLNSGTYHSRDESTDSGLSMSSYSVPRTPDDFL

SEQ ID NO: 6310 - protein, 85 aa, Homo sapiens
NSVDEMDTGDTINQSTLPSQQNRFPDYLEAIPGTNVDLGTLEGDGMNIEGEELMPSLQEALSSDILNDMESVLAATKLDKESFLT

SEQ ID NO: 6311 - protein, 85 aa, Homo sapiens
KMDMEDADMTLWTEAEFEEKCTYIVNDHPWDSGADGGTSVQAEASLPRNLLFKYATNSEEVIGVMSKEYIPKGTRFGPLIGEIYT

SEQ ID NO: 6312 - protein, 85 aa, Homo sapiens
NDTVPKNANRKYFWRIYSRGELHHFIDGFNEEKSNWMRYVNPAHSPREQNLAACQNGMNIYFYTIKPIPANQELLVWYCRDFAER

SEQ ID NO: 6313 - protein, 85 aa, Homo sapiens
LHYPYPGELTMMNLTQTQSSLKQPSTEKNELCPKNVPKREYSVKEILKLDSNPSKGKDLYRSNISPLTSEKDLDDFRRRGSPEMP

SEQ ID NO: 6314 - protein, 85 aa, Homo sapiens
FYPRVVYPIRAPLPEDFLKASLAYGIERPTYITRSPIPSSTTPSPSARSSPDQSLKSSSPHSSPGNTVSPVGPGSQEHRDSYAYL

SEQ ID NO: 6315 - protein, 85 aa, Homo sapiens
NASYGTEGLGSYPGYAPLPHLPPAFIPSYNAHYPKFLLPPYGMNCNGLSAVSSMNGINNFGLFPRLCPVYSNLLGGGSLPHPMLN

SEQ ID NO: 6316 - protein, 85 aa, Homo sapiens
PTSLPSSLPSDGARRLLQPEHPREVLVPAPHSAFSFTGAAASMKDKACSPTSGSPTAGTAATAEHVVQPKATSAAMAAPSSDEAM

SEQ ID NO: 6317 - protein, 85 aa, Homo sapiens
NLIKNKRNMTGYKTLPYPLKKQNGKIKYECNVCAKTFGQLSNLKVHLRVHSGERPFKCQTCNKGFTQLAHLQKHYLVHTGEKPHE

SEQ ID NO: 6318 - protein, 85 aa, Homo sapiens
CQVCHKRFSSTSNLKTHLRLHSGEKPYQCKVCPAKFTQFVHLKLHKRLHTRERPHKCSQCHKNYIHLCSLKVHLKGNCAAAPAPG

SEQ ID NO: 6319 - protein, 85 aa, Homo sapiens
MPLEDLTRINEEIEKFDISDNADRLEDVEDDISVISVVEKEILAVVRKEKEETGLKVSLQRNMGNGLLSSGCSLYESSDLPLMKL

SEQ ID NO: 6320 - protein, 85 aa, Homo sapiens
EASLPRNLLFKYATNSEEVIGVMSKEYIPKGTRFGPLIGEIYTNDTVPKNANRKYFWRIYSRGELHHFIDGFNEEKSNWMRYVNP

SEQ ID NO: 6321 - protein, 85 aa, Homo sapiens
AHSPREQNLAACQNGMNIYFYTIKPIPANQELLVWYCRDFAERLHYPYPGELTMMNLTQTQSSLKQPSTEKNELCPKNVPKREYS

SEQ ID NO: 6322 - protein, 85 aa, Homo sapiens
VKEILKLDSNPSKGKDLYRSNISPLTSEKDLDDFRRRGSPEMPFYPRVVYPIRAPLPEDFLKASLAYGIERPTYITRSPIPSSTT

SEQ ID NO: 6323 - protein, 85 aa, Homo sapiens
PSPSARSSPDQSLKSSSPHSSPGNTVSPVGPGSQEHRDSYAYLNASYGTEGLGSYPGYAPLPHLPPAFIPSYNAHYPKFLLPPYG

SEQ ID NO: 6324 - protein, 85 aa, Homo sapiens
MNCNGLSAVSSMNGINNFGLFPRLCPVYSNLLGGGSLPHPMLNPTSLPSSLPSDGARRLLQPEHPREVLVPAPHSAFSFTGAAAS

SEQ ID NO: 6325 - protein, 85 aa, Homo sapiens
MKDKACSPTSGSPTAGTAATAEHVVQPKATSAAMAAPSSDEAMNLIKNKRNMTGYKTLPYPLKKQNGKIKYECNVCAKTFGQLSN

SEQ ID NO: 6326 - protein, 85 aa, Homo sapiens
MKVHLRVHSGERPFKCQTCNKGFTQLAHLQKHYLVHTGEKPHECQVCHKRFSSTSNLKTHLRLHSGEKPYQCKVCPAKFTQFVHL

SEQ ID NO: 6327 - protein, 85 aa, Homo sapiens
KLHKRLHTRERPHKCSQCHKNYIHLCSLKVHLKGNCAAAPAPGLPLEDLTRINEEIEKFDISDNADRLEDVEDDISVISVVEKEI

SEQ ID NO: 6328 - protein, 85 aa, Homo sapiens
VRFKHRYLLCELVSDDPRCRLSLDDRVLSSLVRDTIARVHGTFGAAACSIGFAVRYLNAYTGIVLLRCRKEFYQLVWSALPFITY

SEQ ID NO: 6329 - protein, 84 aa, Homo sapiens
ALPFITYLENKGHRYPCFFNTLHVGGTIRTCQKFLIQYNRRQLLILLQNCTDEGEREAIQKSVTRSCLLEEEEESGEEAAEAME

SEQ ID NO: 6330 - protein, 85 aa, Homo sapiens
FGAAACSIGFAVRYLNAYTGIVLLRCRKEFYQLVWSALPFITYLENKGHRYPCFFNTLHVGGTIRTCQKFLIQYNRRQLLILLQN

SEQ ID NO: 6331 - protein, 84 aa, Homo sapiens
FIQRPGDLVWINAGTVHWVQAVGWCNNIAWNVGPLTACQYKLAVERYEWNKLKSVKSPVPMVHLSWNMARNIKVSDPKLFEMIK

SEQ ID NO: 6332 - protein, 85 aa, Homo sapiens
ASQSQGIQQLLQAEKRAAEKVSEARKRKNRRLKQAKEEAQAEIEQYRLQREKEFKAKEAAALGSRGSCSTEVEKETQEKMTILQT

SEQ ID NO: 6333 - protein, 84 aa, Homo sapiens
QAKEEAQAEIEQYRLQREKEFKAKEAAALGSRGSCSTEVEKETQEKMTILQTYFRQNRDEVLDNLLAFVCDIRPEIHENYRING

SEQ ID NO: 6334 - protein, 85 aa, Homo sapiens
KERKRHLGDTKHFCPVVLKENFILQPGNTEEAAKYREKIYYFSSAEAKEKFLEHPEDYVAHEEPLKAPPLRICLVGPQGSGKTMC

SEQ ID NO: 6335 - protein, 85 aa, Homo sapiens
GRQLAEKLNIFHIQFEEVLQEKLLLKTEKKVGPEFEEDSENEQAAKQELEELAIQANVKVEEENTKKQLPEVQLTEEEEVIKSSL

SEQ ID NO: 6336 - protein, 85 aa, Homo sapiens
MENEPLPPEILEVILSEWWLKEPIRSTGFILDGFPRYPEEAQFLGDRGFFPDAAVFIQVDDQDIFDRLLPAQIEKWKLKQKKKLE

SEQ ID NO: 6337 - protein, 84 aa, Homo sapiens
KKLERKKLIKDMKAKIRVDTIAKRRAELILERDKKRREVSSFVFFFKTGSHSVAQGRVQWHNHSSLQPRTPGLKGSSHLSLSKC

SEQ ID NO: 6338 - protein, 85 aa, Homo sapiens
SSAEAKEKFLEHPEDYVAHEEPLKAPPLRICLVGPQGSGKTMCGRQLAEKLNIFHIQFEEVLQEKLLLKTEKKVGPEFEEDSENE

SEQ ID NO: 6339 - protein, 85 aa, Homo sapiens
QAAKQELEELAIQANVKVEEENTKKQLPEVQLTEEEEVIKSSLMENEPLPPEILEVILSEWWLKEPIRSTGFILDGFPRYPEEAQ

SEQ ID NO: 6340 - protein, 85 aa, Homo sapiens
FLGDRGFFPDAAVFIQVDDQDIFDRLLPAQIEKWKLKQKKKLERKKLIKDMKAKIRVDTIAKRRAELILERDKKRREVSSFVFFF

SEQ ID NO: 6341 - protein, 85 aa, Homo sapiens
QEPLDKDKVNEFLAFEGPILLDMRIKHLIKTNQLSQATALAKLCSDHPEIGIKGSFKQTYLVCLCTSSPNGKLIEEISEVDCKDA

SEQ ID NO: 6342 - protein, 85 aa, Homo sapiens
MEMICNLESEGDEKSALVLCTAFLSRQLQQGDMYCAWELTLFWSKLQQRVEPSIQVYLERCRQLSLLTKTVYHIFFLIKVINSET

SEQ ID NO: 6343 - protein, 85 aa, Homo sapiens
EGAGLATCIELCVKALRLESTENTEVKISICKTISCLLPDDLEVKRACQLSEFLIEPTVDAYYAVEMLYNQPDQKYDEENLPIPN

SEQ ID NO: 6344 - protein, 85 aa, Homo sapiens
SLRCELLLVLKTQWPFDPEFWDWKTLKRQCLALMGEEASIVSSIDELNDSEVYEKVVDYQEESKETSMNGLSGGVGANSGLLKDI

SEQ ID NO: 6345 - protein, 85 aa, Homo sapiens
GDEKQKKREIKQLRERGFISARFRNWQAYMQYCVLCDKEFLGHRIVRHAQKHYKDGIYSCPICAKNFNSKETFVPHVTLHVKQSS

SEQ ID NO: 6346 - protein, 85 aa, Homo sapiens
KERLAAMKPLRRLGRPPKITTTNENQKTNTVAKQEQRPIKKNSLYSTDFIVFNDNDGSDDENDDKDKSYEPEVIPVQKPVPVNEF

SEQ ID NO: 6347 - protein, 85 aa, Homo sapiens
NCPVTFCKKGFKYFKNLIAHVKGHKDNEDAKRFLEMQSKKVICQYCRRHFVSVTHLNDHLQMHCGSKPYICIQMKCKAGFNSYAE

SEQ ID NO: 6348 - protein, 85 aa, Homo sapiens
LLTHRKEHQVFRAKCMFPKCGRIFSEAYLLYDHEAQHYNTYTCKFTGCGKVYRSQGELEKHLDDHSTPPEKVLPPEAQLNSSGDS

SEQ ID NO: 6349 - protein, 85 aa, Homo sapiens
IQPSEVNQNTAENIEKERSMLPSENNIENSLLADRSDAWDKSKAESAVTKQDQISASELRQANGPLSNGLENPATTPLLQSSEVA

SEQ ID NO: 6350 - protein, 85 aa, Homo sapiens
VSIKVSLNQGIEDNFGKQENSTVEGSGEALVTDLHTPVEDTCNDLCHPGFQERKEQDCFNDAHVTQNSLVNSETLKIGDLTPQNL

SEQ ID NO: 6351 - protein, 85 aa, Homo sapiens
ERQVNNLMTFSVQNQAAFQNNLPTSKFECGDNVKTSSNLYNLPLKTLESIAFVPPQSDLSNSLGTPSVPPKAPVQKFSCQVEGCT

SEQ ID NO: 6352 - protein, 85 aa, Homo sapiens
RTYNSSQSIGKHMKTAHPDQYAAFKMQRKSKKGQKANNLNTPNNGKFVYFLPSPVNSSNPFFTSQTKANGNPACSAQLQHVSPPI

SEQ ID NO: 6353 - protein, 85 aa, Homo sapiens
FPAHLASVSTPLLSSMESVINPNITSQDKNEQGGMLCSQMENLPSTALPAQMEDLTKTVLPLNIDSGSDPFLPLPAESSSMSLFP

SEQ ID NO: 6354 - protein, 85 aa, Homo sapiens
SPADSGTNSVFSQLENNTNHYSSQIEGNTNSSFLKGGNGENAVFPSQVNVANNFSSTNAQQSAPEKVKKDRGRGPNGKERKPKHN

SEQ ID NO: 6355 - protein, 85 aa, Homo sapiens
KRAKWPAIIRDGKFICSRCYRAFTNPRSLGGHLSKRSYCKPLDGAEIAQELLQSNGQPSLLASMILSTNAVNLQQPQQSTFNPEA

SEQ ID NO: 6356 - protein, 85 aa, Homo sapiens
CFKDPSFLQLLAENRSPAFLPNTFPRSGVTNFNTSVSQEGSEIIKQALETAGIPSTFEGAEMLSHVSTGCVSDASQVNATVMPNP

SEQ ID NO: 6357 - protein, 85 aa, Homo sapiens
TVPPLLHTVCHPNTLLTNQNRTSNSKTSSIEECSSLPVFPTNDLLLKTVENGLCSSSFPNSGGPSQNFTSNSSRVSVISGPQNTR

SEQ ID NO: 6358 - protein, 85 aa, Homo sapiens
SSHLNKKGNSASKRRKKVAPPLIAPNASQNLVTSDLTTMGLIAKSVEIPTTNLHSNVIPTCEPQSLVENLTQKLNNVNNQLFMTD

SEQ ID NO: 6359 - protein, 85 aa, Homo sapiens
VKENFKTSLESHTVLAPLTLKTENGDSQMMALNSCTTSINSDLQISEDNVIQNFEKTLEIIKTAMNSQILEVKSGSQGAGETSQN

SEQ ID NO: 6360 - protein, 85 aa, Homo sapiens
AQINYNIQLPSVNTVQNNKLPDSSPFSSFISVMPTKSNIPQSEVSHKEDQIQEILEGLQKLKLENDLSTPASQCVLINTSVTLTP

SEQ ID NO: 6361 - protein, 85 aa, Homo sapiens
TPVKSTADITVIQPVSEMINIQFNDKVNKPFVCQNQGCNYSAMTKDALFKHYGKIHQYTPEMILEIKKNQLKFAPFKCVVPTCTK

SEQ ID NO: 6362 - protein, 85 aa, Homo sapiens
TFTRNSNLRAHCQLVHHFTTEEMVKLKIKRPYGRKSQSENVPASRSTQVKKQLAMTEENKKESQPALELRAETQNTHSNVAVIPE

SEQ ID NO: 6363 - protein, 85 aa, Homo sapiens
KQLVEKKSPDKTESSLQVITVTSEQCNTNALTNTQTKGRKIRRHKKEKEEKKRKKPVSQSLEFPTRYSPYRPYRCVHQGCFAAFT

SEQ ID NO: 6364 - protein, 85 aa, Homo sapiens
IQQNLILHYQAVHKSDLPAFSAEVEEESEAGKESEETETKQTLKEFRCQVSDCSRIFQAITGLIQHYMKLHEMTPEEIESMTASV

SEQ ID NO: 6365 - protein, 85 aa, Homo sapiens
DVGKFPCDQLECKSSFTTYLNYVVHLEADHGIGLRASKTEEDGVYKCDCEGCDRIYATRSNLLRHIFNKHNDKHKAHLIRPRRLT

SEQ ID NO: 6366 - protein, 85 aa, Homo sapiens
PGQENMSSKANQEKSKSKHRGTKHSRCGKEGIKMPKTKRKKKNNLENKNAKIVQIEENKPYSLKRGKHVYSIKARNDALSECTSR

SEQ ID NO: 6367 - protein, 85 aa, Homo sapiens
FVTQYPCMIKGCTSVVTSESNIIRHYKCHKLSKAFTSQHRNLLIVFKRCCNSQVKETSEQEGAKNDVKDSDTCVSESNDNSRTTA

SEQ ID NO: 6368 - protein, 85 aa, Homo sapiens
TVSQKEVEKNEKDEMDELTELFITKLINEDSTSVETQANTSSNVSNDFQEDNLCQSERQKASNLKRVNKEKNVSQNKKRKVEKAE

SEQ ID NO: 6369 - protein, 85 aa, Homo sapiens
PASAAELSSVRKEEETAVAIQTIEEHPASFDWSSFKPMGFEVSFLKFLEESAVKQKKNTDKDHPNTGNKKGSHSNSRKNIDKTAV

SEQ ID NO: 6370 - protein, 85 aa, Homo sapiens
TSGNHVCPCKESETFVQFANPSQLQCSDNVKIVLDKNLKDCTELVLKQLQEMKPTVSLKKLEVHSNDPDMSVMKDISIGKATGRG

SEQ ID NO: 6371 - protein, 85 aa, Homo sapiens
FQTLVQVAHEKLMENGSCELHFLATLAQETGVWKNPVLCTILSQEPLDKDKVNEFLAFEGPILLDMRIKHLIKTNQLSQATALAK

SEQ ID NO: 6372 - protein, 85 aa, Homo sapiens
MCSDHPEIGIKGSFKQTYLVCLCTSSPNGKLIEEISEVDCKDALEMICNLESEGDEKSALVLCTAFLSRQLQQGDMYCAWELTLF

SEQ ID NO: 6373 - protein, 85 aa, Homo sapiens
WSKLQQRVEPSIQVYLERCRQLSLLTKTVYHIFFLIKVINSETEGAGLATCIELCVKALRLESTENTEVKISICKTISCLLPDDL

SEQ ID NO: 6374 - protein, 85 aa, Homo sapiens
EVKRACQLSEFLIEPTVDAYYAVEMLYNQPDQKYDEENLPIPNSLRCELLLVLKTQWPFDPEFWDWKTLKRQCLALMGEEASIVS

SEQ ID NO: 6375 - protein, 85 aa, Homo sapiens
SIDELNDSEVYEKVVDYQEESKETSMNGLSGGVGANSGLLKDIGDEKQKKREIKQLRERGFISARFRNWQAYMQYCVLCDKEFLG

SEQ ID NO: 6376 - protein, 85 aa, Homo sapiens
HRIVRHAQKHYKDGIYSCPICAKNFNSKETFVPHVTLHVKQSSKERLAAMKPLRRLGRPPKITTTNENQKTNTVAKQEQRPIKKN

SEQ ID NO: 6377 - protein, 85 aa, Homo sapiens
SLYSTDFIVFNDNDGSDDENDDKDKSYEPEVIPVQKPVPVNEFNCPVTFCKKGFKYFKNLIAHVKGHKDNEDAKRFLEMQSKKVI

SEQ ID NO: 6378 - protein, 85 aa, Homo sapiens
CQYCRRHFVSVTHLNDHLQMHCGSKPYICIQMKCKAGFNSYAELLTHRKEHQVFRAKCMFPKCGRIFSEAYLLYDHEAQHYNTYT

SEQ ID NO: 6379 - protein, 85 aa, Homo sapiens
CKFTGCGKVYRSQGELEKHLDDHSTPPEKVLPPEAQLNSSGDSIQPSEVNQNTAENIEKERSMLPSENNIENSLLADRSDAWDKS

SEQ ID NO: 6380 - protein, 85 aa, Homo sapiens
KAESAVTKQDQISASELRQANGPLSNGLENPATTPLLQSSEVAVSIKVSLNQGIEDNFGKQENSTVEGSGEALVTDLHTPVEDTC

SEQ ID NO: 6381 - protein, 85 aa, Homo sapiens
NDLCHPGFQERKEQDCFNDAHVTQNSLVNSETLKIGDLTPQNLERQVNNLMTFSVQNQAAFQNNLPTSKFECGDNVKTSSNLYNL

SEQ ID NO: 6382 - protein, 85 aa, Homo sapiens
PLKTLESIAFVPPQSDLSNSLGTPSVPPKAPVQKFSCQVEGCTRTYNSSQSIGKHMKTAHPDQYAAFKMQRKSKKGQKANNLNTP

SEQ ID NO: 6383 - protein, 85 aa, Homo sapiens
NNGKFVYFLPSPVNSSNPFFTSQTKANGNPACSAQLQHVSPPIFPAHLASVSTPLLSSMESVINPNITSQDKNEQGGMLCSQMEN

SEQ ID NO: 6384 - protein, 85 aa, Homo sapiens
LPSTALPAQMEDLTKTVLPLNIDSGSDPFLPLPAESSSMSLFPSPADSGTNSVFSQLENNTNHYSSQIEGNTNSSFLKGGNGENA

SEQ ID NO: 6385 - protein, 85 aa, Homo sapiens
VFPSQVNVANNFSSTNAQQSAPEKVKKDRGRGPNGKERKPKHNKRAKWPAIIRDGKFICSRCYRAFTNPRSLGGHLSKRSYCKPL

SEQ ID NO: 6386 - protein, 85 aa, Homo sapiens
DGAEIAQELLQSNGQPSLLASMILSTNAVNLQQPQQSTFNPEACFKDPSFLQLLAENRSPAFLPNTFPRSGVTNFNTSVSQEGSE

SEQ ID NO: 6387 - protein, 85 aa, Homo sapiens
IIKQALETAGIPSTFEGAEMLSHVSTGCVSDASQVNATVMPNPTVPPLLHTVCHPNTLLTNQNRTSNSKTSSIEECSSLPVFPTN

SEQ ID NO: 6388 - protein, 85 aa, Homo sapiens
DLLLKTVENGLCSSSFPNSGGPSQNFTSNSSRVSVISGPQNTRSSHLNKKGNSASKRRKKVAPPLIAPNASQNLVTSDLTTMGLI

SEQ ID NO: 6389 - protein, 85 aa, Homo sapiens
AKSVEIPTTNLHSNVIPTCEPQSLVENLTQKLNNVNNQLFMTDVKENFKTSLESHTVLAPLTLKTENGDSQMMALNSCTTSINSD

SEQ ID NO: 6390 - protein, 85 aa, Homo sapiens
MQISEDNVIQNFEKTLEIIKTAMNSQILEVKSGSQGAGETSQNAQINYNIQLPSVNTVQNNKLPDSSPFSSFISVMPTKSNIPQS

SEQ ID NO: 6391 - protein, 85 aa, Homo sapiens
EVSHKEDQIQEILEGLQKLKLENDLSTPASQCVLINTSVTLTPTPVKSTADITVIQPVSEMINIQFNDKVNKPFVCQNQGCNYSA

SEQ ID NO: 6392 - protein, 85 aa, Homo sapiens
MTKDALFKHYGKIHQYTPEMILEIKKNQLKFAPFKCVVPTCTKTFTRNSNLRAHCQLVHHFTTEEMVKLKIKRPYGRKSQSENVP

SEQ ID NO: 6393 - protein, 85 aa, Homo sapiens
ASRSTQVKKQLAMTEENKKESQPALELRAETQNTHSNVAVIPEKQLVEKKSPDKTESSLQVITVTSEQCNTNALTNTQTKGRKIR

SEQ ID NO: 6394 - protein, 85 aa, Homo sapiens
RHKKEKEEKKRKKPVSQSLEFPTRYSPYRPYRCVHQGCFAAFTIQQNLILHYQAVHKSDLPAFSAEVEEESEAGKESEETETKQT

SEQ ID NO: 6395 - protein, 85 aa, Homo sapiens
MKEFRCQVSDCSRIFQAITGLIQHYMKLHEMTPEEIESMTASVDVGKFPCDQLECKSSFTTYLNYVVHLEADHGIGLRASKTEED

SEQ ID NO: 6396 - protein, 85 aa, Homo sapiens
GVYKCDCEGCDRIYATRSNLLRHIFNKHNDKHKAHLIRPRRLTPGQENMSSKANQEKSKSKHRGTKHSRCGKEGIKMPKTKRKKK

SEQ ID NO: 6397 - protein, 85 aa, Homo sapiens
NNLENKNAKIVQIEENKPYSLKRGKHVYSIKARNDALSECTSRFVTQYPCMIKGCTSVVTSESNIIRHYKCHKLSKAFTSQHRNL

SEQ ID NO: 6398 - protein, 85 aa, Homo sapiens
LIVFKRCCNSQVKETSEQEGAKNDVKDSDTCVSESNDNSRTTATVSQKEVEKNEKDEMDELTELFITKLINEDSTSVETQANTSS

SEQ ID NO: 6399 - protein, 85 aa, Homo sapiens
NVSNDFQEDNLCQSERQKASNLKRVNKEKNVSQNKKRKVEKAEPASAAELSSVRKEEETAVAIQTIEEHPASFDWSSFKPMGFEV

SEQ ID NO: 6400 - protein, 85 aa, Homo sapiens
SFLKFLEESAVKQKKNTDKDHPNTGNKKGSHSNSRKNIDKTAVTSGNHVCPCKESETFVQFANPSQLQCSDNVKIVLDKNLKDCT

SEQ ID NO: 6401 - protein, 85 aa, Homo sapiens
FCGDYVQGTIFPAPNFNPIMDAQMLGGALQGFDCDKDMLINILTQRCNAQRMMIAEAYQSMYGRDLIGDMREQLSDHFKDVMAGL

SEQ ID NO: 6402 - protein, 85 aa, Homo sapiens
MYPPPLYDAHELWHAMKGVGTDENCLIEILASRTNGEIFQMREAYCLQYSNNLQEDIYSETSGHFRDTLMNLVQGTREEGYTDPA

SEQ ID NO: 6403 - protein, 85 aa, Homo sapiens
MAAQDAMVLWEACQQKTGEHKTMLQMILCNKSYQQLRLVFQEFQNISGQDMVDAINECYDGYFQELLVAIVLCVRDKPAYFAYRL

SEQ ID NO: 6404 - protein, 84 aa, Homo sapiens
IVLCVRDKPAYFAYRLYSAIHDFGFHNKTVIRILIARSEIDLLTIRKRYKERYGKSLFHDIRNFASGHYKKALLAICAGDAEDY

SEQ ID NO: 6405 - protein, 85 aa, Homo sapiens
MTQRCNAQRMMIAEAYQSMYGRDLIGDMREQLSDHFKDVMAGLMYPPPLYDAHELWHAMKGVGTDENCLIEILASRTNGEIFQMR

SEQ ID NO: 6406 - protein, 85 aa, Homo sapiens
EAYCLQYSNNLQEDIYSETSGHFRDTLMNLVQGTREEGYTDPAMAAQDAMVLWEACQQKTGEHKTMLQMILCNKSYQQLRLVFQE

SEQ ID NO: 6407 - protein, 85 aa, Homo sapiens
FQNISGQDMVDAINECYDGYFQELLVAIVLCVRDKPAYFAYRLYSAIHDFGFHNKTVIRILIARSEIDLLTIRKRYKERYGKSLF

SEQ ID NO: 6408 - protein, 85 aa, Homo sapiens
AKRNAEKELTDRNWDQEDEAEEVGTFSMASEEVLKNRAIKKAKRRNVGFESDTGGAFKGFKGLVVPSGGGRFSGFGSGAGGKPLE

SEQ ID NO: 6409 - protein, 85 aa, Homo sapiens
GLSNGNNITSAPPFASAKAAADPKVAFGSLAANGPTTLVDKVSNPKTNGDSQQPSSSGLASSKACVGNAYHKQLAALNCSVRDWI

SEQ ID NO: 6410 - protein, 85 aa, Homo sapiens
VKHVNTNPLCDLTPIFKDYEKYLANIEQQHGNSGRNSESESNKVAAETQSPSLFGSTKLQQESTFLFHGNKTEDTPDKKMEVASE

SEQ ID NO: 6411 - protein, 85 aa, Homo sapiens
KKTDPSSLGATSASFNFGKKVDSSVLGSLSSVPLTGFSFSPGNSSLFGKDTTQSKPVSSPFPTKPLEGQAEGDSGECKGGDEEEN

SEQ ID NO: 6412 - protein, 85 aa, Homo sapiens
DEPPKVVVTEVKEEDAFYSKKCKLFYKKDNEFKEKGIGTLHLKPTANQKTQLLVRADTNLGNILLNVLIPPNMPCTRTGKNNVLI

SEQ ID NO: 6413 - protein, 84 aa, Homo sapiens
PTANQKTQLLVRADTNLGNILLNVLIPPNMPCTRTGKNNVLIVCVPNPPIDEKNATMPVTMLIRVKTSEDADELHKILLEKKDA

SEQ ID NO: 6414 - protein, 85 aa, Homo sapiens
KRRNVGFESDTGGAFKGFKGLVVPSGGGRFSGFGSGAGGKPLEGLSNGNNITSAPPFASAKAAADPKVAFGSLAANGPTTLVDKV

SEQ ID NO: 6415 - protein, 85 aa, Homo sapiens
SNPKTNGDSQQPSSSGLASSKACVGNAYHKQLAALNCSVRDWIVKHVNTNPLCDLTPIFKDYEKYLANIEQQHGNSGRNSESESN

SEQ ID NO: 6416 - protein, 85 aa, Homo sapiens
KVAAETQSPSLFGSTKLQQESTFLFHGNKTEDTPDKKMEVASEKKTDPSSLGATSASFNFGKKVDSSVLGSLSSVPLTGFSFSPG

SEQ ID NO: 6417 - protein, 85 aa, Homo sapiens
NSSLFGKDTTQSKPVSSPFPTKPLEGQAEGDSGECKGGDEEENDEPPKVVVTEVKEEDAFYSKKCKLFYKKDNEFKEKGIGTLHL

SEQ ID NO: 6418 - protein, 85 aa, Homo sapiens
KPTANQKTQLLVRADTNLGNILLNVLIPPNMPCTRTGKNNVLIVCVPNPPIDEKNATMPVTMLIRVKTSEDADELHKILLEKKDA

SEQ ID NO: 6419 - protein, 85 aa, Homo sapiens
ATLARLQARSSTVGNQYYFRNSVVDPFRKKENDAAVKIQSWFRGCQVRAYIRHLNRIVTIIQKWWRSFLGRKQYQLTVQVAYYTM

SEQ ID NO: 6420 - protein, 85 aa, Homo sapiens
MMNLYNAMAVRIQRRWRGYRVRKYLFNYYYLKEYLKVVSETNDAIRKALEEFAEMKEREEKKANLEREEKKRDYQARKMHYLLST

SEQ ID NO: 6421 - protein, 85 aa, Homo sapiens
KQIPGIYNSPFRKEPDPWELQLQKAKPLTHRRPKVKQKDSTSLTDWLACTSARSFPRSEILPPINRKQCQGPFRDITEVLEQRYR

SEQ ID NO: 6422 - protein, 85 aa, Homo sapiens
PLEPTLRVAEPIDELKLAREELRREEWLQNVNDNMFLPFSSYHKNEKYIPSMHLSSKYGPISYKEQFRSENPKKWICDKDFQTVL

SEQ ID NO: 6423 - protein, 84 aa, Homo sapiens
LRREEWLQNVNDNMFLPFSSYHKNEKYIPSMHLSSKYGPISYKEQFRSENPKKWICDKDFQTVLPSFELFSKYGKLYSKAGQIV

SEQ ID NO: 6424 - protein, 85 aa, Homo sapiens
RGCQVRAYIRHLNRIVTIIQKWWRSFLGRKQYQLTVQVAYYTMMMNLYNAMAVRIQRRWRGYRVRKYLFNYYYLKEYLKVVSETN

SEQ ID NO: 6425 - protein, 85 aa, Homo sapiens
DAIRKALEEFAEMKEREEKKANLEREEKKRDYQARKMHYLLSTKQIPGIYNSPFRKEPDPWELQLQKAKPLTHRRPKVKQKDSTS

SEQ ID NO: 6426 - protein, 85 aa, Homo sapiens
LTDWLACTSARSFPRSEILPPINRKQCQGPFRDITEVLEQRYRPLEPTLRVAEPIDELKLAREELRREEWLQNVNDNMFLPFSSY

SEQ ID NO: 6427 - protein, 84 aa, Homo sapiens
MHIFNAKKAAAHYKCMLFSSGTVQLTTTSRAEFGDFDIKTVLQEIKRGKRMVCSFYICYATLHLICCFKFRVHPKFIQSSENLK

SEQ ID NO: 6428 - protein, 85 aa, Homo sapiens
GFCHVGEEENEARGKLHIFNAKKAAAHYKCMLFSSGTVQLTTTSRAEFGDFDIKTVLQEIKRGKRMVCSFYICYATLHLICCFKF

SEQ ID NO: 6429 - protein, 85 aa, Homo sapiens
QDDKTGGVPIRTVKSFLSKIPSVVTGTDIVQWLMKNLSIEDPVEAIHLGSLIAAQGYIFPISDHVLTMKDDGTFYRFQAPYFWPS

SEQ ID NO: 6430 - protein, 85 aa, Homo sapiens
NCWEPENTDYAIYLCKRTMQNKARLELADYEAENLARLQRAFARKWEFIFMQAEAQVKIDRKKDKTERKILDSQERAFWDVHRPV

SEQ ID NO: 6431 - protein, 85 aa, Homo sapiens
PGCVNTTEMDIRKCRRLKNPQKVKKSVYGVTEESQAQSPVHVLSQPIRKTTKEDIRKQITFLNAQIDRHCLKMSKVAESKEPSQQ

SEQ ID NO: 6432 - protein, 85 aa, Homo sapiens
RVKRWGFSFDEILKDQVGRDQFLRFLESEFSSENLRFWLAVQDLKKQPLQDVAKRVEEIWQEFLAPGAPSAINLDSHSYEITSQN

SEQ ID NO: 6433 - protein, 84 aa, Homo sapiens
YEITSQNVKDGGRYTFEDAQEHIYKLMKSDSYARFLRSNAYQDLLLAKKKPESEQGRRTSLEKFTRSVGKSLAGKRLTGLMQSS

SEQ ID NO: 6434 - protein, 85 aa, Homo sapiens
VEAIHLGSLIAAQGYIFPISDHVLTMKDDGTFYRFQAPYFWPSNCWEPENTDYAIYLCKRTMQNKARLELADYEAENLARLQRAF

SEQ ID NO: 6435 - protein, 85 aa, Homo sapiens
ARKWEFIFMQAEAQVKIDRKKDKTERKILDSQERAFWDVHRPVPGCVNTTEMDIRKCRRLKNPQKVKKSVYGVTEESQAQSPVHV

SEQ ID NO: 6436 - protein, 85 aa, Homo sapiens
LSQPIRKTTKEDIRKQITFLNAQIDRHCLKMSKVAESKEPSQQRVKRWGFSFDEILKDQVGRDQFLRFLESEFSSENLRFWLAVQ

SEQ ID NO: 6437 - protein, 85 aa, Homo sapiens
DLKKQPLQDVAKRVEEIWQEFLAPGAPSAINLDSHSYEITSQNVKDGGRYTFEDAQEHIYKLMKSDSYARFLRSNAYQDLLLAKK

SEQ ID NO: 6438 - protein, 85 aa, Homo sapiens
VHFCGLLTLHREPVPLKSISVSVNIYEFVAGVSATLNYENEEKVPLEAFFVFPMDEDSAVYSFEALVDGKKIVAELQDKMKARTN

SEQ ID NO: 6439 - protein, 85 aa, Homo sapiens
YEKAISQGHQAFLLEGDSSSRDVFSCNVGNLQPGSKAAVTLKYVQELPLEADGALRFVLPAVLNPRYQFSGSSKDSCLNVKTPIV

SEQ ID NO: 6440 - protein, 85 aa, Homo sapiens
PVEDLPYTLSMVATIDSQHGIEKVQSNCPLSPTEYLGEDKTSAQVSLAAGHKFDRDVELLIYYNEVHTPSVVLEMGMPNMKPGHL

SEQ ID NO: 6441 - protein, 85 aa, Homo sapiens
MGDPSAMVSFYPNIPEDQPSNTCGEFIFLMDRSGSMQSPMSSQDTSQLRIQAAKETLILLLKSLPIGCYFNIYGFGSSYEACFPE

SEQ ID NO: 6442 - protein, 84 aa, Homo sapiens
GSSYEACFPESVKYTQQTMEEALGRVKLMQADLGGTEILAPLQNIYRGPSIPGHPLQLFVFTDGEVTDTFSVIKEVRINRQKHR

SEQ ID NO: 6443 - protein, 85 aa, Homo sapiens
KVPLEAFFVFPMDEDSAVYSFEALVDGKKIVAELQDKMKARTNYEKAISQGHQAFLLEGDSSSRDVFSCNVGNLQPGSKAAVTLK

SEQ ID NO: 6444 - protein, 85 aa, Homo sapiens
YVQELPLEADGALRFVLPAVLNPRYQFSGSSKDSCLNVKTPIVPVEDLPYTLSMVATIDSQHGIEKVQSNCPLSPTEYLGEDKTS

SEQ ID NO: 6445 - protein, 85 aa, Homo sapiens
AQVSLAAGHKFDRDVELLIYYNEVHTPSVVLEMGMPNMKPGHLMGDPSAMVSFYPNIPEDQPSNTCGEFIFLMDRSGSMQSPMSS

SEQ ID NO: 6446 - protein, 85 aa, Homo sapiens
QDTSQLRIQAAKETLILLLKSLPIGCYFNIYGFGSSYEACFPESVKYTQQTMEEALGRVKLMQADLGGTEILAPLQNIYRGPSIP

SEQ ID NO: 6447 - protein, 85 aa, Homo sapiens
AAAALRDPAQQGYVTFEDVAVYFSQEEWRLLDDAQRLLYRNVMLENFTLLASLGLASSKTHEITQLESWEEPFMPAWEVVTSAIP

SEQ ID NO: 6448 - protein, 85 aa, Homo sapiens
RGCWHGAEAEEAPEQIASVGLLSSNIQQHQKQHCGEKPLKRQEGRVPVLRSCKVHLSEKSLQSREVGKALLISSGVLKHQVTHTG

SEQ ID NO: 6449 - protein, 85 aa, Homo sapiens
EKSHRSSKSREAFHAGKRHYKCSECGKAFGQKYLLVQHQRLHAGKKTYECSECGKLFRDMSNLFIHQIVHTGERPYGCSNCGKSF

SEQ ID NO: 6450 - protein, 85 aa, Homo sapiens
SRNAHLIEHQRVHTGEKPFTCSECGKAFRHNSTLVQHHKIHTGVRPYECSECGKLFSFNSSLMKHQRIHTGERPYKCSECGKFYS

SEQ ID NO: 6451 - protein, 85 aa, Homo sapiens
HKSNLIKHWRVHTGERPYKCSDCGKFFTQCSSLMQHQKVHTGEKPFKCNECGRFFRENSSLVKHQRVHTGAKPYECRECGKFFRH

SEQ ID NO: 6452 - protein, 84 aa, Homo sapiens
YKCSDCGKFFTQCSSLMQHQKVHTGEKPFKCNECGRFFRENSSLVKHQRVHTGAKPYECRECGKFFRHNSSLFKHRRIHTGEMQ

SEQ ID NO: 6453 - protein, 85 aa, Homo sapiens
MLENFTLLASLGLASSKTHEITQLESWEEPFMPAWEVVTSAIPRGCWHGAEAEEAPEQIASVGLLSSNIQQHQKQHCGEKPLKRQ

SEQ ID NO: 6454 - protein, 85 aa, Homo sapiens
EGRVPVLRSCKVHLSEKSLQSREVGKALLISSGVLKHQVTHTGEKSHRSSKSREAFHAGKRHYKCSECGKAFGQKYLLVQHQRLH

SEQ ID NO: 6455 - protein, 85 aa, Homo sapiens
AGKKTYECSECGKLFRDMSNLFIHQIVHTGERPYGCSNCGKSFSRNAHLIEHQRVHTGEKPFTCSECGKAFRHNSTLVQHHKIHT

SEQ ID NO: 6456 - protein, 85 aa, Homo sapiens
GVRPYECSECGKLFSFNSSLMKHQRIHTGERPYKCSECGKFYSHKSNLIKHWRVHTGERPYKCSDCGKFFTQCSSLMQHQKVHTG

SEQ ID NO: 6457 - protein, 85 aa, Homo sapiens
DHHIPMHALPEEIQKMLPEEKVCKYCGVSYLILHEFKAMEEKVKAMEKEMKFYQGSVDREKRLQEKLHSLSQELEQYKIDNKSKT

SEQ ID NO: 6458 - protein, 85 aa, Homo sapiens
ERIYDVGMQLKSQQNEFQKVKKQLSHLQDELKIKYRQSYIFSQRLSEYKYFWNKTLSLLTFTKRELTSIKNEVYDNYQNWTSLKG

SEQ ID NO: 6459 - protein, 85 aa, Homo sapiens
AVFLQIKSISETALTEIDILNKSLTVSQRNKVCLEKEMKNLKLLSDAAILRSQQIRTSRQQEVNLQTRCYDLQKEVLDLQCLVEA

SEQ ID NO: 6460 - protein, 85 aa, Homo sapiens
LGLKLQKAVTEMDNYKEMLMNKSNEADDCQRELKKLKFESIISESQHTMLLKEKEDSLMTCQQIYKALQEELTVKEKQEEDIKRR

SEQ ID NO: 6461 - protein, 85 aa, Homo sapiens
INLAENELEITKTLLNQTREEVLTLKNERELMLISHQKSIEQLQETLRQKLLSDDNWKEKIEAELAKERAQHLVEFEEQALLFKE

SEQ ID NO: 6462 - protein, 85 aa, Homo sapiens
ETKLQLDIEKEKHQDVIQKYKKEQEELQMKISDLITGATRDLRQEVTTLKEKLHKSHIRYTEESNSKEKEIENLKNLVAEFESRL

SEQ ID NO: 6463 - protein, 85 aa, Homo sapiens
KKEIDSNDSVSENLRKEMEQKSDELKRVMLAQTQLIEQFNQSQEENTFLQETVRRECEERFELTEALSQAREQLLELSKLRGSLP

SEQ ID NO: 6464 - protein, 85 aa, Homo sapiens
FSPCSLSKGSLTSPAAAVSNHGERSLARLNSEKGIQIPNLRGVSKPTTFPTSDKPKRVRSGVPILPQPHPPRGGASSANETRQRL

SEQ ID NO: 6465 - protein, 84 aa, Homo sapiens
SPAAAVSNHGERSLARLNSEKGIQIPNLRGVSKPTTFPTSDKPKRVRSGVPILPQPHPPRGGASSANETRQRLAAILRRRRSQQ

SEQ ID NO: 6466 - protein, 85 aa, Homo sapiens
VKAMEKEMKFYQGSVDREKRLQEKLHSLSQELEQYKIDNKSKTERIYDVGMQLKSQQNEFQKVKKQLSHLQDELKIKYRQSYIFS

SEQ ID NO: 6467 - protein, 85 aa, Homo sapiens
QRLSEYKYFWNKTLSLLTFTKRELTSIKNEVYDNYQNWTSLKGAVFLQIKSISETALTEIDILNKSLTVSQRNKVCLEKEMKNLK

SEQ ID NO: 6468 - protein, 85 aa, Homo sapiens
MLSDAAILRSQQIRTSRQQEVNLQTRCYDLQKEVLDLQCLVEALGLKLQKAVTEMDNYKEMLMNKSNEADDCQRELKKLKFESII

SEQ ID NO: 6469 - protein, 85 aa, Homo sapiens
SESQHTMLLKEKEDSLMTCQQIYKALQEELTVKEKQEEDIKRRINLAENELEITKTLLNQTREEVLTLKNERELMLISHQKSIEQ

SEQ ID NO: 6470 - protein, 85 aa, Homo sapiens
MQETLRQKLLSDDNWKEKIEAELAKERAQHLVEFEEQALLFKEETKLQLDIEKEKHQDVIQKYKKEQEELQMKISDLITGATRDL

SEQ ID NO: 6471 - protein, 85 aa, Homo sapiens
RQEVTTLKEKLHKSHIRYTEESNSKEKEIENLKNLVAEFESRLKKEIDSNDSVSENLRKEMEQKSDELKRVMLAQTQLIEQFNQS

SEQ ID NO: 6472 - protein, 85 aa, Homo sapiens
QEENTFLQETVRRECEERFELTEALSQAREQLLELSKLRGSLPFSPCSLSKGSLTSPAAAVSNHGERSLARLNSEKGIQIPNLRG

SEQ ID NO: 6473 - protein, 84 aa, Homo sapiens
HFPEFSQILWIGGRNPGEDVERFKQQGGNIIVATPGRLEDMFRRKAEGLDLASCVRSLDVLVLDEADRLLDMGFEARRRKWRTW

SEQ ID NO: 6474 - protein, 85 aa, Homo sapiens
MAGVQWCNLGSLQPPPPRFKRFSCLSLLSSWDYRPHQQLNALVRLLQWKELGQLVELLLHSTVQLLELNLPQTNVADTNKLQCLV

SEQ ID NO: 6475 - protein, 84 aa, Homo sapiens
WCNLGSLQPPPPRFKRFSCLSLLSSWDYRPHQQLNALVRLLQWKELGQLVELLLHSTVQLLELNLPQTNVADTNKLQCLVSQNP

SEQ ID NO: 6476 - protein, 85 aa, Homo sapiens
MGQMAMGGAMGINNRGAMPPAPVPAGTPAPPGPATMMPDGTLGLAGVQWCNLGSLQPPPPRFKRFSCLSLLSSWDYRPHQQLNAL

SEQ ID NO: 6477 - protein, 85 aa, Homo sapiens
EAKDQKKHRKKNSGPKAAKKKKRLLQDLQLGDEEDARKRNPKAFAVQSAVRMARSFHRTQDLKTKKHHIPVVDRTPLEPPPIVVV

SEQ ID NO: 6478 - protein, 85 aa, Homo sapiens
VMGPPKVGKSTLIQCLIRNFTRQKLTEIRGPVTIVSGKKRRLTIIECGCDINMMIDLAKVADLVLMLIDASFGFEMETFEFLNIC

SEQ ID NO: 6479 - protein, 85 aa, Homo sapiens
QVHGFPKIMGVLTHLDSFKHNKQLKKTKKRLKHRFWTEVYPGAKLFYLSGMVHGEYQNQEIHNLGRFITVMKFRPLTWQTSHPYI

SEQ ID NO: 6480 - protein, 85 aa, Homo sapiens
MADRMEDLTNPEDIRTNIKCDRKVSLYGYLRGAHLKNKSQIHMPGVGDFAVSDISFLPDPCALPEQQKKRCLNEKEKLVYAPLSG

SEQ ID NO: 6481 - protein, 85 aa, Homo sapiens
VGGVLYDKDAVYVDLGGSHVFQDEVGPTHELVQSLISTHSTIDAKMASSRVTLFSDSKPLGSEDIDNQGLMMPKEEKQMDLNTGR

SEQ ID NO: 6482 - protein, 85 aa, Homo sapiens
MRRKAIFGDEDESGDSDDEEDDEMSEDDGLENGSSDEEAEEEENAEMTDQYMAVKGIKRRKLELEEDSEMDLPAFADSDDDLERS

SEQ ID NO: 6483 - protein, 85 aa, Homo sapiens
SAEEGEAEEADESSEEEDCTAGEKGISGSKAAGEGSKAGLSPANCQSDRVNLEKSLLMKKAALPTFDSGHCTAEEVFASEDESEE

SEQ ID NO: 6484 - protein, 85 aa, Homo sapiens
SSSLSAEEEDSENEEAIRKKLSKPSQVSSGQKLGPQNFIDETSDIENLLKEEEDYKEENNDSKETSGALKWKEDLSRKAAEAFLR

SEQ ID NO: 6485 - protein, 85 aa, Homo sapiens
QQQAAPNLRKLIYGTVTEDNEEEDDDTLEELGGLFRVNQPDRECKHKADSLDCSRFLVEAPHDWDLEEVMNSIRDCFVTGKWEDD

SEQ ID NO: 6486 - protein, 85 aa, Homo sapiens
KDAAKVLAEDEELYGDFEDLETGDVHKGKSGPNTQNEDIEKEVKEEIDPDEEESAKKKHLDKKRKLKEMFDAEYDEGESTYFDDL

SEQ ID NO: 6487 - protein, 85 aa, Homo sapiens
KGEMQKQAQLNRAEFEDQDDEARVQYEGFRPGMYVRIEIENVPCEFVQNFDPHYPIILGGLGNSEGNVGYVQMRLKKHRWYKKIL

SEQ ID NO: 6488 - protein, 85 aa, Homo sapiens
KSRDPIIFSVGWRRFQTIPLYYIEDHNGRQRLLKYTPQHMHCGAAFWGPITPQGTGFLAIQSVSGIMPDFRIAATGVVLDLDKSI

SEQ ID NO: 6489 - protein, 85 aa, Homo sapiens
KIVKKLKLTGFPYKIFKNTSFIKGMFNSALEVAKFEGAVIRTVSGIRGQIKKALRAPEGAFRASFEDKLLMSDIVFMRTWYPVSI

SEQ ID NO: 6490 - protein, 85 aa, Homo sapiens
PAFYNPVTSLLKPVGEKDTWSGMRTTGQLRLAHGVRLKANKDSLYKPILRQKKHFNSLHIPKALQKALPFKNKPKTQAKAGKVPK

SEQ ID NO: 6491 - protein, 85 aa, Homo sapiens
DRRRPAVIREPHERKILALLDALSTVHSQKMKKAKEQRHLHNKEHFRAKQKEEEEKLKRQKDLRKKLFRIQGQKERRNQKSSLKG

SEQ ID NO: 6492 - protein, 84 aa, Homo sapiens
IREPHERKILALLDALSTVHSQKMKKAKEQRHLHNKEHFRAKQKEEEEKLKRQKDLRKKLFRIQGQKERRNQKSSLKGAEGQLQ

SEQ ID NO: 6493 - protein, 85 aa, Homo sapiens
AFAVQSAVRMARSFHRTQDLKTKKHHIPVVDRTPLEPPPIVVVVMGPPKVGKSTLIQCLIRNFTRQKLTEIRGPVTIVSGKKRRL

SEQ ID NO: 6494 - protein, 85 aa, Homo sapiens
TIIECGCDINMMIDLAKVADLVLMLIDASFGFEMETFEFLNICQVHGFPKIMGVLTHLDSFKHNKQLKKTKKRLKHRFWTEVYPG

SEQ ID NO: 6495 - protein, 85 aa, Homo sapiens
AKLFYLSGMVHGEYQNQEIHNLGRFITVMKFRPLTWQTSHPYILADRMEDLTNPEDIRTNIKCDRKVSLYGYLRGAHLKNKSQIH

SEQ ID NO: 6496 - protein, 85 aa, Homo sapiens
MPGVGDFAVSDISFLPDPCALPEQQKKRCLNEKEKLVYAPLSGVGGVLYDKDAVYVDLGGSHVFQDEVGPTHELVQSLISTHSTI

SEQ ID NO: 6497 - protein, 85 aa, Homo sapiens
DAKMASSRVTLFSDSKPLGSEDIDNQGLMMPKEEKQMDLNTGRMRRKAIFGDEDESGDSDDEEDDEMSEDDGLENGSSDEEAEEE

SEQ ID NO: 6498 - protein, 85 aa, Homo sapiens
ENAEMTDQYMAVKGIKRRKLELEEDSEMDLPAFADSDDDLERSSAEEGEAEEADESSEEEDCTAGEKGISGSKAAGEGSKAGLSP

SEQ ID NO: 6499 - protein, 85 aa, Homo sapiens
ANCQSDRVNLEKSLLMKKAALPTFDSGHCTAEEVFASEDESEESSSLSAEEEDSENEEAIRKKLSKPSQVSSGQKLGPQNFIDET

SEQ ID NO: 6500 - protein, 85 aa, Homo sapiens
SDIENLLKEEEDYKEENNDSKETSGALKWKEDLSRKAAEAFLRQQQAAPNLRKLIYGTVTEDNEEEDDDTLEELGGLFRVNQPDR

SEQ ID NO: 6501 - protein, 85 aa, Homo sapiens
ECKHKADSLDCSRFLVEAPHDWDLEEVMNSIRDCFVTGKWEDDKDAAKVLAEDEELYGDFEDLETGDVHKGKSGPNTQNEDIEKE

SEQ ID NO: 6502 - protein, 85 aa, Homo sapiens
VKEEIDPDEEESAKKKHLDKKRKLKEMFDAEYDEGESTYFDDLKGEMQKQAQLNRAEFEDQDDEARVQYEGFRPGMYVRIEIENV

SEQ ID NO: 6503 - protein, 85 aa, Homo sapiens
PCEFVQNFDPHYPIILGGLGNSEGNVGYVQMRLKKHRWYKKILKSRDPIIFSVGWRRFQTIPLYYIEDHNGRQRLLKYTPQHMHC

SEQ ID NO: 6504 - protein, 85 aa, Homo sapiens
GAAFWGPITPQGTGFLAIQSVSGIMPDFRIAATGVVLDLDKSIKIVKKLKLTGFPYKIFKNTSFIKGMFNSALEVAKFEGAVIRT

SEQ ID NO: 6505 - protein, 85 aa, Homo sapiens
VSGIRGQIKKALRAPEGAFRASFEDKLLMSDIVFMRTWYPVSIPAFYNPVTSLLKPVGEKDTWSGMRTTGQLRLAHGVRLKANKD

SEQ ID NO: 6506 - protein, 85 aa, Homo sapiens
SLYKPILRQKKHFNSLHIPKALQKALPFKNKPKTQAKAGKVPKDRRRPAVIREPHERKILALLDALSTVHSQKMKKAKEQRHLHN

SEQ ID NO: 6507 - protein, 85 aa, Homo sapiens
SQPKKRKLESGGGGEGGEGTEEEDGAEREAALERPRRTKRERDQLYYECYSDVSVHEEMIADRVRTDAYRLGILRNWAALRGKTV

SEQ ID NO: 6508 - protein, 85 aa, Homo sapiens
MDVGAGTGILSIFCAQAGARRVYAVEASAIWQQAREVVRFNGLEDRVHVLPGPVETVELPEQVDAIVSEWMGYGLLHESMLSSVL

SEQ ID NO: 6509 - protein, 85 aa, Homo sapiens
HARTKWLKEGGLLLPASAELFIAPISDQMLEWRLGFWSQVKQHYGVDMSCLEGFATRCLMGHSEIVVQGLSGEDVLARPQRFAQL

SEQ ID NO: 6510 - protein, 85 aa, Homo sapiens
ELSRAGLEQELEAGVGGRFRCSCYGSAPMHGFAIWFQVTFPGGESEKPLVLSTSPFHPATHWKQALLYLNEPVQVEQDTDVSGEI

SEQ ID NO: 6511 - protein, 84 aa, Homo sapiens
FQVTFPGGESEKPLVLSTSPFHPATHWKQALLYLNEPVQVEQDTDVSGEITLLPSRDNPRRLRVLLRYKVGDQEEKTKDFAMED

SEQ ID NO: 6512 - protein, 85 aa, Homo sapiens
DQLYYECYSDVSVHEEMIADRVRTDAYRLGILRNWAALRGKTVLDVGAGTGILSIFCAQAGARRVYAVEASAIWQQAREVVRFNG

SEQ ID NO: 6513 - protein, 85 aa, Homo sapiens
MEDRVHVLPGPVETVELPEQVDAIVSEWMGYGLLHESMLSSVLHARTKWLKEGGLLLPASAELFIAPISDQMLEWRLGFWSQVKQ

SEQ ID NO: 6514 - protein, 85 aa, Homo sapiens
HYGVDMSCLEGFATRCLMGHSEIVVQGLSGEDVLARPQRFAQLELSRAGLEQELEAGVGGRFRCSCYGSAPMHGFAIWFQVTFPG

SEQ ID NO: 6515 - protein, 85 aa, Homo sapiens
RLAAAANEAYTAPLAVSGLLGCKQCGGGRDQDEELGIRIPRPLGQGPSRFIPEKEILQVGSEDAQMHALFADSFAALGRLDNITL

SEQ ID NO: 6516 - protein, 85 aa, Homo sapiens
VMVFHPQYLESFLKTQHYLLQMDGPLPLHYRHYIGIMAAARHQCSYLVNLHVNDFLHVGGDPKWLNGLENAPQKLQNLGELNKVL

SEQ ID NO: 6517 - protein, 85 aa, Homo sapiens
AHRPWLITKEHIEGLLKAEEHSWSLAELVHAVVLLTHYHSLASFTFGCGISPEIHCDGGHTFRPPSVSNYCICDITNGNHSVDEM

SEQ ID NO: 6518 - protein, 85 aa, Homo sapiens
PVNSAENVSVSDSFFEVEALMEKMRQLQECRDEEEASQEEMASRFEIEKRESMFVFSSDDEEVTPARAVSRHFEDTSYGYKDFSR

SEQ ID NO: 6519 - protein, 85 aa, Homo sapiens
HGMHVPTFRVQDYCWEDHGYSLVNRLYPDVGQLIDEKFHIAYNLTYNTMAMHKDVDTSMLRRAIWNYIHCMFGIRYDDYDYGEIN

SEQ ID NO: 6520 - protein, 85 aa, Homo sapiens
LGQGPSRFIPEKEILQVGSEDAQMHALFADSFAALGRLDNITLVMVFHPQYLESFLKTQHYLLQMDGPLPLHYRHYIGIMAAARH

SEQ ID NO: 6521 - protein, 85 aa, Homo sapiens
QCSYLVNLHVNDFLHVGGDPKWLNGLENAPQKLQNLGELNKVLAHRPWLITKEHIEGLLKAEEHSWSLAELVHAVVLLTHYHSLA

SEQ ID NO: 6522 - protein, 85 aa, Homo sapiens
SFTFGCGISPEIHCDGGHTFRPPSVSNYCICDITNGNHSVDEMPVNSAENVSVSDSFFEVEALMEKMRQLQECRDEEEASQEEMA

SEQ ID NO: 6523 - protein, 85 aa, Homo sapiens
SRFEIEKRESMFVFSSDDEEVTPARAVSRHFEDTSYGYKDFSRHGMHVPTFRVQDYCWEDHGYSLVNRLYPDVGQLIDEKFHIAY

SEQ ID NO: 6524 - protein, 85 aa, Homo sapiens
NLTYNTMAMHKDVDTSMLRRAIWNYIHCMFGIRYDDYDYGEINQLLDRSFKVYIKTVVCTPEKVTKRMYDSFWRQFKHSEKVHVN

SEQ ID NO: 6525 - protein, 85 aa, Homo sapiens
RLKMTTRNFPEREVPCDVEVERFTREVPCLSSLGDGWDCENQEGHLRQSALTLEKPGTQEAICEYPGFGEHLIASSDLPPSQRVL

SEQ ID NO: 6526 - protein, 85 aa, Homo sapiens
ATNGFHAPDSNVSGLDCDPALPSYPKSYADKRTGDSDACGKGFNHSMEVIHGRNPVREKPYKYPESVKSFNHFTSLGHQKIMKRG

SEQ ID NO: 6527 - protein, 85 aa, Homo sapiens
KKSYEGKNFENIFTLSSSLNENQRNLPGEKQYRCTECGKCFKRNSSLVLHHRTHTGEKPYTCNECGKSFSKNYNLIVHQRIHTGE

SEQ ID NO: 6528 - protein, 85 aa, Homo sapiens
KPYECSKCGKAFSDGSALTQHQRIHTGEKPYECLECGKTFNRNSSLILHQRTHTGEKPYRCNECGKPFTDISHLTVHLRIHTGEK

SEQ ID NO: 6529 - protein, 85 aa, Homo sapiens
PYECSKCGKAFRDGSYLTQHERTHTGEKPFECAECGKSFNRNSHLIVHQKIHSGEKPYECKECGKTFIESAYLIRHQRIHTGEKP

SEQ ID NO: 6530 - protein, 85 aa, Homo sapiens
YGCNQCQKLFRNIAGLIRHQRTHTGEKPYECNQCGKAFRDSSCLTKHQRIHTKETPYQCPECGKSFKQNSHLAVHQRLHSREGPS

SEQ ID NO: 6531 - protein, 84 aa, Homo sapiens
NQCGKAFRDSSCLTKHQRIHTKETPYQCPECGKSFKQNSHLAVHQRLHSREGPSRCPQCGKMFQKSSSLVRHQRAHLGEQPMET

SEQ ID NO: 6532 - protein, 85 aa, Homo sapiens
EGHLRQSALTLEKPGTQEAICEYPGFGEHLIASSDLPPSQRVLATNGFHAPDSNVSGLDCDPALPSYPKSYADKRTGDSDACGKG

SEQ ID NO: 6533 - protein, 85 aa, Homo sapiens
FNHSMEVIHGRNPVREKPYKYPESVKSFNHFTSLGHQKIMKRGKKSYEGKNFENIFTLSSSLNENQRNLPGEKQYRCTECGKCFK

SEQ ID NO: 6534 - protein, 85 aa, Homo sapiens
RNSSLVLHHRTHTGEKPYTCNECGKSFSKNYNLIVHQRIHTGEKPYECSKCGKAFSDGSALTQHQRIHTGEKPYECLECGKTFNR

SEQ ID NO: 6535 - protein, 85 aa, Homo sapiens
NSSLILHQRTHTGEKPYRCNECGKPFTDISHLTVHLRIHTGEKPYECSKCGKAFRDGSYLTQHERTHTGEKPFECAECGKSFNRN

SEQ ID NO: 6536 - protein, 85 aa, Homo sapiens
SHLIVHQKIHSGEKPYECKECGKTFIESAYLIRHQRIHTGEKPYGCNQCQKLFRNIAGLIRHQRTHTGEKPYECNQCGKAFRDSS

SEQ ID NO: 6537 - protein, 85 aa, Homo sapiens
MPPLIDPWDPGLTARDLLFRGGCRYRKRPRVVLDVTEQISRFLLDHGDVAFAPLGKLMLENFKLEGAGSRTKKKTVVSVKKLLQD

SEQ ID NO: 6538 - protein, 85 aa, Homo sapiens
LGGHQPWGCPWAYLSNRQRRFSILGGPILGTSVASHLAELLHEELVLRWEQLLLDEACTGGALAWVPGRTPQFGQLVYPAGGAQD

SEQ ID NO: 6539 - protein, 85 aa, Homo sapiens
RLHFQEVVLTPGDNPQFLGKPGRIQLQGPVRQVVTCTVQGETLLAVRSDYHCAVWKFGKQWQPTLLQAMQVEKGATGISLSPHLP

SEQ ID NO: 6540 - protein, 85 aa, Homo sapiens
GELAICSRSGAVCLWSPEDGLRQIYRDPETLVFRDSSSWRWADFTAHPRVLTVGDRTGVKMLDTQGPPGCGLLLFRLGAEASCQK

SEQ ID NO: 6541 - protein, 85 aa, Homo sapiens
GERVLLTQYLGHSSPKCLPPTLHLVCTQFSLYLVDERLPLVPMLKWNHGLPSPLLLARLLPPPRPSCVQPLLLGGQGGQLQLLHL

SEQ ID NO: 6542 - protein, 85 aa, Homo sapiens
AEGASVPRLAGPPQSLPSRIDSLPAFPLLEPKIQWRLQERLKAPTIGLAAVVPPLPSAPTPGLVLFQLSAAGDVFYQQLRPQVDS

SEQ ID NO: 6543 - protein, 85 aa, Homo sapiens
SLRRDAGPPGDTQPDCHAPTASWTSQDTAGCSQWLKALLKVPLAPPVWTAPTFTHRQMLGSTELRREEEEGQRLGVLRKAMARGQ

SEQ ID NO: 6544 - protein, 85 aa, Homo sapiens
LLLQRDLGSLPAAEPPPAPESGLEDKLSERLGEAWAGRGAAWWERQQGRTSEPGRQTRRPKRRTQLSSSFSLSGHVDPSEDTSSP

SEQ ID NO: 6545 - protein, 85 aa, Homo sapiens
HSPEWPPADALPLPPTTPPSQELTPDACAQGVPSEQRQMLRDYMAKLPPQRDTPGCATTPPHSQASSVRATRSQQHTPVLSSSQP

SEQ ID NO: 6546 - protein, 84 aa, Homo sapiens
MPLPPTTPPSQELTPDACAQGVPSEQRQMLRDYMAKLPPQRDTPGCATTPPHSQASSVRATRSQQHTPVLSSSQPLRKKPRMGF

SEQ ID NO: 6547 - protein, 85 aa, Homo sapiens
LLDHGDVAFAPLGKLMLENFKLEGAGSRTKKKTVVSVKKLLQDLGGHQPWGCPWAYLSNRQRRFSILGGPILGTSVASHLAELLH

SEQ ID NO: 6548 - protein, 85 aa, Homo sapiens
EELVLRWEQLLLDEACTGGALAWVPGRTPQFGQLVYPAGGAQDRLHFQEVVLTPGDNPQFLGKPGRIQLQGPVRQVVTCTVQGET

SEQ ID NO: 6549 - protein, 85 aa, Homo sapiens
MLAVRSDYHCAVWKFGKQWQPTLLQAMQVEKGATGISLSPHLPGELAICSRSGAVCLWSPEDGLRQIYRDPETLVFRDSSSWRWA

SEQ ID NO: 6550 - protein, 85 aa, Homo sapiens
DFTAHPRVLTVGDRTGVKMLDTQGPPGCGLLLFRLGAEASCQKGERVLLTQYLGHSSPKCLPPTLHLVCTQFSLYLVDERLPLVP

SEQ ID NO: 6551 - protein, 85 aa, Homo sapiens
MLKWNHGLPSPLLLARLLPPPRPSCVQPLLLGGQGGQLQLLHLAEGASVPRLAGPPQSLPSRIDSLPAFPLLEPKIQWRLQERLK

SEQ ID NO: 6552 - protein, 85 aa, Homo sapiens
APTIGLAAVVPPLPSAPTPGLVLFQLSAAGDVFYQQLRPQVDSSLRRDAGPPGDTQPDCHAPTASWTSQDTAGCSQWLKALLKVP

SEQ ID NO: 6553 - protein, 85 aa, Homo sapiens
MAPPVWTAPTFTHRQMLGSTELRREEEEGQRLGVLRKAMARGQLLLQRDLGSLPAAEPPPAPESGLEDKLSERLGEAWAGRGAAW

SEQ ID NO: 6554 - protein, 85 aa, Homo sapiens
WERQQGRTSEPGRQTRRPKRRTQLSSSFSLSGHVDPSEDTSSPHSPEWPPADALPLPPTTPPSQELTPDACAQGVPSEQRQMLRD

SEQ ID NO: 6555 - protein, 84 aa, Homo sapiens
FDPDLPGGGLHRCLACARYFIDSTNLKTHFRSKDHKKRLKQLSVEPYSQEEAERAAGMGSYVPPRRLAVPTEVSTEVPEMDTST

SEQ ID NO: 6556 - protein, 85 aa, Homo sapiens
QPDPNAEFDPDLPGGGLHRCLACARYFIDSTNLKTHFRSKDHKKRLKQLSVEPYSQEEAERAAGMGSYVPPRRLAVPTEVSTEVP

SEQ ID NO: 6557 - protein, 85 aa, Homo sapiens
KARRNKKQIPSFRKLIKTSKVKLENKLKNKQFKQQSTLKKYRKEQRKLRQAVKDAVSKKPIPLENPKEKRPGKRIEREEEEEEEA

SEQ ID NO: 6558 - protein, 85 aa, Homo sapiens
LPLDMMDEDDLQLMKDLGQRVSFLTRDLSSSEPVHAKKRKHERIIDKYEKIPRTLQTAPEKELIHLLPIKDKSGIIPQTREKPVT

SEQ ID NO: 6559 - protein, 85 aa, Homo sapiens
DSNKDEEDQEEERELEEEIIEDPIQELTIEEHLIERKKKLQEKKMHIAALASAILSDPENNIKKLKELRSMLMEQDPDVAVTVRK

SEQ ID NO: 6560 - protein, 85 aa, Homo sapiens
MVIVSLMELFKDITPSYKIRPLTEAEKSTKTRKETQKLREFEEGLVSQYKFYLENLEQMVKDWKQRKLKKSNVVSLKAYKGLAEV

SEQ ID NO: 6561 - protein, 85 aa, Homo sapiens
AVKSLCELLVALPHFNFHNNIIVLIVPLMNDMSKLISEMCCEAVKKLFKQDKLGQASLGVIKVISGFVKGRNYEVRPEMLKTFLC

SEQ ID NO: 6562 - protein, 85 aa, Homo sapiens
LRIKEVEVKKDTEDINKPKKFMTFKEKRKSLSRMQRKWKKAEEKLERELREAEASESTEKKLKLHTETLNIVFVTYFRILKKAQR

SEQ ID NO: 6563 - protein, 85 aa, Homo sapiens
SPLLPAVLEGLAKFAHLINVEFFDDLLVVLHTLIESGDLSYQESLHCVQTAFHILSGQGDVLNIDPLKFYTHLYKTLFKLHAGAT

SEQ ID NO: 6564 - protein, 85 aa, Homo sapiens
NEGVEIVLQCLDVMLTKRRKQVSQQRALAFIKRLCTLALHVLPNSSIGILATTRILMHTFPKTDLLLDSESQGSGVFLPELDEPE

SEQ ID NO: 6565 - protein, 85 aa, Homo sapiens
YCNAQNTALWELHALRRHYHPIVQRFAAHLIAGAPSEGSGALKPELSRRSATELFEAYSMAEMTFNPPVESSNPKIKGKFLQGDS

SEQ ID NO: 6566 - protein, 84 aa, Homo sapiens
SEGSGALKPELSRRSATELFEAYSMAEMTFNPPVESSNPKIKGKFLQGDSFLNEDLNQLIKRYSSEVATESPLDFTKYLKTSLH

SEQ ID NO: 6567 - protein, 85 aa, Homo sapiens
KEQRKLRQAVKDAVSKKPIPLENPKEKRPGKRIEREEEEEEEALPLDMMDEDDLQLMKDLGQRVSFLTRDLSSSEPVHAKKRKHE

SEQ ID NO: 6568 - protein, 85 aa, Homo sapiens
RIIDKYEKIPRTLQTAPEKELIHLLPIKDKSGIIPQTREKPVTDSNKDEEDQEEERELEEEIIEDPIQELTIEEHLIERKKKLQE

SEQ ID NO: 6569 - protein, 85 aa, Homo sapiens
KKMHIAALASAILSDPENNIKKLKELRSMLMEQDPDVAVTVRKLVIVSLMELFKDITPSYKIRPLTEAEKSTKTRKETQKLREFE

SEQ ID NO: 6570 - protein, 85 aa, Homo sapiens
EGLVSQYKFYLENLEQMVKDWKQRKLKKSNVVSLKAYKGLAEVAVKSLCELLVALPHFNFHNNIIVLIVPLMNDMSKLISEMCCE

SEQ ID NO: 6571 - protein, 85 aa, Homo sapiens
AVKKLFKQDKLGQASLGVIKVISGFVKGRNYEVRPEMLKTFLCLRIKEVEVKKDTEDINKPKKFMTFKEKRKSLSRMQRKWKKAE

SEQ ID NO: 6572 - protein, 85 aa, Homo sapiens
EKLERELREAEASESTEKKLKLHTETLNIVFVTYFRILKKAQRSPLLPAVLEGLAKFAHLINVEFFDDLLVVLHTLIESGDLSYQ

SEQ ID NO: 6573 - protein, 85 aa, Homo sapiens
ESLHCVQTAFHILSGQGDVLNIDPLKFYTHLYKTLFKLHAGATNEGVEIVLQCLDVMLTKRRKQVSQQRALAFIKRLCTLALHVL

SEQ ID NO: 6574 - protein, 85 aa, Homo sapiens
PNSSIGILATTRILMHTFPKTDLLLDSESQGSGVFLPELDEPEYCNAQNTALWELHALRRHYHPIVQRFAAHLIAGAPSEGSGAL

SEQ ID NO: 6575 - protein, 85 aa, Homo sapiens
VLEGNPEVGSPRTSDLQHRGNKGSCVLSSPGEDAQPGEEPIKYGELIVLGYNGCLASGDKGRRRSRLALSRRSHANGVKPDVMHH

SEQ ID NO: 6576 - protein, 85 aa, Homo sapiens
ISTPLVSKALSNRGQHSISYTLSRSHSVIVEYTHDSDTDMFQIGRSTENMIDFVVTDTSPGGGAAEGPSAQSTISRYACRILCDR

SEQ ID NO: 6577 - protein, 85 aa, Homo sapiens
RPPYTARIYAAGFDASSNIFLGERAAKWRTPDGLMDGLTTNGVLVMHPAGGFSEDSAPGVWREISVCGNVYTLRDSRSAQQRGKL

SEQ ID NO: 6578 - protein, 85 aa, Homo sapiens
VENESNVLQDGSLIDLCGATLLWRTPAGLLRAPTLKQLEAQRQEANAARPQCPVGLSTLAFPSPARGRTAPDKQQPWVYVRCGHV

SEQ ID NO: 6579 - protein, 85 aa, Homo sapiens
HGYHGWGCRRERGPQERECPLCRLVGPYVPLWLGQEAGLCLDPGPPSHAFAPCGHVCSEKTARYWAQTPLPHGTHAFHAACPFCG

SEQ ID NO: 6580 - protein, 85 aa, Homo sapiens
YGELIVLGYNGCLASGDKGRRRSRLALSRRSHANGVKPDVMHHISTPLVSKALSNRGQHSISYTLSRSHSVIVEYTHDSDTDMFQ

SEQ ID NO: 6581 - protein, 85 aa, Homo sapiens
IGRSTENMIDFVVTDTSPGGGAAEGPSAQSTISRYACRILCDRRPPYTARIYAAGFDASSNIFLGERAAKWRTPDGLMDGLTTNG

SEQ ID NO: 6582 - protein, 85 aa, Homo sapiens
VLVMHPAGGFSEDSAPGVWREISVCGNVYTLRDSRSAQQRGKLVENESNVLQDGSLIDLCGATLLWRTPAGLLRAPTLKQLEAQR

SEQ ID NO: 6583 - protein, 85 aa, Homo sapiens
QEANAARPQCPVGLSTLAFPSPARGRTAPDKQQPWVYVRCGHVHGYHGWGCRRERGPQERECPLCRLVGPYVPLWLGQEAGLCLD

SEQ ID NO: 6584 - protein, 85 aa, Homo sapiens
DALQKKYLRMVVLAVYTNPEDPQTISECYQFKFKYTNNGPLMDFISKNQSNESSMLSTDTKKASILLIRKIYILMQNLGPLPNDV

SEQ ID NO: 6585 - protein, 85 aa, Homo sapiens
CLTMKLFYYDEVTPPDYQPPGFKDGDCEGVIFEGEPMYLNVGEVSTPFHIFKVKVTTERERMENIDSTILSPKQIKTPFQKILRD

SEQ ID NO: 6586 - protein, 85 aa, Homo sapiens
KDVEDEQEHYTSDDLDIETKMEEQEKNPASSELEEPSLVCEEDEIMRSKESPDLSISHSQVEQLVNKTSELDMSESKTRSGKVFQ

SEQ ID NO: 6587 - protein, 85 aa, Homo sapiens
MRGIFPECAYGTRYLDDLCVKILREDKNCPGSTQLVKWMLGCYDALQKKYLRMVVLAVYTNPEDPQTISECYQFKFKYTNNGPLM

SEQ ID NO: 6588 - protein, 85 aa, Homo sapiens
DFISKNQSNESSMLSTDTKKASILLIRKIYILMQNLGPLPNDVCLTMKLFYYDEVTPPDYQPPGFKDGDCEGVIFEGEPMYLNVG

SEQ ID NO: 6589 - protein, 85 aa, Homo sapiens
EVSTPFHIFKVKVTTERERMENIDSTILSPKQIKTPFQKILRDKDVEDEQEHYTSDDLDIETKMEEQEKNPASSELEEPSLVCEE

SEQ ID NO: 6590 - protein, 85 aa, Homo sapiens
DEIMRSKESPDLSISHSQVEQLVNKTSELDMSESKTRSGKVFQNKMANGNQPVKSSKENRKRSQHESGRIVLHHFDSSSQESVPK

SEQ ID NO: 6591 - protein, 85 aa, Homo sapiens
NPIAMARSRGPIQSSGPTIQDYLNRPRPTWEEVKEQLEKKKKGSKALAEFEEKMNENWKKELEKHREKLLSGSESSSKKRQRKKK

SEQ ID NO: 6592 - protein, 85 aa, Homo sapiens
EKKKSGRYSSSSSSSSDSSSSSSDSEDEDKKQGKRRKKKKNRSHKSSESSMSETESDSKDSLKKKKKSKDGTEKEKDIKGLSKKR

SEQ ID NO: 6593 - protein, 84 aa, Homo sapiens
SKDGTEKEKDIKGLSKKRKMYSEDKPLSSESLSESEYIEEVRAKKKKSSEEREKATEKTKKKKKHKKHSKKKKKKAASSSPDSP

SEQ ID NO: 6594 - protein, 85 aa, Homo sapiens
GSKALAEFEEKMNENWKKELEKHREKLLSGSESSSKKRQRKKKEKKKSGRYSSSSSSSSDSSSSSSDSEDEDKKQGKRRKKKKNR

SEQ ID NO: 6595 - protein, 85 aa, Homo sapiens
SHKSSESSMSETESDSKDSLKKKKKSKDGTEKEKDIKGLSKKRKMYSEDKPLSSESLSESEYIEEVRAKKKKSSEEREKATEKTK

SEQ ID NO: 6596 - protein, 85 aa, Homo sapiens
ATALVSAHSLAPLNLKKEGLRVVREDHYSTWEQGFKLQGNSKGLGQEPLCKQFRQLRYEETTGPREALSRLRELCQQWLQPETHT

SEQ ID NO: 6597 - protein, 85 aa, Homo sapiens
KEQILELLVLEQFLIILPKELQARVQEHHPESREDVVVVLEDLQLDLGETGQQVDPDQPKKQKILVEEMAPLKGVQEQQVRHECE

SEQ ID NO: 6598 - protein, 85 aa, Homo sapiens
VTKPEKEKGEETRIENGKLIVVTDSCGRVESSGKISEPMEAHNEGSNLERHQAKPKEKIEYKCSEREQRFIQHLDLIEHASTHTG

SEQ ID NO: 6599 - protein, 85 aa, Homo sapiens
KKLCESDVCQSSSLTGHKKVLSREKGHQCHECGKAFQRSSHLVRHQKIHLGEKPYQCNECGKVFSQNAGLLEHLRIHTGEKPYLC

SEQ ID NO: 6600 - protein, 85 aa, Homo sapiens
IHCGKNFRRSSHLNRHQRIHSQEEPCECKECGKTFSQALLLTHHQRIHSHSKSHQCNECGKAFSLTSDLIRHHRIHTGEKPFKCN

SEQ ID NO: 6601 - protein, 85 aa, Homo sapiens
GLGQEPLCKQFRQLRYEETTGPREALSRLRELCQQWLQPETHTKEQILELLVLEQFLIILPKELQARVQEHHPESREDVVVVLED

SEQ ID NO: 6602 - protein, 85 aa, Homo sapiens
MQLDLGETGQQVDPDQPKKQKILVEEMAPLKGVQEQQVRHECEVTKPEKEKGEETRIENGKLIVVTDSCGRVESSGKISEPMEAH

SEQ ID NO: 6603 - protein, 85 aa, Homo sapiens
NEGSNLERHQAKPKEKIEYKCSEREQRFIQHLDLIEHASTHTGKKLCESDVCQSSSLTGHKKVLSREKGHQCHECGKAFQRSSHL

SEQ ID NO: 6604 - protein, 85 aa, Homo sapiens
VRHQKIHLGEKPYQCNECGKVFSQNAGLLEHLRIHTGEKPYLCIHCGKNFRRSSHLNRHQRIHSQEEPCECKECGKTFSQALLLT

SEQ ID NO: 6605 - protein, 85 aa, Homo sapiens
HHQRIHSHSKSHQCNECGKAFSLTSDLIRHHRIHTGEKPFKCNICQKAFRLNSHLAQHVRIHNEEKPYQCSECGEAFRQRSGLFQ

SEQ ID NO: 6606 - protein, 85 aa, Homo sapiens
SSVCDMSFLQKSCITMVHFCGLLTLHREPVPLKSISVSVNIYEFVAGVSATLNYENEEKVPLEAFFVFPMDEDSAVYSFEALVDG

SEQ ID NO: 6607 - protein, 85 aa, Homo sapiens
KKIVAELQDKMKARTNYEKAISQGHQAFLLEGDSSSRDVFSCNVGNLQPGSKAAVTLKYVQELPLEADGALRFVLPAVLNPRYQF

SEQ ID NO: 6608 - protein, 85 aa, Homo sapiens
SGSSKDSCLNVKTPIVPVEDLPYTLSMVATIDSQHGIEKVQSNCPLSPTEYLGEDKTSAQVSLAAGHKFDRDVELLIYYNEVHTP

SEQ ID NO: 6609 - protein, 85 aa, Homo sapiens
SVVLEMGMPNMKPGHLMGDPSAMVSFYPNIPEDQPSNTCGEFIFLMDRSGSMQSPMSSQDTSQLRIQAAKETLILLLKSLPIGCY

SEQ ID NO: 6610 - protein, 85 aa, Homo sapiens
FNIYGFGSSYEACFPESVKYTQQTMEEALGRVKLMQADLGGTEILAPLQNIYRGPSIPGHPLQLFVFTDGEVTDTFSVIKEVRIN

SEQ ID NO: 6611 - protein, 85 aa, Homo sapiens
EFVAGVSATLNYENEEKVPLEAFFVFPMDEDSAVYSFEALVDGKKIVAELQDKMKARTNYEKAISQGHQAFLLEGDSSSRDVFSC

SEQ ID NO: 6612 - protein, 85 aa, Homo sapiens
NVGNLQPGSKAAVTLKYVQELPLEADGALRFVLPAVLNPRYQFSGSSKDSCLNVKTPIVPVEDLPYTLSMVATIDSQHGIEKVQS

SEQ ID NO: 6613 - protein, 85 aa, Homo sapiens
NCPLSPTEYLGEDKTSAQVSLAAGHKFDRDVELLIYYNEVHTPSVVLEMGMPNMKPGHLMGDPSAMVSFYPNIPEDQPSNTCGEF

SEQ ID NO: 6614 - protein, 85 aa, Homo sapiens
IFLMDRSGSMQSPMSSQDTSQLRIQAAKETLILLLKSLPIGCYFNIYGFGSSYEACFPESVKYTQQTMEEALGRVKLMQADLGGT

SEQ ID NO: 6615 - protein, 85 aa, Homo sapiens
ERIPVSVDFWVVCCAVLKCNPGIPKRMSTLCFGFSDEFHPFIEALLPHVRAIAYTWFNLQARKRKYFKKHEKRMSKDEERAVKDE

SEQ ID NO: 6616 - protein, 85 aa, Homo sapiens
LLSEKPEIKQKWASRLLAKLRKDIRQEYREDFVLTVTGKKHPCCVLSNPDQKGKIRRIDCLRQADKVWRLDLVMVILFKGIPLES

SEQ ID NO: 6617 - protein, 85 aa, Homo sapiens
TDGERLMKSPHCTNPALCVQPHHITVSVKELDLFLAYYVQEQDSGQSGSPSHNDPAKNPPGYLEDSFVKSGVFNVSELVRVSRTP

SEQ ID NO: 6618 - protein, 85 aa, Homo sapiens
ITQGTGVNFPIGEIPSQPYYHDMNSGVNLQRSLSSPPSSKRPKTISIDENMEPSPTGDFYPSPSSPAAGSRTWHERDQDMSSPTT

SEQ ID NO: 6619 - protein, 85 aa, Homo sapiens
MKKPEKPLFSSASPQDSSPRLSTFPQHHHPGIPGVAHSVISTRTPPPPSPLPFPTQAILPPAPSSYFSHPTIRYPPHLNPQDTLK

SEQ ID NO: 6620 - protein, 84 aa, Homo sapiens
STFPQHHHPGIPGVAHSVISTRTPPPPSPLPFPTQAILPPAPSSYFSHPTIRYPPHLNPQDTLKNYVPSYDPSSPQTSQSWYLG

SEQ ID NO: 6621 - protein, 85 aa, Homo sapiens
EALLPHVRAIAYTWFNLQARKRKYFKKHEKRMSKDEERAVKDELLSEKPEIKQKWASRLLAKLRKDIRQEYREDFVLTVTGKKHP

SEQ ID NO: 6622 - protein, 85 aa, Homo sapiens
CCVLSNPDQKGKIRRIDCLRQADKVWRLDLVMVILFKGIPLESTDGERLMKSPHCTNPALCVQPHHITVSVKELDLFLAYYVQEQ

SEQ ID NO: 6623 - protein, 85 aa, Homo sapiens
DSGQSGSPSHNDPAKNPPGYLEDSFVKSGVFNVSELVRVSRTPITQGTGVNFPIGEIPSQPYYHDMNSGVNLQRSLSSPPSSKRP

SEQ ID NO: 6624 - protein, 85 aa, Homo sapiens
KTISIDENMEPSPTGDFYPSPSSPAAGSRTWHERDQDMSSPTTMKKPEKPLFSSASPQDSSPRLSTFPQHHHPGIPGVAHSVIST

SEQ ID NO: 6625 - protein, 85 aa, Homo sapiens
HTGDPKQDLAYERQYEQQTYQVIPEVIKNFIQYFHKTVSDLIDQKVYELQASRVSSDVIDQKVYEIQDIYENSWTKLTERFFKNT

SEQ ID NO: 6626 - protein, 85 aa, Homo sapiens
EIQDIYENSWTKLTERFFKNTPWPEAEAIAPQVGNDAVFLILYKELYYRHIYAKVSGGPSLEQRFESYYNYCNLFNYILNADGPA

SEQ ID NO: 6627 - protein, 85 aa, Homo sapiens
DQKVYELQASRVSSDVIDQKVYEIQDIYENSWTKLTERFFKNTPWPEAEAIAPQVGNDAVFLILYKELYYRHIYAKVSGGPSLEQ

SEQ ID NO: 6628 - protein, 85 aa, Homo sapiens
AAAALRDPAQGYVTFEDVAVYFSQEEWRLLDDAQRLLYRNVMLENFTLLASLGLASSKTHEITQLESWEEPFMPAWEVVTSAIPR

SEQ ID NO: 6629 - protein, 85 aa, Homo sapiens
GCWHGAEAEEAPEQIASVGLLSSNIQQHQKQHCGEKPLKRQEGRVPVLRSCKVHLSEKSLQSREVGKALLISSGVLKHQVTHTGE

SEQ ID NO: 6630 - protein, 85 aa, Homo sapiens
KSHRSSKSREAFHAGKRHYKCSECGKAFGQKYLLVQHQRLHAGKKTYECSECGKLFRDMSNLFIHQIVHTGERPYGCSNCGKSFS

SEQ ID NO: 6631 - protein, 85 aa, Homo sapiens
RNAHLIEHQRVHTGEKPFTCSECGKAFRHNSTLVQHHKIHTGVRPYECSECGKLFSFNSSLMKHQRIHTGERPYKCSECGKFYSH

SEQ ID NO: 6632 - protein, 85 aa, Homo sapiens
KSNLIKHWRVHTGERPYKCSDCGKFFTQCSSLMQHQKVHTGEKPFKCNECGRFFRENSTLVRHQRVHTGAKPYECRECGKFFSQS

SEQ ID NO: 6633 - protein, 85 aa, Homo sapiens
MENFTLLASLGLASSKTHEITQLESWEEPFMPAWEVVTSAIPRGCWHGAEAEEAPEQIASVGLLSSNIQQHQKQHCGEKPLKRQE

SEQ ID NO: 6634 - protein, 85 aa, Homo sapiens
GRVPVLRSCKVHLSEKSLQSREVGKALLISSGVLKHQVTHTGEKSHRSSKSREAFHAGKRHYKCSECGKAFGQKYLLVQHQRLHA

SEQ ID NO: 6635 - protein, 85 aa, Homo sapiens
GKKTYECSECGKLFRDMSNLFIHQIVHTGERPYGCSNCGKSFSRNAHLIEHQRVHTGEKPFTCSECGKAFRHNSTLVQHHKIHTG

SEQ ID NO: 6636 - protein, 85 aa, Homo sapiens
VRPYECSECGKLFSFNSSLMKHQRIHTGERPYKCSECGKFYSHKSNLIKHWRVHTGERPYKCSDCGKFFTQCSSLMQHQKVHTGE

SEQ ID NO: 6637 - protein, 85 aa, Homo sapiens
KPFKCNECGRFFRENSTLVRHQRVHTGAKPYECRECGKFFSQSSTLMQHRKVHIGEKPFKCNECGRLFRENSSLVKHQRVHTGAK

SEQ ID NO: 6638 - protein, 85 aa, Homo sapiens
RELAIEIGVRALLFGVFVFTEFLDPFQRVIQPEEIWLYKNPLVQSDNIPTRLMFAISFLTPLAVICVVKIIRRTDKTEIKEAFLA

SEQ ID NO: 6639 - protein, 85 aa, Homo sapiens
VSLALALNGVCTNTIKLIVGRPRPDFFYRCFPDGVMNSEMHCTGDPDLVSEGRKSFPSIHSSFAFSGLGFTTFYLAGKLHCFTES

SEQ ID NO: 6640 - protein, 85 aa, Homo sapiens
GRGKSWRLCAAILPLYCAMMIALSRMCDYKHHWQDSFVGGVIGLIFAYICYRQHYPPLANTACHKPYVSLRVPASLKKEERPTAD

SEQ ID NO: 6641 - protein, 84 aa, Homo sapiens
CAMMIALSRMCDYKHHWQDSFVGGVIGLIFAYICYRQHYPPLANTACHKPYVSLRVPASLKKEERPTADSAPSLPLEGITEGPV

SEQ ID NO: 6642 - protein, 85 aa, Homo sapiens
VQSDNIPTRLMFAISFLTPLAVICVVKIIRRTDKTEIKEAFLAVSLALALNGVCTNTIKLIVGRPRPDFFYRCFPDGVMNSEMHC

SEQ ID NO: 6643 - protein, 85 aa, Homo sapiens
TGDPDLVSEGRKSFPSIHSSFAFSGLGFTTFYLAGKLHCFTESGRGKSWRLCAAILPLYCAMMIALSRMCDYKHHWQDSFVGGVI

SEQ ID NO: 6644 - protein, 84 aa, Homo sapiens
ICKSVNFLHSNKLTHTDLKPENILFVQSDYTEAYNPKIKRDERTLINPDIKVVDFGSATYDDEHHSTLVSTRHYRAPEVILDTR

SEQ ID NO: 6645 - protein, 85 aa, Homo sapiens
AEPTSDFETPIGWHASPELTPTLGPLSDTAPPRDSWMFWAMLPPPPPPLTSSLPAAGSKPSSESQPPMEAQSLPGAPPPFDAQIL

SEQ ID NO: 6646 - protein, 85 aa, Homo sapiens
PGAQPPFDAQSPLDSQPQPSGQPWNFHASTSWYWRQSSDRFPRHQKSFNPAVKNSYYPRKYDAKFTDFSLPPSRKQKKKKRKEPV

SEQ ID NO: 6647 - protein, 85 aa, Homo sapiens
FHFFCDTCDRGFKNQEKYDKHMSEHTKCPELDCSFTAHEKIVQFHWRNMHAPGMKKIKLDTPEEIARWREERRKNYPTLANIERK

SEQ ID NO: 6648 - protein, 85 aa, Homo sapiens
KKLKLEKEKRGAVLTTTQYGKMKGMSRHSQMAKIRSPGKNHKWKNDNSRQRAVTGSGSHLCDLKLEGPPEANADPLGVLINSDSE

SEQ ID NO: 6649 - protein, 85 aa, Homo sapiens
SDKEEKPQHSVIPKEVTPALCSLMSSYGSLSGSESEPEETPIKTEADVLAENQVLDSSAPKSPSQDVKATVRNFSEAKSENRKKS

SEQ ID NO: 6650 - protein, 84 aa, Homo sapiens
VRNFSEAKSENRKKSFEKTNPKRKKDYHNYQTLFEPRTHHPYLLEMLLAPDIRHERNVILQCVRYIIKKDFFGLDTNSAKSKDV

SEQ ID NO: 6651 - protein, 85 aa, Homo sapiens
PPPPPPLTSSLPAAGSKPSSESQPPMEAQSLPGAPPPFDAQILPGAQPPFDAQSPLDSQPQPSGQPWNFHASTSWYWRQSSDRFP

SEQ ID NO: 6652 - protein, 85 aa, Homo sapiens
RHQKSFNPAVKNSYYPRKYDAKFTDFSLPPSRKQKKKKRKEPVFHFFCDTCDRGFKNQEKYDKHMSEHTKCPELDCSFTAHEKIV

SEQ ID NO: 6653 - protein, 85 aa, Homo sapiens
QFHWRNMHAPGMKKIKLDTPEEIARWREERRKNYPTLANIERKKKLKLEKEKRGAVLTTTQYGKMKGMSRHSQMAKIRSPGKNHK

SEQ ID NO: 6654 - protein, 85 aa, Homo sapiens
WKNDNSRQRAVTGSGSHLCDLKLEGPPEANADPLGVLINSDSESDKEEKPQHSVIPKEVTPALCSLMSSYGSLSGSESEPEETPI

SEQ ID NO: 6655 - protein, 85 aa, Homo sapiens
KTEADVLAENQVLDSSAPKSPSQDVKATVRNFSEAKSENRKKSFEKTNPKRKKDYHNYQTLFEPRTHHPYLLEMLLAPDIRHERN

SEQ ID NO: 6656 - protein, 85 aa, Homo sapiens
MYSPICLTQDEFHPFIEALLPHVRAIAYTWFNLQARKRKYFKKHEKRMSKDEERAVKDELLSEKPEIKQKWASRLLAKLRKDIRQ

SEQ ID NO: 6657 - protein, 85 aa, Homo sapiens
EYREDFVLTVTGKKHPCCVLSNPDQKGKIRRIDCLRQADKVWRLDLVMVILFKGIPLESTDGERLMKSPHCTNPALCVQPHHITV

SEQ ID NO: 6658 - protein, 85 aa, Homo sapiens
SVKELDLFLAYYVQEQDSGQSGSPSHNDPAKNPPGYLEDSFVKSGVFNVSELVRVSRTPITQGTGVNFPIGEIPSQPYYHDMNSG

SEQ ID NO: 6659 - protein, 85 aa, Homo sapiens
VNLQRSLSSPPSSKRPKTISIDENMEPSPTGDFYPSPSSPAAGSRTWHERDQDMSSPTTMKKPEKPLFSSASPQDSSPRLSTFPQ

SEQ ID NO: 6660 - protein, 85 aa, Homo sapiens
KHEKRMSKDEERAVKDELLSEKPEIKQKWASRLLAKLRKDIRQEYREDFVLTVTGKKHPCCVLSNPDQKGKIRRIDCLRQADKVW

SEQ ID NO: 6661 - protein, 85 aa, Homo sapiens
RLDLVMVILFKGIPLESTDGERLMKSPHCTNPALCVQPHHITVSVKELDLFLAYYVQEQDSGQSGSPSHNDPAKNPPGYLEDSFV

SEQ ID NO: 6662 - protein, 85 aa, Homo sapiens
KSGVFNVSELVRVSRTPITQGTGVNFPIGEIPSQPYYHDMNSGVNLQRSLSSPPSSKRPKTISIDENMEPSPTGDFYPSPSSPAA

SEQ ID NO: 6663 - protein, 85 aa, Homo sapiens
GSRTWHERDQDMSSPTTMKKPEKPLFSSASPQDSSPRLSTFPQHHHPGIPGVAHSVISTRTPPPPSPLPFPTQAILPPAPSSYFS

SEQ ID NO: 6664 - protein, 85 aa, Homo sapiens
HTLLAATKDSLAMDPPVVNRPKKSKTKKAPIKTITKAAPAAPPVPAANEIATNKPKITWQALNLPVITQISQALPTTEVTNTQAS

SEQ ID NO: 6665 - protein, 85 aa, Homo sapiens
SVTAQPKKANKMKRVTAKAAQGSQSPTGHEGGTIQLKSPLQVLKLPVISQNIHAPIANESASSQALITSIKPKKASKAKKAANKA

SEQ ID NO: 6666 - protein, 85 aa, Homo sapiens
GSQSPTGHEGGTIQLKSPLQVLKLPVISQNIHAPIANESASSQALITSIKPKKASKAKKAANKAIASATEVSLAATATHTATTQG

SEQ ID NO: 6667 - protein, 85 aa, Homo sapiens
PVPAANEIATNKPKITWQALNLPVITQISQALPTTEVTNTQASSVTAQPKKANKMKRVTAKAAQGSQSPTGHEGGTIQLKSPLQV

SEQ ID NO: 6668 - protein, 85 aa, Homo sapiens
TQDLLHFPTKEQFDEAEPATLNGLDQPEQTTIPIPQLPQETQSSLEHEPETHTLHLQPQHEESVVPTQSTLTADDMRRAKRIRLE

SEQ ID NO: 6669 - protein, 85 aa, Homo sapiens
MQNAALQHLFIRKSFRPFKCLQCGKAFREKDKLDQHLRFHGREGNCPLTCDLCNKGFISSTSLESHMKLHSDQKTYSCIFCPESF

SEQ ID NO: 6670 - protein, 85 aa, Homo sapiens
DRLDLLKDHVAIHINDGYFTCPTCKKRFPDFIQVKKHVRSFHSEKIYQCTECDKAFCRPDKLRLHMLRHSDRKDFLCSTCGKQFK

SEQ ID NO: 6671 - protein, 85 aa, Homo sapiens
RKDKLREHMQRMHNPEREAKKADRISRSKTFKPRITSTDYDSFTFKCRLCMMGFRRRGMLVNHLSKRHPDMKIEEVPELTLPIIK

SEQ ID NO: 6672 - protein, 85 aa, Homo sapiens
PNRDYFCQYCDKVYKSASKRKAHILKNHPGAELPPSIRKLRPAGPGEPDPMLSTHTQLTGTIATPPVCCPHCSKQYSSKTKMVQH

SEQ ID NO: 6673 - protein, 85 aa, Homo sapiens
IRKKHPEFAQLSNTIHTPLTTAVISATPAVLTTDSATGETVVTTDLLTQAMTELSQTLTTDYRTPQGDYQRIQYIPVSQSASGLQ

SEQ ID NO: 6674 - protein, 85 aa, Homo sapiens
QPQHIQLQVVQVASATSPHQSQQSTVDVGQLHDPQPYPQHAIQVQHIQVSGQPLSPSAQQAQQGLSPSHIQGSSSTQGQALQQQQ

SEQ ID NO: 6675 - protein, 85 aa, Homo sapiens
QQQQNSSVQHTYLPSAWNSFRGYSSEIQMMTLPPGQFVITDSGVATPVTTGQVKAVTSGHYVLSESQSELEEKQTSALSGGVQVE

SEQ ID NO: 6676 - protein, 85 aa, Homo sapiens
SSLEHEPETHTLHLQPQHEESVVPTQSTLTADDMRRAKRIRLELQNAALQHLFIRKSFRPFKCLQCGKAFREKDKLDQHLRFHGR

SEQ ID NO: 6677 - protein, 85 aa, Homo sapiens
EGNCPLTCDLCNKGFISSTSLESHMKLHSDQKTYSCIFCPESFDRLDLLKDHVAIHINDGYFTCPTCKKRFPDFIQVKKHVRSFH

SEQ ID NO: 6678 - protein, 85 aa, Homo sapiens
SEKIYQCTECDKAFCRPDKLRLHMLRHSDRKDFLCSTCGKQFKRKDKLREHMQRMHNPEREAKKADRISRSKTFKPRITSTDYDS

SEQ ID NO: 6679 - protein, 85 aa, Homo sapiens
FTFKCRLCMMGFRRRGMLVNHLSKRHPDMKIEEVPELTLPIIKPNRDYFCQYCDKVYKSASKRKAHILKNHPGAELPPSIRKLRP

SEQ ID NO: 6680 - protein, 85 aa, Homo sapiens
AGPGEPDPMLSTHTQLTGTIATPPVCCPHCSKQYSSKTKMVQHIRKKHPEFAQLSNTIHTPLTTAVISATPAVLTTDSATGETVV

SEQ ID NO: 6681 - protein, 85 aa, Homo sapiens
TTDLLTQAMTELSQTLTTDYRTPQGDYQRIQYIPVSQSASGLQQPQHIQLQVVQVASATSPHQSQQSTVDVGQLHDPQPYPQHAI

SEQ ID NO: 6682 - protein, 85 aa, Homo sapiens
QVQHIQVSGQPLSPSAQQAQQGLSPSHIQGSSSTQGQALQQQQQQQQNSSVQHTYLPSAWNSFRGYSSEIQMMTLPPGQFVITDS

SEQ ID NO: 6683 - protein, 85 aa, Homo sapiens
VIVTPQDRKNSVWTQDGPSAQILQQLVVLAAEALPMLEKQLMDPRGPGDIRTVFRPPLDIYDVLIRLSPRHIPRHRQAVDSPAAS

SEQ ID NO: 6684 - protein, 85 aa, Homo sapiens
FCRGLLSQPGPSSLMPVLGYDPPQLYLTQLREAFGDLALFFYDQHGGEVIGVLWKPTSFQPQPFKASSTKGRMVMSRGGELVMVP

SEQ ID NO: 6685 - protein, 85 aa, Homo sapiens
DPRGPGDIRTVFRPPLDIYDVLIRLSPRHIPRHRQAVDSPAASFCRGLLSQPGPSSLMPVLGYDPPQLYLTQLREAFGDLALFFY

SEQ ID NO: 6686 - protein, 85 aa, Homo sapiens
SNRRRHTGSRANPDPNTCLGVFGLSLYTTERDLREVFSRYGPLSGVNVVYDQRTGRSRGFAFVYFERIDDSKEAMERANGMELDG

SEQ ID NO: 6687 - protein, 85 aa, Homo sapiens
RRIRVDYSITKRAHTPTPGIYMGRPTHSGGGGGGGGGGGGGGGGRRRDSYYDRGYDRGYDRYEDYDYRYRRSPSPYYSRYRSRSR

SEQ ID NO: 6688 - protein, 84 aa, Homo sapiens
KRAHTPTPGIYMGRPTHSGGGGGGGGGGGGGGGGRRRDSYYDRGYDRGYDRYEDYDYRYRRSPSPYYSRYRSRSRSRSYSPRRY

SEQ ID NO: 6689 - protein, 85 aa, Homo sapiens
MSGVNVVYDQRTGRSRGFAFVYFERIDDSKEAMERANGMELDGRRIRVDYSITKRAHTPTPGIYMGRPTHSGGGGGGGGGGGGGG

SEQ ID NO: 6690 - protein, 85 aa, Homo sapiens
RMRVQDDGGSDQNYDIVTIGAPAAHCQGFKSGGLRKKLHKFEETKKHTSSGCQSIIYIPQDVVRAKEIIAQINTLKTQVSYYAER

SEQ ID NO: 6691 - protein, 85 aa, Homo sapiens
MSRAAKDRSATGLERTLAILADKTRQLVTVCDCKLLANSIHGLNAARPDYIASKASPTSTEEEQVMLRNDQDTLMARWTGRNSRS

SEQ ID NO: 6692 - protein, 85 aa, Homo sapiens
SLQVDWHEEEWEKVWLNVDKSLECIIQRVDKLLQKERLHGEGCEDVFPCAGSCTSKKGNPDSHAYWIRPEDPFCDVPSSPCPSTM

SEQ ID NO: 6693 - protein, 85 aa, Homo sapiens
PSTACHPHLTTHCSPPPEESSPGEWSEALYPLLTTLTDCVAMMSDKAKKAMVFLLMQDSAPTIATYLSLQYRRDVVFCQTLTALI

SEQ ID NO: 6694 - protein, 85 aa, Homo sapiens
CGFIIKLRNCLHDDGFLRQLYTIGLLAQFESLLSTYGEELAMLEDMSLGIMDLRNVTFKVTQATSSASADMLPVITGNRDGFNVR

SEQ ID NO: 6695 - protein, 85 aa, Homo sapiens
VPLPGPLFDALPREIQSGMLLRVQPVLFNVGINEQQTLAERFGDTSLQEVINVESLVRLNSYFEQFKEVLPEDCLPRSRSQTCLP

SEQ ID NO: 6696 - protein, 85 aa, Homo sapiens
ELLRFLGQNVHARKNKNVDILWQAAEICRRLNGVRFTSCKSAKDRTAMSVTLEQCLILQHEHGMAPQVFTQALECMRSEGCRREN

SEQ ID NO: 6697 - protein, 85 aa, Homo sapiens
ETKKHTSSGCQSIIYIPQDVVRAKEIIAQINTLKTQVSYYAERLSRAAKDRSATGLERTLAILADKTRQLVTVCDCKLLANSIHG

SEQ ID NO: 6698 - protein, 85 aa, Homo sapiens
MNAARPDYIASKASPTSTEEEQVMLRNDQDTLMARWTGRNSRSSLQVDWHEEEWEKVWLNVDKSLECIIQRVDKLLQKERLHGEG

SEQ ID NO: 6699 - protein, 85 aa, Homo sapiens
CEDVFPCAGSCTSKKGNPDSHAYWIRPEDPFCDVPSSPCPSTMPSTACHPHLTTHCSPPPEESSPGEWSEALYPLLTTLTDCVAM

SEQ ID NO: 6700 - protein, 85 aa, Homo sapiens
MSDKAKKAMVFLLMQDSAPTIATYLSLQYRRDVVFCQTLTALICGFIIKLRNCLHDDGFLRQLYTIGLLAQFESLLSTYGEELAM

SEQ ID NO: 6701 - protein, 85 aa, Homo sapiens
MEDMSLGIMDLRNVTFKVTQATSSASADMLPVITGNRDGFNVRVPLPGPLFDALPREIQSGMLLRVQPVLFNVGINEQQTLAERF

SEQ ID NO: 6702 - protein, 85 aa, Homo sapiens
GDTSLQEVINVESLVRLNSYFEQFKEVLPEDCLPRSRSQTCLPELLRFLGQNVHARKNKNVDILWQAAEICRRLNGVRFTSCKSA

SEQ ID NO: 6703 - protein, 85 aa, Homo sapiens
TAEEGVQLSQQNAKDFFRVLNLNKKCDTSKHKVLVVSVCPQSLPYFAAKFNLSVTDASRRLCGFLKSLGVHYVFDTTIAADFSIL

SEQ ID NO: 6704 - protein, 85 aa, Homo sapiens
ESQKEFVRRYRQHSEEERTLPMLTSACPGWVRYAERVLGRPITAHLCTAKSPQQVMGSLVKDYFARQQNLSPEKIFHVIVAPCYD

SEQ ID NO: 6705 - protein, 85 aa, Homo sapiens
KKLEALQESLPPALHGSRGADCVLTSGEIAQIMEQGDLSVRDAAVDTLFGDLKEDKVTRHDGASSDGHLAHIFRHAAKELFNEDV

SEQ ID NO: 6706 - protein, 85 aa, Homo sapiens
EEVTYRALRNKDFQEVTLEKNGEVVLRFAAAYGFRNIQNMILKLKKGKFPFHFVEVLACAGGCLNGRGQAQTPDGHADKALLRQM

SEQ ID NO: 6707 - protein, 85 aa, Homo sapiens
MPYFAAKFNLSVTDASRRLCGFLKSLGVHYVFDTTIAADFSILESQKEFVRRYRQHSEEERTLPMLTSACPGWVRYAERVLGRPI

SEQ ID NO: 6708 - protein, 85 aa, Homo sapiens
TAHLCTAKSPQQVMGSLVKDYFARQQNLSPEKIFHVIVAPCYDKKLEALQESLPPALHGSRGADCVLTSGEIAQIMEQGDLSVRD

SEQ ID NO: 6709 - protein, 85 aa, Homo sapiens
AAVDTLFGDLKEDKVTRHDGASSDGHLAHIFRHAAKELFNEDVEEVTYRALRNKDFQEVTLEKNGEVVLRFAAAYGFRNIQNMIL

SEQ ID NO: 6710 - protein, 85 aa, Homo sapiens
KLKKGKFPFHFVEVLACAGGCLNGRGQAQTPDGHADKALLRQMEGIYADIPVRRPESSAHVQELYQEWLEGINSPKAREVLHTTY

SEQ ID NO: 6711 - protein, 85 aa, Homo sapiens
NGDDTFAKRPRDDAKASEKRSKAFDDIATYFSKKEWKKMKYSEKISYVYMKRNYKAMTKLGFKVTLPPFMCNKQATDFQGNDFDN

SEQ ID NO: 6712 - protein, 85 aa, Homo sapiens
DHNRRIQVEHPQMTFGRLHRIIPKIMPKKPAEDENDSKGVSEASGPQNDGKQLHPPGKANISEKINKRSGPKRGKHAWTHRLRER

SEQ ID NO: 6713 - protein, 84 aa, Homo sapiens
HRIIPKIMPKKPAEDENDSKGVSEASGPQNDGKQLHPPGKANISEKINKRSGPKRGKHAWTHRLRERKQLVIYEEISDPEEDDE

SEQ ID NO: 6714 - protein, 85 aa, Homo sapiens
EKISYVYMKRNYKAMTKLGFKVTLPPFMCNKQATDFQGNDFDNDHNRRIQVEHPQMTFGRLHRIIPKIMPKKPAEDENDSKGVSE

SEQ ID NO: 6715 - protein, 85 aa, Homo sapiens
ARDLIGPALPPGFKARGTAEDEERDPSPVAGPALPPNYKSSSSDSSDSDEDSSSLYEEGNQESEEDDSGPTARKQRKNQDDDDDD

SEQ ID NO: 6716 - protein, 85 aa, Homo sapiens
DDGFFGPALPPGFKKQDDSPPRPIIGPALPPGFIKSTQKSDKGRDDPGQQETDSSEDEDIIGPMPAKGPVNYNVTTEFEKRAQRM

SEQ ID NO: 6717 - protein, 85 aa, Homo sapiens
SDSSDSDEDSSSLYEEGNQESEEDDSGPTARKQRKNQDDDDDDDDGFFGPALPPGFKKQDDSPPRPIIGPALPPGFIKSTQKSDK

SEQ ID NO: 6718 - protein, 85 aa, Homo sapiens
GRDDPGQQETDSSEDEDIIGPMPAKGPVNYNVTTEFEKRAQRMKEKLTKGDDDSSKPIVRESWMTELPPEMKDFGLGPRTFKRRA

SEQ ID NO: 6719 - protein, 85 aa, Homo sapiens
QEKVKTNGKLVKQELKDREMVETQINSVKCWVQETKEYLGNPTIEIDAQLEELQILLTEATNHRQNIEKMAEEQKEKYLGLYTIL

SEQ ID NO: 6720 - protein, 85 aa, Homo sapiens
PSELSLQLAEVALDLKIRDQTLEDLLGRMTWQVHGLFIFLRQSLALSPRLECSETISAYCNLLGLSSSRASASQVAGIPGMHHHT

SEQ ID NO: 6721 - protein, 85 aa, Homo sapiens
RLIFCIFSKKRQGFAMLASLVSNSWPQVSCLPQPPKVLGLQIQDKIKEVEQSKATSQELSRQIQKLAKDLTTILTKLKAKTDNVV

SEQ ID NO: 6722 - protein, 85 aa, Homo sapiens
QAKTDQKVLGEELDGCNSKLMELDAAVQKFLEQNGQLGKPLAKKIGKLTELHQQTIRQAENRLSKLNQAASHLEEYNEMLELILK

SEQ ID NO: 6723 - protein, 84 aa, Homo sapiens
MAKKIGKLTELHQQTIRQAENRLSKLNQAASHLEEYNEMLELILKWIEKAKVLAHGTIAWNSASQLREQYILHQVTLGKIIFKK

SEQ ID NO: 6724 - protein, 85 aa, Homo sapiens
TIEIDAQLEELQILLTEATNHRQNIEKMAEEQKEKYLGLYTILPSELSLQLAEVALDLKIRDQTLEDLLGRMTWQVHGLFIFLRQ

SEQ ID NO: 6725 - protein, 85 aa, Homo sapiens
SLALSPRLECSETISAYCNLLGLSSSRASASQVAGIPGMHHHTRLIFCIFSKKRQGFAMLASLVSNSWPQVSCLPQPPKVLGLQI

SEQ ID NO: 6726 - protein, 85 aa, Homo sapiens
QDKIKEVEQSKATSQELSRQIQKLAKDLTTILTKLKAKTDNVVQAKTDQKVLGEELDGCNSKLMELDAAVQKFLEQNGQLGKPLA

SEQ ID NO: 6727 - protein, 85 aa, Homo sapiens
KIFCSRANPTTGSVEWLEEDEHYDYHQEIARSSYADMLHDKDRVFKPMADAAVKIVEKNGFSDKIKVINKHSTEVTVGPEGDMPC

SEQ ID NO: 6728 - protein, 85 aa, Homo sapiens
RANILVTELFDTELIGEGALPSYEHAHRHLVEENCEAVPHRATVYAQLVESGRMWSWNKLFPIHVQTSLGEQVIVPPVDVESCPG

SEQ ID NO: 6729 - protein, 85 aa, Homo sapiens
APSVCDIQLNQVSPADFTVLSDVLPMFSIDFSKQVSSSAACHSRRFEPLTSGRAQVVLSWWDIEMDPEGKIKCTMAPFWAHSDPE

SEQ ID NO: 6730 - protein, 85 aa, Homo sapiens
EMQWRDHWMQCVYFLPQEEPVVQGSALYLVAHHDDYCVWYSLQRTSPEKNERVRQMRPVCDCQAHLLWNRPRFGEINDQDRTDRY

SEQ ID NO: 6731 - protein, 85 aa, Homo sapiens
VQALRTVLKPDSVCLCVSDGSLLSVLAHHLGVEQVFTVESSAASHKLLRKIFKANHLEDKINIIEKRPELLTNEDLQGRKVSLLL

SEQ ID NO: 6732 - protein, 85 aa, Homo sapiens
GEPFFTTSLLPWHNLYFWYVRTAVDQHLGPGAMVMPQAASLHAVVVEFRDLWRIRSPCGDCEGFDVHIMDDMIKRALDFRESREA

SEQ ID NO: 6733 - protein, 85 aa, Homo sapiens
EPHPLWEYPCRSLSEPWQILTFDFQQPVPLQPLCAEGTVELRRPGQSHAAVLWMEYHLTPECTLSTGLLEPADPEGGCCWNPHCK

SEQ ID NO: 6734 - protein, 85 aa, Homo sapiens
RVFKPMADAAVKIVEKNGFSDKIKVINKHSTEVTVGPEGDMPCRANILVTELFDTELIGEGALPSYEHAHRHLVEENCEAVPHRA

SEQ ID NO: 6735 - protein, 85 aa, Homo sapiens
TVYAQLVESGRMWSWNKLFPIHVQTSLGEQVIVPPVDVESCPGAPSVCDIQLNQVSPADFTVLSDVLPMFSIDFSKQVSSSAACH

SEQ ID NO: 6736 - protein, 85 aa, Homo sapiens
SRRFEPLTSGRAQVVLSWWDIEMDPEGKIKCTMAPFWAHSDPEEMQWRDHWMQCVYFLPQEEPVVQGSALYLVAHHDDYCVWYSL

SEQ ID NO: 6737 - protein, 85 aa, Homo sapiens
QRTSPEKNERVRQMRPVCDCQAHLLWNRPRFGEINDQDRTDRYVQALRTVLKPDSVCLCVSDGSLLSVLAHHLGVEQVFTVESSA

SEQ ID NO: 6738 - protein, 85 aa, Homo sapiens
ASHKLLRKIFKANHLEDKINIIEKRPELLTNEDLQGRKVSLLLGEPFFTTSLLPWHNLYFWYVRTAVDQHLGPGAMVMPQAASLH

SEQ ID NO: 6739 - protein, 85 aa, Homo sapiens
AVVVEFRDLWRIRSPCGDCEGFDVHIMDDMIKRALDFRESREAEPHPLWEYPCRSLSEPWQILTFDFQQPVPLQPLCAEGTVELR

SEQ ID NO: 6740 - protein, 85 aa, Homo sapiens
RPGQSHAAVLWMEYHLTPECTLSTGLLEPADPEGGCCWNPHCKQAVYFFSPAPDPRALLGGPRTVSYAVEFHPDTGDIIMEFRHA

SEQ ID NO: 6741 - protein, 85 aa, Homo sapiens
ADVDPDTLLEWLQMGQGDERDMQLIALEQLCMLLLMSDNVDRCFETCPPRTFLPALCKIFLDESAPDNVLEVTARAITYYLDVSA

SEQ ID NO: 6742 - protein, 85 aa, Homo sapiens
ECTRRIVGVDGAIKALCNRLVVVELNNRTSRDLAEQCVKVLELICTRESGAVFEAGGLNCVLTFIRDSGHLVHKDTLHSAMAVVS

SEQ ID NO: 6743 - protein, 85 aa, Homo sapiens
RLCGKMEPQDSSLEICVESLSSLLKHEDHQVSDGALRCFASLADRFTRRGVDPAPLAKHGLTEELLSRMAAAGGTVSGPSSACKP

SEQ ID NO: 6744 - protein, 85 aa, Homo sapiens
GRSTTGAPSTTADSKLSNQVSTIVSLLSTLCRGSPVVTHDLLRSELPDSIESALQGDERCVLDTMRLVDLLLVLLFEGRKALPKS

SEQ ID NO: 6745 - protein, 85 aa, Homo sapiens
SAGSTGRIPGLRRLDSSGERSHRQLIDCIRSKDTDALIDAIDTGAFEVNFMDDVGQTLLNWASAFGTQEMVEFLCERGADVNRGQ

SEQ ID NO: 6746 - protein, 85 aa, Homo sapiens
RSSSLHYAACFGRPQVAKTLLRHGANPDLRDEDGKTPLDKARERGHSEVVAILQSPGDWMCPVNKGDDKKKKDTNKDEEECNEPK

SEQ ID NO: 6747 - protein, 85 aa, Homo sapiens
GDPEMAPIYLKRLLPVFAQTFQQTMLPSIRKASLALIRKMIHFCSEALLKEVCDSDVGHNLPTILVEITATVLDQEDDDDGHLLA

SEQ ID NO: 6748 - protein, 85 aa, Homo sapiens
MQIIRDLVDKGGDIFLDQLARLGVISKVSTLAGPSSDDENEEESKPEKEDEPQEDAKELQQGKPYHWRDWSIIRGRDCLYIWSDA

SEQ ID NO: 6749 - protein, 85 aa, Homo sapiens
AALELSNGSNGWFRFILDGKLATMYSSGSPEGGSDSSESRSEFLEKLQRARGQVKPSTSSQPILSAPGPTKLTVGNWSLTCLKEG

SEQ ID NO: 6750 - protein, 85 aa, Homo sapiens
EIAIHNSDGQQATILKEDLPGFVFESNRGTKHSFTAETSLGSEFVTGWTGKRGRKLKSKLEKTKQKVRTMARDLYDDHFKAVESM

SEQ ID NO: 6751 - protein, 85 aa, Homo sapiens
PRGVVVTLRNIATQLESSWELHTNRQCIESENTWRDLMKTALENLIVLLKDENTISPYEMCSSGLVQALLTVLNNSMDLDMKQDC

SEQ ID NO: 6752 - protein, 85 aa, Homo sapiens
SQLVERINVFKTAFSENEDDESRPAVALIRKLIAVLESIERLPLHLYDTPGSTYNLQILTRRLRFRLERAPGETALIDRTGRMLK

SEQ ID NO: 6753 - protein, 85 aa, Homo sapiens
MEPLATVESLEQYLLKMVAKQWYDFDRSSFVFVRKLREGQNFIFRHQHDFDENGIIYWIGTNAKTAYEWVNPAAYGLVVVTSSEG

SEQ ID NO: 6754 - protein, 85 aa, Homo sapiens
RNLPYGRLEDILSRDNSALNCHSNDDKNAWFAIDLGLWVIPSAYTLRHARGYGRSALRNWVFQVSKDGQNWTSLYTHVDDCSLNE

SEQ ID NO: 6755 - protein, 85 aa, Homo sapiens
PGSTATWPLDPPKDEKQGWRHVRIKQMGKNASGQTHYLSLSGFELYGTVNGVCEDQLGKAAKEAEANLRRQRRLVRSQVLKYMVP

SEQ ID NO: 6756 - protein, 85 aa, Homo sapiens
GARVIRGLDWKWRDQDGSPQGEGTVTGELHNGWIDVTWDAGGSNSYRMGAEGKFDLKLAPGYDPDTVASPKPVSSTVSGTTQSWS

SEQ ID NO: 6757 - protein, 85 aa, Homo sapiens
SLVKNNCPDKTSAAAGSSSRKGSSSSVCSVASSSDISLGSTKTERRSEIVMEHSIVSGADVHEPIVVLSSAENVPQTEVGSSSSA

SEQ ID NO: 6758 - protein, 85 aa, Homo sapiens
STSTLTAETGSENAERKLGPDSSVRTPGESSAISMGIVSVSSPDVSSVSELTNKEAASQRPLSSSASNRLSVSSLLAAGAPMSSS

SEQ ID NO: 6759 - protein, 85 aa, Homo sapiens
ASVPNLSSRETSSLESFVRRVANIARTNATNNMNLSRSSSDNNTNTLGRNVMSTATSPLMGAQSFPNLTTPGTTSTVTMSTSSVT

SEQ ID NO: 6760 - protein, 85 aa, Homo sapiens
SSSNVATATTVLSVGQSLSNTLTTSLTSTSSESDTGQEAEYSLYDFLDSCRASTLLAELDDDEDLPEPDEEDDENEDDNQEDQEY

SEQ ID NO: 6761 - protein, 85 aa, Homo sapiens
EEVMILRRPSLQRRAGSRSDVTHHAVTSQLPQVPAGAGSRPIGEQEEEEYETKGGRRRTWDDDYVLKRQFSALVPAFDPRPGRTN

SEQ ID NO: 6762 - protein, 85 aa, Homo sapiens
VQQTTDLEIPPPGTPHSELLEEVECTPSPRLALTLKVTGLGTTREVELPLTNFRSTIFYYVQKLLQLSCNGNVKSDKLRRIWEPT

SEQ ID NO: 6763 - protein, 85 aa, Homo sapiens
YTIMYREMKDSDKEKENGKMGCWSIEHVEQYLGTDELPKNDLITYLQKNADAAFLRHWKLTGTNKSIRKNRNCSQLIAAYKDFCE

SEQ ID NO: 6764 - protein, 85 aa, Homo sapiens
HGTKSGLNQGAISTLQSSDILNLTKEQPQAKAGNGQNSCGVEDVLQLLRILYIVASDPYSRISQEDGDEQPQFTFPPDEFTSKKI

SEQ ID NO: 6765 - protein, 85 aa, Homo sapiens
TTKILQQIEEPLALASGALPDWCEQLTSKCPFLIPFETRQLYFTCTAFGASRAIVWLQNRREATVERTRTTSSVRRDDPGEFRVG

SEQ ID NO: 6766 - protein, 85 aa, Homo sapiens
RLKHERVKVPRGESLMEWAENVMQIHADRKSVLEVEFLGEEGTGLGPTLEFYALVAAEFQRTDLGAWLCDDNFPDDESRHVDLGG

SEQ ID NO: 6767 - protein, 85 aa, Homo sapiens
GLKPPGYYVQRSCGLFTAPFPQDSDELERITKLFHFLGIFLAKCIQDNRLVDLPISKPFFKLMCMGDIKSNMSKLIYESRGDRDL

SEQ ID NO: 6768 - protein, 85 aa, Homo sapiens
HCTESQSEASTEEGHDSLSVGSFEEDSKSEFILDPPKPKPPAWFNGILTWEDFELVNPHRARFLKEIKDLAIKRRQILSNKGLSE

SEQ ID NO: 6769 - protein, 85 aa, Homo sapiens
DEKNTKLQELVLKNPSGSGPPLSIEDLGLNFQFCPSSRIYGFTAVDLKPSGEDEMITMDNAEEYVDLMFDFCMHTGIQKQMEAFR

SEQ ID NO: 6770 - protein, 85 aa, Homo sapiens
DGFNKVFPMEKLSSFSHEEVQMILCGNQSPSWAAEDIINYTEPKLGYTRDSPGFLRFVRVLCGMSSDERKAFLQFTTGCSTLPPG

SEQ ID NO: 6771 - protein, 84 aa, Homo sapiens
LCGMSSDERKAFLQFTTGCSTLPPGGLANLHPRLTVVRKVDATDASYPSVNTCVHYLKLPEYSSEEIMRERLLAATMEKGFHLN

SEQ ID NO: 6772 - protein, 85 aa, Homo sapiens
CFETCPPRTFLPALCKIFLDESAPDNVLEVTARAITYYLDVSAECTRRIVGVDGAIKALCNRLVVVELNNRTSRDLAEQCVKVLE

SEQ ID NO: 6773 - protein, 85 aa, Homo sapiens
MICTRESGAVFEAGGLNCVLTFIRDSGHLVHKDTLHSAMAVVSRLCGKMEPQDSSLEICVESLSSLLKHEDHQVSDGALRCFASL

SEQ ID NO: 6774 - protein, 85 aa, Homo sapiens
ADRFTRRGVDPAPLAKHGLTEELLSRMAAAGGTVSGPSSACKPGRSTTGAPSTTADSKLSNQVSTIVSLLSTLCRGSPVVTHDLL

SEQ ID NO: 6775 - protein, 85 aa, Homo sapiens
RSELPDSIESALQGDERCVLDTMRLVDLLLVLLFEGRKALPKSSAGSTGRIPGLRRLDSSGERSHRQLIDCIRSKDTDALIDAID

SEQ ID NO: 6776 - protein, 85 aa, Homo sapiens
TGAFEVNFMDDVGQTLLNWASAFGTQEMVEFLCERGADVNRGQRSSSLHYAACFGRPQVAKTLLRHGANPDLRDEDGKTPLDKAR

SEQ ID NO: 6777 - protein, 85 aa, Homo sapiens
ERGHSEVVAILQSPGDWMCPVNKGDDKKKKDTNKDEEECNEPKGDPEMAPIYLKRLLPVFAQTFQQTMLPSIRKASLALIRKMIH

SEQ ID NO: 6778 - protein, 85 aa, Homo sapiens
FCSEALLKEVCDSDVGHNLPTILVEITATVLDQEDDDDGHLLALQIIRDLVDKGGDIFLDQLARLGVISKVSTLAGPSSDDENEE

SEQ ID NO: 6779 - protein, 85 aa, Homo sapiens
ESKPEKEDEPQEDAKELQQGKPYHWRDWSIIRGRDCLYIWSDAAALELSNGSNGWFRFILDGKLATMYSSGSPEGGSDSSESRSE

SEQ ID NO: 6780 - protein, 85 aa, Homo sapiens
FLEKLQRARGQVKPSTSSQPILSAPGPTKLTVGNWSLTCLKEGEIAIHNSDGQQATILKEDLPGFVFESNRGTKHSFTAETSLGS

SEQ ID NO: 6781 - protein, 85 aa, Homo sapiens
EFVTGWTGKRGRKLKSKLEKTKQKVRTMARDLYDDHFKAVESMPRGVVVTLRNIATQLESSWELHTNRQCIESENTWRDLMKTAL

SEQ ID NO: 6782 - protein, 85 aa, Homo sapiens
ENLIVLLKDENTISPYEMCSSGLVQALLTVLNNSMDLDMKQDCSQLVERINVFKTAFSENEDDESRPAVALIRKLIAVLESIERL

SEQ ID NO: 6783 - protein, 85 aa, Homo sapiens
PLHLYDTPGSTYNLQILTRRLRFRLERAPGETALIDRTGRMLKMEPLATVESLEQYLLKMVAKQWYDFDRSSFVFVRKLREGQNF

SEQ ID NO: 6784 - protein, 85 aa, Homo sapiens
IFRHQHDFDENGIIYWIGTNAKTAYEWVNPAAYGLVVVTSSEGRNLPYGRLEDILSRDNSALNCHSNDDKNAWFAIDLGLWVIPS

SEQ ID NO: 6785 - protein, 85 aa, Homo sapiens
AYTLRHARGYGRSALRNWVFQVSKDGQNWTSLYTHVDDCSLNEPGSTATWPLDPPKDEKQGWRHVRIKQMGKNASGQTHYLSLSG

SEQ ID NO: 6786 - protein, 85 aa, Homo sapiens
FELYGTVNGVCEDQLGKAAKEAEANLRRQRRLVRSQVLKYMVPGARVIRGLDWKWRDQDGSPQGEGTVTGELHNGWIDVTWDAGG

SEQ ID NO: 6787 - protein, 85 aa, Homo sapiens
SNSYRMGAEGKFDLKLAPGYDPDTVASPKPVSSTVSGTTQSWSSLVKNNCPDKTSAAAGSSSRKGSSSSVCSVASSSDISLGSTK

SEQ ID NO: 6788 - protein, 85 aa, Homo sapiens
TERRSEIVMEHSIVSGADVHEPIVVLSSAENVPQTEVGSSSSASTSTLTAETGSENAERKLGPDSSVRTPGESSAISMGIVSVSS

SEQ ID NO: 6789 - protein, 85 aa, Homo sapiens
PDVSSVSELTNKEAASQRPLSSSASNRLSVSSLLAAGAPMSSSASVPNLSSRETSSLESFVRRVANIARTNATNNMNLSRSSSDN

SEQ ID NO: 6790 - protein, 85 aa, Homo sapiens
NTNTLGRNVMSTATSPLMGAQSFPNLTTPGTTSTVTMSTSSVTSSSNVATATTVLSVGQSLSNTLTTSLTSTSSESDTGQEAEYS

SEQ ID NO: 6791 - protein, 85 aa, Homo sapiens
LYDFLDSCRASTLLAELDDDEDLPEPDEEDDENEDDNQEDQEYEEVMILRRPSLQRRAGSRSDVTHHAVTSQLPQVPAGAGSRPI

SEQ ID NO: 6792 - protein, 85 aa, Homo sapiens
GEQEEEEYETKGGRRRTWDDDYVLKRQFSALVPAFDPRPGRTNVQQTTDLEIPPPGTPHSELLEEVECTPSPRLALTLKVTGLGT

SEQ ID NO: 6793 - protein, 85 aa, Homo sapiens
TREVELPLTNFRSTIFYYVQKLLQLSCNGNVKSDKLRRIWEPTYTIMYREMKDSDKEKENGKMGCWSIEHVEQYLGTDELPKNDL

SEQ ID NO: 6794 - protein, 85 aa, Homo sapiens
ITYLQKNADAAFLRHWKLTGTNKSIRKNRNCSQLIAAYKDFCEHGTKSGLNQGAISTLQSSDILNLTKEQPQAKAGNGQNSCGVE

SEQ ID NO: 6795 - protein, 85 aa, Homo sapiens
DVLQLLRILYIVASDPYSRISQEDGDEQPQFTFPPDEFTSKKITTKILQQIEEPLALASGALPDWCEQLTSKCPFLIPFETRQLY

SEQ ID NO: 6796 - protein, 85 aa, Homo sapiens
FTCTAFGASRAIVWLQNRREATVERTRTTSSVRRDDPGEFRVGRLKHERVKVPRGESLMEWAENVMQIHADRKSVLEVEFLGEEG

SEQ ID NO: 6797 - protein, 85 aa, Homo sapiens
TGLGPTLEFYALVAAEFQRTDLGAWLCDDNFPDDESRHVDLGGGLKPPGYYVQRSCGLFTAPFPQDSDELERITKLFHFLGIFLA

SEQ ID NO: 6798 - protein, 85 aa, Homo sapiens
KCIQDNRLVDLPISKPFFKLMCMGDIKSNMSKLIYESRGDRDLHCTESQSEASTEEGHDSLSVGSFEEDSKSEFILDPPKPKPPA

SEQ ID NO: 6799 - protein, 85 aa, Homo sapiens
WFNGILTWEDFELVNPHRARFLKEIKDLAIKRRQILSNKGLSEDEKNTKLQELVLKNPSGSGPPLSIEDLGLNFQFCPSSRIYGF

SEQ ID NO: 6800 - protein, 85 aa, Homo sapiens
TAVDLKPSGEDEMITMDNAEEYVDLMFDFCMHTGIQKQMEAFRDGFNKVFPMEKLSSFSHEEVQMILCGNQSPSWAAEDIINYTE

SEQ ID NO: 6801 - protein, 85 aa, Homo sapiens
PKLGYTRDSPGFLRFVRVLCGMSSDERKAFLQFTTGCSTLPPGGLANLHPRLTVVRKVDATDASYPSVNTCVHYLKLPEYSSEEI

SEQ ID NO: 6802 - protein, 85 aa, Homo sapiens
SLNPTSVARQRLREDHSQLQAECERLRGLLRAMERGGTVPADLEAAAASLPSSKEVAELKKQVESAELKNQRLKEVFQTKIQEFR

SEQ ID NO: 6803 - protein, 85 aa, Homo sapiens
GTVPADLEAAAASLPSSKEVAELKKQVESAELKNQRLKEVFQTKIQEFRKACYTLTGYQIDITTENQYRLTSLYAEHPGDCLIFK

SEQ ID NO: 6804 - protein, 85 aa, Homo sapiens
TTACQEANYGALLRELCLTQFQVDMEAVGETLWCDWGRTIRSYRELADCTWHMAEKLGCFWPNAEVDRFFLAVHGRYFRSCPISG

SEQ ID NO: 6805 - protein, 85 aa, Homo sapiens
ELITTQATKAGFSGGMVVDYPNSAKAKKFYLCLFSGPSTFIPEGLSENQDEVEPRESVFTNEREGGAFERRGIRGHQTRRFPLRM

SEQ ID NO: 6806 - protein, 84 aa, Homo sapiens
GLSENQDEVEPRESVFTNEREGGAFERRGIRGHQTRRFPLRMSRRGMVRKSRAWVLEKKERHRRQGREVRPDTQYTGRKRKPRF

SEQ ID NO: 6807 - protein, 85 aa, Homo sapiens
EGLSENQDEVEPRESVFTNEREGGAFERRGIRGHQTRRFPLRMSRRGMVRKSRAWVLEKKERHRRQGREVRPDTQYTGRKRKPRF

SEQ ID NO: 6808 - protein, 85 aa, Homo sapiens
QGRITKVLNMKPPEILSMIEEAAGTRMYEYKKIAAQKTIEKKEAKLKEIKTILEEEITPTIQKLKEERSSYLEYQKVMREIEHLS

SEQ ID NO: 6809 - protein, 85 aa, Homo sapiens
TIQKLKEERSSYLEYQKVMREIEHLSRLYIAYQFLLAEDTKVRSAEELKEMQDKVIKLQEELSENDKKIKALNHEIEELEKRKDK

SEQ ID NO: 6810 - protein, 85 aa, Homo sapiens
EAKLKEIKTILEEEITPTIQKLKEERSSYLEYQKVMREIEHLSRLYIAYQFLLAEDTKVRSAEELKEMQDKVIKLQEELSENDKK

SEQ ID NO: 6811 - protein, 23 aa, Homo sapiens
TRLWLTPYPMGRGKEDSMTTGKD

SEQ ID NO: 6812 - protein, 84 aa, Homo sapiens
PNGKRKRGLNDNRKGLDQNIVGAIKVFTEKYCTANHVDKLPGPRDWVQILQDQIKLARRRLKRGSEIADSDERLDGIALPPTGK

SEQ ID NO: 6813 - protein, 85 aa, Homo sapiens
LADELSGWVQRHQRGRRKIPQRAQERQSLDTSPSRSLSHGRSHLQLRQSPSNPLDPQKGILWASCNYIATQTVRSQHSWMQLTDG

SEQ ID NO: 6814 - protein, 84 aa, Homo sapiens
PSRSLSHGRSHLQLRQSPSNPLDPQKGILWASCNYIATQTVRSQHSWMQLTDGKTHFMLSLSEGTTCCSQPSATTRPPGPRCPW

SEQ ID NO: 6815 - protein, 85 aa, Homo sapiens
TDQPSFSNLTAFPGGAKELLLRDLDQLFLSSDCRHFNRTESLRLADELSGWVQRHQRGRRKIPQRAQERQSLDTSPSRSLSHGRS

SEQ ID NO: 6816 - protein, 85 aa, Homo sapiens
AAEVLPSARWQYCGAPDGSQRAVLVQFSNGKLQSPGNMRFTLYENKDSTNPRKRNQRILAAETDRLSYVGNNFGTGALKCNTLCR

SEQ ID NO: 6817 - protein, 85 aa, Homo sapiens
HFVGILNKTSGQMEVYDAELFNMQPLFSDVSVESELALESQTKTYREKMDSCIEAFGTTKQKRALNTRRMNRVGNESLNRAVAKA

SEQ ID NO: 6818 - protein, 85 aa, Homo sapiens
AETIIDTKGVTALVSDAIHNDLQDDSLYLPPCYDDAAKPEDVYKFEDLLSPAEYEALQSPSEAFRNVTSEEILKMIEENSHCTFV

SEQ ID NO: 6819 - protein, 85 aa, Homo sapiens
IEALKSLPSDVESRDRQARCIWFLDTLIKFRAHRVVKRKSALGPGVPHIINTKLLKHFTCLTYNNGRLRNLISDSMKAKITAYVI

SEQ ID NO: 6820 - protein, 84 aa, Homo sapiens
ITAYVIILALHIHDFQIDLTVLQRDLKLSEKRMMEIAKAMRLKISKRRVSVAAGSEEDHKLGTLSLPLPPAQTSDRLAKRRKIT

SEQ ID NO: 6821 - protein, 85 aa, Homo sapiens
YENKDSTNPRKRNQRILAAETDRLSYVGNNFGTGALKCNTLCRHFVGILNKTSGQMEVYDAELFNMQPLFSDVSVESELALESQT

SEQ ID NO: 6822 - protein, 85 aa, Homo sapiens
KTYREKMDSCIEAFGTTKQKRALNTRRMNRVGNESLNRAVAKAAETIIDTKGVTALVSDAIHNDLQDDSLYLPPCYDDAAKPEDV

SEQ ID NO: 6823 - protein, 85 aa, Homo sapiens
YKFEDLLSPAEYEALQSPSEAFRNVTSEEILKMIEENSHCTFVIEALKSLPSDVESRDRQARCIWFLDTLIKFRAHRVVKRKSAL

SEQ ID NO: 6824 - protein, 85 aa, Homo sapiens
GPGVPHIINTKLLKHFTCLTYNNGRLRNLISDSMKAKITAYVIILALHIHDFQIDLTVLQRDLKLSEKRMMEIAKAMRLKISKRR

SEQ ID NO: 6825 - protein, 85 aa, Homo sapiens
SDNEDNFDGDDFDDVEEDEGLDDLENAEEEGQENVEILPSGERPQANQKRITTPYMTKYERARVLGTRALQIAMCAPVMVELEGE

SEQ ID NO: 6826 - protein, 84 aa, Homo sapiens
ERPQANQKRITTPYMTKYERARVLGTRALQIAMCAPVMVELEGETDPLLIAMKELKLLWGLEYTVLRPSYALAHSLGSFSISSR

SEQ ID NO: 6827 - protein, 7 aa, Homo sapiens
YSAWFYI

SEQ ID NO: 6828 - protein, 6 aa, Homo sapiens
QLKFSV

SEQ ID NO: 6829 - protein, 13 aa, Homo sapiens
SNQKFLNTVMEMV

SEQ ID NO: 6830 - protein, 51 aa, Homo sapiens
KALWKLQWMLILLRMIFLWRSPRQNHRFPRQYMTVLFVDRVAPPLKIDLLD

SEQ ID NO: 6831 - protein, 8 aa, Homo sapiens
IPVQPFMM

SEQ ID NO: 6832 - protein, 24 aa, Homo sapiens
HVILEAMWKITLGNVLATKAYKIS

SEQ ID NO: 6833 - protein, 6 aa, Homo sapiens
MLLEPI

SEQ ID NO: 6834 - protein, 7 aa, Homo sapiens
PFCSSRS

SEQ ID NO: 6835 - protein, 85 aa, Homo sapiens
KKELRNVQWLTLLLGLLNPWKNAYRTSAYLFSESPAFFSTTFLGKIYLAARKKKNFQFLPAAWDFCQRFTKQNIHSSVPPVWIGQ

SEQ ID NO: 6836 - protein, 6 aa, Homo sapiens
FQHLIL

SEQ ID NO: 6837 - protein, 24 aa, Homo sapiens
ASNKVTVNVYCTLRTVVQEQVFSF

SEQ ID NO: 6838 - protein, 7 aa, Homo sapiens
CQTCDTL

SEQ ID NO: 6839 - protein, 4 aa, Homo sapiens
QLHS

SEQ ID NO: 6840 - protein, 83 aa, Homo sapiens
PLLYHLKKSLQQRRKHWTKKKGDRRLERGSRNCLRSLLHDRKALWKLQWMLILLRMIFLWRSPRQNHRFPRQYMTVLFVDRVA

SEQ ID NO: 6841 - protein, 9 aa, Homo sapiens
PPLKIDLLD

SEQ ID NO: 6842 - protein, 63 aa, Homo sapiens
IVINLTWNHYGMTRFFRASRWTKENSRVHSVGSLLTVFFHVILEAMWKITLGNVLATKAYKIS

SEQ ID NO: 6843 - protein, 5 aa, Homo sapiens
VQKQI

SEQ ID NO: 6844 - protein, 18 aa, Homo sapiens
CGFIALTLSIIPGESSPS

SEQ ID NO: 6845 - protein, 28 aa, Homo sapiens
AKKIGQPGNTRELSKRVHVMQKSLTKYY

SEQ ID NO: 6846 - protein, 49 aa, Homo sapiens
MGKIYLAARKKKNFQFLPAAWDFCQRFTKQNIHSSVPPVWIGQFQHLIL

SEQ ID NO: 6847 - protein, 38 aa, Homo sapiens
CLRIITPFFSTTTEKPVVSAPRFLKILLFALCVVLLYA

SEQ ID NO: 6848 - protein, 85 aa, Homo sapiens
AAAALRDPAQVPVAADLLTDHEEQGYVTFEDVAVYFSQEEWRLLDDAQRLLYRNVMLENFTLLASLGLASSKTHEITQLESWEEP

SEQ ID NO: 6849 - protein, 85 aa, Homo sapiens
FMPAWEVVTSAIPRGCWHGAEAEEAPEQIASVGLLSSNIQQHQKQHCGEKPLKRQEGRVPVLRSCKVHLSEKSLQSREVGKALLI

SEQ ID NO: 6850 - protein, 85 aa, Homo sapiens
SSGVLKHQVTHTGEKSHRSSKSREAFHAGKRHYKCSECGKAFGQKYLLVQHQRLHAGKKTYECSECGKLFRDMSNLFIHQIVHTG

SEQ ID NO: 6851 - protein, 85 aa, Homo sapiens
ERPYGCSNCGKSFSRNAHLIEHQRVHTGEKPFTCSECGKAFRHNSTLVQHHKIHTGVRPYECSECGKLFSFNSSLMKHQRIHTGE

SEQ ID NO: 6852 - protein, 85 aa, Homo sapiens
RPYKCSECGKFYSHKSNLIKHWRVHTGERPYKCSDCGKFFTQCSSLMQHQKVHTGEKPFKCNECGRFFRENSTLVRHQRVHTGAK

SEQ ID NO: 6853 - protein, 85 aa, Homo sapiens
PYECRECGKFFSQSSTLMQHRKVHIGEKPFKCNECGRLFRENSSLVKHQRVHTGAKPYECRECGKFFRHNSSLFKHRRIHTGEMQ

SEQ ID NO: 6854 - protein, 85 aa, Homo sapiens
MLDDAQRLLYRNVMLENFTLLASLGLASSKTHEITQLESWEEPFMPAWEVVTSAIPRGCWHGAEAEEAPEQIASVGLLSSNIQQH

SEQ ID NO: 6855 - protein, 85 aa, Homo sapiens
QKQHCGEKPLKRQEGRVPVLRSCKVHLSEKSLQSREVGKALLISSGVLKHQVTHTGEKSHRSSKSREAFHAGKRHYKCSECGKAF

SEQ ID NO: 6856 - protein, 85 aa, Homo sapiens
GQKYLLVQHQRLHAGKKTYECSECGKLFRDMSNLFIHQIVHTGERPYGCSNCGKSFSRNAHLIEHQRVHTGEKPFTCSECGKAFR

SEQ ID NO: 6857 - protein, 85 aa, Homo sapiens
HNSTLVQHHKIHTGVRPYECSECGKLFSFNSSLMKHQRIHTGERPYKCSECGKFYSHKSNLIKHWRVHTGERPYKCSDCGKFFTQ

SEQ ID NO: 6858 - protein, 85 aa, Homo sapiens
CSSLMQHQKVHTGEKPFKCNECGRFFRENSTLVRHQRVHTGAKPYECRECGKFFSQSSTLMQHRKVHIGEKPFKCNECGRLFREN

SEQ ID NO: 6859 - protein, 13 aa, Homo sapiens
NPATSLRMPLNAT

SEQ ID NO: 6860 - protein, 10 aa, Homo sapiens
CWNSWKVSLS

SEQ ID NO: 6861 - protein, 14 aa, Homo sapiens
PVAHQERWEVQTLF

SEQ ID NO: 6862 - protein, 27 aa, Homo sapiens
MGLPSISRQLALVFRIRTDIPPCLAIQ

SEQ ID NO: 6863 - protein, 6 aa, Homo sapiens
LIMSIR

SEQ ID NO: 6864 - protein, 33 aa, Homo sapiens
MSRQPQTVLPALTALTVGYTQLMEKGWKNLRAP

SEQ ID NO: 6865 - protein, 18 aa, Homo sapiens
VHLQDHHLHHTLPCQRTS

SEQ ID NO: 6866 - protein, 44 aa, Homo sapiens
SCCSQQMKTGIPLEQRKSGIVKVIDLILQLLNMHSTRPPHSRNH

SEQ ID NO: 6867 - protein, 15 aa, Homo sapiens
MTYLMTKSGSCSYMS

SEQ ID NO: 6868 - protein, 4 aa, Homo sapiens
TGVF

SEQ ID NO: 6869 - protein, 6 aa, Homo sapiens
GTNCKV

SEQ ID NO: 6870 - protein, 84 aa, Homo sapiens
IWHGRTKEEPAHYCSICEVEVFDLLFVTNESNSRKTYIVHCQDCARKTSGNLENFVVLEQYKMEDLMQVYDQFTLAPPLPSASS

SEQ ID NO: 6871 - protein, 19 aa, Homo sapiens
VVDMLCHILQYSNKLIHGV

SEQ ID NO: 6872 - protein, 12 aa, Homo sapiens
QTQSLASSHSLL

SEQ ID NO: 6873 - protein, 4 aa, Homo sapiens
TAQT

SEQ ID NO: 6874 - protein, 9 aa, Homo sapiens
PQVDNKALP

SEQ ID NO: 6875 - protein, 76 aa, Homo sapiens
TMWVLEPVTKSITSTQLFIQRLITLLPLHHLQPFQQQHLLQNPLSRQPQTVLPALTALTVGYTQLMEKGWKNLRAP

SEQ ID NO: 6876 - protein, 22 aa, Homo sapiens
TNLVHRSYHQCLCPYTPAQQKF

SEQ ID NO: 6877 - protein, 9 aa, Homo sapiens
VQIRTTLLQ

SEQ ID NO: 6878 - protein, 34 aa, Homo sapiens
EKKMKKEVIIKTTQIVNLHRQIILGGGGKDPLKP

SEQ ID NO: 6879 - protein, 6 aa, Homo sapiens
TQFNYT

SEQ ID NO: 6880 - protein, 5 aa, Homo sapiens
EIWSG

SEQ ID NO: 6881 - protein, 5 aa, Homo sapiens
SNVRH

SEQ ID NO: 6882 - protein, 85 aa, Homo sapiens
CFLFSTFPRTGKCHVQTIQLCRRLTVEFMHYIIAARALRKVFLSIKGIYYQAEVLGQPIVWITPYAFSHDHPTDVDYRVMATFTE

SEQ ID NO: 6883 - protein, 85 aa, Homo sapiens
FYTTLLGFVNFRLYQLLNLHYPPKLEGQAQAEAKAGEGTYALDSESCMEKLAALSASLARVVVPATEEEAEVDEFPTDGEMSAQE

SEQ ID NO: 6884 - protein, 85 aa, Homo sapiens
EDRRKELEAQEKHKKLFEGLKFFLNREVPREALAFIIRSFGGEVSWDKSLCIGATYDVTDSRITHQIVDRPGQQTSVIGRCYVQP

SEQ ID NO: 6885 - protein, 85 aa, Homo sapiens
QWVFDSVNARLLLPVAEYFSGVQLPPHLSPFVTEKEGDYVPPEKLKLLALQRGEDPGNLNESEEEEEEDDNNEGDGDEEGENEEE

SEQ ID NO: 6886 - protein, 85 aa, Homo sapiens
EEDAEAGSEKEEEARLAALEEQRMEGKKPRVMAGTLKLEDKQRLAQEEESEAKRLAIMMMKKREKYLYQKIMFGKRRKIREANKL

SEQ ID NO: 6887 - protein, 85 aa, Homo sapiens
MSIKGIYYQAEVLGQPIVWITPYAFSHDHPTDVDYRVMATFTEFYTTLLGFVNFRLYQLLNLHYPPKLEGQAQAEAKAGEGTYAL

SEQ ID NO: 6888 - protein, 85 aa, Homo sapiens
DSESCMEKLAALSASLARVVVPATEEEAEVDEFPTDGEMSAQEEDRRKELEAQEKHKKLFEGLKFFLNREVPREALAFIIRSFGG

SEQ ID NO: 6889 - protein, 85 aa, Homo sapiens
EVSWDKSLCIGATYDVTDSRITHQIVDRPGQQTSVIGRCYVQPQWVFDSVNARLLLPVAEYFSGVQLPPHLSPFVTEKEGDYVPP

SEQ ID NO: 6890 - protein, 85 aa, Homo sapiens
EKLKLLALQRGEDPGNLNESEEEEEEDDNNEGDGDEEGENEEEEEDAEAGSEKEEEARLAALEEQRMEGKKPRVMAGTLKLEDKQ

SEQ ID NO: 6891 - protein, 85 aa, Homo sapiens
RAVRRHLFPQHSAPGRGVVWEWLSDDGSWTAYEASVCDYLEQQVARGNQLVDLAPLGYNYTVNYTTHTQTNKTSSFCRSVRRQAG

SEQ ID NO: 6892 - protein, 85 aa, Homo sapiens
PPYPVTTIIAPPGHTGVACSCHQCLSGSRTGPVSGRYRHSMTNLPAYPVPQHPPHRTASVFGTHQAFAPYNKPSLSGARSAPRLN

SEQ ID NO: 6893 - protein, 85 aa, Homo sapiens
TTNAWGAAPPSLGSQPLYRSSLSHLGPQHLPPGSSTSGAVSASLPSGPSSSPGSVPATVPMQMPKPSRVQQALAGMTSVLMSAIG

SEQ ID NO: 6894 - protein, 85 aa, Homo sapiens
LPVCLSRAPQPTSPPASRLASKSHGSVKRLRKMSVKGATPKPEPEPEQVIKNYTEELKVPPDEDCIICMEKLSTASGYSDVTDSK

SEQ ID NO: 6895 - protein, 85 aa, Homo sapiens
AIGSLAVGHLTKCSHAFHLLCLLAMYCNGNKDGSLQCPSCKTIYGEKTGTQPQGKMEVLRFQMSLPGHEDCGTILIVYSIPHGIQ

SEQ ID NO: 6896 - protein, 85 aa, Homo sapiens
GPEHPNPGKPFTARGFPRQCYLPDNAQGRKVLELLKVAWKRRLIFTVGTSSTTGETDTVVWNEIHHKTEMDRNITGHGYPDPNYL

SEQ ID NO: 6897 - protein, 85 aa, Homo sapiens
QVARGNQLVDLAPLGYNYTVNYTTHTQTNKTSSFCRSVRRQAGPPYPVTTIIAPPGHTGVACSCHQCLSGSRTGPVSGRYRHSMT

SEQ ID NO: 6898 - protein, 85 aa, Homo sapiens
NLPAYPVPQHPPHRTASVFGTHQAFAPYNKPSLSGARSAPRLNTTNAWGAAPPSLGSQPLYRSSLSHLGPQHLPPGSSTSGAVSA

SEQ ID NO: 6899 - protein, 85 aa, Homo sapiens
SLPSGPSSSPGSVPATVPMQMPKPSRVQQALAGMTSVLMSAIGLPVCLSRAPQPTSPPASRLASKSHGSVKRLRKMSVKGATPKP

SEQ ID NO: 6900 - protein, 85 aa, Homo sapiens
EPEPEQVIKNYTEELKVPPDEDCIICMEKLSTASGYSDVTDSKAIGSLAVGHLTKCSHAFHLLCLLAMYCNGNKDGSLQCPSCKT

SEQ ID NO: 6901 - protein, 85 aa, Homo sapiens
IYGEKTGTQPQGKMEVLRFQMSLPGHEDCGTILIVYSIPHGIQGPEHPNPGKPFTARGFPRQCYLPDNAQGRKVLELLKVAWKRR

SEQ ID NO: 6902 - protein, 85 aa, Homo sapiens
MMARDGTREDNHKLHKRWLRHQAFMAELAQNKEWLEKIEREGQQLMQEKPELAASVRKKLGEIRQCWAELESTTQAKARQLFEAS

SEQ ID NO: 6903 - protein, 85 aa, Homo sapiens
KADQLVQSFAELDKKLLHMESQLQDVDPGGDLATVNSQLKKLQSMESQVEEWYREVGELQAQTAALPLEPASKELVGERQNAVGE

SEQ ID NO: 6904 - protein, 85 aa, Homo sapiens
RLVRLLEPLQERRRLLLASKELHQVAHDLDDELAWVQERLPLAMQTERGNGLQAVQQHIKKNQGLRREIQAHGPRLEEVLERAGA

SEQ ID NO: 6905 - protein, 85 aa, Homo sapiens
MASLRSPEAEAVRRGLEQLQSAWAGLREAAERRQQVLDAAFQVEQYYFDVAEVEAWLGEQELLMMSEDKGKDEQSTLQLLKKHLQ

SEQ ID NO: 6906 - protein, 85 aa, Homo sapiens
MEQGVENYEESIAQLSRQCRALLEMGHPDSEQISRRQSQVDRLYVALKELGEERRVALEQQYWLYQLSRQVSELEHWIAEKEVVA

SEQ ID NO: 6907 - protein, 85 aa, Homo sapiens
GSPELGQDFEHVSVLQEKFSEFASETGMAGRERLAAVNQMVDELIECGHTAAATMAEWKDGLNEAWAELLELMGTRAQLLAASRE

SEQ ID NO: 6908 - protein, 85 aa, Homo sapiens
LHKFFSDARELQGQIEEKRRRLPRLTTPPEPRPSASSMQRTLRAFEHDLQLLVSQVRQLQEGAAQLRTVYAGEHAEAIASREQEV

SEQ ID NO: 6909 - protein, 84 aa, Homo sapiens
EVLQGWKELLSACEDARLHVSSTADALRFHSQVRDLLSWMDGIASQIGAADKPRCPSSLLGLPASPWWPTPATPSPLTAPFSME

SEQ ID NO: 6910 - protein, 85 aa, Homo sapiens
QQLMQEKPELAASVRKKLGEIRQCWAELESTTQAKARQLFEASKADQLVQSFAELDKKLLHMESQLQDVDPGGDLATVNSQLKKL

SEQ ID NO: 6911 - protein, 85 aa, Homo sapiens
QSMESQVEEWYREVGELQAQTAALPLEPASKELVGERQNAVGERLVRLLEPLQERRRLLLASKELHQVAHDLDDELAWVQERLPL

SEQ ID NO: 6912 - protein, 85 aa, Homo sapiens
AMQTERGNGLQAVQQHIKKNQGLRREIQAHGPRLEEVLERAGALASLRSPEAEAVRRGLEQLQSAWAGLREAAERRQQVLDAAFQ

SEQ ID NO: 6913 - protein, 85 aa, Homo sapiens
VEQYYFDVAEVEAWLGEQELLMMSEDKGKDEQSTLQLLKKHLQLEQGVENYEESIAQLSRQCRALLEMGHPDSEQISRRQSQVDR

SEQ ID NO: 6914 - protein, 85 aa, Homo sapiens
MYVALKELGEERRVALEQQYWLYQLSRQVSELEHWIAEKEVVAGSPELGQDFEHVSVLQEKFSEFASETGMAGRERLAAVNQMVD

SEQ ID NO: 6915 - protein, 85 aa, Homo sapiens
ELIECGHTAAATMAEWKDGLNEAWAELLELMGTRAQLLAASRELHKFFSDARELQGQIEEKRRRLPRLTTPPEPRPSASSMQRTL

SEQ ID NO: 6916 - protein, 85 aa, Homo sapiens
RAFEHDLQLLVSQVRQLQEGAAQLRTVYAGEHAEAIASREQEVLQGWKELLSACEDARLHVSSTADALRFHSQVRDLLSWMDGIA

SEQ ID NO: 6917 - protein, 84 aa, Homo sapiens
DPNRGNQVQRPQMTFGRLQGIFPKIMPKKPAEEGNVSKEVPEASGPQNDGKQLCPPGKPTTSEKINMISGVLQRYCRFGSRPLQ

SEQ ID NO: 6918 - protein, 85 aa, Homo sapiens
IIPSLEELDSLKYSDLQNLAKSLGLRANLRDESQTSASSCDETEIQISNQEEAERQPLGHVTKTRRRCKTVRVDPDSQQNHSEIK

SEQ ID NO: 6919 - protein, 85 aa, Homo sapiens
ISNPTEFQNHEKQESQDLRATAKVPSPPDEHQEAENAVSSGNRDSKVPSEGKKSLYTDESSKPGKNKRTAITTPNFKKLHEAHFK

SEQ ID NO: 6920 - protein, 85 aa, Homo sapiens
EMESIDQYIERKKKHFEEHNSMNELKQPINKGGVRTPVPPRGRLSVASTPISQRRSQGRSCGPASQSTLGLKGSLKRSAISAAKT

SEQ ID NO: 6921 - protein, 85 aa, Homo sapiens
GVRFSAATKDNEHKRSLTKTPARKSAHVTVSGGTPKGEAVLGTHKLKTITGNSAAGKLKPWGQSKENNYLNQHVNRINFYKKTYK

SEQ ID NO: 6922 - protein, 84 aa, Homo sapiens
AVLGTHKLKTITGNSAAGKLKPWGQSKENNYLNQHVNRINFYKKTYKQPHLQTKEEQRKKREQERKEKKAKVLGMRRGLILAED

SEQ ID NO: 6923 - protein, 85 aa, Homo sapiens
TEIQISNQEEAERQPLGHVTKTRRRCKTVRVDPDSQQNHSEIKISNPTEFQNHEKQESQDLRATAKVPSPPDEHQEAENAVSSGN

SEQ ID NO: 6924 - protein, 85 aa, Homo sapiens
RDSKVPSEGKKSLYTDESSKPGKNKRTAITTPNFKKLHEAHFKEMESIDQYIERKKKHFEEHNSMNELKQPINKGGVRTPVPPRG

SEQ ID NO: 6925 - protein, 85 aa, Homo sapiens
RLSVASTPISQRRSQGRSCGPASQSTLGLKGSLKRSAISAAKTGVRFSAATKDNEHKRSLTKTPARKSAHVTVSGGTPKGEAVLG

SEQ ID NO: 6926 - protein, 85 aa, Homo sapiens
QMELSHKRARVELERAASTSARNYEREVDRNQELLTRIRQLQEREAGAEEKMQEQLERNRQCQQNLDAASKRLREKEDSLAQAGE

SEQ ID NO: 6927 - protein, 85 aa, Homo sapiens
DEEEDNLSLLTALLEENESALDCNSEENNFLTRENGEPDAFDELFDADGDGESYTEEADDGETGETRDEKENLATLFGDMEDLTD

SEQ ID NO: 6928 - protein, 85 aa, Homo sapiens
EEEVPASQSTENRVLPAPAPRREKTNEELQEELRNLQEQMKALQEQLKVTTIKQTASPARLQKSPEKSPRPPLKERRVQRIQEST

SEQ ID NO: 6929 - protein, 85 aa, Homo sapiens
CFSAELDVPALPRTKRVARTPKASPPDPKSSSSRMTSAPSQPLQTISRNKPSGITRGQIVGTPGSSGETTQPICVEAFSGLRLRR

SEQ ID NO: 6930 - protein, 85 aa, Homo sapiens
PRVSSTEMNKKMTGRKLIRLSQIKEKMAREKLEEIDWVTFGVILKKVTPQSVNSGKTFSIWKLNDLRDLTQCVSLFLFGEVHKAL

SEQ ID NO: 6931 - protein, 85 aa, Homo sapiens
WKTEQGTVVGILNANPMKPKDGSEEVCLSIDHPQKVLIMGEALDLGTCKAKKKNGEPCTQTVNLRDCEYCQYHVQAQYKKLSAKR

SEQ ID NO: 6932 - protein, 85 aa, Homo sapiens
ADLQSTFSGGRIPKKFARRGTSLKERLCQDGFYYGGVSSASYAASIAAAVAPKKKIQTTLSNLVVKGTNLIIQETRQKLGIPQKS

SEQ ID NO: 6933 - protein, 85 aa, Homo sapiens
MSCSEEFKELMDLPTCGARNLKQHLAKATASGIMGSPKPAIKSISASALLKQQKQRMLEMRRRKSEEIQKRFLQSSSEVESPAVP

SEQ ID NO: 6934 - protein, 85 aa, Homo sapiens
SSSRQPPAQPPRTGSEFPRLEGAPATMTPKLGRGVLEGDDVLFYDESPPPRPKLSALAEAKKLAAITKLRAKGQVLTKTNPNSIK

SEQ ID NO: 6935 - protein, 85 aa, Homo sapiens
KKQKDPQDILEVKERVEKNTMFSSQAEDELEPARKKRREQLAYLESEEFQKILKAKSKHTGILKEAEAEMQERYFEPLVKKEQME

SEQ ID NO: 6936 - protein, 85 aa, Homo sapiens
EKMRNIREVKCRVVTCKTCAYTHFKLLETCVSEQHEYHWHDGVKRFFKCPCGNRSISLDRLPNKHCSNCGLYKWERDGMLKEKTG

SEQ ID NO: 6937 - protein, 84 aa, Homo sapiens
KLLETCVSEQHEYHWHDGVKRFFKCPCGNRSISLDRLPNKHCSNCGLYKWERDGMLKEKTGPKIGGETLLPRGEEHAKFLNSLK

SEQ ID NO: 6938 - protein, 85 aa, Homo sapiens
ELFDADGDGESYTEEADDGETGETRDEKENLATLFGDMEDLTDEEEVPASQSTENRVLPAPAPRREKTNEELQEELRNLQEQMKA

SEQ ID NO: 6939 - protein, 85 aa, Homo sapiens
LQEQLKVTTIKQTASPARLQKSPEKSPRPPLKERRVQRIQESTCFSAELDVPALPRTKRVARTPKASPPDPKSSSSRMTSAPSQP

SEQ ID NO: 6940 - protein, 85 aa, Homo sapiens
LQTISRNKPSGITRGQIVGTPGSSGETTQPICVEAFSGLRLRRPRVSSTEMNKKMTGRKLIRLSQIKEKMAREKLEEIDWVTFGV

SEQ ID NO: 6941 - protein, 85 aa, Homo sapiens
ILKKVTPQSVNSGKTFSIWKLNDLRDLTQCVSLFLFGEVHKALWKTEQGTVVGILNANPMKPKDGSEEVCLSIDHPQKVLIMGEA

SEQ ID NO: 6942 - protein, 85 aa, Homo sapiens
LDLGTCKAKKKNGEPCTQTVNLRDCEYCQYHVQAQYKKLSAKRADLQSTFSGGRIPKKFARRGTSLKERLCQDGFYYGGVSSASY

SEQ ID NO: 6943 - protein, 85 aa, Homo sapiens
AASIAAAVAPKKKIQTTLSNLVVKGTNLIIQETRQKLGIPQKSLSCSEEFKELMDLPTCGARNLKQHLAKATASGIMGSPKPAIK

SEQ ID NO: 6944 - protein, 85 aa, Homo sapiens
SISASALLKQQKQRMLEMRRRKSEEIQKRFLQSSSEVESPAVPSSSRQPPAQPPRTGSEFPRLEGAPATMTPKLGRGVLEGDDVL

SEQ ID NO: 6945 - protein, 85 aa, Homo sapiens
FYDESPPPRPKLSALAEAKKLAAITKLRAKGQVLTKTNPNSIKKKQKDPQDILEVKERVEKNTMFSSQAEDELEPARKKRREQLA

SEQ ID NO: 6946 - protein, 85 aa, Homo sapiens
YLESEEFQKILKAKSKHTGILKEAEAEMQERYFEPLVKKEQMEEKMRNIREVKCRVVTCKTCAYTHFKLLETCVSEQHEYHWHDG

SEQ ID NO: 6947 - protein, 85 aa, Homo sapiens
EPLASNIQVLLQAAEFLERREREAEHGYASLCPHRSPGPIHRRKKRPPQAPGAQDSGRSVHNELEKRRRAQLKRCLERLKQQMPL

SEQ ID NO: 6948 - protein, 85 aa, Homo sapiens
GADCARYTTLSLLRRARMHIQKLEDQEQRARQLKERLRSKQQSLQRQLEQLRGLAGAAERERLRADSLDSSGLSSERSDSDQVLP

SEQ ID NO: 6949 - protein, 84 aa, Homo sapiens
EDQEQRARQLKERLRSKQQSLQRQLEQLRGLAGAAERERLRADSLDSSGLSSERSDSDQVLPNENGGTPNHRPTGRGNNISSHH

SEQ ID NO: 6950 - protein, 85 aa, Homo sapiens
RKKRPPQAPGAQDSGRSVHNELEKRRRAQLKRCLERLKQQMPLGADCARYTTLSLLRRARMHIQKLEDQEQRARQLKERLRSKQQ

SEQ ID NO: 6951 - protein, 85 aa, Homo sapiens
DFPDQRRGAPEPRPRPPRTAPPVSNRPAHKFPGGNDNYLTITGPSHPFLSGAETFHTPSLGDEEFEIPPISLDSDPSLAVSDVVG

SEQ ID NO: 6952 - protein, 85 aa, Homo sapiens
HFDDLADPSSSQDGSFSAQYGVQTLDMPVGMTHGLMEQGGGLLSGGLTMDLDHSIGTQYSANPPVTIDVPMTDMTSGLMGHSQLT

SEQ ID NO: 6953 - protein, 85 aa, Homo sapiens
DHSIGTQYSANPPVTIDVPMTDMTSGLMGHSQLTTIDQSELSSQLGLSLGGGTILPPAQSPEDRLSTTPSPTSSLHEDGVEDFRR

SEQ ID NO: 6954 - protein, 85 aa, Homo sapiens
GPSHPFLSGAETFHTPSLGDEEFEIPPISLDSDPSLAVSDVVGHFDDLADPSSSQDGSFSAQYGVQTLDMPVGMTHGLMEQGGGL

SEQ ID NO: 6955 - protein, 85 aa, Homo sapiens
MSGGLTMDLDHSIGTQYSANPPVTIDVPMTDMTSGLMGHSQLTTIDQSELSSQLGLSLGGGTILPPAQSPEDRLSTTPSPTSSLH

SEQ ID NO: 6956 - protein, 85 aa, Homo sapiens
SDQEAKPSTEDLGDKKEGEYIKLKVIGQDSSEIHFKVKMTTHLKKLKESYCQRQGVPMNSLRFLFEGQRIADNHTPKELGMEEED

SEQ ID NO: 6957 - protein, 84 aa, Homo sapiens
EGEYIKLKVIGQDSSEIHFKVKMTTHLKKLKESYCQRQGVPMNSLRFLFEGQRIADNHTPKELGMEEEDVIEVYQEQTGGHSTV

SEQ ID NO: 6958 - protein, 85 aa, Homo sapiens
KMNEYSTTYECNRQFEDQEEDTESQSRTTDVKIIGFLRNVEKAEMSELSVAQKPEKLLERCKYWPACKNGDECAYHHPISPCKAF

SEQ ID NO: 6959 - protein, 85 aa, Homo sapiens
PNCKFAEKCLFVHPNCKYDAKCTKPDCPFTHVSRRIPVLSPKPAVAPPAPPSSSQLCRYFPACKKMECPFYHPKHCRFNTQCTRP

SEQ ID NO: 6960 - protein, 85 aa, Homo sapiens
ASGSVAECLQQETTCPVCLQYFAEPMMLDCGHNICCACLARCWGTAETNVSCPQCRETFPQRHMRPNRHLANVTQLVKQLRTERP

SEQ ID NO: 6961 - protein, 85 aa, Homo sapiens
SGPGGEMGVCEKHREPLKLYCEEDQMPICVVCDRSREHRGHSVLPLEEAVEGFKEQIQNQLDHLKRVKDLKKRRRAQGEQARAEL

SEQ ID NO: 6962 - protein, 85 aa, Homo sapiens
MSLTQMEREKIVWEFEQLYHSLKEHEYRLLARLEELDLAIYNSINGAITQFSCNISHLSSLIAQLEEKQQQPTRELLQDIGDTLS

SEQ ID NO: 6963 - protein, 85 aa, Homo sapiens
RAERIRIPEPWITPPDLQEKIHIFAQKCLFLTESLKQFTEKMQSDMEKIQELREAQLYSVDVTLDPDTAYPSLILSDNLRQVRYS

SEQ ID NO: 6964 - protein, 85 aa, Homo sapiens
YLQQDLPDNPERFNLFPCVLGSPCFIAGRHYWEVEVGDKAKWTIGVCEDSVCRKGGVTSAPQNGFWAVSLWYGKEYWALTSPMTA

SEQ ID NO: 6965 - protein, 85 aa, Homo sapiens
LPLRTPLQRVGIFLDYDAGEVSFYNVTERCHTFTFSHATFCGPVRPYFSLSYSGGKSAAPLIICPMSGIDGFSGHVGNHGHSMET

SEQ ID NO: 6966 - protein, 84 aa, Homo sapiens
RTPLQRVGIFLDYDAGEVSFYNVTERCHTFTFSHATFCGPVRPYFSLSYSGGKSAAPLIICPMSGIDGFSGHVGNHGHSMETSP

SEQ ID NO: 6967 - protein, 85 aa, Homo sapiens
WGTAETNVSCPQCRETFPQRHMRPNRHLANVTQLVKQLRTERPSGPGGEMGVCEKHREPLKLYCEEDQMPICVVCDRSREHRGHS

SEQ ID NO: 6968 - protein, 85 aa, Homo sapiens
VLPLEEAVEGFKEQIQNQLDHLKRVKDLKKRRRAQGEQARAELLSLTQMEREKIVWEFEQLYHSLKEHEYRLLARLEELDLAIYN

SEQ ID NO: 6969 - protein, 85 aa, Homo sapiens
SINGAITQFSCNISHLSSLIAQLEEKQQQPTRELLQDIGDTLSRAERIRIPEPWITPPDLQEKIHIFAQKCLFLTESLKQFTEKM

SEQ ID NO: 6970 - protein, 85 aa, Homo sapiens
QSDMEKIQELREAQLYSVDVTLDPDTAYPSLILSDNLRQVRYSYLQQDLPDNPERFNLFPCVLGSPCFIAGRHYWEVEVGDKAKW

SEQ ID NO: 6971 - protein, 85 aa, Homo sapiens
TIGVCEDSVCRKGGVTSAPQNGFWAVSLWYGKEYWALTSPMTALPLRTPLQRVGIFLDYDAGEVSFYNVTERCHTFTFSHATFCG

SEQ ID NO: 6972 - protein, 85 aa, Homo sapiens
SITSDEVNFLVYRYLQESGFSHSAFTFGIESHISQSNINGTLVPPAALISILQKGLQYVEAEISINEDGTVFDGRPIESLSLIDA

SEQ ID NO: 6973 - protein, 85 aa, Homo sapiens
VMPDVVQTRQQAFREKLAQQQASAAAAAAAATAAATAATTTSAGVSHQNPSKNREATVNGEENRAHSVNNHAKPMEIDGEVEIPS

SEQ ID NO: 6974 - protein, 85 aa, Homo sapiens
SKATVLRGHESEVFICAWNPVSDLLASGSGDSTARIWNLNENSNGGSTQLVLRHCIREGGHDVPSNKDVTSLDWNTNGTLLATGS

SEQ ID NO: 6975 - protein, 85 aa, Homo sapiens
YDGFARIWTEDGNLASTLGQHKGPIFALKWNRKGNYILSAGVDKTTIIWDAHTGEAKQQFPFHSAPALDVDWQNNTTFASCSTDM

SEQ ID NO: 6976 - protein, 85 aa, Homo sapiens
CIHVCRLGCDRPVKTFQGHTNEVNAIKWDPSGMLLASCSDDMTLKIWSMKQEVCIHDLQAHNKEIYTIKWSPTGPATSNPNSNIM

SEQ ID NO: 6977 - protein, 85 aa, Homo sapiens
MASASFDSTVRLWDIERGVCTHTLTKHQEPVYSVAFSPDGKYLASGSFDKCVHIWNTQSGNLVHSYRGTGGIFEVCWNARGDKVG

SEQ ID NO: 6978 - protein, 84 aa, Homo sapiens
RGVCTHTLTKHQEPVYSVAFSPDGKYLASGSFDKCVHIWNTQSGNLVHSYRGTGGIFEVCWNARGDKVGASASDGSVCVLDLRK

SEQ ID NO: 6979 - protein, 85 aa, Homo sapiens
VPPAALISILQKGLQYVEAEISINEDGTVFDGRPIESLSLIDAVMPDVVQTRQQAFREKLAQQQASAAAAAAAATAAATAATTTS

SEQ ID NO: 6980 - protein, 85 aa, Homo sapiens
AGVSHQNPSKNREATVNGEENRAHSVNNHAKPMEIDGEVEIPSSKATVLRGHESEVFICAWNPVSDLLASGSGDSTARIWNLNEN

SEQ ID NO: 6981 - protein, 85 aa, Homo sapiens
SNGGSTQLVLRHCIREGGHDVPSNKDVTSLDWNTNGTLLATGSYDGFARIWTEDGNLASTLGQHKGPIFALKWNRKGNYILSAGV

SEQ ID NO: 6982 - protein, 85 aa, Homo sapiens
DKTTIIWDAHTGEAKQQFPFHSAPALDVDWQNNTTFASCSTDMCIHVCRLGCDRPVKTFQGHTNEVNAIKWDPSGMLLASCSDDM

SEQ ID NO: 6983 - protein, 85 aa, Homo sapiens
TLKIWSMKQEVCIHDLQAHNKEIYTIKWSPTGPATSNPNSNIMLASASFDSTVRLWDIERGVCTHTLTKHQEPVYSVAFSPDGKY

SEQ ID NO: 6984 - protein, 85 aa, Homo sapiens
DVMNSIARGQKIPIFSAAGLPHNEIAAQICRQAGLVKKSKAVLDYHDDNFAIVFAAMGVRRLSRLVNMETARFFKSDFEQNGTMG

SEQ ID NO: 6985 - protein, 85 aa, Homo sapiens
AAMGVRRLSRLVNMETARFFKSDFEQNGTMGNVCLFLNLANDPTIERIITPRLALTTAEFLAYQCEKHVLVILTDMSSYAEALRE

SEQ ID NO: 6986 - protein, 85 aa, Homo sapiens
MDYHDDNFAIVFAAMGVRRLSRLVNMETARFFKSDFEQNGTMGNVCLFLNLANDPTIERIITPRLALTTAEFLAYQCEKHVLVIL

SEQ ID NO: 6987 - protein, 18 aa, Homo sapiens
WRSTSSPAWWPRTCWTPS

SEQ ID NO: 6988 - protein, 17 aa, Homo sapiens
HSSWTGSWMGPRCRRRW

SEQ ID NO: 6989 - protein, 6 aa, Homo sapiens
CLRDPA

SEQ ID NO: 6990 - protein, 85 aa, Homo sapiens
MWSATTTILTSTGCGASWRARCHACTPSRCTRTSAPVPSSPSRWRSSTRRRAGCTPTCAEPSSRSCPRAWAPAQSPPQSPARSWA

SEQ ID NO: 6991 - protein, 85 aa, Homo sapiens
KPPAAQGSPAAAAAAAPALDSAAAEDLSDALCEFDAVLADFASPFHERHFHYEEHLERMKRRSSASVSDSSGFSDSESADSLYRN

SEQ ID NO: 6992 - protein, 84 aa, Homo sapiens
EEHLERMKRRSSASVSDSSGFSDSESADSLYRNSFSFSDEKLNSPTDSTPALLSATVTPQKAKLGDTKELEAFIADLDKTLASM

SEQ ID NO: 6993 - protein, 85 aa, Homo sapiens
SPFHERHFHYEEHLERMKRRSSASVSDSSGFSDSESADSLYRNSFSFSDEKLNSPTDSTPALLSATVTPQKAKLGDTKELEAFIA

SEQ ID NO: 6994 - protein, 85 aa, Homo sapiens
APPPKEVEEDSEDEEMSEDEEDDSSGEEVVIPQKKGKKAAATSAKKVVVSPTKKVAVATPAKKAAVTPGKKAAATPAKKTVTPAK

SEQ ID NO: 6995 - protein, 85 aa, Homo sapiens
AVTTPGKKGATPGKALVATPGKKGAAIPAKGAKNGKNAKKEDSDEEEDDDSEEDEEDDEDEDEDEDEIEPAAMKAAAAAPASEDE

SEQ ID NO: 6996 - protein, 85 aa, Homo sapiens
DDEDDEDDEDDDDDEEDDSEEEAMETTPAKGKKAAKVVPVKAKNVAEDEDEEEDDEDEDDDDDEDDEDDDDEDDEEEEEEEEEEP

SEQ ID NO: 6997 - protein, 85 aa, Homo sapiens
VKEAPGKRKKEMAKQKAAPEAKKQKVEGTEPTTAFNLFVGNLNFNKSAPELKTGISDVFAKNDLAVVDVRIGMTRKFGYVDFESA

SEQ ID NO: 6998 - protein, 85 aa, Homo sapiens
EDLEKALELTGLKVFGNEIKLEKPKGKDSKKERDARTLLAKNLPYKVTQDELKEVFEDAAEIRLVSKDGKSKGIAYIEFKTEADA

SEQ ID NO: 6999 - protein, 85 aa, Homo sapiens
EKTFEEKQGTEIDGRSISLYYTGEKGQNQDYRGGKNSTWSGESKTLVLSNLSYSATEETLQEVFEKATFIKVPQNQNGKSKGYAF

SEQ ID NO: 7000 - protein, 85 aa, Homo sapiens
IEFASFEDAKEALNSCNKREIEGRAIRLELQGPRGSPNARSQPSKTLFVKGLSEDTTEETLKESFDGSVRARIVTDRETGSSKGF

SEQ ID NO: 7001 - protein, 85 aa, Homo sapiens
GFVDFNSEEDAKAAKEAMEDGEIDGNKVTLDWAKPKGEGGFGGRGGGRGGFGGRGGGRGGRGGFGGRGRGGFGGRGGFRGGRGGG

SEQ ID NO: 7002 - protein, 85 aa, Homo sapiens
SAKKVVVSPTKKVAVATPAKKAAVTPGKKAAATPAKKTVTPAKAVTTPGKKGATPGKALVATPGKKGAAIPAKGAKNGKNAKKED

SEQ ID NO: 7003 - protein, 85 aa, Homo sapiens
SDEEEDDDSEEDEEDDEDEDEDEDEIEPAAMKAAAAAPASEDEDDEDDEDDEDDDDDEEDDSEEEAMETTPAKGKKAAKVVPVKA

SEQ ID NO: 7004 - protein, 85 aa, Homo sapiens
KNVAEDEDEEEDDEDEDDDDDEDDEDDDDEDDEEEEEEEEEEPVKEAPGKRKKEMAKQKAAPEAKKQKVEGTEPTTAFNLFVGNL

SEQ ID NO: 7005 - protein, 85 aa, Homo sapiens
NFNKSAPELKTGISDVFAKNDLAVVDVRIGMTRKFGYVDFESAEDLEKALELTGLKVFGNEIKLEKPKGKDSKKERDARTLLAKN

SEQ ID NO: 7006 - protein, 85 aa, Homo sapiens
LPYKVTQDELKEVFEDAAEIRLVSKDGKSKGIAYIEFKTEADAEKTFEEKQGTEIDGRSISLYYTGEKGQNQDYRGGKNSTWSGE

SEQ ID NO: 7007 - protein, 85 aa, Homo sapiens
SKTLVLSNLSYSATEETLQEVFEKATFIKVPQNQNGKSKGYAFIEFASFEDAKEALNSCNKREIEGRAIRLELQGPRGSPNARSQ

SEQ ID NO: 7008 - protein, 85 aa, Homo sapiens
PSKTLFVKGLSEDTTEETLKESFDGSVRARIVTDRETGSSKGFGFVDFNSEEDAKAAKEAMEDGEIDGNKVTLDWAKPKGEGGFG

SEQ ID NO: 7009 - protein, 85 aa, Homo sapiens
KRPKLKKASKRMTCHKRYKIQKKVREHHRKLRKEAKKRGHKKPRKDPGVPNSAPFKEALLREAELRKQRLEELKQQQKLDRQKEL

SEQ ID NO: 7010 - protein, 85 aa, Homo sapiens
EKKRKLETNPDIKPSNVEPMEKEFGLCKTENKAKSGKQNSKKLYCQELKKVIEASDVVLEVLDARDPLGCRCPQVEEAIVQSGQK

SEQ ID NO: 7011 - protein, 85 aa, Homo sapiens
KLVLILNKSDLVPKENLESWLNYLKKELPTVVFRASTKPKDKGKITKRVKAKKNAAPFRSEVCFGKEGLWKLLGGFQETCSKAIR

SEQ ID NO: 7012 - protein, 85 aa, Homo sapiens
VGVIGFPNVGKSSIINSLKQEQMCNVGVSMGLTRSMQVVPLDKQITIIDSPSFIVSPLNSSSALALRSPASIEVVKPMEAASAIL

SEQ ID NO: 7013 - protein, 85 aa, Homo sapiens
SQADARQVVLKYTVPGYRNSLEFFTVLAQRRGMHQKGGIPNVEGAAKLLWSEWTGASLAYYCHPPTSWTPPPYFNESIVVDMKSG

SEQ ID NO: 7014 - protein, 85 aa, Homo sapiens
FNLEELEKNNAQSIRAIKGPHLANSILFQSSGLTNGIIEEKDIHEELPKRKERKQEEREDDKDSDQETVDEEVDENSSGMFAAEE

SEQ ID NO: 7015 - protein, 84 aa, Homo sapiens
EKDIHEELPKRKERKQEEREDDKDSDQETVDEEVDENSSGMFAAEETGEALSEETTAGEQSTRSFILDKIIEEDDAYDFSTDYV

SEQ ID NO: 7016 - protein, 85 aa, Homo sapiens
PRKDPGVPNSAPFKEALLREAELRKQRLEELKQQQKLDRQKELEKKRKLETNPDIKPSNVEPMEKEFGLCKTENKAKSGKQNSKK

SEQ ID NO: 7017 - protein, 85 aa, Homo sapiens
MYCQELKKVIEASDVVLEVLDARDPLGCRCPQVEEAIVQSGQKKLVLILNKSDLVPKENLESWLNYLKKELPTVVFRASTKPKDK

SEQ ID NO: 7018 - protein, 85 aa, Homo sapiens
GKITKRVKAKKNAAPFRSEVCFGKEGLWKLLGGFQETCSKAIRVGVIGFPNVGKSSIINSLKQEQMCNVGVSMGLTRSMQVVPLD

SEQ ID NO: 7019 - protein, 85 aa, Homo sapiens
KQITIIDSPSFIVSPLNSSSALALRSPASIEVVKPMEAASAILSQADARQVVLKYTVPGYRNSLEFFTVLAQRRGMHQKGGIPNV

SEQ ID NO: 7020 - protein, 85 aa, Homo sapiens
EGAAKLLWSEWTGASLAYYCHPPTSWTPPPYFNESIVVDMKSGFNLEELEKNNAQSIRAIKGPHLANSILFQSSGLTNGIIEEKD

SEQ ID NO: 7021 - protein, 85 aa, Homo sapiens
QVEQCLKRLKNMNLEGSIQDLFELFSSKVLYKGVLKRLILLYEPLFGLLQEVARIQPMPYFKDFTFPSDITEFLGQPYFEAFKKK

SEQ ID NO: 7022 - protein, 85 aa, Homo sapiens
MPIAFAAKGINKLLNKLFLINEQSPRASEETLLGISKKAKQMKINVQNNVDLGQPVKNKRVFKEESSEFDVRAFCNQLKHKATQE

SEQ ID NO: 7023 - protein, 85 aa, Homo sapiens
TSFDFKCSQSRLKTTKYSSQKVIGTPHAKSFVQRFREAESFTQLSEEIQMAVVWCRSKKLKAQAIFLGNKLLKSNRLKHLEAQGT

SEQ ID NO: 7024 - protein, 85 aa, Homo sapiens
SLPKKLECIKTSICNHLLRGSGIKTSKHHLRQRRSQNKFLRRQRKPQRKLQSTLLREIQQFSQGTRKSATDTSAKWRLSHCTVHR

SEQ ID NO: 7025 - protein, 85 aa, Homo sapiens
KECHLVILSLKSQTLDAETDVLCAVLYSNHNRMGRHKPHLALKQVEQCLKRLKNMNLEGSIQDLFELFSSKVLYKGVLKRLILLY

SEQ ID NO: 7026 - protein, 85 aa, Homo sapiens
EPLFGLLQEVARIQPMPYFKDFTFPSDITEFLGQPYFEAFKKKMPIAFAAKGINKLLNKLFLINEQSPRASEETLLGISKKAKQM

SEQ ID NO: 7027 - protein, 85 aa, Homo sapiens
KINVQNNVDLGQPVKNKRVFKEESSEFDVRAFCNQLKHKATQETSFDFKCSQSRLKTTKYSSQKVIGTPHAKSFVQRFREAESFT

SEQ ID NO: 7028 - protein, 85 aa, Homo sapiens
QLSEEIQMAVVWCRSKKLKAQAIFLGNKLLKSNRLKHLEAQGTSLPKKLECIKTSICNHLLRGSGIKTSKHHLRQRRSQNKFLRR

SEQ ID NO: 7029 - protein, 85 aa, Homo sapiens
QRKPQRKLQSTLLREIQQFSQGTRKSATDTSAKWRLSHCTVHRTDLYPNSKQLLNSGVSMPVIQTKEKMIHENLRGIHENETDSW

SEQ ID NO: 7030 - protein, 85 aa, Homo sapiens
ASEEVLKNRAIKKAKRRNVGFESDTGGAFKGFKGLVVPSGGGRFSGFGSGAGGKPLEGLSNGNNITSAPPFASAKAAADPKVAFG

SEQ ID NO: 7031 - protein, 85 aa, Homo sapiens
SLAANGPTTLVDKVSNPKTNGDSQQPSSSGLASSKACVGNAYHKQLAALNCSVRDWIVKHVNTNPLCDLTPIFKDYEKYLANIEQ

SEQ ID NO: 7032 - protein, 85 aa, Homo sapiens
QHGNSGRNSESESNKVAAETQSPSLFGSTKLQQESTFLFHGNKTEDTPDKKMEVASEKKTDPSSLGATSASFNFGKKVDSSVLGS

SEQ ID NO: 7033 - protein, 85 aa, Homo sapiens
LSSVPLTGFSFSPGNSSLFGKDTTQSKPVSSPFPTKPLEGQAEGDSGECKGGDEEENDEPPKVVVTEVKEEDAFYSKKCKLFYKK

SEQ ID NO: 7034 - protein, 85 aa, Homo sapiens
DNEFKEKGIGTLHLKPTANQKTQLLVRADTNLGNILLNVLIPPNMPCTRTGKNNVLIVCVPNPPIDEKNATMPVTMLIRVKTSED

SEQ ID NO: 7035 - protein, 85 aa, Homo sapiens
RFSGFGSGAGGKPLEGLSNGNNITSAPPFASAKAAADPKVAFGSLAANGPTTLVDKVSNPKTNGDSQQPSSSGLASSKACVGNAY

SEQ ID NO: 7036 - protein, 85 aa, Homo sapiens
HKQLAALNCSVRDWIVKHVNTNPLCDLTPIFKDYEKYLANIEQQHGNSGRNSESESNKVAAETQSPSLFGSTKLQQESTFLFHGN

SEQ ID NO: 7037 - protein, 85 aa, Homo sapiens
KTEDTPDKKMEVASEKKTDPSSLGATSASFNFGKKVDSSVLGSLSSVPLTGFSFSPGNSSLFGKDTTQSKPVSSPFPTKPLEGQA

SEQ ID NO: 7038 - protein, 85 aa, Homo sapiens
EGDSGECKGGDEEENDEPPKVVVTEVKEEDAFYSKKCKLFYKKDNEFKEKGIGTLHLKPTANQKTQLLVRADTNLGNILLNVLIP

SEQ ID NO: 7039 - protein, 84 aa, Homo sapiens
MAPGAPSAINLDSHSYEITSQNVKDGGRYTFEDAQEHIYKLMKSDSYARFLRSNAYQDLLLAKKKPESEQGRRTSLEKFTRSVG

SEQ ID NO: 7040 - protein, 85 aa, Homo sapiens
VEEIWQEFLAPGAPSAINLDSHSYEITSQNVKDGGRYTFEDAQEHIYKLMKSDSYARFLRSNAYQDLLLAKKKPESEQGRRTSLE

SEQ ID NO: 7041 - protein, 85 aa, Homo sapiens
LFMKMDLLNYQYLDKMNNNIGILCYEGEAALRGEPRIQTLPVASALSSHRTGPPPISPSKRKFSMEPGDEDLDCDNDHVSKMSRI

SEQ ID NO: 7042 - protein, 85 aa, Homo sapiens
FNPHLNKTANGDCRRDPRERSRSPIERAVAPTMSLHGSHLYTSLPSLGLEQPLALTKNSLDASRPAGLSPTLTPGERQQNRPSVI

SEQ ID NO: 7043 - protein, 85 aa, Homo sapiens
TCASAGARNCNLSHCPIAHSGCAAPGPASYRRPPSAATTCDPVVEEHFRRSLGKNYKEPEPAPNSVSITGSVDDHFAKALGDTWL

SEQ ID NO: 7044 - protein, 85 aa, Homo sapiens
ASALSSHRTGPPPISPSKRKFSMEPGDEDLDCDNDHVSKMSRIFNPHLNKTANGDCRRDPRERSRSPIERAVAPTMSLHGSHLYT

SEQ ID NO: 7045 - protein, 85 aa, Homo sapiens
SLPSLGLEQPLALTKNSLDASRPAGLSPTLTPGERQQNRPSVITCASAGARNCNLSHCPIAHSGCAAPGPASYRRPPSAATTCDP

SEQ ID NO: 7046 - protein, 85 aa, Homo sapiens
SARGEGAGQPSTSAQGQPAAPAPQKRGRGRPRKQQQEPTGEPSPKRPRGRPKGSKNKSPSKAAQKKAEATGEKRPRGRPRKWWLL

SEQ ID NO: 7047 - protein, 84 aa, Homo sapiens
GQPSTSAQGQPAAPAPQKRGRGRPRKQQQEPTGEPSPKRPRGRPKGSKNKSPSKAAQKKAEATGEKRPRGRPRKWWLLMKSPCW

SEQ ID NO: 7048 - protein, 37 aa, Homo sapiens
VCVAMCPLRKAQHRCRSKYLDLHKDCMLQKWSAAHYA

SEQ ID NO: 7049 - protein, 13 aa, Homo sapiens
IMHYFGKSRHKCY

SEQ ID NO: 7050 - protein, 84 aa, Homo sapiens
RRLEENIHDAESALRMAAKDKECVANHMRAVENTLHKVRDQISLSWSAASRNDFTLQLPKLHLETFAMEGLKGGPEVVACQVRV

SEQ ID NO: 7051 - protein, 4 aa, Homo sapiens
SNEV

SEQ ID NO: 7052 - protein, 13 aa, Homo sapiens
EKLLRVSPRQRWS

SEQ ID NO: 7053 - protein, 85 aa, Homo sapiens
AEGSRGGPTCSGVGGRQDPVSGSGGCNFPEYELPELNTRAFHVGAFGELWRGRLRGAGDLSLREPPASALPGSQAADSDREDAAV

SEQ ID NO: 7054 - protein, 85 aa, Homo sapiens
ARDLDCSLEAAAELRAVCGLDKLKCLEDGEDPEVIPENTDLVTLGVRKRFLEHREETITIDRACRQETFVYEMESHAIGKKPENS

SEQ ID NO: 7055 - protein, 85 aa, Homo sapiens
MESHAIGKKPENSADMIEEGELILSVNILYPVIFHKDLYKSAFFYFEGTFYNDKRYPECRDLSRTIIEWSESHDRGYGKFQTARM

SEQ ID NO: 7056 - protein, 85 aa, Homo sapiens
VGAFGELWRGRLRGAGDLSLREPPASALPGSQAADSDREDAAVARDLDCSLEAAAELRAVCGLDKLKCLEDGEDPEVIPENTDLV

SEQ ID NO: 7057 - protein, 85 aa, Homo sapiens
TLGVRKRFLEHREETITIDRACRQETFVYEMESHAIGKKPENSADMIEEGELILSVNILYPVIFHKDLYKSAFFYFEGTFYNDKR

SEQ ID NO: 7058 - protein, 85 aa, Homo sapiens
GKVLISWWCTPVITATQEAAARESLEPGRQRLQRDKIAPLDSSLGGGGEIAQIMEQGDLSVRDAAVDTLFGDLKEDKVTRHDGAS

SEQ ID NO: 7059 - protein, 85 aa, Homo sapiens
SDGHLAHIFRHAAKELFNEDVEEVTYRALRNKDFQEVTLEKNGEVVLRFAAAYGFRNIQNMILKLKKGKFPFHFVEVLACAGGCL

SEQ ID NO: 7060 - protein, 85 aa, Homo sapiens
NLSPEKIFHVIVAPCYDKKLEALQESLPPALHGSRGADCVLTSGKVLISWWCTPVITATQEAAARESLEPGRQRLQRDKIAPLDS

SEQ ID NO: 7061 - protein, 85 aa, Homo sapiens
SLGGGGEIAQIMEQGDLSVRDAAVDTLFGDLKEDKVTRHDGASSDGHLAHIFRHAAKELFNEDVEEVTYRALRNKDFQEVTLEKN

SEQ ID NO: 7062 - protein, 85 aa, Homo sapiens
GEVVLRFAAAYGFRNIQNMILKLKKGKFPFHFVEVLACAGGCLNGRGQAQTPDGHADKALLRQMEGIYADIPVRRPESSAHVQEL

SEQ ID NO: 7063 - protein, 85 aa, Homo sapiens
VQLDHGHAAAWMDLGTLYESCNQPQDAIKCYLNAARSKRCSNTSTLAARIKFLQAQLCNLPQSSLQNKTKLLPSIEEAWSLPIPA

SEQ ID NO: 7064 - protein, 85 aa, Homo sapiens
ELTSRQGAMNTAQQNGSDNWNGGQSLSHHPVQQVYSLCLTPQKLQHLEQLRANRDNLNPAQKHQLEQLESQFVLMQQMRHKEVAQ

SEQ ID NO: 7065 - protein, 85 aa, Homo sapiens
VRTTGIHNGAITDSSLPTNSVSNRQPHGALTRVSSVSQPGVRPACVEKLLSSGAFSAGCIPCGTSKILGSTDTILLGSNCIAGSE

SEQ ID NO: 7066 - protein, 85 aa, Homo sapiens
SNGNVPYLQQNTHTLPHNHTDLNSSTEEPWRKQLSNSAQGLHKSQSSCLSGPNEEQPLFSTGSAQYHQATSTGIKKANEHLTLPS

SEQ ID NO: 7067 - protein, 85 aa, Homo sapiens
NSVPQGDADSHLSCHTATSGGQQGIMFTKESKPSKNRSLVPETSRHTGDTSNGCADVKGLSNHVHQLIADAVSSPNHGDSPNLLI

SEQ ID NO: 7068 - protein, 85 aa, Homo sapiens
ADNPQLSALLIGKANGNVGTGTCDKVNNIHPAVHTKTDHSVASSPSSAISTATPSPKSTEQRSINSVTSLNSPHSGLHTVNGEGL

SEQ ID NO: 7069 - protein, 85 aa, Homo sapiens
GKSQSSTKVDLPLASHRSTSQILPSMSVSICPSSTEVLKACRNPGKNGLSNSCILLDKCPPPRPPTSPYPPLPKDKLNPPTPSIY

SEQ ID NO: 7070 - protein, 85 aa, Homo sapiens
MENKRDAFFPPLHQFCTNPKNPVTVIRGLAGALKLDLGLFSTKTLVEANNEHMVEVRTQLLQPADENWDPTGTKKIWRCESNRSH

SEQ ID NO: 7071 - protein, 85 aa, Homo sapiens
TTIAKYAQYQASSFQESLREENEKRTQHKDHSDNESTSSENSGRRRKGPFKTIKFGTNIDLSDNKKWKLQLHELTKLPAFARVVS

SEQ ID NO: 7072 - protein, 85 aa, Homo sapiens
AGNLLTHVGHTILGMNTVQLYMKVPGSRTPGHQENNNFCSVNINIGPGDCEWFVVPEDYWGVLNDFCEKNNLNFLMSSWWPNLED

SEQ ID NO: 7073 - protein, 85 aa, Homo sapiens
LYEANVPVYRFIQRPGDLVWINAGTVHWVQAVGWCNNIAWNVGPLTACQYKLAVERYEWNKLKSVKSPVPMVHLSWNMARNIKVS

SEQ ID NO: 7074 - protein, 85 aa, Homo sapiens
DPKLFEMIKYCLLKILKQYQTLREALVAAGKEVIWHGRTNDEPAHYCSICEVEVFNLLFVTNESNTQKTYIVHCHDCARKTSKSL

SEQ ID NO: 7075 - protein, 85 aa, Homo sapiens
TSTLAARIKFLQAQLCNLPQSSLQNKTKLLPSIEEAWSLPIPAELTSRQGAMNTAQQNGSDNWNGGQSLSHHPVQQVYSLCLTPQ

SEQ ID NO: 7076 - protein, 85 aa, Homo sapiens
KLQHLEQLRANRDNLNPAQKHQLEQLESQFVLMQQMRHKEVAQVRTTGIHNGAITDSSLPTNSVSNRQPHGALTRVSSVSQPGVR

SEQ ID NO: 7077 - protein, 85 aa, Homo sapiens
PACVEKLLSSGAFSAGCIPCGTSKILGSTDTILLGSNCIAGSESNGNVPYLQQNTHTLPHNHTDLNSSTEEPWRKQLSNSAQGLH

SEQ ID NO: 7078 - protein, 85 aa, Homo sapiens
KSQSSCLSGPNEEQPLFSTGSAQYHQATSTGIKKANEHLTLPSNSVPQGDADSHLSCHTATSGGQQGIMFTKESKPSKNRSLVPE

SEQ ID NO: 7079 - protein, 85 aa, Homo sapiens
TSRHTGDTSNGCADVKGLSNHVHQLIADAVSSPNHGDSPNLLIADNPQLSALLIGKANGNVGTGTCDKVNNIHPAVHTKTDHSVA

SEQ ID NO: 7080 - protein, 85 aa, Homo sapiens
SSPSSAISTATPSPKSTEQRSINSVTSLNSPHSGLHTVNGEGLGKSQSSTKVDLPLASHRSTSQILPSMSVSICPSSTEVLKACR

SEQ ID NO: 7081 - protein, 85 aa, Homo sapiens
NPGKNGLSNSCILLDKCPPPRPPTSPYPPLPKDKLNPPTPSIYLENKRDAFFPPLHQFCTNPKNPVTVIRGLAGALKLDLGLFST

SEQ ID NO: 7082 - protein, 85 aa, Homo sapiens
KTLVEANNEHMVEVRTQLLQPADENWDPTGTKKIWRCESNRSHTTIAKYAQYQASSFQESLREENEKRTQHKDHSDNESTSSENS

SEQ ID NO: 7083 - protein, 85 aa, Homo sapiens
GRRRKGPFKTIKFGTNIDLSDNKKWKLQLHELTKLPAFARVVSAGNLLTHVGHTILGMNTVQLYMKVPGSRTPGHQENNNFCSVN

SEQ ID NO: 7084 - protein, 85 aa, Homo sapiens
INIGPGDCEWFVVPEDYWGVLNDFCEKNNLNFLMSSWWPNLEDLYEANVPVYRFIQRPGDLVWINAGTVHWVQAVGWCNNIAWNV

SEQ ID NO: 7085 - protein, 85 aa, Homo sapiens
GPLTACQYKLAVERYEWNKLKSVKSPVPMVHLSWNMARNIKVSDPKLFEMIKYCLLKILKQYQTLREALVAAGKEVIWHGRTNDE

SEQ ID NO: 7086 - protein, 85 aa, Homo sapiens
NDMWMLTADHGGYVKYWQSNMNNVKMFQAHKEAIREASFSPTDNKFATCSDDGTVRIWDFLRCHEERILRDTCFHHCRCYFLSVK

SEQ ID NO: 7087 - protein, 84 aa, Homo sapiens
MWMLTADHGGYVKYWQSNMNNVKMFQAHKEAIREASFSPTDNKFATCSDDGTVRIWDFLRCHEERILRDTCFHHCRCYFLSVKR

SEQ ID NO: 7088 - protein, 85 aa, Homo sapiens
EVSPLQPVNENMQVNKIKKNEDAKKRLSVERIYQKKTQLEHILLRPDTYIGSVELVTQQMWVYDEDVGINYREVTFVPGLYKIFD

SEQ ID NO: 7089 - protein, 85 aa, Homo sapiens
EILVNAADNKQRDPKMSCIRVTIDPENNLISIWNNGKGIPVVEHKVEKMYVPALIFGQLLTSSNYDDDEKKVTGGRNGYGAKLCN

SEQ ID NO: 7090 - protein, 85 aa, Homo sapiens
IFSTKFTVETASREYKKMFKQTWMDNMGRAGEMELKPFNGEDYTCITFQPDLSKFKMQSLDKDIVALMVRRAYDIAGSTKDVKVF

SEQ ID NO: 7091 - protein, 85 aa, Homo sapiens
LNGNKLPVKGFRSYVDMYLKDKLDETGNSLKVIHEQVNHRWEVCLTMSEKGFQQISFVNSIATSKGGRHVDYVADQIVTKLVDVV

SEQ ID NO: 7092 - protein, 85 aa, Homo sapiens
KKKNKGGVAVKAHQVKNHMWIFVNALIENPTFDSQTKENMTLQPKSFGSTCQLSEKFIKAAIGCGIVESILNWVKFKAQVQLNKK

SEQ ID NO: 7093 - protein, 85 aa, Homo sapiens
CSAVKHNRIKGIPKLDDANDAGGRNSTECTLILTEGDSAKTLAVSGLGVVGRDKYGVFPLRGKILNVREASHKQIMENAEINNII

SEQ ID NO: 7094 - protein, 85 aa, Homo sapiens
KIVGLQYKKNYEDEDSLKTLRYGKIMIMTDQDQDGSHIKGLLINFIHHNWPSLLRHRFLEEFITPIVKVSKNKQEMAFYSLPEFE

SEQ ID NO: 7095 - protein, 85 aa, Homo sapiens
EWKSSTPNHKKWKVKYYKGLGTSTSKEAKEYFADMKRHRIQFKYSGPEDDAAISLAFSKKQIDDRKEWLTNFMEDRRQRKLLGLP

SEQ ID NO: 7096 - protein, 85 aa, Homo sapiens
EDYLYGQTTTYLTYNDFINKELILFSNSDNERSIPSMVDGLKPGQRKVLFTCFKRNDKREVKVAQLAGSVAEMSSYHHGEMSLMM

SEQ ID NO: 7097 - protein, 85 aa, Homo sapiens
TIINLAQNFVGSNNLNLLQPIGQFGTRLHGGKDSASPRYIFTMLSSLARLLFPPKDDHTLKFLYDDNQRVEPEWYIPIIPMVLIN

SEQ ID NO: 7098 - protein, 85 aa, Homo sapiens
GAEGIGTGWSCKIPNFDVREIVNNIRRLMDGEEPLPMLPSYKNFKGTIEELAPNQYVISGEVAILNSTTIEISELPVRTWTQTYK

SEQ ID NO: 7099 - protein, 85 aa, Homo sapiens
EQVLEPMLNGTEKTPPLITDYREYHTDTTVKFVVKMTEEKLAEAERVGLHKVFKLQTSLTCNSMVLFDHVGCLKKYDTVLDILRD

SEQ ID NO: 7100 - protein, 85 aa, Homo sapiens
FFELRLKYYGLRKEWLLGMLGAESAKLNNQARFILEKIDGKIIIENKPKKELIKVLIQRGYDSDPVKAWKEAQQKVPDEEENEES

SEQ ID NO: 7101 - protein, 85 aa, Homo sapiens
DNEKETEKSDSVTDSGPTFNYLLDMPLWYLTKEKKDELCRLRNEKEQELDTLKRKSPSDLWKEDLATFIEELEAVEAKEKQDEQV

SEQ ID NO: 7102 - protein, 85 aa, Homo sapiens
GLPGKGGKAKGKKTQMAEVLPSPRGQRVIPRITIEMKAEAEKKNKKKIKNENTEGSPQEDGVELEGLKQRLEKKQKREPGTKTKK

SEQ ID NO: 7103 - protein, 85 aa, Homo sapiens
QTTLAFKPIKKGKKRNPWSDSESDRSSDESNFDVPPRETEPRRAATKTKFTMDLDSDEDFSDFDEKTDDEDFVPSDASPPKTKTS

SEQ ID NO: 7104 - protein, 85 aa, Homo sapiens
PKLSNKELKPQKSVVSDLEADDVKGSVPLSSSPPATHFPDETEITNPVPKKNVTVKKTAAKSQSSTSTTGAKKRAAPKGTKRDPA

SEQ ID NO: 7105 - protein, 85 aa, Homo sapiens [sequence omitted]

SEQ ID NO: 7106 - protein, 84 aa, Homo sapiens
NSGVSQKPDPAKTKNRRKRKPSTSDDSDSNFEKIVSKAVTSKKSKGESDDFHMDFDSAVAPRAKSVRAKKPIKYLEESDEDDLF

SEQ ID NO: 7107 - protein, 85 aa, Homo sapiens
MLRPDTYIGSVELVTQQMWVYDEDVGINYREVTFVPGLYKIFDEILVNAADNKQRDPKMSCIRVTIDPENNLISIWNNGKGIPVV

SEQ ID NO: 7108 - protein, 85 aa, Homo sapiens
EHKVEKMYVPALIFGQLLTSSNYDDDEKKVTGGRNGYGAKLCNIFSTKFTVETASREYKKMFKQTWMDNMGRAGEMELKPFNGED

SEQ ID NO: 7109 - protein, 85 aa, Homo sapiens
YTCITFQPDLSKFKMQSLDKDIVALMVRRAYDIAGSTKDVKVFLNGNKLPVKGFRSYVDMYLKDKLDETGNSLKVIHEQVNHRWE

SEQ ID NO: 7110 - protein, 85 aa, Homo sapiens
VCLTMSEKGFQQISFVNSIATSKGGRHVDYVADQIVTKLVDVVKKKNKGGVAVKAHQVKNHMWIFVNALIENPTFDSQTKENMTL

SEQ ID NO: 7111 - protein, 85 aa, Homo sapiens
QPKSFGSTCQLSEKFIKAAIGCGIVESILNWVKFKAQVQLNKKCSAVKHNRIKGIPKLDDANDAGGRNSTECTLILTEGDSAKTL

SEQ ID NO: 7112 - protein, 85 aa, Homo sapiens
AVSGLGVVGRDKYGVFPLRGKILNVREASHKQIMENAEINNIIKIVGLQYKKNYEDEDSLKTLRYGKIMIMTDQDQDGSHIKGLL

SEQ ID NO: 7113 - protein, 85 aa, Homo sapiens
INFIHHNWPSLLRHRFLEEFITPIVKVSKNKQEMAFYSLPEFEEWKSSTPNHKKWKVKYYKGLGTSTSKEAKEYFADMKRHRIQF

SEQ ID NO: 7114 - protein, 85 aa, Homo sapiens
KYSGPEDDAAISLAFSKKQIDDRKEWLTNFMEDRRQRKLLGLPEDYLYGQTTTYLTYNDFINKELILFSNSDNERSIPSMVDGLK

SEQ ID NO: 7115 - protein, 85 aa, Homo sapiens
PGQRKVLFTCFKRNDKREVKVAQLAGSVAEMSSYHHGEMSLMMTIINLAQNFVGSNNLNLLQPIGQFGTRLHGGKDSASPRYIFT

SEQ ID NO: 7116 - protein, 85 aa, Homo sapiens
MLSSLARLLFPPKDDHTLKFLYDDNQRVEPEWYIPIIPMVLINGAEGIGTGWSCKIPNFDVREIVNNIRRLMDGEEPLPMLPSYK

SEQ ID NO: 7117 - protein, 85 aa, Homo sapiens
NFKGTIEELAPNQYVISGEVAILNSTTIEISELPVRTWTQTYKEQVLEPMLNGTEKTPPLITDYREYHTDTTVKFVVKMTEEKLA

SEQ ID NO: 7118 - protein, 85 aa, Homo sapiens
EAERVGLHKVFKLQTSLTCNSMVLFDHVGCLKKYDTVLDILRDFFELRLKYYGLRKEWLLGMLGAESAKLNNQARFILEKIDGKI

SEQ ID NO: 7119 - protein, 85 aa, Homo sapiens
IIENKPKKELIKVLIQRGYDSDPVKAWKEAQQKVPDEEENEESDNEKETEKSDSVTDSGPTFNYLLDMPLWYLTKEKKDELCRLR

SEQ ID NO: 7120 - protein, 85 aa, Homo sapiens
NEKEQELDTLKRKSPSDLWKEDLATFIEELEAVEAKEKQDEQVGLPGKGGKAKGKKTQMAEVLPSPRGQRVIPRITIEMKAEAEK

SEQ ID NO: 7121 - protein, 85 aa, Homo sapiens
KNKKKIKNENTEGSPQEDGVELEGLKQRLEKKQKREPGTKTKKQTTLAFKPIKKGKKRNPWSDSESDRSSDESNFDVPPRETEPR

SEQ ID NO: 7122 - protein, 85 aa, Homo sapiens
RAATKTKFTMDLDSDEDFSDFDEKTDDEDFVPSDASPPKTKTSPKLSNKELKPQKSVVSDLEADDVKGSVPLSSSPPATHFPDET

SEQ ID NO: 7123 - protein, 85 aa, Homo sapiens
EITNPVPKKNVTVKKTAAKSQSSTSTTGAKKRAAPKGTKRDPALNSGVSQKPDPAKTKNRRKRKPSTSDDSDSNFEKIVSKAVTS

SEQ ID NO: 7124 - protein, 84 aa, Homo sapiens
AEEEGQENVEILPSGERPQANQKRITTPYMTKYERARVLGTRALQIAMCAPVMVELEGETDPLLIAMKELNYFQKAFEEAPVQG

SEQ ID NO: 7125 - protein, 85 aa, Homo sapiens
EEDGQQREKVKPLGFLKPFSLMKASSRFKAHQDALPRLPVPPLQQSLDHYLKALQPIVSEEEWAHTKQLVDEFQASGGVGERLQK

SEQ ID NO: 7126 - protein, 85 aa, Homo sapiens
MGFLKPFSLMKASSRFKAHQDALPRLPVPPLQQSLDHYLKALQPIVSEEEWAHTKQLVDEFQASGGVGERLQKGLERRARKTENW

SEQ ID NO: 7127 - protein, 85 aa, Homo sapiens
HPSLATMGKLASKLQLDLSVVKIWFKNQRAKWKRQQRQQMQTRPSLGPANQTTSVKKEETPSAITTANIRPVSPGISDANDHDLR

SEQ ID NO: 7128 - protein, 84 aa, Homo sapiens
LREPSGIKNPGGASASARVSSWDSQSYDIEQICLGASNPPWASTLFEIDEFVKIYDLPGEDDTSSLNQYLFPVCLEYDQLQSSV

SEQ ID NO: 7129 - protein, 85 aa, Homo sapiens
RPSLGPANQTTSVKKEETPSAITTANIRPVSPGISDANDHDLREPSGIKNPGGASASARVSSWDSQSYDIEQICLGASNPPWAST

SEQ ID NO: 7130 - protein, 84 aa, Homo sapiens
GPVPSKDPKTEHGSRKRTISQSSSLKSSSNSNKETSGSSKNSSSTSKQKKTEGKTSSSSKEVKVKCWGPGAFENHSTCHVTFPG

SEQ ID NO: 7131 - protein, 85 aa, Homo sapiens
KDLLPSPAGPVPSKDPKTEHGSRKRTISQSSSLKSSSNSNKETSGSSKNSSSTSKQKKTEGKTSSSSKEVKVKCWGPGAFENHST

SEQ ID NO: 7132 - protein, 85 aa, Homo sapiens
EDSDSAAKQLGLAEAAAVAAAAAVAAAAAAAAGGEAEEPVLSRDEDSEEDADSEAERETPRVTAVAVMAAEPGHMDMGAEALPGP

SEQ ID NO: 7133 - protein, 85 aa, Homo sapiens
DEAAAAAAFAEVTTVTVANVGAAADNVFTTSVANAASISGHVLSGRTALQIGDSLNTEKATLIVVHTDGSIVETTGLKGPAAPLT

SEQ ID NO: 7134 - protein, 85 aa, Homo sapiens
PGPQSPPTPLAPGQEKGGTKYNWDPSVYDSELPVRCRNISGTLYKNRLGSGGRGRCIKQGENWYSPTEFEAMAGRASSKDWKRSI

SEQ ID NO: 7135 - protein, 85 aa, Homo sapiens
RYAGRPLQCLIQDGILNPHAASCTCAACCDDMTLSGPVRLFVPYKRRKKENELPTTPVKKDSPKNITLLPATAATTFTVTPSGQI

SEQ ID NO: 7136 - protein, 85 aa, Homo sapiens
TTSGALTFDRASTVEATAVISESPAQGDVFAGATVQEASVQPPCRASHPEPHYPGYQDSCQIAPFPEAALPTSHPKIVLTSLPAL

SEQ ID NO: 7137 - protein, 85 aa, Homo sapiens
AVPPPTPTKAAPPALVNGLELSEPRSWLYLEEMVNSLLNTAQQLKTLFEQAKHASTYREAATNQAKIHADAERKEQSCVNCGREA

SEQ ID NO: 7138 - protein, 84 aa, Homo sapiens
TYREAATNQAKIHADAERKEQSCVNCGREAMSECTGCHKVNYCSTFCQRKDWKDHQHICGQSAAVTVQADEVHVAESVMEKVTV

SEQ ID NO: 7139 - protein, 85 aa, Homo sapiens
RDEDSEEDADSEAERETPRVTAVAVMAAEPGHMDMGAEALPGPDEAAAAAAFAEVTTVTVANVGAAADNVFTTSVANAASISGHV

SEQ ID NO: 7140 - protein, 85 aa, Homo sapiens
MSGRTALQIGDSLNTEKATLIVVHTDGSIVETTGLKGPAAPLTPGPQSPPTPLAPGQEKGGTKYNWDPSVYDSELPVRCRNISGT

SEQ ID NO: 7141 - protein, 85 aa, Homo sapiens
MYKNRLGSGGRGRCIKQGENWYSPTEFEAMAGRASSKDWKRSIRYAGRPLQCLIQDGILNPHAASCTCAACCDDMTLSGPVRLFV

SEQ ID NO: 7142 - protein, 85 aa, Homo sapiens
PYKRRKKENELPTTPVKKDSPKNITLLPATAATTFTVTPSGQITTSGALTFDRASTVEATAVISESPAQGDVFAGATVQEASVQP

SEQ ID NO: 7143 - protein, 85 aa, Homo sapiens
PCRASHPEPHYPGYQDSCQIAPFPEAALPTSHPKIVLTSLPALAVPPPTPTKAAPPALVNGLELSEPRSWLYLEEMVNSLLNTAQ

SEQ ID NO: 7144 - protein, 85 aa, Homo sapiens
QLKTLFEQAKHASTYREAATNQAKIHADAERKEQSCVNCGREAMSECTGCHKVNYCSTFCQRKDWKDHQHICGQSAAVTVQADEV

SEQ ID NO: 7145 - protein, 85 aa, Homo sapiens
VAIVLRRLRELQLQEVALRQENKRPSPRKLSSEPLLPLDEEAVDMDYGDMAVDVVDGDQEEASGDMEISFHLDSGHKTSSRVNST

SEQ ID NO: 7146 - protein, 85 aa, Homo sapiens
TKPEDGGLKKNKSAKQGDRENFRKAKQKLGFSSSDPDRMFVELSNSSWSEMSPWVIGTNYTLYPMTPAIEQRLILQYLTPLGEYQ

SEQ ID NO: 7147 - protein, 85 aa, Homo sapiens
ELLPIFMQLGSRELMMFYIDLKQTNDVLLTFEALKHLASLLLHNKFATEFVAHGGVQKLLEIPRPSMAATGVSMCLYYLSYNQDA

SEQ ID NO: 7148 - protein, 85 aa, Homo sapiens
MERVCMHPHNVLSDVVNYTLWLMECSHASGCCHATMFFSICFSFRAVLELFDRYDGLRRLVNLISTLEILNLEDQGALLSDDEIF

SEQ ID NO: 7149 - protein, 85 aa, Homo sapiens
ASRQTGKHTCMALRKYFEAHLAIKLEQVKQSLQRTEGGILVHPQPPYKACSYTHEQIVEMMEFLIEYGPAQLYWEPAEVFLKLSC

SEQ ID NO: 7150 - protein, 85 aa, Homo sapiens
VQLLLQLISIACNWKTYYARNDTVRFALDVLAILTVVPKIQLQLAESVDVLDEAGSTVSTVGISIILGVAEGEFFIHDAEIQKSA

SEQ ID NO: 7151 - protein, 85 aa, Homo sapiens
LQIIINCVCGPDNRISSIGKFISGTPRRKLPQNPKSSEHTLAKMWNVVQSNNGIKVLLSLLSIKMPITDADQIRALACKALVGLS

SEQ ID NO: 7152 - protein, 85 aa, Homo sapiens
RSSTVRQIISKLPLFSSCQIQQLMKEPVLQDKRSDHVKFCKYAAELIERVSGKPLLIGTDVSLARLQKADVVAQSRISFPEKELL

SEQ ID NO: 7153 - protein, 85 aa, Homo sapiens
MLIRNHLISKGLGETATVLTKEADLPMTAASHSSAFTPVTAAASPVSLPRTPRIANGIATRLGSHAAVGASAPSAPTAHPQPRPP

SEQ ID NO: 7154 - protein, 85 aa, Homo sapiens
QGPLALPGPSYAGNSPLIGRISFIRERPSPCNGRKIRVLRQKSDHGAYSQSPAIKKQLDRHLPSPPTLDSIITEYLREQHARCKN

SEQ ID NO: 7155 - protein, 85 aa, Homo sapiens
PVATCPPFSLFTPHQCPEPKQRRQAPINFTSRLNRRASFPKYGGVDGGCFDRHLIFSRFRPISVFREANEDESGFTCCAFSARER

SEQ ID NO: 7156 - protein, 85 aa, Homo sapiens
FLMLGTCTGQLKLYNVFSGQEEASYNCHNSAITHLEPSRDGSLLLTSATWSQPLSALWGMKSVFDMKHSFTEDHYVEFSKHSQDR

SEQ ID NO: 7157 - protein, 85 aa, Homo sapiens
VIGTKGDIAHIYDIQTGNKLLTLFNPDLANNYKRNCATFNPTDDLVLNDGVLWDVRSAQAIHKFDKFNMNISGVFHPNGLEVIIN

SEQ ID NO: 7158 - protein, 85 aa, Homo sapiens
TEIWDLRTFHLLHTVPALDQCRVVFNHTGTVMYGAMLQADDEDDLMEERMKSPFGSSFRTFNATDYKPIATIDVKRNIFDLCTDT

SEQ ID NO: 7159 - protein, 85 aa, Homo sapiens
KDCYLAVIENQGSMDALNMDTVCRLYEVGRQRLAEDEDEEEDQEEEEQEEEDDDEDDDDTDDLDELDTDQLLEAELEEDDNNENA

SEQ ID NO: 7160 - protein, 85 aa, Homo sapiens
VDMDYGDMAVDVVDGDQEEASGDMEISFHLDSGHKTSSRVNSTTKPEDGGLKKNKSAKQGDRENFRKAKQKLGFSSSDPDRMFVE

SEQ ID NO: 7161 - protein, 85 aa, Homo sapiens
MSNSSWSEMSPWVIGTNYTLYPMTPAIEQRLILQYLTPLGEYQELLPIFMQLGSRELMMFYIDLKQTNDVLLTFEALKHLASLLL

SEQ ID NO: 7162 - protein, 85 aa, Homo sapiens
HNKFATEFVAHGGVQKLLEIPRPSMAATGVSMCLYYLSYNQDAMERVCMHPHNVLSDVVNYTLWLMECSHASGCCHATMFFSICF

SEQ ID NO: 7163 - protein, 85 aa, Homo sapiens
SFRAVLELFDRYDGLRRLVNLISTLEILNLEDQGALLSDDEIFASRQTGKHTCMALRKYFEAHLAIKLEQVKQSLQRTEGGILVH

SEQ ID NO: 7164 - protein, 85 aa, Homo sapiens
PQPPYKACSYTHEQIVEMMEFLIEYGPAQLYWEPAEVFLKLSCVQLLLQLISIACNWKTYYARNDTVRFALDVLAILTVVPKIQL

SEQ ID NO: 7165 - protein, 85 aa, Homo sapiens
QLAESVDVLDEAGSTVSTVGISIILGVAEGEFFIHDAEIQKSALQIIINCVCGPDNRISSIGKFISGTPRRKLPQNPKSSEHTLA

SEQ ID NO: 7166 - protein, 85 aa, Homo sapiens
KMWNVVQSNNGIKVLLSLLSIKMPITDADQIRALACKALVGLSRSSTVRQIISKLPLFSSCQIQQLMKEPVLQDKRSDHVKFCKY

SEQ ID NO: 7167 - protein, 85 aa, Homo sapiens
AAELIERVSGKPLLIGTDVSLARLQKADVVAQSRISFPEKELLLLIRNHLISKGLGETATVLTKEADLPMTAASHSSAFTPVTAA

SEQ ID NO: 7168 - protein, 85 aa, Homo sapiens
ASPVSLPRTPRIANGIATRLGSHAAVGASAPSAPTAHPQPRPPQGPLALPGPSYAGNSPLIGRISFIRERPSPCNGRKIRVLRQK

SEQ ID NO: 7169 - protein, 85 aa, Homo sapiens
SDHGAYSQSPAIKKQLDRHLPSPPTLDSIITEYLREQHARCKNPVATCPPFSLFTPHQCPEPKQRRQAPINFTSRLNRRASFPKY

SEQ ID NO: 7170 - protein, 85 aa, Homo sapiens
GGVDGGCFDRHLIFSRFRPISVFREANEDESGFTCCAFSARERFLMLGTCTGQLKLYNVFSGQEEASYNCHNSAITHLEPSRDGS

SEQ ID NO: 7171 - protein, 85 aa, Homo sapiens
MLLTSATWSQPLSALWGMKSVFDMKHSFTEDHYVEFSKHSQDRVIGTKGDIAHIYDIQTGNKLLTLFNPDLANNYKRNCATFNPT

SEQ ID NO: 7172 - protein, 85 aa, Homo sapiens
DDLVLNDGVLWDVRSAQAIHKFDKFNMNISGVFHPNGLEVIINTEIWDLRTFHLLHTVPALDQCRVVFNHTGTVMYGAMLQADDE

SEQ ID NO: 7173 - protein, 85 aa, Homo sapiens
DDLMEERMKSPFGSSFRTFNATDYKPIATIDVKRNIFDLCTDTKDCYLAVIENQGSMDALNMDTVCRLYEVGRQRLAEDEDEEED

SEQ ID NO: 7174 - protein, 85 aa, Homo sapiens
QEEEEQEEEDDDEDDDDTDDLDELDTDQLLEAELEEDDNNENAGEDGDNDFSPSDEELANLLEEGEDGEDEDSDADEEVELILGD

SEQ ID NO: 7175 - protein, 85 aa, Homo sapiens
EAGPPGSARPAEPGPCLSGQRGADHTASASLQSVAGTEPGRHPQAVAAVLPAGGCGERMGVPTPKQFCPILERPLISYTLQALER

SEQ ID NO: 7176 - protein, 85 aa, Homo sapiens
VCWIKDIVVAVTGENMEVMKSIIQKYQHKRISLVEAGVTRHRSIFNGLKALAEDQINSKLSKPEVVIIHDAVRPFVEEGVLLKVV

SEQ ID NO: 7177 - protein, 85 aa, Homo sapiens
TAAKEHGAAGAIRPLVSTVVSPSADGCLDYSLERARHRASEMPQAFLFDVIYEAYQQCSDYDLEFGTECLQLALKYCCTKAKLVE

SEQ ID NO: 7178 - protein, 85 aa, Homo sapiens
GSPDLWKVTYKRDLYAAESIIKERISQEICVVMDTEEDNKHVGHLLEEVLKSELNHVKVTSEALGHAGRHLQQIILDQCYNFVCV

SEQ ID NO: 7179 - protein, 85 aa, Homo sapiens
NVTTSDFQETQKLLSMLEESSLCILYPVVVVSVHFLDFKLVPPSQKMENLMQIREFAKEVKERNILLYGLLISYPQDDQKLQESL

SEQ ID NO: 7180 - protein, 84 aa, Homo sapiens
PVVVVSVHFLDFKLVPPSQKMENLMQIREFAKEVKERNILLYGLLISYPQDDQKLQESLRQGAIIIASLIKERNSGLIGQLLIA

SEQ ID NO: 7181 - protein, 85 aa, Homo sapiens
PQAVAAVLPAGGCGERMGVPTPKQFCPILERPLISYTLQALERVCWIKDIVVAVTGENMEVMKSIIQKYQHKRISLVEAGVTRHR

SEQ ID NO: 7182 - protein, 85 aa, Homo sapiens
SIFNGLKALAEDQINSKLSKPEVVIIHDAVRPFVEEGVLLKVVTAAKEHGAAGAIRPLVSTVVSPSADGCLDYSLERARHRASEM

SEQ ID NO: 7183 - protein, 85 aa, Homo sapiens
PQAFLFDVIYEAYQQCSDYDLEFGTECLQLALKYCCTKAKLVEGSPDLWKVTYKRDLYAAESIIKERISQEICVVMDTEEDNKHV

SEQ ID NO: 7184 - protein, 85 aa, Homo sapiens
GHLLEEVLKSELNHVKVTSEALGHAGRHLQQIILDQCYNFVCVNVTTSDFQETQKLLSMLEESSLCILYPVVVVSVHFLDFKLVP

SEQ ID NO: 7185 - protein, 85 aa, Homo sapiens
EEGSSSPVSPVDSLGTSEEELERQPKRFGRKRRYSKKSSEDGSPTPGKRGKKGSPSAQSFEELQSQRILANVRERQRTQSLNEAF

SEQ ID NO: 7186 - protein, 84 aa, Homo sapiens
QRTQSLNEAFAALRKIIPTLPSDKLSKIQTLKLAARYIDFLYQVLQSDEMDNKMTSCSYVAHERLSYAFSVWRMEGAWSMSASH

SEQ ID NO: 7187 - protein, 85 aa, Homo sapiens
SPTPGKRGKKGSPSAQSFEELQSQRILANVRERQRTQSLNEAFAALRKIIPTLPSDKLSKIQTLKLAARYIDFLYQVLQSDEMDN

SEQ ID NO: 7188 - protein, 85 aa, Homo sapiens
WQDGLGTWHPYSATVCSFIEQQFVQQKGQRFGLGSLAHSIPLGQADPSLAPYIIDLPSWTQFRQDTGTMRAVRRHLFPQHSAPGR

SEQ ID NO: 7189 - protein, 84 aa, Homo sapiens
RPAKRPVFPPLCGDGLLSGKEETRKIPVPANRYTPLKENWMKIFTPIVEHLGLQIRFNLKSRNVEIRCMQVVRPGAVGLRNISI

SEQ ID NO: 7190 - protein, 85 aa, Homo sapiens
AGRMDTEEARPAKRPVFPPLCGDGLLSGKEETRKIPVPANRYTPLKENWMKIFTPIVEHLGLQIRFNLKSRNVEIRCMQVVRPGA

SEQ ID NO: 7191 - protein, 85 aa, Homo sapiens
GLYAAAAGVLAGVESRQGSIKGLVYSSNFQNVKQLYALVCETQRYSAVLDAVIASAGLLRAEKKLRPHLAKVHRGVSRNEDLLEV

SEQ ID NO: 7192 - protein, 85 aa, Homo sapiens
GSRPGPASQLPRFVRVNTLKTCSDDVVDYFKRQGFSYQGRASSLDDLRALKGKHFLLDPLMPELLVFPAQTDLHEHPLYRAGHLI

SEQ ID NO: 7193 - protein, 85 aa, Homo sapiens
MQDRASCLPAMLLDPPPGSHVIDACAAPGNKTSHLAALLKNQGKIFAFDLDAKRLASMATLLARAGVSCCELAEEDFLAVSPSDP

SEQ ID NO: 7194 - protein, 85 aa, Homo sapiens
RYHEVHYILLDPSCSGSGMPSRQLEEPGAGTPSPVRLHALAGFQQRALCHALTFPSLQRLVYSTCSLCQEENEDVVRDALQQNPG

SEQ ID NO: 7195 - protein, 85 aa, Homo sapiens
QRYSAVLDAVIASAGLLRAEKKLRPHLAKVHRGVSRNEDLLEVGSRPGPASQLPRFVRVNTLKTCSDDVVDYFKRQGFSYQGRAS

SEQ ID NO: 7196 - protein, 85 aa, Homo sapiens
SLDDLRALKGKHFLLDPLMPELLVFPAQTDLHEHPLYRAGHLILQDRASCLPAMLLDPPPGSHVIDACAAPGNKTSHLAALLKNQ

SEQ ID NO: 7197 - protein, 85 aa, Homo sapiens
GKIFAFDLDAKRLASMATLLARAGVSCCELAEEDFLAVSPSDPRYHEVHYILLDPSCSGSGMPSRQLEEPGAGTPSPVRLHALAG

SEQ ID NO: 7198 - protein, 85 aa, Homo sapiens
FQQRALCHALTFPSLQRLVYSTCSLCQEENEDVVRDALQQNPGAFRLAPALPAWPHRGLSTFPGAEHCLRASPETTLSSGFFVAV

SEQ ID NO: 7199 - protein, 85 aa, Homo sapiens
DTLDRVVKPKTKRAKRFLEKREPKLNENIKNAMLIKGGNANATVTKVLKDVYALKKPYGVLYKKKNITRPFEDQTSLEFFSKKSD

SEQ ID NO: 7200 - protein, 85 aa, Homo sapiens
CSLFMFGSHNKKRPNNLVIGRMYDYHVLDMIELGIENFVSLKDIKNSKCPEGTKPMLIFAGDDFDVTEDYRRLKSLLIDFFRGPT

SEQ ID NO: 7201 - protein, 85 aa, Homo sapiens
VSNIRLAGLEYVLHFTALNGKIYFRSYKLLLKKSGCRTPRIELEEMGPSLDLVLRRTHLASDDLYKLSMKMPKALKPKKKKNISH

SEQ ID NO: 7202 - protein, 84 aa, Homo sapiens
MVLRRTHLASDDLYKLSMKMPKALKPKKKKNISHDTFGTTYGRIHMQKQDLSKLQTRKMKGLKKRPAERITEDHEKKSKRIKKN

SEQ ID NO: 7203 - protein, 85 aa, Homo sapiens
TVTKVLKDVYALKKPYGVLYKKKNITRPFEDQTSLEFFSKKSDCSLFMFGSHNKKRPNNLVIGRMYDYHVLDMIELGIENFVSLK

SEQ ID NO: 7204 - protein, 85 aa, Homo sapiens
DIKNSKCPEGTKPMLIFAGDDFDVTEDYRRLKSLLIDFFRGPTVSNIRLAGLEYVLHFTALNGKIYFRSYKLLLKKSGCRTPRIE

SEQ ID NO: 7205 - protein, 85 aa, Homo sapiens
MEEMGPSLDLVLRRTHLASDDLYKLSMKMPKALKPKKKKNISHDTFGTTYGRIHMQKQDLSKLQTRKMKGLKKRPAERITEDHEK

SEQ ID NO: 7206 - protein, 85 aa, Homo sapiens
NLNTSSNTGDTQRLKIASLDVKQILKNETELDITDNLRKKLHWAKKEKLEITTKHNAELASYESQIAKLRSEVEKGEALRQSLEY

SEQ ID NO: 7207 - protein, 85 aa, Homo sapiens
DLAVARKEAGLGRRAAEERLAEAHRIQEKLCAQNSELQAKTNETEKAFQTSQQKWKEECRRFEHDLEERDNMIQNCNREYDLLMK

SEQ ID NO: 7208 - protein, 85 aa, Homo sapiens
EKSRLEKTLQEALEKHQREKNEMESHIRETALEEFRLQEEQWEAERRELQFIVQEQDTAVQNMHKKVEKLETEHMDCSDLLRRQT

SEQ ID NO: 7209 - protein, 85 aa, Homo sapiens
SELEFSTQREERLRKEFEATTLRVRKLEENIEAERAAHLESKFNSEIIQLRIRDLEGALQVEKASQAEAVADLEIIKNEFKEVES

SEQ ID NO: 7210 - protein, 85 aa, Homo sapiens
AYEREKHNAQESFAKLNLLEKEYFSKNKKLNEDIEEQKKVIIDLSKRLQYNEKSCSELQEELVMAKKHQAFLVETCENNVKELES

SEQ ID NO: 7211 - protein, 85 aa, Homo sapiens
ILDSFTVSGQWTSGIHKDKDKPPSFSVVLERLRRTLTDYQNKLEDASNEEKACNELDSTKQKIDSHTKNIKELQDKLADVNKELS

SEQ ID NO: 7212 - protein, 85 aa, Homo sapiens
HLHTKCADREALISTLKVELQNVLHCWEKEKAQAAQSESELQKLSQAFHKDAEEKLTFLHTLYQHLVAGCVLIKQPEGMLDKFSW

SEQ ID NO: 7213 - protein, 85 aa, Homo sapiens
SELCAVLQENVDALIADLNRANEKIRHLEYICKNKSDTMRELQQTQEDTFTKVAEQIKAQESCWHRQKKELELQYSELFLEVQKR

SEQ ID NO: 7214 - protein, 85 aa, Homo sapiens
AQKFQEIAEKNMEKLNHIEKSHEQLVLENSHFKKLLSQTQREQMSLLAACALMAGALYPLYSRSCALSTQRDFLQEQVNTFELFK

SEQ ID NO: 7215 - protein, 85 aa, Homo sapiens
MEIRTLAQALSTVEEKKQEEAKMKKKTFKGLIRIFRKGVIAVLAANRLKILGQSCASLFTWMESFKEGIGMLVCTGEPQDKHKFP

SEQ ID NO: 7216 - protein, 85 aa, Homo sapiens
KHQKEQLRCLQALSWLTSSDLLAAIISSMAELQDVIGKADPNSRICGHLLIGAAKNSFAKLMDKISLVMECIPLHSSRSITYVEK

SEQ ID NO: 7217 - protein, 85 aa, Homo sapiens
DSLVQRLAHGLHKVNTLALKYGLRGHVPITKSTASLQKQILGFTQRLHAAEVERRSLRLEVTEFKRSVNEMKKELDKAQGLQMQL

SEQ ID NO: 7218 - protein, 85 aa, Homo sapiens
NEFKQSKLITHEKFESACEELNNALLREEQAQMLLNEQAQQLQELNYKLELHSSEEADKNQTLGEAVKSLSEAKMELRRKDQSLR

SEQ ID NO: 7219 - protein, 85 aa, Homo sapiens
QLNRHLTQLEQDKRRLEENIHDAESALRMAAKDKECVANHMRAVENTLHKVRDQISLSWSAASRNDFTLQLPKLHLETFAMEGLK

SEQ ID NO: 7220 - protein, 85 aa, Homo sapiens
GGPEVVACQAMIKSFMDVYQLASTRIMTLEKEMTSHRSHIAALKSELHTACLRENASLQSIGSRDHSNLSIPSRAPLPADTTGIG

SEQ ID NO: 7221 - protein, 84 aa, Homo sapiens
LRENASLQSIGSRDHSNLSIPSRAPLPADTTGIGDFLPLKAELDTTYTFLKETFINTVPHALTSSHSSPVTMSANANRPTQIGL

SEQ ID NO: 7222 - protein, 85 aa, Homo sapiens
WAKKEKLEITTKHNAELASYESQIAKLRSEVEKGEALRQSLEYDLAVARKEAGLGRRAAEERLAEAHRIQEKLCAQNSELQAKTN

SEQ ID NO: 7223 - protein, 85 aa, Homo sapiens
ETEKAFQTSQQKWKEECRRFEHDLEERDNMIQNCNREYDLLMKEKSRLEKTLQEALEKHQREKNEMESHIRETALEEFRLQEEQW

SEQ ID NO: 7224 - protein, 85 aa, Homo sapiens
EAERRELQFIVQEQDTAVQNMHKKVEKLETEHMDCSDLLRRQTSELEFSTQREERLRKEFEATTLRVRKLEENIEAERAAHLESK

SEQ ID NO: 7225 - protein, 85 aa, Homo sapiens
FNSEIIQLRIRDLEGALQVEKASQAEAVADLEIIKNEFKEVESAYEREKHNAQESFAKLNLLEKEYFSKNKKLNEDIEEQKKVII

SEQ ID NO: 7226 - protein, 85 aa, Homo sapiens
DLSKRLQYNEKSCSELQEELVMAKKHQAFLVETCENNVKELESILDSFTVSGQWTSGIHKDKDKPPSFSVVLERLRRTLTDYQNK

SEQ ID NO: 7227 - protein, 85 aa, Homo sapiens
MEDASNEEKACNELDSTKQKIDSHTKNIKELQDKLADVNKELSHLHTKCADREALISTLKVELQNVLHCWEKEKAQAAQSESELQ

SEQ ID NO: 7228 - protein, 85 aa, Homo sapiens
KLSQAFHKDAEEKLTFLHTLYQHLVAGCVLIKQPEGMLDKFSWSELCAVLQENVDALIADLNRANEKIRHLEYICKNKSDTMREL

SEQ ID NO: 7229 - protein, 85 aa, Homo sapiens
QQTQEDTFTKVAEQIKAQESCWHRQKKELELQYSELFLEVQKRAQKFQEIAEKNMEKLNHIEKSHEQLVLENSHFKKLLSQTQRE

SEQ ID NO: 7230 - protein, 85 aa, Homo sapiens
QMSLLAACALMAGALYPLYSRSCALSTQRDFLQEQVNTFELFKLEIRTLAQALSTVEEKKQEEAKMKKKTFKGLIRIFRKGVIAV

SEQ ID NO: 7231 - protein, 85 aa, Homo sapiens
MAANRLKILGQSCASLFTWMESFKEGIGMLVCTGEPQDKHKFPKHQKEQLRCLQALSWLTSSDLLAAIISSMAELQDVIGKADPN

SEQ ID NO: 7232 - protein, 85 aa, Homo sapiens
SRICGHLLIGAAKNSFAKLMDKISLVMECIPLHSSRSITYVEKDSLVQRLAHGLHKVNTLALKYGLRGHVPITKSTASLQKQILG

SEQ ID NO: 7233 - protein, 85 aa, Homo sapiens
FTQRLHAAEVERRSLRLEVTEFKRSVNEMKKELDKAQGLQMQLNEFKQSKLITHEKFESACEELNNALLREEQAQMLLNEQAQQL

SEQ ID NO: 7234 - protein, 85 aa, Homo sapiens
QELNYKLELHSSEEADKNQTLGEAVKSLSEAKMELRRKDQSLRQLNRHLTQLEQDKRRLEENIHDAESALRMAAKDKECVANHMR

SEQ ID NO: 7235 - protein, 85 aa, Homo sapiens
AVENTLHKVRDQISLSWSAASRNDFTLQLPKLHLETFAMEGLKGGPEVVACQAMIKSFMDVYQLASTRIMTLEKEMTSHRSHIAA

SEQ ID NO: 7236 - protein, 85 aa, Homo sapiens
MKSELHTACLRENASLQSIGSRDHSNLSIPSRAPLPADTTGIGDFLPLKAELDTTYTFLKETFINTVPHALTSSHSSPVTMSANA

SEQ ID NO: 7237 - protein, 85 aa, Homo sapiens
PHIDNDVKLDFKDVLLRPKRSTLKSRSEVDLTRSFSFRNSKQTYSGVPIIAANMDTVGTFEMAKVLCKHLAASSGTGSSDFEQLE

SEQ ID NO: 7238 - protein, 85 aa, Homo sapiens
QILEAIPQVKYICLDVANGYSEHFVEFVKDVRKRFPQHTIMAGNVVTGEMVEELILSGADIIKVGIGPGSVCTTRKKTGVGYPQL

SEQ ID NO: 7239 - protein, 85 aa, Homo sapiens
SAVMECADAAHGLKGHIISDGGCSCPGDVAKAFGAGADFVMLGGMLAGHSESGGELIERDGKKYKLFYGMSSEMAMKKYAGGVAE

SEQ ID NO: 7240 - protein, 85 aa, Homo sapiens
TYSGVPIIAANMDTVGTFEMAKVLCKHLAASSGTGSSDFEQLEQILEAIPQVKYICLDVANGYSEHFVEFVKDVRKRFPQHTIMA

SEQ ID NO: 7241 - protein, 85 aa, Homo sapiens
GNVVTGEMVEELILSGADIIKVGIGPGSVCTTRKKTGVGYPQLSAVMECADAAHGLKGHIISDGGCSCPGDVAKAFGAGADFVML

SEQ ID NO: 7242 - protein, 85 aa, Homo sapiens
GGMLAGHSESGGELIERDGKKYKLFYGMSSEMAMKKYAGGVAEYRASEGKTVEVPFKGDVEHTIRDILGGIRSTCTYVGAAKLKE

SEQ ID NO: 7243 - protein, 85 aa, Homo sapiens
SNVNLSVSDFWRVMMRVCWLVRQDSRHQRIRLPHLEAVVIGRGPETKITDKKCSRQQVQLKAECNKGYVKVKQVGVNPTSIDSVV

SEQ ID NO: 7244 - protein, 85 aa, Homo sapiens
IGKDQEVKLQPGQVLHMVNELYPYIVEFEEEAKNPGLETHRKRKRSGNSDSIERDAAQEAEAGTGLEPGSNSGQCSVPLKKGKDA

SEQ ID NO: 7245 - protein, 85 aa, Homo sapiens
PIKKVYKDEQVVVIKDKYPKARYHWLVLPWTSISSLKAVAREHLELLKHMHTVGEKVIVDFAGSSKLRFRLGYHAIPSMSHVHLH

SEQ ID NO: 7246 - protein, 85 aa, Homo sapiens
GPETKITDKKCSRQQVQLKAECNKGYVKVKQVGVNPTSIDSVVIGKDQEVKLQPGQVLHMVNELYPYIVEFEEEAKNPGLETHRK

SEQ ID NO: 7247 - protein, 85 aa, Homo sapiens
RKRSGNSDSIERDAAQEAEAGTGLEPGSNSGQCSVPLKKGKDAPIKKVYKDEQVVVIKDKYPKARYHWLVLPWTSISSLKAVARE

SEQ ID NO: 7248 - protein, 85 aa, Homo sapiens
HLELLKHMHTVGEKVIVDFAGSSKLRFRLGYHAIPSMSHVHLHVISQDFDSPCLKNKKHWNSFNTEYFLESQAVIEMVQEAGRVT

SEQ ID NO: 7249 - protein, 85 aa, Homo sapiens
AAMCLGLAHSLSRYRLKFSADKVDTMIVQAISLLDDLDKELNNYIMRCREWYGWHFPELGKIISDNLTYCKCLQKVGDRKNYASA

SEQ ID NO: 7250 - protein, 85 aa, Homo sapiens
KLSELLPEEVEAEVKAAAEISMGTEVSEEDICNILHLCTQVIEISEYRTQLYEYLQNRMMAIAPNVTVMVGELVGARLIAHADFS

SEQ ID NO: 7251 - protein, 84 aa, Homo sapiens
VKAAAEISMGTEVSEEDICNILHLCTQVIEISEYRTQLYEYLQNRMMAIAPNVTVMVGELVGARLIAHADFSNAGSQNRFGYPL

SEQ ID NO: 7252 - protein, 85 aa, Homo sapiens
NYIMRCREWYGWHFPELGKIISDNLTYCKCLQKVGDRKNYASAKLSELLPEEVEAEVKAAAEISMGTEVSEEDICNILHLCTQVI

SEQ ID NO: 7253 - protein, 85 aa, Homo sapiens
EAPSWSVLQRSGDEEKYPDAVYLSEGPSSCSMGIRSASRPGFELVIVWRIQIDEDGKVFPKLDLLTKVPQRALELDKNRAIETAP

SEQ ID NO: 7254 - protein, 84 aa, Homo sapiens
SMGIRSASRPGFELVIVWRIQIDEDGKVFPKLDLLTKVPQRALELDKNRAIETAPLSFRTLVGLLGIEAALESLIKSLCAEENN

SEQ ID NO: 7255 - protein, 85 aa, Homo sapiens
ASRKTKKKEGGALRAQRASSNVFSNFEQTQIQEFKEAFTLMDQNRDGFIDKEDLKDTYASLGKTNVKDDELDAMLKEASGPINFT

SEQ ID NO: 7256 - protein, 85 aa, Homo sapiens
MFLNLFGEKLSGTDAEETILNAFKMLDPDGKGKINKEYIKRLLMSQADKMTAEEVDQMFQFASIDVAGNLDYKALSYVITHGEEK

SEQ ID NO: 7257 - protein, 84 aa, Homo sapiens
NLFGEKLSGTDAEETILNAFKMLDPDGKGKINKEYIKRLLMSQADKMTAEEVDQMFQFASIDVAGNLDYKALSYVITHGEEKEE

SEQ ID NO: 7258 - protein, 85 aa, Homo sapiens
QNRDGFIDKEDLKDTYASLGKTNVKDDELDAMLKEASGPINFTMFLNLFGEKLSGTDAEETILNAFKMLDPDGKGKINKEYIKRL

SEQ ID NO: 7259 - protein, 84 aa, Homo sapiens
QVRELATLLHMKDLEIQDYQESGATLIRDRLKTEPFEENSFLEQFMIELKDIPIKTGDPAYWPRTLHAASVSFYHETARGMQHW

SEQ ID NO: 7260 - protein, 85 aa, Homo sapiens
SLVSQHLIRPLMGMSLALQCQVRELATLLHMKDLEIQDYQESGATLIRDRLKTEPFEENSFLEQFMIELKDIPIKTGDPAYWPRT

SEQ ID NO: 7261 - protein, 85 aa, Homo sapiens
TRGNQRELARQKNMKKQSDSVKGKRRDDGLSAAARKQRVGVQQPNAELSPIHFHLILCALHPPASCPFCPLVPPSAPSSLPPGTR

SEQ ID NO: 7262 - protein, 85 aa, Homo sapiens
QPNAELSPIHFHLILCALHPPASCPFCPLVPPSAPSSLPPGTRRSCSRSRKRQTRRRRNPSSFVASCPTLLPFACVPGASPTTLA

SEQ ID NO: 7263 - protein, 85 aa, Homo sapiens
RSGKASCTLETVWEDKHKYEEAERRFYEHEATQAAASAQQLPAEGPAMNGPGQDDPEDADEAEAPDGGSRRDPRKSQDSRKPLQK

SEQ ID NO: 7264 - protein, 85 aa, Homo sapiens
KRKRSPKSGLGPADLALLGLSAERVWLDKSLFDQAESSYRQKLADVAAQAAWPPALAPWGLCTHGNQVACHHVTWGIWVNKSSFD

SEQ ID NO: 7265 - protein, 85 aa, Homo sapiens
QAERAFVEWSQALLLAPDGSRRQGTPNTGQQVAVPDLAHQPSPPVNGQPPLGSLQALVREVWLEKPRYDAAERGFYEALFDGHPP

SEQ ID NO: 7266 - protein, 85 aa, Homo sapiens
GKVRLQERAGLAEGARRGRRDRRGRNILGNKRAGLRRADGEAPSALPYCYFLQKDAEAPWLSKPAYDSAECRHHAAEALRVAWCL

SEQ ID NO: 7267 - protein, 85 aa, Homo sapiens
EAASLSHRPGPRSGLSVSSLRPNRKMATNFLAHEKIWFDKFKYDDAERRFYEQMNGPVAGASRQENGASVILRDIARARENIQKS

SEQ ID NO: 7268 - protein, 85 aa, Homo sapiens
MAGSSGPGASSGTSGDHGELVVRIASLEVENQSLRGVVQELQQAISKLEARLNVLEKSSPGHRATAPQTQHVSPMRQVEPPAKKP

SEQ ID NO: 7269 - protein, 85 aa, Homo sapiens
ATPAEDDEDDDIDLFGSDNEEEDKEAAQLREERLRQYAEKKAKKPALVAKSSILLDVKPWDDETDMAQLEACVRSIQLDGLVWGA

SEQ ID NO: 7270 - protein, 85 aa, Homo sapiens
AEGPAMNGPGQDDPEDADEAEAPDGGSRRDPRKSQDSRKPLQKKRKRSPKSGLGPADLALLGLSAERVWLDKSLFDQAESSYRQK

SEQ ID NO: 7271 - protein, 85 aa, Homo sapiens
MADVAAQAAWPPALAPWGLCTHGNQVACHHVTWGIWVNKSSFDQAERAFVEWSQALLLAPDGSRRQGTPNTGQQVAVPDLAHQPS

SEQ ID NO: 7272 - protein, 85 aa, Homo sapiens
PPVNGQPPLGSLQALVREVWLEKPRYDAAERGFYEALFDGHPPGKVRLQERAGLAEGARRGRRDRRGRNILGNKRAGLRRADGEA

SEQ ID NO: 7273 - protein, 85 aa, Homo sapiens
PSALPYCYFLQKDAEAPWLSKPAYDSAECRHHAAEALRVAWCLEAASLSHRPGPRSGLSVSSLRPNRKMATNFLAHEKIWFDKFK

SEQ ID NO: 7274 - protein, 85 aa, Homo sapiens
YDDAERRFYEQMNGPVAGASRQENGASVILRDIARARENIQKSLAGSSGPGASSGTSGDHGELVVRIASLEVENQSLRGVVQELQ

SEQ ID NO: 7275 - protein, 85 aa, Homo sapiens
QAISKLEARLNVLEKSSPGHRATAPQTQHVSPMRQVEPPAKKPATPAEDDEDDDIDLFGSDNEEEDKEAAQLREERLRQYAEKKA

SEQ ID NO: 7276 - protein, 85 aa, Homo sapiens
KKPALVAKSSILLDVKPWDDETDMAQLEACVRSIQLDGLVWGASKLVPVGYGIRKLQIQCVVEDDKVGTDLLEEEITKFEEHVQS

SEQ ID NO: 7277 - protein, 85 aa, Homo sapiens
KERHTPIERVPHLGFKQINLWKIYKAVEKLGAYELVTGRRLWKNVYDELGGSPGSTSAATCTRRHYERLVLPYVRHLKGEDDKPL

SEQ ID NO: 7278 - protein, 85 aa, Homo sapiens
PTSKPRKQYKMAKENRGDDGATERPKKAKEERRMDQMMPGKTKADAADPAPLPSQEPPRNSTEQQGLASGSSVSFVGASGCPEAY

SEQ ID NO: 7279 - protein, 85 aa, Homo sapiens
KRLLSSFYCKGTHGIMSPLAKKKLLAQVSKVEALQCQEEGCRHGAEPQASPAVHLPESPQSPKGLTENSRHRLTPQEGLQAPGGS

SEQ ID NO: 7280 - protein, 85 aa, Homo sapiens
LREEAQAGPCPAAPIFKGCFYTHPTEVLKPVSQHPRDFFSRLKDGVLLGPPGKEGLSVKEPQLVWGGDANRPSAFHKGGSRKGIL

SEQ ID NO: 7281 - protein, 85 aa, Homo sapiens
YPKPKACWVSPMAKVPAESPTLPPTFPSSPGLGSKRSLEEEGAAHSGKRLRAVSPFLKEADAKKCGAKPAGSGLVSCLLGPALGP

SEQ ID NO: 7282 - protein, 85 aa, Homo sapiens
VPPEAYRGTMLHCPLNFTGTPGPLKGQAALPFSPLVIPAFPAHFLATAGPSPMAAGLMHFPPTSFDSALRHRLCPASSAWHAPPV

SEQ ID NO: 7283 - protein, 85 aa, Homo sapiens
KNVYDELGGSPGSTSAATCTRRHYERLVLPYVRHLKGEDDKPLPTSKPRKQYKMAKENRGDDGATERPKKAKEERRMDQMMPGKT

SEQ ID NO: 7284 - protein, 85 aa, Homo sapiens
KADAADPAPLPSQEPPRNSTEQQGLASGSSVSFVGASGCPEAYKRLLSSFYCKGTHGIMSPLAKKKLLAQVSKVEALQCQEEGCR

SEQ ID NO: 7285 - protein, 85 aa, Homo sapiens
HGAEPQASPAVHLPESPQSPKGLTENSRHRLTPQEGLQAPGGSLREEAQAGPCPAAPIFKGCFYTHPTEVLKPVSQHPRDFFSRL

SEQ ID NO: 7286 - protein, 85 aa, Homo sapiens
KDGVLLGPPGKEGLSVKEPQLVWGGDANRPSAFHKGGSRKGILYPKPKACWVSPMAKVPAESPTLPPTFPSSPGLGSKRSLEEEG

SEQ ID NO: 7287 - protein, 85 aa, Homo sapiens
AAHSGKRLRAVSPFLKEADAKKCGAKPAGSGLVSCLLGPALGPVPPEAYRGTMLHCPLNFTGTPGPLKGQAALPFSPLVIPAFPA

SEQ ID NO: 7288 - protein, 85 aa, Homo sapiens
DGDQIVVEIQEAVFVSNIVDSDITVHNFVPDDPDSVVIQDVVEDVVIEEDVQCSDILEEADVSENVIIPEQVLDSDVTEEVSLPH

SEQ ID NO: 7289 - protein, 85 aa, Homo sapiens
CTVPDDVLASDITSTSMSMPEHVLTSESMHVCDIGHVEHMVHDSVVEAEIITDPLTSDIVSEEVLVADCAPEAVIDASGISVDQQ

SEQ ID NO: 7290 - protein, 85 aa, Homo sapiens
DNDKASCEDYLMISLDDAGKIEHDGSTGVTIDAESEMDPCKVDSTCPEVIKVYIFKADPGEDDLGGTVDIVESEPENDHGVELLD

SEQ ID NO: 7291 - protein, 85 aa, Homo sapiens
QNSSIRVPREKMVYMTVNDSQQEDEDLSNNSDGIENRNGTASALLHIDESAGLGRLAKQKPKKKRRPDSRQYQTAIIIGPDGHPL

SEQ ID NO: 7292 - protein, 85 aa, Homo sapiens
TVYPCMICGKKFKSRGFLKRHMKNHPEHLAKKKYHCTDCDYTTNKKISLHNHLESHKLTSKAEKAIECDECGKHFSHAGALFTHK

SEQ ID NO: 7293 - protein, 85 aa, Homo sapiens
MVHKEKGANKMHKCKFCEYETAEQGLLNRHLLAVHSKNFPHICVECGKGFRHPSELRKHMRIHTGEKPYQCQYCEYRSADSSNLK

SEQ ID NO: 7294 - protein, 85 aa, Homo sapiens
THIKTKHSKEMPFKCDICLLTFSDTKEVQQHTLVHQESKTHQCLHCDHKSSNSSDLKRHVISVHTKDYPHKCEMCEKGFHRPSEL

SEQ ID NO: 7295 - protein, 85 aa, Homo sapiens
KKHVAVHKGKKMHQCRHCDFKIADPFVLSRHILSVHTKDLPFRCKRCRKGFRQQNELKKHMKTHSGRKVYQCEYCEYSTTDASGF

SEQ ID NO: 7296 - protein, 85 aa, Homo sapiens
EDVVIEEDVQCSDILEEADVSENVIIPEQVLDSDVTEEVSLPHCTVPDDVLASDITSTSMSMPEHVLTSESMHVCDIGHVEHMVH

SEQ ID NO: 7297 - protein, 85 aa, Homo sapiens
DSVVEAEIITDPLTSDIVSEEVLVADCAPEAVIDASGISVDQQDNDKASCEDYLMISLDDAGKIEHDGSTGVTIDAESEMDPCKV

SEQ ID NO: 7298 - protein, 85 aa, Homo sapiens
DSTCPEVIKVYIFKADPGEDDLGGTVDIVESEPENDHGVELLDQNSSIRVPREKMVYMTVNDSQQEDEDLSNNSDGIENRNGTAS

SEQ ID NO: 7299 - protein, 85 aa, Homo sapiens
ALLHIDESAGLGRLAKQKPKKKRRPDSRQYQTAIIIGPDGHPLTVYPCMICGKKFKSRGFLKRHMKNHPEHLAKKKYHCTDCDYT

SEQ ID NO: 7300 - protein, 85 aa, Homo sapiens
TNKKISLHNHLESHKLTSKAEKAIECDECGKHFSHAGALFTHKMVHKEKGANKMHKCKFCEYETAEQGLLNRHLLAVHSKNFPHI

SEQ ID NO: 7301 - protein, 85 aa, Homo sapiens
CVECGKGFRHPSELRKHMRIHTGEKPYQCQYCEYRSADSSNLKTHIKTKHSKEMPFKCDICLLTFSDTKEVQQHTLVHQESKTHQ

SEQ ID NO: 7302 - protein, 85 aa, Homo sapiens
CLHCDHKSSNSSDLKRHVISVHTKDYPHKCEMCEKGFHRPSELKKHVAVHKGKKMHQCRHCDFKIADPFVLSRHILSVHTKDLPF

SEQ ID NO: 7303 - protein, 85 aa, Homo sapiens
RCKRCRKGFRQQNELKKHMKTHSGRKVYQCEYCEYSTTDASGFKRHVISIHTKDYPHRCEYCKKGFRRPSEKNQHIMRHHKEVGL

SEQ ID NO: 7304 - protein, 85 aa, Homo sapiens
QSSSYGQQSSFRQDHPSSMGVYGQESGGFSGPGENRSMSGPDNRGRGRGGFDRGGMSRGGRGGGRGGMGSAGERGGFNKPGGPMD

SEQ ID NO: 7305 - protein, 85 aa, Homo sapiens
EGPDLDLGPPVDPDEDSDNSAIYVQGLNDSVTLDDLADFFKQCGVVKMNKRTGQPMIHIYLDKETGKPKGDATVSYEDPPTAKAA

SEQ ID NO: 7306 - protein, 85 aa, Homo sapiens
VEWFDGKDFQGSKLKVSLARKKPPMNSMRGGLPPREGRGMPPPLRGGPGGPGGPGGPMGRMGGRGGDRGGFPPRGPRGSRGNPSG

SEQ ID NO: 7307 - protein, 85 aa, Homo sapiens
GGNVQHRAGDWQCPNPGCGNQNFAWRTECNQCKAPKPEGFLPPPFPPPGGDRGRGGPGGMRGGRGGLMDRGGPGGMFRGGRGGDR

SEQ ID NO: 7308 - protein, 85 aa, Homo sapiens
NRGRGRGGFDRGGMSRGGRGGGRGGMGSAGERGGFNKPGGPMDEGPDLDLGPPVDPDEDSDNSAIYVQGLNDSVTLDDLADFFKQ

SEQ ID NO: 7309 - protein, 85 aa, Homo sapiens
CGVVKMNKRTGQPMIHIYLDKETGKPKGDATVSYEDPPTAKAAVEWFDGKDFQGSKLKVSLARKKPPMNSMRGGLPPREGRGMPP

SEQ ID NO: 7310 - protein, 85 aa, Homo sapiens
PLRGGPGGPGGPGGPMGRMGGRGGDRGGFPPRGPRGSRGNPSGGGNVQHRAGDWQCPNPGCGNQNFAWRTECNQCKAPKPEGFLP

SEQ ID NO: 7311 - protein, 85 aa, Homo sapiens
PPFPPPGGDRGRGGPGGMRGGRGGLMDRGGPGGMFRGGRGGDRGGFRGGRGMDRGGFGGGRRGGPGGPPGPLMEQMGGRRGGRGG

SEQ ID NO: 7312 - protein, 85 aa, Homo sapiens
MQGEAHPSASLIDRTIKMRKETEARKVVLAWGLLNVSMAGMIYTEMTGKLISSYYNVTYWPLWYIELALASLFSLNALFDFWRYF

SEQ ID NO: 7313 - protein, 85 aa, Homo sapiens
KYTVAPTSLVVSPGQQTLLGLKTAVVQTTPPHDLAATQIPPAPPSPSIQGQSVLSYSPSRSPSTSPKFTTSCMTGYSPQLQGLSS

SEQ ID NO: 7314 - protein, 85 aa, Homo sapiens
GGSGSYSPGVTYSPVSGYNKLASFSPSPPSPYPTTVGPVESSGLRSRYRSSPTVYNSPTDKEDYMTDLRTLDTFLRSEEEKQHRV

SEQ ID NO: 7315 - protein, 85 aa, Homo sapiens
KLGSPDSTSPSSSPTFWNYSRSMGDYAQTLKKFQYQLACRSQAPCANKDEADLSSKQAAEEVWARVAMNRQLLDHMDSWTAKFRN

SEQ ID NO: 7316 - protein, 85 aa, Homo sapiens
WINETILVPLVQEIESVSTQMRRMGCPELQIGEASITSLKQAALVKAPLIPTLNTIVQYLDLTPNQEYLFERIKELSQGGCMSSF

SEQ ID NO: 7317 - protein, 85 aa, Homo sapiens
RWNRGGDFKGRKWDTDLPTDSAIIMHVFCTYLDSRLPPHPKYPDGKTFTSQHFVQTPNKPDVTNENVFCIYQSAINPPHYELIYQ

SEQ ID NO: 7318 - protein, 84 aa, Homo sapiens
HFVQTPNKPDVTNENVFCIYQSAINPPHYELIYQRHVYNLPKGRNNMFHTLLMFLYIIKTKESGMLGRVNLGLSGVNILWIFGE

SEQ ID NO: 7319 - protein, 85 aa, Homo sapiens
YTEMTGKLISSYYNVTYWPLWYIELALASLFSLNALFDFWRYFKYTVAPTSLVVSPGQQTLLGLKTAVVQTTPPHDLAATQIPPA

SEQ ID NO: 7320 - protein, 85 aa, Homo sapiens
PPSPSIQGQSVLSYSPSRSPSTSPKFTTSCMTGYSPQLQGLSSGGSGSYSPGVTYSPVSGYNKLASFSPSPPSPYPTTVGPVESS

SEQ ID NO: 7321 - protein, 85 aa, Homo sapiens
GLRSRYRSSPTVYNSPTDKEDYMTDLRTLDTFLRSEEEKQHRVKLGSPDSTSPSSSPTFWNYSRSMGDYAQTLKKFQYQLACRSQ

SEQ ID NO: 7322 - protein, 85 aa, Homo sapiens
APCANKDEADLSSKQAAEEVWARVAMNRQLLDHMDSWTAKFRNWINETILVPLVQEIESVSTQMRRMGCPELQIGEASITSLKQA

SEQ ID NO: 7323 - protein, 85 aa, Homo sapiens
ALVKAPLIPTLNTIVQYLDLTPNQEYLFERIKELSQGGCMSSFRWNRGGDFKGRKWDTDLPTDSAIIMHVFCTYLDSRLPPHPKY

SEQ ID NO: 7324 - protein, 85 aa, Homo sapiens
PDGKTFTSQHFVQTPNKPDVTNENVFCIYQSAINPPHYELIYQRHVYNLPKGRNNMFHTLLMFLYIIKTKESGMLGRVNLGLSGV

SEQ ID NO: 7325 - protein, 84 aa, Homo sapiens
QGAGDPHTSNSASLQGIDSQCVNQPEQLVSSAPTLSAPEKESTALCRDLSCQRSRGRSQGVSSVNLLWPQLLRMDLENSFQASP

SEQ ID NO: 7326 - protein, 85 aa, Homo sapiens
MQDLYMAVTTQEVQVGQKHQGAGDPHTSNSASLQGIDSQCVNQPEQLVSSAPTLSAPEKESTALCRDLSCQRSRGRSQGVSSVNL

SEQ ID NO: 7327 - protein, 85 aa, Homo sapiens
HVRSLRAAAPHSFVALWAPLFLLRSALADFSLDNEVHSSFIHRRLRSQERREMQREILSILGLPHRPRPHLQGKHNSAPMFMLDL

SEQ ID NO: 7328 - protein, 85 aa, Homo sapiens
YNAMAVEEGGGPGGQGFSYPYKAVFSTQGPPLASLQDSHFLTDADMVMSFVNLVEHDKEFFHPRYHHREFRFDLSKIPEGEAVTA

SEQ ID NO: 7329 - protein, 85 aa, Homo sapiens
AEFRIYKDYIRERFDNETFRISVYQVLQEHLGRESDLFLLDSRTLWASEEGWLVFDITATSNHWVVNPRHNLGLQLSVETLDGQS

SEQ ID NO: 7330 - protein, 85 aa, Homo sapiens
INPKLAGLIGRHGPQNKQPFMVAFFKATEVHFRSIRSTGSKQRSQNRSKTPKNQEALRMANVAENSSSDQRQACKKHELYVSFRD

SEQ ID NO: 7331 - protein, 84 aa, Homo sapiens
ACKKHELYVSFRDLGWQDWIIAPEGYAAYYCEGECAFPLNSYMNATNHAIVQTLVGVTPSWGVVTWAGQAAGPPDPAASKLGPE

SEQ ID NO: 7332 - protein, 85 aa, Homo sapiens
RRLRSQERREMQREILSILGLPHRPRPHLQGKHNSAPMFMLDLYNAMAVEEGGGPGGQGFSYPYKAVFSTQGPPLASLQDSHFLT

SEQ ID NO: 7333 - protein, 85 aa, Homo sapiens
DADMVMSFVNLVEHDKEFFHPRYHHREFRFDLSKIPEGEAVTAAEFRIYKDYIRERFDNETFRISVYQVLQEHLGRESDLFLLDS

SEQ ID NO: 7334 - protein, 85 aa, Homo sapiens
RTLWASEEGWLVFDITATSNHWVVNPRHNLGLQLSVETLDGQSINPKLAGLIGRHGPQNKQPFMVAFFKATEVHFRSIRSTGSKQ

SEQ ID NO: 7335 - protein, 85 aa, Homo sapiens
RSQNRSKTPKNQEALRMANVAENSSSDQRQACKKHELYVSFRDLGWQDWIIAPEGYAAYYCEGECAFPLNSYMNATNHAIVQTLV

SEQ ID NO: 7336 - protein, 85 aa, Homo sapiens
FRRVRINFSKPEAAARARIELHETDFNGQKLKLYFAQSYLLPPQPVKQFLISPPASPPVGWKQSEDAMPVINYDLLCAVSKLGPG

SEQ ID NO: 7337 - protein, 85 aa, Homo sapiens
DLPTSLFACSVHEAVFEAREQKERFEALFTIYDDQVTFQLFKSFRRVRINFSKPEAAARARIELHETDFNGQKLKLYFAQSYLLP

SEQ ID NO: 7338 - protein, 85 aa, Homo sapiens
PQPVKQFLISPPASPPVGWKQSEDAMPVINYDLLCAVSKLGPGEKYELHAGTESTPSVVVHVCESETEEEEETKNPKQKIAQTRR

SEQ ID NO: 7339 - protein, 85 aa, Homo sapiens
IIAARALRKVFLSIKGIYYQAEHPTDVDYRVMATFTEFYTTLLGFVNFRLYQLLNLHYPPKLEGQAQAEAKAGEGTYALDSESCM

SEQ ID NO: 7340 - protein, 85 aa, Homo sapiens
EKLAALSASLARVVVPATEEEAEVDEFPTDGEMSAQEEDRRKELEAQEKHKKLFEGLKFFLNREVPREALAFIIRSFGGEVSWDK

SEQ ID NO: 7341 - protein, 85 aa, Homo sapiens
SLCIGATYDVTDSRITHQIVDRPGQQTSVIGRCYVQPQWVFDSVNARLLLPVAEYFSGVQLPPHLSPFVTEKEGDYVPPEKLKLL

SEQ ID NO: 7342 - protein, 85 aa, Homo sapiens
ALQRGEDPGNLNESEEEEEEDDNNEGDGDEEGENEEEEEDAEAGSEKEEEARLAALEEQRMEGKKPRVMAGTLKLEDKQRLAQEE

SEQ ID NO: 7343 - protein, 85 aa, Homo sapiens
DALRDLDDALSMCFLFSTFPRTGKCHVQTIQLCRRLTVEFMHYIIAARALRKVFLSIKGIYYQAEHPTDVDYRVMATFTEFYTTL

SEQ ID NO: 7344 - protein, 85 aa, Homo sapiens
MGFVNFRLYQLLNLHYPPKLEGQAQAEAKAGEGTYALDSESCMEKLAALSASLARVVVPATEEEAEVDEFPTDGEMSAQEEDRRK

SEQ ID NO: 7345 - protein, 85 aa, Homo sapiens
ELEAQEKHKKLFEGLKFFLNREVPREALAFIIRSFGGEVSWDKSLCIGATYDVTDSRITHQIVDRPGQQTSVIGRCYVQPQWVFD

SEQ ID NO: 7346 - protein, 85 aa, Homo sapiens
SVNARLLLPVAEYFSGVQLPPHLSPFVTEKEGDYVPPEKLKLLALQRGEDPGNLNESEEEEEEDDNNEGDGDEEGENEEEEEDAE

SEQ ID NO: 7347 - protein, 85 aa, Homo sapiens
AGSEKEEEARLAALEEQRMEGKKPRVMAGTLKLEDKQRLAQEEESEAKRLAIMMMKKREKYLYQKIMFGKRRKIREANKLAEKRK

SEQ ID NO: 7348 - protein, 85 aa, Homo sapiens
NQRDQPFMTIQRNDSSDNLVFHMKNEMRNIKYKPVDYQQLRALTEAKKLASASAKLKIRKAMLTSKLSKEQTLIKQHKQVWWQEY

SEQ ID NO: 7349 - protein, 85 aa, Homo sapiens
QRLNEVRCKMESEIKSLLNEENIGNECLCDLTNFEQELSEQQCTYLKNVINPIQQLRADLKYRQHHTLQHSHPHIEFNSMKVLEE

SEQ ID NO: 7350 - protein, 85 aa, Homo sapiens
VDFVKKQLKTVFERLRLEQQRIENDLSDWSIKILDHSLEEKTNPLSELPIELESLECPYPDLKSSILSEFYKFTQKYQKKLQDFN

SEQ ID NO: 7351 - protein, 85 aa, Homo sapiens
MQLEDIYRNCQLSEEDHWIYQAILDQYPGDLFGRRTLYLDMLQRYFPHKSRHDLVEHEKYCDQYRFAIEQQNILISNWNKNKKDF

SEQ ID NO: 7352 - protein, 85 aa, Homo sapiens
IQKAVLTLTEACATHEMESMLAKDKKKQQELCADLKAKVRQWRAHQEEVARLEMEISARRREKEEEKEKLWKKKELLQRAEKKKK

SEQ ID NO: 7353 - protein, 85 aa, Homo sapiens
IKKYWAKKKQKWQEMEMRDLQRLEELKKLIAEQSLKDRERVKYRQELLERRLMEKKEVALQEAHEDKERARRLEALRKQVAVVAQ

SEQ ID NO: 7354 - protein, 85 aa, Homo sapiens
FDPVRMMSDTMASKARMGIEIEEEFILQKPLFTLNTYNEQQIISDPRLRFELALREAGLHRTLYAKEILPKISPQKPPRKDMEST

SEQ ID NO: 7355 - protein, 85 aa, Homo sapiens
LTEAKKLASASAKLKIRKAMLTSKLSKEQTLIKQHKQVWWQEYQRLNEVRCKMESEIKSLLNEENIGNECLCDLTNFEQELSEQQ

SEQ ID NO: 7356 - protein, 85 aa, Homo sapiens
CTYLKNVINPIQQLRADLKYRQHHTLQHSHPHIEFNSMKVLEEVDFVKKQLKTVFERLRLEQQRIENDLSDWSIKILDHSLEEKT

SEQ ID NO: 7357 - protein, 85 aa, Homo sapiens
NPLSELPIELESLECPYPDLKSSILSEFYKFTQKYQKKLQDFNLQLEDIYRNCQLSEEDHWIYQAILDQYPGDLFGRRTLYLDML

SEQ ID NO: 7358 - protein, 85 aa, Homo sapiens
QRYFPHKSRHDLVEHEKYCDQYRFAIEQQNILISNWNKNKKDFIQKAVLTLTEACATHEMESMLAKDKKKQQELCADLKAKVRQW

SEQ ID NO: 7359 - protein, 85 aa, Homo sapiens
RAHQEEVARLEMEISARRREKEEEKEKLWKKKELLQRAEKKKKIKKYWAKKKQKWQEMEMRDLQRLEELKKLIAEQSLKDRERVK

SEQ ID NO: 7360 - protein, 85 aa, Homo sapiens
YRQELLERRLMEKKEVALQEAHEDKERARRLEALRKQVAVVAQFDPVRMMSDTMASKARMGIEIEEEFILQKPLFTLNTYNEQQI

SEQ ID NO: 7361 - protein, 85 aa, Homo sapiens
VLDIIYQPQAIFRVRAVTRCTSSLEGHSEAVISVAFSPTGKYLASGSGDTTVRFWDLSTETPHFTCKGHRHWVLSISWSPDGRKL

SEQ ID NO: 7362 - protein, 85 aa, Homo sapiens
ASGCKNGQILLWDPSTGKQVGRTLAGHSKWITGLSWEPLHANPECRYVASSSKDGSVRIWDTTAGRCERILTGHTQSVTCLRWGG

SEQ ID NO: 7363 - protein, 85 aa, Homo sapiens
DGLLYSASQDRTIKVWRAHDGVLCRTLQGHGHWVNTMALSTDYALRTGAFEPAEASVNPQDLQGSLQELKERALSRYNLVRGQGP

SEQ ID NO: 7364 - protein, 85 aa, Homo sapiens
ERLVSGSDDFTLFLWSPAEDKKPLTRMTGHQALINQVLFSPDSRIVASASFDKSIKLWDGRTGKYLASLRGHVAAVYQIAWSADS

SEQ ID NO: 7365 - protein, 85 aa, Homo sapiens
MASGSGDTTVRFWDLSTETPHFTCKGHRHWVLSISWSPDGRKLASGCKNGQILLWDPSTGKQVGRTLAGHSKWITGLSWEPLHAN

SEQ ID NO: 7366 - protein, 85 aa, Homo sapiens
QPNAILEKVFISITKYPDKKRLEGLSKQLDWNVRKIQCWFRHRRNQDKPPTLTKFCESIHLGSGTSDSAGITIHFSLFQVGFITI

SEQ ID NO: 7367 - protein, 84 aa, Homo sapiens
SKQLDWNVRKIQCWFRHRRNQDKPPTLTKFCESIHLGSGTSDSAGITIHFSLFQVGFITIISWNWPSIGPLCFLSLQTLKERTS

SEQ ID NO: 7368 - protein, 84 aa, Homo sapiens
RQVYTKCEGDEVEDLYELLKLVKGITRMTLLAEYDALNLQDFHMHLKVGSQAIVYRTPNELCTHSKFDKHTFPPFISEIAKCEV

SEQ ID NO: 7369 - protein, 85 aa, Homo sapiens
ELDSYMYQTVGHHAIDLYAEAMALPLYRRTIRGRSLDTRQVYTKCEGDEVEDLYELLKLVKGITRMTLLAEYDALNLQDFHMHLK

SEQ ID NO: 7370 - protein, 85 aa, Homo sapiens
IKHRQVQRRGRRSQMTTSFTDPAISMDLLRAVLQPSINEEIQTVFNKYMKFFQKAALNVRDNVGEEVDAEQLIQEACRSCLEQAK

SEQ ID NO: 7371 - protein, 85 aa, Homo sapiens
RDNVGEEVDAEQLIQEACRSCLEQAKLLFSDGEKVIPRLTHELPGIKRGRQAEEECAHRGSPLPKKRKGRPPGHILSSDRAAAGM

SEQ ID NO: 7372 - protein, 85 aa, Homo sapiens
TVFNKYMKFFQKAALNVRDNVGEEVDAEQLIQEACRSCLEQAKLLFSDGEKVIPRLTHELPGIKRGRQAEEECAHRGSPLPKKRK

SEQ ID NO: 7373 - protein, 85 aa, Homo sapiens
AQASPPRPERVLGASSPEARPAQEALLLPTGVFQVAEKMEKRTCALCPKDVEYNVLYFAQSENIAAHENCLLYSSGLVECEDQDP

SEQ ID NO: 7374 - protein, 85 aa, Homo sapiens
LNPDRSFDVESVKKEIQRGRKLKCKFCHKRGATVGCDLKNCNKNYHFFCAKKDDAVPQSDGVRGIYKLLCQQHAQFPIIAQSAKF

SEQ ID NO: 7375 - protein, 85 aa, Homo sapiens
SGVKRKRGRKKPLSGNHVQPPETMKCNTFIRQVKEEHGRHTDATVKVPFLKKCKEAGLLNYLLEEILDKVHSIPEKLMDETTSES

SEQ ID NO: 7376 - protein, 85 aa, Homo sapiens
TCALCPKDVEYNVLYFAQSENIAAHENCLLYSSGLVECEDQDPLNPDRSFDVESVKKEIQRGRKLKCKFCHKRGATVGCDLKNCN

SEQ ID NO: 7377 - protein, 85 aa, Homo sapiens
KNYHFFCAKKDDAVPQSDGVRGIYKLLCQQHAQFPIIAQSAKFSGVKRKRGRKKPLSGNHVQPPETMKCNTFIRQVKEEHGRHTD

SEQ ID NO: 7378 - protein, 85 aa, Homo sapiens
ATVKVPFLKKCKEAGLLNYLLEEILDKVHSIPEKLMDETTSESDYEEIGSALFDCRLFEDTFVNFQAAIEKKIHASQQRWQQLKE

SEQ ID NO: 7379 - protein, 85 aa, Homo sapiens
SRRKQGNPQHLSQRELITRKDEPSSYICTTCKQPFNSAWFLLQHAQNTHGFRIYLEPGPASSSLTPRLTIPPPLGPEAVAQSPLM

SEQ ID NO: 7380 - protein, 85 aa, Homo sapiens
NFLGDSNPFNLLRMTGPILRDHPGFGEGRLPGTPPLFSPPPRHHLDPHRLSAEEMGLVAQHPSAFDRVMRLNPMAIDSPAMDFSR

SEQ ID NO: 7381 - protein, 85 aa, Homo sapiens
RLRELAGNSSTPPPVSPGRGNPMHRLLNPFQPSPKSPFLSTPPLPPMPPGGTPPPQPPAKSKSCEFCGKTFKFQSNLIVHRRSHT

SEQ ID NO: 7382 - protein, 85 aa, Homo sapiens
GEKPYKCQLCDHACSQASKLKRHMKTHMHKAGSLAGRSDDGLSAASSPEPGTSELAGEGLKAADGDFRHHESDPSLGHEPEEEDE

SEQ ID NO: 7383 - protein, 85 aa, Homo sapiens
EEEEEEEELLLENESRPESSFSMDSELSRNRENGGGGVPGVPGAGGGAAKALADEKALVLGKVMENVGLGALPQYGELLADKQKR

SEQ ID NO: 7384 - protein, 85 aa, Homo sapiens
GAFLKRAAGGGDAGDDDDAGGCGDAGAGGAVNGRGGGFAPGTEPFPGLFPRKPAPLPSPGLNSAAKRIKVEKDLELPPAALIPSE

SEQ ID NO: 7385 - protein, 85 aa, Homo sapiens
NVYSQWLVGYAASRHFMKDPFLGFTDARQSPFATSSEHSSENGSLRFSTPPGDLLDGGLSGRSGTASGGSTPHLGGPGPGRPSSK

SEQ ID NO: 7386 - protein, 85 aa, Homo sapiens
EGRRSDTCEYCGKVFKNCSNLTVHRRSHTGERPYKCELCNYACAQSSKLTRHMKTHGQIGKEVYRCDICQMPFSVYSTLEKHMKK

SEQ ID NO: 7387 - protein, 85 aa, Homo sapiens
QHAQNTHGFRIYLEPGPASSSLTPRLTIPPPLGPEAVAQSPLMNFLGDSNPFNLLRMTGPILRDHPGFGEGRLPGTPPLFSPPPR

SEQ ID NO: 7388 - protein, 85 aa, Homo sapiens
HHLDPHRLSAEEMGLVAQHPSAFDRVMRLNPMAIDSPAMDFSRRLRELAGNSSTPPPVSPGRGNPMHRLLNPFQPSPKSPFLSTP

SEQ ID NO: 7389 - protein, 85 aa, Homo sapiens
PLPPMPPGGTPPPQPPAKSKSCEFCGKTFKFQSNLIVHRRSHTGEKPYKCQLCDHACSQASKLKRHMKTHMHKAGSLAGRSDDGL

SEQ ID NO: 7390 - protein, 85 aa, Homo sapiens
SAASSPEPGTSELAGEGLKAADGDFRHHESDPSLGHEPEEEDEEEEEEEEELLLENESRPESSFSMDSELSRNRENGGGGVPGVP

SEQ ID NO: 7391 - protein, 85 aa, Homo sapiens
GAGGGAAKALADEKALVLGKVMENVGLGALPQYGELLADKQKRGAFLKRAAGGGDAGDDDDAGGCGDAGAGGAVNGRGGGFAPGT

SEQ ID NO: 7392 - protein, 85 aa, Homo sapiens
EPFPGLFPRKPAPLPSPGLNSAAKRIKVEKDLELPPAALIPSENVYSQWLVGYAASRHFMKDPFLGFTDARQSPFATSSEHSSEN

SEQ ID NO: 7393 - protein, 85 aa, Homo sapiens
GSLRFSTPPGDLLDGGLSGRSGTASGGSTPHLGGPGPGRPSSKEGRRSDTCEYCGKVFKNCSNLTVHRRSHTGERPYKCELCNYA

SEQ ID NO: 7394 - protein, 85 aa, Homo sapiens
YPDFLLKPDAVDKEYEFEVHEKTYFKNILNSIRFSIQLSVKKIRQEVDKWLLPPQALNAYYLPNKNQMVFPAGILQPTLYDPDFP

SEQ ID NO: 7395 - protein, 85 aa, Homo sapiens
QSLNYGGIGTIIGHELTHGYDDWGGQYDRSGNLLHWWTEASYSRFLRKAECIVRLYDNFTVYNQRVNGKHTLGENIADMGGLKLA

SEQ ID NO: 7396 - protein, 85 aa, Homo sapiens
YHAYQKWVREHGPEHPLPRLKYTHDQLFFIAFAQNWCIKRRSQSIYLQVLTDKHAPEHYRVLGSVSQFEEFGRAFHCPKDSPMNP

SEQ ID NO: 7397 - protein, 85 aa, Homo sapiens
IRQEVDKWLLPPQALNAYYLPNKNQMVFPAGILQPTLYDPDFPQSLNYGGIGTIIGHELTHGYDDWGGQYDRSGNLLHWWTEASY

SEQ ID NO: 7398 - protein, 85 aa, Homo sapiens
SRFLRKAECIVRLYDNFTVYNQRVNGKHTLGENIADMGGLKLAYHAYQKWVREHGPEHPLPRLKYTHDQLFFIAFAQNWCIKRRS

SEQ ID NO: 7399 - protein, 85 aa, Homo sapiens
SSSFPTAVETFHLMGELSSLYVGLKESMKDLDEEQAGQTDLEKIQFLLAQMVKRTIPPELQEQLKTVKTLAKEVWQEKAKVERLQ

SEQ ID NO: 7400 - protein, 85 aa, Homo sapiens
RILEGEGNQEAGKELKAGELRLQLGVLRVTVADIEKELAELRESQDRGKAAMENSVSEASLYLQDQLDKLRMIIESMLTSSSTLL

SEQ ID NO: 7401 - protein, 85 aa, Homo sapiens
SMSMAPHKAHTLAPGQIDPEATCPACSLDVSHQVSTLVRRYEQLQDMVNSLAVSRPSKKAKLQRQDEELLGRVQSAILQVQGDCE

SEQ ID NO: 7402 - protein, 85 aa, Homo sapiens
KLNITTSNLIEDHRQKQKDIAMLYQGLEKLEKEKANREHLEMEIDVKADKSALATKVSRVQFDATTEQLNHMMQELVAKMSGQEQ

SEQ ID NO: 7403 - protein, 85 aa, Homo sapiens
DWQKMLDRLLTEMDNKAARHPPKRQLRDLKAQVPAAQAPRAQAAIPQQQWPAALSATERPDFGWQHLRKIDLPPRAVSPSRTQPT

SEQ ID NO: 7404 - protein, 84 aa, Homo sapiens
AIPQQQWPAALSATERPDFGWQHLRKIDLPPRAVSPSRTQPTRPAPPRWQTGGWRGTWTCLLGRGSRSPRGGRGPAPLSERRCK

SEQ ID NO: 7405 - protein, 85 aa, Homo sapiens
KIQFLLAQMVKRTIPPELQEQLKTVKTLAKEVWQEKAKVERLQRILEGEGNQEAGKELKAGELRLQLGVLRVTVADIEKELAELR

SEQ ID NO: 7406 - protein, 85 aa, Homo sapiens
ESQDRGKAAMENSVSEASLYLQDQLDKLRMIIESMLTSSSTLLSMSMAPHKAHTLAPGQIDPEATCPACSLDVSHQVSTLVRRYE

SEQ ID NO: 7407 - protein, 85 aa, Homo sapiens
QLQDMVNSLAVSRPSKKAKLQRQDEELLGRVQSAILQVQGDCEKLNITTSNLIEDHRQKQKDIAMLYQGLEKLEKEKANREHLEM

SEQ ID NO: 7408 - protein, 85 aa, Homo sapiens
EIDVKADKSALATKVSRVQFDATTEQLNHMMQELVAKMSGQEQDWQKMLDRLLTEMDNKAARHPPKRQLRDLKAQVPAAQAPRAQ

SEQ ID NO: 7409 - protein, 85 aa, Homo sapiens
AAIPQQQWPAALSATERPDFGWQHLRKIDLPPRAVSPSRTQPTRPAPPRWQTGGWRGTWTCLLGRGSRSPRGGRGPAPLSERRCK

SEQ ID NO: 7410 - protein, 85 aa, Homo sapiens
IDSKILERLLEELQKKKKEEEEARKATEEELRLEEENRRLLELMKVKAKEAEETDNEDEEEIEGDELEVHEEPEASHDTRGSWLP

SEQ ID NO: 7411 - protein, 85 aa, Homo sapiens
EEFEASEVPETEPEAVSEPIEETTVETEIPKGSKEGLEIEKLSETVVLPEFPEDSYPDVPEMEPFKEKIGSFIILWKQLEATISE

SEQ ID NO: 7412 - protein, 85 aa, Homo sapiens
AYIKILNLEIADRTPQELLQKVVETMEKPFQYTAWELTGEDYEEETEDYQTEAEVDEELEEEEEEEGEDKMKERKRHLGDTKHFC

SEQ ID NO: 7413 - protein, 85 aa, Homo sapiens
PVVLKENFILQPGNTEEAAKYREKIYYFSSAEAKEKFLEHPEDYVAHEEPLKAPPLRICLVGPQGSGKTMCGRQLAEKLNIFHIQ

SEQ ID NO: 7414 - protein, 85 aa, Homo sapiens
FEEVLQEKLLLKTEKKVGPEFEEDSENEQAAKQELEELAIQANVKVEEENTKKQLPEVQLTEEEEVIKSSLMENEPLPPEILEVI

SEQ ID NO: 7415 - protein, 85 aa, Homo sapiens
LSEWWLKEPIRSTGFILDGFPRYPEEAQFLGDRGFFPDAAVFIQVDDQDIFDRLLPAQIEKWKLKQKKKLERKKLIKDMKAKIRV

SEQ ID NO: 7416 - protein, 85 aa, Homo sapiens
DTIAKRRAELILERDKKRRENVVRDDEEISEEELEEDNDDIENILEDEFPKDEEEMSGEEDEEQETDAIERLRGELGEKFEADTH

SEQ ID NO: 7417 - protein, 85 aa, Homo sapiens
NLQIIQDELERYLIPIISINGARRNHIVQYTLNMKLKPLVENRASIFEKCHPIPAPLAQKMLTFTYKYISSFGYWDPVKLSEGET

SEQ ID NO: 7418 - protein, 85 aa, Homo sapiens
IKPVENAENPIYPVIHRQYIYFLSSKETKEKFMKNPIKYIRQPKPKPTVPIRIIIVGPPKSGKTTVAKKITSEYGLKHLSIGGAL

SEQ ID NO: 7419 - protein, 85 aa, Homo sapiens
RYVLNNHPETELALMLNWHLHKGMTAPDELAIQALELSLMESVCNTAGVVIDGYPVTKHQMNLLEARSIIPMVIFELSVPSKEIF

SEQ ID NO: 7420 - protein, 85 aa, Homo sapiens
KRLLLEKENEQRLPYPLHNSAQIVAVNNVKYRKNIGEIRQYYQEQHQNWYVIDGFHSKWWVWNEVIKNVQMVNKYMQTYLERIKA

SEQ ID NO: 7421 - protein, 85 aa, Homo sapiens
GKAACIDKLCITPQELLSRLGEFEQFCPVSLAESQELFDCSATDSLEFAAEFRGHYYKMSSQEKLNKFLENPELYVPPLAPHPLP

SEQ ID NO: 7422 - protein, 85 aa, Homo sapiens
SADMIPKRLTLSELKSRFPKCAELQGYCPVTYKDGNQRYEALVPGSINYALEYHNRIYICENKEKLQKFLRSPLKYWEQKLPHKL

SEQ ID NO: 7423 - protein, 85 aa, Homo sapiens
PPLREPILLTSLPLPGYLEQGIATSLIKAMNAAGCLKPKFPFLSIRRSALLYIALHLKAFNPKGSEYTRKKYKKKMEQFMESCEL

SEQ ID NO: 7424 - protein, 84 aa, Homo sapiens
FLSIRRSALLYIALHLKAFNPKGSEYTRKKYKKKMEQFMESCELITYLGAKMTRKYKEPQFRAIDFDHKLKTFLSLRNIDPING

SEQ ID NO: 7425 - protein, 85 aa, Homo sapiens
LMKVKAKEAEETDNEDEEEIEGDELEVHEEPEASHDTRGSWLPEEFEASEVPETEPEAVSEPIEETTVETEIPKGSKEGLEIEKL

SEQ ID NO: 7426 - protein, 85 aa, Homo sapiens
SETVVLPEFPEDSYPDVPEMEPFKEKIGSFIILWKQLEATISEAYIKILNLEIADRTPQELLQKVVETMEKPFQYTAWELTGEDY

SEQ ID NO: 7427 - protein, 85 aa, Homo sapiens
EEETEDYQTEAEVDEELEEEEEEEGEDKMKERKRHLGDTKHFCPVVLKENFILQPGNTEEAAKYREKIYYFSSAEAKEKFLEHPE

SEQ ID NO: 7428 - protein, 85 aa, Homo sapiens
DYVAHEEPLKAPPLRICLVGPQGSGKTMCGRQLAEKLNIFHIQFEEVLQEKLLLKTEKKVGPEFEEDSENEQAAKQELEELAIQA

SEQ ID NO: 7429 - protein, 85 aa, Homo sapiens
NVKVEEENTKKQLPEVQLTEEEEVIKSSLMENEPLPPEILEVILSEWWLKEPIRSTGFILDGFPRYPEEAQFLGDRGFFPDAAVF

SEQ ID NO: 7430 - protein, 85 aa, Homo sapiens
IQVDDQDIFDRLLPAQIEKWKLKQKKKLERKKLIKDMKAKIRVDTIAKRRAELILERDKKRRENVVRDDEEISEEELEEDNDDIE

SEQ ID NO: 7431 - protein, 85 aa, Homo sapiens
NILEDEFPKDEEEMSGEEDEEQETDAIERLRGELGEKFEADTHNLQIIQDELERYLIPIISINGARRNHIVQYTLNMKLKPLVEN

SEQ ID NO: 7432 - protein, 85 aa, Homo sapiens
RASIFEKCHPIPAPLAQKMLTFTYKYISSFGYWDPVKLSEGETIKPVENAENPIYPVIHRQYIYFLSSKETKEKFMKNPIKYIRQ

SEQ ID NO: 7433 - protein, 85 aa, Homo sapiens
PKPKPTVPIRIIIVGPPKSGKTTVAKKITSEYGLKHLSIGGALRYVLNNHPETELALMLNWHLHKGMTAPDELAIQALELSLMES

SEQ ID NO: 7434 - protein, 85 aa, Homo sapiens
VCNTAGVVIDGYPVTKHQMNLLEARSIIPMVIFELSVPSKEIFKRLLLEKENEQRLPYPLHNSAQIVAVNNVKYRKNIGEIRQYY

SEQ ID NO: 7435 - protein, 85 aa, Homo sapiens
QEQHQNWYVIDGFHSKWWVWNEVIKNVQMVNKYMQTYLERIKAGKAACIDKLCITPQELLSRLGEFEQFCPVSLAESQELFDCSA

SEQ ID NO: 7436 - protein, 85 aa, Homo sapiens
TDSLEFAAEFRGHYYKMSSQEKLNKFLENPELYVPPLAPHPLPSADMIPKRLTLSELKSRFPKCAELQGYCPVTYKDGNQRYEAL

SEQ ID NO: 7437 - protein, 85 aa, Homo sapiens
VPGSINYALEYHNRIYICENKEKLQKFLRSPLKYWEQKLPHKLPPLREPILLTSLPLPGYLEQGIATSLIKAMNAAGCLKPKFPF

SEQ ID NO: 7438 - protein, 85 aa, Homo sapiens
SGTSSPEAVKKLLENMQSDLRALSLECKKKFPPVKEAAESGIIKVKTIAARNTEILAALKENSSEVVQPFLMGCGTKEPKITQLC

SEQ ID NO: 7439 - protein, 85 aa, Homo sapiens
MAAIQRLMSHEVVSETAAGNIINMLWQLMENSLEELKLLQTVLVLLTTNTVVHDEALSKAIVLCFRLHFTKDNITNNTAAATVRQ

SEQ ID NO: 7440 - protein, 85 aa, Homo sapiens
VVTVVFERMVAEDERHRDIIEQPVLVQGNSNRRSVSTLKPCAKDAYMLFQDLCQLVNADAPYWLVGMTEMTRTFGLELLESVLND

SEQ ID NO: 7441 - protein, 85 aa, Homo sapiens
FPQVFLQHQEFSFLLKERVCPLVIKLFSPNIKFRQGSSTSSSPAPVEKPYFPICMRLLRVVSVLIKQFYSLLVTECEIFLSLLVK

SEQ ID NO: 7442 - protein, 85 aa, Homo sapiens
FLDADKPQWLRAVAVESIHRFCVQPQLLRSFCQSYDMKQHSTKVFRDIVNALGSFIQSLFLVPPTGNPATSNQAGNNNLGGSVSA

SEQ ID NO: 7443 - protein, 85 aa, Homo sapiens
PANSGMVGIGGGVTLLPAFEYRGTWIPILTITVQGSAKATYLEMLDKVEPPTIPEGYAMSVAFHCLLDLVRGITSMIEGELGELE

SEQ ID NO: 7444 - protein, 85 aa, Homo sapiens
TECQTTTEEGSSPTQSTEQQDLQSTSDQMDKEIVSRAVWEEMVNACWCGLLAALSLLLDASTDEAATENILKAELTMAALCGRLG

SEQ ID NO: 7445 - protein, 85 aa, Homo sapiens
LVTSRDAFITAICKGSLPPHYALTVLNTTTAATLSNKSYSVQGQSVMMISPSSESHQQVVAVGQPLAVQPQGTVMLTSKNIQCMR

SEQ ID NO: 7446 - protein, 85 aa, Homo sapiens
TLLNLAHCHGAVLGTSWQLVLATLQHLVWILGLKPSSGGALKPGRAVEGPSTVLTTAVMTDLPVISNILSRLFESSQYLDDVSLH

SEQ ID NO: 7447 - protein, 85 aa, Homo sapiens
HLINALCSLSLEAMDMAYGNNKEPSLFAVAKLLETGLVNMHRIEILWRPLTGHLLEVCQHPNSRMREWGAEALTSLIKAGLTFNH

SEQ ID NO: 7448 - protein, 85 aa, Homo sapiens
DPPLSQNQRLQLLLLNPLKEMSNINHPDIRLKQLECVLQILQSQGDSLGPGWPLVLGVMGAIRNDQGESLIRTAFQCLQLVVTDF

SEQ ID NO: 7449 - protein, 85 aa, Homo sapiens
LPTMPCTCLQIVVDVAGSFGLHNQELNISLTSIGLLWNISDYFFQRGETIEKELNKEEAAQQKQAEEKGVVLNRPFHPAPPFDCL

SEQ ID NO: 7450 - protein, 85 aa, Homo sapiens
WLCLYAKLGELCVDPRPAVRKSAGQTLFSTIGAHGTLLQHSTWHTVIWKVLFHLLDRVRESSTTADKEKIESGGGNILIHHSRDT

SEQ ID NO: 7451 - protein, 85 aa, Homo sapiens
AEKQWAETWVLTLAGVARIFNTRRYLLQPLGDFSRAWDVLLDHIQSAALSKNNEVSLAALKSFQEILQIVSPVRDSDKPETPPVV

SEQ ID NO: 7452 - protein, 85 aa, Homo sapiens
NVPVPVLIGPISGMSRPFVRTDSIGEKLGRYSSSEPPIVTDELEDLNLWWAAWNTWYRIGSESTKPPITFDKLTFIPSQPFLTAL

SEQ ID NO: 7453 - protein, 85 aa, Homo sapiens
IQIFPALYQHIKTGFNMDDLQKLGVILHSAISVPISSDASPFILPSYTEAVLTSLQEAVLTALDVLQKAICVGPENMQIMYPAIF

SEQ ID NO: 7454 - protein, 85 aa, Homo sapiens
DQLLAFVEFSCKPPQYGQLETKHIANAKYNQAEWVALNYVPFAERSLEVVVDLYQKTACHKAVVNEKVLQNIIKTLRVPLSLKYS

SEQ ID NO: 7455 - protein, 85 aa, Homo sapiens
CPSESTWKLAVSSLLRVLSIGLPVARQHASSGKFDSMWPELANTFEDFLFTKSIPPDNLSIQEFQRNENIDVEVVQLISNEILPY

SEQ ID NO: 7456 - protein, 85 aa, Homo sapiens
ANFIPKEFVGQIMTMLNKGSIHSQSSSFTEAEIDIRLREEFSKMCFETLLQFSFSNKVTTPQEGYISRMALSVLLKRSQDVLHRY

SEQ ID NO: 7457 - protein, 85 aa, Homo sapiens
IEDERLSGKCPLPRQQVTEIIFVLKAVSTLIDSLKKTQPENVDGNTWAQVIALYPTLVECITCSSSEVCSALKEALVPFKDFMQP

SEQ ID NO: 7458 - protein, 84 aa, Homo sapiens
LPRQQVTEIIFVLKAVSTLIDSLKKTQPENVDGNTWAQVIALYPTLVECITCSSSEVCSALKEALVPFKDFMQPPASRVQNGES

SEQ ID NO: 7459 - protein, 85 aa, Homo sapiens
IKVKTIAARNTEILAALKENSSEVVQPFLMGCGTKEPKITQLCLAAIQRLMSHEVVSETAAGNIINMLWQLMENSLEELKLLQTV

SEQ ID NO: 7460 - protein, 85 aa, Homo sapiens
LVLLTTNTVVHDEALSKAIVLCFRLHFTKDNITNNTAAATVRQVVTVVFERMVAEDERHRDIIEQPVLVQGNSNRRSVSTLKPCA

SEQ ID NO: 7461 - protein, 85 aa, Homo sapiens
KDAYMLFQDLCQLVNADAPYWLVGMTEMTRTFGLELLESVLNDFPQVFLQHQEFSFLLKERVCPLVIKLFSPNIKFRQGSSTSSS

SEQ ID NO: 7462 - protein, 85 aa, Homo sapiens
PAPVEKPYFPICMRLLRVVSVLIKQFYSLLVTECEIFLSLLVKFLDADKPQWLRAVAVESIHRFCVQPQLLRSFCQSYDMKQHST

SEQ ID NO: 7463 - protein, 85 aa, Homo sapiens
KVFRDIVNALGSFIQSLFLVPPTGNPATSNQAGNNNLGGSVSAPANSGMVGIGGGVTLLPAFEYRGTWIPILTITVQGSAKATYL

SEQ ID NO: 7464 - protein, 85 aa, Homo sapiens
EMLDKVEPPTIPEGYAMSVAFHCLLDLVRGITSMIEGELGELETECQTTTEEGSSPTQSTEQQDLQSTSDQMDKEIVSRAVWEEM

SEQ ID NO: 7465 - protein, 85 aa, Homo sapiens
VNACWCGLLAALSLLLDASTDEAATENILKAELTMAALCGRLGLVTSRDAFITAICKGSLPPHYALTVLNTTTAATLSNKSYSVQ

SEQ ID NO: 7466 - protein, 85 aa, Homo sapiens
GQSVMMISPSSESHQQVVAVGQPLAVQPQGTVMLTSKNIQCMRTLLNLAHCHGAVLGTSWQLVLATLQHLVWILGLKPSSGGALK

SEQ ID NO: 7467 - protein, 85 aa, Homo sapiens
PGRAVEGPSTVLTTAVMTDLPVISNILSRLFESSQYLDDVSLHHLINALCSLSLEAMDMAYGNNKEPSLFAVAKLLETGLVNMHR

SEQ ID NO: 7468 - protein, 85 aa, Homo sapiens
IEILWRPLTGHLLEVCQHPNSRMREWGAEALTSLIKAGLTFNHDPPLSQNQRLQLLLLNPLKEMSNINHPDIRLKQLECVLQILQ

SEQ ID NO: 7469 - protein, 85 aa, Homo sapiens
SQGDSLGPGWPLVLGVMGAIRNDQGESLIRTAFQCLQLVVTDFLPTMPCTCLQIVVDVAGSFGLHNQELNISLTSIGLLWNISDY

SEQ ID NO: 7470 - protein, 85 aa, Homo sapiens
FFQRGETIEKELNKEEAAQQKQAEEKGVVLNRPFHPAPPFDCLWLCLYAKLGELCVDPRPAVRKSAGQTLFSTIGAHGTLLQHST

SEQ ID NO: 7471 - protein, 85 aa, Homo sapiens
WHTVIWKVLFHLLDRVRESSTTADKEKIESGGGNILIHHSRDTAEKQWAETWVLTLAGVARIFNTRRYLLQPLGDFSRAWDVLLD

SEQ ID NO: 7472 - protein, 85 aa, Homo sapiens
HIQSAALSKNNEVSLAALKSFQEILQIVSPVRDSDKPETPPVVNVPVPVLIGPISGMSRPFVRTDSIGEKLGRYSSSEPPIVTDE

SEQ ID NO: 7473 - protein, 85 aa, Homo sapiens
LEDLNLWWAAWNTWYRIGSESTKPPITFDKLTFIPSQPFLTALIQIFPALYQHIKTGFNMDDLQKLGVILHSAISVPISSDASPF

SEQ ID NO: 7474 - protein, 85 aa, Homo sapiens
ILPSYTEAVLTSLQEAVLTALDVLQKAICVGPENMQIMYPAIFDQLLAFVEFSCKPPQYGQLETKHIANAKYNQAEWVALNYVPF

SEQ ID NO: 7475 - protein, 85 aa, Homo sapiens
AERSLEVVVDLYQKTACHKAVVNEKVLQNIIKTLRVPLSLKYSCPSESTWKLAVSSLLRVLSIGLPVARQHASSGKFDSMWPELA

SEQ ID NO: 7476 - protein, 85 aa, Homo sapiens
NTFEDFLFTKSIPPDNLSIQEFQRNENIDVEVVQLISNEILPYANFIPKEFVGQIMTMLNKGSIHSQSSSFTEAEIDIRLREEFS

SEQ ID NO: 7477 - protein, 85 aa, Homo sapiens
KMCFETLLQFSFSNKVTTPQEGYISRMALSVLLKRSQDVLHRYIEDERLSGKCPLPRQQVTEIIFVLKAVSTLIDSLKKTQPENV

SEQ ID NO: 7478 - protein, 85 aa, Homo sapiens
CLEDKMLMSSVKDNVGRGLNIALVNDVNDLLKFIRPLHEGTLVFVASYDDPATKMNEETRKLFSELGSRNAKELAFRDSWVFVGA

SEQ ID NO: 7479 - protein, 85 aa, Homo sapiens
PESSVTAAPRARKYKCGLPQPCPEEHLAFRVVSGAANVIGPKICLEDKMLMSSVKDNVGRGLNIALVNDVNDLLKFIRPLHEGTL

SEQ ID NO: 7480 - protein, 85 aa, Homo sapiens
VFVASYDDPATKMNEETRKLFSELGSRNAKELAFRDSWVFVGAKGVQNKSPFEQHVKNSKHSNKYEGWPEALEMEGCIPRRSTAS

SEQ ID NO: 7481 - protein, 28 aa, Homo sapiens
PKYNTLKNFLSNLNPKLLSWTRLSGPFC

SEQ ID NO: 7482 - protein, 84 aa, Homo sapiens
PSSHEVVAWIRRILRVEKTGHSGTLDPKVTGCLIVCIERATRLVKSQQSAGPRNSDRCLIPATPTYCCSKEAAPSEDHLREQND

SEQ ID NO: 7483 - protein, 10 aa, Homo sapiens
IHLLHVVQIL

SEQ ID NO: 7484 - protein, 85 aa, Homo sapiens
VCSPVTLRIAPPDRRFSRSAIPEQIISSTLSSPSSNAPDPCAKETVLSALKEKKKKRTVEEEDQIFLDGQENKRRPSLSLSPRLV

SEQ ID NO: 7485 - protein, 84 aa, Homo sapiens
QENKRRPSLSLSPRLVQWCNFGSLHPLPPRFKRFSCLSLPSRWITAVLSTVSLMPLLHSKFLDPGQIHSSSQWMSSTLLMTPET

SEQ ID NO: 7486 - protein, 85 aa, Homo sapiens
KETVLSALKEKKKKRTVEEEDQIFLDGQENKRRPSLSLSPRLVQWCNFGSLHPLPPRFKRFSCLSLPSRWITAVLSTVSLMPLLH

SEQ ID NO: 7487 - protein, 85 aa, Homo sapiens
ADPGMMSLFGEDGNIFSEGLEGLGECGYPENPVNPMGQQMPIDQGFASLQPSLHHPSTNQNQTKLTHFDHYNQYEQQKMHLMDQP

SEQ ID NO: 7488 - protein, 85 aa, Homo sapiens
NRMMSNTPGNGLASPHSQYHTPPVPQVPHGGSGGGQMGVYPGMQNERHGQSFVDSSSMWGPRAVQVPDQIRAPYQQQQPQPQPPQ

SEQ ID NO: 7489 - protein, 85 aa, Homo sapiens
PAPSGPPAQGHPQHMQQMGSYMARGDFSMQQHGQPQQRMSQFSQGQEGLNQGNPFIATSGPGHLSHVPQQSPSMAPSLRHSVQQF

SEQ ID NO: 7490 - protein, 85 aa, Homo sapiens
HHHPSTALHGESVAHSPRFSPNPPQQGAVRPQTLNFSSRSQTVPSPTINNSGQYSRYPYSNLNQGLVNNTGMNQNLGLTNNTPMN

SEQ ID NO: 7491 - protein, 85 aa, Homo sapiens
QSVPRYPNAVGFPSNSGQGLMHQQPIHPSGSLNQMNTQTMHPSQPQGTYASPPPMSPMKAMSNPAGTPPPQVRPGSAGIPMEVGS

SEQ ID NO: 7492 - protein, 85 aa, Homo sapiens
YPNMPHPQPSHQPPGAMGIGQRNMGPRNMQQSRPFIGMSSAPRELTGHMRPNGCPGVGLGDPQAIQERLIPGQQHPGQQPSFQQL

SEQ ID NO: 7493 - protein, 85 aa, Homo sapiens
PTCPPLQPHPGLHHQSSPPHPHHQPWAQLHPSPQNTPQKVPVHQHSPSEPFLEKPVPDMTQVSGPNAQLVKSDDYLPSIEQQPQQ

SEQ ID NO: 7494 - protein, 85 aa, Homo sapiens
KKKKKKNNHIVAEDPSKGFGKDDFPGGVDNQELNRNSLDGSQEEKKKKKRSKAKKDPKEPKEPKEKKEPKEPKTPKAPKIPKEPK

SEQ ID NO: 7495 - protein, 85 aa, Homo sapiens
EKKAKTATPKPKSSKKSSNKKPDSEASALKKKVNKGKTEGSENSDLDKTPPPSPPPEEDEDPGVQKRRSSRQVKRKRYTEDLEFK

SEQ ID NO: 7496 - protein, 85 aa, Homo sapiens
ISDEEADDADAAGRDSPSNTSQSEQQESVDAEGPVVEKIMSSRSVKKQKESGEEVEIEEFYVKYKNFSYLHCQWASIEDLEKDKR

SEQ ID NO: 7497 - protein, 85 aa, Homo sapiens
IQQKIKRFKAKQGQNKFLSEIEDELFNPDYVEVDRIMDFARSTDDRGEPVTHYLVKWCSLPYEDSTWERRQDIDQAKIEEFEKLM

SEQ ID NO: 7498 - protein, 85 aa, Homo sapiens
SREPETERVERPPADDWKKSESSREYKNNNKLREYQLEGVNWLLFNWYNMRNCILADEMGLGKTIQSITFLYEIYLKGIHGPFLV

SEQ ID NO: 7499 - protein, 85 aa, Homo sapiens
IAPLSTIPNWEREFRTWTELNVVVYHGSQASRRTIQLYEMYFKDPQGRVIKGSYKFHAIITTFEMILTDCPELRNIPWRCVVIDE

SEQ ID NO: 7500 - protein, 85 aa, Homo sapiens
AHRLKNRNCKLLEGLKMMDLEHKVLLTGTPLQNTVEELFSLLHFLEPSRFPSETTFMQEFGDLKTEEQVQKLQAILKPMMLRRLK

SEQ ID NO: 7501 - protein, 85 aa, Homo sapiens
EDVEKNLAPKEETIIEVELTNIQKKYYRAILEKNFTFLSKGGGQANVPNLLNTMMELRKCCNHPYLINGAEEKILEEFKETHNAE

SEQ ID NO: 7502 - protein, 85 aa, Homo sapiens
SPDFQLQAMIQAAGKLVLIDKLLPKLKAGGHRVLIFSQMVRCLDILEDYLIQRRYPYERIDGRVRGNLRQAAIDRFSKPDSDRFV

SEQ ID NO: 7503 - protein, 85 aa, Homo sapiens
FLLCTRAGGLGINLTAADTCIIFDSDWNPQNDLQAQARCHRIGQSKSVKIYRLITRNSYEREMFDKASLKLGLDKAVLQSMSGRE

SEQ ID NO: 7504 - protein, 85 aa, Homo sapiens
NATNGVQQLSKKEIEDLLRKGAYGALMDEEDEGSKFCEEDIDQILLRRTHTITIESEGKGSTFAKASFVASGNRTDISLDDPNFW

SEQ ID NO: 7505 - protein, 85 aa, Homo sapiens
QKWAKKAELDIDALNGRNNLVIDTPRVRKQTRLYSAVKEDELMEFSDLESDSEEKPCAKPRRPQDKSQGYARSECFRVEKNLLVY

SEQ ID NO: 7506 - protein, 85 aa, Homo sapiens
GWGRWTDILSHGRYKRQLTEQDVETICRTILVYCLNHYKGDENIKSFIWDLITPTADGQTRALVNHSGLSAPVPRGRKGKKVKAQ

SEQ ID NO: 7507 - protein, 85 aa, Homo sapiens
STQPVVQDADWLASCNPDALFQEDSYKKHLKHHCNKVLLRVRMLYYLRQEVIGDQADKILEGADSSEADVWIPEPFHAEVPADWW

SEQ ID NO: 7508 - protein, 85 aa, Homo sapiens
DKEADKSLLIGVFKHGYEKYNSMRADPALCFLERVGMPDAKAIAAEQRGTDMLADGGDGGEFDREDEDPEYKPTRTPFKDEIDEF

SEQ ID NO: 7509 - protein, 85 aa, Homo sapiens
ANSPSEDKEESMEIHATGKHSESNAELGQLYWPNTSTLTTRLRRLITAYQRSYKRQQMRQEALMKTDRRRRRPREEVRALEAERE

SEQ ID NO: 7510 - protein, 85 aa, Homo sapiens
AIISEKRQKWTRREEADFYRVVSTFGVIFDPVKQQFDWNQFRAFARLDKKSDESLEKYFSCFVAMCRRVCRMPVKPDDEPPDLSS

SEQ ID NO: 7511 - protein, 85 aa, Homo sapiens
IIEPITEERASRTLYRIELLRKIREQVLHHPQLGERLKLCQPSLDLPEWWECGRHDRDLLVGAAKHGVSRTDYHILNDPELSFLD

SEQ ID NO: 7512 - protein, 85 aa, Homo sapiens
AHKNFAQNRGAGNTSSLNPLAVGFVQTPPVISSAHIQDERVLEQAEGKVEEPENPAAKEKCEGKEEEEETDGSGKESKQECEAEA

SEQ ID NO: 7513 - protein, 85 aa, Homo sapiens
SSVKNELKGVEVGADTGSKSISEKGSEEDEEEKLEDDDKSEESSQPEAGAVSRGKNFDEESNASMSTARDETRDGFYMEDGDPSV

SEQ ID NO: 7514 - protein, 85 aa, Homo sapiens
AQLLHERTFAFSFWPKDRVMINRLDNICEAVLKGKWPVNRRQMFDFQGLIPGYTPTTVDSPLQKRSFAELSMVGQASISGSEDIT

SEQ ID NO: 7515 - protein, 85 aa, Homo sapiens
TSPQLSKEDALNLSVPRQRRRRRRKIEIEAERAAKRRNLMEMVAQLRESQVVSENGQEKVVDLSKASREATSSTSNFSSLSSKFI

SEQ ID NO: 7516 - protein, 85 aa, Homo sapiens
MPNVSTPVSDAFKTQMELLQAGLSRTPTRHLLNGSLVDGEPPMKRRRGRRKNVEGLDLLFMSHKRTSLSAEDAEVTKAFEEDIET

SEQ ID NO: 7517 - protein, 85 aa, Homo sapiens
PPTRNIPSPGQLDPDTRIPVINLEDGTRLVGEDAPKNKDLVEWLKLHPTYTVDMPSYVPKNADVLFSSFQKPKQKRHRCRNPNKL

SEQ ID NO: 7518 - protein, 85 aa, Homo sapiens
DINTLTGEERVPVVNKRNGKKMGGAMAPPMKDLPRWLEENPEFAVAPDWTDIVKQSGFVPESMFDRLLTGPVVRGEGASRRGRRP

SEQ ID NO: 7519 - protein, 85 aa, Homo sapiens
KSEIARAAAAAAAVASTSGINPLLVNSLFAGMDLTSLQNLQNLQSLQLAGLMGFPPGLATAATAGGDAKNPAAVLPLMLPGMAGL

SEQ ID NO: 7520 - protein, 85 aa, Homo sapiens
PNVFGLGGLLNNPLSAATGNTTTASSQGEPEDSTSKGEEKGNENEDENKDSEKSTDAVSAADSANGSVGAATAPAGLPSNPLAFN

SEQ ID NO: 7521 - protein, 85 aa, Homo sapiens
PFLLSTMAPGLFYPSMFLPPGLGGLTLPGFPALAGLQNAVGSSEEKAADKAEGGPFKDGETLEGSDAEESLDKTAESSLLEDEIA

SEQ ID NO: 7522 - protein, 84 aa, Homo sapiens
GGLTLPGFPALAGLQNAVGSSEEKAADKAEGGPFKDGETLEGSDAEESLDKTAESSLLEDEIAQGEELDSLDGGDEIENNENDE

SEQ ID NO: 7523 - protein, 85 aa, Homo sapiens
DQGFASLQPSLHHPSTNQNQTKLTHFDHYNQYEQQKMHLMDQPNRMMSNTPGNGLASPHSQYHTPPVPQVPHGGSGGGQMGVYPG

SEQ ID NO: 7524 - protein, 85 aa, Homo sapiens
MQNERHGQSFVDSSSMWGPRAVQVPDQIRAPYQQQQPQPQPPQPAPSGPPAQGHPQHMQQMGSYMARGDFSMQQHGQPQQRMSQF

SEQ ID NO: 7525 - protein, 85 aa, Homo sapiens
SQGQEGLNQGNPFIATSGPGHLSHVPQQSPSMAPSLRHSVQQFHHHPSTALHGESVAHSPRFSPNPPQQGAVRPQTLNFSSRSQT

SEQ ID NO: 7526 - protein, 85 aa, Homo sapiens
VPSPTINNSGQYSRYPYSNLNQGLVNNTGMNQNLGLTNNTPMNQSVPRYPNAVGFPSNSGQGLMHQQPIHPSGSLNQMNTQTMHP

SEQ ID NO: 7527 - protein, 85 aa, Homo sapiens
SQPQGTYASPPPMSPMKAMSNPAGTPPPQVRPGSAGIPMEVGSYPNMPHPQPSHQPPGAMGIGQRNMGPRNMQQSRPFIGMSSAP

SEQ ID NO: 7528 - protein, 85 aa, Homo sapiens
RELTGHMRPNGCPGVGLGDPQAIQERLIPGQQHPGQQPSFQQLPTCPPLQPHPGLHHQSSPPHPHHQPWAQLHPSPQNTPQKVPV

SEQ ID NO: 7529 - protein, 85 aa, Homo sapiens
HQHSPSEPFLEKPVPDMTQVSGPNAQLVKSDDYLPSIEQQPQQKKKKKKNNHIVAEDPSKGFGKDDFPGGVDNQELNRNSLDGSQ

SEQ ID NO: 7530 - protein, 85 aa, Homo sapiens
EEKKKKKRSKAKKDPKEPKEPKEKKEPKEPKTPKAPKIPKEPKEKKAKTATPKPKSSKKSSNKKPDSEASALKKKVNKGKTEGSE

SEQ ID NO: 7531 - protein, 85 aa, Homo sapiens
NSDLDKTPPPSPPPEEDEDPGVQKRRSSRQVKRKRYTEDLEFKISDEEADDADAAGRDSPSNTSQSEQQESVDAEGPVVEKIMSS

SEQ ID NO: 7532 - protein, 85 aa, Homo sapiens
RSVKKQKESGEEVEIEEFYVKYKNFSYLHCQWASIEDLEKDKRIQQKIKRFKAKQGQNKFLSEIEDELFNPDYVEVDRIMDFARS

SEQ ID NO: 7533 - protein, 85 aa, Homo sapiens
TDDRGEPVTHYLVKWCSLPYEDSTWERRQDIDQAKIEEFEKLMSREPETERVERPPADDWKKSESSREYKNNNKLREYQLEGVNW

SEQ ID NO: 7534 - protein, 85 aa, Homo sapiens
LLFNWYNMRNCILADEMGLGKTIQSITFLYEIYLKGIHGPFLVIAPLSTIPNWEREFRTWTELNVVVYHGSQASRRTIQLYEMYF

SEQ ID NO: 7535 - protein, 85 aa, Homo sapiens
KDPQGRVIKGSYKFHAIITTFEMILTDCPELRNIPWRCVVIDEAHRLKNRNCKLLEGLKMMDLEHKVLLTGTPLQNTVEELFSLL

SEQ ID NO: 7536 - protein, 85 aa, Homo sapiens
HFLEPSRFPSETTFMQEFGDLKTEEQVQKLQAILKPMMLRRLKEDVEKNLAPKEETIIEVELTNIQKKYYRAILEKNFTFLSKGG

SEQ ID NO: 7537 - protein, 85 aa, Homo sapiens
GQANVPNLLNTMMELRKCCNHPYLINGAEEKILEEFKETHNAESPDFQLQAMIQAAGKLVLIDKLLPKLKAGGHRVLIFSQMVRC

SEQ ID NO: 7538 - protein, 85 aa, Homo sapiens
MDILEDYLIQRRYPYERIDGRVRGNLRQAAIDRFSKPDSDRFVFLLCTRAGGLGINLTAADTCIIFDSDWNPQNDLQAQARCHRI

SEQ ID NO: 7539 - protein, 85 aa, Homo sapiens
GQSKSVKIYRLITRNSYEREMFDKASLKLGLDKAVLQSMSGRENATNGVQQLSKKEIEDLLRKGAYGALMDEEDEGSKFCEEDID

SEQ ID NO: 7540 - protein, 85 aa, Homo sapiens
QILLRRTHTITIESEGKGSTFAKASFVASGNRTDISLDDPNFWQKWAKKAELDIDALNGRNNLVIDTPRVRKQTRLYSAVKEDEL

SEQ ID NO: 7541 - protein, 85 aa, Homo sapiens
MEFSDLESDSEEKPCAKPRRPQDKSQGYARSECFRVEKNLLVYGWGRWTDILSHGRYKRQLTEQDVETICRTILVYCLNHYKGDE

SEQ ID NO: 7542 - protein, 85 aa, Homo sapiens
NIKSFIWDLITPTADGQTRALVNHSGLSAPVPRGRKGKKVKAQSTQPVVQDADWLASCNPDALFQEDSYKKHLKHHCNKVLLRVR

SEQ ID NO: 7543 - protein, 85 aa, Homo sapiens
MLYYLRQEVIGDQADKILEGADSSEADVWIPEPFHAEVPADWWDKEADKSLLIGVFKHGYEKYNSMRADPALCFLERVGMPDAKA

SEQ ID NO: 7544 - protein, 85 aa, Homo sapiens
IAAEQRGTDMLADGGDGGEFDREDEDPEYKPTRTPFKDEIDEFANSPSEDKEESMEIHATGKHSESNAELGQLYWPNTSTLTTRL

SEQ ID NO: 7545 - protein, 85 aa, Homo sapiens
RRLITAYQRSYKRQQMRQEALMKTDRRRRRPREEVRALEAEREAIISEKRQKWTRREEADFYRVVSTFGVIFDPVKQQFDWNQFR

SEQ ID NO: 7546 - protein, 85 aa, Homo sapiens
AFARLDKKSDESLEKYFSCFVAMCRRVCRMPVKPDDEPPDLSSIIEPITEERASRTLYRIELLRKIREQVLHHPQLGERLKLCQP

SEQ ID NO: 7547 - protein, 85 aa, Homo sapiens
SLDLPEWWECGRHDRDLLVGAAKHGVSRTDYHILNDPELSFLDAHKNFAQNRGAGNTSSLNPLAVGFVQTPPVISSAHIQDERVL

SEQ ID NO: 7548 - protein, 85 aa, Homo sapiens
EQAEGKVEEPENPAAKEKCEGKEEEEETDGSGKESKQECEAEASSVKNELKGVEVGADTGSKSISEKGSEEDEEEKLEDDDKSEE

SEQ ID NO: 7549 - protein, 85 aa, Homo sapiens
SSQPEAGAVSRGKNFDEESNASMSTARDETRDGFYMEDGDPSVAQLLHERTFAFSFWPKDRVMINRLDNICEAVLKGKWPVNRRQ

SEQ ID NO: 7550 - protein, 85 aa, Homo sapiens
MFDFQGLIPGYTPTTVDSPLQKRSFAELSMVGQASISGSEDITTSPQLSKEDALNLSVPRQRRRRRRKIEIEAERAAKRRNLMEM

SEQ ID NO: 7551 - protein, 85 aa, Homo sapiens
VAQLRESQVVSENGQEKVVDLSKASREATSSTSNFSSLSSKFILPNVSTPVSDAFKTQMELLQAGLSRTPTRHLLNGSLVDGEPP

SEQ ID NO: 7552 - protein, 85 aa, Homo sapiens
MKRRRGRRKNVEGLDLLFMSHKRTSLSAEDAEVTKAFEEDIETPPTRNIPSPGQLDPDTRIPVINLEDGTRLVGEDAPKNKDLVE

SEQ ID NO: 7553 - protein, 85 aa, Homo sapiens
WLKLHPTYTVDMPSYVPKNADVLFSSFQKPKQKRHRCRNPNKLDINTLTGEERVPVVNKRNGKKMGGAMAPPMKDLPRWLEENPE

SEQ ID NO: 7554 - protein, 85 aa, Homo sapiens
FAVAPDWTDIVKQSGFVPESMFDRLLTGPVVRGEGASRRGRRPKSEIARAAAAAAAVASTSGINPLLVNSLFAGMDLTSLQNLQN

SEQ ID NO: 7555 - protein, 85 aa, Homo sapiens
LQSLQLAGLMGFPPGLATAATAGGDAKNPAAVLPLMLPGMAGLPNVFGLGGLLNNPLSAATGNTTTASSQGEPEDSTSKGEEKGN

SEQ ID NO: 7556 - protein, 85 aa, Homo sapiens
ENEDENKDSEKSTDAVSAADSANGSVGAATAPAGLPSNPLAFNPFLLSTMAPGLFYPSMFLPPGLGGLTLPGFPALAGLQNAVGS

SEQ ID NO: 7557 - protein, 85 aa, Homo sapiens
GKSCKVVVCGQASVGKTSILEQLLYGNHVVGSEMIETQEDIYVGSIETDRGVREQVTIVVLGNKCDLQEQRRVDPDVAQHWAKSE

SEQ ID NO: 7558 - protein, 84 aa, Homo sapiens
GVREQVTIVVLGNKCDLQEQRRVDPDVAQHWAKSEKVKLWEVSVADRRSLLEPFVYLASKMTQPQSKSAFPLSRKNKGSGSLDG

SEQ ID NO: 7559 - protein, 85 aa, Homo sapiens
VGSIETDRGVREQVTIVVLGNKCDLQEQRRVDPDVAQHWAKSEKVKLWEVSVADRRSLLEPFVYLASKMTQPQSKSAFPLSRKNK

SEQ ID NO: 7560 - protein, 84 aa, Homo sapiens
EKIHIFAQKCLFLTESLKQFTEKMQSDMEKIQELREAQLYSVDVTLDPDTAYPSLILSDNLRQVRYSYLQQDLPDNPERSPSTT

SEQ ID NO: 7561 - protein, 85 aa, Homo sapiens
LGSLAHSIPLGQADPSLAPYIIDLPSWTQFRQDTGTMRAVRRHLFPQHSAPGRGVVWEWLSDDGSWTAYEASVCDYLEQQVARGN

SEQ ID NO: 7562 - protein, 31 aa, Homo sapiens
EKSAVGRLLGVWVMGCLMTCQVKKMVKHGHR

SEQ ID NO: 7563 - protein, 14 aa, Homo sapiens
NLNQQPSARALDRV

SEQ ID NO: 7564 - protein, 16 aa, Homo sapiens
YSGFRIQVLPLIELVQ

SEQ ID NO: 7565 - protein, 84 aa, Homo sapiens
FLHRLFREKSLDQLKSISAEEILTLFCGAPPVTPIIVLSIINFFERLCLTWMFFFMMCVAERTYKQVSGEIRKIFYLFLYMIFH

SEQ ID NO: 7566 - protein, 18 aa, Homo sapiens
QVTMVVKLRIENQYFQGT

SEQ ID NO: 7567 - protein, 22 aa, Homo sapiens
GTTCYMAQSAGHLSPVTVRGPM

SEQ ID NO: 7568 - protein, 6 aa, Homo sapiens
MPISKE

SEQ ID NO: 7569 - protein, 85 aa, Homo sapiens
APASASGEDLRKLPTMAEVNGEQDFIDLTRETRPRTKDRSGLYVIDLTRAEGENRPIATLDLTLEPVTPSQKEPTSLQTCASLSG

SEQ ID NO: 7570 - protein, 85 aa, Homo sapiens
KAVMEGHVDRSSQPTARRIINSDPVDLDLVEENTFVGPPPATSISGGSVYPTEPNCSSATFTGNLSFLASLQLSSDVSSLSPTSN

SEQ ID NO: 7571 - protein, 85 aa, Homo sapiens
NSRSSSSSSNQKAPLPCPQQDVSRPPQALPCPLRPLPCPPRASPCPPRASSCPPRALSCPSQTMQCQLPALTHPPQEVPCPRQNI

SEQ ID NO: 7572 - protein, 85 aa, Homo sapiens
PGPPQDSLGLPQDVPGLPQSILHPQDVAYLQDMPRSPGDVPQSPSDVSPSPDAPQSPGGMPHLPGDVLHSPGDMPHSSGDVTHSP

SEQ ID NO: 7573 - protein, 85 aa, Homo sapiens
RDIPHLPGDRPDFTQNDVQNRDMPMDISALSSPSCSPSPQSETPLEKVPWLSVMETPARKEISLSEPAKPGSAHVQSRTPQGGLY

SEQ ID NO: 7574 - protein, 85 aa, Homo sapiens
NRPCLHRLKYFLRPPVHHLFFQTLIPDKDTRENKGQKLEPIPHRRLRMVTNTIEENFPLGTVQFLMDFVSPQHYPPREIVAHIIQ

SEQ ID NO: 7575 - protein, 85 aa, Homo sapiens
KILLSGSETVDVLKEAYMLLMKIQQLHPANAKTVEWDWKLLTYVMEEEGQTLPGRVLFLRYVVQTLEDDFQQTLRRQRQHLQQSI

SEQ ID NO: 7576 - protein, 85 aa, Homo sapiens
ANMVLSCDKQPHNVRDVIKWLVKAVTEDGLTQPPNGNQTSSGTGILKASSSHPSSQPNLTKNTNQLIVCQLQRMLSIAVEVDRTP

SEQ ID NO: 7577 - protein, 85 aa, Homo sapiens
TCSSNKIAEMMFGFVLDIPERSQREMFFTTMESHLLRCKVLEIIFLHSCETPTRLPLSLAQALYFLNNSTSLLKCQSDKSQWQTW

SEQ ID NO: 7578 - protein, 85 aa, Homo sapiens
DELVEHLQFLLSSYQHVLREHLRSSVIDRKDLIIKRIKPKPQQGDDITVVDVEKQIEAFRSRLIQMLGEPLVPQLQDKVHLLKLL

SEQ ID NO: 7579 - protein, 85 aa, Homo sapiens
YVIDLTRAEGENRPIATLDLTLEPVTPSQKEPTSLQTCASLSGKAVMEGHVDRSSQPTARRIINSDPVDLDLVEENTFVGPPPAT

SEQ ID NO: 7580 - protein, 85 aa, Homo sapiens
SISGGSVYPTEPNCSSATFTGNLSFLASLQLSSDVSSLSPTSNNSRSSSSSSNQKAPLPCPQQDVSRPPQALPCPLRPLPCPPRA

SEQ ID NO: 7581 - protein, 85 aa, Homo sapiens
SPCPPRASSCPPRALSCPSQTMQCQLPALTHPPQEVPCPRQNIPGPPQDSLGLPQDVPGLPQSILHPQDVAYLQDMPRSPGDVPQ

SEQ ID NO: 7582 - protein, 85 aa, Homo sapiens
SPSDVSPSPDAPQSPGGMPHLPGDVLHSPGDMPHSSGDVTHSPRDIPHLPGDRPDFTQNDVQNRDMPMDISALSSPSCSPSPQSE

SEQ ID NO: 7583 - protein, 85 aa, Homo sapiens
TPLEKVPWLSVMETPARKEISLSEPAKPGSAHVQSRTPQGGLYNRPCLHRLKYFLRPPVHHLFFQTLIPDKDTRENKGQKLEPIP

SEQ ID NO: 7584 - protein, 85 aa, Homo sapiens
HRRLRMVTNTIEENFPLGTVQFLMDFVSPQHYPPREIVAHIIQKILLSGSETVDVLKEAYMLLMKIQQLHPANAKTVEWDWKLLT

SEQ ID NO: 7585 - protein, 85 aa, Homo sapiens
YVMEEEGQTLPGRVLFLRYVVQTLEDDFQQTLRRQRQHLQQSIANMVLSCDKQPHNVRDVIKWLVKAVTEDGLTQPPNGNQTSSG

SEQ ID NO: 7586 - protein, 85 aa, Homo sapiens
TGILKASSSHPSSQPNLTKNTNQLIVCQLQRMLSIAVEVDRTPTCSSNKIAEMMFGFVLDIPERSQREMFFTTMESHLLRCKVLE

SEQ ID NO: 7587 - protein, 85 aa, Homo sapiens
IIFLHSCETPTRLPLSLAQALYFLNNSTSLLKCQSDKSQWQTWDELVEHLQFLLSSYQHVLREHLRSSVIDRKDLIIKRIKPKPQ

SEQ ID NO: 7588 - protein, 85 aa, Homo sapiens
KTRRRCKTVRVDPDSQQNHSEIKISNPTEFQNHEKQESQDLRATAKVPSPPDEHQEAENAVSSGNRDSKVPSEGKKSLYTDESSK

SEQ ID NO: 7589 - protein, 85 aa, Homo sapiens
PGKNKRTAITTPNFKKLHEAHFKEMESIDQYIERKKKHFEEHNSMNELKQPINKGGVRTPVPPRGRLSVASTPISQRRSQGRSCG

SEQ ID NO: 7590 - protein, 85 aa, Homo sapiens
PASQSTLGLKGSLKRSAISAAKTGVRFSAATKDNEHKRSLTKTPARKSAHVTVSGGTPKGEAVLGTHKLKTITGNSAAVITPFKL

SEQ ID NO: 7591 - protein, 85 aa, Homo sapiens
TTEATQTPVSNKKPVFDLKASLSRPLNYEPHKGKLKPWGQSKENNYLNQHVNRINFYKKTYKQPHLQTKEEQRKKREQERKEKKA

SEQ ID NO: 7592 - protein, 85 aa, Homo sapiens
KHEARKGNENQDESQTSASSCDETEIQISNQEEAERQPLGHVTKTRRRCKTVRVDPDSQQNHSEIKISNPTEFQNHEKQESQDLR

SEQ ID NO: 7593 - protein, 85 aa, Homo sapiens
ATAKVPSPPDEHQEAENAVSSGNRDSKVPSEGKKSLYTDESSKPGKNKRTAITTPNFKKLHEAHFKEMESIDQYIERKKKHFEEH

SEQ ID NO: 7594 - protein, 85 aa, Homo sapiens
NSMNELKQPINKGGVRTPVPPRGRLSVASTPISQRRSQGRSCGPASQSTLGLKGSLKRSAISAAKTGVRFSAATKDNEHKRSLTK

SEQ ID NO: 7595 - protein, 85 aa, Homo sapiens
TPARKSAHVTVSGGTPKGEAVLGTHKLKTITGNSAAVITPFKLTTEATQTPVSNKKPVFDLKASLSRPLNYEPHKGKLKPWGQSK

SEQ ID NO: 7596 - protein, 85 aa, Homo sapiens
ASTDYSTYSQAAAQQGYSAYTAQPTQGYAQTTQQAYGQQSYGTYGQPTDVSYTQAQTTATYGQTAYATSYGQPPTEGTSTGYTTP

SEQ ID NO: 7597 - protein, 85 aa, Homo sapiens
GYTTPTAPQAYSQPVQGYGTGAYDTTTATVTTTQASYAAQSAYGTQPAYPAYGQQPAATAPTRPQDGNKPTETSQPQSSTGGYNQ

SEQ ID NO: 7598 - protein, 85 aa, Homo sapiens
TYGQPTDVSYTQAQTTATYGQTAYATSYGQPPTEGTSTGYTTPTAPQAYSQPVQGYGTGAYDTTTATVTTTQASYAAQSAYGTQP

SEQ ID NO: 7599 - protein, 85 aa, Homo sapiens
KNLSIEDPVEAIHLGSLIAAQGYIFPISDHVLTMKDDGTFYRFQAPYFWPSNCWEPENTDYAIYLCKRTMQNKARLELADYEAEN

SEQ ID NO: 7600 - protein, 85 aa, Homo sapiens
LARLQRAFARKWEFIFMQAEAQVKIDRKKDKTERKILDSQERAFWDVHRPVPGCVNTTEMDIRKCRRLKNPQKVKKSVYGVTEES

SEQ ID NO: 7601 - protein, 85 aa, Homo sapiens
QAQSPVHVLSQPIRKTTKEDIRKQITFLNAQIDRHCLKMSKVAESLIAYTEQYVEYDPLITPAEPSNPWISDDVALWDIEMSKEP

SEQ ID NO: 7602 - protein, 85 aa, Homo sapiens
SQQRVKRWGFSFDEILKDQVGRDQFLRFLESEFSSENLRFWLAVQDLKKQPLQDVAKRVEEIWQEFLAPGAPSAINLDSHSYEIT

SEQ ID NO: 7603 - protein, 85 aa, Homo sapiens
SQNVKDGGRYTFEDAQEHIYKLMKSDSYARFLRSNAYQDLLLAKKKPESEQGRRTSLEKFTRSVNVQNTRPAGAWSIFMAALPMA

SEQ ID NO: 7604 - protein, 85 aa, Homo sapiens
VWLRTPRSCHGLSESRLLGLPSLHDGLREGQSLPQSCPGSSSTAAEGARERASNGRSLARRQHCQCHGQGEETQLCLWSRLESSK

SEQ ID NO: 7605 - protein, 84 aa, Homo sapiens
GQSLPQSCPGSSSTAAEGARERASNGRSLARRQHCQCHGQGEETQLCLWSRLESSKRSQRASSLRTSKAKKKRQTVKQGPKAWP

SEQ ID NO: 7606 - protein, 85 aa, Homo sapiens
FQAPYFWPSNCWEPENTDYAIYLCKRTMQNKARLELADYEAENLARLQRAFARKWEFIFMQAEAQVKIDRKKDKTERKILDSQER

SEQ ID NO: 7607 - protein, 85 aa, Homo sapiens
AFWDVHRPVPGCVNTTEMDIRKCRRLKNPQKVKKSVYGVTEESQAQSPVHVLSQPIRKTTKEDIRKQITFLNAQIDRHCLKMSKV

SEQ ID NO: 7608 - protein, 85 aa, Homo sapiens
AESLIAYTEQYVEYDPLITPAEPSNPWISDDVALWDIEMSKEPSQQRVKRWGFSFDEILKDQVGRDQFLRFLESEFSSENLRFWL

SEQ ID NO: 7609 - protein, 85 aa, Homo sapiens
AVQDLKKQPLQDVAKRVEEIWQEFLAPGAPSAINLDSHSYEITSQNVKDGGRYTFEDAQEHIYKLMKSDSYARFLRSNAYQDLLL

SEQ ID NO: 7610 - protein, 85 aa, Homo sapiens
AKKKPESEQGRRTSLEKFTRSVNVQNTRPAGAWSIFMAALPMAVWLRTPRSCHGLSESRLLGLPSLHDGLREGQSLPQSCPGSSS

SEQ ID NO: 7611 - protein, 85 aa, Homo sapiens
ELEQREGTMAAVGFEEFSAPPGSELALPPLFGGHILESELETEVEFVSGGLGGSGLRERDEEEEAARGRRRRQRELNRRKYQALG

SEQ ID NO: 7612 - protein, 84 aa, Homo sapiens
PGSELALPPLFGGHILESELETEVEFVSGGLGGSGLRERDEEEEAARGRRRRQRELNRRKYQALGRRCREIEQVPHESAGLLRG

SEQ ID NO: 7613 - protein, 85 aa, Homo sapiens
MGWQDWIIAPEGYAAYYCEGECAFPLNSYMNATNHAIVQTLVHFINPETVPKPCCAPTQLNAISVLYFDDSSNVILKKYRNMVVR

SEQ ID NO: 7614 - protein, 84 aa, Homo sapiens
IIAPEGYAAYYCEGECAFPLNSYMNATNHAIVQTLVHFINPETVPKPCCAPTQLNAISVLYFDDSSNVILKKYRNMVVRACGCH

SEQ ID NO: 7615 - protein, 85 aa, Homo sapiens; identical to SEQ ID NO: 7335

SEQ ID NO: 7616 - protein, 84 aa, Homo sapiens
LPSTASGRLRGTQEVAPPTPLTPTSHTANTSPRPVSGMERERKVSMRLHRGAPVNISSSDLTGRQDTSRMSTSQNSIPFEHHGK

SEQ ID NO: 7617 - protein, 85 aa, Homo sapiens
SPAAAAAGAGERRRPIASVRDGRGRGCGGPARAVLLGLSLVGLLLYLVPAAAALAWLTVGATAAWWGLSREPRGSRPLSSFVRKA

SEQ ID NO: 7618 - protein, 85 aa, Homo sapiens
RHRRPLSSFVRKARHRRTLFASPLAKSTANGNLLEPRTLLEGPDPAELLLMGSYLGKPGPPQPAAAPEGQDLRDRPGRRPPARPA

SEQ ID NO: 7619 - protein, 85 aa, Homo sapiens
PRSPPPRSPPPRSPPPSPPTHRAHHVYPSLPTPLLRPSRRPSPRDCGTLPNRFVITPRRRYPIHQAQYSCLGVLPTVCWNGYHKK

SEQ ID NO: 7620 - protein, 85 aa, Homo sapiens
AVLSPRNSRMVCSPVTVRIAPPDRRFSRSAIPEQIISSTLSSPSSNAPDPCAKETVLSALKEKEKKRTVEEEDQIFLDGQENKRR

SEQ ID NO: 7621 - protein, 85 aa, Homo sapiens
RHDSSGSGHSAFEPLVANGVPASFVPKPGSLKRGLNSQSSDDHLNKRSRSSSMSSLTGAYASGIPSSSRNAITSSYSSTRGISQL

SEQ ID NO: 7622 - protein, 85 aa, Homo sapiens
WKRNGPSSSPFSSPASSRSQTPERPAKKIREEELCHHSSSSTPLAADRESQGEKAADTTPRKKQNSNSQSTPGSSGQRKRKVQLL

SEQ ID NO: 7623 - protein, 85 aa, Homo sapiens
PSRRGEQLTLPPPPQLGYSITAEDLDLEKKASLQWFNQALEDKSDAASNSVTETPPITQPSFTFTLPAAAPASPPTSLLAPSTNP

SEQ ID NO: 7624 - protein, 85 aa, Homo sapiens
MLESLKKMQTPPSLPPCPESAGAATTEALSPPKTPSLLPPLGLSQSGPPGLLPSPSFDSKPPTTLLGLIPAPSMVPATDTKAPPT

SEQ ID NO: 7625 - protein, 85 aa, Homo sapiens
LQAETATKPQATSAPSPAPKQSFLFGTQNTSPSSPAAPAASSAPPMFKPIFTAPPKSEKEGPTPPGPSVTATAPSSSSLPTTTST

SEQ ID NO: 7626 - protein, 85 aa, Homo sapiens
TAPTFQPVFSSMGPPASVPLPAPFFKQTTTPATAPTTTAPLFTGLASATSAVAPITSASPSTDSASKPAFGFGINSVSSSSVSTT

SEQ ID NO: 7627 - protein, 85 aa, Homo sapiens
TSTATAASQPFLFGAPQASAASFTPAMGSIFQFGKPPALPTTTTVTTFSQSLHTAVPTATSSSAADFSGFGSTLATSAPATSSQP

SEQ ID NO: 7628 - protein, 85 aa, Homo sapiens
TLTFSNTSTPTFNIPFGSSAKSPLPSYPGANPQPAFGAAEGQPPGAAKPALAPSFGSSFTFGNSAAPAAAPTPAPPSMIKVVPAY

SEQ ID NO: 7629 - protein, 85 aa, Homo sapiens
VPTPIHPIFGGATHSAFGLKATASAFGAPASSQPAFGGSTAVFFGAATSSGFGATTQTASSGSSSSVFGSTTPSPFTFGGSAAPA

SEQ ID NO: 7630 - protein, 85 aa, Homo sapiens
GSGSFGINVATPGSSTTTGAFSFGAGQSGSTATSTPFAGGLGQNALGTTGQSTPFAFNVSSTTESKPVFGGTATPTFGLNTPAPG

SEQ ID NO: 7631 - protein, 85 aa, Homo sapiens
LLLYLVPAAAALAWLTVGATAAWWGLSREPRGSRPLSSFVRKARHRRPLSSFVRKARHRRTLFASPLAKSTANGNLLEPRTLLEG

SEQ ID NO: 7632 - protein, 85 aa, Homo sapiens
PDPAELLLMGSYLGKPGPPQPAAAPEGQDLRDRPGRRPPARPAPRSPPPRSPPPRSPPPSPPTHRAHHVYPSLPTPLLRPSRRPS

SEQ ID NO: 7633 - protein, 85 aa, Homo sapiens
PRDCGTLPNRFVITPRRRYPIHQAQYSCLGVLPTVCWNGYHKKAVLSPRNSRMVCSPVTVRIAPPDRRFSRSAIPEQIISSTLSS

SEQ ID NO: 7634 - protein, 85 aa, Homo sapiens
PSSNAPDPCAKETVLSALKEKEKKRTVEEEDQIFLDGQENKRRRHDSSGSGHSAFEPLVANGVPASFVPKPGSLKRGLNSQSSDD

SEQ ID NO: 7635 - protein, 85 aa, Homo sapiens
HLNKRSRSSSMSSLTGAYASGIPSSSRNAITSSYSSTRGISQLWKRNGPSSSPFSSPASSRSQTPERPAKKIREEELCHHSSSST

SEQ ID NO: 7636 - protein, 85 aa, Homo sapiens
PLAADRESQGEKAADTTPRKKQNSNSQSTPGSSGQRKRKVQLLPSRRGEQLTLPPPPQLGYSITAEDLDLEKKASLQWFNQALED

SEQ ID NO: 7637 - protein, 85 aa, Homo sapiens
KSDAASNSVTETPPITQPSFTFTLPAAAPASPPTSLLAPSTNPLLESLKKMQTPPSLPPCPESAGAATTEALSPPKTPSLLPPLG

SEQ ID NO: 7638 - protein, 85 aa, Homo sapiens
LSQSGPPGLLPSPSFDSKPPTTLLGLIPAPSMVPATDTKAPPTLQAETATKPQATSAPSPAPKQSFLFGTQNTSPSSPAAPAASS

SEQ ID NO: 7639 - protein, 85 aa, Homo sapiens
APPMFKPIFTAPPKSEKEGPTPPGPSVTATAPSSSSLPTTTSTTAPTFQPVFSSMGPPASVPLPAPFFKQTTTPATAPTTTAPLF

SEQ ID NO: 7640 - protein, 85 aa, Homo sapiens
TGLASATSAVAPITSASPSTDSASKPAFGFGINSVSSSSVSTTTSTATAASQPFLFGAPQASAASFTPAMGSIFQFGKPPALPTT

SEQ ID NO: 7641 - protein, 85 aa, Homo sapiens
TTVTTFSQSLHTAVPTATSSSAADFSGFGSTLATSAPATSSQPTLTFSNTSTPTFNIPFGSSAKSPLPSYPGANPQPAFGAAEGQ

SEQ ID NO: 7642 - protein, 85 aa, Homo sapiens
PPGAAKPALAPSFGSSFTFGNSAAPAAAPTPAPPSMIKVVPAYVPTPIHPIFGGATHSAFGLKATASAFGAPASSQPAFGGSTAV

SEQ ID NO: 7643 - protein, 85 aa, Homo sapiens
FFGAATSSGFGATTQTASSGSSSSVFGSTTPSPFTFGGSAAPAGSGSFGINVATPGSSTTTGAFSFGAGQSGSTATSTPFAGGLG

SEQ ID NO: 7644 - protein, 85 aa, Homo sapiens
QNALGTTGQSTPFAFNVSSTTESKPVFGGTATPTFGLNTPAPGVGTSGSSLSFGASSAPAQGFVGVAPFGSAALSFSIGAGSKTP

SEQ ID NO: 7645 - protein, 84 aa, Homo sapiens
EKAKEEMHRVEILPPANQEDKKMQPVTIASLQASVLPMVSMVGVQLSPPVTFQLRAGSGPVFLSGQERYEKKAGKRRRGNKSQR

SEQ ID NO: 7646 - protein, 85 aa, Homo sapiens
MLLHTICLGEKAKEEMHRVEILPPANQEDKKMQPVTIASLQASVLPMVSMVGVQLSPPVTFQLRAGSGPVFLSGQERYEKKAGKR

SEQ ID NO: 7647 - protein, 85 aa, Homo sapiens
ATAAQGPLSLLWGWLWSERFWLPENVSWADLEGPADGYGYPRGRHILSVFPLAAGIFFVRLLFERILIRKGWRACQSSWIGMSEK

SEQ ID NO: 7648 - protein, 85 aa, Homo sapiens
SNAGFAIGGIRTSPQRLLNSVKACGDSHFIYVYSAMELDFSGRHLGSGTSDSAGITIHFSLFQVGFITIISWNWPSIGPLCFLSL

SEQ ID NO: 7649 - protein, 84 aa, Homo sapiens
IRTSPQRLLNSVKACGDSHFIYVYSAMELDFSGRHLGSGTSDSAGITIHFSLFQVGFITIISWNWPSIGPLCFLSLQTLKERTS

SEQ ID NO: 7650 - protein, 85 aa, Homo sapiens
GRHILSVFPLAAGIFFVRLLFERILIRKGWRACQSSWIGMSEKSNAGFAIGGIRTSPQRLLNSVKACGDSHFIYVYSAMELDFSG

SEQ ID NO: 7651 - protein, 85 aa, Homo sapiens
AAAGAPDGMEEPGMDTEAETVATEAPARPVNCLEAEAAAGAAAEDSGAARGSLQPAPAQPPGDPAAQASVSNGEDAGGGAGRELV

SEQ ID NO: 7652 - protein, 85 aa, Homo sapiens
DLKIIWNKTKHDVKFPLDSTGSELKQKIHSITGLPPAMQKVMYKGLVPEDKTLREIKVTSGAKIMVVGSTINDVLAVNTPKDAAQ

SEQ ID NO: 7653 - protein, 85 aa, Homo sapiens
QDAKAEENKKEPLCRQKQHRKVLDKGKPEDVMPSVKGAQERLPTVPLSGMYNKSGGKVRLTFKLEQDQLWIGTKERTEKLPMGSI

SEQ ID NO: 7654 - protein, 84 aa, Homo sapiens
GGKVRLTFKLEQDQLWIGTKERTEKLPMGSIKNVVSEPIEGHEDYHMMAFQLGPTEASYYWVYWVPTQYVDAIKDTVLGKWQYF

SEQ ID NO: 7655 - protein, 85 aa, Homo sapiens
AEDSGAARGSLQPAPAQPPGDPAAQASVSNGEDAGGGAGRELVDLKIIWNKTKHDVKFPLDSTGSELKQKIHSITGLPPAMQKVM

SEQ ID NO: 7656 - protein, 85 aa, Homo sapiens
YKGLVPEDKTLREIKVTSGAKIMVVGSTINDVLAVNTPKDAAQQDAKAEENKKEPLCRQKQHRKVLDKGKPEDVMPSVKGAQERL

SEQ ID NO: 7657 - protein, 85 aa, Homo sapiens
PTVPLSGMYNKSGGKVRLTFKLEQDQLWIGTKERTEKLPMGSIKNVVSEPIEGHEDYHMMAFQLGPTEASYYWVYWVPTQYVDAI

SEQ ID NO: 7658 - protein, 85 aa, Homo sapiens
YQASAVSLLPRDIPSCHSPSPGFSHLPTSSSQLAPDLLQFPLGQDPSFLAIPILTLPPSDSLVPPYIVWYIVWPSALISFLGCTL

SEQ ID NO: 7659 - protein, 85 aa, Homo sapiens
TVQFSNGKLQSPGNMRFTLYENKDSTNPRKRNQRILAAETDRLSYVGNNFGTGALKCNTLCRHFVGILNKTSGQMEVYDAELFNM

SEQ ID NO: 7660 - protein, 85 aa, Homo sapiens
QPLFSDVSVESELALESQTKTYREKMDSCIEAFGTTKQKRALNTRRMNRVGNESLNRAVAKAAETIIDTKGVTALVSDAIHNDLQ

SEQ ID NO: 7661 - protein, 85 aa, Homo sapiens
DDSLYLPPCYDDAAKPEDVYKFEDLLSPAEYEALQSPSEAFRNVTSEEILKMIEENSHCTFVIEALKSLPSDVESRDRQARCIWF

SEQ ID NO: 7662 - protein, 85 aa, Homo sapiens
MDTLIKFRAHRVVKRKSALGPGVPHIINTKLLKHFTCLTYNNGRLRNLISDSMKAKITAYVIILALHIHDFQIDLTVLQRDLKLS

SEQ ID NO: 7663 - protein, 85 aa, Homo sapiens
GQDPSFLAIPILTLPPSDSLVPPYIVWYIVWPSALISFLGCTLTVQFSNGKLQSPGNMRFTLYENKDSTNPRKRNQRILAAETDR

SEQ ID NO: 7664 - protein, 85 aa, Homo sapiens
LSYVGNNFGTGALKCNTLCRHFVGILNKTSGQMEVYDAELFNMQPLFSDVSVESELALESQTKTYREKMDSCIEAFGTTKQKRAL

SEQ ID NO: 7665 - protein, 85 aa, Homo sapiens
NTRRMNRVGNESLNRAVAKAAETIIDTKGVTALVSDAIHNDLQDDSLYLPPCYDDAAKPEDVYKFEDLLSPAEYEALQSPSEAFR

SEQ ID NO: 7666 - protein, 85 aa, Homo sapiens
NVTSEEILKMIEENSHCTFVIEALKSLPSDVESRDRQARCIWFLDTLIKFRAHRVVKRKSALGPGVPHIINTKLLKHFTCLTYNN

SEQ ID NO: 7667 - protein, 85 aa, Homo sapiens
GRLRNLISDSMKAKITAYVIILALHIHDFQIDLTVLQRDLKLSEKRMMEIAKAMRLKISKRRVSVAAGSEEDHKLGTLSLPLPPA

SEQ ID NO: 7668 - protein, 85 aa, Homo sapiens
AGAAAAVAAGAAAGAAAAAVSVAAPGRASAPPPPPPVYCVCRQPYDVNRFMIECDICKDWFHGSCVGVEEHHAVDIDLYHCPNCA

SEQ ID NO: 7669 - protein, 85 aa, Homo sapiens
VLHGSSLMKKRRNWHRHDYTEIDDGSKPVQAGTRTFIKELRSRVFPSADEIIIKMHGSQLTQRYLEKHGFDVPIMVPKLDDLGLR

SEQ ID NO: 7670 - protein, 85 aa, Homo sapiens
LPSPTFSVMDVERYVGGDKVIDVIDVARQADSKMTLHNYVKYFMNPNRPKVLNVISLEFSDTKMSELVEVPDIAKKLSWVENYWP

SEQ ID NO: 7671 - protein, 85 aa, Homo sapiens
DDSVFPKPFVQKYCLMGVQDSYTDFHIDFGGTSVWYHVLWGEKIFYLIKPTDENLARYESWSSSVTQSEVFFGDKVDKCYKCVVK

SEQ ID NO: 7672 - protein, 85 aa, Homo sapiens
QGHTLFVPTGWIHAVLTSQDCMAFGGNFLHNLNIGMQLRCYEMEKRLKTPDLFKFPFFEAICWFVAKNLLETLKELREDGFQPQT

SEQ ID NO: 7673 - protein, 85 aa, Homo sapiens
YLVQGVKALHTALKLWMKKELVSEHAFEIPDNVRPGHLIKELSKVIRAIEEENGKPVKSQGIPIVCPVSRSSNEATSPYHSRRKM

SEQ ID NO: 7674 - protein, 85 aa, Homo sapiens
RKLRDHNVRTPSNLDILELHTREVLKRLEMCPWEEDILSSKLNGKFNKHLQPSSTVPEWRAKDNDLRLLLTNGRIIKDERQPFAD

SEQ ID NO: 7675 - protein, 85 aa, Homo sapiens
QSLYTADSENEEDKRRTKKAKMKIEESSGVEGVEHEESQKPLNGFFTRVKSELRSRSSGYSDISESEDSGPECTALKSIFTTEES

SEQ ID NO: 7676 - protein, 85 aa, Homo sapiens
ESSGDEKKQEITSNFKEESNVMRNFLQKSQKPSRSEIPIKRECPTSTSTEEEAIQGMLSMAGLHYSTCLQRQIQSTDCSGERNSL

SEQ ID NO: 7677 - protein, 85 aa, Homo sapiens
QDPSSCHGSNHEVRQLYRYDKPVECGYHVKTEDPDLRTSSWIKQFDTSRFHPQDLSRSQKCIRKEGSSEISQRVQSRNYVDSSGS

SEQ ID NO: 7678 - protein, 85 aa, Homo sapiens
SLQNGKYMQNSNLTSGACQISNGSLSPERPVGETSFSVPLHPTKRPASNPPPISNQATKGKRPKKGMATAKQRLGKILKLNRNGH

SEQ ID NO: 7679 - protein, 84 aa, Homo sapiens
YMQNSNLTSGACQISNGSLSPERPVGETSFSVPLHPTKRPASNPPPISNQATKGKRPKKGMATAKQRLGKILKLNRNGHARFFV

SEQ ID NO: 7680 - protein, 85 aa, Homo sapiens
QPYDVNRFMIECDICKDWFHGSCVGVEEHHAVDIDLYHCPNCAVLHGSSLMKKRRNWHRHDYTEIDDGSKPVQAGTRTFIKELRS

SEQ ID NO: 7681 - protein, 85 aa, Homo sapiens
RVFPSADEIIIKMHGSQLTQRYLEKHGFDVPIMVPKLDDLGLRLPSPTFSVMDVERYVGGDKVIDVIDVARQADSKMTLHNYVKY

SEQ ID NO: 7682 - protein, 85 aa, Homo sapiens
FMNPNRPKVLNVISLEFSDTKMSELVEVPDIAKKLSWVENYWPDDSVFPKPFVQKYCLMGVQDSYTDFHIDFGGTSVWYHVLWGE

SEQ ID NO: 7683 - protein, 85 aa, Homo sapiens
KIFYLIKPTDENLARYESWSSSVTQSEVFFGDKVDKCYKCVVKQGHTLFVPTGWIHAVLTSQDCMAFGGNFLHNLNIGMQLRCYE

SEQ ID NO: 7684 - protein, 85 aa, Homo sapiens
MEKRLKTPDLFKFPFFEAICWFVAKNLLETLKELREDGFQPQTYLVQGVKALHTALKLWMKKELVSEHAFEIPDNVRPGHLIKEL

SEQ ID NO: 7685 - protein, 85 aa, Homo sapiens
SKVIRAIEEENGKPVKSQGIPIVCPVSRSSNEATSPYHSRRKMRKLRDHNVRTPSNLDILELHTREVLKRLEMCPWEEDILSSKL

SEQ ID NO: 7686 - protein, 85 aa, Homo sapiens
NGKFNKHLQPSSTVPEWRAKDNDLRLLLTNGRIIKDERQPFADQSLYTADSENEEDKRRTKKAKMKIEESSGVEGVEHEESQKPL

SEQ ID NO: 7687 - protein, 85 aa, Homo sapiens
NGFFTRVKSELRSRSSGYSDISESEDSGPECTALKSIFTTEESESSGDEKKQEITSNFKEESNVMRNFLQKSQKPSRSEIPIKRE

SEQ ID NO: 7688 - protein, 85 aa, Homo sapiens
CPTSTSTEEEAIQGMLSMAGLHYSTCLQRQIQSTDCSGERNSLQDPSSCHGSNHEVRQLYRYDKPVECGYHVKTEDPDLRTSSWI

SEQ ID NO: 7689 - protein, 85 aa, Homo sapiens
KQFDTSRFHPQDLSRSQKCIRKEGSSEISQRVQSRNYVDSSGSSLQNGKYMQNSNLTSGACQISNGSLSPERPVGETSFSVPLHP

SEQ ID NO: 7690 - protein, 85 aa, Homo sapiens
EDFIVISDDSGSESSGGARPGRSRRPRRALSRTSGALPRRTVDFIDLTRETRPRTKDRSGLYVIDLTRAEGENRPIATLDLTLEP

SEQ ID NO: 7691 - protein, 85 aa, Homo sapiens
VTPSQKEPTSLQTCASLSGKAVMEGHVDRSSQPTARRIINSDPVDLDLVEENTFVGPPPATSISGGSVYPTEPNCSSATFTGNLS

SEQ ID NO: 7692 - protein, 85 aa, Homo sapiens
FLASLQLSSDVSSLSPTSNNSRSSSSSSNQKAPLPCPQQDVSRPPQALPCPLRPLPCPPRASPCPPRASSCPPRALSCPSQTMQC

SEQ ID NO: 7693 - protein, 85 aa, Homo sapiens
QLPALTHPPQEVPCPRQNIPGPPQDSLGLPQDVPGLPQSILHPQDVAYLQDMPRSPGDVPQSPSDVSPSPDAPQSPGGMPHLPGD

SEQ ID NO: 7694 - protein, 85 aa, Homo sapiens
VLHSPGDMPHSSGDVTHSPRDIPHLPGDRPDFTQNDVQNRDMPMDISALSSPSCSPSPQSETPLEKVPWLSVMETPARKEISLSE

SEQ ID NO: 7695 - protein, 85 aa, Homo sapiens
PAKPGSAHVQSRTPQGGLYNRPCLHRLKYFLRPPVHHLFFQTLIPDKDTRENKGQKLEPIPHRRLRMVTNTIEENFPLGTVQFLM

SEQ ID NO: 7696 - protein, 85 aa, Homo sapiens
DFVSPQHYPPREIVAHIIQKILLSGSETVDVLKEAYMLLMKIQQLHPANAKTVEWDWKLLTYVMEEEGQTLPGRVLFLRYVVQTL

SEQ ID NO: 7697 - protein, 85 aa, Homo sapiens
EDDFQQTLRRQRQHLQQSIANMVLSCDKQPHNVRDVIKWLVKAVTEDGLTQPPNGNQTSSGTGILKASSSHPSSQPNLTKNTNQL

SEQ ID NO: 7698 - protein, 85 aa, Homo sapiens
IVCQLQRMLSIAVEVDRTPTCSSNKIAEMMFGFVLDIPERSQREMFFTTMESHLLRCKVLEIIFLHSCETPTRLPLSLAQALYFL

SEQ ID NO: 7699 - protein, 85 aa, Homo sapiens
NNSTSLLKCQSDKSQWQTWDELVEHLQFLLSSYQHVLREHLRSSVIDRKDLIIKRIKPKPQQGDDITVVDVEKQIEAFRSRLIQM

SEQ ID NO: 7700 - protein, 85 aa, Homo sapiens
DFIDLTRETRPRTKDRSGLYVIDLTRAEGENRPIATLDLTLEPVTPSQKEPTSLQTCASLSGKAVMEGHVDRSSQPTARRIINSD

SEQ ID NO: 7701 - protein, 85 aa, Homo sapiens
PVDLDLVEENTFVGPPPATSISGGSVYPTEPNCSSATFTGNLSFLASLQLSSDVSSLSPTSNNSRSSSSSSNQKAPLPCPQQDVS

SEQ ID NO: 7702 - protein, 85 aa, Homo sapiens
RPPQALPCPLRPLPCPPRASPCPPRASSCPPRALSCPSQTMQCQLPALTHPPQEVPCPRQNIPGPPQDSLGLPQDVPGLPQSILH

SEQ ID NO: 7703 - protein, 85 aa, Homo sapiens
PQDVAYLQDMPRSPGDVPQSPSDVSPSPDAPQSPGGMPHLPGDVLHSPGDMPHSSGDVTHSPRDIPHLPGDRPDFTQNDVQNRDM

SEQ ID NO: 7704 - protein, 85 aa, Homo sapiens
PMDISALSSPSCSPSPQSETPLEKVPWLSVMETPARKEISLSEPAKPGSAHVQSRTPQGGLYNRPCLHRLKYFLRPPVHHLFFQT

SEQ ID NO: 7705 - protein, 85 aa, Homo sapiens
LIPDKDTRENKGQKLEPIPHRRLRMVTNTIEENFPLGTVQFLMDFVSPQHYPPREIVAHIIQKILLSGSETVDVLKEAYMLLMKI

SEQ ID NO: 7706 - protein, 85 aa, Homo sapiens
QQLHPANAKTVEWDWKLLTYVMEEEGQTLPGRVLFLRYVVQTLEDDFQQTLRRQRQHLQQSIANMVLSCDKQPHNVRDVIKWLVK

SEQ ID NO: 7707 - protein, 85 aa, Homo sapiens
AVTEDGLTQPPNGNQTSSGTGILKASSSHPSSQPNLTKNTNQLIVCQLQRMLSIAVEVDRTPTCSSNKIAEMMFGFVLDIPERSQ

SEQ ID NO: 7708 - protein, 85 aa, Homo sapiens
REMFFTTMESHLLRCKVLEIIFLHSCETPTRLPLSLAQALYFLNNSTSLLKCQSDKSQWQTWDELVEHLQFLLSSYQHVLREHLR

SEQ ID NO: 7709 - protein, 85 aa, Homo sapiens
SYHETSKMKVLKFACRVQKKDPKDWAVQYREAVEMEVQAAAVAVAEAEARAEIYSPCLQIPLINCSSPSHGAKVHPWNLCPHSSQ

SEQ ID NO: 7710 - protein, 85 aa, Homo sapiens
GKRDNRVAYMNPIAMARSRGPIQSSGPTIQDYLNRPRPTWEEVKEQLEKKKKGSKALAEFEEKMNENWKKELEKHREKLLSGSES

SEQ ID NO: 7711 - protein, 85 aa, Homo sapiens
SSKKRQRKKKEKKKSGRYSSSSSSSSDSSSSSSDSEDEDKKQGKRRKKKKNRSHKSSESSMSETESDSKDSLKKKKKSKDGTEKE

SEQ ID NO: 7712 - protein, 85 aa, Homo sapiens
VKEQLEKKKKGSKALAEFEEKMNENWKKELEKHREKLLSGSESSSKKRQRKKKEKKKSGRYSSSSSSSSDSSSSSSDSEDEDKKQ

SEQ ID NO: 7713 - protein, 85 aa, Homo sapiens
GKRRKKKKNRSHKSSESSMSETESDSKDSLKKKKKSKDGTEKEKDIKGLSKKRKMYSEDKPLSSESLSESEYIEEVRAKKKKSSE

SEQ ID NO: 7714 - protein, 85 aa, Homo sapiens
SEPGMLGRKDVWVPRETPFTKAMEVEAAEARSPAPGYKRSGRRYKCLSCTKTFPNAPRAARHAATHGPADCSEEVAEVKPKPETE

SEQ ID NO: 7715 - protein, 85 aa, Homo sapiens
AKAEEASGEKVSGSAAKPRPYACPLCPKAYKTAPELRSHGRSHTGEKPFPCPECGRRFMQPVCLRVHLASHAGELPFRCAHCPKA

SEQ ID NO: 7716 - protein, 85 aa, Homo sapiens
YGALSKLKIHQRGHTGERPYACADCGKSFADPSVFRKHRRTHAGLRPYSCERCGKAYAELKDLRNHERSHTGERPFLCSECGKSF

SEQ ID NO: 7717 - protein, 85 aa, Homo sapiens
SRSSSLTCHQRIHAAQKPYRCPACGKGFTQLSSYQSHERTHSGEKPFLCPRCGRMFSDPSSFRRHQRAHEGVKPYHCEKCGKDFR

SEQ ID NO: 7718 - protein, 85 aa, Homo sapiens
QPADLAMHRRVHTGDRPFKCLQCDKTFVASWDLKRHALVHSGQRPFRCEECGRAFAERASLTKHSRVHSGERPFHCNACGKSFVV

SEQ ID NO: 7719 - protein, 85 aa, Homo sapiens
SSSLRKHERTHRSSEAAGVPPAQELVVGLALPVGVAGESSAAPAAGAGLGDPPAGLLGLPPESGGVMATQWQVVGMTVEHVECQD

SEQ ID NO: 7720 - protein, 85 aa, Homo sapiens
AGVREAPGPLEGAGEAGGEEADEKPPQFVCRECKETFSTMTLLRRHERSHPELRPFPCTQCGKSFSDRAGLRKHSRTHSSVRPYT

SEQ ID NO: 7721 - protein, 85 aa, Homo sapiens
RYKCLSCTKTFPNAPRAARHAATHGPADCSEEVAEVKPKPETEAKAEEASGEKVSGSAAKPRPYACPLCPKAYKTAPELRSHGRS

SEQ ID NO: 7722 - protein, 85 aa, Homo sapiens
HTGEKPFPCPECGRRFMQPVCLRVHLASHAGELPFRCAHCPKAYGALSKLKIHQRGHTGERPYACADCGKSFADPSVFRKHRRTH

SEQ ID NO: 7723 - protein, 85 aa, Homo sapiens
AGLRPYSCERCGKAYAELKDLRNHERSHTGERPFLCSECGKSFSRSSSLTCHQRIHAAQKPYRCPACGKGFTQLSSYQSHERTHS

SEQ ID NO: 7724 - protein, 85 aa, Homo sapiens
GEKPFLCPRCGRMFSDPSSFRRHQRAHEGVKPYHCEKCGKDFRQPADLAMHRRVHTGDRPFKCLQCDKTFVASWDLKRHALVHSG

SEQ ID NO: 7725 - protein, 85 aa, Homo sapiens
QRPFRCEECGRAFAERASLTKHSRVHSGERPFHCNACGKSFVVSSSLRKHERTHRSSEAAGVPPAQELVVGLALPVGVAGESSAA

SEQ ID NO: 7726 - protein, 85 aa, Homo sapiens
PAAGAGLGDPPAGLLGLPPESGGVMATQWQVVGMTVEHVECQDAGVREAPGPLEGAGEAGGEEADEKPPQFVCRECKETFSTMTL

SEQ ID NO: 7727 - protein, 85 aa, Homo sapiens
MRRHERSHPELRPFPCTQCGKSFSDRAGLRKHSRTHSSVRPYTCPHCPKAFLSASDLRKHERTHPVPMGTPTPLEPLVALLGMPE

SEQ ID NO: 7728 - protein, 85 aa, Homo sapiens
AAAALRDPAQGYVTFEDVAVYFSQEEWRLLDDAQRLLYRNVMLENFTLLASLGCWHGAEAEEAPEQIASVGLLSSNIQQHQKQHC

SEQ ID NO: 7729 - protein, 85 aa, Homo sapiens
GEKPLKRQEGRVPVLRSCKVHLSEKSLQSREVGKALLISSGVLKHQVTHTGEKSHRSSKSREAFHAGKRHYKCSECGKAFGQKYL

SEQ ID NO: 7730 - protein, 85 aa, Homo sapiens
LVQHQRLHAGKKTYECSECGKLFRDMSNLFIHQIVHTGERPYGCSNCGKSFSRNAHLIEHQRVHTGEKPFTCSECGKAFRHNSTL

SEQ ID NO: 7731 - protein, 85 aa, Homo sapiens
VQHHKIHTGVRPYECSECGKLFSFNSSLMKHQRIHTGERPYKCSECGKFYSHKSNLIKHWRVHTGERPYKCSDCGKFFTQCSSLM

SEQ ID NO: 7732 - protein, 85 aa, Homo sapiens
QHQKVHTGEKPFKCNECGRFFRENSTLVRHQRVHTGAKPYECRECGKFFSQSSTLMQHRKVHIGEKPFKCNECGRLFRENSSLVK

SEQ ID NO: 7733 - protein, 85 aa, Homo sapiens
MENFTLLASLGCWHGAEAEEAPEQIASVGLLSSNIQQHQKQHCGEKPLKRQEGRVPVLRSCKVHLSEKSLQSREVGKALLISSGV

SEQ ID NO: 7734 - protein, 85 aa, Homo sapiens
LKHQVTHTGEKSHRSSKSREAFHAGKRHYKCSECGKAFGQKYLLVQHQRLHAGKKTYECSECGKLFRDMSNLFIHQIVHTGERPY

SEQ ID NO: 7735 - protein, 85 aa, Homo sapiens
GCSNCGKSFSRNAHLIEHQRVHTGEKPFTCSECGKAFRHNSTLVQHHKIHTGVRPYECSECGKLFSFNSSLMKHQRIHTGERPYK

SEQ ID NO: 7736 - protein, 85 aa, Homo sapiens
CSECGKFYSHKSNLIKHWRVHTGERPYKCSDCGKFFTQCSSLMQHQKVHTGEKPFKCNECGRFFRENSTLVRHQRVHTGAKPYEC

SEQ ID NO: 7737 - protein, 84 aa, Homo sapiens
AGLFGVPISYHLFPDPVVQWLYQYWPQGQPAPLPPQLQSLFQEVLQDIGVPSGHCYKPFTTFTFQPEREHHRKVKKFALNHKTL

SEQ ID NO: 7738 - protein, 85 aa, Homo sapiens
ETEELSSNQEDAVIVEQPEVIPLTEDQEEKEGEKAPGEDTPRMPGKSEGSSDLENTPGPDVEMNSQVDKVNDPTESQQEDQLIGA

SEQ ID NO: 7739 - protein, 84 aa, Homo sapiens
IVEQPEVIPLTEDQEEKEGEKAPGEDTPRMPGKSEGSSDLENTPGPDVEMNSQVDKVNDPTESQQEDQLIGAQDEAKEQRNGTK

SEQ ID NO: 7740 - protein, 84 aa, Homo sapiens
EQILELLVLEQFLTILPREFYAWIREHGPESGKALAAMVEDLTERALEAKAVGSMPQAGRAGGNSTLQRRLGARHPAGASGGQA

SEQ ID NO: 7741 - protein, 84 aa, Homo sapiens
RYLQKSKQAYCKNPVYTTGRKPTVLEDNLSHSDWASEPELLSDVSCPPFLESGAESQSDIHTRKPFPVSKASQSGLLKRTIFLT

SEQ ID NO: 7742 - protein, 85 aa, Homo sapiens
CNHTVLDPDLRMTLYTHIVTDIKNINAKHKNNKVNVVLQNFMYTMLRDSNATAAKMSLDVMIELYRRNIWNDAKTVNVITTACFS

SEQ ID NO: 7743 - protein, 85 aa, Homo sapiens
KVTKILVAALTFFLGKDEDEKQDSDSESEDDGPTARDLLVQYATGKKSSKNKKKLEKAMKVLKKQKKKKKPEVFNFSAIHLIHDP

SEQ ID NO: 7744 - protein, 85 aa, Homo sapiens
QDFAEKLLKQLECCKERFEVKMMLMNLISRLVGIHELFLFNFYPFLQRFLQPHQREVTKILLFAAQASHHLVPPEIIQSLLMTVA

SEQ ID NO: 7745 - protein, 85 aa, Homo sapiens
NNFVTDKNSGEVMTVGINAIKEITARCPLAMTEELLQDLAQYKTHKDKNVMMSARTLIHLFRTLNPQMLQKKFRGKPTEASIEAR

SEQ ID NO: 7746 - protein, 85 aa, Homo sapiens
VQEYGELDAKDYIPGAEVLEVEKEENAENDEDGWESTSLSEEEDADGEWIDVQHSSDEEQQEISKKLNSMPMEERKAKAAAISTS

SEQ ID NO: 7747 - protein, 85 aa, Homo sapiens
RVLTQEDFQKIRMAQMRKELDAAPGKSQKRKYIEIDSDEEPRGELLSLRDIERLHKKPKSDKETRLATAMAGKTDRKEFVRKKTK

SEQ ID NO: 7748 - protein, 85 aa, Homo sapiens
IFKLQPNKPSKELAELVMFMAQISHCYPEYLSNFPQEVKDLLSCNHTVLDPDLRMTLYTHIVTDIKNINAKHKNNKVNVVLQNFM

SEQ ID NO: 7749 - protein, 85 aa, Homo sapiens
YTMLRDSNATAAKMSLDVMIELYRRNIWNDAKTVNVITTACFSKVTKILVAALTFFLGKDEDEKQDSDSESEDDGPTARDLLVQY

SEQ ID NO: 7750 - protein, 85 aa, Homo sapiens
ATGKKSSKNKKKLEKAMKVLKKQKKKKKPEVFNFSAIHLIHDPQDFAEKLLKQLECCKERFEVKMMLMNLISRLVGIHELFLFNF

SEQ ID NO: 7751 - protein, 85 aa, Homo sapiens
YPFLQRFLQPHQREVTKILLFAAQASHHLVPPEIIQSLLMTVANNFVTDKNSGEVMTVGINAIKEITARCPLAMTEELLQDLAQY

SEQ ID NO: 7752 - protein, 85 aa, Homo sapiens
KTHKDKNVMMSARTLIHLFRTLNPQMLQKKFRGKPTEASIEARVQEYGELDAKDYIPGAEVLEVEKEENAENDEDGWESTSLSEE

SEQ ID NO: 7753 - protein, 85 aa, Homo sapiens
EDADGEWIDVQHSSDEEQQEISKKLNSMPMEERKAKAAAISTSRVLTQEDFQKIRMAQMRKELDAAPGKSQKRKYIEIDSDEEPR

SEQ ID NO: 7754 - protein, 85 aa, Homo sapiens
GELLSLRDIERLHKKPKSDKETRLATAMAGKTDRKEFVRKKTKTNPFSSSTNKEKKKQKNFMMMRYSQNVRSKNKRSFREKQLAL

SEQ ID NO: 7755 - protein, 85 aa, Homo sapiens
AARRRRSTGGGRARALNESKRVNNGNTAPEDSSPAKKTRRCQRQESKKMPVAGGKANKDRTEDKQDESVKALLLKGKAPVDPECT

SEQ ID NO: 7756 - protein, 85 aa, Homo sapiens
AKVGKAHVYCEGNDVYDVMLNQTNLQFNNNKYYLIQLLEDDAQRNFSVWMRWGRVGKMGQHSLVACSGNLNKAKEIFQKKFLDKT

SEQ ID NO: 7757 - protein, 85 aa, Homo sapiens
KNNWEDREKFEKVPGKYDMLQMDYATNTQDEEETKKEESLKSPLKPESQLDLRVQELIKLICNVQAMEEMMMEMKYNTKKAPLGK

SEQ ID NO: 7758 - protein, 85 aa, Homo sapiens
MTVAQIKAGYQSLKKIEDCIRAGQHGRALMEACNEFYTRIPHDFGLRTPPLIRTQKELSEKIQLLEALGDIEIAIKLVKTELQSP

SEQ ID NO: 7759 - protein, 85 aa, Homo sapiens
EHPLDQHYRNLHCALRPLDHESYEFKVISQYLQSTHAPTHSDYTMTLLDLFEVEKDGEKEAFREDLHNRMLLWHGSRMSNWVGIL

SEQ ID NO: 7760 - protein, 85 aa, Homo sapiens
SHGLRIAPPEAPITGYMFGKGIYFADMSSKSANYCFASRLKNTGLLLLSEVALGQCNELLEANPKAEGLLQGKHSTKGLGKMAPS

SEQ ID NO: 7761 - protein, 85 aa, Homo sapiens
RQESKKMPVAGGKANKDRTEDKQDESVKALLLKGKAPVDPECTAKVGKAHVYCEGNDVYDVMLNQTNLQFNNNKYYLIQLLEDDA

SEQ ID NO: 7762 - protein, 85 aa, Homo sapiens
QRNFSVWMRWGRVGKMGQHSLVACSGNLNKAKEIFQKKFLDKTKNNWEDREKFEKVPGKYDMLQMDYATNTQDEEETKKEESLKS

SEQ ID NO: 7763 - protein, 85 aa, Homo sapiens
PLKPESQLDLRVQELIKLICNVQAMEEMMMEMKYNTKKAPLGKLTVAQIKAGYQSLKKIEDCIRAGQHGRALMEACNEFYTRIPH

SEQ ID NO: 7764 - protein, 85 aa, Homo sapiens
DFGLRTPPLIRTQKELSEKIQLLEALGDIEIAIKLVKTELQSPEHPLDQHYRNLHCALRPLDHESYEFKVISQYLQSTHAPTHSD

SEQ ID NO: 7765 - protein, 85 aa, Homo sapiens
YTMTLLDLFEVEKDGEKEAFREDLHNRMLLWHGSRMSNWVGILSHGLRIAPPEAPITGYMFGKGIYFADMSSKSANYCFASRLKN

SEQ ID NO: 7766 - protein, 85 aa, Homo sapiens
TGLLLLSEVALGQCNELLEANPKAEGLLQGKHSTKGLGKMAPSSAHFVTLNGSTVPLGPASDTGILNPDGYTLNYNEYIVYNPNQ

SEQ ID NO: 7767 - protein, 33 aa, Homo sapiens
QALVFLWAKLCSGPGWTQSQSCPQRSRGSWKGS

SEQ ID NO: 7768 - protein, 79 aa, Homo sapiens
GSVCGRQALWPSTRLPGARGPNWPWTTSADGPKSTRTGGFRRRGRRGSCCTCMTVTRFPMSTSPPCWPTWRGCRAGPES

SEQ ID NO: 7769 - protein, 85 aa, Homo sapiens
ALVAPEAPSEQARRVFQTYDPEDNGFIPDSLLEDVMKALDLVSDPEYINLMKNKLDPEGLGIILLGPFLQEFFPDQGSSGPESFT

SEQ ID NO: 7770 - protein, 85 aa, Homo sapiens
SDPEYINLMKNKLDPEGLGIILLGPFLQEFFPDQGSSGPESFTVYHYNGLKQSNYNEKVMYVEGTAVVMGFEDPMLQTDDTPIKR

SEQ ID NO: 7771 - protein, 84 aa, Homo sapiens
PSAINLDSHSYEITSQNVKDGGRYTFEDAQEHIYKLMKSDSYARFLRSNAYQDLLLAKKKPESEQGRRTSLEKFTRSVCLQLLF

SEQ ID NO: 7772 - protein, 85 aa, Homo sapiens
PLVHMASSPAVDVSCRRREKRRQLDARRSKCRIRLGGHMEQWCLLKERLGFSLHSQLAKFLLDRYTSSGCVLCAGPEPLPPKGLQ

SEQ ID NO: 7773 - protein, 85 aa, Homo sapiens
YLVLLSHAHSRECSLVPGLRGPGGQDGGLVWECSAGHTFSWGPSLSPTPSEAPKPASLPHTTRRSWCSEATSGQELADLESEHDE

SEQ ID NO: 7774 - protein, 85 aa, Homo sapiens
RTQEARLPRRVGPPPETFPPPGEEEGEEEEDNDEDEEEMLSDASLWTYSSSPDDSEPDAPRLLPSPVTCTPKEGETPPAPAALSS

SEQ ID NO: 7775 - protein, 85 aa, Homo sapiens
PLAVPALSASSLSSRAPPPAEVRVQPQLSRTPQAAQQTEALASTGSQAQSAPTPAWDEDTAQIGPKRIRKAAKRELMPCDFPGCG

SEQ ID NO: 7776 - protein, 85 aa, Homo sapiens
RIFSNRQYLNHHKKYQHIHQKSFSCPEPACGKSFNFKKHLKEHMKLHSDTRDYICEFCARSFRTSSNLVIHRRIHTGEKPLQCEI

SEQ ID NO: 7777 - protein, 85 aa, Homo sapiens
CGFTCRQKASLNWHQRKHAETVAALRFPCEFCGKRFEKPDSVAAHRSKSHPALLLAPQESPSGPLEPCPSISAPGPLGSSEGSRP

SEQ ID NO: 7778 - protein, 85 aa, Homo sapiens
CLLKERLGFSLHSQLAKFLLDRYTSSGCVLCAGPEPLPPKGLQYLVLLSHAHSRECSLVPGLRGPGGQDGGLVWECSAGHTFSWG

SEQ ID NO: 7779 - protein, 85 aa, Homo sapiens
PSLSPTPSEAPKPASLPHTTRRSWCSEATSGQELADLESEHDERTQEARLPRRVGPPPETFPPPGEEEGEEEEDNDEDEEEMLSD

SEQ ID NO: 7780 - protein, 85 aa, Homo sapiens
ASLWTYSSSPDDSEPDAPRLLPSPVTCTPKEGETPPAPAALSSPLAVPALSASSLSSRAPPPAEVRVQPQLSRTPQAAQQTEALA

SEQ ID NO: 7781 - protein, 85 aa, Homo sapiens
STGSQAQSAPTPAWDEDTAQIGPKRIRKAAKRELMPCDFPGCGRIFSNRQYLNHHKKYQHIHQKSFSCPEPACGKSFNFKKHLKE

SEQ ID NO: 7782 - protein, 85 aa, Homo sapiens
HMKLHSDTRDYICEFCARSFRTSSNLVIHRRIHTGEKPLQCEICGFTCRQKASLNWHQRKHAETVAALRFPCEFCGKRFEKPDSV

SEQ ID NO: 7783 - protein, 85 aa, Homo sapiens
KTNGGRCRIRALCWSRREWRGAGMAQKKYLQAKLTQFLREDRIQLWKPPYTDENKKVGLALKDLAKQYSDRLECCENEVEKVIEE

SEQ ID NO: 7784 - protein, 85 aa, Homo sapiens
IRCKAIERGTGNDNYRTTGIATIEVFLPPRLKKDRKNLLETRLHITGRELRSKIAETFGLQENYIKIVINKKQLQLGKTLEEQGV

SEQ ID NO: 7785 - protein, 85 aa, Homo sapiens
AHNVKAMVLELKQSEEDARKNFQLEEEEQNEAKLKEKQIQRTKRGLEILAKRAAETVVDPEMTPYLDIANQTGRSIRIPPSERKA

SEQ ID NO: 7786 - protein, 85 aa, Homo sapiens
LMLAMGYHEKGRAFLKRKEYGIALPCLLDADKYFCECCRELLDTVDNYAVLQLDIVWCYFRLEQLECLDDAEKKLNLAQKCFKNC

SEQ ID NO: 7787 - protein, 85 aa, Homo sapiens
YGENHQRLVHIKGNCGKEKVLFLRLYLLQGIRNYHSGNDVEAYEYLNKARQLFKELYIDPSKVDNLLQLGFTAQEARLGLRACDG

SEQ ID NO: 7788 - protein, 85 aa, Homo sapiens
NVDHAATHITNRREELAQIRKEEKEKKRRRLENIRFLKGMGYSTHAAQQILLSNPQMWWLNDSNPETDNRQESPSQENIDRLVYM

SEQ ID NO: 7789 - protein, 85 aa, Homo sapiens
GFDALVAEAALRVFRGNVQLAAQTLAHNGGSLPPELPLSPEDSLSPPATSPSDSAGTSSASTDEDMETEAVNEILEDIPEHEEDY

SEQ ID NO: 7790 - protein, 84 aa, Homo sapiens
SLPPELPLSPEDSLSPPATSPSDSAGTSSASTDEDMETEAVNEILEDIPEHEEDYLDSTLEDEEIIIAEYLSYVENRKSATKKN

SEQ ID NO: 7791 - protein, 85 aa, Homo sapiens
IQLWKPPYTDENKKVGLALKDLAKQYSDRLECCENEVEKVIEEIRCKAIERGTGNDNYRTTGIATIEVFLPPRLKKDRKNLLETR

SEQ ID NO: 7792 - protein, 85 aa, Homo sapiens
MHITGRELRSKIAETFGLQENYIKIVINKKQLQLGKTLEEQGVAHNVKAMVLELKQSEEDARKNFQLEEEEQNEAKLKEKQIQRT

SEQ ID NO: 7793 - protein, 85 aa, Homo sapiens
KRGLEILAKRAAETVVDPEMTPYLDIANQTGRSIRIPPSERKALMLAMGYHEKGRAFLKRKEYGIALPCLLDADKYFCECCRELL

SEQ ID NO: 7794 - protein, 85 aa, Homo sapiens
DTVDNYAVLQLDIVWCYFRLEQLECLDDAEKKLNLAQKCFKNCYGENHQRLVHIKGNCGKEKVLFLRLYLLQGIRNYHSGNDVEA

SEQ ID NO: 7795 - protein, 85 aa, Homo sapiens
YEYLNKARQLFKELYIDPSKVDNLLQLGFTAQEARLGLRACDGNVDHAATHITNRREELAQIRKEEKEKKRRRLENIRFLKGMGY

SEQ ID NO: 7796 - protein, 85 aa, Homo sapiens
STHAAQQILLSNPQMWWLNDSNPETDNRQESPSQENIDRLVYMGFDALVAEAALRVFRGNVQLAAQTLAHNGGSLPPELPLSPED

SEQ ID NO: 7797 - protein, 85 aa, Homo sapiens
RNSRSSLQVDWHEEEWEKVWLNVDKSLECIIQRVDKLLQKERLHGEGCEDVFPCAGSCTSKKDCSPPPEESSPGEWSEALYPLLT

SEQ ID NO: 7798 - protein, 85 aa, Homo sapiens
TLTDCVAMMSDKAKKAMVFLLMQDSAPTIATYLSLQYRRDVVFCQTLTALICGFIIKLRNCLHDDGFLRQLYTIGLLAQFESLLS

SEQ ID NO: 7799 - protein, 85 aa, Homo sapiens
TYGEELAMLEDMSLGIMDLRNVTFKVTQATSSASADMLPVITGNRDGFNVRVPLPGPLFDALPREIQSGMLLRVQPVLFNVGINE

SEQ ID NO: 7800 - protein, 85 aa, Homo sapiens
QQTLAERFGDTSLQEVINVESLVRLNSYFEQFKEVLPEDCLPRSRSQTCLPELLRFLGQNVHARKNKNVDILWQAAEICRRLNGV

SEQ ID NO: 7801 - protein, 85 aa, Homo sapiens
RFTSCKSAKDRTAMSVTLEQCLILQHEHGMAPQVFTQALECMRSIGTREVVTQKNLSGLVPIRDLRLDPSLLCSIPLLALSPNLL

SEQ ID NO: 7802 - protein, 84 aa, Homo sapiens
QCLILQHEHGMAPQVFTQALECMRSIGTREVVTQKNLSGLVPIRDLRLDPSLLCSIPLLALSPNLLIVWLFLSIAYLVTKLRCK

SEQ ID NO: 7803 - protein, 85 aa, Homo sapiens
MHGEGCEDVFPCAGSCTSKKDCSPPPEESSPGEWSEALYPLLTTLTDCVAMMSDKAKKAMVFLLMQDSAPTIATYLSLQYRRDVV

SEQ ID NO: 7804 - protein, 85 aa, Homo sapiens
FCQTLTALICGFIIKLRNCLHDDGFLRQLYTIGLLAQFESLLSTYGEELAMLEDMSLGIMDLRNVTFKVTQATSSASADMLPVIT

SEQ ID NO: 7805 - protein, 85 aa, Homo sapiens
GNRDGFNVRVPLPGPLFDALPREIQSGMLLRVQPVLFNVGINEQQTLAERFGDTSLQEVINVESLVRLNSYFEQFKEVLPEDCLP

SEQ ID NO: 7806 - protein, 85 aa, Homo sapiens
RSRSQTCLPELLRFLGQNVHARKNKNVDILWQAAEICRRLNGVRFTSCKSAKDRTAMSVTLEQCLILQHEHGMAPQVFTQALECM

SEQ ID NO: 7807 - protein, 85 aa, Homo sapiens
DSPRLSSFTQHHRPVIAVHSGIARSPHPSSALHFPTTSILPQTASTYFPHTAIRYPPHLNPQDPLKDLVSLACDPASQQPGPLNG

SEQ ID NO: 7808 - protein, 84 aa, Homo sapiens
NGSGQLKMPSHCLSAQMLAPPPPGLPRLALPPATKPATTSEGGATSPTSPSYSPPDTSPANRSFVGLGPRDPAGIYQAQSWYLG

SEQ ID NO: 7809 - protein, 85 aa, Homo sapiens
TASTYFPHTAIRYPPHLNPQDPLKDLVSLACDPASQQPGPLNGSGQLKMPSHCLSAQMLAPPPPGLPRLALPPATKPATTSEGGA

SEQ ID NO: 7810 - protein, 85 aa, Homo sapiens
TAAKEHGCSDYDLEFGTECLQLALKYCCTKAKLVEGSPDLWKVTYKRDLYAAESIIKERISQEICVVMDTEEDNKHVGHLLEEVL

SEQ ID NO: 7811 - protein, 85 aa, Homo sapiens
KSELNHVKVTSEALGHAGRHLQQIILDQCYNFVCVNVTTSDFQETQKLLSMLEESSLCILYPVVVVSVHFLDFKLVPPSQKMENL

SEQ ID NO: 7812 - protein, 85 aa, Homo sapiens
SIFNGLKALAEDQINSKLSKPEVVIIHDAVRPFVEEGVLLKVVTAAKEHGCSDYDLEFGTECLQLALKYCCTKAKLVEGSPDLWK

SEQ ID NO: 7813 - protein, 85 aa, Homo sapiens
VTYKRDLYAAESIIKERISQEICVVMDTEEDNKHVGHLLEEVLKSELNHVKVTSEALGHAGRHLQQIILDQCYNFVCVNVTTSDF

SEQ ID NO: 7814 - protein, 85 aa, Homo sapiens
QETQKLLSMLEESSLCILYPVVVVSVHFLDFKLVPPSQKMENLMQIREFAKEVKERNILLYGLLISYPQDDQKLQESLRQGAIII

SEQ ID NO: 7815 - protein, 85 aa, Homo sapiens
GVALRDLPGRHVSSRSHVTAVLTVFHGRCFLPGFGVVTTFPSPSPAGAMEEEDEEARALLAGGPDEADRGAPAAPGALPALCDPS

SEQ ID NO: 7816 - protein, 85 aa, Homo sapiens
RLAHRLLVLLLMCFLGFAIFAMIILLPFRLKLNEWGTIIFSCFVCIGQVVFALGGIFNAFWLMEFGRFVFGIGGESLAVAQNTYA

SEQ ID NO: 7817 - protein, 85 aa, Homo sapiens
VSWFKGKELNLVFGLQLSMARIGSTVNMNLMGWLYSKIEALLGSAGHTTLGITLMIGGITCILSLICALALAYLDQRAERILHKE

SEQ ID NO: 7818 - protein, 85 aa, Homo sapiens
QGKTGEVIKLTDVKDFSLPLWLIFIICVCYYVAVFPFIGLGKVFFTEKFGFSSQAASAINSVVYVISAPMSPVFGLLVDKTGKNI

SEQ ID NO: 7819 - protein, 85 aa, Homo sapiens
IWVLCAVAATLVSHMMLAFTMWNPWIAMCLLGLSYSLLACALWPMVAFVVPEHQLGTAYGFMQSIQNLGLAIISIIAGMILDSRG

SEQ ID NO: 7820 - protein, 85 aa, Homo sapiens
PSPAGAMEEEDEEARALLAGGPDEADRGAPAAPGALPALCDPSRLAHRLLVLLLMCFLGFAIFAMIILLPFRLKLNEWGTIIFSC

SEQ ID NO: 7821 - protein, 85 aa, Homo sapiens
FVCIGQVVFALGGIFNAFWLMEFGRFVFGIGGESLAVAQNTYAVSWFKGKELNLVFGLQLSMARIGSTVNMNLMGWLYSKIEALL

SEQ ID NO: 7822 - protein, 85 aa, Homo sapiens
GSAGHTTLGITLMIGGITCILSLICALALAYLDQRAERILHKEQGKTGEVIKLTDVKDFSLPLWLIFIICVCYYVAVFPFIGLGK

SEQ ID NO: 7823 - protein, 85 aa, Homo sapiens
VFFTEKFGFSSQAASAINSVVYVISAPMSPVFGLLVDKTGKNIIWVLCAVAATLVSHMMLAFTMWNPWIAMCLLGLSYSLLACAL

SEQ ID NO: 7824 - protein, 85 aa, Homo sapiens
WPMVAFVVPEHQLGTAYGFMQSIQNLGLAIISIIAGMILDSRGYLFLEVFFIACVSLSLLSVVLLYLVNRAQGGNLNYSARQREE

SEQ ID NO: 7825 - protein, 85 aa, Homo sapiens
ELIDMAVLEEIQQELINQEQSIISEYEKSLQFDEKCLSIMLAEWEANPLICPVCTKYNLRITSGVVVCQCGLSIPSHACDTWAVI

SEQ ID NO: 7826 - protein, 84 aa, Homo sapiens
IDMAVLEEIQQELINQEQSIISEYEKSLQFDEKCLSIMLAEWEANPLICPVCTKYNLRITSGVVVCQCGLSIPSHACDTWAVIL

SEQ ID NO: 7827 - protein, 85 aa, Homo sapiens
ENLESRLKNAPYFRCEKGTDSIPLCRKCETRVLAWKIFSTKEWFCRINDISQRRFLVGILKQLNSLYLLHYFQNILQTTQGKDFI

SEQ ID NO: 7828 - protein, 85 aa, Homo sapiens
YNRSRIDLSKKEGKVVKSSLNQMLDKTVEQKMKEILYWFANSTQWTKANYTLLLLQMCNPKLLLTAANVIRVLFLREENNISGLN

SEQ ID NO: 7829 - protein, 85 aa, Homo sapiens
QDITDVCFSPEKDHSSKSATSQVYWTAKTQHTSLPLSKAPENEHFLGAASNPEEPWRNSLRCISEMNRLFSGKADITKPGYDPCN

SEQ ID NO: 7830 - protein, 85 aa, Homo sapiens
LLVDLDDIRDLSSGFSKYRDFIRYLPIHLSKYILRMLDRHTLNKCASVSQHWAAMAQQVKMDLSAHGFIQNQITFLQGSYTRGID

SEQ ID NO: 7831 - protein, 85 aa, Homo sapiens
PNYANKVSIPVPKMVDDGKSMRVKHPKWKLRTKNEYNLWTAYQNEETQQVLMEERNVFCGTYNVRILSDTWDQNRVIHYSGGDLI

SEQ ID NO: 7832 - protein, 85 aa, Homo sapiens
AVSSNRKIHLLDIIQVKAIPVEFRGHAGSVRALFLCEEENFLLSGSYDLSIRYWDLKSGVCTRIFGGHQGTITCMDLCKNRLVSG

SEQ ID NO: 7833 - protein, 85 aa, Homo sapiens
GRDCQVKVWDVDTGKCLKTFRHKDPILATRINDTYIVSSCERGLVKVWHIAMAQLVKTLSGHEGAVKCLFFDQWHLLSGSTDGLV

SEQ ID NO: 7834 - protein, 85 aa, Homo sapiens
MAWSMVGKYERCLMAFKHPKEVLDVSLLFLRVISACADGKIRIYNFFNGNCMKVIKANGRGDPVLSFFIQGNRISVCHISTFAKR

SEQ ID NO: 7835 - protein, 85 aa, Homo sapiens
WFCRINDISQRRFLVGILKQLNSLYLLHYFQNILQTTQGKDFIYNRSRIDLSKKEGKVVKSSLNQMLDKTVEQKMKEILYWFANS

SEQ ID NO: 7836 - protein, 85 aa, Homo sapiens
TQWTKANYTLLLLQMCNPKLLLTAANVIRVLFLREENNISGLNQDITDVCFSPEKDHSSKSATSQVYWTAKTQHTSLPLSKAPEN

SEQ ID NO: 7837 - protein, 85 aa, Homo sapiens
EHFLGAASNPEEPWRNSLRCISEMNRLFSGKADITKPGYDPCNLLVDLDDIRDLSSGFSKYRDFIRYLPIHLSKYILRMLDRHTL

SEQ ID NO: 7838 - protein, 85 aa, Homo sapiens
NKCASVSQHWAAMAQQVKMDLSAHGFIQNQITFLQGSYTRGIDPNYANKVSIPVPKMVDDGKSMRVKHPKWKLRTKNEYNLWTAY

SEQ ID NO: 7839 - protein, 85 aa, Homo sapiens
QNEETQQVLMEERNVFCGTYNVRILSDTWDQNRVIHYSGGDLIAVSSNRKIHLLDIIQVKAIPVEFRGHAGSVRALFLCEEENFL

SEQ ID NO: 7840 - protein, 85 aa, Homo sapiens
LSGSYDLSIRYWDLKSGVCTRIFGGHQGTITCMDLCKNRLVSGGRDCQVKVWDVDTGKCLKTFRHKDPILATRINDTYIVSSCER

SEQ ID NO: 7841 - protein, 85 aa, Homo sapiens
GLVKVWHIAMAQLVKTLSGHEGAVKCLFFDQWHLLSGSTDGLVMAWSMVGKYERCLMAFKHPKEVLDVSLLFLRVISACADGKIR

SEQ ID NO: 7842 - protein, 85 aa, Homo sapiens
IYNFFNGNCMKVIKANGRGDPVLSFFIQGNRISVCHISTFAKRINVGWNGIEPSATAQGGNASLTECAHVRLHIAGHLPASRLPV

SEQ ID NO: 7843 - protein, 84 aa, Homo sapiens
LMVVDNEEEPMEGVPLEQYRAWLDEDSNLSPSPLRDLSGGLGGQEEEEEQRWLDALEKGELDDNGDLKKEINERLLTARQRRCC

SEQ ID NO: 7844 - protein, 85 aa, Homo sapiens
ELAVAVLRDLLRYAAQLPALFRDISMNHLPGLLTSLLGLRPECEQSALEGMKACMTYFPRACGSLKGKLASFFLSRVDALSPQLQ

SEQ ID NO: 7845 - protein, 85 aa, Homo sapiens
QLACECYSRLPSLGAGFSQGLKHTESWEQELHSLLASLHTLLGALYEGAETAPVQNEGPGVEMLLSSEDGDAHVLLQLRQRFSGL

SEQ ID NO: 7846 - protein, 85 aa, Homo sapiens
ARCLGLMLSSEFGAPVSVPVQEILDFICRTLSVSSKNISLHGDGPLRLLLLPSIHLEALDLLSALILACGSRLLRFGILIGRLLP

SEQ ID NO: 7847 - protein, 85 aa, Homo sapiens
QVLNSWSIGRDSLSPGQERPYSTVRTKVYAILELWVQVCGASAGMLQGGASGEALLTHLLSDISPPADALKLRSPRGSPDGSLQT

SEQ ID NO: 7848 - protein, 85 aa, Homo sapiens
GKPSAPKKLKLDVGEAMAPPSHRKGDSNANSDVCAAALRGLSRTILMCGPLIKEETHRRLHDLVLPLVMGVQQGEVLGSSPYTSS

SEQ ID NO: 7849 - protein, 85 aa, Homo sapiens
RCRRELYCLLLALLLAPSPRCPPPLACALQAFSLGQREDSLEVSSFCSEALVTCAALTHPRVPPLQPMGPTCPTPAPVPPPEAPS

SEQ ID NO: 7850 - protein, 85 aa, Homo sapiens
PFRAPPFHPPGPMPSVGSMPSAGPMPSAGPMPSAGPVPSARPGPPTTANHLGLSVPGLVSVPPRLLPGPENHRAGSNEDPILAPS

SEQ ID NO: 7851 - protein, 85 aa, Homo sapiens
GTPPPTIPPDETFGGRVPRPAFVHYDKEEASDVEISLESDSDDSVVIVPEGLPPLPPPPPSGATPPPIAPTGPPTASPPVPAKEE

SEQ ID NO: 7852 - protein, 85 aa, Homo sapiens
PEELPAAPGPLPPPPPPPPPVPGPVTLPPPQLVPEGTPGGGGPPALEEDLTVININSSDEEEEEEEEEEEEEEEEEEEEEDFEEE

SEQ ID NO: 7853 - protein, 85 aa, Homo sapiens
EEDEEEYFEEEEEEEEEFEEEFEEEEGELEEEEEEEDEEEEEELEEVEREGESPAAGPPPQELVEEEPSAPPTLLEEETEDGSDK

SEQ ID NO: 7854 - protein, 85 aa, Homo sapiens
CEQSALEGMKACMTYFPRACGSLKGKLASFFLSRVDALSPQLQQLACECYSRLPSLGAGFSQGLKHTESWEQELHSLLASLHTLL

SEQ ID NO: 7855 - protein, 85 aa, Homo sapiens
GALYEGAETAPVQNEGPGVEMLLSSEDGDAHVLLQLRQRFSGLARCLGLMLSSEFGAPVSVPVQEILDFICRTLSVSSKNISLHG

SEQ ID NO: 7856 - protein, 85 aa, Homo sapiens
DGPLRLLLLPSIHLEALDLLSALILACGSRLLRFGILIGRLLPQVLNSWSIGRDSLSPGQERPYSTVRTKVYAILELWVQVCGAS

SEQ ID NO: 7857 - protein, 85 aa, Homo sapiens
AGMLQGGASGEALLTHLLSDISPPADALKLRSPRGSPDGSLQTGKPSAPKKLKLDVGEAMAPPSHRKGDSNANSDVCAAALRGLS

SEQ ID NO: 7858 - protein, 85 aa, Homo sapiens
RTILMCGPLIKEETHRRLHDLVLPLVMGVQQGEVLGSSPYTSSRCRRELYCLLLALLLAPSPRCPPPLACALQAFSLGQREDSLE

SEQ ID NO: 7859 - protein, 85 aa, Homo sapiens
VSSFCSEALVTCAALTHPRVPPLQPMGPTCPTPAPVPPPEAPSPFRAPPFHPPGPMPSVGSMPSAGPMPSAGPMPSAGPVPSARP

SEQ ID NO: 7860 - protein, 85 aa, Homo sapiens
GPPTTANHLGLSVPGLVSVPPRLLPGPENHRAGSNEDPILAPSGTPPPTIPPDETFGGRVPRPAFVHYDKEEASDVEISLESDSD

SEQ ID NO: 7861 - protein, 85 aa, Homo sapiens
DSVVIVPEGLPPLPPPPPSGATPPPIAPTGPPTASPPVPAKEEPEELPAAPGPLPPPPPPPPPVPGPVTLPPPQLVPEGTPGGGG

SEQ ID NO: 7862 - protein, 85 aa, Homo sapiens
PPALEEDLTVININSSDEEEEEEEEEEEEEEEEEEEEEDFEEEEEDEEEYFEEEEEEEEEFEEEFEEEEGELEEEEEEEDEEEEE

SEQ ID NO: 7863 - protein, 85 aa, Homo sapiens
ELEEVEREGESPAAGPPPQELVEEEPSAPPTLLEEETEDGSDKVQPPPETPAEEEMETETEAEALQEKEQDDTAAMLADFIDCPP

SEQ ID NO: 7864 - protein, 85 aa, Homo sapiens
LTLQDNSFLSIDKVPSKDAEEMRLFLDAVHQNRLPAAMKPSQGSGSFGAILGSRTSQKETSRQLSYSDNQASAKRGSLETKDDIP

SEQ ID NO: 7865 - protein, 85 aa, Homo sapiens
FRKVLGNPGRGSIKTVAGSGIARTIPSLTSTSTPLRSGLLENRTEKRKRMISTGSELNEDYPKENDSSSNNKAMTDPSRKYLTSS

SEQ ID NO: 7866 - protein, 85 aa, Homo sapiens
REKQLSLKQSEENRTSGLLPLQSSSFYGSRAGSKEHSSGGTNLDRTNVSSQTPSAKRSLGFLPQPVPLSVKKLRCNQDYTGWNKP

SEQ ID NO: 7867 - protein, 85 aa, Homo sapiens
RVPLSSHQQQQLQGFSNLGNTCYMNAILQSLFSLQSFANDLLKQGIPWKKIPLNALIRRFAHLLVKKDICNSETKKDLLKKVKNA

SEQ ID NO: 7868 - protein, 85 aa, Homo sapiens
ISATAERFSGYMQNDAHEFLSQCLDQLKEDMEKLNKTWKTEPVSGEENSPDISATRAYTCPVITNLEFEVQHSIICKACGEIIPK

SEQ ID NO: 7869 - protein, 85 aa, Homo sapiens
REQFNDLSIDLPRRKKPLPPRSIQDSLDLFFRAEELEYSCEKCGGKCALVRHKFNRLPRVLILHLKRYSFNVALSLNNKIGQQVI

SEQ ID NO: 7870 - protein, 85 aa, Homo sapiens
IPRYLTLSSHCTENTKPPFTLGWSAHMAMKFTFKSKSSLALCLDSDSEDELKRSVALSQRLCEMLGNEQQQEDLEKDSKLCPIEP

SEQ ID NO: 7871 - protein, 85 aa, Homo sapiens
DKSELENSGFDRMSEEELLAAVLEISKRDASPSLSHEDDDKPTSSPDTGFAEDDIQEMPENPDTMETEKPKTITELDPASFTEIT

SEQ ID NO: 7872 - protein, 85 aa, Homo sapiens
KDCDENKENKTPEGSQGEVDWLQQYDMEREREEQELQQALAQSLQEQEAWEQKEDDDLKRATELSLQEFNNSFVDALGSDEDSGN

SEQ ID NO: 7873 - protein, 85 aa, Homo sapiens
EDVFDMEYTEAEAEELKRNAETGNLPHSYRLISVVSHIGSTSSSGHYISDVYDIKKQAWFTYNDLEVSKIQEAAVQSDRDRSGYI

SEQ ID NO: 7874 - protein, 85 aa, Homo sapiens
GSGSFGAILGSRTSQKETSRQLSYSDNQASAKRGSLETKDDIPFRKVLGNPGRGSIKTVAGSGIARTIPSLTSTSTPLRSGLLEN

SEQ ID NO: 7875 - protein, 85 aa, Homo sapiens
RTEKRKRMISTGSELNEDYPKENDSSSNNKAMTDPSRKYLTSSREKQLSLKQSEENRTSGLLPLQSSSFYGSRAGSKEHSSGGTN

SEQ ID NO: 7876 - protein, 85 aa, Homo sapiens
LDRTNVSSQTPSAKRSLGFLPQPVPLSVKKLRCNQDYTGWNKPRVPLSSHQQQQLQGFSNLGNTCYMNAILQSLFSLQSFANDLL

SEQ ID NO: 7877 - protein, 85 aa, Homo sapiens
KQGIPWKKIPLNALIRRFAHLLVKKDICNSETKKDLLKKVKNAISATAERFSGYMQNDAHEFLSQCLDQLKEDMEKLNKTWKTEP

SEQ ID NO: 7878 - protein, 85 aa, Homo sapiens
VSGEENSPDISATRAYTCPVITNLEFEVQHSIICKACGEIIPKREQFNDLSIDLPRRKKPLPPRSIQDSLDLFFRAEELEYSCEK

SEQ ID NO: 7879 - protein, 85 aa, Homo sapiens
CGGKCALVRHKFNRLPRVLILHLKRYSFNVALSLNNKIGQQVIIPRYLTLSSHCTENTKPPFTLGWSAHMAMKFTFKSKSSLALC

SEQ ID NO: 7880 - protein, 85 aa, Homo sapiens
LDSDSEDELKRSVALSQRLCEMLGNEQQQEDLEKDSKLCPIEPDKSELENSGFDRMSEEELLAAVLEISKRDASPSLSHEDDDKP

SEQ ID NO: 7881 - protein, 85 aa, Homo sapiens
TSSPDTGFAEDDIQEMPENPDTMETEKPKTITELDPASFTEITKDCDENKENKTPEGSQGEVDWLQQYDMEREREEQELQQALAQ

SEQ ID NO: 7882 - protein, 85 aa, Homo sapiens
SLQEQEAWEQKEDDDLKRATELSLQEFNNSFVDALGSDEDSGNEDVFDMEYTEAEAEELKRNAETGNLPHSYRLISVVSHIGSTS

SEQ ID NO: 7883 - protein, 85 aa, Homo sapiens
ETPTPLPPVPASPTCNPAPRTIQIEFPQHSSSLLESLNRHRLEGKFCDVSLLVQGRELRAHKAVLAAASPYFHDKLLLGDAPRLT

SEQ ID NO: 7884 - protein, 85 aa, Homo sapiens
LPSVIEADAFEGLLQLIYSGRLRLPLDALPAHLLVASGLQMWQVVDQCSEILRELETSGGGISARGGNSYHALLSTTSSTGGWCI

SEQ ID NO: 7885 - protein, 85 aa, Homo sapiens
RSSPFQTPVQSSASTESPASTESPVGGEGSELGEVLQIQVEEEEEEEEDDDDEDQGSATLSQTPQPQRVSGVFPRPHGPHPLPMT

SEQ ID NO: 7886 - protein, 85 aa, Homo sapiens
ATPRKLPEGESAPLELPAPPALPPKIFYIKQEPFEPKEEISGSGTQPGGAKEETKVFSGGDTEGNGELGFLLPSGPGPTSGGGGP

SEQ ID NO: 7887 - protein, 85 aa, Homo sapiens
SWKPVDLHGNEILSGGGGPGGAGQAVHGPVKLGGTPPADGKRFGCLCGKRFAVKPKRDRHIMLTFSLRPFGCGICNKRFKLKHHL

SEQ ID NO: 7888 - protein, 84 aa, Homo sapiens
KRFAVKPKRDRHIMLTFSLRPFGCGICNKRFKLKHHLTEHMKTHAGALHACPHCGRRFRVHACFLRHRDLCKGQGWATAHWTYK

SEQ ID NO: 7889 - protein, 85 aa, Homo sapiens
EGKFCDVSLLVQGRELRAHKAVLAAASPYFHDKLLLGDAPRLTLPSVIEADAFEGLLQLIYSGRLRLPLDALPAHLLVASGLQMW

SEQ ID NO: 7890 - protein, 85 aa, Homo sapiens
QVVDQCSEILRELETSGGGISARGGNSYHALLSTTSSTGGWCIRSSPFQTPVQSSASTESPASTESPVGGEGSELGEVLQIQVEE

SEQ ID NO: 7891 - protein, 85 aa, Homo sapiens
EEEEEEDDDDEDQGSATLSQTPQPQRVSGVFPRPHGPHPLPMTATPRKLPEGESAPLELPAPPALPPKIFYIKQEPFEPKEEISG

SEQ ID NO: 7892 - protein, 85 aa, Homo sapiens
SGTQPGGAKEETKVFSGGDTEGNGELGFLLPSGPGPTSGGGGPSWKPVDLHGNEILSGGGGPGGAGQAVHGPVKLGGTPPADGKR

SEQ ID NO: 7893 - protein, 85 aa, Homo sapiens
FGCLCGKRFAVKPKRDRHIMLTFSLRPFGCGICNKRFKLKHHLTEHMKTHAGALHACPHCGRRFRVHACFLRHRDLCKGQGWATA

SEQ ID NO: 7894 - protein, 85 aa, Homo sapiens
TDPLLDSQPASSTGEMDGLCPELLLIPPPLSNRGILGPVQSPCPSRDPAPIPTEPGCLLVEATATEEGPGNMEIIVETVAGTLTP

SEQ ID NO: 7895 - protein, 84 aa, Homo sapiens
GEMDGLCPELLLIPPPLSNRGILGPVQSPCPSRDPAPIPTEPGCLLVEATATEEGPGNMEIIVETVAGTLTPGAPGETPATAAS

SEQ ID NO: 7896 - protein, 85 aa, Homo sapiens
GVPAFFRWLSRKYPSIIVNCVEEKPKECNGVKIPVDASKPNPNDVEFDNLYLDMNGIIHPCTHPEDKPAPKNEDEMMVAIFEYID

SEQ ID NO: 7897 - protein, 85 aa, Homo sapiens
RLFSIVRPRRLLYMAIDGVAPRAKMNQQRSRRFRASKEGMEAAVEKQRVREEILAKGGFLPPEEIKERFDSNCITPGTEFMDNLA

SEQ ID NO: 7898 - protein, 85 aa, Homo sapiens
KCLRYYIADRLNNDPGWKNLTVILSDASAPGEGEHKIMDYIRRQRAQPNHDPNTHHCLCGADADLIMLGLATHEPNFTIIREEFK

SEQ ID NO: 7899 - protein, 85 aa, Homo sapiens
PNKPKPCGLCNQFGHEVKDCEGLPREKKGKHDELADSLPCAEGEFIFLRLNVLREYLERELTMASLPFTFDVERSIDDWVFMCFF

SEQ ID NO: 7900 - protein, 85 aa, Homo sapiens
VGNDFLPHLPSLEIRENAIDRLVNIYKNVVHKTGGYLTESGYVNLQRVQMIMLAVGEVEDSIFKKRKDDEDSFRRRQKEKRKRMK

SEQ ID NO: 7901 - protein, 85 aa, Homo sapiens
RDQPAFTPSGILTPHALGSRNSPGSQVASNPRQAAYEMRMQNNSSPSISPNTSFTSDGSPSPLGGIKRKAEDSDSEPEPEDNVRL

SEQ ID NO: 7902 - protein, 85 aa, Homo sapiens
WEAGWKQRYYKNKFDVDAADEKFRRKVVQSYVEGLCWVLRYYYQGCASWKWYYPFHYAPFASDFEGIADMPSDFEKGTKPFKPLE

SEQ ID NO: 7903 - protein, 85 aa, Homo sapiens
QLMGVFPAASGNFLPPSWRKLMSDPDSSIIDFYPEDFAIDLNGKKYAWQGVALLPFVDERRLRAALEEVYPDLTPEETRRNSLGG

SEQ ID NO: 7904 - protein, 85 aa, Homo sapiens
DVLFVGKHHPLHDFILELYQTGSTEPVEVPPELCHGIQGKFSLDEEAILPDQIVCSPVPMLRDLTQNTVVSINFKDPQFAEDYIF

SEQ ID NO: 7905 - protein, 85 aa, Homo sapiens
KAVMLPGARKPAAVLKPSDWEKSSNGRQWKPQLGFNRDRRPVHLDQAAFRTLGHVMPRGSGTGIYSNAAPPPVTYQGNLYRPLLR

SEQ ID NO: 7906 - protein, 85 aa, Homo sapiens
GQAQIPKLMSNMRPQDSWRGPPPLFQQQRFDRGVGAEPLLPWNRMLQTQNAAFQPNQYQMLAGPGGYPPRRDDRGGRQGYPREGR

SEQ ID NO: 7907 - protein, 84 aa, Homo sapiens
DSWRGPPPLFQQQRFDRGVGAEPLLPWNRMLQTQNAAFQPNQYQMLAGPGGYPPRRDDRGGRQGYPREGRKYPLPPPSGRYNWN

SEQ ID NO: 7908 - protein, 85 aa, Homo sapiens
NDVEFDNLYLDMNGIIHPCTHPEDKPAPKNEDEMMVAIFEYIDRLFSIVRPRRLLYMAIDGVAPRAKMNQQRSRRFRASKEGMEA

SEQ ID NO: 7909 - protein, 85 aa, Homo sapiens
AVEKQRVREEILAKGGFLPPEEIKERFDSNCITPGTEFMDNLAKCLRYYIADRLNNDPGWKNLTVILSDASAPGEGEHKIMDYIR

SEQ ID NO: 7910 - protein, 85 aa, Homo sapiens
RQRAQPNHDPNTHHCLCGADADLIMLGLATHEPNFTIIREEFKPNKPKPCGLCNQFGHEVKDCEGLPREKKGKHDELADSLPCAE

SEQ ID NO: 7911 - protein, 85 aa, Homo sapiens
GEFIFLRLNVLREYLERELTMASLPFTFDVERSIDDWVFMCFFVGNDFLPHLPSLEIRENAIDRLVNIYKNVVHKTGGYLTESGY

SEQ ID NO: 7912 - protein, 85 aa, Homo sapiens
VNLQRVQMIMLAVGEVEDSIFKKRKDDEDSFRRRQKEKRKRMKRDQPAFTPSGILTPHALGSRNSPGSQVASNPRQAAYEMRMQN

SEQ ID NO: 7913 - protein, 85 aa, Homo sapiens
NSSPSISPNTSFTSDGSPSPLGGIKRKAEDSDSEPEPEDNVRLWEAGWKQRYYKNKFDVDAADEKFRRKVVQSYVEGLCWVLRYY

SEQ ID NO: 7914 - protein, 85 aa, Homo sapiens
YQGCASWKWYYPFHYAPFASDFEGIADMPSDFEKGTKPFKPLEQLMGVFPAASGNFLPPSWRKLMSDPDSSIIDFYPEDFAIDLN

SEQ ID NO: 7915 - protein, 85 aa, Homo sapiens
GKKYAWQGVALLPFVDERRLRAALEEVYPDLTPEETRRNSLGGDVLFVGKHHPLHDFILELYQTGSTEPVEVPPELCHGIQGKFS

SEQ ID NO: 7916 - protein, 85 aa, Homo sapiens
MDEEAILPDQIVCSPVPMLRDLTQNTVVSINFKDPQFAEDYIFKAVMLPGARKPAAVLKPSDWEKSSNGRQWKPQLGFNRDRRPV

SEQ ID NO: 7917 - protein, 85 aa, Homo sapiens
HLDQAAFRTLGHVMPRGSGTGIYSNAAPPPVTYQGNLYRPLLRGQAQIPKLMSNMRPQDSWRGPPPLFQQQRFDRGVGAEPLLPW

SEQ ID NO: 7918 - protein, 85 aa, Homo sapiens
IQDLDITVMVFHHFGKDFPKSEKLSPDAFIQMALQLAYYRIYGQACATYESASLRMFHLGRTDTIRSASMDSLTFVKAMDDSSVT

SEQ ID NO: 7919 - protein, 85 aa, Homo sapiens
EHQKVELLRKAVQAHRGYTDRAIRGEAFDRHLLGLKLQAIEDLVPAKTDCVMFFGPVVPDGYGVCYNPMEAHINFSLSAYNSCAE

SEQ ID NO: 7920 - protein, 84 aa, Homo sapiens
HLLGLKLQAIEDLVPAKTDCVMFFGPVVPDGYGVCYNPMEAHINFSLSAYNSCAETNAARLAHYLEKALLDMRALLQSHPRAKL

SEQ ID NO: 7921 - protein, 85 aa, Homo sapiens
GQACATYESASLRMFHLGRTDTIRSASMDSLTFVKAMDDSSVTEHQKVELLRKAVQAHRGYTDRAIRGEAFDRHLLGLKLQAIED

SEQ ID NO: 7922 - protein, 84 aa, Homo sapiens
VARFAAQAAHQGTASQYFMLLLLTDGAVTDVEATREAVAPREALAQTVLAEVPTQLVSYFRAQGWAPLKPLPPSAKDPAQAPQA

SEQ ID NO: 7923 - protein, 85 aa, Homo sapiens
RLYGPTNFAPIINHVARFAAQAAHQGTASQYFMLLLLTDGAVTDVEATREAVAPREALAQTVLAEVPTQLVSYFRAQGWAPLKPL

SEQ ID NO: 7924 - protein, 85 aa, Homo sapiens
ARKCNETAKSYCVNGGVCYYIEGINQLSCKCPNGFFGQRCLEKLPLRLYMPDPKQSVLWDTPGTGVSSSQWSTSPKPRSCTRRGS

SEQ ID NO: 7925 - protein, 84 aa, Homo sapiens
RKCNETAKSYCVNGGVCYYIEGINQLSCKCPNGFFGQRCLEKLPLRLYMPDPKQSVLWDTPGTGVSSSQWSTSPKPRSCTRRGS

SEQ ID NO: 7926 - protein, 84 aa, Homo sapiens
ELMESLRQAEQKNWTLDQHHIANLCDSLNHFLTQTGHVPPQGGTHRPPAPARIADSCALTSGKQESAMSQGTAPSQLPWRWRLC

SEQ ID NO: 7927 - protein, 85 aa, Homo sapiens
QSSYSQQNTYGQPSSYGQQSSYGQQSSYGQQPPTSYPPQTGSYSQAPSQYSQQSSSYGQQSSFRQDHPSSMGVYGQESGGFSGPG

SEQ ID NO: 7928 - protein, 85 aa, Homo sapiens
TELAGASSSCCHRPAGRGAMQSVLHHFQRLRGREGGSHFINTSSPRGEAKMSITSDEVNFLVYRYLQESGFSHSAFTFGIESHIS

SEQ ID NO: 7929 - protein, 85 aa, Homo sapiens
QSNINGTLVPPAALISILQKGLQYVEAEISINEDGTVFDGRPIESLSLIDAVMPDVVQTRQQAFREKLAQQQASAAAAAAAATAA

SEQ ID NO: 7930 - protein, 85 aa, Homo sapiens
ATAATTTSAGVSHQNPSKNREATVNGEENRAHSVNNHAKPMEIDGEVEIPSSKATVLRGHESEVFICAWNPVSDLLASGSGDSTA

SEQ ID NO: 7931 - protein, 85 aa, Homo sapiens
RIWNLNENSNGGSTQLVLRHCIREGGHDVPSNKDVTSLDWNTNGTLLATGSYDGFARIWTEDGNLASTLGQHKGPIFALKWNRKG

SEQ ID NO: 7932 - protein, 85 aa, Homo sapiens
NYILSAGVDKTTIIWDAHTGEAKQQFPFHSAPALDVDWQNNTTFASCSTDMCIHVCRLGCDRPVKTFQGHTNEVNAIKWDPSGML

SEQ ID NO: 7933 - protein, 85 aa, Homo sapiens
MASCSDDMTLKIWSMKQEVCIHDLQAHNKEIYTIKWSPTGPATSNPNSNIMLASASFDSTVRLWDIERGVCTHTLTKHQEPVYSV

SEQ ID NO: 7934 - protein, 85 aa, Homo sapiens
SSPRGEAKMSITSDEVNFLVYRYLQESGFSHSAFTFGIESHISQSNINGTLVPPAALISILQKGLQYVEAEISINEDGTVFDGRP

SEQ ID NO: 7935 - protein, 85 aa, Homo sapiens
IESLSLIDAVMPDVVQTRQQAFREKLAQQQASAAAAAAAATAAATAATTTSAGVSHQNPSKNREATVNGEENRAHSVNNHAKPME

SEQ ID NO: 7936 - protein, 85 aa, Homo sapiens
IDGEVEIPSSKATVLRGHESEVFICAWNPVSDLLASGSGDSTARIWNLNENSNGGSTQLVLRHCIREGGHDVPSNKDVTSLDWNT

SEQ ID NO: 7937 - protein, 85 aa, Homo sapiens
NGTLLATGSYDGFARIWTEDGNLASTLGQHKGPIFALKWNRKGNYILSAGVDKTTIIWDAHTGEAKQQFPFHSAPALDVDWQNNT

SEQ ID NO: 7938 - protein, 85 aa, Homo sapiens
TFASCSTDMCIHVCRLGCDRPVKTFQGHTNEVNAIKWDPSGMLLASCSDDMTLKIWSMKQEVCIHDLQAHNKEIYTIKWSPTGPA

SEQ ID NO: 7939 - protein, 85 aa, Homo sapiens
TSNPNSNIMLASASFDSTVRLWDIERGVCTHTLTKHQEPVYSVAFSPDGKYLASGSFDKCVHIWNTQSGNLVHSYRGTGGIFEVC

SEQ ID NO: 7940 - protein, 84 aa, Homo sapiens
YKKPDYNLFTPYIQHRQRNPNQPFYILHPKFIWQLWDIIQENTKEKIQPNPPSSGFIGSFVKIGHIRACSEPRSRDCTPAWTTE

SEQ ID NO: 7941 - protein, 84 aa, Homo sapiens
FYDETEARKYVRNSRMIDIQTRMAGRALELLYLPENKPCYLLDIGCGTGLSGSYLSDEGHYWVGLDISPAMLGPGIPSCPAAVP

SEQ ID NO: 7942 - protein, 85 aa, Homo sapiens
MRVCWLVRQDSRHQRIRLPHLEAVVIGRGPETKITDKKCSRQQVQLKAECNKGYVKVKQVGVNPTSIDSVVIGKDQEVKLQPGQV

SEQ ID NO: 7943 - protein, 85 aa, Homo sapiens
LHMESLGHWSQGLKISMQDPKMQVYKDEQVVVIKDKYPKARYHWLVLPWTSISSLKAVAREHLELLKHMHTVGEKVIVDFAGSSK

SEQ ID NO: 7944 - protein, 85 aa, Homo sapiens
LRFRLGYHAIPSMSHVHLHVISQDFDSPCLKNKKHWNSFNTEYFLESQAVIEMVQEAGRVTVRDGMPELLKLPLRCHECQQLLPS

SEQ ID NO: 7945 - protein, 85 aa, Homo sapiens
QVQLKAECNKGYVKVKQVGVNPTSIDSVVIGKDQEVKLQPGQVLHMESLGHWSQGLKISMQDPKMQVYKDEQVVVIKDKYPKARY

SEQ ID NO: 7946 - protein, 85 aa, Homo sapiens
HWLVLPWTSISSLKAVAREHLELLKHMHTVGEKVIVDFAGSSKLRFRLGYHAIPSMSHVHLHVISQDFDSPCLKNKKHWNSFNTE

SEQ ID NO: 7947 - protein, 84 aa, Homo sapiens
PSGGNEKQVTTISHSSTLTIQKCGQKTMPVNTIIPTSQFPPASILKQITLPGNKILSLQASPTQKNRIKENVTSCFRSTFICVY

SEQ ID NO: 7948 - protein, 85 aa, Homo sapiens
QEKYPDAVYLSEGPSSCSMGIRSASRPGFELVIVWRIQIDEDGKVFPKLDLLTKVPQRALELDKNRAIETAPLSFRTLVGLLGIE

SEQ ID NO: 7949 - protein, 5 aa, Homo sapiens
HSRYF

SEQ ID NO: 7950 - protein, 84 aa, Homo sapiens
SKRTDIKFDGFNINTCREMISLLDEETQDTMQVPDSSETFWNTEADILDTVRRWPSMNQEGGPHRHQICQCFDLGLLSLRNYEK

SEQ ID NO: 7951 - protein, 85 aa, Homo sapiens
KSCGVSLATAAAAAAAFGDEEKKMAAGKASGESEEASPSLTAEEREALGGLDSRLFGFVRFHEDGARTKALLGKAVRCYESLILK

SEQ ID NO: 7952 - protein, 85 aa, Homo sapiens
AEGKVESDFFCQLGHFNLLLEDYPKALSAYQRYYSLQSDYWKNAAFLYGLGLVYFHYNAFQWAIKAFQEVLYVDPSFCRAKEIHL

SEQ ID NO: 7953 - protein, 85 aa, Homo sapiens
RLGLMFKVNTDYESSLKHFQLALVDCNPCTLSNAEIQFHIAHLYETQRKYHSAKEAYEQLLQTENLSAQVKATVLQQLGWMHHTV

SEQ ID NO: 7954 - protein, 85 aa, Homo sapiens
DLLGDKATKESYAIQYLQKSLEADPNSGQSWYFLGRCYSSIGKVQDAFISYRQSIDKSEASADTWCSIGVLYQQQNQPMDALQAY

SEQ ID NO: 7955 - protein, 85 aa, Homo sapiens
ICAVQLDHGHAAAWMDLGTLYESCNQPQDAIKCYLNATRSKSCSNTSALAARIKYLQAQLCNLPQGSLQNKTKLLPSIEEAWSLP

SEQ ID NO: 7956 - protein, 85 aa, Homo sapiens
IPAELTSRQGAMNTAQQNTSDNWSGGHAVSHPPVQQQAHSWCLTPQKLQHLEQLRANRNNLNPAQKLMLEQLESQFVLMQQHQMR

SEQ ID NO: 7957 - protein, 85 aa, Homo sapiens
PTGVAQVRSTGIPNGPTADSSLPTNSVSGQQPQLALTRVPSVSQPGVRPACPGQPLANGPFSAGHVPCSTSRTLGSTDTILIGNN

SEQ ID NO: 7958 - protein, 85 aa, Homo sapiens
HITGSGSNGNVPYLQRNALTLPHNRTNLTSSAEEPWKNQLSNSTQGLHKGQSSHSAGPNGERPLSSTGPSQHLQAAGSGIQNQNG

SEQ ID NO: 7959 - protein, 85 aa, Homo sapiens
HPTLPSNSVTQGAALNHLSSHTATSGGQQGITLTKESKPSGNILTVPETSRHTGETPNSTASVEGLPNHVHQMTADAVCSPSHGD

SEQ ID NO: 7960 - protein, 85 aa, Homo sapiens
SKSPGLLSSDNPQLSALLMGKANNNVGTGTCDKVNNIHPAVHTKTDNSVASSPSSAISTATPSPKSTEQTTTNSVTSLNSPHSGL

SEQ ID NO: 7961 - protein, 85 aa, Homo sapiens
HTINGEGMEESQSPMKTDLLLVNHKPSPQIIPSMSVSIYPSSAEVLKACRNLGKNGLSNSSILLDKCPPPRPPSSPYPPLPKDKL

SEQ ID NO: 7962 - protein, 85 aa, Homo sapiens
NPPTPSIYLENKRDAFFPPLHQFCTNPNNPVTVIRGLAGALKLDLGLFSTKTLVEANNEHMVEVRTQLLQPADENWDPTGTKKIW

SEQ ID NO: 7963 - protein, 85 aa, Homo sapiens
HCESNRSHTTIAKYAQYQASSFQESLREENEKRSHHKDHSDSESTSSDNSGRRRKGPFKTIKFGTNIDLSDDKKWKLQLHELTKL

SEQ ID NO: 7964 - protein, 85 aa, Homo sapiens
PAFVRVVSAGNLLSHVGHTILGMNTVQLYMKVPGSRTPGHQENNNFCSVNINIGPGDCEWFVVPEGYWGVLNDFCEKNNLNFLMG

SEQ ID NO: 7965 - protein, 85 aa, Homo sapiens
SWWPNLEDLYEANVPVYRFIQRPGDLVWINAGTVHWVQAIGWCNNIAWNVGPLTACQYKLAVERYEWNKLQSVKSIVPMVHLSWN

SEQ ID NO: 7966 - protein, 85 aa, Homo sapiens
MARNIKVSDPKLFEMIKYCLLRTLKQCQTLREALIAAGKEIIWHGRTKEEPAHYCSICEVEVFDLLFVTNESNSRKTYIVHCQDC

SEQ ID NO: 7967 - protein, 85 aa, Homo sapiens
EEREALGGLDSRLFGFVRFHEDGARTKALLGKAVRCYESLILKAEGKVESDFFCQLGHFNLLLEDYPKALSAYQRYYSLQSDYWK

SEQ ID NO: 7968 - protein, 85 aa, Homo sapiens
NAAFLYGLGLVYFHYNAFQWAIKAFQEVLYVDPSFCRAKEIHLRLGLMFKVNTDYESSLKHFQLALVDCNPCTLSNAEIQFHIAH

SEQ ID NO: 7969 - protein, 85 aa, Homo sapiens
LYETQRKYHSAKEAYEQLLQTENLSAQVKATVLQQLGWMHHTVDLLGDKATKESYAIQYLQKSLEADPNSGQSWYFLGRCYSSIG

SEQ ID NO: 7970 - protein, 85 aa, Homo sapiens
KVQDAFISYRQSIDKSEASADTWCSIGVLYQQQNQPMDALQAYICAVQLDHGHAAAWMDLGTLYESCNQPQDAIKCYLNATRSKS

SEQ ID NO: 7971 - protein, 85 aa, Homo sapiens
CSNTSALAARIKYLQAQLCNLPQGSLQNKTKLLPSIEEAWSLPIPAELTSRQGAMNTAQQNTSDNWSGGHAVSHPPVQQQAHSWC

SEQ ID NO: 7972 - protein, 85 aa, Homo sapiens
MTPQKLQHLEQLRANRNNLNPAQKLMLEQLESQFVLMQQHQMRPTGVAQVRSTGIPNGPTADSSLPTNSVSGQQPQLALTRVPSV

SEQ ID NO: 7973 - protein, 85 aa, Homo sapiens
SQPGVRPACPGQPLANGPFSAGHVPCSTSRTLGSTDTILIGNNHITGSGSNGNVPYLQRNALTLPHNRTNLTSSAEEPWKNQLSN

SEQ ID NO: 7974 - protein, 85 aa, Homo sapiens
STQGLHKGQSSHSAGPNGERPLSSTGPSQHLQAAGSGIQNQNGHPTLPSNSVTQGAALNHLSSHTATSGGQQGITLTKESKPSGN

SEQ ID NO: 7975 - protein, 85 aa, Homo sapiens
ILTVPETSRHTGETPNSTASVEGLPNHVHQMTADAVCSPSHGDSKSPGLLSSDNPQLSALLMGKANNNVGTGTCDKVNNIHPAVH

SEQ ID NO: 7976 - protein, 85 aa, Homo sapiens
TKTDNSVASSPSSAISTATPSPKSTEQTTTNSVTSLNSPHSGLHTINGEGMEESQSPMKTDLLLVNHKPSPQIIPSMSVSIYPSS

SEQ ID NO: 7977 - protein, 85 aa, Homo sapiens
AEVLKACRNLGKNGLSNSSILLDKCPPPRPPSSPYPPLPKDKLNPPTPSIYLENKRDAFFPPLHQFCTNPNNPVTVIRGLAGALK

SEQ ID NO: 7978 - protein, 85 aa, Homo sapiens
LDLGLFSTKTLVEANNEHMVEVRTQLLQPADENWDPTGTKKIWHCESNRSHTTIAKYAQYQASSFQESLREENEKRSHHKDHSDS

SEQ ID NO: 7979 - protein, 85 aa, Homo sapiens
ESTSSDNSGRRRKGPFKTIKFGTNIDLSDDKKWKLQLHELTKLPAFVRVVSAGNLLSHVGHTILGMNTVQLYMKVPGSRTPGHQE

SEQ ID NO: 7980 - protein, 85 aa, Homo sapiens
NNNFCSVNINIGPGDCEWFVVPEGYWGVLNDFCEKNNLNFLMGSWWPNLEDLYEANVPVYRFIQRPGDLVWINAGTVHWVQAIGW

SEQ ID NO: 7981 - protein, 85 aa, Homo sapiens
CNNIAWNVGPLTACQYKLAVERYEWNKLQSVKSIVPMVHLSWNMARNIKVSDPKLFEMIKYCLLRTLKQCQTLREALIAAGKEII

SEQ ID NO: 7982 - protein, 85 aa, Homo sapiens
MRDTMKSWNDSQSDLCSTDQEEEEEMIFGENEDDLDEMMDLSDLPTSLFACSVHEAVFEAREQKVQMSGEVRDKSYLLPPQPVKQ

SEQ ID NO: 7983 - protein, 85 aa, Homo sapiens
FLISPPASPPVGWKQSEDAMPVINYDLLCAVSKLGPGEKYELHAGTESTPSVVVHVCESETEEEEETKNPKQKIAQTRRPDPPTA

SEQ ID NO: 7984 - protein, 85 aa, Homo sapiens
DLPTSLFACSVHEAVFEAREQKVQMSGEVRDKSYLLPPQPVKQFLISPPASPPVGWKQSEDAMPVINYDLLCAVSKLGPGEKYEL

SEQ ID NO: 7985 - protein, 85 aa, Homo sapiens
ELQQFLRGARAMCIESWARFSLVRMAGGTALLAASCFICLLASQWAISPGFPFCPLLLTPVAWGLVGAIAYAGLLGTIELKLDLV

SEQ ID NO: 7986 - protein, 85 aa, Homo sapiens
LLGAVAAVSSFLPFLWKAWAGWGSKRPLATLFPIPGPVLLLLLFRLAVFFSDSFVVAEARATPFLLGSFILLLVVQLHWEGQLLP

SEQ ID NO: 7987 - protein, 85 aa, Homo sapiens
PKLLTMPRLGTSATTNPPRHNGAYALRLGIGLLLCTRLAGLFHRCPEETPVCHSSPWLSPLASMVGGRAKNLWYGACVAALVALL

SEQ ID NO: 7988 - protein, 85 aa, Homo sapiens
AAVRLWLRRYGNLKSPEPPMLFVRWGLPLMALGTAAYWALASGADEAPPRLRVLVSGASMVLPRAVAGLAASGLALLLWKPVTVL

SEQ ID NO: 7989 - protein, 85 aa, Homo sapiens
VKAGAGAPRTRTVLTPFSGPPTSQADLDYVVPQIYRHMQEEFRGRLERTKSQGPLTVAAYQLGSVYSAAMVTALTLLAFPLLLLH

SEQ ID NO: 7990 - protein, 85 aa, Homo sapiens
AERISLVFLLLFLQSFLLLHLLAAGIPVTTPGPFTVPWQAVSAWALMATQTFYSTGHQPVFPAIHWHAAFVGFPEGHGSCTWLPA

SEQ ID NO: 7991 - protein, 85 aa, Homo sapiens
MLVGANTFASHLLFAVGCPLLLLWPFLCESQGLRKRQQPPGNEADARVRPEEEEEPLMEMRLRDAPQHFYAALLQLGLKYLFILG

SEQ ID NO: 7992 - protein, 85 aa, Homo sapiens
ATQDLQAKELHQLQNLFSKASADYQWLLQSPKGAEATLPTVIAELQQFLRGARAMCIESWARFSLVRMAGGTALLAASCFICLLA

SEQ ID NO: 7993 - protein, 85 aa, Homo sapiens
SQWAISPGFPFCPLLLTPVAWGLVGAIAYAGLLGTIELKLDLVLLGAVAAVSSFLPFLWKAWAGWGSKRPLATLFPIPGPVLLLL

SEQ ID NO: 7994 - protein, 85 aa, Homo sapiens
MFRLAVFFSDSFVVAEARATPFLLGSFILLLVVQLHWEGQLLPPKLLTMPRLGTSATTNPPRHNGAYALRLGIGLLLCTRLAGLF

SEQ ID NO: 7995 - protein, 85 aa, Homo sapiens
HRCPEETPVCHSSPWLSPLASMVGGRAKNLWYGACVAALVALLAAVRLWLRRYGNLKSPEPPMLFVRWGLPLMALGTAAYWALAS

SEQ ID NO: 7996 - protein, 85 aa, Homo sapiens
GADEAPPRLRVLVSGASMVLPRAVAGLAASGLALLLWKPVTVLVKAGAGAPRTRTVLTPFSGPPTSQADLDYVVPQIYRHMQEEF

SEQ ID NO: 7997 - protein, 85 aa, Homo sapiens
RGRLERTKSQGPLTVAAYQLGSVYSAAMVTALTLLAFPLLLLHAERISLVFLLLFLQSFLLLHLLAAGIPVTTPGPFTVPWQAVS

SEQ ID NO: 7998 - protein, 85 aa, Homo sapiens
AWALMATQTFYSTGHQPVFPAIHWHAAFVGFPEGHGSCTWLPALLVGANTFASHLLFAVGCPLLLLWPFLCESQGLRKRQQPPGN

SEQ ID NO: 7999 - protein, 85 aa, Homo sapiens
EADARVRPEEEEEPLMEMRLRDAPQHFYAALLQLGLKYLFILGIQILACALAASILRRHLMVWKVFAPKFIFEAVGFIVSSVGLL

SEQ ID NO: 8000 - protein, 84 aa, Homo sapiens
RPQANQKRITTPYMTKYERARVLGTRALQIAMCAPVMVELEGETDPLLIAMKELKARKIPIIIRRYLPDGSYEDWGVDELIITD

SEQ ID NO: 8001 - protein, 85 aa, Homo sapiens
CESSFTSEDILAEHLQTLHQKPTEEKEFKCKNCGKKFPVKQALQRHFEQHQETCRGDARFVCKADSCGKRLKSKDALKRHQENVH

SEQ ID NO: 8002 - protein, 85 aa, Homo sapiens
TGDPKKKLICSVCNKKCSSASSLQEHRKIHEIFDCQECMKKFISANQLKRHMITHSEKRPYNCEICNKSFKRLDQVGAHKVIHSE

SEQ ID NO: 8003 - protein, 85 aa, Homo sapiens
DKPYKCKLCGKGFAHRNVYKNHKKTHSEERPFQCEECKALFRTPFSLQRHLLIHNSERTFKCHHCDATFKRKDTLNVHVQVVHER

SEQ ID NO: 8004 - protein, 85 aa, Homo sapiens
HKKYRCELCNKAFVTPSVLRSHKKTHTGEKEKICPYCGQKFASSGTLRVHIRSHTGERPYQCPYCEKGFSKNDGLKMHIRTHTRE

SEQ ID NO: 8005 - protein, 85 aa, Homo sapiens
KPYKCSECSKAFSQKRGLDEHKRTHTGEKPFQCDVCDLAFSLKKMLIRHKMTHNPNRPLAECQFCHKKFTRNDYLKVHMDNIHGV

SEQ ID NO: 8006 - protein, 85 aa, Homo sapiens
MQRHFEQHQETCRGDARFVCKADSCGKRLKSKDALKRHQENVHTGDPKKKLICSVCNKKCSSASSLQEHRKIHEIFDCQECMKKF

SEQ ID NO: 8007 - protein, 85 aa, Homo sapiens
ISANQLKRHMITHSEKRPYNCEICNKSFKRLDQVGAHKVIHSEDKPYKCKLCGKGFAHRNVYKNHKKTHSEERPFQCEECKALFR

SEQ ID NO: 8008 - protein, 85 aa, Homo sapiens
TPFSLQRHLLIHNSERTFKCHHCDATFKRKDTLNVHVQVVHERHKKYRCELCNKAFVTPSVLRSHKKTHTGEKEKICPYCGQKFA

SEQ ID NO: 8009 - protein, 85 aa, Homo sapiens
SSGTLRVHIRSHTGERPYQCPYCEKGFSKNDGLKMHIRTHTREKPYKCSECSKAFSQKRGLDEHKRTHTGEKPFQCDVCDLAFSL

SEQ ID NO: 8010 - protein, 84 aa, Homo sapiens
MLDIGCGTGLSGSYLSDEGHYWVGLDISPAMLDEAVDREIEGDLLLGDMGQGIPFKPGTFDGCIRSGDPELSCSCTLRTQSSWS

SEQ ID NO: 8011 - protein, 85 aa, Homo sapiens
MELLYLPENKPCYLLDIGCGTGLSGSYLSDEGHYWVGLDISPAMLDEAVDREIEGDLLLGDMGQGIPFKPGTFDGCIRSGDPELS

SEQ ID NO: 8012 - protein, 85 aa, Homo sapiens
MAWSMVGKYERCLMAFKHPKEVLDVSLLFLRVISACADGKIRIYNFFNGNCMKVIKANGRGDPVLSFFIQGNSDHLRKTYLPVEW

SEQ ID NO: 8013 - protein, 84 aa, Homo sapiens
ACADGKIRIYNFFNGNCMKVIKANGRGDPVLSFFIQGNSDHLRKTYLPVEWKTDGRRVRKKAEKSAGMCCNNPRKTDDGLKLKH

SEQ ID NO: 8014 - protein, 85 aa, Homo sapiens
APAAPPVPAANEIATNKPKITWQALNLPVITQISQALPTTEVTNTQASSVTAQPKKANKMKRVTAKAAQGSQSPTGHEGGTIQLK

SEQ ID NO: 8015 - protein, 85 aa, Homo sapiens
PPLWALLALGCLRFGSAVNLQPQLASVTFATNNPTLTTVALEKPLCMFDSKEALTGTHEVYLYVLVDSVTPYSTIDTWPGRRSGG

SEQ ID NO: 8016 - protein, 85 aa, Homo sapiens
KPLCMFDSKEALTGTHEVYLYVLVDSVTPYSTIDTWPGRRSGGMIVITSILGSLPFFLLVGFAGAIALSLVDMGSSDGETTHDSQ

SEQ ID NO: 8017 - protein, 85 aa, Homo sapiens
VEEILDGNDEKYKAVSISTEPPTYLREQKAKRNSQWVPTLPNSSHHLDAVPCSTTINRNRMGRDKKRTFPLCFDDHDPAVIHENA

SEQ ID NO: 8018 - protein, 85 aa, Homo sapiens
SQPEVLVPIRLDMEIDGQKLRDAFTWNMNEKLMTPEMFSEILCDDLDLNPLTFVPAIASAIRQQIESYPTDSILEDQSDQRVIIK

SEQ ID NO: 8019 - protein, 85 aa, Homo sapiens
MNIHVGNISLVDQFEWDMSEKENSPEKFALKLCSELGLGGEFVTTIAYSIRGQLSWHQKTYAFSENPLPTVEIAIRNTGDADQWC

SEQ ID NO: 8020 - protein, 85 aa, Homo sapiens
SSHHLDAVPCSTTINRNRMGRDKKRTFPLCFDDHDPAVIHENASQPEVLVPIRLDMEIDGQKLRDAFTWNMNEKLMTPEMFSEIL

SEQ ID NO: 8021 - protein, 85 aa, Homo sapiens
CDDLDLNPLTFVPAIASAIRQQIESYPTDSILEDQSDQRVIIKLNIHVGNISLVDQFEWDMSEKENSPEKFALKLCSELGLGGEF

SEQ ID NO: 8022 - protein, 85 aa, Homo sapiens
QVSSPCAQRKEKALEKSASRDVSPFVMSMQKNKWDATRSLRFNQDAQREDDQRRMTEITGHLIKMRLGDLDRVKSKEAKEFAGGI

SEQ ID NO: 8023 - protein, 84 aa, Homo sapiens
SLRFNQDAQREDDQRRMTEITGHLIKMRLGDLDRVKSKEAKEFAGGIYSRLEAQIKASVPVSARQSSSEKNTRSKSRFGQGRPA

SEQ ID NO: 8024 - protein, 85 aa, Homo sapiens
EVEAAEARSPAPGYKRSGRRYKCLSCTKTFPNAPRAARHAATHGPADCSEEVAEVPHRRAPLPLLRVREELLPLILAHVPPAHPR

SEQ ID NO: 8025 - protein, 85 aa, Homo sapiens
CLSCTKTFPNAPRAARHAATHGPADCSEEVAEVPHRRAPLPLLRVREELLPLILAHVPPAHPRGTEALPLPGLRQGLHAAQFLPE

SEQ ID NO: 8026 - protein, 5 aa, Homo sapiens
GSGST

SEQ ID NO: 8027 - protein, 27 aa, Homo sapiens
IFRSEKKKRKEETPLRQSCTATRNNEM

SEQ ID NO: 8028 - protein, 4 aa, Homo sapiens
FKKL

SEQ ID NO: 8029 - protein, 13 aa, Homo sapiens
WQTHRCNCESSFS

SEQ ID NO: 8030 - protein, 85 aa, Homo sapiens
WPRSNDMNNPTYVGFERDVFRTIADYFLDLPEPLLTFEYYELFVNILVVCGYITVSDRSSGIHKIQDDPQSSKFLHLNNLNSFKS

SEQ ID NO: 8031 - protein, 85 aa, Homo sapiens
TECLLLSLLHREKNKEESDSTERLQISNPGFQERCAKKMQLVNLRNRRVSANDIMGGSCHNLIGLSNMHDLSSNSKPRCCSLEGI

SEQ ID NO: 8032 - protein, 85 aa, Homo sapiens
VDVPGNSSKEASSVFHQSFPNIEGQNNKLFLESKPKQEFLLNLHSEENIQKPFSAGFKRTSTLTVQDQEELCNGKCKSKQLCRSQ

SEQ ID NO: 8033 - protein, 85 aa, Homo sapiens
SLLLRSSTRRNSYINTPVAEIIMKPNVGQGSTSVQTAMESELGESSATINKRLCKSTIELSENSLLPASSMLTGTQSLLQPHLER

SEQ ID NO: 8034 - protein, 85 aa, Homo sapiens
VAIDALQLCCLLLPPPNRRKLQLLMRMISRMSQNVDMPKLHDAMGTRSLMIHTFSRCVLCCAEEVDLDELLAGRLVSFLMDHHQE

SEQ ID NO: 8035 - protein, 85 aa, Homo sapiens
ILQVPSYLQTAVEKHLDYLKKGHIENPGDGLFAPLPTYSYCKQISAQEFDEQKVSTSQAAIAELLENIIKNRSLPLKEKRKKLKQ

SEQ ID NO: 8036 - protein, 85 aa, Homo sapiens
FVNILVVCGYITVSDRSSGIHKIQDDPQSSKFLHLNNLNSFKSTECLLLSLLHREKNKEESDSTERLQISNPGFQERCAKKMQLV

SEQ ID NO: 8037 - protein, 85 aa, Homo sapiens
NLRNRRVSANDIMGGSCHNLIGLSNMHDLSSNSKPRCCSLEGIVDVPGNSSKEASSVFHQSFPNIEGQNNKLFLESKPKQEFLLN

SEQ ID NO: 8038 - protein, 85 aa, Homo sapiens
LHSEENIQKPFSAGFKRTSTLTVQDQEELCNGKCKSKQLCRSQSLLLRSSTRRNSYINTPVAEIIMKPNVGQGSTSVQTAMESEL

SEQ ID NO: 8039 - protein, 85 aa, Homo sapiens
GESSATINKRLCKSTIELSENSLLPASSMLTGTQSLLQPHLERVAIDALQLCCLLLPPPNRRKLQLLMRMISRMSQNVDMPKLHD

SEQ ID NO: 8040 - protein, 85 aa, Homo sapiens
AMGTRSLMIHTFSRCVLCCAEEVDLDELLAGRLVSFLMDHHQEILQVPSYLQTAVEKHLDYLKKGHIENPGDGLFAPLPTYSYCK

SEQ ID NO: 8041 - protein, 85 aa, Homo sapiens
QISAQEFDEQKVSTSQAAIAELLENIIKNRSLPLKEKRKKLKQFQKEYPLIYQKRFPTTESEAALFGDKPTIKQPMLILRKPKFR

SEQ ID NO: 8042 - protein, 85 aa, Homo sapiens
ICAVQLDHGHAAAWMDLGTLYESCNQPQDAIKCYLNATRSKSCSNTSALAARIKYLQACKPHHPNTEPVLGLSQTPISQQSLPLH

SEQ ID NO: 8043 - protein, 85 aa, Homo sapiens
MIPSSQVDDLSSPAKRKRTSSPTKNTSDNWSGGHAVSHPPVQQQAHSWCLTPQKLQHLEQLRANRNNLNPAQKLMLEQLESQFVL

SEQ ID NO: 8044 - protein, 85 aa, Homo sapiens
MQQHQMRPTGVAQVRSTGIPNGPTADSSLPTNSVSGQQPQLALTRVPSVSQPGVRPACPGQPLANGPFSAGHVPCSTSRTLGSTD

SEQ ID NO: 8045 - protein, 85 aa, Homo sapiens
TILIGNNHITGSGSNGNVPYLQRNALTLPHNRTNLTSSAEEPWKNQLSNSTQGLHKGQSSHSAGPNGERPLSSTGPSQHLQAAGS

SEQ ID NO: 8046 - protein, 85 aa, Homo sapiens
GIQNQNGHPTLPSNSVTQGAALNHLSSHTATSGGQQGITLTKESKPSGNILTVPETSRHTGETPNSTASVEGLPNHVHQMTADAV

SEQ ID NO: 8047 - protein, 85 aa, Homo sapiens
CSPSHGDSKSPGLLSSDNPQLSALLMGKANNNVGTGTCDKVNNIHPAVHTKTDNSVASSPSSAISTATPSPKSTEQTTTNSVTSL

SEQ ID NO: 8048 - protein, 85 aa, Homo sapiens
NSPHSGLHTINGEGMEESQSPMKTDLLLVNHKPSPQIIPSMSVSIYPSSAEVLKACRNLGKNGLSNSSILLDKCPPPRPPSSPYP

SEQ ID NO: 8049 - protein, 85 aa, Homo sapiens
PLPKDKLNPPTPSIYLENKRDAFFPPLHQFCTNPNNPVTVIRGLAGALKLDLGLFSTKTLVEANNEHMVEVRTQLLQPADENWDP

SEQ ID NO: 8050 - protein, 85 aa, Homo sapiens
TGTKKIWHCESNRSHTTIAKYAQYQASSFQESLREENEKRSHHKDHSDSESTSSDNSGRRRKGPFKTIKFGTNIDLSDDKKWKLQ

SEQ ID NO: 8051 - protein, 85 aa, Homo sapiens
LHELTKLPAFVRVVSAGNLLSHVGHTILGMNTVQLYMKVPGSRTPGHQENNNFCSVNINIGPGDCEWFVVPEGYWGVLNDFCEKN

SEQ ID NO: 8052 - protein, 85 aa, Homo sapiens
NLNFLMGSWWPNLEDLYEANVPVYRFIQRPGDLVWINAGTVHWVQAIGWCNNIAWNVGPLTACQYKLAVERYEWNKLQSVKSIVP

SEQ ID NO: 8053 - protein, 85 aa, Homo sapiens
MVHLSWNMARNIKVSDPKLFEMIKYCLLRTLKQCQTLREALIAAGKEIIWHGRTKEEPAHYCSICEVEVFDLLFVTNESNSRKTY

SEQ ID NO: 8054 - protein, 85 aa, Homo sapiens
CSNTSALAARIKYLQACKPHHPNTEPVLGLSQTPISQQSLPLHMIPSSQVDDLSSPAKRKRTSSPTKNTSDNWSGGHAVSHPPVQ

SEQ ID NO: 8055 - protein, 85 aa, Homo sapiens
QQAHSWCLTPQKLQHLEQLRANRNNLNPAQKLMLEQLESQFVLMQQHQMRPTGVAQVRSTGIPNGPTADSSLPTNSVSGQQPQLA

SEQ ID NO: 8056 - protein, 85 aa, Homo sapiens
MTRVPSVSQPGVRPACPGQPLANGPFSAGHVPCSTSRTLGSTDTILIGNNHITGSGSNGNVPYLQRNALTLPHNRTNLTSSAEEP

SEQ ID NO: 8057 - protein, 85 aa, Homo sapiens
WKNQLSNSTQGLHKGQSSHSAGPNGERPLSSTGPSQHLQAAGSGIQNQNGHPTLPSNSVTQGAALNHLSSHTATSGGQQGITLTK

SEQ ID NO: 8058 - protein, 85 aa, Homo sapiens
ESKPSGNILTVPETSRHTGETPNSTASVEGLPNHVHQMTADAVCSPSHGDSKSPGLLSSDNPQLSALLMGKANNNVGTGTCDKVN

SEQ ID NO: 8059 - protein, 85 aa, Homo sapiens
NIHPAVHTKTDNSVASSPSSAISTATPSPKSTEQTTTNSVTSLNSPHSGLHTINGEGMEESQSPMKTDLLLVNHKPSPQIIPSMS

SEQ ID NO: 8060 - protein, 85 aa, Homo sapiens
VSIYPSSAEVLKACRNLGKNGLSNSSILLDKCPPPRPPSSPYPPLPKDKLNPPTPSIYLENKRDAFFPPLHQFCTNPNNPVTVIR

SEQ ID NO: 8061 - protein, 85 aa, Homo sapiens
GLAGALKLDLGLFSTKTLVEANNEHMVEVRTQLLQPADENWDPTGTKKIWHCESNRSHTTIAKYAQYQASSFQESLREENEKRSH

SEQ ID NO: 8062 - protein, 85 aa, Homo sapiens
HKDHSDSESTSSDNSGRRRKGPFKTIKFGTNIDLSDDKKWKLQLHELTKLPAFVRVVSAGNLLSHVGHTILGMNTVQLYMKVPGS

SEQ ID NO: 8063 - protein, 85 aa, Homo sapiens
RTPGHQENNNFCSVNINIGPGDCEWFVVPEGYWGVLNDFCEKNNLNFLMGSWWPNLEDLYEANVPVYRFIQRPGDLVWINAGTVH

SEQ ID NO: 8064 - protein, 85 aa, Homo sapiens
WVQAIGWCNNIAWNVGPLTACQYKLAVERYEWNKLQSVKSIVPMVHLSWNMARNIKVSDPKLFEMIKYCLLRTLKQCQTLREALI

SEQ ID NO: 8065 - protein, 85 aa, Homo sapiens
AAGKEIIWHGRTKEEPAHYCSICEVEVFDLLFVTNESNSRKTYIVHCQDCARKTSGNLENFVVLEQYKMEDLMQVYDQFTLAPPL

SEQ ID NO: 8066 - protein, 85 aa, Homo sapiens
NEFFSVDDNNEEEEDVEMKEDSDENGPEEKQSVEEMEEQSQDADGVNTVTVPGPASEEAVEDCKDEDFAKDENITKGGEVTDHSV

SEQ ID NO: 8067 - protein, 85 aa, Homo sapiens
RDQDHPDGQENDSTKNEIKIETESQSSYMETEELSSNQEDAVIVEQPEVIPLTEDQEEKEGEKAPGEDTPRMPGKSEGSSDLENT

SEQ ID NO: 8068 - protein, 84 aa, Homo sapiens
VEQPEVIPLTEDQEEKEGEKAPGEDTPRMPGKSEGSSDLENTPGPDVEMNSQVDKVNDPTESQQEDQLIAGAQDEAKEQRNGTK

SEQ ID NO: 8069 - protein, 85 aa, Homo sapiens
ADGVNTVTVPGPASEEAVEDCKDEDFAKDENITKGGEVTDHSVRDQDHPDGQENDSTKNEIKIETESQSSYMETEELSSNQEDAV

SEQ ID NO: 8070 - protein, 85 aa, Homo sapiens
IVEQPEVIPLTEDQEEKEGEKAPGEDTPRMPGKSEGSSDLENTPGPDVEMNSQVDKVNDPTESQQEDQLIAGAQDEAKEQRNGTK

SEQ ID NO: 8071 - protein, 84 aa, Homo sapiens
GVGERLQKGLERRARKTENWVSEGILTVTCCWLHMHSSPVPTALARPFVCCPEFREHILCVWHLAGCWVIKKDTVTSSLELTFK

SEQ ID NO: 8072 - protein, 85 aa, Homo sapiens
QQSLDHYLKALQPIVSEEEWAHTKQLVDEFQASGGVGERLQKGLERRARKTENWVSEGILTVTCCWLHMHSSPVPTALARPFVCC

SEQ ID NO: 8073 - protein, 85 aa, Homo sapiens
DYYDMESMVHADTRSFILKKPKLSEEVVVAPNQESGMKTADSLRVLSGHLMQTRDLVQPDKPASPKFIVTLDGVPSPPGYMSDQE

SEQ ID NO: 8074 - protein, 85 aa, Homo sapiens
EDMCFEGMKPVNQTAASNKGLRGLLHPQQLHLLSRQLEDPNGSFSNAEMSELSVAQKPEKLLERCKYWPACKNGDECAYHHPISP

SEQ ID NO: 8075 - protein, 85 aa, Homo sapiens
CKAFPNCKFAEKCLFVHPNCKYDAKCTKPDCPFTHVSRRIPVLSPKPAVAPPAPPSSSQLCRYFPACKKMECPFYHPKHCRFNTQ

SEQ ID NO: 8076 - protein, 85 aa, Homo sapiens
APRTRTSQEELLAEVVQGQSRTPRISPPIKEEETKGDSVEKNQDYYDMESMVHADTRSFILKKPKLSEEVVVAPNQESGMKTADS

SEQ ID NO: 8077 - protein, 85 aa, Homo sapiens
LRVLSGHLMQTRDLVQPDKPASPKFIVTLDGVPSPPGYMSDQEEDMCFEGMKPVNQTAASNKGLRGLLHPQQLHLLSRQLEDPNG

SEQ ID NO: 8078 - protein, 85 aa, Homo sapiens
SFSNAEMSELSVAQKPEKLLERCKYWPACKNGDECAYHHPISPCKAFPNCKFAEKCLFVHPNCKYDAKCTKPDCPFTHVSRRIPV

SEQ ID NO: 8079 - protein, 85 aa, Homo sapiens
GEQGQLGRVPELFANRGGRQGLERLLVPKCVMLKSRGSRGHVRFQDAFCGAYFTFAISHEGHVYGFGLSNYHQLGTPGTESCFIP

SEQ ID NO: 8080 - protein, 85 aa, Homo sapiens
DAELAEVRALQAEIAALRRACEDPPAPWEEKSRVQKSFQAIHQFNLEGWKSSKDLKNQLGHLESELSFLSTLTGINIRNHSKQTE

SEQ ID NO: 8081 - protein, 85 aa, Homo sapiens
DLTSTEMTEKSIRKVLQRHRLSGNCHMVTFQLEFQILEIQNKERLSSAVTDLNIIMEPTECSELSEFVSRAEERKDLFMFFRSLH

SEQ ID NO: 8082 - protein, 85 aa, Homo sapiens
FFVEWFEYRKRTFKHLKEKYPDAVYLSEGPSSCSMGIRSASRPGFELVIVWRIQIDEDGKVFPKLDLLTKVPQRALELDKNRAIE

SEQ ID NO: 8083 - protein, 85 aa, Homo sapiens
QFNLEGWKSSKDLKNQLGHLESELSFLSTLTGINIRNHSKQTEDLTSTEMTEKSIRKVLQRHRLSGNCHMVTFQLEFQILEIQNK

SEQ ID NO: 8084 - protein, 85 aa, Homo sapiens
ERLSSAVTDLNIIMEPTECSELSEFVSRAEERKDLFMFFRSLHFFVEWFEYRKRTFKHLKEKYPDAVYLSEGPSSCSMGIRSASR

SEQ ID NO: 8085 - protein, 84 aa, Homo sapiens
PCMTSATIDVTTVERLSQTYLYRASLGLGSDNNSLLLRGEYNAADLRNLATGVGLNLPISCIQIRNRKGDHANVNAMVSKFYGI

SEQ ID NO: 8086 - protein, 85 aa, Homo sapiens
AEGENEVRWDGLCSRDSTTRETALENIRQTILRKTEYLRSVKETPHRPSDGLSNTESSDGLNKLLAHLLMLSKRCPFKDVREKSE

SEQ ID NO: 8087 - protein, 85 aa, Homo sapiens
FILKSIQELGIRIPRPLGQGPSRFIPEKEILQVGSEDAQMHALFADSFAALGRLDNITLVMVFHPQYLESFLKTQHYLLQMDGPL

SEQ ID NO: 8088 - protein, 85 aa, Homo sapiens
PLHYRHYIGIMAAARHQCSYLVNLHVNDFLHVGGDPKWLNGLENAPQKLQNLGELNKVLAHRPWLITKEHIEGLLKAEEHSWSLA

SEQ ID NO: 8089 - protein, 85 aa, Homo sapiens
ELVHAVVLLTHYHSLASFTFGCGISPEIHCDGGHTFRPPSVSNYCICDITNGNHSVDEMPVNSAENVSVSDSFFEVEALMEKMRQ

SEQ ID NO: 8090 - protein, 85 aa, Homo sapiens
LQECRDEEEASQEEMASRFEIEKRESMFVFSSDDEEVTPARAVSRHFEDTSYGYKDFSRHGMHVPTFRVQDYCWEDHGYSLVNRL

SEQ ID NO: 8091 - protein, 85 aa, Homo sapiens
YPDVGQLIDEKFHIAYNLTYNTMAMHKDVDTSMLRRAIWNYIHCMFGIRYDDYDYGEINQLLDRSFKVYIKTVVCTPEKVTKRMY

SEQ ID NO: 8092 - protein, 85 aa, Homo sapiens
ETPHRPSDGLSNTESSDGLNKLLAHLLMLSKRCPFKDVREKSEFILKSIQELGIRIPRPLGQGPSRFIPEKEILQVGSEDAQMHA

SEQ ID NO: 8093 - protein, 85 aa, Homo sapiens
LFADSFAALGRLDNITLVMVFHPQYLESFLKTQHYLLQMDGPLPLHYRHYIGIMAAARHQCSYLVNLHVNDFLHVGGDPKWLNGL

SEQ ID NO: 8094 - protein, 85 aa, Homo sapiens
ENAPQKLQNLGELNKVLAHRPWLITKEHIEGLLKAEEHSWSLAELVHAVVLLTHYHSLASFTFGCGISPEIHCDGGHTFRPPSVS

SEQ ID NO: 8095 - protein, 85 aa, Homo sapiens
NYCICDITNGNHSVDEMPVNSAENVSVSDSFFEVEALMEKMRQLQECRDEEEASQEEMASRFEIEKRESMFVFSSDDEEVTPARA

SEQ ID NO: 8096 - protein, 85 aa, Homo sapiens
VSRHFEDTSYGYKDFSRHGMHVPTFRVQDYCWEDHGYSLVNRLYPDVGQLIDEKFHIAYNLTYNTMAMHKDVDTSMLRRAIWNYI

SEQ ID NO: 8097 - protein, 85 aa, Homo sapiens
SVKYTQQTMEEALGRVKLMQADLGGTEILAPLQNIYRGPSIPGHPLQLFVFTDGEVTDTFSVIKEVRINRQKHRCFSFGIGEGTS

SEQ ID NO: 8098 - protein, 85 aa, Homo sapiens
TSLIKGIARASGGTSEFITGKDRMQSKALRTLKRSLQPVVEDVSLSWHLPPGLSAKMLSPEQTVIFRGQRLISYAQLTGRMPAAE

SEQ ID NO: 8099 - protein, 85 aa, Homo sapiens
TTGEVCLKYTLQGKTFEDKVTFPLQPKPDVNLTIHRLAAKSLLQTKDMGLRETPASDKKDALNLSLESGVISSFTAFIAINKELN

SEQ ID NO: 8100 - protein, 85 aa, Homo sapiens
KPVQGPLAHRDVPRPILLGASAPLKIKCQSGFRKALHSDRPPSASQPRGELMCYKAKTFQMDDYSLCGLISHKDQHSPGFGENHL

SEQ ID NO: 8101 - protein, 85 aa, Homo sapiens
VQLIYHQNANGSWDLNEDLAKILGMSLEEIMAAQPAELVDSSGWATILAVIWLHSNGKDLKCEWELLERKAVAWMRAHAGSTMPS

SEQ ID NO: 8102 - protein, 84 aa, Homo sapiens
ILGMSLEEIMAAQPAELVDSSGWATILAVIWLHSNGKDLKCEWELLERKAVAWMRAHAGSTMPSVVKAAITFLKSSVDPAIFAF

SEQ ID NO: 8103 - protein, 85 aa, Homo sapiens
GHPLQLFVFTDGEVTDTFSVIKEVRINRQKHRCFSFGIGEGTSTSLIKGIARASGGTSEFITGKDRMQSKALRTLKRSLQPVVED

SEQ ID NO: 8104 - protein, 85 aa, Homo sapiens
VSLSWHLPPGLSAKMLSPEQTVIFRGQRLISYAQLTGRMPAAETTGEVCLKYTLQGKTFEDKVTFPLQPKPDVNLTIHRLAAKSL

SEQ ID NO: 8105 - protein, 85 aa, Homo sapiens
LQTKDMGLRETPASDKKDALNLSLESGVISSFTAFIAINKELNKPVQGPLAHRDVPRPILLGASAPLKIKCQSGFRKALHSDRPP

SEQ ID NO: 8106 - protein, 85 aa, Homo sapiens
SASQPRGELMCYKAKTFQMDDYSLCGLISHKDQHSPGFGENHLVQLIYHQNANGSWDLNEDLAKILGMSLEEIMAAQPAELVDSS

SEQ ID NO: 8107 - protein, 85 aa, Homo sapiens
ACGATLKRPMEFEAALLSPGSPKRRRCAPLPGPTPGLRPPDAEPPPPFQTQTPPQSLQQPAPPGSERRLPTPEQIFQNIKQEYSR

SEQ ID NO: 8108 - protein, 84 aa, Homo sapiens
PGSERRLPTPEQIFQNIKQEYSRYQRWRHLEVVLNQSEACASESQPHSSALTAPSSPEQYESFVKFTHDQIMRRYGTRPTSYVS

SEQ ID NO: 8109 - protein, 85 aa, Homo sapiens
EPPPPFQTQTPPQSLQQPAPPGSERRLPTPEQIFQNIKQEYSRYQRWRHLEVVLNQSEACASESQPHSSALTAPSSPEQYESFVK

SEQ ID NO: 8110 - protein, 85 aa, Homo sapiens
ESLRNDQVLQGFSVDKGEFTCPLCRQFANSVLPCYPGSNVENNPWQRPSNKSIQDLIKEVEELQGRPGAFPSETNLSKEMESVMK

SEQ ID NO: 8111 - protein, 85 aa, Homo sapiens
DIKNTTQKKYRDYSKTPGSPDNDFLFMYSVARTNLELELIHRGGNLCSGGASTAGKRSCLNFCFIIFPFTKSEIILCQYRKSHDK

SEQ ID NO: 8112 - protein, 85 aa, Homo sapiens
VYPKYQLFHVLALHMRLYSIDSEYNPWRKLTQLEEMNPQLGYEEQQPEVPILYHDVTSLLLIQILMMPQPLRKDHFTCIVKVLFT

SEQ ID NO: 8113 - protein, 85 aa, Homo sapiens
LLYTQALAALSVKCSEEDRSAWKHAGALKKSTCDAEKSYEVLLSFVISELFKGKLYHEEGTQECAMVNPIAWSPESMEKCLQDFC

SEQ ID NO: 8114 - protein, 85 aa, Homo sapiens
LPFLRITSLLQHHLFGEDLPSCQEEEEFSVLASCLGLLPTFYQTEHPFISASCLDWPVPAFDIITQWCFEIKSFTERHAEQGKAL

SEQ ID NO: 8115 - protein, 85 aa, Homo sapiens
LIQESKWKLPHLLQLPENYNTIFQYYHRKTCSVCTKVPKDPAVCLVCGTFVCLKGLCCKQQSYCECVLHSQNCGAGTGIFLLINA

SEQ ID NO: 8116 - protein, 85 aa, Homo sapiens
NPWQRPSNKSIQDLIKEVEELQGRPGAFPSETNLSKEMESVMKDIKNTTQKKYRDYSKTPGSPDNDFLFMYSVARTNLELELIHR

SEQ ID NO: 8117 - protein, 85 aa, Homo sapiens
GGNLCSGGASTAGKRSCLNFCFIIFPFTKSEIILCQYRKSHDKVYPKYQLFHVLALHMRLYSIDSEYNPWRKLTQLEEMNPQLGY

SEQ ID NO: 8118 - protein, 85 aa, Homo sapiens
EEQQPEVPILYHDVTSLLLIQILMMPQPLRKDHFTCIVKVLFTLLYTQALAALSVKCSEEDRSAWKHAGALKKSTCDAEKSYEVL

SEQ ID NO: 8119 - protein, 85 aa, Homo sapiens
MSFVISELFKGKLYHEEGTQECAMVNPIAWSPESMEKCLQDFCLPFLRITSLLQHHLFGEDLPSCQEEEEFSVLASCLGLLPTFY

SEQ ID NO: 8120 - protein, 85 aa, Homo sapiens
QTEHPFISASCLDWPVPAFDIITQWCFEIKSFTERHAEQGKALLIQESKWKLPHLLQLPENYNTIFQYYHRKTCSVCTKVPKDPA

SEQ ID NO: 8121 - protein, 85 aa, Homo sapiens
VCLVCGTFVCLKGLCCKQQSYCECVLHSQNCGAGTGIFLLINASVIIIIRGHRFCLWGSVYLDAHGEEDRDLRRGKPLYICKERY

SEQ ID NO: 8122 - protein, 85 aa, Homo sapiens
ELIDMAVLEEIQQELINQEQSIISEYEKSLQFDEKCLSIMLAEWEANPLICPVCTKYNLRITSGVVVCQCGLSIPSHSSELTEQK

SEQ ID NO: 8123 - protein, 84 aa, Homo sapiens
ICPVCTKYNLRITSGVVVCQCGLSIPSHSSELTEQKLRACLEGSINEHSAHCPHTPEFSVTGGTEEKSSLLMSCLACDTWAVIL

SEQ ID NO: 8124 - protein, 85 aa, Homo sapiens
EWEANPLICPVCTKYNLRITSGVVVCQCGLSIPSHSSELTEQKLRACLEGSINEHSAHCPHTPEFSVTGGTEEKSSLLMSCLACD

SEQ ID NO: 8125 - protein, 85 aa, Homo sapiens
AAAEPASSGQQAPAGQGQGQRPPPQPPQAQAPQPPPPPQLGGAGGGSSRHEKSLGLLTTKFVSLLQEAKDGVLDLKAAADTLAVR

SEQ ID NO: 8126 - protein, 85 aa, Homo sapiens
QKRRIYDITNVLEGIDLIEKKSKNSIQWKGVGAGCNTKEVIDRLRYLKAEIEDLELKERELDQQKLWLQQSIKNVMDDSINNRFS

SEQ ID NO: 8127 - protein, 85 aa, Homo sapiens
YVTHEDICNCFNGDTLLAIQAPSGTQLEVPIPEMGQNGQKKYQINLKSHSGPIHVLLINKESSSSKPVVFPVPPPDDLTQPSSQS

SEQ ID NO: 8128 - protein, 85 aa, Homo sapiens
MTPVTPQKSSMATQNLPEQHVSERSQALQQTSATDISSGSISGDIIDELMSSDVFPLLRLSPTPADDYNFNLDDNEGVCDLFDVQ

SEQ ID NO: 8129 - protein, 84 aa, Homo sapiens
PQKSSMATQNLPEQHVSERSQALQQTSATDISSGSISGDIIDELMSSDVFPLLRLSPTPADDYNFNLDDNEGVCDLFDVQILNY

SEQ ID NO: 8130 - protein, 85 aa, Homo sapiens
AGGGSSRHEKSLGLLTTKFVSLLQEAKDGVLDLKAAADTLAVRQKRRIYDITNVLEGIDLIEKKSKNSIQWKGVGAGCNTKEVID

SEQ ID NO: 8131 - protein, 85 aa, Homo sapiens
RLRYLKAEIEDLELKERELDQQKLWLQQSIKNVMDDSINNRFSYVTHEDICNCFNGDTLLAIQAPSGTQLEVPIPEMGQNGQKKY

SEQ ID NO: 8132 - protein, 85 aa, Homo sapiens
QINLKSHSGPIHVLLINKESSSSKPVVFPVPPPDDLTQPSSQSLTPVTPQKSSMATQNLPEQHVSERSQALQQTSATDISSGSIS

SEQ ID NO: 8133 - protein, 85 aa, Homo sapiens
MVLGSQKLTQLRDSIRCVSDLQIGGEFSNTPDQAPEHISKDLYKSAFFYFEGTFYNDKRYPECRDLSRTIIEWSESHDRGYGKFQ

SEQ ID NO: 8134 - protein, 84 aa, Homo sapiens
KDLYKSAFFYFEGTFYNDKRYPECRDLSRTIIEWSESHDRGYGKFQTARMEDFTFNDLCIKLGFPYLYCHQGDCEHVIVITDIR

SEQ ID NO: 8135 - protein, 85 aa, Homo sapiens
DEFHPFIEALLPHVRAFAYTWFNLQARKRKYFKKHEKRMSKDEERAVKDELLGEKPEVKQKWASRLLAKLRKDIRPECREDFVLS

SEQ ID NO: 8136 - protein, 85 aa, Homo sapiens
ITGKKAPGCVLSNPDQKGKMRRIDCLRQADKVWRLDLVMVILFKGIPLESTDGERLVKAAQCGHPVLCVQPHHIGVAVKELDLYL

SEQ ID NO: 8137 - protein, 85 aa, Homo sapiens
AYFVRERDAEQSGSPRTGMGSDQEDSKPITLDTTDFQESFVTSGVFSVTELIQVSRTPVVTGTGPNFSLGELQGHLAYDLNPAST

SEQ ID NO: 8138 - protein, 85 aa, Homo sapiens
GLRRTLPSTSSSGSKRHKSGSMEEDVDTSPGGDYYTSPSSPTSSSRNWTEDMEGGISSPVKKTEMDKSPFNSPSPQDSPRLSSFT

SEQ ID NO: 8139 - protein, 85 aa, Homo sapiens
QHHRPVIAVHSGIARSPHPSSALHFPTTSILPQTASTYFPHTAIRYPPHLNPQDPLKDLVSLACDPASQQPGPPTLRPTRPLQTV

SEQ ID NO: 8140 - protein, 84 aa, Homo sapiens
VIAVHSGIARSPHPSSALHFPTTSILPQTASTYFPHTAIRYPPHLNPQDPLKDLVSLACDPASQQPGPPTLRPTRPLQTVPLWD

SEQ ID NO: 8141 - protein, 85 aa, Homo sapiens
EERAVKDELLGEKPEVKQKWASRLLAKLRKDIRPECREDFVLSITGKKAPGCVLSNPDQKGKMRRIDCLRQADKVWRLDLVMVIL

SEQ ID NO: 8142 - protein, 85 aa, Homo sapiens
FKGIPLESTDGERLVKAAQCGHPVLCVQPHHIGVAVKELDLYLAYFVRERDAEQSGSPRTGMGSDQEDSKPITLDTTDFQESFVT

SEQ ID NO: 8143 - protein, 85 aa, Homo sapiens
SGVFSVTELIQVSRTPVVTGTGPNFSLGELQGHLAYDLNPASTGLRRTLPSTSSSGSKRHKSGSMEEDVDTSPGGDYYTSPSSPT

SEQ ID NO: 8144 - protein, 85 aa, Homo sapiens
SSSRNWTEDMEGGISSPVKKTEMDKSPFNSPSPQDSPRLSSFTQHHRPVIAVHSGIARSPHPSSALHFPTTSILPQTASTYFPHT

SEQ ID NO: 8145 - protein, 85 aa, Homo sapiens
PGCVNTTEMDIRKCRRLKNPQKVKKSVYGVTEESQAQSPVHVLSQPIRKTTKEDIRKQITFLNAQIDRHCLKMSKVAESLIAYTE

SEQ ID NO: 8146 - protein, 85 aa, Homo sapiens
QYVEYDPLITPAEPSNPWISDDVALWDIEMSKEPSQQRVKRWGFSFDEILKDQVGRDQFLRFLESEFSSENLRFWLAVQDLKKQP

SEQ ID NO: 8147 - protein, 85 aa, Homo sapiens
LQDVAKRVEEIWQEFLAPGAPSAINLDSHSYEITSQNVKDGGRYTFEDAQEHIYKLMKSDSYARFLRSNAYQDLLLAKKKGKSLA

SEQ ID NO: 8148 - protein, 84 aa, Homo sapiens
QEFLAPGAPSAINLDSHSYEITSQNVKDGGRYTFEDAQEHIYKLMKSDSYARFLRSNAYQDLLLAKKKGKSLAGKRLTGLMQSS

SEQ ID NO: 8149 - protein, 85 aa, Homo sapiens
LSQPIRKTTKEDIRKQITFLNAQIDRHCLKMSKVAESLIAYTEQYVEYDPLITPAEPSNPWISDDVALWDIEMSKEPSQQRVKRW

SEQ ID NO: 8150 - protein, 85 aa, Homo sapiens
GFSFDEILKDQVGRDQFLRFLESEFSSENLRFWLAVQDLKKQPLQDVAKRVEEIWQEFLAPGAPSAINLDSHSYEITSQNVKDGG

SEQ ID NO: 8151 - protein, 84 aa, Homo sapiens
SGGREDLESSGLQRRNSSEASSGDFLDLKGEGDIHENVDTDLPGSLGQSEEKPVPAAPVPSPVAPAPVPSRRNPPGGKSSLVLG

SEQ ID NO: 8152 - protein, 85 aa, Homo sapiens
KNKMASNIFGTPEENQASWAKSAGAKSSGGREDLESSGLQRRNSSEASSGDFLDLKGEGDIHENVDTDLPGSLGQSEEKPVPAAP

SEQ ID NO: 8153 - protein, 85 aa, Homo sapiens
GADCARYTTLSLLRRARMHIQKLEDQEQRARQLKERLRSKQQSLQRQLEQLRGLAGAAERERLRADSLDSSGLSSERSDSDQGEC

SEQ ID NO: 8154 - protein, 85 aa, Homo sapiens
PEAEGLCGPRGEPGLLTGPLPAQRSWRWMWRAWCLGVRPSCCGASSPARSTATRTAAAPGYDVPHPGRASALYSCQAHLPGRSPP

SEQ ID NO: 8155 - protein, 85 aa, Homo sapiens
QAFRAARSHLLEWTKRTLVWEQVLPKHPAAGCQAGPLEGKGQDSSGPPWTPAGQAAWARAQAFGSAAPKGTGSLLGLFPSWTRPP

SEQ ID NO: 8156 - protein, 84 aa, Homo sapiens
WTPAGQAAWARAQAFGSAAPKGTGSLLGLFPSWTRPPAFASHKLYSIFIKSLFHNFPSIVLPNENGGTPNHRPTGRGNNISSHH

SEQ ID NO: 8157 - protein, 85 aa, Homo sapiens
SLQRQLEQLRGLAGAAERERLRADSLDSSGLSSERSDSDQGECPEAEGLCGPRGEPGLLTGPLPAQRSWRWMWRAWCLGVRPSCC

SEQ ID NO: 8158 - protein, 85 aa, Homo sapiens
GASSPARSTATRTAAAPGYDVPHPGRASALYSCQAHLPGRSPPQAFRAARSHLLEWTKRTLVWEQVLPKHPAAGCQAGPLEGKGQ

SEQ ID NO: 8159 - protein, 85 aa, Homo sapiens
DSSGPPWTPAGQAAWARAQAFGSAAPKGTGSLLGLFPSWTRPPAFASHKLYSIFIKSLFHNFPSIVLPNENGGTPNHRPTGRGNN

SEQ ID NO: 8160 - protein, 85 aa, Homo sapiens
KKKTFKGLIRIFRKGVIAVLAANRLKILGQSCASLFTWMESFKEGIGMLVCTGEPQDKHKFPKHQKEQLRCLQALSWLTSSDLLA

SEQ ID NO: 8161 - protein, 85 aa, Homo sapiens
AIISSMAELQDVIGKADPNSRICGHLLIGAAKNSFAKLMDKISLVMECIPLHSSRSITYVEKDSLVQRLAHGLHKVNTLALKYGL

SEQ ID NO: 8162 - protein, 85 aa, Homo sapiens
RGHVPITKSTASLQKQILGFTQRLHAAEVERRSLRLEVTEFKRSVNEMKKELDKAQGLQMQLNEFKQSKLITHEKFESACEELNN

SEQ ID NO: 8163 - protein, 85 aa, Homo sapiens
ALLREEQAQMLLNEQAQQLQELNYKLELHSSEEADKNQTLGEAVKSLSEAKMELRRKDQSLRQLNRHLTQLEQDKRRLEENIHDA

SEQ ID NO: 8164 - protein, 85 aa, Homo sapiens
ESALRMAAKDKECVANHMRAVENTLHKVRDQISLSWSAASRNDFTLQLPKLHLETFAMEGLKGGPEVVACQVRVQWCDHSSLQSQ

SEQ ID NO: 8165 - protein, 84 aa, Homo sapiens
HMRAVENTLHKVRDQISLSWSAASRNDFTLQLPKLHLETFAMEGLKGGPEVVACQVRVQWCDHSSLQSQMPGLKQSSCLSLLST

SEQ ID NO: 8166 - protein, 85 aa, Homo sapiens
KEGIGMLVCTGEPQDKHKFPKHQKEQLRCLQALSWLTSSDLLAAIISSMAELQDVIGKADPNSRICGHLLIGAAKNSFAKLMDKI

SEQ ID NO: 8167 - protein, 85 aa, Homo sapiens
SLVMECIPLHSSRSITYVEKDSLVQRLAHGLHKVNTLALKYGLRGHVPITKSTASLQKQILGFTQRLHAAEVERRSLRLEVTEFK

SEQ ID NO: 8168 - protein, 85 aa, Homo sapiens
RSVNEMKKELDKAQGLQMQLNEFKQSKLITHEKFESACEELNNALLREEQAQMLLNEQAQQLQELNYKLELHSSEEADKNQTLGE

SEQ ID NO: 8169 - protein, 85 aa, Homo sapiens
AVKSLSEAKMELRRKDQSLRQLNRHLTQLEQDKRRLEENIHDAESALRMAAKDKECVANHMRAVENTLHKVRDQISLSWSAASRN

SEQ ID NO: 8170 - protein, 85 aa, Homo sapiens
DGLAYSALLKNELLGAGIEKVQDPQTEDRRLQPSTPEKKGLFTYSLSTKRSSPDDGNDVSPYSLSPVSNKSQKLLRSPRKPTRKI

SEQ ID NO: 8171 - protein, 85 aa, Homo sapiens
SKIPFKVLDAPELQDDFYLNLVDWSSLNVLSVGLGTCVYLWSACTSQVTRLCDLSVEGDSVTSVGWSERGNLVAVGTHKGFVQIW

SEQ ID NO: 8172 - protein, 85 aa, Homo sapiens
DAAAGKKLSMLEGHTARVGALAWNAEQLSSGSRDRMILQRDIRTPPLQSERRLQGHRQEVCGLKWSTDHQLLASGGNDNKLLVWN

SEQ ID NO: 8173 - protein, 85 aa, Homo sapiens
HSSLSPVQQYTEHLAAVKAIAWSPHQHGLLASGGGTADRCIRFWNTLTGQPLQCIDTGSQVCNLAWSKHANELVSTHGYSQNQIL

SEQ ID NO: 8174 - protein, 85 aa, Homo sapiens
TYSLSTKRSSPDDGNDVSPYSLSPVSNKSQKLLRSPRKPTRKISKIPFKVLDAPELQDDFYLNLVDWSSLNVLSVGLGTCVYLWS

SEQ ID NO: 8175 - protein, 85 aa, Homo sapiens
ACTSQVTRLCDLSVEGDSVTSVGWSERGNLVAVGTHKGFVQIWDAAAGKKLSMLEGHTARVGALAWNAEQLSSGSRDRMILQRDI

SEQ ID NO: 8176 - protein, 85 aa, Homo sapiens
RTPPLQSERRLQGHRQEVCGLKWSTDHQLLASGGNDNKLLVWNHSSLSPVQQYTEHLAAVKAIAWSPHQHGLLASGGGTADRCIR

SEQ ID NO: 8177 - protein, 85 aa, Homo sapiens
FWNTLTGQPLQCIDTGSQVCNLAWSKHANELVSTHGYSQNQILVWKYPSLTQVAKLTGHSYRVLYLAMSPDGEAIVTGAGDETLR

SEQ ID NO: 8178 - protein, 85 aa, Homo sapiens
LHMVNELYPYIVEFEEEAKNPGLETHRKRKRSGNSDSIERDAAQEAEAGTGLEPGSNSGQCSVPLKKGKDAPIKKESLGHWSQGL

SEQ ID NO: 8179 - protein, 85 aa, Homo sapiens
KISMQDPKMQVYKDEQVVVIKDKYPKARYHWLVLPWTSISSLKAVAREHLELLKHMHTVGEKVIVDFAGSSKLRFRLGYHAIPSM

SEQ ID NO: 8180 - protein, 84 aa, Homo sapiens
SISSLKAVAREHLELLKHMHTVGEKVIVDFAGSSKLRFRLGYHAIPSMSHVHLHVISQDFDSPCLKNKKHWNSFNTEYFLESQE

SEQ ID NO: 8181 - protein, 85 aa, Homo sapiens
QVQLKAECNKGYVKVKQVGVNPTSIDSVVIGKDQEVKLQPGQVLHMVNELYPYIVEFEEEAKNPGLETHRKRKRSGNSDSIERDA

SEQ ID NO: 8182 - protein, 85 aa, Homo sapiens
AQEAEAGTGLEPGSNSGQCSVPLKKGKDAPIKKESLGHWSQGLKISMQDPKMQVYKDEQVVVIKDKYPKARYHWLVLPWTSISSL

SEQ ID NO: 8183 - protein, 85 aa, Homo sapiens
AAEEEAAAGGEVAGGEATAPGKVLREENQCIAPVVSSRVSPGTRPTAMGSFSSHMTEFPRKRKGSDSDPSQEAHSQTEKRRRDKM

SEQ ID NO: 8184 - protein, 85 aa, Homo sapiens
NNLIEELSAMIPQCNPMARKLDKLTVLRMAVQHLRSLKGLTNSYVGSNYRPSFLQDNELRHLILKTAEGFLFVVGCERGKILFVS

SEQ ID NO: 8185 - protein, 85 aa, Homo sapiens
KSVSKILNYDQASLTGQSLFDFLHPKDVAKVKEQLSSFDISPREKLIDAKTGLQVHSNLHAGRTRVYSGSRRSFFCRIKSCKISV

SEQ ID NO: 8186 - protein, 85 aa, Homo sapiens
KEEHGCLPNSKKKEHRKFYTIHCTGYLRSWPPNIVGMEEERNSKKDNSNFTCLVAIGRLQPYIVPQNSGEINVKPTEFITRFAVN

SEQ ID NO: 8187 - protein, 85 aa, Homo sapiens
GKFVYVDQRATAILGYLPQELLGTSCYEYFHQDDHNNLTDKHKAVLQSKEKILTDSYKFRAKDGSFVTLKSQWFSFTNPWTKELE

SEQ ID NO: 8188 - protein, 85 aa, Homo sapiens
YIVSVNTLVLGHSEPGEASFLPCSSQSSEESSRQSCMSVPGMSTGTVLGAGSIGTDIANEILDLQRLQSSSYLDDSSPTGLMKDT

SEQ ID NO: 8189 - protein, 85 aa, Homo sapiens
HTVNCRSMSNKELFPPSPSEMGELEATRQNQSTVAVHSHEPLLSDGAQLDFDALCDNDDTAMAAFMNYLEAEGGLGDPGDFSDIQ

SEQ ID NO: 8190 - protein, 85 aa, Homo sapiens
TRPTAMGSFSSHMTEFPRKRKGSDSDPSQEAHSQTEKRRRDKMNNLIEELSAMIPQCNPMARKLDKLTVLRMAVQHLRSLKGLTN

SEQ ID NO: 8191 - protein, 85 aa, Homo sapiens
SYVGSNYRPSFLQDNELRHLILKTAEGFLFVVGCERGKILFVSKSVSKILNYDQASLTGQSLFDFLHPKDVAKVKEQLSSFDISP

SEQ ID NO: 8192 - protein, 85 aa, Homo sapiens
REKLIDAKTGLQVHSNLHAGRTRVYSGSRRSFFCRIKSCKISVKEEHGCLPNSKKKEHRKFYTIHCTGYLRSWPPNIVGMEEERN

SEQ ID NO: 8193 - protein, 85 aa, Homo sapiens
SKKDNSNFTCLVAIGRLQPYIVPQNSGEINVKPTEFITRFAVNGKFVYVDQRATAILGYLPQELLGTSCYEYFHQDDHNNLTDKH

SEQ ID NO: 8194 - protein, 85 aa, Homo sapiens
KAVLQSKEKILTDSYKFRAKDGSFVTLKSQWFSFTNPWTKELEYIVSVNTLVLGHSEPGEASFLPCSSQSSEESSRQSCMSVPGM

SEQ ID NO: 8195 - protein, 85 aa, Homo sapiens
STGTVLGAGSIGTDIANEILDLQRLQSSSYLDDSSPTGLMKDTHTVNCRSMSNKELFPPSPSEMGELEATRQNQSTVAVHSHEPL

SEQ ID NO: 8196 - protein, 85 aa, Homo sapiens
MGIPRLLDPEDVDVDKPDEKSIMTYVAQFLKHYPDIHNASTDGQEDDEILPGFPSFANSVQNFKREDRVIFKEMKVWIEQFERDL

SEQ ID NO: 8197 - protein, 85 aa, Homo sapiens
TRAQMVESNLQDKYQSFKHFRVQYEMKRKQIEHLIQPLHRDGKLSLDQALVKQSWDRVTSRLFDWHIQLDKSLPAPLGTIGAWLY

SEQ ID NO: 8198 - protein, 85 aa, Homo sapiens
RAEVALREEITVQQVHEETANTIQRKLEQHKDLLQNTDAHKRAFHEIYRTRSVNGIPVPPDQLEDMAERFHFVSSTSELHLMKME

SEQ ID NO: 8199 - protein, 85 aa, Homo sapiens
FLELKYRLLSLLVLAESKLKSWIIKYGRRESVEQLLQNYVSFIENSKFFEQYEVTYQILKQTAEMYVKADGSVEEAENVMKFMNE

SEQ ID NO: 8200 - protein, 85 aa, Homo sapiens
TTAQWRNLSVEVRSVRSMLEEVISNWDRYGNTVASLQAWLEDAEKMLNQSENAKKDFFRNLPHWIQQHTAMNDAGNFLIETCDEM

SEQ ID NO: 8201 - protein, 85 aa, Homo sapiens
VSRDLKQQLLLLNGRWRELFMEVKQYAQADEMDRMKKEYTDCVVTLSAFATEAHKKLSEPLEVSFMNVKLLIQDLEDIEQRVPVM

SEQ ID NO: 8202 - protein, 85 aa, Homo sapiens
DAQYKIITKTAHLITKESPQEEGKEMFATMSKLKEQLTKVKECYSPLLYESQQLLIPLEELEKQMTSFYDSLGKINEIITVLERE

SEQ ID NO: 8203 - protein, 85 aa, Homo sapiens
AQSSALFKQKHQELLACQENCKKTLTLIEKGSQSVQKFVTLSNVLKHFDQTRLQRQIADIHVAFQSMVKKTGDWKKHVETNSRLM

SEQ ID NO: 8204 - protein, 85 aa, Homo sapiens
YLFQTGSSHERFLSFSSLESLSSELEQTKEFSKRTESIAVQAENLVKEASEIPLGPQNKQLLQQQAKSIKEQVKKLEDTLEEDIK

SEQ ID NO: 8205 - protein, 85 aa, Homo sapiens
TMEMVKTKWDHFGSNFETLSVWITEKEKELNALETSSSAMDMQISQIKVTIQEIESKLSSIVGLEEEAQSFAQFVTTGESARIKA

SEQ ID NO: 8206 - protein, 85 aa, Homo sapiens
KLTQIRRYGEELREHAQCLEGTILGHLSQQQKFEENLRKIQQSVSEFEDKLAVPIKICSSATETYKVLQEHMDLCQALESLSSAI

SEQ ID NO: 8207 - protein, 85 aa, Homo sapiens
TAFSASARKVVNRDSCVQEAAALQQQYEDILRRAKERQTALENLLAHWQRLEKELSSFLTWLERGEAKASSPEMDISADRVKVEG

SEQ ID NO: 8208 - protein, 85 aa, Homo sapiens
ELQLIQALQNEVVSQASFYSKLLQLKESLFSVASKDDVKMMKLHLEQLDERWRDLPQIINKRINFLQSVVAEHQQFDELLLSFSV

SEQ ID NO: 8209 - protein, 85 aa, Homo sapiens
WIKLFLSELQTTSEISIMDHQVALTRHKDHAAEVESKKGELQSLQGHLAKLGSLGRAEDLHLLQGKAEDCFQLFEEASQVVERRQ

SEQ ID NO: 8210 - protein, 85 aa, Homo sapiens
LALSHLAEFLQSHASLSGILRQLRQTVEATNSMNKNESDLIEKDLNDALQNAKALESAAVSLDGILSKAQYHLKIGSSEQRTSCR

SEQ ID NO: 8211 - protein, 85 aa, Homo sapiens
ATADQLCGEVERIQNLLGTKQSEADALAVLKKAFQDQKEELLKSIEDIEERTDKERLKEPTRQALQQRLRVFNQLEDELNSHEHE

SEQ ID NO: 8212 - protein, 85 aa, Homo sapiens
LCWLKDKAKQIAQKDVAFAPEVDREINRLEVTWDDTKRLIHENQGQCCGLIDLMREYQNLKSAVSKVLENASSVIVTRTTIKDQE

SEQ ID NO: 8213 - protein, 85 aa, Homo sapiens
DLKWAFSKHETAKNKMNYKQKDLDNFTSKGKHLLSELKKIHSSDFSLVKTDMESTVDKWLDVSEKLEENMDRLRVSLSIWDDVLS

SEQ ID NO: 8214 - protein, 85 aa, Homo sapiens
TRDEIEGWSNNCVPQMAENISNLDNHLRAEELLKEFESEVKNKALRLEELHSKVNDLKELTKNLETPPDLQFIEADLMQKLEHAK

SEQ ID NO: 8215 - protein, 85 aa, Homo sapiens
EITEVAKGTLKDFTAQSTQVEKFINDITTWFTKVEESLMNCAQNETCEALKKVKDIQKELQSQQSNISSTQENLNSLCRKYHSAE

SEQ ID NO: 8216 - protein, 85 aa, Homo sapiens
MESLGRAMTGLIKKHEAVSQLCSKTQASLQESLEKHFSESMQEFQEWFLGAKAAAKESSDRTGDSKVLEAKLHDLQNILDSVSDG

SEQ ID NO: 8217 - protein, 85 aa, Homo sapiens
QSKLDAVTQEGQTLYAHLSKQIVSSIQEQITKANEEFQAFLKQCLKDKQALQDCASELGSFEDQHRKLNLWIHEMEERFNTENLG

SEQ ID NO: 8218 - protein, 85 aa, Homo sapiens
ESKQHIPEKKNEVHKVEMFLGELLAARESLDKLSQRGQLLSEEGHGAGQEGRLCSQLLTSHQNLLRMTKEKLRSCQVALQEHEAL

SEQ ID NO: 8219 - protein, 85 aa, Homo sapiens
EEALQSMWFWVKAIQDRLACAESTLGSKDTLEKRLSQIQDILLMKGEGEVKLNMAIGKGEQALRSSNKEGQRVIQTQLETLKEVW

SEQ ID NO: 8220 - protein, 85 aa, Homo sapiens
ADIMSSSVHAQSTLESVISQWNDYVERKNQLEQWMESVDQKIEHPLQPQPGLKEKFVLLDHLQSILSEAEDHTRALHRLIAKSRE

SEQ ID NO: 8221 - protein, 85 aa, Homo sapiens
LYEKTEDESFKDTAQEELKTQFNDIMTVAKEKMRKVEEIVKDHLMYLDAVHEFTDWLHSAKEELHRWSDMSGDSSATQKKLSKIK

SEQ ID NO: 8222 - protein, 85 aa, Homo sapiens
ELIDSREIGASRLSRVESLAPEVKQNTTASGCELMHTEMQALRADWKQWEDSVFQTQSCLENLVSQMALSEQEFSGQVAQLEQAL

SEQ ID NO: 8223 - protein, 85 aa, Homo sapiens
EQFSALLKTWAQQLTLLEGKNTDEEIVECWHKGQEILDALQKAEPRTEDLKSQLNELCRFSRDLSTYSGKVSGLIKEYNCLCLQA

SEQ ID NO: 8224 - protein, 85 aa, Homo sapiens
SKGCQNKEQILQQRFRKAFRDFQQWLVNAKITTAKCFDIPQNISEVSTSLQKIQEFLSESENGQHKLNMMLSKGELLSTLLTKEK

SEQ ID NO: 8225 - protein, 85 aa, Homo sapiens
AKGIQAKVTAAKEDWKNFHSNLHQKESALENLKIQMKDFEVSAEPIQDWLSKTEKMVHESSNRLYDLPAKRREQQKLQSVLEEIH

SEQ ID NO: 8226 - protein, 85 aa, Homo sapiens
CYEPQLNRLKEKAQQLWEGQAASKSFRHRVSQLSSQYLALSNLTKEKVSRLDRIVAEHNQFSLGIKELQDWMTDAIHMLDSYCHP

SEQ ID NO: 8227 - protein, 85 aa, Homo sapiens
TSDKSVLDSRTLKLEALLSVKQEKEIQMKMIVTRGESVLQNTSPEGIPTIQQQLQSVKDMWASLLSAGIRCKSQLEGALSKWTSY

SEQ ID NO: 8228 - protein, 85 aa, Homo sapiens
QDGVRQFSGWMDSMEANLNESERQHAELRDKTTMLGKAKLLNEEVLSYSSLLETIEVKGAGMTEHYVTQLELQDLQERYRAIQER

SEQ ID NO: 8229 - protein, 85 aa, Homo sapiens
AKEAVTKSEKLVRLHQEYQRDLKAFEVWLGQEQEKLDQYSVLEGDAHTHETTLRDLQELQVHCAEGQALLNSVLHTREDVIPSGI

SEQ ID NO: 8230 - protein, 85 aa, Homo sapiens
PQAEDRALESLRQDWQAYQHRLSETRTQFNNVVNKLRLMEQKFQQVDEWLKTAEEKKWHEEVTAYRDEVEEVGARAQEILDESHV

SEQ ID NO: 8231 - protein, 85 aa, Homo sapiens
NSRMGCQATQLTSRYQALLLQVLEQIKFLEEEIQSLEESESSLSSYSDWYGSTHKNFKNVATKIDKVDTVMMGKKLKTLEVLLKD

SEQ ID NO: 8232 - protein, 85 aa, Homo sapiens
MEKGHSLLKSAREKGERAVKYLEEGEAERLRKEIHDHMEQLKELTSTVRKEHMTLEKGLHLAKEFSDKCKALTQWIAEYQEILHV

SEQ ID NO: 8233 - protein, 85 aa, Homo sapiens
PEEPKMELYEKKAQLSKYKSLQQTVLSHEPSVKSVREKGEALLELVQDVTLKDKIDQLQSDYQDLCSIGKAMMEEIAGFEDRLNN

SEQ ID NO: 8234 - protein, 85 aa, Homo sapiens
LQMKGDTLIGQCADHLQAKLKQNVHAHLQGTKDSYSAICSTAQRMYQSLEHELQKHVSRQDTLQQCQAWLSAVQPDLEPSPQPPL

SEQ ID NO: 8235 - protein, 85 aa, Homo sapiens
SRAEAIKQVKHFRALQEQARTYLDLLCSMCDLSNASVKTTAKDIQQTEQTIEQKLVQAQNLTQGWEEIKHLKSELWIYLQDADQQ

SEQ ID NO: 8236 - protein, 85 aa, Homo sapiens
MQNMKRRHSELELNIAQNMVSQVKDFVKKLQSKQASVNTIIEKVNKLTKKEESPEHKEINHLNDQWLDLCRQSNNLCLQREEDLQ

SEQ ID NO: 8237 - protein, 85 aa, Homo sapiens
RTRDYHDCMNVVEVFLEKFTTEWDNLARSDAESTAVHLEALKKLALALQERKYAIEDLKDQKQKMIEHLNLDDKELVKEQTSHLE

SEQ ID NO: 8238 - protein, 85 aa, Homo sapiens
QRWFQLEDLIKRKIQVSVTNLEELNVVQSRFQELMEWAEEQQPNIAEALKQSPPPDMAQNLLMDHLAICSELEAKQMLLKSLIKD

SEQ ID NO: 8239 - protein, 85 aa, Homo sapiens
ADRVMADLGLNERQVIQKALSDAQSHVNCLSDLVGQRRKYLNKALSEKTQFLMAVFQATSQIQQHERKIMFREHICLLPDDVSKQ

SEQ ID NO: 8240 - protein, 85 aa, Homo sapiens
VKTCKSAQASLKTYQNEVTGLWAQGRELMKEVTEQEKSEVLGKLQELQSVYDSVLQKCSHRLQELEKNLVSRKHFKEDFDKACHW

SEQ ID NO: 8241 - protein, 85 aa, Homo sapiens
LKQADIVTFPEINLMNESSELHTQLAKYQNILEQSPEYENLLLTLQRTGQTILPSLNEVDHSYLSEKLNALPRQFNVIVALAKDK

SEQ ID NO: 8242 - protein, 85 aa, Homo sapiens
FYKVQEAILARKEYASLIELTTQSLSELEAQFLRMSKVPTDLAVEEALSLQDGCRAILDEVAGLGEAVDELNQKKEGFRSTGQPW

SEQ ID NO: 8243 - protein, 85 aa, Homo sapiens
QPDKMLHLVTLYHRLKRQTEQRVSLLEDTTSAYQEHEKMCQQLERQLKSVKEEQSKVNEETLPAEEKLKMYHSLAGSLQDSGIVL

SEQ ID NO: 8244 - protein, 85 aa, Homo sapiens
KRVTIHLEDLAPHLDPLAYEKARHQIQSWQGELKLLTSAIGETVTECESRMVQSIDFQTEMSRSLDWLRRVKAELSGPVYLDLNL

SEQ ID NO: 8245 - protein, 85 aa, Homo sapiens
QDIQEEIRKIQIHQEEVQSSLRIMNALSHKEKEKFTKAKELISADLEHSLAELSELDGDIQEALRTRQATLTEIYSQCQRYYQVF

SEQ ID NO: 8246 - protein, 85 aa, Homo sapiens
QAANDWLEDAQELLQLAGNGLDVESAEENLKSHMEFFSTEDQFHSNLEELHSLVATLDPLIKPTGKEDLEQKVASLELRSQRMSR

SEQ ID NO: 8247 - protein, 85 aa, Homo sapiens
DSGAQVDLLQRCTAQWHDYQKAREEVIELMNDTEKKLSEFSLLKTSSSHEAEEKLSEHKALVSVVNSFHEKIVALEEKASQLEKT

SEQ ID NO: 8248 - protein, 85 aa, Homo sapiens
GNDASKATLSRSMTTVWQRWTRLRAVAQDQEKILEDAVDEWTGFNNKVKKATEMIDQLQDKLPGSSAEKASKAELLTLLEYHDTF

SEQ ID NO: 8249 - protein, 85 aa, Homo sapiens
VLELEQQQSALGMLRQQTLSMLQDGAAPTPGEEPPLMQEITAMQDRCLNMQEKVKTNGKLVKQELKDREMVETQINSVKCWVQET

SEQ ID NO: 8250 - protein, 85 aa, Homo sapiens
KEYLGNPTIEIDAQLEELQILLTEATNHRQNIEKMAEEQKEKYLGLYTILPSELSLQLAEVALDLKIRDQIQDKIKEVEQSKATS

SEQ ID NO: 8251 - protein, 85 aa, Homo sapiens
QELSRQIQKLAKDLTTILTKLKAKTDNVVQAKTDQKVLGEELDGCNSKLMELDAAVQKFLEQNGQLGKPLAKKIGKLTELHQQTI

SEQ ID NO: 8252 - protein, 85 aa, Homo sapiens
RQAENRLSKLNQAASHLEEYNEMLELILKWIEKAKVLAHGTIAWNSASQLREQYILHQTLLEESKEIDSELEAMTEKLQYLTSVY

SEQ ID NO: 8253 - protein, 85 aa, Homo sapiens
CTEKMSQQVAELGRETEELRQMIKIRLQNLQDAAKDMKKFEAELKKLQAALEQAQATLTSPEVGRLSLKEQLSHRQHLLSEMESL

SEQ ID NO: 8254 - protein, 85 aa, Homo sapiens
KPKVQAVQLCQSALRIPEDVVASLPLCHAALRLQEEASRLQHTAIQQCNIMQAAVVQYEQYEQEMKHLQQLIEGAHREIEDKPVA

SEQ ID NO: 8255 - protein, 85 aa, Homo sapiens
TSNIQELQAQISRHEELAQKIKGYQEQIASLNSKCKMLTMKAKHATMLLTVTEVEGLAEGTEDLDGELLPTPSAHPSVVMMTAGR

SEQ ID NO: 8256 - protein, 85 aa, Homo sapiens
CHTLLSPVTEESGEEGTNSEISSPPACRSPSPVANTDASVNQDIAYYQALSAERLQTDAAKIHPSTSASQEFYEPGLEPSATAKL

SEQ ID NO: 8257 - protein, 85 aa, Homo sapiens
GDLQRSWETLKNVISEKQRTLYEALERQQKYQDSLQSISTKMEAIELKLSESPEPGRSPESQMAEHQALMDEILMLQDEINELQS

SEQ ID NO: 8258 - protein, 85 aa, Homo sapiens
SLAEELVSESCEADPAEQLALQSTLTVLAERMSTIRMKASGKRQLLEEKLNDQLEEQRQEQALQRYRCEADELDSWLLSTKATLD

SEQ ID NO: 8259 - protein, 85 aa, Homo sapiens
TALSPPKEPMDMEAQLMDCQNMLVEIEQKVVALSELSVHNENLLLEGKAHTKDEAEQLAGKLRRLKGSLLELQRALHDKQLNMQG

SEQ ID NO: 8260 - protein, 85 aa, Homo sapiens
TAQEKEESDVDLTATQSPGVQEWLAQARTTWTQQRQSSLQQQKELEQELAEQKSLLRSVASRGEEILIQHSAAETSGDAGEKPDV

SEQ ID NO: 8261 - protein, 85 aa, Homo sapiens
LSQELGMEGEKSSAEDQMRMKWESLHQEFSTKQKLLQNVLEQEQEQVLYSRPNRLLSGVPLYKGDVPTQDKSAVTSLLDGLNQAF

SEQ ID NO: 8262 - protein, 85 aa, Homo sapiens
EEVSSQSGGAKRQSIHLEQKLYDGVSATSTWLDDVEERLFVATALLPEETETCLFNQEILAKDIKEMSEEMDKNKNLFSQAFPEN

SEQ ID NO: 8263 - protein, 85 aa, Homo sapiens
GDNRDVIEDTLGCLLGRLSLLDSVVNQRCHQMKERLQQILNFQNDLKVLFTSLADNKYIILQKLANVFEQPVAEQIEAIQQAEDG

SEQ ID NO: 8264 - protein, 85 aa, Homo sapiens
LKEFDAGIIELKRRGDKLQVEQPSMQELSKLQDMYDELMMIIGSRRSGLNQNLTLKSQYERALQDLADLLETGQEKMAGDQKIIV

SEQ ID NO: 8265 - protein, 85 aa, Homo sapiens
SSKEEIQQLLDKHKEYFQGLESHMILTETLFRKIISFAVQKETQFHTELMAQASAVLKRAHKRGVELEYILETWSHLDEDQQELS

SEQ ID NO: 8266 - protein, 85 aa, Homo sapiens
RQLEVVESSIPSVGLVEENEDRLIDRITLYQHLKSSLNEYQPKLYQVLDDGKRLLISISCSDLESQLNQLGECWLSNTNKMSKEL

SEQ ID NO: 8267 - protein, 85 aa, Homo sapiens
HRLETILKHWTRYQSESADLIHWLQSAKDRLEFWTQQSVTVPQELEMVRDHLNAFLEFSKEVDAQSSLKSSVLSTGNQLLRLKKV

SEQ ID NO: 8268 - protein, 85 aa, Homo sapiens
DTATLRSELSRIDSQWTDLLTNIPAVQEKLHQLQMDKLPSRHAISEVMSWISLMENVIQKDEDNIKNSIGYKAIHEYLQKYKGFK

SEQ ID NO: 8269 - protein, 85 aa, Homo sapiens
IDINCKQLTVDFVNQSVLQISSQDVESKRSDKTDFAEQLGAMNKSWQILQGLVTEKIQLLEGLLESWSEYENNVQCLKTWFETQE

SEQ ID NO: 8270 - protein, 85 aa, Homo sapiens
KRLKQQHRIGDQASVQNALKDCQDLEDLIKAKEKEVEKIEQNGLALIQNKKEDVSSIVMSTLRELGQTWANLDHMVGQLKILLKS

SEQ ID NO: 8271 - protein, 85 aa, Homo sapiens
VLDQWSSHKVAFDKINSYLMEARYSLSRFRLLTGSLEAVQVQVDNLQNLQDDLEKQERSLQKFGSITNQLLKECHPPVTETLTNT

SEQ ID NO: 8272 - protein, 85 aa, Homo sapiens
MKEVNMRWNNLLEEIAEQLQSSKALLQLWQRYKDYSKQCASTVQQQEDRTNELLKAATNKDIADDEVATWIQDCNDLLKGLGTVK

SEQ ID NO: 8273 - protein, 85 aa, Homo sapiens
DSLFFLHELGEQLKQQVDASAASAIQSDQLSLSQHLCALEQALCKQQTSLQAGVLDYETFAKSLEALEAWIVEAEEILQGQDPSH

SEQ ID NO: 8274 - protein, 85 aa, Homo sapiens
SSDLSTIQERMEELKGQMLKFSSMAPDLDRLNELGYRLPLNDKEIKRMQNLNRHWSLISSQTTERFSKLQSFLLQHQTFLEKCET

SEQ ID NO: 8275 - protein, 85 aa, Homo sapiens
WMEFLVQTEQKLAVEISGNYQHLLEQQRAHELFQAEMFSRQQILHSIIIDGQRLLEQGQVDDRDEFNLKLTLLSNQWQGVIRRAQ

SEQ ID NO: 8276 - protein, 85 aa, Homo sapiens
QRRGIIDSQIRQWQRYREMAEKLRKWLVEVSYLPMSGLGSVPIPLQQARTLFDEVQFKEKVFLRQQGSYILTVEAGKQLLLSADS

SEQ ID NO: 8277 - protein, 85 aa, Homo sapiens
GAEAALQAELAEIQEKWKSASMRLEEQKKKLAFLLKDWEKCEKGIADSLEKLRTFKKKLSQSLPDHHEELHAEQMRCKELENAVG

SEQ ID NO: 8278 - protein, 85 aa, Homo sapiens
SWTDDLTQLSLLKDTLSAYISADDISILNERVELLQRQWEELCHQLSLRRQQIGERLNEWAVFSEKNKELCEWLTQMESKVSQNG

SEQ ID NO: 8279 - protein, 85 aa, Homo sapiens
DILIEEMIEKLKKDYQEEIAIAQENKIQLQQMGERLAKASHESKASEIEYKLGKVNDRWQHLLDLIAARVKKLKETLVAVQQLDK

SEQ ID NO: 8280 - protein, 85 aa, Homo sapiens
NMSSLRTWLAHIESELAKPIVYDSCNSEEIQRKLNEQQELQRDIEKHSTGVASVLNLCEVLLHDCDACATDAECDSIQQATRNLD

SEQ ID NO: 8281 - protein, 85 aa, Homo sapiens
RRWRNICAMSMERRLKIEETWRLWQKFLDDYSRFEDWLKSSERTAAFPSSSGVIYTVAKEELKKFEAFQRQVHECLTQLELINKQ

SEQ ID NO: 8282 - protein, 85 aa, Homo sapiens
YRRLARENRTDSACSLKQMVHEGNQRWDNLQKRVTSILRRLKHFIGQREEFETARDSILVWLTEMDLQLTNIEHFSECDVQAKIK

SEQ ID NO: 8283 - protein, 85 aa, Homo sapiens
QLKAFQQEISLNHNKIEQIIAQGEQLIEKSEPLDAAIIEEELDELRRYCQEVFGRVERYHKKLIRLPLPDDEHDLSDRELELEDS

SEQ ID NO: 8284 - protein, 85 aa, Homo sapiens
AALSDLHWHDRSADSLLSPQPSSNLSLSLAQPLRSERSGRDTPASVDSIPLEWDHDYDLSRDLESAMSRALPSEDEEGQDDKDFY

SEQ ID NO: 8285 - protein, 85 aa, Homo sapiens
LRGAVGLSDVMIPESPEAYVKLTENAIKNTSGDHSALESQIRQLGKALDDSRFQIQQTENIIRSKTPTGPELDTSYKGYMKLLGE

SEQ ID NO: 8286 - protein, 85 aa, Homo sapiens
CSSSIDSVKRLEHKLKEEEESLPGFVNLHSTETQTAGVIDRWELLQAQALSKELRMKQNLQKWQQFNSDLNSIWAWLGDTEEELE

SEQ ID NO: 8287 - protein, 85 aa, Homo sapiens
QLQRLELSTDIQTIELQIKKLKELQKAVDHRKAIILSINLCSPEFTQADSKESRDLQDRLSQMNGRWDRVCSLLEEWRGLLQDAL

SEQ ID NO: 8288 - protein, 85 aa, Homo sapiens
MQCQGFHEMSHGLLLMLENIDRRKNEIVPIDSNLDAEILQDHHKQLMQIKHELLESQLRVASLQDMSCQLLVNAEGTDCLEAKEK

SEQ ID NO: 8289 - protein, 85 aa, Homo sapiens
VHVIGNRLKLLLKEVSRHIKELEKLLDVSSSQQDLSSWSSADELDTSGSVSPTSGRSTPNRQKTPRGKCSLSQPGPSVSSPHSRS

SEQ ID NO: 8290 - protein, 85 aa, Homo sapiens
GQEDDEILPGFPSFANSVQNFKREDRVIFKEMKVWIEQFERDLTRAQMVESNLQDKYQSFKHFRVQYEMKRKQIEHLIQPLHRDG

SEQ ID NO: 8291 - protein, 85 aa, Homo sapiens
KLSLDQALVKQSWDRVTSRLFDWHIQLDKSLPAPLGTIGAWLYRAEVALREEITVQQVHEETANTIQRKLEQHKDLLQNTDAHKR

SEQ ID NO: 8292 - protein, 85 aa, Homo sapiens
AFHEIYRTRSVNGIPVPPDQLEDMAERFHFVSSTSELHLMKMEFLELKYRLLSLLVLAESKLKSWIIKYGRRESVEQLLQNYVSF

SEQ ID NO: 8293 - protein, 85 aa, Homo sapiens
IENSKFFEQYEVTYQILKQTAEMYVKADGSVEEAENVMKFMNETTAQWRNLSVEVRSVRSMLEEVISNWDRYGNTVASLQAWLED

SEQ ID NO: 8294 - protein, 85 aa, Homo sapiens
AEKMLNQSENAKKDFFRNLPHWIQQHTAMNDAGNFLIETCDEMVSRDLKQQLLLLNGRWRELFMEVKQYAQADEMDRMKKEYTDC

SEQ ID NO: 8295 - protein, 85 aa, Homo sapiens
VVTLSAFATEAHKKLSEPLEVSFMNVKLLIQDLEDIEQRVPVMDAQYKIITKTAHLITKESPQEEGKEMFATMSKLKEQLTKVKE

SEQ ID NO: 8296 - protein, 85 aa, Homo sapiens
CYSPLLYESQQLLIPLEELEKQMTSFYDSLGKINEIITVLEREAQSSALFKQKHQELLACQENCKKTLTLIEKGSQSVQKFVTLS

SEQ ID NO: 8297 - protein, 85 aa, Homo sapiens
NVLKHFDQTRLQRQIADIHVAFQSMVKKTGDWKKHVETNSRLMKKFEESRAELEKVLRIAQEGLEEKGDPEELLRRHTEFFSQLD

SEQ ID NO: 8298 - protein, 85 aa, Homo sapiens
QRVLNAFLKACDELTDILPEQEQQGLQEAVRKLHKQWKDLQGEAPYHLLHLKIDVEKNRFLASVEECRTELDRETKLMPQEGSEK

SEQ ID NO: 8299 - protein, 85 aa, Homo sapiens
IIKEHRVFFSDKGPHHLCEKRLQLIEELCVKLPVRDPVRDTPGTCHVTLKELRAAIDSTYRKLMEDPDKWKDYTSRFSEFSSWIS

SEQ ID NO: 8300 - protein, 85 aa, Homo sapiens
TNETQLKGIKGEAIDTANHGEVKRAVEEIRNGVTKRGETLSWLKSRLKVLTEVSSENEAQKQGDELAKLSSSFKALVTLLSEVEK

SEQ ID NO: 8301 - protein, 85 aa, Homo sapiens
MLSNFGDCVQYKEIVKNSLEELISGSKEVQEQAEKILDTENLFEAQQLLLHHQQKTKRISAKKRDVQQQIAQAQQGEGGLPDRGH

SEQ ID NO: 8302 - protein, 85 aa, Homo sapiens
EELRKLESTLDGLERSRERQERRIQVTLRKWERFETNKETVVRYLFQTGSSHERFLSFSSLESLSSELEQTKEFSKRTESIAVQA

SEQ ID NO: 8303 - protein, 85 aa, Homo sapiens
ENLVKEASEIPLGPQNKQLLQQQAKSIKEQVKKLEDTLEEDIKTMEMVKTKWDHFGSNFETLSVWITEKEKELNALETSSSAMDM

SEQ ID NO: 8304 - protein, 85 aa, Homo sapiens
QISQIKVTIQEIESKLSSIVGLEEEAQSFAQFVTTGESARIKAKLTQIRRYGEELREHAQCLEGTILGHLSQQQKFEENLRKIQQ

SEQ ID NO: 8305 - protein, 85 aa, Homo sapiens
SVSEFEDKLAVPIKICSSATETYKVLQEHMDLCQALESLSSAITAFSASARKVVNRDSCVQEAAALQQQYEDILRRAKERQTALE

SEQ ID NO: 8306 - protein, 85 aa, Homo sapiens
NLLAHWQRLEKELSSFLTWLERGEAKASSPEMDISADRVKVEGELQLIQALQNEVVSQASFYSKLLQLKESLFSVASKDDVKMMK

SEQ ID NO: 8307 - protein, 85 aa, Homo sapiens
LHLEQLDERWRDLPQIINKRINFLQSVVAEHQQFDELLLSFSVWIKLFLSELQTTSEISIMDHQVALTRHKDHAAEVESKKGELQ

SEQ ID NO: 8308 - protein, 85 aa, Homo sapiens
SLQGHLAKLGSLGRAEDLHLLQGKAEDCFQLFEEASQVVERRQLALSHLAEFLQSHASLSGILRQLRQTVEATNSMNKNESDLIE

SEQ ID NO: 8309 - protein, 85 aa, Homo sapiens
KDLNDALQNAKALESAAVSLDGILSKAQYHLKIGSSEQRTSCRATADQLCGEVERIQNLLGTKQSEADALAVLKKAFQDQKEELL

SEQ ID NO: 8310 - protein, 85 aa, Homo sapiens
KSIEDIEERTDKERLKEPTRQALQQRLRVFNQLEDELNSHEHELCWLKDKAKQIAQKDVAFAPEVDREINRLEVTWDDTKRLIHE

SEQ ID NO: 8311 - protein, 85 aa, Homo sapiens
NQGQCCGLIDLMREYQNLKSAVSKVLENASSVIVTRTTIKDQEDLKWAFSKHETAKNKMNYKQKDLDNFTSKGKHLLSELKKIHS

SEQ ID NO: 8312 - protein, 85 aa, Homo sapiens
SDFSLVKTDMESTVDKWLDVSEKLEENMDRLRVSLSIWDDVLSTRDEIEGWSNNCVPQMAENISNLDNHLRAEELLKEFESEVKN

SEQ ID NO: 8313 - protein, 85 aa, Homo sapiens
KALRLEELHSKVNDLKELTKNLETPPDLQFIEADLMQKLEHAKEITEVAKGTLKDFTAQSTQVEKFINDITTWFTKVEESLMNCA

SEQ ID NO: 8314 - protein, 85 aa, Homo sapiens
QNETCEALKKVKDIQKELQSQQSNISSTQENLNSLCRKYHSAELESLGRAMTGLIKKHEAVSQLCSKTQASLQESLEKHFSESMQ

SEQ ID NO: 8315 - protein, 85 aa, Homo sapiens
EFQEWFLGAKAAAKESSDRTGDSKVLEAKLHDLQNILDSVSDGQSKLDAVTQEGQTLYAHLSKQIVSSIQEQITKANEEFQAFLK

SEQ ID NO: 8316 - protein, 85 aa, Homo sapiens
QCLKDKQALQDCASELGSFEDQHRKLNLWIHEMEERFNTENLGESKQHIPEKKNEVHKVEMFLGELLAARESLDKLSQRGQLLSE

SEQ ID NO: 8317 - protein, 85 aa, Homo sapiens
EGHGAGQEGRLCSQLLTSHQNLLRMTKEKLRSCQVALQEHEALEEALQSMWFWVKAIQDRLACAESTLGSKDTLEKRLSQIQDIL

SEQ ID NO: 8318 - protein, 85 aa, Homo sapiens
MMKGEGEVKLNMAIGKGEQALRSSNKEGQRVIQTQLETLKEVWADIMSSSVHAQSTLESVISQWNDYVERKNQLEQWMESVDQKI

SEQ ID NO: 8319 - protein, 85 aa, Homo sapiens
EHPLQPQPGLKEKFVLLDHLQSILSEAEDHTRALHRLIAKSRELYEKTEDESFKDTAQEELKTQFNDIMTVAKEKMRKVEEIVKD

SEQ ID NO: 8320 - protein, 85 aa, Homo sapiens
HLMYLDAVHEFTDWLHSAKEELHRWSDMSGDSSATQKKLSKIKELIDSREIGASRLSRVESLAPEVKQNTTASGCELMHTEMQAL

SEQ ID NO: 8321 - protein, 85 aa, Homo sapiens
RADWKQWEDSVFQTQSCLENLVSQMALSEQEFSGQVAQLEQALEQFSALLKTWAQQLTLLEGKNTDEEIVECWHKGQEILDALQK

SEQ ID NO: 8322 - protein, 85 aa, Homo sapiens
AEPRTEDLKSQLNELCRFSRDLSTYSGKVSGLIKEYNCLCLQASKGCQNKEQILQQRFRKAFRDFQQWLVNAKITTAKCFDIPQN

SEQ ID NO: 8323 - protein, 85 aa, Homo sapiens
ISEVSTSLQKIQEFLSESENGQHKLNMMLSKGELLSTLLTKEKAKGIQAKVTAAKEDWKNFHSNLHQKESALENLKIQMKDFEVS

SEQ ID NO: 8324 - protein, 85 aa, Homo sapiens
AEPIQDWLSKTEKMVHESSNRLYDLPAKRREQQKLQSVLEEIHCYEPQLNRLKEKAQQLWEGQAASKSFRHRVSQLSSQYLALSN

SEQ ID NO: 8325 - protein, 85 aa, Homo sapiens
LTKEKVSRLDRIVAEHNQFSLGIKELQDWMTDAIHMLDSYCHPTSDKSVLDSRTLKLEALLSVKQEKEIQMKMIVTRGESVLQNT

SEQ ID NO: 8326 - protein, 85 aa, Homo sapiens
SPEGIPTIQQQLQSVKDMWASLLSAGIRCKSQLEGALSKWTSYQDGVRQFSGWMDSMEANLNESERQHAELRDKTTMLGKAKLLN

SEQ ID NO: 8327 - protein, 85 aa, Homo sapiens
EEVLSYSSLLETIEVKGAGMTEHYVTQLELQDLQERYRAIQERAKEAVTKSEKLVRLHQEYQRDLKAFEVWLGQEQEKLDQYSVL

SEQ ID NO: 8328 - protein, 85 aa, Homo sapiens
EGDAHTHETTLRDLQELQVHCAEGQALLNSVLHTREDVIPSGIPQAEDRALESLRQDWQAYQHRLSETRTQFNNVVNKLRLMEQK

SEQ ID NO: 8329 - protein, 85 aa, Homo sapiens
FQQVDEWLKTAEEKKWHEEVTAYRDEVEEVGARAQEILDESHVNSRMGCQATQLTSRYQALLLQVLEQIKFLEEEIQSLEESESS

SEQ ID NO: 8330 - protein, 85 aa, Homo sapiens
LSSYSDWYGSTHKNFKNVATKIDKVDTVMMGKKLKTLEVLLKDMEKGHSLLKSAREKGERAVKYLEEGEAERLRKEIHDHMEQLK

SEQ ID NO: 8331 - protein, 85 aa, Homo sapiens
ELTSTVRKEHMTLEKGLHLAKEFSDKCKALTQWIAEYQEILHVPEEPKMELYEKKAQLSKYKSLQQTVLSHEPSVKSVREKGEAL

SEQ ID NO: 8332 - protein, 85 aa, Homo sapiens
MELVQDVTLKDKIDQLQSDYQDLCSIGKAMMEEIAGFEDRLNNLQMKGDTLIGQCADHLQAKLKQNVHAHLQGTKDSYSAICSTA

SEQ ID NO: 8333 - protein, 85 aa, Homo sapiens
QRMYQSLEHELQKHVSRQDTLQQCQAWLSAVQPDLEPSPQPPLSRAEAIKQVKHFRALQEQARTYLDLLCSMCDLSNASVKTTAK

SEQ ID NO: 8334 - protein, 85 aa, Homo sapiens
DIQQTEQTIEQKLVQAQNLTQGWEEIKHLKSELWIYLQDADQQLQNMKRRHSELELNIAQNMVSQVKDFVKKLQSKQASVNTIIE

SEQ ID NO: 8335 - protein, 85 aa, Homo sapiens
KVNKLTKKEESPEHKEINHLNDQWLDLCRQSNNLCLQREEDLQRTRDYHDCMNVVEVFLEKFTTEWDNLARSDAESTAVHLEALK

SEQ ID NO: 8336 - protein, 85 aa, Homo sapiens
KLALALQERKYAIEDLKDQKQKMIEHLNLDDKELVKEQTSHLEQRWFQLEDLIKRKIQVSVTNLEELNVVQSRFQELMEWAEEQQ

SEQ ID NO: 8337 - protein, 85 aa, Homo sapiens
PNIAEALKQSPPPDMAQNLLMDHLAICSELEAKQMLLKSLIKDADRVMADLGLNERQVIQKALSDAQSHVNCLSDLVGQRRKYLN

SEQ ID NO: 8338 - protein, 85 aa, Homo sapiens
KALSEKTQFLMAVFQATSQIQQHERKIMFREHICLLPDDVSKQVKTCKSAQASLKTYQNEVTGLWAQGRELMKEVTEQEKSEVLG

SEQ ID NO: 8339 - protein, 85 aa, Homo sapiens
KLQELQSVYDSVLQKCSHRLQELEKNLVSRKHFKEDFDKACHWLKQADIVTFPEINLMNESSELHTQLAKYQNILEQSPEYENLL

SEQ ID NO: 8340 - protein, 85 aa, Homo sapiens
LTLQRTGQTILPSLNEVDHSYLSEKLNALPRQFNVIVALAKDKFYKVQEAILARKEYASLIELTTQSLSELEAQFLRMSKVPTDL

SEQ ID NO: 8341 - protein, 85 aa, Homo sapiens
AVEEALSLQDGCRAILDEVAGLGEAVDELNQKKEGFRSTGQPWQPDKMLHLVTLYHRLKRQTEQRVSLLEDTTSAYQEHEKMCQQ

SEQ ID NO: 8342 - protein, 85 aa, Homo sapiens
MERQLKSVKEEQSKVNEETLPAEEKLKMYHSLAGSLQDSGIVLKRVTIHLEDLAPHLDPLAYEKARHQIQSWQGELKLLTSAIGE

SEQ ID NO: 8343 - protein, 85 aa, Homo sapiens
TVTECESRMVQSIDFQTEMSRSLDWLRRVKAELSGPVYLDLNLQDIQEEIRKIQIHQEEVQSSLRIMNALSHKEKEKFTKAKELI

SEQ ID NO: 8344 - protein, 85 aa, Homo sapiens
SADLEHSLAELSELDGDIQEALRTRQATLTEIYSQCQRYYQVFQAANDWLEDAQELLQLAGNGLDVESAEENLKSHMEFFSTEDQ

SEQ ID NO: 8345 - protein, 85 aa, Homo sapiens
FHSNLEELHSLVATLDPLIKPTGKEDLEQKVASLELRSQRMSRDSGAQVDLLQRCTAQWHDYQKAREEVIELMNDTEKKLSEFSL

SEQ ID NO: 8346 - protein, 85 aa, Homo sapiens
MKTSSSHEAEEKLSEHKALVSVVNSFHEKIVALEEKASQLEKTGNDASKATLSRSMTTVWQRWTRLRAVAQDQEKILEDAVDEWT

SEQ ID NO: 8347 - protein, 85 aa, Homo sapiens
GFNNKVKKATEMIDQLQDKLPGSSAEKASKAELLTLLEYHDTFVLELEQQQSALGMLRQQTLSMLQDGAAPTPGEEPPLMQEITA

SEQ ID NO: 8348 - protein, 85 aa, Homo sapiens
MQDRCLNMQEKVKTNGKLVKQELKDREMVETQINSVKCWVQETKEYLGNPTIEIDAQLEELQILLTEATNHRQNIEKMAEEQKEK

SEQ ID NO: 8349 - protein, 85 aa, Homo sapiens
YLGLYTILPSELSLQLAEVALDLKIRDQIQDKIKEVEQSKATSQELSRQIQKLAKDLTTILTKLKAKTDNVVQAKTDQKVLGEEL

SEQ ID NO: 8350 - protein, 85 aa, Homo sapiens
DGCNSKLMELDAAVQKFLEQNGQLGKPLAKKIGKLTELHQQTIRQAENRLSKLNQAASHLEEYNEMLELILKWIEKAKVLAHGTI

SEQ ID NO: 8351 - protein, 85 aa, Homo sapiens
AWNSASQLREQYILHQTLLEESKEIDSELEAMTEKLQYLTSVYCTEKMSQQVAELGRETEELRQMIKIRLQNLQDAAKDMKKFEA

SEQ ID NO: 8352 - protein, 85 aa, Homo sapiens
ELKKLQAALEQAQATLTSPEVGRLSLKEQLSHRQHLLSEMESLKPKVQAVQLCQSALRIPEDVVASLPLCHAALRLQEEASRLQH

SEQ ID NO: 8353 - protein, 85 aa, Homo sapiens
TAIQQCNIMQAAVVQYEQYEQEMKHLQQLIEGAHREIEDKPVATSNIQELQAQISRHEELAQKIKGYQEQIASLNSKCKMLTMKA

SEQ ID NO: 8354 - protein, 85 aa, Homo sapiens
KHATMLLTVTEVEGLAEGTEDLDGELLPTPSAHPSVVMMTAGRCHTLLSPVTEESGEEGTNSEISSPPACRSPSPVANTDASVNQ

SEQ ID NO: 8355 - protein, 85 aa, Homo sapiens
DIAYYQALSAERLQTDAAKIHPSTSASQEFYEPGLEPSATAKLGDLQRSWETLKNVISEKQRTLYEALERQQKYQDSLQSISTKM

SEQ ID NO: 8356 - protein, 85 aa, Homo sapiens
EAIELKLSESPEPGRSPESQMAEHQALMDEILMLQDEINELQSSLAEELVSESCEADPAEQLALQSTLTVLAERMSTIRMKASGK

SEQ ID NO: 8357 - protein, 85 aa, Homo sapiens
RQLLEEKLNDQLEEQRQEQALQRYRCEADELDSWLLSTKATLDTALSPPKEPMDMEAQLMDCQNMLVEIEQKVVALSELSVHNEN

SEQ ID NO: 8358 - protein, 85 aa, Homo sapiens
MLLEGKAHTKDEAEQLAGKLRRLKGSLLELQRALHDKQLNMQGTAQEKEESDVDLTATQSPGVQEWLAQARTTWTQQRQSSLQQQ

SEQ ID NO: 8359 - protein, 85 aa, Homo sapiens
KELEQELAEQKSLLRSVASRGEEILIQHSAAETSGDAGEKPDVLSQELGMEGEKSSAEDQMRMKWESLHQEFSTKQKLLQNVLEQ

SEQ ID NO: 8360 - protein, 85 aa, Homo sapiens
EQEQVLYSRPNRLLSGVPLYKGDVPTQDKSAVTSLLDGLNQAFEEVSSQSGGAKRQSIHLEQKLYDGVSATSTWLDDVEERLFVA

SEQ ID NO: 8361 - protein, 85 aa, Homo sapiens
TALLPEETETCLFNQEILAKDIKEMSEEMDKNKNLFSQAFPENGDNRDVIEDTLGCLLGRLSLLDSVVNQRCHQMKERLQQILNF

SEQ ID NO: 8362 - protein, 85 aa, Homo sapiens
QNDLKVLFTSLADNKYIILQKLANVFEQPVAEQIEAIQQAEDGLKEFDAGIIELKRRGDKLQVEQPSMQELSKLQDMYDELMMII

SEQ ID NO: 8363 - protein, 85 aa, Homo sapiens
GSRRSGLNQNLTLKSQYERALQDLADLLETGQEKMAGDQKIIVSSKEEIQQLLDKHKEYFQGLESHMILTETLFRKIISFAVQKE

SEQ ID NO: 8364 - protein, 85 aa, Homo sapiens
TQFHTELMAQASAVLKRAHKRGVELEYILETWSHLDEDQQELSRQLEVVESSIPSVGLVEENEDRLIDRITLYQHLKSSLNEYQP

SEQ ID NO: 8365 - protein, 85 aa, Homo sapiens
KLYQVLDDGKRLLISISCSDLESQLNQLGECWLSNTNKMSKELHRLETILKHWTRYQSESADLIHWLQSAKDRLEFWTQQSVTVP

SEQ ID NO: 8366 - protein, 85 aa, Homo sapiens
QELEMVRDHLNAFLEFSKEVDAQSSLKSSVLSTGNQLLRLKKVDTATLRSELSRIDSQWTDLLTNIPAVQEKLHQLQMDKLPSRH

SEQ ID NO: 8367 - protein, 85 aa, Homo sapiens
AISEVMSWISLMENVIQKDEDNIKNSIGYKAIHEYLQKYKGFKIDINCKQLTVDFVNQSVLQISSQDVESKRSDKTDFAEQLGAM

SEQ ID NO: 8368 - protein, 85 aa, Homo sapiens
NKSWQILQGLVTEKIQLLEGLLESWSEYENNVQCLKTWFETQEKRLKQQHRIGDQASVQNALKDCQDLEDLIKAKEKEVEKIEQN

SEQ ID NO: 8369 - protein, 85 aa, Homo sapiens
GLALIQNKKEDVSSIVMSTLRELGQTWANLDHMVGQLKILLKSVLDQWSSHKVAFDKINSYLMEARYSLSRFRLLTGSLEAVQVQ

SEQ ID NO: 8370 - protein, 85 aa, Homo sapiens
VDNLQNLQDDLEKQERSLQKFGSITNQLLKECHPPVTETLTNTLKEVNMRWNNLLEEIAEQLQSSKALLQLWQRYKDYSKQCAST

SEQ ID NO: 8371 - protein, 85 aa, Homo sapiens
VQQQEDRTNELLKAATNKDIADDEVATWIQDCNDLLKGLGTVKDSLFFLHELGEQLKQQVDASAASAIQSDQLSLSQHLCALEQA

SEQ ID NO: 8372 - protein, 85 aa, Homo sapiens
LCKQQTSLQAGVLDYETFAKSLEALEAWIVEAEEILQGQDPSHSSDLSTIQERMEELKGQMLKFSSMAPDLDRLNELGYRLPLND

SEQ ID NO: 8373 - protein, 85 aa, Homo sapiens
KEIKRMQNLNRHWSLISSQTTERFSKLQSFLLQHQTFLEKCETWMEFLVQTEQKLAVEISGNYQHLLEQQRAHELFQAEMFSRQQ

SEQ ID NO: 8374 - protein, 85 aa, Homo sapiens
ILHSIIIDGQRLLEQGQVDDRDEFNLKLTLLSNQWQGVIRRAQQRRGIIDSQIRQWQRYREMAEKLRKWLVEVSYLPMSGLGSVP

SEQ ID NO: 8375 - protein, 85 aa, Homo sapiens
IPLQQARTLFDEVQFKEKVFLRQQGSYILTVEAGKQLLLSADSGAEAALQAELAEIQEKWKSASMRLEEQKKKLAFLLKDWEKCE

SEQ ID NO: 8376 - protein, 85 aa, Homo sapiens
KGIADSLEKLRTFKKKLSQSLPDHHEELHAEQMRCKELENAVGSWTDDLTQLSLLKDTLSAYISADDISILNERVELLQRQWEEL

SEQ ID NO: 8377 - protein, 85 aa, Homo sapiens
CHQLSLRRQQIGERLNEWAVFSEKNKELCEWLTQMESKVSQNGDILIEEMIEKLKKDYQEEIAIAQENKIQLQQMGERLAKASHE

SEQ ID NO: 8378 - protein, 85 aa, Homo sapiens
SKASEIEYKLGKVNDRWQHLLDLIAARVKKLKETLVAVQQLDKNMSSLRTWLAHIESELAKPIVYDSCNSEEIQRKLNEQQELQR

SEQ ID NO: 8379 - protein, 85 aa, Homo sapiens
DIEKHSTGVASVLNLCEVLLHDCDACATDAECDSIQQATRNLDRRWRNICAMSMERRLKIEETWRLWQKFLDDYSRFEDWLKSSE

SEQ ID NO: 8380 - protein, 85 aa, Homo sapiens
RTAAFPSSSGVIYTVAKEELKKFEAFQRQVHECLTQLELINKQYRRLARENRTDSACSLKQMVHEGNQRWDNLQKRVTSILRRLK

SEQ ID NO: 8381 - protein, 85 aa, Homo sapiens
HFIGQREEFETARDSILVWLTEMDLQLTNIEHFSECDVQAKIKQLKAFQQEISLNHNKIEQIIAQGEQLIEKSEPLDAAIIEEEL

SEQ ID NO: 8382 - protein, 85 aa, Homo sapiens
DELRRYCQEVFGRVERYHKKLIRLPLPDDEHDLSDRELELEDSAALSDLHWHDRSADSLLSPQPSSNLSLSLAQPLRSERSGRDT

SEQ ID NO: 8383 - protein, 85 aa, Homo sapiens
PASVDSIPLEWDHDYDLSRDLESAMSRALPSEDEEGQDDKDFYLRGAVGLSDVMIPESPEAYVKLTENAIKNTSGDHSALESQIR

SEQ ID NO: 8384 - protein, 85 aa, Homo sapiens
QLGKALDDSRFQIQQTENIIRSKTPTGPELDTSYKGYMKLLGECSSSIDSVKRLEHKLKEEEESLPGFVNLHSTETQTAGVIDRW

SEQ ID NO: 8385 - protein, 85 aa, Homo sapiens
ELLQAQALSKELRMKQNLQKWQQFNSDLNSIWAWLGDTEEELEQLQRLELSTDIQTIELQIKKLKELQKAVDHRKAIILSINLCS

SEQ ID NO: 8386 - protein, 85 aa, Homo sapiens
PEFTQADSKESRDLQDRLSQMNGRWDRVCSLLEEWRGLLQDALMQCQGFHEMSHGLLLMLENIDRRKNEIVPIDSNLDAEILQDH

SEQ ID NO: 8387 - protein, 85 aa, Homo sapiens
HKQLMQIKHELLESQLRVASLQDMSCQLLVNAEGTDCLEAKEKVHVIGNRLKLLLKEVSRHIKELEKLLDVSSSQQDLSSWSSAD

SEQ ID NO: 8388 - protein, 85 aa, Homo sapiens
ELDTSGSVSPTSGRSTPNRQKTPRGKCSLSQPGPSVSSPHSRSTKGGSDSSLSEPGPGRSGRGFLFRVLRAALPLQLLLLLLIGL

SEQ ID NO: 8389 - protein, 85 aa, Homo sapiens
VKPVFEEPPNPTNVEISLQQMKANDPSLQEVNLNNIKAFADMLKVNKTLTSLNIESNFITGTGILALVEALKENDTLTEIKIDNQ

SEQ ID NO: 8390 - protein, 85 aa, Homo sapiens
TELYDLAAVLGVHNLLNNPKFDEETANNKGGKGPVRNVVKGEKVKPVFEEPPNPTNVEISLQQMKANDPSLQEVNLNNIKAFADM

SEQ ID NO: 8391 - protein, 85 aa, Homo sapiens
MKVNKTLTSLNIESNFITGTGILALVEALKENDTLTEIKIDNQRQQLGTAVEMEIAQMLEENSRILKFGYQFTKQGPRTRVAAAI

SEQ ID NO: 8392 - protein, 85 aa, Homo sapiens
ASKCSSERKSRTSLTLNQKLEMIKLSEEGMSKAEIGRRLGLLRQTVSQVVNAKEKFLKEVKSATPMNTRMIRKRNSLIADMEKVL

SEQ ID NO: 8393 - protein, 85 aa, Homo sapiens
VVWIEDQTSRNIPLSQSLIQNKALTLFNSMKAERGVEAAEEKFEASRGWFMRFKERSHFHNIKAQGEAASADVEAAASYPEALAK

SEQ ID NO: 8394 - protein, 85 aa, Homo sapiens
IIDEGGYTKQQIFNVDETAFYWKKMPSRTFIAREEKSVPGFKASKDRLTLLLGANAAGDFKLKPMLIYHSENPRALKNYTKSTLP

SEQ ID NO: 8395 - protein, 85 aa, Homo sapiens
VLYKWNSKARMTAHLFTAWFTEYFKPTVETYCSEKKIPFKILLLIDNAPSHPRALMEIYEEINVIFMPANTTSILQPMDQGVIST

SEQ ID NO: 8396 - protein, 85 aa, Homo sapiens
FKSYYLRNTFHKALAAMDSDVSDGSGQSKLKTFWKGFTILDAIKNIRDSWEEVKLSTLTGVWKKLIPTLIDDYEGFKTSVEEVSA

SEQ ID NO: 8397 - protein, 85 aa, Homo sapiens
DVVEIAKELELEVEPEDVTELLQSHDKTLTDEELFLMDAQRKWFLEMESTPGEDAVNIVEMTTKDLEYYINLVDKAAAGFERIDS

SEQ ID NO: 8398 - protein, 84 aa, Homo sapiens
RIDSNFERSSTVGKMLSNSIACYREIFHERKSQLMRKASPMSYFRKLPQPPQPSAATTLTSQQPSTSRQDPPPAKRVRLTEGSD

SEQ ID NO: 8399 - protein, 85 aa, Homo sapiens
RQTVSQVVNAKEKFLKEVKSATPMNTRMIRKRNSLIADMEKVLVVWIEDQTSRNIPLSQSLIQNKALTLFNSMKAERGVEAAEEK

SEQ ID NO: 8400 - protein, 85 aa, Homo sapiens
FEASRGWFMRFKERSHFHNIKAQGEAASADVEAAASYPEALAKIIDEGGYTKQQIFNVDETAFYWKKMPSRTFIAREEKSVPGFK

SEQ ID NO: 8401 - protein, 85 aa, Homo sapiens
ASKDRLTLLLGANAAGDFKLKPMLIYHSENPRALKNYTKSTLPVLYKWNSKARMTAHLFTAWFTEYFKPTVETYCSEKKIPFKIL

SEQ ID NO: 8402 - protein, 85 aa, Homo sapiens
MLIDNAPSHPRALMEIYEEINVIFMPANTTSILQPMDQGVISTFKSYYLRNTFHKALAAMDSDVSDGSGQSKLKTFWKGFTILDA

SEQ ID NO: 8403 - protein, 85 aa, Homo sapiens
IKNIRDSWEEVKLSTLTGVWKKLIPTLIDDYEGFKTSVEEVSADVVEIAKELELEVEPEDVTELLQSHDKTLTDEELFLMDAQRK

SEQ ID NO: 8404 - protein, 85 aa, Homo sapiens
WFLEMESTPGEDAVNIVEMTTKDLEYYINLVDKAAAGFERIDSNFERSSTVGKMLSNSIACYREIFHERKSQLMRKASPMSYFRK

SEQ ID NO: 8405 - protein, 84 aa, Homo sapiens
RALKEIKAEVCHTCGAAFQEDDVIMLNGTKEDVDVLKTRMEERRLRAKLEKKPQGHQKLRQGSLKKPALILERRKPTWLPKAQQ

SEQ ID NO: 8406 - protein, 85 aa, Homo sapiens
NGRHRFCFLRCCGCVFSERALKEIKAEVCHTCGAAFQEDDVIMLNGTKEDVDVLKTRMEERRLRAKLEKKPQGHQKLRQGSLKKP

SEQ ID NO: 8407 - protein, 25 aa, Homo sapiens
CAPWFVIGSWWSDAGASEGSFWSHE

SEQ ID NO: 8408 - protein, 8 aa, Homo sapiens
YASRCSSI

SEQ ID NO: 8409 - protein, 84 aa, Homo sapiens
TTKGEAICMAIALMTTAVISTCDHGIVAKIKRVIMERDTYPRKWGLGPKASQKKLMIKQGLLDKHGKPTDSTPATWKQEYVDYR

SEQ ID NO: 8410 - protein, 17 aa, Homo sapiens
ELPAASCLPFGKAVDIS

SEQ ID NO: 8411 - protein, 84 aa, Homo sapiens
PIQSSGPTIQDYLNRPRPTWEEVKEQLEKKKKGSKALAEFEEKMNENWKKELEKHREKLLSGSESSSKKRQRKKKEKKKSGRFF

SEQ ID NO: 8412 - protein, 85 aa, Homo sapiens
LCVSYQVDERTCIQFSMKLLYFLLSALGLTVCVLAVAFAAHHYSQLTQFTCETTLDSCQCKLPSSEPLSRTFVYRDVTDCTSVTG

SEQ ID NO: 8413 - protein, 85 aa, Homo sapiens
YSQLTQFTCETTLDSCQCKLPSSEPLSRTFVYRDVTDCTSVTGTFKLFLLIQMILNLVCGLVCLLACFVMWKHRYQVFYVGVRIC

SEQ ID NO: 8414 - protein, 85 aa, Homo sapiens
EDEVVRFAKKMDKMVQKKNASTRIGMSVNAIRKQSTDEEVTSLAKSLIKSWKKLLDGPSTEKDLDEKKKEPAITSQNSPEAREES

SEQ ID NO: 8415 - protein, 85 aa, Homo sapiens
TSSGNVSNRKDETNARDTYVSSFPRAPSTSDSVRLKCREMLAAALRTGDDYIAIGADEEELGSQIEEAIYQEIRNTDMKYKNRVR

SEQ ID NO: 8416 - protein, 85 aa, Homo sapiens
SRISNLKDAKNPNLRKNVLCGNIPPDLFARMTAEEMASDELKEMRKNLTKEAIREHQMAKTGGTQTDLFTCGKCKKKNCTYTQVQ

SEQ ID NO: 8417 - protein, 84 aa, Homo sapiens
DLFARMTAEEMASDELKEMRKNLTKEAIREHQMAKTGGTQTDLFTCGKCKKKNCTYTQVQTRSADEPMTTFVVCNECGNRWKFC

SEQ ID NO: 8418 - protein, 85 aa, Homo sapiens
MAKSLIKSWKKLLDGPSTEKDLDEKKKEPAITSQNSPEAREESTSSGNVSNRKDETNARDTYVSSFPRAPSTSDSVRLKCREMLA

SEQ ID NO: 8419 - protein, 85 aa, Homo sapiens
AALRTGDDYIAIGADEEELGSQIEEAIYQEIRNTDMKYKNRVRSRISNLKDAKNPNLRKNVLCGNIPPDLFARMTAEEMASDELK

SEQ ID NO: 8420 - protein, 85 aa, Homo sapiens
MTPVTPQKSSMATQNLPEQHVSERSQALQQTSATDISSAGSISGDIIDELMSSDVFPLLRLSPTPADDYNFNLDDNEGVCDLFDV

SEQ ID NO: 8421 - protein, 84 aa, Homo sapiens
QKSSMATQNLPEQHVSERSQALQQTSATDISSAGSISGDIIDELMSSDVFPLLRLSPTPADDYNFNLDDNEGVCDLFDVQILNY

SEQ ID NO: 8422 - protein, 85 aa, Homo sapiens
QINLKSHSGPIHVLLINKESSSSKPVVFPVPPPDDLTQPSSQSLTPVTPQKSSMATQNLPEQHVSERSQALQQTSATDISSAGSI

SEQ ID NO: 8423 - protein, 85 aa, Homo sapiens
PMAGLLKGLVRQLERFSVQQQASKMPPKGKSGSGKAGKGGAASGSDSADKKAQGPKGGGNAVKVRHILCEKHGKIMEAMEKLKSG

SEQ ID NO: 8424 - protein, 84 aa, Homo sapiens
DKKAQGPKGGGNAVKVRHILCEKHGKIMEAMEKLKSGMRFNEVAAQYSEDKARQGIPSLQQHAGHHRDLRSTLISLVSYLQTTP

SEQ ID NO: 8425 - protein, 85 aa, Homo sapiens
SGSDSADKKAQGPKGGGNAVKVRHILCEKHGKIMEAMEKLKSGMRFNEVAAQYSEDKARQGIPSLQQHAGHHRDLRSTLISLVSY

SEQ ID NO: 8426 - protein, 84 aa, Homo sapiens
TVFERLRLEQQRIENDLSDWSIKILDHSLEEKTNPLSELPIELESLECPYPDLKSSILSEFYKFTQKYQKKLQDFNLQLEDIYR

SEQ ID NO: 8427 - protein, 85 aa, Homo sapiens
SHVHLHVISQDFDSPCLKNKKHWNSFNTEYFLESQAVIEMVQEAGRVTVRDGMPELLKLPLRCHECQQLLPSIPQLKEHLRKHWT

SEQ ID NO: 8428 - protein, 85 aa, Homo sapiens
KAVAREHLELLKHMHTVGEKVIVDFAGSSKLRFRLGYHAIPSMSHVHLHVISQDFDSPCLKNKKHWNSFNTEYFLESQAVIEMVQ

SEQ ID NO: 8429 - protein, 84 aa, Homo sapiens
YLEMMELDIGDATQVYVAFLVYLDLMESKSWHEVNCVGLPELQLICLVGTEIEGEGLQTVVPTPITASLSHNRIFLLEDDIHVS

SEQ ID NO: 8430 - protein, 85 aa, Homo sapiens
PKYLEMMELDIGDATQVYVAFLVYLDLMESKSWHEVNCVGLPELQLICLVGTEIEGEGLQTVVPTPITASLSHNRIFLLEDDIHV

SEQ ID NO: 8431 - protein, 54 aa, Homo sapiens
SQKRRRKRTTTTKVMVMKREKMRRRRKMQRLVQKRRKRPGWQPWKSRGWRGSPG

SEQ ID NO: 8432 - protein, 84 aa, Homo sapiens
MEGKPRVMAGTLKLEDKQRLAQEEESEAKRLAIMMMKKREKYLYQKIMFGKRRKIREANKLAEKRKAHDEAVRSEKKAKKARPE

SEQ ID NO: 8433 - protein, 12 aa, Homo sapiens
PWKSRGWRGSPG

SEQ ID NO: 8434 - protein, 84 aa, Homo sapiens
TSGVVVCQCGLSIPSHSSELTEQKLRACLEGSINEHSAHCPHTPEFSVTGGTEEKSSLLMSCLVSVSWDPLCGKRDLWLVLFPP

SEQ ID NO: 8435 - protein, 85 aa, Homo sapiens
EWEANPLICPVCTKYNLRITSGVVVCQCGLSIPSHSSELTEQKLRACLEGSINEHSAHCPHTPEFSVTGGTEEKSSLLMSCLVSV

SEQ ID NO: 8436 - protein, 85 aa, Homo sapiens
EFPGGNDNYLTITGPSHPFLSGAETFHTPSLGDEEFEIPPISLDSDPSLAVSDVVGHFDDLADPSSSQDGSFSAQYGVQTLDMPV

SEQ ID NO: 8437 - protein, 85 aa, Homo sapiens
GMTHGLMEQGGGLLSGGLTMDLDHSIGTQYSANPPVTIDVPMTDMTSGLMGHSQLTTIDQSELSSQLGLSLGGGTILPPAQSPED

SEQ ID NO: 8438 - protein, 85 aa, Homo sapiens
RLSTTPSPTSSLHEDGVEDFRRQLPSQKTVVVEAGKKQKAPKKRKKKDPNEPQKPVSAYALFFRDTQAAIKGQNPNATFGEVSKI

SEQ ID NO: 8439 - protein, 85 aa, Homo sapiens
VASMWDSLGEEQKQVYKRKTEAAKKEYLKALAAYKDNQECQATVETVELDPAPPSQTPSPPPMATVDPASPAPASIEPPALSPSI

SEQ ID NO: 8440 - protein, 85 aa, Homo sapiens
VVNSTLSSYVANQASSGAGGQPNITKLIITKQMLPSSITMSQGGMVTVIPATVVTSRGLQLGQTSTATIQPSQQAQIVTRSVLQA

SEQ ID NO: 8441 - protein, 85 aa, Homo sapiens
AAAAAAAASMQLPPPRLQPPPLQQMPQPPTQQQVTILQQPPPLQAMQQPPPQKVRINLQQQPPPLQIKSVPLPTLKMQTTLVPPT

SEQ ID NO: 8442 - protein, 85 aa, Homo sapiens
VESSPERPMNNSPEAHTVEAPSPETICEMITDVVPEVESPSQMDVELVSGSPVALSPQPRCVRSGCENPPIVSKDWDNEYCSNEC

SEQ ID NO: 8443 - protein, 84 aa, Homo sapiens
CEMITDVVPEVESPSQMDVELVSGSPVALSPQPRCVRSGCENPPIVSKDWDNEYCSNECVVKHCRDVFLAWVASRNSNTVVFVK

SEQ ID NO: 8444 - protein, 85 aa, Homo sapiens
MDSDPSLAVSDVVGHFDDLADPSSSQDGSFSAQYGVQTLDMPVGMTHGLMEQGGGLLSGGLTMDLDHSIGTQYSANPPVTIDVPM

SEQ ID NO: 8445 - protein, 85 aa, Homo sapiens
TDMTSGLMGHSQLTTIDQSELSSQLGLSLGGGTILPPAQSPEDRLSTTPSPTSSLHEDGVEDFRRQLPSQKTVVVEAGKKQKAPK

SEQ ID NO: 8446 - protein, 85 aa, Homo sapiens
KRKKKDPNEPQKPVSAYALFFRDTQAAIKGQNPNATFGEVSKIVASMWDSLGEEQKQVYKRKTEAAKKEYLKALAAYKDNQECQA

SEQ ID NO: 8447 - protein, 85 aa, Homo sapiens
TVETVELDPAPPSQTPSPPPMATVDPASPAPASIEPPALSPSIVVNSTLSSYVANQASSGAGGQPNITKLIITKQMLPSSITMSQ

SEQ ID NO: 8448 - protein, 85 aa, Homo sapiens
GGMVTVIPATVVTSRGLQLGQTSTATIQPSQQAQIVTRSVLQAAAAAAAAASMQLPPPRLQPPPLQQMPQPPTQQQVTILQQPPP

SEQ ID NO: 8449 - protein, 85 aa, Homo sapiens
LQAMQQPPPQKVRINLQQQPPPLQIKSVPLPTLKMQTTLVPPTVESSPERPMNNSPEAHTVEAPSPETICEMITDVVPEVESPSQ

SEQ ID NO: 8450 - protein, 61 aa, Homo sapiens
TRRSRCTGITWSRCTSCAGRAKRLWSTTSSTRTASCAPCCSATSSSAGRPTRPTHRTSPPP

SEQ ID NO: 8451 - protein, 85 aa, Homo sapiens
RCMGPADTSPQAPLCPWPCHLVAMAQPHLTMAPPLGPRAGGSCWAYSPSTWRRSCVRPGPLGRATRRASWHWAYSPACWQCCWLA

SEQ ID NO: 8452 - protein, 35 aa, Homo sapiens
ASGSGGSMPSAPACGPCCWGCTWLSSTCRPPRLAG

SEQ ID NO: 8453 - protein, 59 aa, Homo sapiens
AWPSLTRVSEALQRLCSSPARPASCPSPTSSSSGLLDGPHPPHCLAASAGPSLWEPYPL

SEQ ID NO: 8454 - protein, 24 aa, Homo sapiens
PARWPPAPALCATAGPSSALPGST

SEQ ID NO: 8455 - protein, 19 aa, Homo sapiens
TSSSAGRPTRPTHRTSPPP

SEQ ID NO: 8456 - protein, 78 aa, Homo sapiens
CWAYSPSTWRRSCVRPGPLGRATRRASWHWAYSPACWQCCWLAASGSGGSMPSAPACGPCCWGCTWLSSTCRPPRLAG

SEQ ID NO: 8457 - protein, 85 aa, Homo sapiens
PHLCAAWLASRRLWPQGRQRAHGGSGPEGSSQETLPAFSPPAPAWPSLTRVSEALQRLCSSPARPASCPSPTSSSSGLLDGPHPP

SEQ ID NO: 8458 - protein, 17 aa, Homo sapiens
HCLAASAGPSLWEPYPL

SEQ ID NO: 8459 - protein, 31 aa, Homo sapiens
RPAAPMSTRLTTAASSPWSRPMFPGSRPCRT

SEQ ID NO: 8460 - protein, 85 aa, Homo sapiens
IVEVLEDVPLTMHNFVRKTFFSLAFCDFCLKFLFHGFRCQTCGYKFHQHCSSKVPTVCVDMSTNRQQFYHSVQDLSGGSRQHEAP

SEQ ID NO: 8461 - protein, 84 aa, Homo sapiens
RKTFFSLAFCDFCLKFLFHGFRCQTCGYKFHQHCSSKVPTVCVDMSTNRQQFYHSVQDLSGGSRQHEAPSNRPLNELLTPQGPR

SEQ ID NO: 8462 - protein, 85 aa, Homo sapiens
RRCREIEQVNERVLNRLHQVQRITRRLQQERRFLMRVLDSYGDDYRASQFTIVLEDEGSQGTDAPTPGNAENEPPEKETLSPPRR

SEQ ID NO: 8463 - protein, 84 aa, Homo sapiens
RRTPAPPEPGSPAPGEGPSGRKRRRVPRDGRRAGNALTPELAPVQIKVEEDFGFEADEALDSSWVSRGPDKLLPYPTLASPASD

SEQ ID NO: 8464 - protein, 85 aa, Homo sapiens
EVEFVSGGLGGSGLRERDEEEEAARGRRRRQRELNRRKYQALGRRCREIEQVNERVLNRLHQVQRITRRLQQERRFLMRVLDSYG

SEQ ID NO: 8465 - protein, 85 aa, Homo sapiens
DDYRASQFTIVLEDEGSQGTDAPTPGNAENEPPEKETLSPPRRTPAPPEPGSPAPGEGPSGRKRRRVPRDGRRAGNALTPELAPV

SEQ ID NO: 8466 - protein, 85 aa, Homo sapiens
MANDPTIERIITPRLALTTAEFLAYQCEKHVLVILTDMSSYAEALREVSAAREEVPGRRGFPGYMYTDLATIYERAGRVEDITHP

SEQ ID NO: 8467 - protein, 85 aa, Homo sapiens
IPDLTGFITEGQIYVDRQLHNRQIYPPINVLPSLSRLMKSAIGEGMTRKDHGDVSNQLYACYAIGKDVQAMKAVVGEEALTSEDL

SEQ ID NO: 8468 - protein, 85 aa, Homo sapiens
EALREVSAAREEVPGRRGFPGYMYTDLATIYERAGRVEDITHPIPDLTGFITEGQIYVDRQLHNRQIYPPINVLPSLSRLMKSAI

SEQ ID NO: 8469 - protein, 85 aa, Homo sapiens
GEGMTRKDHGDVSNQLYACYAIGKDVQAMKAVVGEEALTSEDLLYLEFLQKFEKNFINQGPYENRSVFESLDLGWKLLRIFPKEM

SEQ ID NO: 8470 - protein, 85 aa, Homo sapiens
ADPQSCFMTRQKPGNTFASEGSLNTAGRPGVGKRQVAPVAGVARKGRRIWGSRMIDIQTRMAGRALELLYLPENKPCYLLDIGCG

SEQ ID NO: 8471 - protein, 85 aa, Homo sapiens
TGLSGSYLSDEGHYWVGLDISPAMLDEAVDREIEGDLLLGDMGQGIPFKPGTFDGCISISAVQWLCNANKKSENPAKRLYCFFAS

SEQ ID NO: 8472 - protein, 85 aa, Homo sapiens
AMLDEAVDREIEGDLLLGDMGQGIPFKPGTFDGCISISAVQWLCNANKKSENPAKRLYCFFASLFSVLVRGSRAVLQLYPENSEQ

SEQ ID NO: 8473 - protein, 85 aa, Homo sapiens
ARKGRRIWGSRMIDIQTRMAGRALELLYLPENKPCYLLDIGCGTGLSGSYLSDEGHYWVGLDISPAMLDEAVDREIEGDLLLGDM

SEQ ID NO: 8474 - protein, 85 aa, Homo sapiens
GAGEERREGTDSPSPESGTDAAGGAASGSDSADKKAQGPKGGGNAVKVRHILCEKHGKIMEAMEKLKSGMRFNEVAAQYSEDKAR

SEQ ID NO: 8475 - protein, 84 aa, Homo sapiens
DSPSPESGTDAAGGAASGSDSADKKAQGPKGGGNAVKVRHILCEKHGKIMEAMEKLKSGMRFNEVAAQYSEDKARQGVCCSYYL

SEQ ID NO: 8476 - protein, 85 aa, Homo sapiens
RFTSCKSAKDRTAMSVTLEQCLILQHEHGMAPQVFTQALECMRSEGCRRENTMKNVGSRKYAFNSLQLKAFPKHYRPPEGTYGKV

SEQ ID NO: 8477 - protein, 85 aa, Homo sapiens
KKEGSSGSFRLQPNTGSLSRAVSWINFSSLSRQTKRLFRSDGELSVCGQQVEVDDENWIYRAQPRKAVSNLDEESRWTVHYTAPW

SEQ ID NO: 8478 - protein, 85 aa, Homo sapiens
HQQENVFLPTTRPPCVEDLHRQAKLNLKSVLRECDKLRHDGYRSSQYYSQGPTFAANASPFCDDYQDEDEETDQKCSLSSSEEER

SEQ ID NO: 8479 - protein, 85 aa, Homo sapiens
FISIRRPKTPASSDFSDLNTQTNWTKSLPLPTPEEKMRQQAQTVQADVVPINITASGTGQDDADGHSVYTPDHYSTLGRFNSCRS

SEQ ID NO: 8480 - protein, 85 aa, Homo sapiens
AGQRSETRDSSCQTEDVKVVPPSMRRIRAQKGQGIAAQMGHFSGSSGNMSVLSDSAGIVFPSRLDSDAGFHSLPRSGARANIQSL

SEQ ID NO: 8481 - protein, 85 aa, Homo sapiens
EPRLGALGPAGDMNGTFLYQRGHPQADENLGHLGGASGTGTLLRPKSQELRHFESENIMSPACVVSPHATYSTSIIPNATLSSSS

SEQ ID NO: 8482 - protein, 85 aa, Homo sapiens
EVIAIPTAQSAGQRESKSSGSSHARIKSRDHLISRHAVKGDPQSPGRHWNEGHATILSQDLDPHSPGEPALLSLCDSAVPLNAPA

SEQ ID NO: 8483 - protein, 85 aa, Homo sapiens
NRENGSQAMPYNCRNNLAFPAHPQDVDGKSESSYSGGGGHSSSEPWEYKSSGNGRASPLKPHLATPGYSTPTSNMSSCSLDQTSN

SEQ ID NO: 8484 - protein, 85 aa, Homo sapiens
KEDAGSLYSEDHDGYCASVHTDSGHGSGNLCNSSDGFGNPRHSVINVFVGRAQKNQGDRSNYQDKSLSRNISLKKAKKPPLPPSR

SEQ ID NO: 8485 - protein, 85 aa, Homo sapiens
TDSLRRIPKKSSQCNGQVLNESLIATLQHSLQLSLPGKSGSSPSQSPCSDLEEPWLPRSRSQSTVSAGSSMTSATTPNVYSLCGA

SEQ ID NO: 8486 - protein, 85 aa, Homo sapiens
TPSQSDTSSVKSEYTDPWGYYIDYTGMQEDPGNPAGGCSTSSGVPTGNGPVRHVQEGSRATMPQVPGGSVKPKIMSPEKSHRVIS

SEQ ID NO: 8487 - protein, 85 aa, Homo sapiens
PSSGYSSQSNTPTALTPVPVFLKSVSPANGKGKPKPKVPERKSSLISSVSISSSSTSLSSSTSTEGSGTMKKLDPAVGSPPAPPP

SEQ ID NO: 8488 - protein, 85 aa, Homo sapiens
PPVPSPPFPCPADRSPFLPPPPPVTDCSQGSPLPHSPVFPPPPPEALIPFCSPPDWCLSPPRPALSPILPDSPVSLPLPPPLLPS

SEQ ID NO: 8489 - protein, 85 aa, Homo sapiens
SEPPPAPPLDPKFMKDTRPPFTNSGQPESSRGSLRPPSTKEETSRPPMPLITTEALQMVQLRPVRKNSGAEAAQLSERTAQEQRT

SEQ ID NO: 8490 - protein, 85 aa, Homo sapiens
PVAPQYHLKPSAFLKSRNSTNEMESESQPASVTSSLPTPAKSSSQGDHGSAAERGGPVSRSPGAPSAGEAEARPSPSTTPLPDSS

SEQ ID NO: 8491 - protein, 85 aa, Homo sapiens
PSRKPPPISKKPKLFLVVPPPQKDFAVEPAENVSEALRAVPSPTTGEEGSVHSREAKESSAAQAGSHATHPGTSVLEGGAAGSMS

SEQ ID NO: 8492 - protein, 85 aa, Homo sapiens
PSRVEANVPMVQPDVSPAPKQEEPAENSADTGGDGESCLSQQDGAAGVPETNAAGSSSEACDFLKEDGNDEVMTPSRPRTTEDLF

SEQ ID NO: 8493 - protein, 85 aa, Homo sapiens
AAIHRSKRKVLGRRDSDDDHSRNHSPSPPVTPTGAAPSLASPKQVGSIQRSIRKSSTSSDNFKALLLKKGSRSDTSARMSAAEML

SEQ ID NO: 8494 - protein, 85 aa, Homo sapiens
KNTDPRFQRSRSEPSPDAPESPSSCSPSKNRRAQEEWAKNEGLMPRSLSFSGPRYGRSRTPPSAASSRYSMRNRIQSSPMTVISE

SEQ ID NO: 8495 - protein, 85 aa, Homo sapiens
ELSVCGQQVEVDDENWIYRAQPRKAVSNLDEESRWTVHYTAPWHQQENVFLPTTRPPCVEDLHRQAKLNLKSVLRECDKLRHDGY

SEQ ID NO: 8496 - protein, 85 aa, Homo sapiens
RSSQYYSQGPTFAANASPFCDDYQDEDEETDQKCSLSSSEEERFISIRRPKTPASSDFSDLNTQTNWTKSLPLPTPEEKMRQQAQ

SEQ ID NO: 8497 - protein, 85 aa, Homo sapiens
TVQADVVPINITASGTGQDDADGHSVYTPDHYSTLGRFNSCRSAGQRSETRDSSCQTEDVKVVPPSMRRIRAQKGQGIAAQMGHF

SEQ ID NO: 8498 - protein, 85 aa, Homo sapiens
SGSSGNMSVLSDSAGIVFPSRLDSDAGFHSLPRSGARANIQSLEPRLGALGPAGDMNGTFLYQRGHPQADENLGHLGGASGTGTL

SEQ ID NO: 8499 - protein, 85 aa, Homo sapiens
MRPKSQELRHFESENIMSPACVVSPHATYSTSIIPNATLSSSSEVIAIPTAQSAGQRESKSSGSSHARIKSRDHLISRHAVKGDP

SEQ ID NO: 8500 - protein, 85 aa, Homo sapiens
QSPGRHWNEGHATILSQDLDPHSPGEPALLSLCDSAVPLNAPANRENGSQAMPYNCRNNLAFPAHPQDVDGKSESSYSGGGGHSS

SEQ ID NO: 8501 - protein, 85 aa, Homo sapiens
SEPWEYKSSGNGRASPLKPHLATPGYSTPTSNMSSCSLDQTSNKEDAGSLYSEDHDGYCASVHTDSGHGSGNLCNSSDGFGNPRH

SEQ ID NO: 8502 - protein, 85 aa, Homo sapiens
SVINVFVGRAQKNQGDRSNYQDKSLSRNISLKKAKKPPLPPSRTDSLRRIPKKSSQCNGQVLNESLIATLQHSLQLSLPGKSGSS

SEQ ID NO: 8503 - protein, 85 aa, Homo sapiens
PSQSPCSDLEEPWLPRSRSQSTVSAGSSMTSATTPNVYSLCGATPSQSDTSSVKSEYTDPWGYYIDYTGMQEDPGNPAGGCSTSS

SEQ ID NO: 8504 - protein, 85 aa, Homo sapiens
GVPTGNGPVRHVQEGSRATMPQVPGGSVKPKIMSPEKSHRVISPSSGYSSQSNTPTALTPVPVFLKSVSPANGKGKPKPKVPERK

SEQ ID NO: 8505 - protein, 85 aa, Homo sapiens
SSLISSVSISSSSTSLSSSTSTEGSGTMKKLDPAVGSPPAPPPPPVPSPPFPCPADRSPFLPPPPPVTDCSQGSPLPHSPVFPPP

SEQ ID NO: 8506 - protein, 85 aa, Homo sapiens
PPEALIPFCSPPDWCLSPPRPALSPILPDSPVSLPLPPPLLPSSEPPPAPPLDPKFMKDTRPPFTNSGQPESSRGSLRPPSTKEE

SEQ ID NO: 8507 - protein, 85 aa, Homo sapiens
TSRPPMPLITTEALQMVQLRPVRKNSGAEAAQLSERTAQEQRTPVAPQYHLKPSAFLKSRNSTNEMESESQPASVTSSLPTPAKS

SEQ ID NO: 8508 - protein, 85 aa, Homo sapiens
SSQGDHGSAAERGGPVSRSPGAPSAGEAEARPSPSTTPLPDSSPSRKPPPISKKPKLFLVVPPPQKDFAVEPAENVSEALRAVPS

SEQ ID NO: 8509 - protein, 85 aa, Homo sapiens
PTTGEEGSVHSREAKESSAAQAGSHATHPGTSVLEGGAAGSMSPSRVEANVPMVQPDVSPAPKQEEPAENSADTGGDGESCLSQQ

SEQ ID NO: 8510 - protein, 85 aa, Homo sapiens
DGAAGVPETNAAGSSSEACDFLKEDGNDEVMTPSRPRTTEDLFAAIHRSKRKVLGRRDSDDDHSRNHSPSPPVTPTGAAPSLASP

SEQ ID NO: 8511 - protein, 85 aa, Homo sapiens
KQVGSIQRSIRKSSTSSDNFKALLLKKGSRSDTSARMSAAEMLKNTDPRFQRSRSEPSPDAPESPSSCSPSKNRRAQEEWAKNEG

SEQ ID NO: 8512 - protein, 85 aa, Homo sapiens
MMPRSLSFSGPRYGRSRTPPSAASSRYSMRNRIQSSPMTVISEGEGEAVEPVDSIARGALGAAEGCSLDGLAREEMDEGGLLCGE

SEQ ID NO: 8513 - protein, 85 aa, Homo sapiens
GAQVPPDWQVSHEFALNFNPSNPYCAGIQGIVDAYRQALPQVRLYGPTNFAPIINHVARFAAQAAHQGTASDMNGLVPSNTSCCC

SEQ ID NO: 8514 - protein, 84 aa, Homo sapiens
QVPPDWQVSHEFALNFNPSNPYCAGIQGIVDAYRQALPQVRLYGPTNFAPIINHVARFAAQAAHQGTASDMNGLVPSNTSCCCC

SEQ ID NO: 8515 - protein, 85 aa, Homo sapiens
GTITVSAQELKDNRVVTMEVEARNLDKKDFLGKSDPFLEFFRQGDGKWHLVYRSEVIKNNLNPTWKRFSVPVQHFCGGNPSTPIQ

SEQ ID NO: 8516 - protein, 85 aa, Homo sapiens
SEKSVEAAAELSAKDLKEKKEKVEEKASRKERKKEVVEAPVPLVVMVGKACSQPEATPSPGPHRRRRTGLRRKKKKLPRMERRKM

SEQ ID NO: 8517 - protein, 84 aa, Homo sapiens
KEKVEEKASRKERKKEVVEAPVPLVVMVGKACSQPEATPSPGPHRRRRTGLRRKKKKLPRMERRKMKGKKKMRKKKKRMMKGPR

SEQ ID NO: 8518 - protein, 85 aa, Homo sapiens
RLTDVVQQLVYEAIDSRDGASCAELVSFKHPHVANPRLQMASPEEKCQQVLEPPYDEMFAAHLRCTYAVGNHDFIEAYKCQTVIV

SEQ ID NO: 8519 - protein, 85 aa, Homo sapiens
QSFLRAFQAHKEENWALPVMYAVALDLRVFANNADQQLVKKGKSKVGDMLEKAAELLMSCFRVCASDTRAGIEDSKKWGMLFLVN

SEQ ID NO: 8520 - protein, 85 aa, Homo sapiens
QLFKIYFKINKLHLCKPLIRAIDSSNLKDDYSTAQRVTYKYYVGRKAMFDSDFKQAEEYLSFAFEHCHRSSQKNKRMILIYLLPV

SEQ ID NO: 8521 - protein, 85 aa, Homo sapiens
KMLLGHMPTVELLKKYHLMQFAEVTRAVSEGNLLLLHEALAKHEAFFIRCGIFLILEKLKIITYRNLFKKVYLLLKTHQLSLDAF

SEQ ID NO: 8522 - protein, 85 aa, Homo sapiens
PEEKCQQVLEPPYDEMFAAHLRCTYAVGNHDFIEAYKCQTVIVQSFLRAFQAHKEENWALPVMYAVALDLRVFANNADQQLVKKG

SEQ ID NO: 8523 - protein, 85 aa, Homo sapiens
KSKVGDMLEKAAELLMSCFRVCASDTRAGIEDSKKWGMLFLVNQLFKIYFKINKLHLCKPLIRAIDSSNLKDDYSTAQRVTYKYY

SEQ ID NO: 8524 - protein, 85 aa, Homo sapiens
VGRKAMFDSDFKQAEEYLSFAFEHCHRSSQKNKRMILIYLLPVKMLLGHMPTVELLKKYHLMQFAEVTRAVSEGNLLLLHEALAK

SEQ ID NO: 8525 - protein, 85 aa, Homo sapiens
HEAFFIRCGIFLILEKLKIITYRNLFKKVYLLLKTHQLSLDAFLVALKFMQVEDVDIDEVQCILANLIYMGHVKGYISHQHQKLV

SEQ ID NO: 8526 - protein, 85 aa, Homo sapiens
ARGLGKASGFPAGPSGAELPASGRRRGPLISLFPAVLASEAAMSYPADDYESEAAYDPYAYPSDYDMHTGDPKQDLAYERQYEQQ

SEQ ID NO: 8527 - protein, 85 aa, Homo sapiens
TYQVIPEVIKNFIQYFHKTVSDLIDQKVYELQASRVSSDVIDQKVYEIQDIYENSWTKLTERFFKNTPWPEAEAIAPQVGNDAVF

SEQ ID NO: 8528 - protein, 85 aa, Homo sapiens
MILYKELYYRHIYAKVSGGPSLEQRFESYYNYCNLFNYILNADGPAPLELPNQWLWDIIDEFIYQFQSFSQYRCKTAKKSEEEID

SEQ ID NO: 8529 - protein, 85 aa, Homo sapiens
FLRSNPKIWNVHSVLNVLHSLVDKSNINRQLEVYTSGGDPESVAGEYGRHSLYKMLGYFSLVGLLRLHSLLGDYYQAIKVLENIE

SEQ ID NO: 8530 - protein, 85 aa, Homo sapiens
MNKKSMYSRVPECQVTTYYYVGFAYLMMRRYQDAIRVFANILLYIQRTKSMFQRTTYKYEMINKQNEQMHALLAIALTMYPMRID

SEQ ID NO: 8531 - protein, 85 aa, Homo sapiens
ESIHLQLREKYGDKMLRMQKGDPQVYEELFSYSCPKFLSPVVPNYDNVHPNYHKEPFLQQLKVFSDEVQQQAQLSTIRSFLKLYT

SEQ ID NO: 8532 - protein, 85 aa, Homo sapiens
TMPVAKLAGFLDLTEQEFRIQLLVFKHKMKNLVWTSGISALDGEFQSASEVDFYIDKDMIHIADTKVARRYGDFFIRQIHKFEEL

SEQ ID NO: 8533 - protein, 84 aa, Homo sapiens
LTEQEFRIQLLVFKHKMKNLVWTSGISALDGEFQSASEVDFYIDKDMIHIADTKVARRYGDFFIRQIHKFEELNRTLKKMGQRP

SEQ ID NO: 8534 - protein, 85 aa, Homo sapiens
MSYPADDYESEAAYDPYAYPSDYDMHTGDPKQDLAYERQYEQQTYQVIPEVIKNFIQYFHKTVSDLIDQKVYELQASRVSSDVID

SEQ ID NO: 8535 - protein, 85 aa, Homo sapiens
QKVYEIQDIYENSWTKLTERFFKNTPWPEAEAIAPQVGNDAVFLILYKELYYRHIYAKVSGGPSLEQRFESYYNYCNLFNYILNA

SEQ ID NO: 8536 - protein, 85 aa, Homo sapiens
DGPAPLELPNQWLWDIIDEFIYQFQSFSQYRCKTAKKSEEEIDFLRSNPKIWNVHSVLNVLHSLVDKSNINRQLEVYTSGGDPES

SEQ ID NO: 8537 - protein, 85 aa, Homo sapiens
VAGEYGRHSLYKMLGYFSLVGLLRLHSLLGDYYQAIKVLENIELNKKSMYSRVPECQVTTYYYVGFAYLMMRRYQDAIRVFANIL

SEQ ID NO: 8538 - protein, 85 aa, Homo sapiens
LYIQRTKSMFQRTTYKYEMINKQNEQMHALLAIALTMYPMRIDESIHLQLREKYGDKMLRMQKGDPQVYEELFSYSCPKFLSPVV

SEQ ID NO: 8539 - protein, 85 aa, Homo sapiens
PNYDNVHPNYHKEPFLQQLKVFSDEVQQQAQLSTIRSFLKLYTTMPVAKLAGFLDLTEQEFRIQLLVFKHKMKNLVWTSGISALD

SEQ ID NO: 8540 - protein, 85 aa, Homo sapiens
FETVQKLRFGIYDIDNKTPELRDDDFLGGAECSLGQIVSSQVLTLPLMLKPGKPAGRGTITVSAQELKDNRVVTMEVEARNLDKK

SEQ ID NO: 8541 - protein, 85 aa, Homo sapiens
AAAAAAAVAGVGRGGGGAEPRQERSRARGWAGVERSEGRRMEPGEELEEEGSPGGREDGFTAEHLAAEAMAADMDPWLVFDARTT

SEQ ID NO: 8542 - protein, 85 aa, Homo sapiens
PATELDAWLAKYPPSQVTRYGDPGSPNSEPVGWIAVYGQGYSPNSGDVQGLQAAWEALQTSGRPITPGTLRQLAITHHVLSGKWL

SEQ ID NO: 8543 - protein, 85 aa, Homo sapiens
MHLAPGFKLDHAWAGIARAVVEGQLQVAKVSPRAKEGGRQVICVYTDDFTDRLGVLEADSAIRAAGIKCLLTYKPDVYTYLGIYR

SEQ ID NO: 8544 - protein, 84 aa, Homo sapiens
GRQVICVYTDDFTDRLGVLEADSAIRAAGIKCLLTYKPDVYTYLGIYRANRWHLCPTLYESRFQLGGSARGSRVLDRANNVELT

SEQ ID NO: 8545 - protein, 85 aa, Homo sapiens
PGEELEEEGSPGGREDGFTAEHLAAEAMAADMDPWLVFDARTTPATELDAWLAKYPPSQVTRYGDPGSPNSEPVGWIAVYGQGYS

SEQ ID NO: 8546 - protein, 85 aa, Homo sapiens
PNSGDVQGLQAAWEALQTSGRPITPGTLRQLAITHHVLSGKWLMHLAPGFKLDHAWAGIARAVVEGQLQVAKVSPRAKEGGRQVI

SEQ ID NO: 8547 - protein, 85 aa, Homo sapiens
TENTHFDKIPESCALKSWRHPGLHHGEAALRGEPRIQTLPVASALSSHRTGPPPISPSKRKFSMEPGDEDLDCDNDHVSKMSRIF

SEQ ID NO: 8548 - protein, 85 aa, Homo sapiens
NPHLNKTANGDCRRDPRERSRSPIERAVAPTMSLHGSHLYTSLPSLGLEQPLALTKNSLDASRPAGLSPTLTPGERQQNRPSVIT

SEQ ID NO: 8549 - protein, 85 aa, Homo sapiens
CASAGARNCNLSHCPIAHSGCAAPGPASYRRPPSAATTCDPVVEEHFRRSLGKNYKEPEPAPNSVSITGSVDDHFAKALGDTWLQ

SEQ ID NO: 8550 - protein, 85 aa, Homo sapiens
SALSSHRTGPPPISPSKRKFSMEPGDEDLDCDNDHVSKMSRIFNPHLNKTANGDCRRDPRERSRSPIERAVAPTMSLHGSHLYTS

SEQ ID NO: 8551 - protein, 85 aa, Homo sapiens
LPSLGLEQPLALTKNSLDASRPAGLSPTLTPGERQQNRPSVITCASAGARNCNLSHCPIAHSGCAAPGPASYRRPPSAATTCDPV

SEQ ID NO: 8552 - protein, 85 aa, Homo sapiens
PVSCSTVLCIAFEVLQGLQYMNKHGIVHRALSPHNILLDRKGHIKLAKFGLYHMTAHGDDVDFPIGYPSYLAPEGRKLFQSLDIS

SEQ ID NO: 8553 - protein, 85 aa, Homo sapiens
ERLKFLLTLDCVDDTLIVLAEEHGCLDIIKELPETVIDLLNKCLTFHPSKRPTPDQLMKDKVFSEVSPLYTPFTKPASLFSSSLR

SEQ ID NO: 8554 - protein, 85 aa, Homo sapiens
CADLTLPEDISQLCKDINNDYLAERSIEEVYYLWCLAGGDLEKELVNKEIIRSKPPICTLPNFLFEDGESFGQGRDRSSLLDDTT

SEQ ID NO: 8555 - protein, 85 aa, Homo sapiens
VTLSLCQLRNRLKDVGGEAFYPLLEDDQSNLPHSNSNNELSAAATLPLIIREKDTEYQLNRIILFDRLLKAYPYKKNQIWKEARV

SEQ ID NO: 8556 - protein, 85 aa, Homo sapiens
DIPPLMRGLTWAALLGVEGAIHAKYDAIDKDTPIPTDRQIEVDIPRCHQYDELLSSPEGHAKFRRVLKAWVVSHPDLVYWQGLDS

SEQ ID NO: 8557 - protein, 85 aa, Homo sapiens
LCAPFLYLNFNNEALAYACMSAFIPKYLYNFFLKDNSHVIQEYLTVFSQMIAFHDPELSNHLNEIGFIPDLYAIPWFLTMFTHVF

SEQ ID NO: 8558 - protein, 85 aa, Homo sapiens
PLHKIFHLWDTLLLGNSSFPFCIGVAILQQLRDRLLANGFNECILLFSDLPEIDIERCVRESINLFCWTPKSATYRQHAQPPKPS

SEQ ID NO: 8559 - protein, 85 aa, Homo sapiens
SDSSGGRSSAPYFSAECPDPPKTDLSRESIPLNDLKSEVSPRISAEDLIDLCELTVTGHFKTPSKKTKSSKPKLLVVDIRNSEDF

SEQ ID NO: 8560 - protein, 85 aa, Homo sapiens
IRGHISGSINIPFSAAFTAEGELTQGPYTAMLQNFKGKVIVIVGHVAKHTAEFAAHLVKMKYPRICILDGGINKIKPTGLLTIPS

SEQ ID NO: 8561 - protein, 85 aa, Homo sapiens
HIKLAKFGLYHMTAHGDDVDFPIGYPSYLAPEGRKLFQSLDISERLKFLLTLDCVDDTLIVLAEEHGCLDIIKELPETVIDLLNK

SEQ ID NO: 8562 - protein, 85 aa, Homo sapiens
CLTFHPSKRPTPDQLMKDKVFSEVSPLYTPFTKPASLFSSSLRCADLTLPEDISQLCKDINNDYLAERSIEEVYYLWCLAGGDLE

SEQ ID NO: 8563 - protein, 85 aa, Homo sapiens
KELVNKEIIRSKPPICTLPNFLFEDGESFGQGRDRSSLLDDTTVTLSLCQLRNRLKDVGGEAFYPLLEDDQSNLPHSNSNNELSA

SEQ ID NO: 8564 - protein, 85 aa, Homo sapiens
AATLPLIIREKDTEYQLNRIILFDRLLKAYPYKKNQIWKEARVDIPPLMRGLTWAALLGVEGAIHAKYDAIDKDTPIPTDRQIEV

SEQ ID NO: 8565 - protein, 85 aa, Homo sapiens
DIPRCHQYDELLSSPEGHAKFRRVLKAWVVSHPDLVYWQGLDSLCAPFLYLNFNNEALAYACMSAFIPKYLYNFFLKDNSHVIQE

SEQ ID NO: 8566 - protein, 85 aa, Homo sapiens
YLTVFSQMIAFHDPELSNHLNEIGFIPDLYAIPWFLTMFTHVFPLHKIFHLWDTLLLGNSSFPFCIGVAILQQLRDRLLANGFNE

SEQ ID NO: 8567 - protein, 85 aa, Homo sapiens
CILLFSDLPEIDIERCVRESINLFCWTPKSATYRQHAQPPKPSSDSSGGRSSAPYFSAECPDPPKTDLSRESIPLNDLKSEVSPR

SEQ ID NO: 8568 - protein, 85 aa, Homo sapiens
ISAEDLIDLCELTVTGHFKTPSKKTKSSKPKLLVVDIRNSEDFIRGHISGSINIPFSAAFTAEGELTQGPYTAMLQNFKGKVIVI

SEQ ID NO: 8569 - protein, 85 aa, Homo sapiens
KDKQKKKKERTWAEAARLVLENYSDAPMTPKQILQVIEAEGLKEMRSGTSPLACLNAMLHSNSRGGEGLFYKLPGRISLFTLKKD

SEQ ID NO: 8570 - protein, 85 aa, Homo sapiens
ALQWSRHPATVEGEEPEDTADVESCGSNEASTVSGENDVSLDETSSNASCSTESQSRPLSNPRDSYRASSQANKQKKKTGVMLPR

SEQ ID NO: 8571 - protein, 85 aa, Homo sapiens
VVLTPLKVNGAHVESASGFSGCHADGESGSPSSSSSGSLALGSAAIRGQAEVTQDPAPLLRGFRKPATGQMKRNRGEEIDFETPG

SEQ ID NO: 8572 - protein, 85 aa, Homo sapiens
SILVNTNLRALINSRTFHALPSHFQQQLLFLLPEVDRQVGTDGLLRLSSSALNNEFFTHAAQSWRERLADGEFTHEMQVRIRQEM

SEQ ID NO: 8573 - protein, 85 aa, Homo sapiens
EKEKKVEQWKEKFFEDYYGQKLGLTKEESLQQNVGQEEAEIKSGLCVPGESVRIQRGPATRQRDGHFKKRSRPDLRTRARRNLYK

SEQ ID NO: 8574 - protein, 85 aa, Homo sapiens
KQESEQAGVAKDAKSVASDVPLYKDGEAKTDPAGLSSPHLPGTSSAAPDLEGPEFPVESVASRIQAEPDNLARASASPDRIPSLP

SEQ ID NO: 8575 - protein, 85 aa, Homo sapiens
QETVDQEPKDQKRKSFEQAASASFPEKKPRLEDRQSFRNTIESVHTEKPQPTKEEPKVPPIRIQLSRIKPPWVVKGQPTYQICPR

SEQ ID NO: 8576 - protein, 85 aa, Homo sapiens
IIPTTESSCRGWTGARTLADIKARALQVRGARGHHCHREAATTAIGGGGGPGGGGGGATDEGGGRGSSSGDGGEACGHPEPRGGP

SEQ ID NO: 8577 - protein, 85 aa, Homo sapiens
STPGKCTSDLQRTQLLPPYPLNGEHTQAGTAMSRARREDLPSLRKEESCLLQRATVGLTDGLGDASQLPVAPTGDQPCQALPLLS

SEQ ID NO: 8578 - protein, 85 aa, Homo sapiens
SQTSVAERLVEQPQLHPDVRTECESGTTSWESDDEEQGPTVPADNGPIPSLVGDDTLEKGTGQALDSHPTMKDPVNVTPSSTPES

SEQ ID NO: 8579 - protein, 85 aa, Homo sapiens
SPTDCLQNRAFDDELGLGGSCPPMRESDTRQENLKTKALVSNSSLHWIPIPSNDEVVKQPKPESREHIPSVEPQVGEEWEKAAPT

SEQ ID NO: 8580 - protein, 85 aa, Homo sapiens
PPALPGDLTAEEGLDPLDSLTSLWTVPSRGGSDSNGSYCQQVDIEKLKINGDSEALSPHGESTDTASDFEGHLTEDSSEADTREA

SEQ ID NO: 8581 - protein, 85 aa, Homo sapiens
AVTKGSSVDKDEKPNWNQSAPLSKVNGDMRLVTRTDGMVAPQSWVSRVCAVRQKIPDSLLLASTEYQPRAVCLSMPGSSVEATNP

SEQ ID NO: 8582 - protein, 85 aa, Homo sapiens
LVMQLLQGSLPLEKVLPPAHDDSMSESPQVPLTKDQSHGSLRMGSLHGLGKNSGMVDGSSPSSLRALKEPLLPDSCETGTGLARI

SEQ ID NO: 8583 - protein, 85 aa, Homo sapiens
EATQAPGAPQKNCKAVPSFDSLHPVTNPITSSRKLEEMDSKEQFSSFSCEDQKEVRAMSQDSNSNAAPGKSPGDLTTSRTPRFSS

SEQ ID NO: 8584 - protein, 85 aa, Homo sapiens
PNVISFGPEQTGRALGDQSNVTGQGKKLFGSGNVAATLQRPRPADPMPLPAEIPPVFPSGKLGPSTNSMSGGVQTPREDWAPKPH

SEQ ID NO: 8585 - protein, 85 aa, Homo sapiens
AFVGSVKNEKTFVGGPLKANAENRKATGHSPLELVGHLEGMPFVMDLPFWKLPREPGKGLSEPLEPSSLPSQLSIKQAFYGKLSK

SEQ ID NO: 8586 - protein, 85 aa, Homo sapiens
LQLSSTSFNYSSSSPTFPKGLAGSVVQLSHKANFGASHSASLSLQMFTDSSTVESISLQCACSLKAMIMCQGCGAFCHDDCIGPS

SEQ ID NO: 8587 - protein, 85 aa, Homo sapiens
KEMRSGTSPLACLNAMLHSNSRGGEGLFYKLPGRISLFTLKKDALQWSRHPATVEGEEPEDTADVESCGSNEASTVSGENDVSLD

SEQ ID NO: 8588 - protein, 85 aa, Homo sapiens
ETSSNASCSTESQSRPLSNPRDSYRASSQANKQKKKTGVMLPRVVLTPLKVNGAHVESASGFSGCHADGESGSPSSSSSGSLALG

SEQ ID NO: 8589 - protein, 85 aa, Homo sapiens
SAAIRGQAEVTQDPAPLLRGFRKPATGQMKRNRGEEIDFETPGSILVNTNLRALINSRTFHALPSHFQQQLLFLLPEVDRQVGTD

SEQ ID NO: 8590 - protein, 85 aa, Homo sapiens
GLLRLSSSALNNEFFTHAAQSWRERLADGEFTHEMQVRIRQEMEKEKKVEQWKEKFFEDYYGQKLGLTKEESLQQNVGQEEAEIK

SEQ ID NO: 8591 - protein, 85 aa, Homo sapiens
SGLCVPGESVRIQRGPATRQRDGHFKKRSRPDLRTRARRNLYKKQESEQAGVAKDAKSVASDVPLYKDGEAKTDPAGLSSPHLPG

SEQ ID NO: 8592 - protein, 85 aa, Homo sapiens
TSSAAPDLEGPEFPVESVASRIQAEPDNLARASASPDRIPSLPQETVDQEPKDQKRKSFEQAASASFPEKKPRLEDRQSFRNTIE

SEQ ID NO: 8593 - protein, 85 aa, Homo sapiens
SVHTEKPQPTKEEPKVPPIRIQLSRIKPPWVVKGQPTYQICPRIIPTTESSCRGWTGARTLADIKARALQVRGARGHHCHREAAT

SEQ ID NO: 8594 - protein, 85 aa, Homo sapiens
TAIGGGGGPGGGGGGATDEGGGRGSSSGDGGEACGHPEPRGGPSTPGKCTSDLQRTQLLPPYPLNGEHTQAGTAMSRARREDLPS

SEQ ID NO: 8595 - protein, 85 aa, Homo sapiens
MRKEESCLLQRATVGLTDGLGDASQLPVAPTGDQPCQALPLLSSQTSVAERLVEQPQLHPDVRTECESGTTSWESDDEEQGPTVP

SEQ ID NO: 8596 - protein, 85 aa, Homo sapiens
ADNGPIPSLVGDDTLEKGTGQALDSHPTMKDPVNVTPSSTPESSPTDCLQNRAFDDELGLGGSCPPMRESDTRQENLKTKALVSN

SEQ ID NO: 8597 - protein, 85 aa, Homo sapiens
SSLHWIPIPSNDEVVKQPKPESREHIPSVEPQVGEEWEKAAPTPPALPGDLTAEEGLDPLDSLTSLWTVPSRGGSDSNGSYCQQV

SEQ ID NO: 8598 - protein, 85 aa, Homo sapiens
DIEKLKINGDSEALSPHGESTDTASDFEGHLTEDSSEADTREAAVTKGSSVDKDEKPNWNQSAPLSKVNGDMRLVTRTDGMVAPQ

SEQ ID NO: 8599 - protein, 85 aa, Homo sapiens
SWVSRVCAVRQKIPDSLLLASTEYQPRAVCLSMPGSSVEATNPLVMQLLQGSLPLEKVLPPAHDDSMSESPQVPLTKDQSHGSLR

SEQ ID NO: 8600 - protein, 85 aa, Homo sapiens
MGSLHGLGKNSGMVDGSSPSSLRALKEPLLPDSCETGTGLARIEATQAPGAPQKNCKAVPSFDSLHPVTNPITSSRKLEEMDSKE

SEQ ID NO: 8601 - protein, 85 aa, Homo sapiens
QFSSFSCEDQKEVRAMSQDSNSNAAPGKSPGDLTTSRTPRFSSPNVISFGPEQTGRALGDQSNVTGQGKKLFGSGNVAATLQRPR

SEQ ID NO: 8602 - protein, 85 aa, Homo sapiens
PADPMPLPAEIPPVFPSGKLGPSTNSMSGGVQTPREDWAPKPHAFVGSVKNEKTFVGGPLKANAENRKATGHSPLELVGHLEGMP

SEQ ID NO: 8603 - protein, 85 aa, Homo sapiens
FVMDLPFWKLPREPGKGLSEPLEPSSLPSQLSIKQAFYGKLSKLQLSSTSFNYSSSSPTFPKGLAGSVVQLSHKANFGASHSASL

SEQ ID NO: 8604 - protein, 85 aa, Homo sapiens
SDQEAKPSTEDLGDKKEGEYIKLKVIGQDSSEIHFKVKMTTHLKKLKESYCQRQGVPMNSLRFLFEGQRIADNHTPKEAQWPTPA

SEQ ID NO: 8605 - protein, 84 aa, Homo sapiens
RFLFEGQRIADNHTPKEAQWPTPAILALWEAEAGWITAGQELRPAWATWRNLISTKNRKSSQLGMEEEDVIEVYQEQTGGHSTV

SEQ ID NO: 8606 - protein, 85 aa, Homo sapiens
LKKLKESYCQRQGVPMNSLRFLFEGQRIADNHTPKEAQWPTPAILALWEAEAGWITAGQELRPAWATWRNLISTKNRKSSQLGME

SEQ ID NO: 8607 - protein, 85 aa, Homo sapiens
ARSPAPGYKRSGRRYKCLSCTKTFPNAPRAARHAATHGPADCSEEVAEVKPKPETEAKAEEASGEKVSGSAAKPRPYACPLCPKA

SEQ ID NO: 8608 - protein, 84 aa, Homo sapiens
RVRKGEKFGPFAGEKRMPEDLDENMDYRLMWEVRGSKGEVLYILDATNPRHSNWLRFVHEAPSQEQKNLAAIQDKNLGPAEWRG

SEQ ID NO: 8609 - protein, 85 aa, Homo sapiens
MPARGCVRKRTVWPRLARVLIVTLLTLELSYAPLPCQLSGVPYNTGDPVGRWARPCIWPCPWHTTINALKGRISELQWSVMDQEM

SEQ ID NO: 8610 - protein, 85 aa, Homo sapiens
RVKRLESEKQELQEQLDLQHKKCQEANQKIQELQASQEARADHEQQIKDLEQKLSLQEQDAAIVKNMKSELVRLPRLERELKQLR

SEQ ID NO: 8611 - protein, 85 aa, Homo sapiens
EESAHLREMRETNGLLQEELEGLQRKLGRQEKMQETLVGLELENERLLAKLQSWERLDQTMGLSIRTPEDLSRFVVELQQRELAL

SEQ ID NO: 8612 - protein, 85 aa, Homo sapiens
KDKNSAVTSSARGLEKARQQLQEELRQVSGQLLEERKKRETHEALARRLQKRVLLLTKERDGMRAILGSYDSELTPAEYSPQLTR

SEQ ID NO: 8613 - protein, 85 aa, Homo sapiens
RMREAEDMVQKVHSHSAEMEAQLSQALEELGGQKQRADMLEMELKMLKSQSSSAEQSFLFSREEADTLRLKVEELEGERSRLEEE

SEQ ID NO: 8614 - protein, 85 aa, Homo sapiens
KRMLEAQLERRALQGDYDQSRTKVLHMSLNPTSVARQRLREDHSQLQAECERLRGLLRAMERGGTVPADLEAAAASLPSSKEVAE

SEQ ID NO: 8615 - protein, 85 aa, Homo sapiens
MKKQVESAELKNQRLKEVFQTKIQEFRKACYTLTGYQIDITTENQYRLTSLYAEHPGDCLIFKATSPSGSKMQLLETEFSHTVGE

SEQ ID NO: 8616 - protein, 85 aa, Homo sapiens
YNTGDPVGRWARPCIWPCPWHTTINALKGRISELQWSVMDQEMRVKRLESEKQELQEQLDLQHKKCQEANQKIQELQASQEARAD

SEQ ID NO: 8617 - protein, 85 aa, Homo sapiens
HEQQIKDLEQKLSLQEQDAAIVKNMKSELVRLPRLERELKQLREESAHLREMRETNGLLQEELEGLQRKLGRQEKMQETLVGLEL

SEQ ID NO: 8618 - protein, 85 aa, Homo sapiens
ENERLLAKLQSWERLDQTMGLSIRTPEDLSRFVVELQQRELALKDKNSAVTSSARGLEKARQQLQEELRQVSGQLLEERKKRETH

SEQ ID NO: 8619 - protein, 85 aa, Homo sapiens
EALARRLQKRVLLLTKERDGMRAILGSYDSELTPAEYSPQLTRRMREAEDMVQKVHSHSAEMEAQLSQALEELGGQKQRADMLEM

SEQ ID NO: 8620 - protein, 85 aa, Homo sapiens
ELKMLKSQSSSAEQSFLFSREEADTLRLKVEELEGERSRLEEEKRMLEAQLERRALQGDYDQSRTKVLHMSLNPTSVARQRLRED

SEQ ID NO: 8621 - protein, 85 aa, Homo sapiens
HSQLQAECERLRGLLRAMERGGTVPADLEAAAASLPSSKEVAELKKQVESAELKNQRLKEVFQTKIQEFRKACYTLTGYQIDITT

SEQ ID NO: 8622 - protein, 84 aa, Homo sapiens
RIDCLRQADKVWRLDLVMVILFKGIPLESTDGERLMKSPHCTNPALCVQPHHITVSVKELDLFLAYYVQEQGKNFFSSNKCIKI

SEQ ID NO: 8623 - protein, 85 aa, Homo sapiens
GRRLKGARRLKLSPLRSLRKGPGLLSPPSASPVPTPAVSRTLLGNFEESLLRGRFAPSGHIEGFTAEIGASGSYCPQHVTLPVTV

SEQ ID NO: 8624 - protein, 85 aa, Homo sapiens
TFFDVSEQNAPAPFLGIVDLNPLGRKGYSVPKVGTVQVTLFNPNQTVVKMFLVTFDFSDMPAAHMTFLRHRLFLVPVGEEGNANP

SEQ ID NO: 8625 - protein, 85 aa, Homo sapiens
MGNFEESLLRGRFAPSGHIEGFTAEIGASGSYCPQHVTLPVTVTFFDVSEQNAPAPFLGIVDLNPLGRKGYSVPKVGTVQVTLFN

SEQ ID NO: 8626 - protein, 85 aa, Homo sapiens
PNQTVVKMFLVTFDFSDMPAAHMTFLRHRLFLVPVGEEGNANPTHRLLCYLLHLRFRSSRSGRLSLHGDIRLLFSRRSLELDTGL

SEQ ID NO: 8627 - protein, 85 aa, Homo sapiens
DEDGLELQQEPNSFFDATDRVSFCHPGWSTVAPSGSTATSASQAQVICSASRVTGATGADGTHMDGDQIVVEVQETVFVSDVVDS

SEQ ID NO: 8628 - protein, 85 aa, Homo sapiens
DITVHNFVPDDPDSVVIQDVIEDVVIEDVQCPDIMEEADVSETVIIPEQVLDSDVTEEVSLAHCTVPDDVLASDITSASMSMPEH

SEQ ID NO: 8629 - protein, 85 aa, Homo sapiens
VLTGDSIHVSDVGHVGHVGHVEHVVHDSVVEAEIVTDPLTTDVVSEEVLVADCASEAVIDANGIPVDQQDDDKGNCEDYLMISLD

SEQ ID NO: 8630 - protein, 85 aa, Homo sapiens
DAGKIEHDGSSGMTMDTESEIDPCKVDGTCPEVIKVYIFKADPGEDDLGGTVDIVESEPENDHGVELLDQNSSIRVPREKMVYMT

SEQ ID NO: 8631 - protein, 85 aa, Homo sapiens
VNDSQPEDEDLNVAEIADEVYMEVIVGEEDAAAAAAAAAVHEQQMDDNEIKTFMPIAWAAAYGNNSDGIENRNGTASALLHIDES

SEQ ID NO: 8632 - protein, 85 aa, Homo sapiens
AGLGRLAKQKPKKRRRPDSRQYQTAIIIGPDGHPLTVYPCMICGKKFKSRGFLKRHMKNHPEHLAKKKYRCTDCDYTTNKKISLH

SEQ ID NO: 8633 - protein, 85 aa, Homo sapiens; identical to SEQ ID NO: 31

SEQ ID NO: 8634 - protein, 85 aa, Homo sapiens
RHPSELKKHMRIHTGEKPYQCQYCEYRSADSSNLKTHVKTKHSKEMPFKCDICLLTFSDTKEVQQHALIHQESKTHQCLHCDHKS

SEQ ID NO: 8635 - protein, 85 aa, Homo sapiens
SNSSDLKRHIISVHTKDYPHKCDMCDKGFHRPSELKKHVAAHKGKKMHQCRHCDFKIADPFVLSRHILSVHTKDLPFRCKRCRKG

SEQ ID NO: 8636 - protein, 85 aa, Homo sapiens
QAQVICSASRVTGATGADGTHMDGDQIVVEVQETVFVSDVVDSDITVHNFVPDDPDSVVIQDVIEDVVIEDVQCPDIMEEADVSE

SEQ ID NO: 8637 - protein, 85 aa, Homo sapiens
TVIIPEQVLDSDVTEEVSLAHCTVPDDVLASDITSASMSMPEHVLTGDSIHVSDVGHVGHVGHVEHVVHDSVVEAEIVTDPLTTD

SEQ ID NO: 8638 - protein, 85 aa, Homo sapiens
VVSEEVLVADCASEAVIDANGIPVDQQDDDKGNCEDYLMISLDDAGKIEHDGSSGMTMDTESEIDPCKVDGTCPEVIKVYIFKAD

SEQ ID NO: 8639 - protein, 85 aa, Homo sapiens
PGEDDLGGTVDIVESEPENDHGVELLDQNSSIRVPREKMVYMTVNDSQPEDEDLNVAEIADEVYMEVIVGEEDAAAAAAAAAVHE

SEQ ID NO: 8640 - protein, 85 aa, Homo sapiens
QQMDDNEIKTFMPIAWAAAYGNNSDGIENRNGTASALLHIDESAGLGRLAKQKPKKRRRPDSRQYQTAIIIGPDGHPLTVYPCMI

SEQ ID NO: 8641 - protein, 85 aa, Homo sapiens
CGKKFKSRGFLKRHMKNHPEHLAKKKYRCTDCDYTTNKKISLHNHLESHKLTSKAEKAIECDECGKHFSHAGALFTHKMVHKEKG

SEQ ID NO: 8642 - protein, 85 aa, Homo sapiens
ANKMHKCKFCEYETAEQGLLNRHLLAVHSKNFPHICVECGKGFRHPSELKKHMRIHTGEKPYQCQYCEYRSADSSNLKTHVKTKH

SEQ ID NO: 8643 - protein, 85 aa, Homo sapiens
SKEMPFKCDICLLTFSDTKEVQQHALIHQESKTHQCLHCDHKSSNSSDLKRHIISVHTKDYPHKCDMCDKGFHRPSELKKHVAAH

SEQ ID NO: 8644 - protein, 85 aa, Homo sapiens
KGKKMHQCRHCDFKIADPFVLSRHILSVHTKDLPFRCKRCRKGFRQQSELKKHMKTHSGRKVYQCEYCEYSTTDASGFKRHVISI

SEQ ID NO: 8645 - protein, 85 aa, Homo sapiens
AEFRIYKDYIRERFDNETFRISVYQVLQEHLGRESDLFLLDSRTLWASEEGWLVFDITATSNHWVVNPRHNLGLQLSVETLDENS

SEQ ID NO: 8646 - protein, 85 aa, Homo sapiens
SSDQRQACKKHELYVSFRDLGWQDWIIAPEGYAAYYCEGECAFPLNSYMNATNHAIVQTLVHFINPETVPKPCCAPTQLNAISVL

SEQ ID NO: 8647 - protein, 85 aa, Homo sapiens
RTLWASEEGWLVFDITATSNHWVVNPRHNLGLQLSVETLDENSSSDQRQACKKHELYVSFRDLGWQDWIIAPEGYAAYYCEGECA

SEQ ID NO: 8648 - protein, 85 aa, Homo sapiens
RRCREIEQVNERVLNRLHQVQRITRRLQQERRFLMRVLDSYGDDYRASQFTIVLEAMRRMSLQRKRHCPRPEGLLHPQNPAAQPP

SEQ ID NO: 8649 - protein, 84 aa, Homo sapiens
TRRLQQERRFLMRVLDSYGDDYRASQFTIVLEAMRRMSLQRKRHCPRPEGLLHPQNPAAQPPVRGPVGGRGGECHGMDAEQEMR

SEQ ID NO: 8650 - protein, 85 aa, Homo sapiens
PPTPLTPTSHTANTSPRPVSGMERERKVSMRLHRGAPVNISSSDLTGRQDTSRMSTSQRSRDMASLRLHAARQGTRCRPQRPRRT

SEQ ID NO: 8651 - protein, 84 aa, Homo sapiens
TPLTPTSHTANTSPRPVSGMERERKVSMRLHRGAPVNISSSDLTGRQDTSRMSTSQRSRDMASLRLHAARQGTRCRPQRPRRTY

SEQ ID NO: 8652 - protein, 85 aa, Homo sapiens
SYPADDYESEAAYDPYAYPSDYDMHTGDPKQDLAYERQYEQQTYQVIPEVIKNFIQYFHKTVSDLIDQKVYELQASRVSSDVIDQ

SEQ ID NO: 8653 - protein, 84 aa, Homo sapiens
KQDLAYERQYEQQTYQVIPEVIKNFIQYFHKTVSDLIDQKVYELQASRVSSDVIDQKVYEIQDIYENRYGLLAERASFWVGLAW

SEQ ID NO: 8654 - protein, 85 aa, Homo sapiens
ANEIATNKPKITWQALNLPVITQISQALPTTEVTNTQASSVTAQPKKANKMKRVTAKAAQGSQSPTGHEGGTIQLKSPLQVLKLP

SEQ ID NO: 8655 - protein, 85 aa, Homo sapiens
DVTVSELLELFLQSPLVTWVKTFGPFGSGSQDNLTMYMDLVDGIFLNQIMLQIDPRPTNQRINKHVNNDVNLRIQNLTILVRNIK

SEQ ID NO: 8656 - protein, 85 aa, Homo sapiens
TYYQEVLQQLIVMNLPNVLMIGRDPLSGKSMEEIKKVLLLVLGCAVQCERKEEFIERIKQLDIETQAGIVAHIQEVTHNQENVFD

SEQ ID NO: 8657 - protein, 85 aa, Homo sapiens
MQWLELPDVAPEELEALSRSMVLHLRRLIDQRDECTELIVDLTQERDYLQAQHPPSPIKSSSADSTPSPTSSLSSEDKQHLAVEL

SEQ ID NO: 8658 - protein, 85 aa, Homo sapiens
ADTKARLRRVRQELEDKTEQLVDTRHEVDQLVLELQKVKQENIQLAADARSARAYRDELDSLREKANRVERLELELTRCKEKLHD

SEQ ID NO: 8659 - protein, 85 aa, Homo sapiens
VDFYKARMEELREDNIILIETKAMLEEQLTAARARGDKVHELEKENLQLKSKLHDLELDRDTDKKRIEELLEENMVLEIAQKQSM

SEQ ID NO: 8660 - protein, 85 aa, Homo sapiens
NESAHLGWELEQLSKNADLSDASRKSFVFELNECASSRILKLEKENQSLQSTIQGLRDASLVLEESGLKCGELEKENHQLSKKIE

SEQ ID NO: 8661 - protein, 85 aa, Homo sapiens
KLQTQLEREKQSNQDLETLSEELIREKEQLQSDMETLKADKARQIKDLEQEKDHLNRAMWSLRERSQVSSEARMKDVEKENKALH

SEQ ID NO: 8662 - protein, 85 aa, Homo sapiens
QTVTEANGKLSQLEFEKRQLHRDLEQAKEKGERAEKLERELQRLQEENGRLARKVTSLETATEKVEALEHESQGLQLENRTLRKS

SEQ ID NO: 8663 - protein, 85 aa, Homo sapiens
MDTLQNVSLQLEGLERDNKQLDAENLELRRLVETMRFTSTKLAQMERENQQLEREKEELRKNVDLLKALGKKSERLELSYQSVSA

SEQ ID NO: 8664 - protein, 85 aa, Homo sapiens
ENLRLQQSLESSSHKTQTLESELGELEAERQALRRDLEALRLANAQLEGAEKDRKALEQEVAQLEKDKKLLEKEAKRLWQQVELK

SEQ ID NO: 8665 - protein, 85 aa, Homo sapiens
DAVLDDSTAKLSAVEKESRALDKELARCRDAAGKLKELEKDNRDLTKQVTVHARTLTTLREDLVLEKLKSQQLSSELDKLSQELE

SEQ ID NO: 8666 - protein, 85 aa, Homo sapiens
KVGLNRELLLQEDDSGSDTKYKILEGRNESALKTTLAMKEEKIVLLEAQMEEKASLNRQLESELQMLKKECETLRQNQGEGQHLQ

SEQ ID NO: 8667 - protein, 85 aa, Homo sapiens
NSFKHPAGKTAASHQGKEAWGPGHKEATMELLRVKDRAIELERNNAALQAEKQLLKEQLQHLETQNVTFSSQILTLQKQSAFLQE

SEQ ID NO: 8668 - protein, 85 aa, Homo sapiens
HNTTLQTQTAKLQVENSTLSSQSAALTAQYTLLQNHHTAKETENESLQRQQEQLTAAYEALLQDHEHLGTLHERQSAEYEALIRQ

SEQ ID NO: 8669 - protein, 85 aa, Homo sapiens
HSCLKTLHRNLELEHKELGERHGDMLKRKAELEEREKVLTTEREALQQEQRTNALAMGENQRLRGELDRVNFLHHQLKGEYEELH

SEQ ID NO: 8670 - protein, 85 aa, Homo sapiens
AHTKELKTSLNNAQLELNRWQARFDELKEQHQTMDISLTKLDNHCELLSRLKGNLEEENHHLLSQIQLLSQQNQMLLEQNMENKE

SEQ ID NO: 8671 - protein, 85 aa, Homo sapiens
QYHEEQKQYIDKLNALRRHKEKLEEKIMDQYKFYDPPPKKKNHWIGAKALVKLIKPKKEGSRERLKSTVDSPPWQLESSDPASPA

SEQ ID NO: 8672 - protein, 85 aa, Homo sapiens
ASQPLRSQAENPDTPALGSNCAEERDAHNGSVGKGPGDLKPKRGSPHRGSLDRTDASTDLAMRSWPSELGSRTCSTSATTTAPSN

SEQ ID NO: 8673 - protein, 85 aa, Homo sapiens
STPIARHPGRTKGYNSDDNLCEPSLEFEVPNHRQYVSRPSSLESSRNTSSNSSPLNLKGSSEQLHGRSESFSSEDLIPSRDLATL

SEQ ID NO: 8674 - protein, 85 aa, Homo sapiens
PREASTPGRNALGRHEYPLPRNGPLPQEGAQKRGTAPPYVGVRPCSASPSSEMVTLEEFLEESNRSSPTHDTPSCRDDLLSDYFR

SEQ ID NO: 8675 - protein, 85 aa, Homo sapiens
KASDPPAIGGQPGPPAKKEGAKMPTNFVAPTVKMAAPTSEGRPLKPGQYVKPNFRLTEAEAPPSVAPRQAQPPQSLSLGRPRQAP

SEQ ID NO: 8676 - protein, 85 aa, Homo sapiens
VPPASHAPASRSASLSRAFSLASADLLRASGPEACKQESPQKLGAPEALGGRETGSHTLQSPAPPSSHSLARERTPLVGKAGSSC

SEQ ID NO: 8677 - protein, 85 aa, Homo sapiens
QGPGPRSRPLDTRRFSLAPPKEERLAPLHQSATAPAIATAGAGAAAAGSGSNSQLLHFSPAAAPAARTKPKAPPRSGEVATITPV

SEQ ID NO: 8678 - protein, 85 aa, Homo sapiens
GIFLNQIMLQIDPRPTNQRINKHVNNDVNLRIQNLTILVRNIKTYYQEVLQQLIVMNLPNVLMIGRDPLSGKSMEEIKKVLLLVL

SEQ ID NO: 8679 - protein, 85 aa, Homo sapiens
GCAVQCERKEEFIERIKQLDIETQAGIVAHIQEVTHNQENVFDLQWLELPDVAPEELEALSRSMVLHLRRLIDQRDECTELIVDL

SEQ ID NO: 8680 - protein, 85 aa, Homo sapiens
TQERDYLQAQHPPSPIKSSSADSTPSPTSSLSSEDKQHLAVELADTKARLRRVRQELEDKTEQLVDTRHEVDQLVLELQKVKQEN

SEQ ID NO: 8681 - protein, 85 aa, Homo sapiens
IQLAADARSARAYRDELDSLREKANRVERLELELTRCKEKLHDVDFYKARMEELREDNIILIETKAMLEEQLTAARARGDKVHEL

SEQ ID NO: 8682 - protein, 85 aa, Homo sapiens
EKENLQLKSKLHDLELDRDTDKKRIEELLEENMVLEIAQKQSMNESAHLGWELEQLSKNADLSDASRKSFVFELNECASSRILKL

SEQ ID NO: 8683 - protein, 85 aa, Homo sapiens
EKENQSLQSTIQGLRDASLVLEESGLKCGELEKENHQLSKKIEKLQTQLEREKQSNQDLETLSEELIREKEQLQSDMETLKADKA

SEQ ID NO: 8684 - protein, 85 aa, Homo sapiens
RQIKDLEQEKDHLNRAMWSLRERSQVSSEARMKDVEKENKALHQTVTEANGKLSQLEFEKRQLHRDLEQAKEKGERAEKLERELQ

SEQ ID NO: 8685 - protein, 85 aa, Homo sapiens
RLQEENGRLARKVTSLETATEKVEALEHESQGLQLENRTLRKSLDTLQNVSLQLEGLERDNKQLDAENLELRRLVETMRFTSTKL

SEQ ID NO: 8686 - protein, 85 aa, Homo sapiens
AQMERENQQLEREKEELRKNVDLLKALGKKSERLELSYQSVSAENLRLQQSLESSSHKTQTLESELGELEAERQALRRDLEALRL

SEQ ID NO: 8687 - protein, 85 aa, Homo sapiens
ANAQLEGAEKDRKALEQEVAQLEKDKKLLEKEAKRLWQQVELKDAVLDDSTAKLSAVEKESRALDKELARCRDAAGKLKELEKDN

SEQ ID NO: 8688 - protein, 85 aa, Homo sapiens
RDLTKQVTVHARTLTTLREDLVLEKLKSQQLSSELDKLSQELEKVGLNRELLLQEDDSGSDTKYKILEGRNESALKTTLAMKEEK

SEQ ID NO: 8689 - protein, 85 aa, Homo sapiens
IVLLEAQMEEKASLNRQLESELQMLKKECETLRQNQGEGQHLQNSFKHPAGKTAASHQGKEAWGPGHKEATMELLRVKDRAIELE

SEQ ID NO: 8690 - protein, 85 aa, Homo sapiens
RNNAALQAEKQLLKEQLQHLETQNVTFSSQILTLQKQSAFLQEHNTTLQTQTAKLQVENSTLSSQSAALTAQYTLLQNHHTAKET

SEQ ID NO: 8691 - protein, 85 aa, Homo sapiens
ENESLQRQQEQLTAAYEALLQDHEHLGTLHERQSAEYEALIRQHSCLKTLHRNLELEHKELGERHGDMLKRKAELEEREKVLTTE

SEQ ID NO: 8692 - protein, 85 aa, Homo sapiens
REALQQEQRTNALAMGENQRLRGELDRVNFLHHQLKGEYEELHAHTKELKTSLNNAQLELNRWQARFDELKEQHQTMDISLTKLD

SEQ ID NO: 8693 - protein, 85 aa, Homo sapiens
NHCELLSRLKGNLEEENHHLLSQIQLLSQQNQMLLEQNMENKEQYHEEQKQYIDKLNALRRHKEKLEEKIMDQYKFYDPPPKKKN

SEQ ID NO: 8694 - protein, 85 aa, Homo sapiens
HWIGAKALVKLIKPKKEGSRERLKSTVDSPPWQLESSDPASPAASQPLRSQAENPDTPALGSNCAEERDAHNGSVGKGPGDLKPK

SEQ ID NO: 8695 - protein, 85 aa, Homo sapiens
RGSPHRGSLDRTDASTDLAMRSWPSELGSRTCSTSATTTAPSNSTPIARHPGRTKGYNSDDNLCEPSLEFEVPNHRQYVSRPSSL

SEQ ID NO: 8696 - protein, 85 aa, Homo sapiens
ESSRNTSSNSSPLNLKGSSEQLHGRSESFSSEDLIPSRDLATLPREASTPGRNALGRHEYPLPRNGPLPQEGAQKRGTAPPYVGV

SEQ ID NO: 8697 - protein, 85 aa, Homo sapiens
RPCSASPSSEMVTLEEFLEESNRSSPTHDTPSCRDDLLSDYFRKASDPPAIGGQPGPPAKKEGAKMPTNFVAPTVKMAAPTSEGR

SEQ ID NO: 8698 - protein, 85 aa, Homo sapiens
PLKPGQYVKPNFRLTEAEAPPSVAPRQAQPPQSLSLGRPRQAPVPPASHAPASRSASLSRAFSLASADLLRASGPEACKQESPQK

SEQ ID NO: 8699 - protein, 85 aa, Homo sapiens
MGAPEALGGRETGSHTLQSPAPPSSHSLARERTPLVGKAGSSCQGPGPRSRPLDTRRFSLAPPKEERLAPLHQSATAPAIATAGA

SEQ ID NO: 8700 - protein, 85 aa, Homo sapiens
GAAAAGSGSNSQLLHFSPAAAPAARTKPKAPPRSGEVATITPVRAGLSLSEGDGVPGQGCSEGLPAKSPGRSPDLAPHLGRALED

SEQ ID NO: 8701 - protein, 85 aa, Homo sapiens
AAAAAAAVAGVGRGGGGAEPRQERSRARGWAGVERSEGRSRMEPGEELEEEGSPGGREDGFTAEHLAAEAMAADMDPWLVFDART

SEQ ID NO: 8702 - protein, 85 aa, Homo sapiens
TPATELDAWLAKYPPSQVTRYGDPGSPNSEPVGWIAVYGQGYSPNSGDVQGLQAAWEALQTSGRPITPGTLRQLAITHHVLSGKW

SEQ ID NO: 8703 - protein, 85 aa, Homo sapiens
LMHLAPGFKLDHAWAGIARAVVEGQLQVAKVSPRAKEGGRQVICVYTDDFTDRLGVLEADSAIRAAGIKCLLTYKPDVYTYLGIY

SEQ ID NO: 8704 - protein, 85 aa, Homo sapiens
EPGEELEEEGSPGGREDGFTAEHLAAEAMAADMDPWLVFDARTTPATELDAWLAKYPPSQVTRYGDPGSPNSEPVGWIAVYGQGY

SEQ ID NO: 8705 - protein, 85 aa, Homo sapiens
SPNSGDVQGLQAAWEALQTSGRPITPGTLRQLAITHHVLSGKWLMHLAPGFKLDHAWAGIARAVVEGQLQVAKVSPRAKEGGRQV

SEQ ID NO: 8706 - protein, 85 aa, Homo sapiens
ASSPAVDVSCRRREKRRQLDARRSKCRIRLGGHMEQWCLLKERLGFSLHSQLAKFLLDRYTSSGCVLCAAESAAWCPGFGGLAAK

SEQ ID NO: 8707 - protein, 84 aa, Homo sapiens
ARRSKCRIRLGGHMEQWCLLKERLGFSLHSQLAKFLLDRYTSSGCVLCAAESAAWCPGFGGLAAKMGGLCGSAQQAIPSPGDPL

SEQ ID NO: 8708 - protein, 85 aa, Homo sapiens
TAREHSPRHGARARAMQRASTIDVAADMLGLSLAGNIQDPDEPILEFSLACSELHTPSLDRKPNSFVAVSVTTPPQATSSASADM

SEQ ID NO: 8709 - protein, 85 aa, Homo sapiens
MPVITGNRDGFNVRVPLPGPLFDALPREIQSGMLLRVQPVLFNVGINEQQTLAERFGDTSLQEVINVESLVRLNSYFEQFKEVLP

SEQ ID NO: 8710 - protein, 85 aa, Homo sapiens
EDCLPRSRSQTCLPELLRFLGQNVHARKNKNVDILWQAAEICRRLNGVRFTSCKSAKDRTAMSVTLEQCLILQHEHGMAPQVFTQ

SEQ ID NO: 8711 - protein, 85 aa, Homo sapiens
PILEFSLACSELHTPSLDRKPNSFVAVSVTTPPQATSSASADMLPVITGNRDGFNVRVPLPGPLFDALPREIQSGMLLRVQPVLF

SEQ ID NO: 8712 - protein, 85 aa, Homo sapiens
NVGINEQQTLAERFGDTSLQEVINVESLVRLNSYFEQFKEVLPEDCLPRSRSQTCLPELLRFLGQNVHARKNKNVDILWQAAEIC

SEQ ID NO: 8713 - protein, 85 aa, Homo sapiens
RRLNGVRFTSCKSAKDRTAMSVTLEQCLILQHEHGMAPQVFTQALECMRSEGCRRENTMKNVGSRKYAFNSLQLKAFPKHYRPPE

SEQ ID NO: 8714 - protein, 85 aa, Homo sapiens
AAGRRPASALWPERRGSPLRGDLLGFQNVREPSSCGETLSGMRHSKRTYCPDWDDKDWDYGKWRSSSSHKRRKRSHSSAQENKRC

SEQ ID NO: 8715 - protein, 85 aa, Homo sapiens
KYNHSKMCDSHYLESRSINEKDYHSRRYIDEYRNDYTQGCEPGHRQRDHESRYQNHSSKSSGRSGRSSYKSKHRIHHSTSHRRSH

SEQ ID NO: 8716 - protein, 85 aa, Homo sapiens
GKSHRRKRTRSVEDDEEGHLICQSGDVLSARYEIVDTLGEGAFGKVVECIDHKAGGRHVAVKIVKNVDRYCEAARSEIQVLEHLN

SEQ ID NO: 8717 - protein, 85 aa, Homo sapiens
TTDPNSTFRCVQMLEWFEHHGHICIVFELLGLSTYDFIKENGFLPFRLDHIRKMAYQICKSVNFLHSNKLTHTDLKPENILFVQS

SEQ ID NO: 8718 - protein, 85 aa, Homo sapiens
DYTEAYNPKIKRDERTLINPDIKVVDFGSATYDDEHHSTLVSTRHYRAPEVILALGWSQPCDVWSIGCILIEYYLGFTVFPTHDS

SEQ ID NO: 8719 - protein, 85 aa, Homo sapiens
KEHLAMMERILGPLPKHMIQKTRKRKYFHHDRLDWDEHSSAGRYVSRRCKPLKEFMLSQDVEHERLFDLIQKMLEYDPAKRITLR

SEQ ID NO: 8720 - protein, 85 aa, Homo sapiens
APSTAVSVVSDSIKVQPLLISADNKVIIIQPQVQTQPESTAESRPPTEEPSQGAQATKKKKEDRPPTQENPEKIAFMVALGLVTT

SEQ ID NO: 8721 - protein, 85 aa, Homo sapiens
EHLEEIQSKRQERKRRSTANPAYSGLLETERKRLASNYLNNPLFLTARANEDPCWKNEITHDEHCAACKRGANLQPCGTCPGAYH

SEQ ID NO: 8722 - protein, 85 aa, Homo sapiens
LSCLEPPLKTAPKGVWVCPRCQQKALKKDEGVPWTGMLAIVHSYVTHKTVKEEEKQKLLQRGSELQNEHQQLEERDRRLASAVQK

SEQ ID NO: 8723 - protein, 85 aa, Homo sapiens
SRPPTEEPSQGAQATKKKKEDRPPTQENPEKIAFMVALGLVTTEHLEEIQSKRQERKRRSTANPAYSGLLETERKRLASNYLNNP

SEQ ID NO: 8724 - protein, 85 aa, Homo sapiens
MFLTARANEDPCWKNEITHDEHCAACKRGANLQPCGTCPGAYHLSCLEPPLKTAPKGVWVCPRCQQKALKKDEGVPWTGMLAIVH

SEQ ID NO: 8725 - protein, 85 aa, Homo sapiens
SYVTHKTVKEEEKQKLLQRGSELQNEHQQLEERDRRLASAVQKCLELKTSLLARQRGTQSSLDRLRALLRLIQGEQLLQVTMTTT

SEQ ID NO: 8726 - protein, 45 aa, Homo sapiens
PTAKPCPKFASMALPTLHPSSTMWPGLQPRLHIRGLPRNTSCCCC

SEQ ID NO: 8727 - protein, 32 aa, Homo sapiens
SWTLMVDPCIHVLGRLLPATLCSLYPTAGSRM

SEQ ID NO: 8728 - protein, 84 aa, Homo sapiens
YRRFQNVSPSGGIGTDRARRSAHTTGLILQGPGLGPAQATSTLSQGSCTGPPGLGSLGGCGKSSILCPRGPSGPQPNPSHSPQC

SEQ ID NO: 8729 - protein, 4 aa, Homo sapiens
LMVL

SEQ ID NO: 8730 - protein, 85 aa, Homo sapiens
QSDMEKIQESADSLEGGILDLGSVLSHILPVSELREAQLYSVDVTLDPDTAYPSLILSDNLRQVRYSYLQQDLPDNPERFNLFPC

SEQ ID NO: 8731 - protein, 85 aa, Homo sapiens
VLGSPCFIAGRHYWEVEVGDKAKWTIGVCEDSVCRKGGVTSAPQNGFWAVSLWYGKEYWALTSPMTALPLRTPLQRVGIFLDYDA

SEQ ID NO: 8732 - protein, 85 aa, Homo sapiens
DVTLDPDTAYPSLILSDNLRQVRYSYLQQDLPDNPERFNLFPCVLGSPCFIAGRHYWEVEVGDKAKWTIGVCEDSVCRKGGVTSA

SEQ ID NO: 8733 - protein, 85 aa, Homo sapiens
PQNGFWAVSLWYGKEYWALTSPMTALPLRTPLQRVGIFLDYDAGEVSFYNVTERCHTFTFSHATFCGPVRPYFSLSYSGGKSAAP

SEQ ID NO: 8734 - protein, 85 aa, Homo sapiens
RLAGPESSVTAAPRARKYKCGLPQPCPEEHLAFRVVSGAANVIGPKICLEDKMLMSSVKDNVGRGLNIALVNGVSGELIEARAFD

SEQ ID NO: 8735 - protein, 85 aa, Homo sapiens
MWAGDVNDLLKFIRPLHEGTLVFVASYDDPATKMNEETRKLFSELGSRNAKELAFRDSWVFVGAKGVQNKSPFEQHVKNSKHSNK

SEQ ID NO: 8736 - protein, 85 aa, Homo sapiens
IGPKICLEDKMLMSSVKDNVGRGLNIALVNGVSGELIEARAFDMWAGDVNDLLKFIRPLHEGTLVFVASYDDPATKMNEETRKLF

SEQ ID NO: 8737 - protein, 85 aa, Homo sapiens
HHHPGIPGVAHSVISTRTPPPPSPLPFPTQAILPPAPSSYFSHPTIRYPPHLNPQDTLKNYVPSYDPSSPQTSQPNGSGQVVGKV

SEQ ID NO: 8738 - protein, 85 aa, Homo sapiens
PGHFTPVLAPSPHPSAVRPVTLSMTDTKPITTSTEAYTASGTSQANRYVGLSPRDPSFLHQQQLRICDWTMNQNGRHLYPSTSED

SEQ ID NO: 8739 - protein, 84 aa, Homo sapiens
SPRDPSFLHQQQLRICDWTMNQNGRHLYPSTSEDTLGITWQSPGTWASLVPFQVSNRTPILPANVQNYGLNIIGEPFLQAETSN

SEQ ID NO: 8740 - protein, 85 aa, Homo sapiens
HPTIRYPPHLNPQDTLKNYVPSYDPSSPQTSQPNGSGQVVGKVPGHFTPVLAPSPHPSAVRPVTLSMTDTKPITTSTEAYTASGT

SEQ ID NO: 8741 - protein, 85 aa, Homo sapiens
SQANRYVGLSPRDPSFLHQQQLRICDWTMNQNGRHLYPSTSEDTLGITWQSPGTWASLVPFQVSNRTPILPANVQNYGLNIIGEP

SEQ ID NO: 8742 - protein, 85 aa, Homo sapiens
KFFQKAALNVRDNVGEEVDAEQLIQEACRSCLEQAKLLFSDGEKVIPRLTHELPGIKRGRQAEEECAHRGSPLPKKRKGRPPGHI

SEQ ID NO: 8743 - protein, 85 aa, Homo sapiens
MSSDRAAAGMVWKPKSCEPIRREGPKWDPARLNESTTFVLGSRANKALGMGGTRGRIYIKHPHLFKAYLLIEEDIRDLAASDDYR

SEQ ID NO: 8744 - protein, 84 aa, Homo sapiens
ALGMGGTRGRIYIKHPHLFKAYLLIEEDIRDLAASDDYRGCLDLKLEELKSFVLPSWMVEKMRKYMETLRTENEHRAVEAPPQT

SEQ ID NO: 8745 - protein, 85 aa, Homo sapiens
EKVIPRLTHELPGIKRGRQAEEECAHRGSPLPKKRKGRPPGHILSSDRAAAGMVWKPKSCEPIRREGPKWDPARLNESTTFVLGS

SEQ ID NO: 8746 - protein, 85 aa, Homo sapiens
RANKALGMGGTRGRIYIKHPHLFKAYLLIEEDIRDLAASDDYRGCLDLKLEELKSFVLPSWMVEKMRKYMETLRTENEHRAVEAP

SEQ ID NO: 8747 - protein, 85 aa, Homo sapiens
FRDNNGVIGLLEPMKKSMVPVQVQLDVPVVKVASGNDHLVMLTADGDLYTLGCGEQGQLGRVPELFANRGGRQGLERLLVPKCVM

SEQ ID NO: 8748 - protein, 85 aa, Homo sapiens
FPRSGPSNDEVKSRGMKFAEEQLLKHGWTQGKGLGRKENGITQALRVTLKQDTHGVGHDPAKEFTNHWWNELFNKTAANLVVETG

SEQ ID NO: 8749 - protein, 85 aa, Homo sapiens
QDGVQIRSLSKETTRYNHPKPNLLYQKFVKMATLTSGGEKPNKDLESCSDDDNQGSKSPKILTDEMLLQACEGRTAHKAARLGIT

SEQ ID NO: 8750 - protein, 85 aa, Homo sapiens
MKAKLARLEAQEQAFLARLKGQDPGAPQLQSESKPPKKKKKKRRQKEEEEATASERNDADEKHPEHAEQNIRKSKKKKRRHQEGK

SEQ ID NO: 8751 - protein, 85 aa, Homo sapiens
VSDEREGTTKGNEKEDAAGTSGLGELNSREQTNQSLRKGKKKKRWHHEEEKMGVLEEGGKGKEAAGSVRTEEVESRAYADPCSRR

SEQ ID NO: 8752 - protein, 85 aa, Homo sapiens
QALRVTLKQDTHGVGHDPAKEFTNHWWNELFNKTAANLVVETGQDGVQIRSLSKETTRYNHPKPNLLYQKFVKMATLTSGGEKPN

SEQ ID NO: 8753 - protein, 85 aa, Homo sapiens
KDLESCSDDDNQGSKSPKILTDEMLLQACEGRTAHKAARLGITMKAKLARLEAQEQAFLARLKGQDPGAPQLQSESKPPKKKKKK

SEQ ID NO: 8754 - protein, 85 aa, Homo sapiens
RRQKEEEEATASERNDADEKHPEHAEQNIRKSKKKKRRHQEGKVSDEREGTTKGNEKEDAAGTSGLGELNSREQTNQSLRKGKKK

SEQ ID NO: 8755 - protein, 42 aa, Homo sapiens
ARWLIWPHSIWMQGFHFLPFSSSWASLRKLWKLWNQCMIQIL

SEQ ID NO: 8756 - protein, 84 aa, Homo sapiens
MLFSQGKMYGYVDTLLTMLAMLLKVAMNRAQVCLISSSKSGERHLYLIKVSRDKISDSNDQESANCDAKGNNFICIMLYKIWLN

SEQ ID NO: 8757 - protein, 10 aa, Homo sapiens
HRMQMLHSRN

SEQ ID NO: 8758 - protein, 85 aa, Homo sapiens
KVYEIQDIYENSWTKLTERFFKNTPWPEAEAIAPQVGNDAVFLILYKELYYRHIYAKVSFQSFSQYRCKTAKKSEEEIDFLRSNP

SEQ ID NO: 8759 - protein, 85 aa, Homo sapiens
KIWNVHSVLNVLHSLVDKSNINRQLEVYTSGGDPESVAGEYGRHSLYKMLGYFSLVGLLRLHSLLGDYYQAIKVLENIELNKKSM

SEQ ID NO: 8760 - protein, 85 aa, Homo sapiens
YSRVPECQVTTYYYVGFAYLMMRRYQDAIRVFANILLYIQRTKSMFQRTTYKYEMINKQNEQMHALLAIALTMYPMRIDESIHLQ

SEQ ID NO: 8761 - protein, 85 aa, Homo sapiens
MREKYGDKMLRMQKGDPQVYEELFSYSCPKFLSPVVPNYDNVHPNYHKEPFLQQLKVFSDEVQQQAQLSTIRSFLKLYTTMPVAK

SEQ ID NO: 8762 - protein, 85 aa, Homo sapiens
MAGFLDLTEQEFRIQLLVFKHKMKNLVWTSGISALDGEFQSASEVDFYIDKDMIHIADTKVARRYGDFFIRQIHKFEELNRTLKK

SEQ ID NO: 8763 - protein, 85 aa, Homo sapiens
MILYKELYYRHIYAKVSFQSFSQYRCKTAKKSEEEIDFLRSNPKIWNVHSVLNVLHSLVDKSNINRQLEVYTSGGDPESVAGEYG

SEQ ID NO: 8764 - protein, 85 aa, Homo sapiens
RHSLYKMLGYFSLVGLLRLHSLLGDYYQAIKVLENIELNKKSMYSRVPECQVTTYYYVGFAYLMMRRYQDAIRVFANILLYIQRT

SEQ ID NO: 8765 - protein, 85 aa, Homo sapiens
KSMFQRTTYKYEMINKQNEQMHALLAIALTMYPMRIDESIHLQLREKYGDKMLRMQKGDPQVYEELFSYSCPKFLSPVVPNYDNV

SEQ ID NO: 8766 - protein, 85 aa, Homo sapiens
HPNYHKEPFLQQLKVFSDEVQQQAQLSTIRSFLKLYTTMPVAKLAGFLDLTEQEFRIQLLVFKHKMKNLVWTSGISALDGEFQSA

SEQ ID NO: 8767 - protein, 85 aa, Homo sapiens
EPGDEDLDCDNDHVSKMSRIFNPHLNKTANGDCRRDPRERSRSPIERAVAPTMSLHGSHLYTSLPSLGLEQPLALTKNSLDASRP

SEQ ID NO: 8768 - protein, 85 aa, Homo sapiens
AGLSPTLTPGERQQNRPSVITCASAGARNCNLSHCPIAHSGCAAPGPASYRRPPSAATTCDPVVEEHFRRSLGKNYKEPEPAPNS

SEQ ID NO: 8769 - protein, 85 aa, Homo sapiens
SPIERAVAPTMSLHGSHLYTSLPSLGLEQPLALTKNSLDASRPAGLSPTLTPGERQQNRPSVITCASAGARNCNLSHCPIAHSGC

SEQ ID NO: 8770 - protein, 85 aa, Homo sapiens
AAPGPASYRRPPSAATTCDPVVEEHFRRSLGKNYKEPEPAPNSVSITGSVDDHFAKALGDTWLQIKAAKDGASSSPESASRRGQP

SEQ ID NO: 8771 - protein, 85 aa, Homo sapiens
YQAEVLGQPIVWITPYAFSHDHPTDVDYRVMATFTEFYTTLLGFVNFRLYQLLNLHYPPKLEGQAQAEAKAGEGTYALDSESCME

SEQ ID NO: 8772 - protein, 85 aa, Homo sapiens
AVEGSTITSRIKNLLRSPSIKLRRSKAGNRREDLSSKVTLEKVLGITVSGGRGLACDPRSGLVAYPAGCVVVLFNPRKHKQHHIL

SEQ ID NO: 8773 - protein, 85 aa, Homo sapiens
NSSRKTITALAFSPDGKYLVTGESGHMPAVRVWDVAEHSQVAELQEHKYGVACVAFSPSAKYIVSVGYQHDMIVNVWAWKKNIVV

SEQ ID NO: 8774 - protein, 85 aa, Homo sapiens
ASNKVSSRVTAVSFSEDCSYFVTAGNRHIKFWYLDDSKTSKVNATVPLLGRSGLLGELRNNLFTDVACGRGKKADSTFCITSSGL

SEQ ID NO: 8775 - protein, 85 aa, Homo sapiens
MCEFSDRRLLDKWVELRNIDSFTTTVAHCISVSQDYIFCGCADGTVRLFNPSNLHFLSTLPRPHALGTDIASVTEASRLFSGVAN

SEQ ID NO: 8776 - protein, 85 aa, Homo sapiens
ARYPDTIALTFDPTNQWLSCVYNDHSIYVWDVRDPKKVGKVYSALYHSSCVWSVEVYPEVKDSNQACLPPSSFITCSSDNTIRLW

SEQ ID NO: 8777 - protein, 85 aa, Homo sapiens
NTESSGVHGSTLHRNILSSDLIKIIYVDGNTQALLDTELPGGDKADASLLDPRVGIRSVCVSPNGQHLASGDRMGTLRVHELQSL

SEQ ID NO: 8778 - protein, 85 aa, Homo sapiens
SEMLKVEAHDSEILCLEYSKPDTGLKLLASASRDRLIHVLDAGREYSLQQTLDEHSSSITAVKFAASDGQVRMISCGADKSIYFR

SEQ ID NO: 8779 - protein, 85 aa, Homo sapiens
TAQKSGDGVQFTRTHHVVRKTTLYDMDVEPSWKYTAIGCQDRNIRIFNISSGKQKKLFKGSQGEDGTLIKVQTDPSGIYIATSCS

SEQ ID NO: 8780 - protein, 85 aa, Homo sapiens
DKNLSIFDFSSGECVATMFGHSEIVTGMKFSNDCKHLISVSGDSCIFVWRLSSEMTISMRQRLAELRQRQRGGKQQGPSSPQRAS

SEQ ID NO: 8781 - protein, 85 aa, Homo sapiens
GPNRHQAPSMLSPGPALSSDSDKEGEDEGTEEELPALPVLAKSTKKALASVPSPALPRSLSHWEMSRAQESVGFLDPAPAANPGP

SEQ ID NO: 8782 - protein, 85 aa, Homo sapiens
RRRGRWVQPGVELSVRSMLDLRQLETLAPSLQDPSQDSLAIIPSGPRKHGQEALETSLTSQNEKPPRPQASQPCSYPHIIRLLSQ

SEQ ID NO: 8783 - protein, 85 aa, Homo sapiens
EEGVFAQDLEPAPIEDGIVYPEPSDNPTMDTSEFQVQAPARGTLGRVYPGSRSSEKHSPDSACSVDYSSSCLSSPEHPTEDSEST

SEQ ID NO: 8784 - protein, 85 aa, Homo sapiens
EPLSVDGISSDLEEPAEGDEEEEEEEGGMGPYGLQEGSPQTPDQEQFLKQHFETLASGAAPGAPVQVPERSESRSISSRFLLQVQ

SEQ ID NO: 8785 - protein, 85 aa, Homo sapiens
TRPLREPSPSSSSLALMSRPAQVPQASGEQPRGNGANPPGAPPEVEPSSGNPSPQQAASVLLPRCRLNPDSSWAPKRVATASPFS

SEQ ID NO: 8786 - protein, 85 aa, Homo sapiens
GLQKAQSVHSLVPQERHEASLQAPSPGALLSREIEAQDGLGSLPPADGRPSRPHSYQNPTTSSMAKISRSISVGENLGLVAEPQA

SEQ ID NO: 8787 - protein, 85 aa, Homo sapiens
HAPIRVSPLSKLALPSRAHLVLDIPKPLPDRPTLAAFSPVTKGRAPGEAEKPGFPVGLGKAHSTTERWACLGEGTTPKPRTECQA

SEQ ID NO: 8788 - protein, 85 aa, Homo sapiens
HPGPSSPCAQQLPVSSLFQGPENLQPPPPEKTPNPMECTKPGAALSQDSEPAVSLEQCEQLVAELRGSVRQAVRLYHSVAGCKMP

SEQ ID NO: 8789 - protein, 84 aa, Homo sapiens
RQAVRLYHSVAGCKMPSAEQSRIAQLLRDTFSSVRQELEAVAGAVLSSPGSSPGAVGAEQTQALLEQYSELLLRAVERRMERKL

SEQ ID NO: 8790 - protein, 85 aa, Homo sapiens
VLGITVSGGRGLACDPRSGLVAYPAGCVVVLFNPRKHKQHHILNSSRKTITALAFSPDGKYLVTGESGHMPAVRVWDVAEHSQVA

SEQ ID NO: 8791 - protein, 85 aa, Homo sapiens
ELQEHKYGVACVAFSPSAKYIVSVGYQHDMIVNVWAWKKNIVVASNKVSSRVTAVSFSEDCSYFVTAGNRHIKFWYLDDSKTSKV

SEQ ID NO: 8792 - protein, 85 aa, Homo sapiens
NATVPLLGRSGLLGELRNNLFTDVACGRGKKADSTFCITSSGLLCEFSDRRLLDKWVELRNIDSFTTTVAHCISVSQDYIFCGCA

SEQ ID NO: 8793 - protein, 85 aa, Homo sapiens
DGTVRLFNPSNLHFLSTLPRPHALGTDIASVTEASRLFSGVANARYPDTIALTFDPTNQWLSCVYNDHSIYVWDVRDPKKVGKVY

SEQ ID NO: 8794 - protein, 85 aa, Homo sapiens
SALYHSSCVWSVEVYPEVKDSNQACLPPSSFITCSSDNTIRLWNTESSGVHGSTLHRNILSSDLIKIIYVDGNTQALLDTELPGG

SEQ ID NO: 8795 - protein, 85 aa, Homo sapiens
DKADASLLDPRVGIRSVCVSPNGQHLASGDRMGTLRVHELQSLSEMLKVEAHDSEILCLEYSKPDTGLKLLASASRDRLIHVLDA

SEQ ID NO: 8796 - protein, 85 aa, Homo sapiens
GREYSLQQTLDEHSSSITAVKFAASDGQVRMISCGADKSIYFRTAQKSGDGVQFTRTHHVVRKTTLYDMDVEPSWKYTAIGCQDR

SEQ ID NO: 8797 - protein, 85 aa, Homo sapiens
NIRIFNISSGKQKKLFKGSQGEDGTLIKVQTDPSGIYIATSCSDKNLSIFDFSSGECVATMFGHSEIVTGMKFSNDCKHLISVSG

SEQ ID NO: 8798 - protein, 85 aa, Homo sapiens
DSCIFVWRLSSEMTISMRQRLAELRQRQRGGKQQGPSSPQRASGPNRHQAPSMLSPGPALSSDSDKEGEDEGTEEELPALPVLAK

SEQ ID NO: 8799 - protein, 85 aa, Homo sapiens
STKKALASVPSPALPRSLSHWEMSRAQESVGFLDPAPAANPGPRRRGRWVQPGVELSVRSMLDLRQLETLAPSLQDPSQDSLAII

SEQ ID NO: 8800 - protein, 85 aa, Homo sapiens
PSGPRKHGQEALETSLTSQNEKPPRPQASQPCSYPHIIRLLSQEEGVFAQDLEPAPIEDGIVYPEPSDNPTMDTSEFQVQAPARG

SEQ ID NO: 8801 - protein, 85 aa, Homo sapiens
TLGRVYPGSRSSEKHSPDSACSVDYSSSCLSSPEHPTEDSESTEPLSVDGISSDLEEPAEGDEEEEEEEGGMGPYGLQEGSPQTP

SEQ ID NO: 8802 - protein, 85 aa, Homo sapiens
DQEQFLKQHFETLASGAAPGAPVQVPERSESRSISSRFLLQVQTRPLREPSPSSSSLALMSRPAQVPQASGEQPRGNGANPPGAP

SEQ ID NO: 8803 - protein, 85 aa, Homo sapiens
PEVEPSSGNPSPQQAASVLLPRCRLNPDSSWAPKRVATASPFSGLQKAQSVHSLVPQERHEASLQAPSPGALLSREIEAQDGLGS

SEQ ID NO: 8804 - protein, 85 aa, Homo sapiens
MPPADGRPSRPHSYQNPTTSSMAKISRSISVGENLGLVAEPQAHAPIRVSPLSKLALPSRAHLVLDIPKPLPDRPTLAAFSPVTK

SEQ ID NO: 8805 - protein, 85 aa, Homo sapiens
GRAPGEAEKPGFPVGLGKAHSTTERWACLGEGTTPKPRTECQAHPGPSSPCAQQLPVSSLFQGPENLQPPPPEKTPNPMECTKPG

SEQ ID NO: 8806 - protein, 85 aa, Homo sapiens
AALSQDSEPAVSLEQCEQLVAELRGSVRQAVRLYHSVAGCKMPSAEQSRIAQLLRDTFSSVRQELEAVAGAVLSSPGSSPGAVGA

SEQ ID NO: 8807 - protein, 85 aa, Homo sapiens
EDVNIAAELYISNKQYDKALEIITDFSGIVLEKKTSEEGTSEENKAPENVTCTIPDGVPIDITVKLMVCLVHLNILEPLNPLLTT

SEQ ID NO: 8808 - protein, 84 aa, Homo sapiens
MVCLVHLNILEPLNPLLTTLVEQNPEDMGDLYLDVAEAFLDVGEYNSALPLLSALVCSERYNLAVVWLRHAGNTFLWEEEVLII

SEQ ID NO: 8809 - protein, 85 aa, Homo sapiens
ENKAPENVTCTIPDGVPIDITVKLMVCLVHLNILEPLNPLLTTLVEQNPEDMGDLYLDVAEAFLDVGEYNSALPLLSALVCSERY

SEQ ID NO: 8810 - protein, 85 aa, Homo sapiens
AAVGFEEFSAPPGSELALPPLFGGHILESELETEVEFVSGGLGGSGLRERDEEEEAARGRRRRQRELNRRKYQALGRRCREIEQV

SEQ ID NO: 8811 - protein, 85 aa, Homo sapiens
NERVLNRLHQVQRITRRLQQERRFLMRVLDSYGDDYRASQFTIVLEDEGSQGTDAPTPGNAENEPPEKETLSPPRRTPAPPEPGS

SEQ ID NO: 8812 - protein, 85 aa, Homo sapiens
GGSGLRERDEEEEAARGRRRRQRELNRRKYQALGRRCREIEQVNERVLNRLHQVQRITRRLQQERRFLMRVLDSYGDDYRASQFT

SEQ ID NO: 8813 - protein, 85 aa, Homo sapiens
IVLEDEGSQGTDAPTPGNAENEPPEKETLSPPRRTPAPPEPGSPAPGEGPSGRKRRRVPRDGRRAGNALTPELAPVQIKVEEDFG

SEQ ID NO: 8814 - protein, 85 aa, Homo sapiens
KNLVWTSGISALDGEFQSASEVDFYIDKDMIHIADTKVARRYGDFFIRQIHKFEEMESCAVTHAGVQRRDLSSLQPLPPGFKRVS

SEQ ID NO: 8815 - protein, 84 aa, Homo sapiens
QSASEVDFYIDKDMIHIADTKVARRYGDFFIRQIHKFEEMESCAVTHAGVQRRDLSSLQPLPPGFKRVSLLSLPHSWNYSLIEP

SEQ ID NO: 8816 - protein, 85 aa, Homo sapiens
MKALELLTNCYIMVQGNTVSAIGPFSGLKEVRKVVLDTMKNIHPIYNIKIDKELASGEYFLKANQKKRQKMEAIKAKQAEAISKR

SEQ ID NO: 8817 - protein, 85 aa, Homo sapiens
HPIYNIKIDKELASGEYFLKANQKKRQKMEAIKAKQAEAISKRQEERNKAFIPPKEKPIVKPKEASTETKIDVASIKEKVKKAKN

SEQ ID NO: 8818 - protein, 85 aa, Homo sapiens
TADKLVFFVNGRKVVEKNADPETTLLAYLRRKLGLSGTKLGCGEGGCGACTVMLSKYDRLQNKIVHFSANACLAPICSLHHVAVT

SEQ ID NO: 8819 - protein, 85 aa, Homo sapiens
TVEGIGSTKTRLHPVQERIAKSHGSQCGFCTPGIVMSMYTLLRNQPEPTMEEIENAFQGNLCRCTGYRPILQGFRTFARDGGCCG

SEQ ID NO: 8820 - protein, 85 aa, Homo sapiens
GDGNNPNCCMNQKKDHSVSLSPSLFKPEEFTPLDPTQEPIFPPELLRLKDTPRKQLRFEGERVTWIQASTLKELLDLKAQHPDAK

SEQ ID NO: 8821 - protein, 85 aa, Homo sapiens
MVVGNTEIGIEMKFKNMLFPMIVCPAWIPELNSVEHGPDGISFGAACPLSIVEKTLVDAVAKLPAQKTEVFRGVLEQLRWFAGKQ

SEQ ID NO: 8822 - protein, 85 aa, Homo sapiens
VKSVASVGGNIITASPISDLNPVFMASGAKLTLVSRGTRRTVQMDHTFFPGYRKTLLSPEEILLSIEIPYSREGEYFSAFKQASR

SEQ ID NO: 8823 - protein, 85 aa, Homo sapiens
REDDIAKVTSGMRVLFKPGTTEVQELALCYGGMANRTISALKTTQRQLSKLWKEELLQDVCAGLAEELHLPPDAPGGMVDFRCTL

SEQ ID NO: 8824 - protein, 85 aa, Homo sapiens
TLSFFFKFYLTVLQKLGQENLEDKCGKLDPTFASATLLFQKDPPADVQLFQEVPKGQSEEDMVGRPLPHLAADMQASGEAVYCDD

SEQ ID NO: 8825 - protein, 85 aa, Homo sapiens
IPRYENELSLRLVTSTRAHAKIKSIDTSEAKKVPGFVCFISADDVPGSNITGICNDETVFAKDKVTCVGHIIGAVVADTPEHTQR

SEQ ID NO: 8826 - protein, 85 aa, Homo sapiens
AAQGVKITYEELPAIITIEDAIKNNSFYGPELKIEKGDLKKGFSEADNVVSGEIYIGGQEHFYLETHCTIAVPKGEAGEMELFVS

SEQ ID NO: 8827 - protein, 85 aa, Homo sapiens
TQNTMKTQSFVAKMLGVPANRIVVRVKRMGGGFGGKETRSTVVSTAVALAAYKTGRPVRCMLDRDEDMLITGGRHPFLARYKVGF

SEQ ID NO: 8828 - protein, 85 aa, Homo sapiens
MKTGTVVALEVDHFSNVGNTQDLSQSIMERALFHMDNCYKIPNIRGTGRLCKTNLPSNTAFRGFGGPQGMLIAECWMSEVAVTCG

SEQ ID NO: 8829 - protein, 85 aa, Homo sapiens
MPAEEVRRKNLYKEGDLTHFNQKLEGFTLPRCWEECLASSQYHARKSEVDKFNKENCWKKRGLCIIPTKFGISFTVPFLNQAGAL

SEQ ID NO: 8830 - protein, 85 aa, Homo sapiens
LHVYTDGSVLLTHGGTEMGQGLHTKMVQVASRALKIPTSKIYISETSTNTVPNTSPTAASVSADLNGQAVYAACQTILKRLEPYK

SEQ ID NO: 8831 - protein, 85 aa, Homo sapiens
KKNPSGSWEDWVTAAYMDTVSLSATGFYRTPNLGYSFETNSGNPFHYFSYGVACSEVEIDCLTGDHKNLRTDIVMDVGSSLNPAI

SEQ ID NO: 8832 - protein, 85 aa, Homo sapiens
DIGQVEGAFVQGLGLFTLEELHYSPEGSLHTRGPSTYKIPAFGSIPIEFRVSLLRDCPNKKAIYASKAVGEPPLFLAASIFFAIK

SEQ ID NO: 8833 - protein, 84 aa, Homo sapiens
NKKAIYASKAVGEPPLFLAASIFFAIKDAIRAARAQHTGNNVKELFRLDSPATPEKIRNACVDKFTTLCVTGVPENCKPWSVRV

SEQ ID NO: 8834 - protein, 85 aa, Homo sapiens
GEGGCGACTVMLSKYDRLQNKIVHFSANACLAPICSLHHVAVTTVEGIGSTKTRLHPVQERIAKSHGSQCGFCTPGIVMSMYTLL

SEQ ID NO: 8835 - protein, 85 aa, Homo sapiens
RNQPEPTMEEIENAFQGNLCRCTGYRPILQGFRTFARDGGCCGGDGNNPNCCMNQKKDHSVSLSPSLFKPEEFTPLDPTQEPIFP

SEQ ID NO: 8836 - protein, 85 aa, Homo sapiens
PELLRLKDTPRKQLRFEGERVTWIQASTLKELLDLKAQHPDAKLVVGNTEIGIEMKFKNMLFPMIVCPAWIPELNSVEHGPDGIS

SEQ ID NO: 8837 - protein, 85 aa, Homo sapiens
FGAACPLSIVEKTLVDAVAKLPAQKTEVFRGVLEQLRWFAGKQVKSVASVGGNIITASPISDLNPVFMASGAKLTLVSRGTRRTV

SEQ ID NO: 8838 - protein, 85 aa, Homo sapiens
QMDHTFFPGYRKTLLSPEEILLSIEIPYSREGEYFSAFKQASRREDDIAKVTSGMRVLFKPGTTEVQELALCYGGMANRTISALK

SEQ ID NO: 8839 - protein, 85 aa, Homo sapiens
TTQRQLSKLWKEELLQDVCAGLAEELHLPPDAPGGMVDFRCTLTLSFFFKFYLTVLQKLGQENLEDKCGKLDPTFASATLLFQKD

SEQ ID NO: 8840 - protein, 85 aa, Homo sapiens
PPADVQLFQEVPKGQSEEDMVGRPLPHLAADMQASGEAVYCDDIPRYENELSLRLVTSTRAHAKIKSIDTSEAKKVPGFVCFISA

SEQ ID NO: 8841 - protein, 85 aa, Homo sapiens
DDVPGSNITGICNDETVFAKDKVTCVGHIIGAVVADTPEHTQRAAQGVKITYEELPAIITIEDAIKNNSFYGPELKIEKGDLKKG

SEQ ID NO: 8842 - protein, 85 aa, Homo sapiens
FSEADNVVSGEIYIGGQEHFYLETHCTIAVPKGEAGEMELFVSTQNTMKTQSFVAKMLGVPANRIVVRVKRMGGGFGGKETRSTV

SEQ ID NO: 8843 - protein, 85 aa, Homo sapiens
VSTAVALAAYKTGRPVRCMLDRDEDMLITGGRHPFLARYKVGFMKTGTVVALEVDHFSNVGNTQDLSQSIMERALFHMDNCYKIP

SEQ ID NO: 8844 - protein, 85 aa, Homo sapiens
NIRGTGRLCKTNLPSNTAFRGFGGPQGMLIAECWMSEVAVTCGMPAEEVRRKNLYKEGDLTHFNQKLEGFTLPRCWEECLASSQY

SEQ ID NO: 8845 - protein, 85 aa, Homo sapiens
HARKSEVDKFNKENCWKKRGLCIIPTKFGISFTVPFLNQAGALLHVYTDGSVLLTHGGTEMGQGLHTKMVQVASRALKIPTSKIY

SEQ ID NO: 8846 - protein, 85 aa, Homo sapiens
ISETSTNTVPNTSPTAASVSADLNGQAVYAACQTILKRLEPYKKKNPSGSWEDWVTAAYMDTVSLSATGFYRTPNLGYSFETNSG

SEQ ID NO: 8847 - protein, 85 aa, Homo sapiens
NPFHYFSYGVACSEVEIDCLTGDHKNLRTDIVMDVGSSLNPAIDIGQVEGAFVQGLGLFTLEELHYSPEGSLHTRGPSTYKIPAF

SEQ ID NO: 8848 - protein, 85 aa, Homo sapiens
GSIPIEFRVSLLRDCPNKKAIYASKAVGEPPLFLAASIFFAIKDAIRAARAQHTGNNVKELFRLDSPATPEKIRNACVDKFTTLC

SEQ ID NO: 8849 - protein, 85 aa, Homo sapiens
ASVSSATFSGHGARSLLQFLRLVGQLKRVPRTGWVYRNVQRPESVSDHMYRMAVMAMVIKDDRLNKDRCVRLALVHDMAECIVGD

SEQ ID NO: 8850 - protein, 85 aa, Homo sapiens
IAPADNIPKEEKHRREEEAMKQITQLLPEDLRKELYELWEEYETQSSAEAKFVKQLDQCEMILQASEYEDLEHKPGRLQDFYDST

SEQ ID NO: 8851 - protein, 84 aa, Homo sapiens
LYELWEEYETQSSAEAKFVKQLDQCEMILQASEYEDLEHKPGRLQDFYDSTAGKFNHPEIVQLVSELEAERSTNIAAAASEPHS

SEQ ID NO: 8852 - protein, 85 aa, Homo sapiens
ESVSDHMYRMAVMAMVIKDDRLNKDRCVRLALVHDMAECIVGDIAPADNIPKEEKHRREEEAMKQITQLLPEDLRKELYELWEEY

SEQ ID NO: 8853 - protein, 85 aa, Homo sapiens
KAKATELRVCCARRKREAREFKPPQMRGSTRLNISDDLKIGFFSTDHATQTDSSEILSVKELSSSTQKLAQMMKSLQVDFGFLKQ

SEQ ID NO: 8854 - protein, 85 aa, Homo sapiens
MLQLKFEDRLKEESLSLFTILHDRILEIEKHYQQNEDKMRKSFNQQLADAIAVIKGMYQQFFEVEEENVSLQDASTVKTNILLRK

SEQ ID NO: 8855 - protein, 85 aa, Homo sapiens
MKEKEEVIKELKEELDQYKDFGFHKMESFAKETSSPKSNLEKENLEYKVENERLLQIISELEEEIQINLKENSGLEDELISMKEM

SEQ ID NO: 8856 - protein, 85 aa, Homo sapiens
AEKDHKTIQKLMDSRDRLREELHYEKSLVQDVINKQKEDKEMRKKYGSLSVKVARSAKGREASLSPWPKSPPSTTALRPHSATMS

SEQ ID NO: 8857 - protein, 84 aa, Homo sapiens
TMSVSSAGAQKAKMPKKALKEDQAVVEDKHGLESQIEALKANLENEKKKVERFRKEADRLNKSWEKRFFILRNRYESKTLISAV

SEQ ID NO: 8858 - protein, 85 aa, Homo sapiens
FSTDHATQTDSSEILSVKELSSSTQKLAQMMKSLQVDFGFLKQLLQLKFEDRLKEESLSLFTILHDRILEIEKHYQQNEDKMRKS

SEQ ID NO: 8859 - protein, 85 aa, Homo sapiens
FNQQLADAIAVIKGMYQQFFEVEEENVSLQDASTVKTNILLRKLKEKEEVIKELKEELDQYKDFGFHKMESFAKETSSPKSNLEK

SEQ ID NO: 8860 - protein, 85 aa, Homo sapiens
ENLEYKVENERLLQIISELEEEIQINLKENSGLEDELISMKEMAEKDHKTIQKLMDSRDRLREELHYEKSLVQDVINKQKEDKEM

SEQ ID NO: 8861 - protein, 85 aa, Homo sapiens
RKKYGSLSVKVARSAKGREASLSPWPKSPPSTTALRPHSATMSVSSAGAQKAKMPKKALKEDQAVVEDKHGLESQIEALKANLEN

SEQ ID NO: 8862 - protein, 85 aa, Homo sapiens
LQKPKSVKLRALRSPRKFGVAGRSCQEVLRKGCLRFQLPERGSRLCLYEDGTELTEDYFPSVPDNAELVLLTLGQAWQGYVSDIR

SEQ ID NO: 8863 - protein, 85 aa, Homo sapiens
RFLSAFHEPQVGLIQAAQQLLCDEQAPQRQRLLADLLHNVSQNIAAETRAEDPPWFEGLESRFQSKSGYLRYSCESRIRSYLREV

SEQ ID NO: 8864 - protein, 85 aa, Homo sapiens
SSYPSTVGAEAQEEFLRVLGSMCQRLRSMQYNGSYFDRGAKGGSRLCTPEGWFSCQGPFDMDSCLSRHSINPYSNRESRILFSTW

SEQ ID NO: 8865 - protein, 85 aa, Homo sapiens
SRLCLYEDGTELTEDYFPSVPDNAELVLLTLGQAWQGYVSDIRRFLSAFHEPQVGLIQAAQQLLCDEQAPQRQRLLADLLHNVSQ

SEQ ID NO: 8866 - protein, 85 aa, Homo sapiens
NIAAETRAEDPPWFEGLESRFQSKSGYLRYSCESRIRSYLREVSSYPSTVGAEAQEEFLRVLGSMCQRLRSMQYNGSYFDRGAKG

SEQ ID NO: 8867 - protein, 85 aa, Homo sapiens
GSRLCTPEGWFSCQGPFDMDSCLSRHSINPYSNRESRILFSTWNLDHIIEKKRTIIPTLVEAIKEQDGREVDWEYFYGLLFTSEN

SEQ ID NO: 8868 - protein, 84 aa, Homo sapiens
PQTSQPNGSGQVVGKVPGHFTPVLAPSPHPSAVRPVTLSMTDTKPITTSTEAYTASGTSQANRYVGLSPRDPSFLHQQQSWYLG

SEQ ID NO: 8869 - protein, 85 aa, Homo sapiens
SARGEGAGQPSTSAQGQPAAPAPQKRGRGRPRKQQQEPTGEPSPKRPRGRPKGSKNKSPSKAAQKKAEATGEKRPRGRPRKWPQQ

SEQ ID NO: 8870 - protein, 84 aa, Homo sapiens
KRGRGRPRKQQQEPTGEPSPKRPRGRPKGSKNKSPSKAAQKKAEATGEKRPRGRPRKWPQQVVQKKPAQEETEETSSQESAEED

SEQ ID NO: 8871 - protein, 85 aa, Homo sapiens
GAPGETPGVLVKVVEVYFCERCEQSFAEPTLLALHQCSETHIQPVQGLSSPPCSVELPPSNPTLPGPLQGQSPPVSPLSCPVCRQ

SEQ ID NO: 8872 - protein, 85 aa, Homo sapiens
EFAQPQALKSHFKIHRGTPDTFSCPESGCVFSAEDRKGLQHHLRQTHRAVPVPCSFRGCPLLFGSQQGMELHRQAHYPFHCSHCS

SEQ ID NO: 8873 - protein, 85 aa, Homo sapiens
FIGSNVKLFRQHQRSHGAGTQGELSAVQGLPSQELLPAPKLPPGEREPSQEAGTPLPGQETAEEENVEKEEKSDTQKDSQKAVDK

SEQ ID NO: 8874 - protein, 85 aa, Homo sapiens
GQGAQRLEGDVVSGTESLFKTHMCPECKRCFKKRTHLVEHLHLHFPDPSLQCPNCQKFFTSKSKLKTHLLRELGEKAHHCPLCHY

SEQ ID NO: 8875 - protein, 85 aa, Homo sapiens
SAVERNALNRHMASMHEDISNFYSDTYACPVCREEFRLSQALKEHLKSHTAAAAAEPLPLRCFQEGCSYAAPDRKAFIKHLKETH

SEQ ID NO: 8876 - protein, 85 aa, Homo sapiens
GVRAVECRHHSCPMLFATAEAMEAHHKSHYAFHCPHCDFACSNKHLFRKHKKQGHPGSEELRCTFCPFATFNPVAYQDHVGKMHA

SEQ ID NO: 8877 - protein, 85 aa, Homo sapiens
HEKIHQCPECNFATAHKRVLIRHMLLHTGEKPHKCELCDFTCRDVSYLSKHMLTHSNTKDYMCTECGYVTKWKHYLRVHMRKHAG

SEQ ID NO: 8878 - protein, 85 aa, Homo sapiens
DLRYQCNQCSYRCHRADQLSSHKLRHQGKSLMCEVCAFACKRKYELQKHMASQHHPGTPAPLYPCHYCSYQSRHKQAVLSHENCK

SEQ ID NO: 8879 - protein, 85 aa, Homo sapiens
HTRLREFHCALCDYRTFSNTTLLFHKRKAHGYVPGDQAWQLRYASQEPEGAMQGPTPPPDSEPSNQLSARPEGPGHEPGTVVDPS

SEQ ID NO: 8880 - protein, 85 aa, Homo sapiens
MDQALPEMSEEVNTGRQEGSEAPHGGDLGGSPSPAEVEEGSCTLHLEALGVELESVTEPPLEEVTETAPMEFRPLGLEGPDGLEG

SEQ ID NO: 8881 - protein, 85 aa, Homo sapiens
PELSSFEGIGTSDLSAEENPLLEKPVSEPSTNPPSLEEAPNNWVGTFKTTPPAETAPLPPLPESESLLKALRRQDKEQAEALVLE

SEQ ID NO: 8882 - protein, 85 aa, Homo sapiens
GRVQMVVIQGEGRAFRCPHCPFITRREKALNLHSRTGCQGRREPLLCPECGASFKQQRGLSTHLLKKCPVLLRKNKGLPRPDSPI

SEQ ID NO: 8883 - protein, 85 aa, Homo sapiens
PLQPVLPGTQASEDTESGKPPPASQEAELLLPKDAPLELPREPEETEEPLATVSGSPVPPAGNSLPTEAPKKHCFDPVPPAGNSS

SEQ ID NO: 8884 - protein, 85 aa, Homo sapiens
PTEAPKKHHLDPVPPAGNSSPTEALKKHRFEQGKFHCNSCPFLCSRLSSITSHVAEGCRGGRGGGGKRGTPQTQPDVSPLSNGDS

SEQ ID NO: 8885 - protein, 85 aa, Homo sapiens
APPKNGSTESSSGDGDTVLVQKQKGARFSCPTCPFSCQQERALRTHQIRGCPLEESGELHCSLCPFTAPAATALRLHQKRRHPTA

SEQ ID NO: 8886 - protein, 85 aa, Homo sapiens
APARGPRPHLQCGDCGFTCKQSRCMQQHRRLKHEGVKPHQCPFCDFSTTRRYRLEAHQSRHTGIGRIPCSSCPQTFGTNSKLRLH

SEQ ID NO: 8887 - protein, 85 aa, Homo sapiens
RLRVHDKTPTHFCPLCDYSGYLRHDITRHVNSCHQGTPAFACSQCEAQFSSETALKQHALRRHPEPAQPAPGSPAETTEGPLHCS

SEQ ID NO: 8888 - protein, 85 aa, Homo sapiens
RCGLLCPSPASLRGHTRKQHPRLECGACQEAFPSRLALDEHRRQQHFSHRCQLCDFAARERVGLVKHYLEQHEETSAAVAASDGD

SEQ ID NO: 8889 - protein, 85 aa, Homo sapiens
GDAGQPPLHCPFCDFTCRHQLVLDHHVKGHGGTRLYKCTDCAYSTKNRQKITWHSRIHTGEKPYHCHLCPYACADPSRLKYHMRI

SEQ ID NO: 8890 - protein, 85 aa, Homo sapiens
HKEERKYLCPECGYKCKWVNQLKYHMTKHTGLKPYQCPECEYCTNRADALRVHQETRHREARAFMCEQCGKAFKTRFLLRTHLRK

SEQ ID NO: 8891 - protein, 85 aa, Homo sapiens
HSEAKPYVCNVCHRAFRWAAGLRHHALTHTDRHPFFCRLCNYKAKQKFQVVKHVRRHHPDQADPNQGVGKDPTTPTVHLHDVQLE

SEQ ID NO: 8892 - protein, 84 aa, Homo sapiens
WAAGLRHHALTHTDRHPFFCRLCNYKAKQKFQVVKHVRRHHPDQADPNQGVGKDPTTPTVHLHDVQLEDPSPPAPAAPHTGPEG

SEQ ID NO: 8893 - protein, 85 aa, Homo sapiens
CPSRDPAPIPTEPGCLLVEATATEEGPGNMEIIVETVAGTLTPGAPGETPGVLVKVVEVYFCERCEQSFAEPTLLALHQCSETHI

SEQ ID NO: 8894 - protein, 85 aa, Homo sapiens
QPVQGLSSPPCSVELPPSNPTLPGPLQGQSPPVSPLSCPVCRQEFAQPQALKSHFKIHRGTPDTFSCPESGCVFSAEDRKGLQHH

SEQ ID NO: 8895 - protein, 85 aa, Homo sapiens
MRQTHRAVPVPCSFRGCPLLFGSQQGMELHRQAHYPFHCSHCSFIGSNVKLFRQHQRSHGAGTQGELSAVQGLPSQELLPAPKLP

SEQ ID NO: 8896 - protein, 85 aa, Homo sapiens
PGEREPSQEAGTPLPGQETAEEENVEKEEKSDTQKDSQKAVDKGQGAQRLEGDVVSGTESLFKTHMCPECKRCFKKRTHLVEHLH

SEQ ID NO: 8897 - protein, 85 aa, Homo sapiens
LHFPDPSLQCPNCQKFFTSKSKLKTHLLRELGEKAHHCPLCHYSAVERNALNRHMASMHEDISNFYSDTYACPVCREEFRLSQAL

SEQ ID NO: 8898 - protein, 85 aa, Homo sapiens
KEHLKSHTAAAAAEPLPLRCFQEGCSYAAPDRKAFIKHLKETHGVRAVECRHHSCPMLFATAEAMEAHHKSHYAFHCPHCDFACS

SEQ ID NO: 8899 - protein, 85 aa, Homo sapiens
NKHLFRKHKKQGHPGSEELRCTFCPFATFNPVAYQDHVGKMHAHEKIHQCPECNFATAHKRVLIRHMLLHTGEKPHKCELCDFTC

SEQ ID NO: 8900 - protein, 85 aa, Homo sapiens
RDVSYLSKHMLTHSNTKDYMCTECGYVTKWKHYLRVHMRKHAGDLRYQCNQCSYRCHRADQLSSHKLRHQGKSLMCEVCAFACKR

SEQ ID NO: 8901 - protein, 85 aa, Homo sapiens
KYELQKHMASQHHPGTPAPLYPCHYCSYQSRHKQAVLSHENCKHTRLREFHCALCDYRTFSNTTLLFHKRKAHGYVPGDQAWQLR

SEQ ID NO: 8902 - protein, 85 aa, Homo sapiens
YASQEPEGAMQGPTPPPDSEPSNQLSARPEGPGHEPGTVVDPSLDQALPEMSEEVNTGRQEGSEAPHGGDLGGSPSPAEVEEGSC

SEQ ID NO: 8903 - protein, 85 aa, Homo sapiens
TLHLEALGVELESVTEPPLEEVTETAPMEFRPLGLEGPDGLEGPELSSFEGIGTSDLSAEENPLLEKPVSEPSTNPPSLEEAPNN

SEQ ID NO: 8904 - protein, 85 aa, Homo sapiens
WVGTFKTTPPAETAPLPPLPESESLLKALRRQDKEQAEALVLEGRVQMVVIQGEGRAFRCPHCPFITRREKALNLHSRTGCQGRR

SEQ ID NO: 8905 - protein, 85 aa, Homo sapiens
EPLLCPECGASFKQQRGLSTHLLKKCPVLLRKNKGLPRPDSPIPLQPVLPGTQASEDTESGKPPPASQEAELLLPKDAPLELPRE

SEQ ID NO: 8906 - protein, 85 aa, Homo sapiens
PEETEEPLATVSGSPVPPAGNSLPTEAPKKHCFDPVPPAGNSSPTEAPKKHHLDPVPPAGNSSPTEALKKHRFEQGKFHCNSCPF

SEQ ID NO: 8907 - protein, 85 aa, Homo sapiens
LCSRLSSITSHVAEGCRGGRGGGGKRGTPQTQPDVSPLSNGDSAPPKNGSTESSSGDGDTVLVQKQKGARFSCPTCPFSCQQERA

SEQ ID NO: 8908 - protein, 85 aa, Homo sapiens
MRTHQIRGCPLEESGELHCSLCPFTAPAATALRLHQKRRHPTAAPARGPRPHLQCGDCGFTCKQSRCMQQHRRLKHEGVKPHQCP

SEQ ID NO: 8909 - protein, 85 aa, Homo sapiens
FCDFSTTRRYRLEAHQSRHTGIGRIPCSSCPQTFGTNSKLRLHRLRVHDKTPTHFCPLCDYSGYLRHDITRHVNSCHQGTPAFAC

SEQ ID NO: 8910 - protein, 85 aa, Homo sapiens
SQCEAQFSSETALKQHALRRHPEPAQPAPGSPAETTEGPLHCSRCGLLCPSPASLRGHTRKQHPRLECGACQEAFPSRLALDEHR

SEQ ID NO: 8911 - protein, 85 aa, Homo sapiens
RQQHFSHRCQLCDFAARERVGLVKHYLEQHEETSAAVAASDGDGDAGQPPLHCPFCDFTCRHQLVLDHHVKGHGGTRLYKCTDCA

SEQ ID NO: 8912 - protein, 85 aa, Homo sapiens
YSTKNRQKITWHSRIHTGEKPYHCHLCPYACADPSRLKYHMRIHKEERKYLCPECGYKCKWVNQLKYHMTKHTGLKPYQCPECEY

SEQ ID NO: 8913 - protein, 85 aa, Homo sapiens
CTNRADALRVHQETRHREARAFMCEQCGKAFKTRFLLRTHLRKHSEAKPYVCNVCHRAFRWAAGLRHHALTHTDRHPFFCRLCNY

SEQ ID NO: 8914 - protein, 85 aa, Homo sapiens
GSKKKPKIIQQNKKETSPQVKGEEMPAGKDQEASRGSVPSGSKMDRRAPVPRTKASGTEHNKKGTKERTNGDIVPERGDIEHKKR

SEQ ID NO: 8915 - protein, 85 aa, Homo sapiens
KAKEAAPAPPTEEDIWFDDVDPADIEAAIGPEAAKIARKQLGQSEGSVSLSLVKEQAFGGLTRALALDCEMVGVGPKGEESMAAR

SEQ ID NO: 8916 - protein, 85 aa, Homo sapiens
DVDPADIEAAIGPEAAKIARKQLGQSEGSVSLSLVKEQAFGGLTRALALDCEMVGVGPKGEESMAARVSIVNQYGKCVYDKYVKP

SEQ ID NO: 8917 - protein, 85 aa, Homo sapiens
KMDRRAPVPRTKASGTEHNKKGTKERTNGDIVPERGDIEHKKRKAKEAAPAPPTEEDIWFDDVDPADIEAAIGPEAAKIARKQLG

SEQ ID NO: 8918 - protein, 84 aa, Homo sapiens
TINWETIARLVPGLTPKECAKRFDELKSSGSSPVDNQYNSLMAAGESPVETLATYIKSSLLDIHGEFQETPVGHDAVSKTGQTW

SEQ ID NO: 8919 - protein, 85 aa, Homo sapiens
RRQPQNGDLKKQLHERQPRIAALSDKQALGTITAVPVTGPQVSSLQRLAGQGAAVLPQVRPKTLIPDSLPVAPGRDRPPKQPPTF

SEQ ID NO: 8920 - protein, 85 aa, Homo sapiens
QKATVVSVKNPSPALPTANNTVSHVPAPGSQPQALAEPAALASPLSSAGVAYAIISTSPSNAAAMAPSTAVSVVSDSIKVQPLLI

SEQ ID NO: 8921 - protein, 85 aa, Homo sapiens
SADNKVIIIQPQVQTQPESTAESRPPTEEPSQGAQATKKKKEDRPPTQENPEKIAFMVALGLVTTEHLEEIQSKRQERKRRSTAN

SEQ ID NO: 8922 - protein, 85 aa, Homo sapiens
PAYSGLLETERKRLASNYLNNPLFLTARANEDPCWKNEITHDEHCAACKRGANLQPCGTCPGAYHLSCLEPPLKTAPKGVWVCPR

SEQ ID NO: 8923 - protein, 85 aa, Homo sapiens
CQQKALKKDEGVPWTGMLAIVHSYVTHKTVKEEEKQKLLQRGSELQNEHQQLEERDRRLASAVQKCLELKTSLLARQRGTQSSLD

SEQ ID NO: 8924 - protein, 85 aa, Homo sapiens
SSLQRLAGQGAAVLPQVRPKTLIPDSLPVAPGRDRPPKQPPTFQKATVVSVKNPSPALPTANNTVSHVPAPGSQPQALAEPAALA

SEQ ID NO: 8925 - protein, 85 aa, Homo sapiens
SPLSSAGVAYAIISTSPSNAAAMAPSTAVSVVSDSIKVQPLLISADNKVIIIQPQVQTQPESTAESRPPTEEPSQGAQATKKKKE

SEQ ID NO: 8926 - protein, 85 aa, Homo sapiens
DRPPTQENPEKIAFMVALGLVTTEHLEEIQSKRQERKRRSTANPAYSGLLETERKRLASNYLNNPLFLTARANEDPCWKNEITHD

SEQ ID NO: 8927 - protein, 85 aa, Homo sapiens
EHCAACKRGANLQPCGTCPGAYHLSCLEPPLKTAPKGVWVCPRCQQKALKKDEGVPWTGMLAIVHSYVTHKTVKEEEKQKLLQRG

SEQ ID NO: 8928 - protein, 85 aa, Homo sapiens
SELQNEHQQLEERDRRLASAVQKCLELKTSLLARQRGTQSSLDRLRALLRLIQGEQLLQVTMTTTSPAPLLAGPWTKPSVAATHP

SEQ ID NO: 8929 - protein, 85 aa, Homo sapiens
NKTANGDCRRDPRERSRSPIERAVAPTMSLHGSHLYTSLPSLGLEQPLALTKNSLDASRPAGLSPTLTPGERQQNRPSVITCASA

SEQ ID NO: 8930 - protein, 85 aa, Homo sapiens
GARNCNLSHCPIAHSGCAAPGPASYRRPPSAATTCDPVVEEHFRRSLGKNYKEPEPAPNSVSITGSVDDHFAKALGDTWLQIKAA

SEQ ID NO: 8931 - protein, 85 aa, Homo sapiens
GLEQPLALTKNSLDASRPAGLSPTLTPGERQQNRPSVITCASAGARNCNLSHCPIAHSGCAAPGPASYRRPPSAATTCDPVVEEH

SEQ ID NO: 8932 - protein, 14 aa, Homo sapiens
RAQRGSWFLRTLGT

SEQ ID NO: 8933 - protein, 84 aa, Homo sapiens
AVLQPSINEEIQTVFNKYMKFFQKAALNVRDNVGEEVDAEQLIQEACRSCLEQVRGGSSYHGPIWYHGDEHPAASLPLWCGQEA

SEQ ID NO: 8934 - protein, 22 aa, Homo sapiens
ISSELSCSPASTRRSRLSSTST

SEQ ID NO: 8935 - protein, 85 aa, Homo sapiens
NTGRLTSPSAIPAITIGRLGYVCPQEVAPMLQQFIRPWCTSLRNIRDNEEKDSAFRGICMMIGVNPGGVVQDFIFFCDAVASWVS

SEQ ID NO: 8936 - protein, 85 aa, Homo sapiens
NATWAIGEICMQMGAEMQPYVQMVLNNLVEIINRPNTPKTLLENTGRLTSPSAIPAITIGRLGYVCPQEVAPMLQQFIRPWCTSL

SEQ ID NO: 8937 - protein, 85 aa, Homo sapiens
RNIRDNEEKDSAFRGICMMIGVNPGGVVQDFIFFCDAVASWVSPKDDLRDMFYKILHGFKDQVGEDNWQQFSEQFPPLLKERLAA

SEQ ID NO: 8938 - protein, 84 aa, Homo sapiens
MADCSHPQELQELCQSTLTEMESQKQLCRPLTCEKSKPVPLKLFTPRLVSNSRPQVIHLPWPPNYRCEPQHPAKKVIFFRVIML

SEQ ID NO: 8939 - protein, 85 aa, Homo sapiens
GIAESTPDELPSDAEEQLRSGDQQLELSGRRLRRLPSAVCALSRLQKLYVSGTGLRELPEEIEELRELRILALDFNKLERLPDGL

SEQ ID NO: 8940 - protein, 85 aa, Homo sapiens
CRLPRLTRLYLGGNRLLALPADFAQLQSLRCLWIEGNFLRRFPRPLLRLVALQSLQMGDNRLRALPAELPRMTGLRGLWLYGNRF

SEQ ID NO: 8941 - protein, 85 aa, Homo sapiens
EEFPPALLRMGRLHILDLDRNRLGGFPDLHPLRALRVFSYDHNPVTGPPRVADTVFLVGEGAVERMAERDEPTPRPPPRRPARAF

SEQ ID NO: 8942 - protein, 84 aa, Homo sapiens
FSYDHNPVTGPPRVADTVFLVGEGAVERMAERDEPTPRPPPRRPARAFEDEEEEDLLIGGAGSRALGAPGGSFRALEAAPGLGT

SEQ ID NO: 8943 - protein, 85 aa, Homo sapiens
SRLQKLYVSGTGLRELPEEIEELRELRILALDFNKLERLPDGLCRLPRLTRLYLGGNRLLALPADFAQLQSLRCLWIEGNFLRRF

SEQ ID NO: 8944 - protein, 85 aa, Homo sapiens
PRPLLRLVALQSLQMGDNRLRALPAELPRMTGLRGLWLYGNRFEEFPPALLRMGRLHILDLDRNRLGGFPDLHPLRALRVFSYDH

SEQ ID NO: 8945 - protein, 85 aa, Homo sapiens
IAQFIETTKKKLEVLQSQKGQESEYGNITYPPAMKNAHAKASRTSSKSLESSAGTVAASPVRRGGQRGLPVPGPPVLSPDLHQLP

SEQ ID NO: 8946 - protein, 84 aa, Homo sapiens
YPPAMKNAHAKASRTSSKSLESSAGTVAASPVRRGGQRGLPVPGPPVLSPDLHQLPVLAPLHPAADTRRMCMRTCTLRTRGRRK

SEQ ID NO: 8947 - protein, 85 aa, Homo sapiens
ATLNSASTTGTTPSPGHNAPSLPSDTFSSSTPSDPVTKDPPAASSTSENMRSSEPGGQLLESGCGLVPPKEIGEPQEGPDCGHFP

SEQ ID NO: 8948 - protein, 85 aa, Homo sapiens
PNDPGVEKDKEQEEEEEGLPPMDLSNHLFFTAGGEAYLVAKLSLPGGSELLLPKGFPWGEAGIKEEPSLPFLAYPPPSHLTALHI

SEQ ID NO: 8949 - protein, 85 aa, Homo sapiens
QHGFDPIQGFSSSDQILSHDTSAPSPAACEERHGAFWSYQLAPNPPGDPKDGPMGNSGGNHVAVFWLCLLCRLGFSKPQAFMDHT

SEQ ID NO: 8950 - protein, 85 aa, Homo sapiens
QSHGVKLTPAQYQGLSGSPAVLQEGDEGCKALISFLEPKLPARPSSDIPLDNSSTVNMEANVAQTEDGPPEAEVQALILLDEEVM

SEQ ID NO: 8951 - protein, 85 aa, Homo sapiens
ALSPPSPPTATWDPSPTQAKESPVAAGEAGPDWFPEGQEEDGGLCPPLNQSSPTSKEGGTLPAPVGSPEDPSDPPQPYRLADDYT

SEQ ID NO: 8952 - protein, 85 aa, Homo sapiens
PAPAAFQGLSLSSHMSLLHSRNSCKTLKCPKCNWHYKYQQTLDVHMREKHPESNSHCSYCSAGGAHPRLARGESYNCGYKPYRCD

SEQ ID NO: 8953 - protein, 85 aa, Homo sapiens
VCNYSTTTKGNLSIHMQSDKHLANLQGFQAGPGGQGSPPEASLPPSAGDKEPKTKSSWQCKVCSYETNISRNLRIHMTSEKHMQN

SEQ ID NO: 8954 - protein, 85 aa, Homo sapiens
VLMLHQGLPLGLPPGLMGPGPPPPPGATPTSPPELFQYFGPQALGQPQTPLAGPGLRPDKPLEAQLLLNGFHHVGAPARKFPTSA

SEQ ID NO: 8955 - protein, 85 aa, Homo sapiens
PGSLSPDAHLPPSQLLGSSSDSLPTSPPPDDSLSLKVFRCLVCQAFSTDSLELLLYHCSIGRSLPEAEWKEVAGDTHRCKLCCYG

SEQ ID NO: 8956 - protein, 85 aa, Homo sapiens
TQLKANFQLHLKTDKHAQKYQLAAHLREGGGAMGTPSPASLGDGAPYGSVSPLHLRCNICDFESNSKEKMQLHARGAAHEENSQI

SEQ ID NO: 8957 - protein, 85 aa, Homo sapiens
YKFLLDMEGAEAGAELGLYHCLLCAWETPSRLAVLQHLRTPAHRDAQAQRRLQLLQNGPTTEEGLAALQSILSFSHGQLRTPGKA

SEQ ID NO: 8958 - protein, 85 aa, Homo sapiens
PVTPLAEPPTPEKDAQNKTEQLASEETENKTGPSRDSANQTTVYCCPYCSFLSPESSQVRAHTLSQHAVQPKYRCPLCQEQLVGR

SEQ ID NO: 8959 - protein, 85 aa, Homo sapiens
PALHFHLSHLHNVVPECVEKLLLVATTVEMTFTTKVLSAPTLSPLDNGQEPPTHGPEPTPSRDQAAEGPNLTPEASPDPLPEPPL

SEQ ID NO: 8960 - protein, 85 aa, Homo sapiens
ASVEVPDKPSGSPGQPPSPAPSPVPEPDAQAEDVAPPPTMAEEEEGTTGELRSAEPAPADSRHPLTYRKTTNFALDKFLDPARPY

SEQ ID NO: 8961 - protein, 85 aa, Homo sapiens
KCTVCKESFTQKNILLVHYNSVSHLHKMKKAAIDPSAPARGEAGAPPTTTAATDKPFKCTVCRVSYNQSSTLEIHMRSVLHQTRS

SEQ ID NO: 8962 - protein, 85 aa, Homo sapiens
RGTKTDSKIEGPERSQEEPKEGETEGEVGTEKKGPDTSGFISGLPFLSPPPPPLDLHRFPAPLFTPPVLPPFPLVPESLLKLQQQ

SEQ ID NO: 8963 - protein, 85 aa, Homo sapiens
QLLLPFYLHDLKVGPKLTLAGPAPVLSLPAATPPPPPQPPKAELAEREWERPPMAKEGNEAGPSSPPDPLPNEAARTAAKALLEN

SEQ ID NO: 8964 - protein, 85 aa, Homo sapiens
FGFELVIQYNEGKQAVPPPPTPPPPEALGGGDKLACGACGKLFSNMLILKTHEEHVHRRFLPFEALSRYAAQFRKSYDSLYPPLA

SEQ ID NO: 8965 - protein, 85 aa, Homo sapiens
EPPKPPDGSLDSPVPHLGPPFLVPEPEAGGTRAPEERSRAGGHWPIEEEESSRGNLPPLVPAGRRFSRTKFTEFQTQALQSFFET

SEQ ID NO: 8966 - protein, 85 aa, Homo sapiens
SAYPKDGEVERLASLLGLASRVVVVWFQNARQKARKNACEGGSMPTGGGTGGASGCRRCHATFSCVFELVRHLKKCYDDQTLEEE

SEQ ID NO: 8967 - protein, 85 aa, Homo sapiens
EEEAERGEEEEEVEEEEVEEEQGLEPPAGPEGPLPEPPDGEELSQAEATKAGGKEPEEKATPSPSPAHTCDQCAISFSSQDLLTS

SEQ ID NO: 8968 - protein, 85 aa, Homo sapiens
HRRLHFLPSLQPSAPPQLLDLPLLVFGERNPLVAATSPMPGPPLKRKHEDGSLSPTGSEAGGGGEGEPPRDKRLRTTILPEQLEI

SEQ ID NO: 8969 - protein, 85 aa, Homo sapiens
MYRWYMQDSNPTRKMLDCISEEVGLKKRVVQVWFQNTRARERKGQFRSTPGGVPSPAVKPPATATPASLPKFNLLLGKVDDGTGR

SEQ ID NO: 8970 - protein, 85 aa, Homo sapiens
EAPKREAPAFPYPTATLASGPQPFLPPGKEATTPTPEPPLPLLPPPPPSEEEGPEEPPKASPESEACSLSAGDLSDSSASSLAEP

SEQ ID NO: 8971 - protein, 85 aa, Homo sapiens
ESPGAGGTSGGPGGGTGVPDGMGQRRYRTQMSSLQLKIMKACYEAYRTPTMQECEVLGEEIGLPKRVIQVWFQNARAKEKKAKLQ

SEQ ID NO: 8972 - protein, 85 aa, Homo sapiens
GTAAGSTGGSSEGLLAAQRTDCPYCDVKYDFYVSCRGHLFSRQHLAKLKEAVRAQLKSESKCYDLAPAPEAPPALKAPPATTPAS

SEQ ID NO: 8973 - protein, 85 aa, Homo sapiens
MPLGAAPTLPRLAPVLLSGPALAQPPLGNLAPFNSGPAASSGLLGLATSVLPTTTVVQTAGPGRPLPQRPMPDQTNTSTAGTTDP

SEQ ID NO: 8974 - protein, 85 aa, Homo sapiens
VPGPPTEPLGDKVSSERKPVAGPTSSSNDALKNLKALKTTVPALLGGQFLPFPLPPAGGTAPPAVFGPQLQGAYFQQLYGMKKGL

SEQ ID NO: 8975 - protein, 85 aa, Homo sapiens
FPMNPMIPQTLIGLLPNALLQPPPQPPEPTATAPPKPPELPAPGEGEAGEVDELLTGSTGISTVDVTHRYLCRQCKMAFDGEAPA

SEQ ID NO: 8976 - protein, 85 aa, Homo sapiens
TAHQRSFCFFGRGSGGSMPPPLRVPICTYHCLACEVLLSGREALASHLRSSAHRRKAAPPQGGPPISITNAATAASAAVAFAKEE

SEQ ID NO: 8977 - protein, 84 aa, Homo sapiens
RVPICTYHCLACEVLLSGREALASHLRSSAHRRKAAPPQGGPPISITNAATAASAAVAFAKEEARLPHTDSNPKTTTTSTLLAL

SEQ ID NO: 8978 - protein, 85 aa, Homo sapiens
ASSTSENMRSSEPGGQLLESGCGLVPPKEIGEPQEGPDCGHFPPNDPGVEKDKEQEEEEEGLPPMDLSNHLFFTAGGEAYLVAKL

SEQ ID NO: 8979 - protein, 85 aa, Homo sapiens
SLPGGSELLLPKGFPWGEAGIKEEPSLPFLAYPPPSHLTALHIQHGFDPIQGFSSSDQILSHDTSAPSPAACEERHGAFWSYQLA

SEQ ID NO: 8980 - protein, 85 aa, Homo sapiens
PNPPGDPKDGPMGNSGGNHVAVFWLCLLCRLGFSKPQAFMDHTQSHGVKLTPAQYQGLSGSPAVLQEGDEGCKALISFLEPKLPA

SEQ ID NO: 8981 - protein, 85 aa, Homo sapiens
RPSSDIPLDNSSTVNMEANVAQTEDGPPEAEVQALILLDEEVMALSPPSPPTATWDPSPTQAKESPVAAGEAGPDWFPEGQEEDG

SEQ ID NO: 8982 - protein, 85 aa, Homo sapiens
GLCPPLNQSSPTSKEGGTLPAPVGSPEDPSDPPQPYRLADDYTPAPAAFQGLSLSSHMSLLHSRNSCKTLKCPKCNWHYKYQQTL

SEQ ID NO: 8983 - protein, 85 aa, Homo sapiens
DVHMREKHPESNSHCSYCSAGGAHPRLARGESYNCGYKPYRCDVCNYSTTTKGNLSIHMQSDKHLANLQGFQAGPGGQGSPPEAS

SEQ ID NO: 8984 - protein, 85 aa, Homo sapiens
LPPSAGDKEPKTKSSWQCKVCSYETNISRNLRIHMTSEKHMQNVLMLHQGLPLGLPPGLMGPGPPPPPGATPTSPPELFQYFGPQ

SEQ ID NO: 8985 - protein, 85 aa, Homo sapiens
ALGQPQTPLAGPGLRPDKPLEAQLLLNGFHHVGAPARKFPTSAPGSLSPDAHLPPSQLLGSSSDSLPTSPPPDDSLSLKVFRCLV

SEQ ID NO: 8986 - protein, 85 aa, Homo sapiens
CQAFSTDSLELLLYHCSIGRSLPEAEWKEVAGDTHRCKLCCYGTQLKANFQLHLKTDKHAQKYQLAAHLREGGGAMGTPSPASLG

SEQ ID NO: 8987 - protein, 85 aa, Homo sapiens
DGAPYGSVSPLHLRCNICDFESNSKEKMQLHARGAAHEENSQIYKFLLDMEGAEAGAELGLYHCLLCAWETPSRLAVLQHLRTPA

SEQ ID NO: 8988 - protein, 85 aa, Homo sapiens
HRDAQAQRRLQLLQNGPTTEEGLAALQSILSFSHGQLRTPGKAPVTPLAEPPTPEKDAQNKTEQLASEETENKTGPSRDSANQTT

SEQ ID NO: 8989 - protein, 85 aa, Homo sapiens
VYCCPYCSFLSPESSQVRAHTLSQHAVQPKYRCPLCQEQLVGRPALHFHLSHLHNVVPECVEKLLLVATTVEMTFTTKVLSAPTL

SEQ ID NO: 8990 - protein, 85 aa, Homo sapiens
SPLDNGQEPPTHGPEPTPSRDQAAEGPNLTPEASPDPLPEPPLASVEVPDKPSGSPGQPPSPAPSPVPEPDAQAEDVAPPPTMAE

SEQ ID NO: 8991 - protein, 85 aa, Homo sapiens
EEEGTTGELRSAEPAPADSRHPLTYRKTTNFALDKFLDPARPYKCTVCKESFTQKNILLVHYNSVSHLHKMKKAAIDPSAPARGE

SEQ ID NO: 8992 - protein, 85 aa, Homo sapiens
AGAPPTTTAATDKPFKCTVCRVSYNQSSTLEIHMRSVLHQTRSRGTKTDSKIEGPERSQEEPKEGETEGEVGTEKKGPDTSGFIS

SEQ ID NO: 8993 - protein, 85 aa, Homo sapiens
GLPFLSPPPPPLDLHRFPAPLFTPPVLPPFPLVPESLLKLQQQQLLLPFYLHDLKVGPKLTLAGPAPVLSLPAATPPPPPQPPKA

SEQ ID NO: 8994 - protein, 85 aa, Homo sapiens
ELAEREWERPPMAKEGNEAGPSSPPDPLPNEAARTAAKALLENFGFELVIQYNEGKQAVPPPPTPPPPEALGGGDKLACGACGKL

SEQ ID NO: 8995 - protein, 85 aa, Homo sapiens
FSNMLILKTHEEHVHRRFLPFEALSRYAAQFRKSYDSLYPPLAEPPKPPDGSLDSPVPHLGPPFLVPEPEAGGTRAPEERSRAGG

SEQ ID NO: 8996 - protein, 85 aa, Homo sapiens
HWPIEEEESSRGNLPPLVPAGRRFSRTKFTEFQTQALQSFFETSAYPKDGEVERLASLLGLASRVVVVWFQNARQKARKNACEGG

SEQ ID NO: 8997 - protein, 85 aa, Homo sapiens
SMPTGGGTGGASGCRRCHATFSCVFELVRHLKKCYDDQTLEEEEEEAERGEEEEEVEEEEVEEEQGLEPPAGPEGPLPEPPDGEE

SEQ ID NO: 8998 - protein, 85 aa, Homo sapiens
MSQAEATKAGGKEPEEKATPSPSPAHTCDQCAISFSSQDLLTSHRRLHFLPSLQPSAPPQLLDLPLLVFGERNPLVAATSPMPGP

SEQ ID NO: 8999 - protein, 85 aa, Homo sapiens
PLKRKHEDGSLSPTGSEAGGGGEGEPPRDKRLRTTILPEQLEILYRWYMQDSNPTRKMLDCISEEVGLKKRVVQVWFQNTRARER

SEQ ID NO: 9000 - protein, 85 aa, Homo sapiens
KGQFRSTPGGVPSPAVKPPATATPASLPKFNLLLGKVDDGTGREAPKREAPAFPYPTATLASGPQPFLPPGKEATTPTPEPPLPL

SEQ ID NO: 9001 - protein, 85 aa, Homo sapiens
LPPPPPSEEEGPEEPPKASPESEACSLSAGDLSDSSASSLAEPESPGAGGTSGGPGGGTGVPDGMGQRRYRTQMSSLQLKIMKAC

SEQ ID NO: 9002 - protein, 85 aa, Homo sapiens
YEAYRTPTMQECEVLGEEIGLPKRVIQVWFQNARAKEKKAKLQGTAAGSTGGSSEGLLAAQRTDCPYCDVKYDFYVSCRGHLFSR

SEQ ID NO: 9003 - protein, 85 aa, Homo sapiens
QHLAKLKEAVRAQLKSESKCYDLAPAPEAPPALKAPPATTPASMPLGAAPTLPRLAPVLLSGPALAQPPLGNLAPFNSGPAASSG

SEQ ID NO: 9004 - protein, 85 aa, Homo sapiens
LLGLATSVLPTTTVVQTAGPGRPLPQRPMPDQTNTSTAGTTDPVPGPPTEPLGDKVSSERKPVAGPTSSSNDALKNLKALKTTVP

SEQ ID NO: 9005 - protein, 85 aa, Homo sapiens
ALLGGQFLPFPLPPAGGTAPPAVFGPQLQGAYFQQLYGMKKGLFPMNPMIPQTLIGLLPNALLQPPPQPPEPTATAPPKPPELPA

SEQ ID NO: 9006 - protein, 85 aa, Homo sapiens
PGEGEAGEVDELLTGSTGISTVDVTHRYLCRQCKMAFDGEAPATAHQRSFCFFGRGSGGSMPPPLRVPICTYHCLACEVLLSGRE

SEQ ID NO: 9007 - protein, 85 aa, Homo sapiens
DRPGPGSARPGRTVHVWGYRVEWKVRNGRKLQPSEWAGRGDLGGFKRRWKDTRATVGTTFRRRSRVSLVGELSKFPLPSDSSGGK

SEQ ID NO: 9008 - protein, 85 aa, Homo sapiens
SSSSFARGALAWCRQRNPNPSCAAAETGARTSLPKERCRGWRLGNWLHKHPHPNTCPRLPACWLPPILTERGERVPKLVPLLACY

SEQ ID NO: 9009 - protein, 84 aa, Homo sapiens
ALAWCRQRNPNPSCAAAETGARTSLPKERCRGWRLGNWLHKHPHPNTCPRLPACWLPPILTERGERVPKLVPLLACYPKSKPKD

SEQ ID NO: 9010 - protein, 85 aa, Homo sapiens
GGFKRRWKDTRATVGTTFRRRSRVSLVGELSKFPLPSDSSGGKSSSSFARGALAWCRQRNPNPSCAAAETGARTSLPKERCRGWR

SEQ ID NO: 9011 - protein, 85 aa, Homo sapiens
NSGVNLQRSLSSPPSSKRPKTISIDENMEPSPTGDFYPSPSSPAAGSRTWHERDQDMSSPTTMKKPEKPLFSSASPQDSSPRLST

SEQ ID NO: 9012 - protein, 85 aa, Homo sapiens
PAAGSRTWHERDQDMSSPTTMKKPEKPLFSSASPQDSSPRLSTFPQHHHPGIPGVAHSVISTRTPPPPSPLPFPTQAILPPAPSS

SEQ ID NO: 9013 - protein, 85 aa, Homo sapiens
SSSSNCLSDTNQNKQSSESAVSSTVNPVAIHKRSKVKTEPEGLRPASPLALTQGQVSGHGSCGCALPLSQEQLADLKEDLDRDDC

SEQ ID NO: 9014 - protein, 85 aa, Homo sapiens
KQEAEVVIYETNCHWEDCTKEYDTQEQLVHHINNEHIHGEKKEFVCRWQACTREQKPFKAQYMLVVHMRRHTGEKPHKCTFEGCS

SEQ ID NO: 9015 - protein, 85 aa, Homo sapiens
KAYSRLENLKTHLRSHTGEKPYVCEHEGCNKAFSNASDRAKHQNRTHSNEKPYICKIPGCTKRYTDPSSLRKHVKTVHGPDAHVT

SEQ ID NO: 9016 - protein, 85 aa, Homo sapiens
KKQRNDVHLRTPLLKENGDSEAGTEPGGPESTEASSTSQAVEDCLHVRAIKTESSGLCQSSPGAQSSCSSEPSPLGSAPNNDSGV

SEQ ID NO: 9017 - protein, 85 aa, Homo sapiens
EMPGTGPGSLGDLTALDDTPPGADTSALAAPSAGGLQLRKHMTTMHRFEQLKKEKLKSLKDSCSWAGPTPHTRNTKLPPLPGSGS

SEQ ID NO: 9018 - protein, 85 aa, Homo sapiens
ILENFSGSGGGGPAGLLPNPRLSELSASEVTMLSQLQERRDSSTSTVSSAYTVSRRSSGISPYFSSRRSSEASPLGAGRPHNASS

SEQ ID NO: 9019 - protein, 85 aa, Homo sapiens
ADSYDPISTDASRRSSEASQCSGGSGLLNLTPAQQYSLRAKYAAATGGPPPTPLPGLERMSLRTRLALLDAPERTLPAGCPRPLG

SEQ ID NO: 9020 - protein, 85 aa, Homo sapiens
PRRGSDGPTYGHGHAGAAPAFPHEAPGGGARRASDPVRRPDALSLPRVQRFHSTHNVNPGPLPPCADRRGLRLQSHPSTDGGLAR

SEQ ID NO: 9021 - protein, 85 aa, Homo sapiens
GAYSPRPPSISENVAMEAVAAGVDGAGPEADLGLPEDDLVLPDDVVQYIKAHASGALDEGTGQVYPTESTGFSDNPRLPSPGLHG

SEQ ID NO: 9022 - protein, 85 aa, Homo sapiens
QRRMVAADSNVGPSAPMLGGCQLGFGAPSSLNKNNMPVQWNEVSSGTVDALASQVKPPPFPQGNLAVVQQKPAFGQYPGYSPQGL

SEQ ID NO: 9023 - protein, 85 aa, Homo sapiens
QASPGGLDSTQPHLQPRSGAPSQGIPRVNYMQQLRQPVAGSQCPGMTTTMSPHACYGQVHPQLSPSTISGALNQFPQSCSNMPAK

SEQ ID NO: 9024 - protein, 85 aa, Homo sapiens
PGHLGHPQQTEVAPDPTTMGNRHRELGVPDSALAGVPPPHPVQSYPQQSHHLAASMSQEGYHQVPSLLPARQPGFMEPQTGPMGV

SEQ ID NO: 9025 - protein, 85 aa, Homo sapiens
ATAGFGLVQPRPPLEPSPTGRHRGVRAVQQQLAYARATGHAMAAMPSSQETAEAVPKGAMGNMGSVPPQPPPQDAGGAPDHSMLY

SEQ ID NO: 9026 - protein, 85 aa, Homo sapiens
YYGQIHMYEQDGGLENLGSCQVMRSQPPQPQACQDSIQPQPLPSPGVNQVSSTVDSQLLEAPQIDFDAIMDDGDHSSLFSGALSP

SEQ ID NO: 9027 - protein, 85 aa, Homo sapiens
MRPASPLALTQGQVSGHGSCGCALPLSQEQLADLKEDLDRDDCKQEAEVVIYETNCHWEDCTKEYDTQEQLVHHINNEHIHGEKK

SEQ ID NO: 9028 - protein, 85 aa, Homo sapiens
EFVCRWQACTREQKPFKAQYMLVVHMRRHTGEKPHKCTFEGCSKAYSRLENLKTHLRSHTGEKPYVCEHEGCNKAFSNASDRAKH

SEQ ID NO: 9029 - protein, 85 aa, Homo sapiens
QNRTHSNEKPYICKIPGCTKRYTDPSSLRKHVKTVHGPDAHVTKKQRNDVHLRTPLLKENGDSEAGTEPGGPESTEASSTSQAVE

SEQ ID NO: 9030 - protein, 85 aa, Homo sapiens
DCLHVRAIKTESSGLCQSSPGAQSSCSSEPSPLGSAPNNDSGVEMPGTGPGSLGDLTALDDTPPGADTSALAAPSAGGLQLRKHM

SEQ ID NO: 9031 - protein, 85 aa, Homo sapiens
TTMHRFEQLKKEKLKSLKDSCSWAGPTPHTRNTKLPPLPGSGSILENFSGSGGGGPAGLLPNPRLSELSASEVTMLSQLQERRDS

SEQ ID NO: 9032 - protein, 85 aa, Homo sapiens
STSTVSSAYTVSRRSSGISPYFSSRRSSEASPLGAGRPHNASSADSYDPISTDASRRSSEASQCSGGSGLLNLTPAQQYSLRAKY

SEQ ID NO: 9033 - protein, 85 aa, Homo sapiens
AAATGGPPPTPLPGLERMSLRTRLALLDAPERTLPAGCPRPLGPRRGSDGPTYGHGHAGAAPAFPHEAPGGGARRASDPVRRPDA

SEQ ID NO: 9034 - protein, 85 aa, Homo sapiens
MSLPRVQRFHSTHNVNPGPLPPCADRRGLRLQSHPSTDGGLARGAYSPRPPSISENVAMEAVAAGVDGAGPEADLGLPEDDLVLP

SEQ ID NO: 9035 - protein, 85 aa, Homo sapiens
DDVVQYIKAHASGALDEGTGQVYPTESTGFSDNPRLPSPGLHGQRRMVAADSNVGPSAPMLGGCQLGFGAPSSLNKNNMPVQWNE

SEQ ID NO: 9036 - protein, 85 aa, Homo sapiens
VSSGTVDALASQVKPPPFPQGNLAVVQQKPAFGQYPGYSPQGLQASPGGLDSTQPHLQPRSGAPSQGIPRVNYMQQLRQPVAGSQ

SEQ ID NO: 9037 - protein, 85 aa, Homo sapiens
CPGMTTTMSPHACYGQVHPQLSPSTISGALNQFPQSCSNMPAKPGHLGHPQQTEVAPDPTTMGNRHRELGVPDSALAGVPPPHPV

SEQ ID NO: 9038 - protein, 85 aa, Homo sapiens
QSYPQQSHHLAASMSQEGYHQVPSLLPARQPGFMEPQTGPMGVATAGFGLVQPRPPLEPSPTGRHRGVRAVQQQLAYARATGHAM

SEQ ID NO: 9039 - protein, 85 aa, Homo sapiens
AAMPSSQETAEAVPKGAMGNMGSVPPQPPPQDAGGAPDHSMLYYYGQIHMYEQDGGLENLGSCQVMRSQPPQPQACQDSIQPQPL

SEQ ID NO: 9040 - protein, 85 aa, Homo sapiens
PSPGVNQVSSTVDSQLLEAPQIDFDAIMDDGDHSSLFSGALSPSLLHSLSQNSSRLTTPRNSLTLPSIPAGISNMAVGDMSSMLT

SEQ ID NO: 9041 - protein, 85 aa, Homo sapiens
QSSSYGQQSSFRQDHPSSMGVYGQESGGFSGPGENRSMSGPDNRGRGRGGFDRGGMSRGGRGGGRGGMGAGERGGFNKPGGPMDE

SEQ ID NO: 9042 - protein, 85 aa, Homo sapiens
GPDLDLGPPVDPDEDSDNSAIYVQGLNDSVTLDDLADFFKQCGVVKMNKRTGQPMIHIYLDKETGKPKGDATVSYEDPPTAKAAV

SEQ ID NO: 9043 - protein, 85 aa, Homo sapiens
EWFDGKDFQGSKLKVSLARKKPPMNSMRGGLPPREGRGMPPPLRGGPGGPGGPGGPMGRMGGRGGDRGGFPPRGPRGSRGNPSGG

SEQ ID NO: 9044 - protein, 85 aa, Homo sapiens
GNVQHRAGDWQCPNPGCGNQNFAWRTECNQCKAPKPEGFLPPPFPPPGGDRGRGGPGGMRGGRGGLMDRGGPGGMFRGGRGGDRG

SEQ ID NO: 9045 - protein, 85 aa, Homo sapiens
NRGRGRGGFDRGGMSRGGRGGGRGGMGAGERGGFNKPGGPMDEGPDLDLGPPVDPDEDSDNSAIYVQGLNDSVTLDDLADFFKQC

SEQ ID NO: 9046 - protein, 85 aa, Homo sapiens
GVVKMNKRTGQPMIHIYLDKETGKPKGDATVSYEDPPTAKAAVEWFDGKDFQGSKLKVSLARKKPPMNSMRGGLPPREGRGMPPP

SEQ ID NO: 9047 - protein, 85 aa, Homo sapiens
LRGGPGGPGGPGGPMGRMGGRGGDRGGFPPRGPRGSRGNPSGGGNVQHRAGDWQCPNPGCGNQNFAWRTECNQCKAPKPEGFLPP

SEQ ID NO: 9048 - protein, 85 aa, Homo sapiens
PFPPPGGDRGRGGPGGMRGGRGGLMDRGGPGGMFRGGRGGDRGGFRGGRGMDRGGFGGGRRGGPGGPPGPLMEQMGGRRGGRGGP

SEQ ID NO: 9049 - protein, 85 aa, Homo sapiens
ADMIEEGELILSVNILYPVIFHKHKEHKPYQTMLVLGSQKLTQLRDSIRCVSDLQIGGEFSNTPDQAPEHISKDLYKSAFFYFEG

SEQ ID NO: 9050 - protein, 85 aa, Homo sapiens
TFYNDKRYPECRDLSRTIIEWSESHDRGYGKFQTARMEDFTFNDLCIKLGFPYLYCHQGDCEHVIVITDIRLVHHDDCLDRTLYP

SEQ ID NO: 9051 - protein, 84 aa, Homo sapiens
LVHHDDCLDRTLYPLLIKKHWLWTRKCFVCKMYTARWVTNNDSFAPEDPCFFCDVCFRMLHYDSEGNKLGEFLAYPYVDPGTFN

SEQ ID NO: 9052 - protein, 85 aa, Homo sapiens
TLGVRKRFLEHREETITIDRACRQETFVYEMESHAIGKKPENSADMIEEGELILSVNILYPVIFHKHKEHKPYQTMLVLGSQKLT

SEQ ID NO: 9053 - protein, 85 aa, Homo sapiens
QLRDSIRCVSDLQIGGEFSNTPDQAPEHISKDLYKSAFFYFEGTFYNDKRYPECRDLSRTIIEWSESHDRGYGKFQTARMEDFTF

SEQ ID NO: 9054 - protein, 85 aa, Homo sapiens
NDLCIKLGFPYLYCHQGDCEHVIVITDIRLVHHDDCLDRTLYPLLIKKHWLWTRKCFVCKMYTARWVTNNDSFAPEDPCFFCDVC

SEQ ID NO: 9055 - protein, 85 aa, Homo sapiens
AAATLRTPTQGTVTFEDVAVHFSWEEWGLLDEAQRCLYRDVMLENLALLTSLDVHHQKQHLGEKHFRSNVGRALFVKTCTFHVSG

SEQ ID NO: 9056 - protein, 85 aa, Homo sapiens
EPSTCREVGKDFLAKLGFLHQQAAHTGEQSNSKSDGGAISHRGKTHYNCGEHTKAFSGKHTLVQQQRTLTTERCYICSECGKSFS

SEQ ID NO: 9057 - protein, 85 aa, Homo sapiens
KSYSLNDHWRLHTGEKPYECRECGKSFRQSSSLIQHRRVHTAVRPHECDECGKLFSNKSNLIKHRRVHTGERPYECSECGKSFSQ

SEQ ID NO: 9058 - protein, 85 aa, Homo sapiens
RSALLQHRGVHTGERPYECSECGKFFTYHSSLIKHQKVHSGSRPYECSECGKSFSQNSSLIEHHRVHTGERPYKCSECGKSFSQR

SEQ ID NO: 9059 - protein, 85 aa, Homo sapiens
SALLQHRGVHTGERPYECSECGKFFPYSSSLRKHQRVHTGSRPYECSECGKSFTQNSGLIKHRRVHTGEKPYECTECGKSFSHNS

SEQ ID NO: 9060 - protein, 84 aa, Homo sapiens
ERPYECSECGKFFPYSSSLRKHQRVHTGSRPYECSECGKSFTQNSGLIKHRRVHTGEKPYECTECGKSFSHNSSLIKHQRIHSR

SEQ ID NO: 9061 - protein, 85 aa, Homo sapiens
MENLALLTSLDVHHQKQHLGEKHFRSNVGRALFVKTCTFHVSGEPSTCREVGKDFLAKLGFLHQQAAHTGEQSNSKSDGGAISHR

SEQ ID NO: 9062 - protein, 85 aa, Homo sapiens
GKTHYNCGEHTKAFSGKHTLVQQQRTLTTERCYICSECGKSFSKSYSLNDHWRLHTGEKPYECRECGKSFRQSSSLIQHRRVHTA

SEQ ID NO: 9063 - protein, 85 aa, Homo sapiens
VRPHECDECGKLFSNKSNLIKHRRVHTGERPYECSECGKSFSQRSALLQHRGVHTGERPYECSECGKFFTYHSSLIKHQKVHSGS

SEQ ID NO: 9064 - protein, 85 aa, Homo sapiens
RPYECSECGKSFSQNSSLIEHHRVHTGERPYKCSECGKSFSQRSALLQHRGVHTGERPYECSECGKFFPYSSSLRKHQRVHTGSR

SEQ ID NO: 9065 - protein, 85 aa, Homo sapiens
VPISYHLFPDPVVQWLYQYWPQGQPAPLPPQLQSLFQEVLQDIGVPSGHCYKPFTTFTFQPVSAGFPRLPAGAVVGIPASFLGDL

SEQ ID NO: 9066 - protein, 85 aa, Homo sapiens
VPAETSSSGLLEEQKMMKSQGLVSFKDVAVDFTQEEWQQLDPSQRTLYRDVMLENYSHLVSMGYPVSKPDVISKLEQGEEPWIIK

SEQ ID NO: 9067 - protein, 85 aa, Homo sapiens
GDISNWIYPDEYQADGRQDRKSNLHNSQSCILGTVSFHHKILKGVTRDGSLCSILKVCQGDGQLQRFLENQDKLFRQVTFVNSKT

SEQ ID NO: 9068 - protein, 85 aa, Homo sapiens
VTEASGHKYNPLGKIFQECIETDISIQRFHKYDAFKKNLKPNIDLPSCYKSNSRKKPDQSFGGGKSSSQSEPNSNLEKIHNGVIP

SEQ ID NO: 9069 - protein, 85 aa, Homo sapiens
FDDNQCGNVFRNTQSLIQYQNVETKEKSCVCVTCGKAFAKKSQLIVHQRIHTGKKPYDCGACGKAFSEKFHLVVHQRTHTGEKPY

SEQ ID NO: 9070 - protein, 85 aa, Homo sapiens
DCSECGKAFSQKSSLIIHQRVHTGEKPYECSECGKAFSQKSPLIIHQRIHTGEKPYECRECGKAFSQKSQLIIHHRAHTGEKPYE

SEQ ID NO: 9071 - protein, 85 aa, Homo sapiens
CTECGKAFCEKSHLIIHKRIHTGEKPYKCAQCEEAFSRKTELITHQLVHTGEKPYECTECGKTFSRKSQLIIHQRTHTGEKPYKC

SEQ ID NO: 9072 - protein, 85 aa, Homo sapiens
SECGKAFCQKSHLIGHQRIHTGEKPYICTECGKAFSQKSHLPGHQRIHTGEKPYICAECGKAFSQKSDLVLHQRIHTGERPYQCA

SEQ ID NO: 9073 - protein, 85 aa, Homo sapiens
SQRTLYRDVMLENYSHLVSMGYPVSKPDVISKLEQGEEPWIIKGDISNWIYPDEYQADGRQDRKSNLHNSQSCILGTVSFHHKIL

SEQ ID NO: 9074 - protein, 85 aa, Homo sapiens
KGVTRDGSLCSILKVCQGDGQLQRFLENQDKLFRQVTFVNSKTVTEASGHKYNPLGKIFQECIETDISIQRFHKYDAFKKNLKPN

SEQ ID NO: 9075 - protein, 85 aa, Homo sapiens
IDLPSCYKSNSRKKPDQSFGGGKSSSQSEPNSNLEKIHNGVIPFDDNQCGNVFRNTQSLIQYQNVETKEKSCVCVTCGKAFAKKS

SEQ ID NO: 9076 - protein, 85 aa, Homo sapiens
QLIVHQRIHTGKKPYDCGACGKAFSEKFHLVVHQRTHTGEKPYDCSECGKAFSQKSSLIIHQRVHTGEKPYECSECGKAFSQKSP

SEQ ID NO: 9077 - protein, 85 aa, Homo sapiens
LIIHQRIHTGEKPYECRECGKAFSQKSQLIIHHRAHTGEKPYECTECGKAFCEKSHLIIHKRIHTGEKPYKCAQCEEAFSRKTEL

SEQ ID NO: 9078 - protein, 85 aa, Homo sapiens
ITHQLVHTGEKPYECTECGKTFSRKSQLIIHQRTHTGEKPYKCSECGKAFCQKSHLIGHQRIHTGEKPYICTECGKAFSQKSHLP

SEQ ID NO: 9079 - protein, 85 aa, Homo sapiens
ASTDYSTYSQAAAQQGYSAYTAQPTQGYAQTTQASYAAQSAYGTQPAYPAYGQQPAATAPTRPQDGNKPTETSQPQSSTGGYNQP

SEQ ID NO: 9080 - protein, 85 aa, Homo sapiens
SLGYGQSNYSYPQVPGSYPMQPVTAPPSYPPTSYSSTQPTSYDQSSYSQQNTYGQPSSYGQQSSYGQQSSYGQQPPTSYPPQTGS

SEQ ID NO: 9081 - protein, 85 aa, Homo sapiens
SYPQVPGSYPMQPVTAPPSYPPTSYSSTQPTSYDQSSYSQQNTYGQPSSYGQQSSYGQQSSYGQQPPTSYPPQTGSYSQAPSQYS

SEQ ID NO: 9082 - protein, 85 aa, Homo sapiens
GTQPAYPAYGQQPAATAPTRPQDGNKPTETSQPQSSTGGYNQPSLGYGQSNYSYPQVPGSYPMQPVTAPPSYPPTSYSSTQPTSY

SEQ ID NO: 9083 - protein, 85 aa, Homo sapiens
MIKGGNANATVTKVLKDVYALKKPYGVLYKKKNITRPFEDQTSLEFFSKKSDCSLFMFGSHNKKRPNNLVIGRMYDYHVLDMIEL

SEQ ID NO: 9084 - protein, 85 aa, Homo sapiens
GIENFVSLKDIKNSKCPEGTKPMLIFAGDDFDVTEDYRRLKSLLIDFFRGPTVSNIRLAGLEYVLHFTALNGKIYFRSYKLLLKK

SEQ ID NO: 9085 - protein, 85 aa, Homo sapiens
LIDFFRGPTVSNIRLAGLEYVLHFTALNGKIYFRSYKLLLKKSGCRTPRIELEEMGPSLDLVLRRTHLASDDLYKLSMKMPKALK

SEQ ID NO: 9086 - protein, 85 aa, Homo sapiens
SLEFFSKKSDCSLFMFGSHNKKRPNNLVIGRMYDYHVLDMIELGIENFVSLKDIKNSKCPEGTKPMLIFAGDDFDVTEDYRRLKS

SEQ ID NO: 9087 - protein, 85 aa, Homo sapiens
LLIDFFRGPTVSNIRLAGLEYVLHFTALNGKIYFRSYKLLLKKSGCRTPRIELEEMGPSLDLVLRRTHLASDDLYKLSMKMPKAL

SEQ ID NO: 9088 - protein, 85 aa, Homo sapiens
SNRPLNELLTPQGPSPRTQHCDPEHFPFPAPANAPLQRIRSTSTPNVHMVSTTAPMDSNLIQLTGQSFSTDAAGSRGGSDGTPRG

SEQ ID NO: 9089 - protein, 85 aa, Homo sapiens
SPSPASVSSGRKSPHSKSPAEQRERKSLADDKKKVKNLGYRDSGYYWEVPPSEVQLLKRIGTGSFGTVFRGRWHGDVAVKVLKVS

SEQ ID NO: 9090 - protein, 85 aa, Homo sapiens
QPTAEQAQAFKNEMQVLRKTRHVNILLFMGFMTRPGFAIITQWCEGSSLYHHLHVADTRFDMVQLIDVARQTAQGMDYLHAKNII

SEQ ID NO: 9091 - protein, 85 aa, Homo sapiens
HRDLKSNNIFLHEGLTVKIGDFGLATVKTRWSGAQPLEQPSGSVLWMAAEVIRMQDPNPYSFQSDVYAYGVVLYELMTGSLPYSH

SEQ ID NO: 9092 - protein, 85 aa, Homo sapiens
IGCRDQIIFMVGRGYLSPDLSKISSNCPKAMRRLLSDCLKFQREERPLFPQILATIELLQRSLPKIERSASEPSLHRTQADELPA

SEQ ID NO: 9093 - protein, 85 aa, Homo sapiens
GYKFHQHCSSKVPTVCVDMSTNRQQFYHSVQDLSGGSRQHEAPSNRPLNELLTPQGPSPRTQHCDPEHFPFPAPANAPLQRIRST

SEQ ID NO: 9094 - protein, 85 aa, Homo sapiens
STPNVHMVSTTAPMDSNLIQLTGQSFSTDAAGSRGGSDGTPRGSPSPASVSSGRKSPHSKSPAEQRERKSLADDKKKVKNLGYRD

SEQ ID NO: 9095 - protein, 85 aa, Homo sapiens
SGYYWEVPPSEVQLLKRIGTGSFGTVFRGRWHGDVAVKVLKVSQPTAEQAQAFKNEMQVLRKTRHVNILLFMGFMTRPGFAIITQ

SEQ ID NO: 9096 - protein, 85 aa, Homo sapiens
WCEGSSLYHHLHVADTRFDMVQLIDVARQTAQGMDYLHAKNIIHRDLKSNNIFLHEGLTVKIGDFGLATVKTRWSGAQPLEQPSG

SEQ ID NO: 9097 - protein, 85 aa, Homo sapiens
SVLWMAAEVIRMQDPNPYSFQSDVYAYGVVLYELMTGSLPYSHIGCRDQIIFMVGRGYLSPDLSKISSNCPKAMRRLLSDCLKFQ

SEQ ID NO: 9098 - protein, 84 aa, Homo sapiens
WKNAAFLYGLGLVYFYYNAFHWAIKAFQDVLYVDPSFCRAKEIHLRLGLMFKVNTDYKSSLKHFQLALIDCNPCTLSNAESKYF

SEQ ID NO: 9099 - protein, 85 aa, Homo sapiens
HLSNRGGRHVAVKIVKNVDRYCEAARSEIQVLEHLNTTDPNSTFRCVQMLEWFEHHGHICIVFELLGLSTYDFIKENGFLPFRLD

SEQ ID NO: 9100 - protein, 85 aa, Homo sapiens
HIRKMAYQICKSVNFLHSNKLTHTDLKPENILFVQSDYTEAYNPKIKRDERTLINPDIKVVDFGSATYDDEHHSTLVSTRHYRAP

SEQ ID NO: 9101 - protein, 85 aa, Homo sapiens
EVILALGWSQPCDVWSIGCILIEYYLGFTVFPTHDSKEHLAMMERILGPLPKHMIQKTRKRKYFHHDRLDWDEHSSAGRYVSRRC

SEQ ID NO: 9102 - protein, 85 aa, Homo sapiens
TFRCVQMLEWFEHHGHICIVFELLGLSTYDFIKENGFLPFRLDHIRKMAYQICKSVNFLHSNKLTHTDLKPENILFVQSDYTEAY

SEQ ID NO: 9103 - protein, 85 aa, Homo sapiens
NPKIKRDERTLINPDIKVVDFGSATYDDEHHSTLVSTRHYRAPEVILALGWSQPCDVWSIGCILIEYYLGFTVFPTHDSKEHLAM

SEQ ID NO: 9104 - protein, 85 aa, Homo sapiens
MERILGPLPKHMIQKTRKRKYFHHDRLDWDEHSSAGRYVSRRCKPLKEFMLSQDVEHERLFDLIQKMLEYDPAKRITLREALKHP

SEQ ID NO: 9105 - protein, 85 aa, Homo sapiens
HTEMQALRADWKQWEDSVFQTQSCLENLVSQMALSEQEFSGQVAQLEQALEQFSALLKTWAQQLTLLEGKNTDEEIVECWHKGQE

SEQ ID NO: 9106 - protein, 85 aa, Homo sapiens
ILDALQKAEPRTEDLKSQLNELCRFSRDLSTYSGKVSGLIKEYNCLCLQASKGCQNKEQILQQRFRKAFRDFQQWLVNAKITTAK

SEQ ID NO: 9107 - protein, 85 aa, Homo sapiens
CFDIPQNISEVSTSLQKIQEFLSESENGQHKLNMMLSKGELLSTLLTKEKAKGIQAKVTAAKEDWKNFHSNLHQKESALENLKIQ

SEQ ID NO: 9108 - protein, 85 aa, Homo sapiens
MKDFEVSAEPIQDWLSKTEKMVHESSNRLYDLPAKRREQQKLQSVLEEIHCYEPQLNRLKEKAQQLWEGQAASKSFRHRVSQLSS

SEQ ID NO: 9109 - protein, 85 aa, Homo sapiens
QYLALSNLTKEKVSRLDRIVAEHNQFSLGIKELQDWMTDAIHMLDSYCHPTSDKSVLDSRTLKLEVCIFTQKYLQPTEFVFLKIS

SEQ ID NO: 9110 - protein, 84 aa, Homo sapiens
SDKSVLDSRTLKLEVCIFTQKYLQPTEFVFLKISRLHPPGVMMSHSLHDKSQMLCECNAVCLGCTCQRIPESSDPGCFPKNKIK

SEQ ID NO: 9111 - protein, 85 aa, Homo sapiens
VAQLEQALEQFSALLKTWAQQLTLLEGKNTDEEIVECWHKGQEILDALQKAEPRTEDLKSQLNELCRFSRDLSTYSGKVSGLIKE

SEQ ID NO: 9112 - protein, 85 aa, Homo sapiens
YNCLCLQASKGCQNKEQILQQRFRKAFRDFQQWLVNAKITTAKCFDIPQNISEVSTSLQKIQEFLSESENGQHKLNMMLSKGELL

SEQ ID NO: 9113 - protein, 85 aa, Homo sapiens
STLLTKEKAKGIQAKVTAAKEDWKNFHSNLHQKESALENLKIQMKDFEVSAEPIQDWLSKTEKMVHESSNRLYDLPAKRREQQKL

SEQ ID NO: 9114 - protein, 85 aa, Homo sapiens
QSVLEEIHCYEPQLNRLKEKAQQLWEGQAASKSFRHRVSQLSSQYLALSNLTKEKVSRLDRIVAEHNQFSLGIKELQDWMTDAIH

SEQ ID NO: 9115 - protein, 85 aa, Homo sapiens
MLDSYCHPTSDKSVLDSRTLKLEVCIFTQKYLQPTEFVFLKISRLHPPGVMMSHSLHDKSQMLCECNAVCLGCTCQRIPESSDPG

SEQ ID NO: 9116 - protein, 85 aa, Homo sapiens
QKCDAFFSTKSNCERHQLRKHGVTTCSLRRNGLIPQSKESDVGSHDSTDSQSDAETAAAAGEVLDLTSRDREQPSEGATELRQVA

SEQ ID NO: 9117 - protein, 85 aa, Homo sapiens
GDAPVEQATAETASPVHREEHGRGESHEPEEEHGTEESTGDADGAEEDASSNQSLDLDFATKLMDFKLAEGDGEAGAGGAASQEQ

SEQ ID NO: 9118 - protein, 85 aa, Homo sapiens
KLACDTCGKSFKFLGTLSRHRKAHGRQEPKDEKGDGASTAEEGPQPAPEQEEKPPETPAEVVESAPGAGEAPAEKLAEETEGPSD

SEQ ID NO: 9119 - protein, 85 aa, Homo sapiens
GESAAEKRSSEKSDDDKKPKTDSPKSVASKADKRKKVCSVCNKRFWSLQDLTRHMRSHTGERPYKCQTCERTFTLKHSLVRHQRI

SEQ ID NO: 9120 - protein, 85 aa, Homo sapiens
HQKARHAKHHGKDSDKEERGEEDSENESTHSGNNAVSENEAELAPNASNHMAVTRSRKEGLASATKDCSHREEKVTAGWPSEPGQ

SEQ ID NO: 9121 - protein, 85 aa, Homo sapiens
GSHDSTDSQSDAETAAAAGEVLDLTSRDREQPSEGATELRQVAGDAPVEQATAETASPVHREEHGRGESHEPEEEHGTEESTGDA

SEQ ID NO: 9122 - protein, 85 aa, Homo sapiens
DGAEEDASSNQSLDLDFATKLMDFKLAEGDGEAGAGGAASQEQKLACDTCGKSFKFLGTLSRHRKAHGRQEPKDEKGDGASTAEE

SEQ ID NO: 9123 - protein, 85 aa, Homo sapiens
GPQPAPEQEEKPPETPAEVVESAPGAGEAPAEKLAEETEGPSDGESAAEKRSSEKSDDDKKPKTDSPKSVASKADKRKKVCSVCN

SEQ ID NO: 9124 - protein, 85 aa, Homo sapiens
KRFWSLQDLTRHMRSHTGERPYKCQTCERTFTLKHSLVRHQRIHQKARHAKHHGKDSDKEERGEEDSENESTHSGNNAVSENEAE

SEQ ID NO: 9125 - protein, 85 aa, Homo sapiens
VILRTVYRRDVQSAMDRYTAFLKQSGKFPGNPWPPYKKRTSLHPSYKGLMRLLHCKTLHIVLFTLLYKILMDHQNLSEHVLCMVL

SEQ ID NO: 9126 - protein, 85 aa, Homo sapiens
YLIELGLENSAEEESDEEASVGGPERCHDSWFPGSNLVSNMRHFINYVRVRVPETAPEVKRDSPASTSSDNLGSLQNSGTAQVFS

SEQ ID NO: 9127 - protein, 85 aa, Homo sapiens
LVAERRKKFQEIINRSSSEANQVVRPKTSSKWSAPGSAPQLTTAILEIKESILSLLIKLHHKLSGKQNSYYPPWLDDIEILIQPE

SEQ ID NO: 9128 - protein, 85 aa, Homo sapiens
IPKYSHGDGITAVERILLKAASQSRMNKRIIEEICRKVTPPVPPKKVTAAEKKTLDKEERRQKARERQQKLLAEFASRQKSFMET

SEQ ID NO: 9129 - protein, 84 aa, Homo sapiens
IEEICRKVTPPVPPKKVTAAEKKTLDKEERRQKARERQQKLLAEFASRQKSFMETAMDVVRQNKNNFLRNQLSNVPRADWVVLP

SEQ ID NO: 9130 - protein, 85 aa, Homo sapiens
HPSYKGLMRLLHCKTLHIVLFTLLYKILMDHQNLSEHVLCMVLYLIELGLENSAEEESDEEASVGGPERCHDSWFPGSNLVSNMR

SEQ ID NO: 9131 - protein, 85 aa, Homo sapiens
HFINYVRVRVPETAPEVKRDSPASTSSDNLGSLQNSGTAQVFSLVAERRKKFQEIINRSSSEANQVVRPKTSSKWSAPGSAPQLT

SEQ ID NO: 9132 - protein, 85 aa, Homo sapiens
TAILEIKESILSLLIKLHHKLSGKQNSYYPPWLDDIEILIQPEIPKYSHGDGITAVERILLKAASQSRMNKRIIEEICRKVTPPV

SEQ ID NO: 9133 - protein, 84 aa, Homo sapiens
LVSFKDVAVDFTQEEWQQLDPSQRTLYRDVMLENYSHLVSMGYPVSKPDVISKLEQGEEPWIIKGDISNWIYPDEYQADGRQGK

SEQ ID NO: 9134 - protein, 84 aa, Homo sapiens
RILAAETDRLSYVGNNFGTGALKCNTLCRHFVGILNKTSGQMEVYDAELFNMQPLFSGLSPRKQNYFLERAKDLFSNPVSATTW

SEQ ID NO: 9135 - protein, 85 aa, Homo sapiens
YENKDSTNPRKRNQRILAAETDRLSYVGNNFGTGALKCNTLCRHFVGILNKTSGQMEVYDAELFNMQPLFSGLSPRKQNYFLERA

SEQ ID NO: 9136 - protein, 85 aa, Homo sapiens
AAFRDIEEVSQGLLSLLGANRAEAQQRRLLGRHEQVVERLLETQDGAEKQLRGLQTRGMFLASGGKWNHLLSALLGEGQTLGSLL

SEQ ID NO: 9137 - protein, 84 aa, Homo sapiens
QLRGLQTRGMFLASGGKWNHLLSALLGEGQTLGSLLLSTLQRSSPWRRKWPRAFSMRRSRCTREAWSCSSWKLGFRRLGRRTPV

SEQ ID NO: 9138 - protein, 85 aa, Homo sapiens
TQDGAEKQLRGLQTRGMFLASGGKWNHLLSALLGEGQTLGSLLLSTLQRSSPWRRKWPRAFSMRRSRCTREAWSCSSWKLGFRRL

SEQ ID NO: 9139 - protein, 85 aa, Homo sapiens
EPSRALLGCLASAAAAAPPGEDGAGAGAEEEEEEEEEAAAAVGPGELGCDAPLPYWTAVFEYEAAGEDELTLRLGDVVEVLSKDS

SEQ ID NO: 9140 - protein, 85 aa, Homo sapiens
QVSGDEGWWTGQLNQRVGIFPSNYVTPRSAFSSRCQPGGEDPSCYPPIQLLEIDFAELTLEEIIGIGGFGKVYRAFWIGDEVAVK

SEQ ID NO: 9141 - protein, 85 aa, Homo sapiens
AARHDPDEDISQTIENVRQEAKLFAMLKHPNIIALRGVCLKEPNLCLVMEFARGGPLNRVLSGKRIPPDILVNWAVQIARGMNYL

SEQ ID NO: 9142 - protein, 85 aa, Homo sapiens
HDEAIVPIIHRDLKSSNILILQKVENGDLSNKILKITDFGLAREWHRTTKMSAAGTYAWMAPEVIRASMFSKGSDVWSYGVLLWE

SEQ ID NO: 9143 - protein, 85 aa, Homo sapiens
MLTGEVPFRGIDGLAVAYGVAMNKLALPIPSTCPEPFAKLMEDCWNPDPHSRPSFTNILDQLTTIEESGFFEMPKDSFHCLQDNW

SEQ ID NO: 9144 - protein, 85 aa, Homo sapiens
KHEIQEMFDQLRAKEKELRTWEEELTRAALQQKNQEELLRRREQELAEREIDILERELNIIIHQLCQEKPRVKKRKGKFRKSRLK

SEQ ID NO: 9145 - protein, 85 aa, Homo sapiens
LKDGNRISLPSDFQHKFTVQASPTMDKRKSLINSRSSPPASPTIIPRLRAIQLTPGESSKTWGRSSVVPKEEGEEEEKRAPKKKG

SEQ ID NO: 9146 - protein, 85 aa, Homo sapiens
RTWGPGTLGQKELASGDEGLKSLVDGYKQWSSSAPNLVKGPRSSPALPGFTSLMEMEDEDSEGPGSGESRLQHSPSQSYLCIPFP

SEQ ID NO: 9147 - protein, 85 aa, Homo sapiens
RGEDGDGPSSDGIHEEPTPVNSATSTPQLTPTNSLKRGGAHHRRCEVALLGCGAVLAATGLGFDLLEAGKCQLLPLEEPEPPARE

SEQ ID NO: 9148 - protein, 85 aa, Homo sapiens
EKKRREGLFQRSSRPRRSTSPPSRKLFKKEEPMLLLGDPSASLTLLSLSSISECNSTRSLLRSDSDEIVVYEMPVSPVEAPPLSP

SEQ ID NO: 9149 - protein, 85 aa, Homo sapiens
CTHNPLVNVRVERFKRDPNQSLTPTHVTLTTPSQPSSHRRTPSDGALKPETLLASRSPSSNGLSPSPGAGMLKTPSPSRDPGEFP

SEQ ID NO: 9150 - protein, 85 aa, Homo sapiens
RLPDPNVVFPPTPRRWNTQQDSTLERPKTLEFLPRPRPSANRQRLDPWWFVSPSHARSTSPANSSSTETPSNLDSCFASSSSTVE

SEQ ID NO: 9151 - protein, 84 aa, Homo sapiens
ANSSSTETPSNLDSCFASSSSTVEERPGLPALLPFQAGPLPPTERTLLDLDAEGQSQDSTVPLCRAELNTHRPAPYEIQQEFWS

SEQ ID NO: 9152 - protein, 85 aa, Homo sapiens
GPGELGCDAPLPYWTAVFEYEAAGEDELTLRLGDVVEVLSKDSQVSGDEGWWTGQLNQRVGIFPSNYVTPRSAFSSRCQPGGEDP

SEQ ID NO: 9153 - protein, 85 aa, Homo sapiens
SCYPPIQLLEIDFAELTLEEIIGIGGFGKVYRAFWIGDEVAVKAARHDPDEDISQTIENVRQEAKLFAMLKHPNIIALRGVCLKE

SEQ ID NO: 9154 - protein, 85 aa, Homo sapiens
PNLCLVMEFARGGPLNRVLSGKRIPPDILVNWAVQIARGMNYLHDEAIVPIIHRDLKSSNILILQKVENGDLSNKILKITDFGLA

SEQ ID NO: 9155 - protein, 85 aa, Homo sapiens
REWHRTTKMSAAGTYAWMAPEVIRASMFSKGSDVWSYGVLLWELLTGEVPFRGIDGLAVAYGVAMNKLALPIPSTCPEPFAKLME

SEQ ID NO: 9156 - protein, 85 aa, Homo sapiens
DCWNPDPHSRPSFTNILDQLTTIEESGFFEMPKDSFHCLQDNWKHEIQEMFDQLRAKEKELRTWEEELTRAALQQKNQEELLRRR

SEQ ID NO: 9157 - protein, 85 aa, Homo sapiens
EQELAEREIDILERELNIIIHQLCQEKPRVKKRKGKFRKSRLKLKDGNRISLPSDFQHKFTVQASPTMDKRKSLINSRSSPPASP

SEQ ID NO: 9158 - protein, 85 aa, Homo sapiens
TIIPRLRAIQLTPGESSKTWGRSSVVPKEEGEEEEKRAPKKKGRTWGPGTLGQKELASGDEGLKSLVDGYKQWSSSAPNLVKGPR

SEQ ID NO: 9159 - protein, 85 aa, Homo sapiens
SSPALPGFTSLMEMEDEDSEGPGSGESRLQHSPSQSYLCIPFPRGEDGDGPSSDGIHEEPTPVNSATSTPQLTPTNSLKRGGAHH

SEQ ID NO: 9160 - protein, 85 aa, Homo sapiens
RRCEVALLGCGAVLAATGLGFDLLEAGKCQLLPLEEPEPPAREEKKRREGLFQRSSRPRRSTSPPSRKLFKKEEPMLLLGDPSAS

SEQ ID NO: 9161 - protein, 85 aa, Homo sapiens
MTLLSLSSISECNSTRSLLRSDSDEIVVYEMPVSPVEAPPLSPCTHNPLVNVRVERFKRDPNQSLTPTHVTLTTPSQPSSHRRTP

SEQ ID NO: 9162 - protein, 85 aa, Homo sapiens
SDGALKPETLLASRSPSSNGLSPSPGAGMLKTPSPSRDPGEFPRLPDPNVVFPPTPRRWNTQQDSTLERPKTLEFLPRPRPSANR

SEQ ID NO: 9163 - protein, 85 aa, Homo sapiens
QRLDPWWFVSPSHARSTSPANSSSTETPSNLDSCFASSSSTVEERPGLPALLPFQAGPLPPTERTLLDLDAEGQSQDSTVPLCRA

SEQ ID NO: 9164 - protein, 85 aa, Homo sapiens
PGHFTPVLAPSPHPSAVRPVTLSMTDTKPITTSTEGEAASPTATTYTASGTSQANRYVGLSPRDPSFLHQQQLRICDWTMNQNGR

SEQ ID NO: 9165 - protein, 85 aa, Homo sapiens
HPTIRYPPHLNPQDTLKNYVPSYDPSSPQTSQPNGSGQVVGKVPGHFTPVLAPSPHPSAVRPVTLSMTDTKPITTSTEGEAASPT

SEQ ID NO: 9166 - protein, 85 aa, Homo sapiens
ATTYTASGTSQANRYVGLSPRDPSFLHQQQLRICDWTMNQNGRHLYPSTSEDTLGITWQSPGTWASLVPFQVSNRTPILPANVQN

SEQ ID NO: 9167 - protein, 85 aa, Homo sapiens
MDSLKAVEVVNLSVSCTATCLPFSSVPKETPARAGFSSKQTLFPITHQPLGSFGVVSTHSSTLDEEVSERMFSFYQAKEKFKKEL

SEQ ID NO: 9168 - protein, 85 aa, Homo sapiens
KIEGFLYSDLTVLASDIPYFPPEEEEENLEDGIHLVVCVHGLDGNSADLRLVKTFIELGLPGGKLDFLMSEKNQMDTFADFDTMT

SEQ ID NO: 9169 - protein, 85 aa, Homo sapiens
DRLLDEIIQHIQLYNLSISRISFIGHSLGNIIIRSVLTRPRFRYYLNKLHTFLSLSGPHLGTLYNNSTLVSTGLWLMQKLKKSGS

SEQ ID NO: 9170 - protein, 85 aa, Homo sapiens
LLQLTFRDNADLRKCFLYQLSQKTGLQYFKNVVLVASPQDRYVPFHSARIEMCKTALKDRHTGPVYAEMINNLLGPLVEAKDCTL

SEQ ID NO: 9171 - protein, 84 aa, Homo sapiens
SARIEMCKTALKDRHTGPVYAEMINNLLGPLVEAKDCTLIRHNVFHALPNTANTLIGRAAHIAVLDSELFLEKFFLVAGLNYFK

SEQ ID NO: 9172 - protein, 85 aa, Homo sapiens
FPITHQPLGSFGVVSTHSSTLDEEVSERMFSFYQAKEKFKKELKIEGFLYSDLTVLASDIPYFPPEEEEENLEDGIHLVVCVHGL

SEQ ID NO: 9173 - protein, 85 aa, Homo sapiens
DGNSADLRLVKTFIELGLPGGKLDFLMSEKNQMDTFADFDTMTDRLLDEIIQHIQLYNLSISRISFIGHSLGNIIIRSVLTRPRF

SEQ ID NO: 9174 - protein, 85 aa, Homo sapiens
RYYLNKLHTFLSLSGPHLGTLYNNSTLVSTGLWLMQKLKKSGSLLQLTFRDNADLRKCFLYQLSQKTGLQYFKNVVLVASPQDRY

SEQ ID NO: 9175 - protein, 85 aa, Homo sapiens
VPFHSARIEMCKTALKDRHTGPVYAEMINNLLGPLVEAKDCTLIRHNVFHALPNTANTLIGRAAHIAVLDSELFLEKFFLVAGLN

SEQ ID NO: 9176 - protein, 84 aa, Homo sapiens
KTKHPQLHIESKIYKMMQGGVGIPTIRWCGAEGDYNVMVMELLGPSLEDLFNFCSRKFSLKTVLLLADQMNNPEEMTWSLWATC

SEQ ID NO: 9177 - protein, 85 aa, Homo sapiens
APNASCLCVHVRSEEWDLMTFDANPYDSVKKIKEHVRSKTKVPVQDQVLLLGSKILKPRRSLSSYGIDKEKTIHLTLKVVKPSDE

SEQ ID NO: 9178 - protein, 84 aa, Homo sapiens
KPSDEELPLFLVESGDEAKRHLLQVRRSSSVAQVKAMIETKTGIIPETQIVTCNGKRLEDGKMMADYGIRKGNLLFLACYCIGG

SEQ ID NO: 9179 - protein, 85 aa, Homo sapiens
PVQDQVLLLGSKILKPRRSLSSYGIDKEKTIHLTLKVVKPSDEELPLFLVESGDEAKRHLLQVRRSSSVAQVKAMIETKTGIIPE

SEQ ID NO: 9180 - protein, 85 aa, Homo sapiens
IKIFSLSPNFRAEKCLRDHLVQPLRSNGEPEPLRFTGEYCLLRTLKQCQTLREALIAAGKEIIWHGRTKEEPAHYCSICEVEVFD

SEQ ID NO: 9181 - protein, 85 aa, Homo sapiens
RTLKQCQTLREALIAAGKEIIWHGRTKEEPAHYCSICEVEVFDLLFVTNESNSRKTYIVHCQDCARKTSGNLENFVVLEQYKMED

SEQ ID NO: 9182 - protein, 22 aa, Homo sapiens
GPKAQELEVSEDEADVAPAAHV

SEQ ID NO: 9183 - protein, 84 aa, Homo sapiens
LAPALPAWPHRGLSTFPGAEHCLRASPETTLSSGFFVAVIERVEVPSSASQAKASAPERTPSPAPKRKKRQQRAAAGACTPPCT

SEQ ID NO: 9184 - protein, 85 aa, Homo sapiens
ASWLPETLFETVGQGPPPSKDYYQLLVTRSQVIFRWWKISLRSEYRSTKPGEAKETHEDFLENSHLQGKFDFLERLSDDLLLTII

SEQ ID NO: 9185 - protein, 85 aa, Homo sapiens
SEYRSTKPGEAKETHEDFLENSHLQGKFDFLERLSDDLLLTIISYLDLEDIARLCQTSHRFAKLCMSDKLWEQIVQSTCDTITPD

SEQ ID NO: 9186 - protein, 84 aa, Homo sapiens
PTFGLNTPAPGVGTSGSSLSFGASSAPAQGFVGVAPFGNTFAHQQEHSPRKGPNNLSKRKLLPAVRAQGLPRRGQASSFPTRKE

SEQ ID NO: 9187 - protein, 85 aa, Homo sapiens
TPFAFNVSSTTESKPVFGGTATPTFGLNTPAPGVGTSGSSLSFGASSAPAQGFVGVAPFGNTFAHQQEHSPRKGPNNLSKRKLLP

SEQ ID NO: 9188 - protein, 85 aa, Homo sapiens
MSRGWFHRDLSGLDAETLLKGRGVHGSFLARPSRKNQGDFSLSVRVGDQVTHIRIQNSGDFYDLYGGEKFATLTELVEYYTQQQG

SEQ ID NO: 9189 - protein, 85 aa, Homo sapiens
VLQDRDGTIIHLKYPLNCSDPTSERWYHGHMSGGQAETLLQAKGEPWTFLVRESLSQPGDFVLSVLSDQPKAGPGSPLRVTHIKV

SEQ ID NO: 9190 - protein, 85 aa, Homo sapiens
MCEGGRYTVGGLETFDSLTDLVEHFKKTGIEEASGAFVYLRQPYYATRVNAADIENRVLELNKKQESEDTAKAGFWEEFESLQKQ

SEQ ID NO: 9191 - protein, 85 aa, Homo sapiens
EVKNLHQRLEGQRPENKGKNRYKNILPFDHSRVILQGRDSNIPGSDYINANYIKNQLLGPDENAKTYIASQGCLEATVNDFWQMA

SEQ ID NO: 9192 - protein, 85 aa, Homo sapiens
WQENSRVIVMTTREVEKGRNKCVPYWPEVGMQRAYGPYSVTNCGEHDTTEYKLRTLQVSPLDNGDLIREIWHYQYLSWPDHGVPS

SEQ ID NO: 9193 - protein, 85 aa, Homo sapiens
EPGGVLSFLDQINQRQESLPHAGPIIVHCSAGIGRTGTIIVIDMLMENISTKGLDCDIDIQKTIQMVRAQRSGMVQTEAQYKFIY

SEQ ID NO: 9194 - protein, 85 aa, Homo sapiens
VAIAQFIETTKKKLEVLQSQKGQESEYGNITYPPAMKNAHAKASRTSSKHKEDVYENLHTKNKREEKVKKQRSADKEKSKGSLKR

SEQ ID NO: 9195 - protein, 85 aa, Homo sapiens
SVRVGDQVTHIRIQNSGDFYDLYGGEKFATLTELVEYYTQQQGVLQDRDGTIIHLKYPLNCSDPTSERWYHGHMSGGQAETLLQA

SEQ ID NO: 9196 - protein, 85 aa, Homo sapiens
KGEPWTFLVRESLSQPGDFVLSVLSDQPKAGPGSPLRVTHIKVMCEGGRYTVGGLETFDSLTDLVEHFKKTGIEEASGAFVYLRQ

SEQ ID NO: 9197 - protein, 85 aa, Homo sapiens
PYYATRVNAADIENRVLELNKKQESEDTAKAGFWEEFESLQKQEVKNLHQRLEGQRPENKGKNRYKNILPFDHSRVILQGRDSNI

SEQ ID NO: 9198 - protein, 85 aa, Homo sapiens
PGSDYINANYIKNQLLGPDENAKTYIASQGCLEATVNDFWQMAWQENSRVIVMTTREVEKGRNKCVPYWPEVGMQRAYGPYSVTN

SEQ ID NO: 9199 - protein, 85 aa, Homo sapiens
CGEHDTTEYKLRTLQVSPLDNGDLIREIWHYQYLSWPDHGVPSEPGGVLSFLDQINQRQESLPHAGPIIVHCSAGIGRTGTIIVI

SEQ ID NO: 9200 - protein, 85 aa, Homo sapiens
DMLMENISTKGLDCDIDIQKTIQMVRAQRSGMVQTEAQYKFIYVAIAQFIETTKKKLEVLQSQKGQESEYGNITYPPAMKNAHAK

SEQ ID NO: 9201 - protein, 85 aa, Homo sapiens
HHHPGIPGVAHSVISTRTPPPPSPLPFPTQAILPPAPSSYFSHPTIRYPPHLNPQDTLKNYVPSYDPSSPQTSQLRICDWTMNQN

SEQ ID NO: 9202 - protein, 84 aa, Homo sapiens
PSYDPSSPQTSQLRICDWTMNQNGRHLYPSTSEDTLGITWQSPGTWASLVPFQVSNRTPILPANVQNYGLNIIGEPFLQAETSN

SEQ ID NO: 9203 - protein, 85 aa, Homo sapiens
HPTIRYPPHLNPQDTLKNYVPSYDPSSPQTSQLRICDWTMNQNGRHLYPSTSEDTLGITWQSPGTWASLVPFQVSNRTPILPANV

SEQ ID NO: 9204 - protein, 85 aa, Homo sapiens
KPQRNTADLLPKLKSMALADRAVFEKGMKAFVSYVQAYAKHECNLIFRLKDLDFASLARGFALLRMPKMPELRGKQFPDFVPVDV

SEQ ID NO: 9205 - protein, 85 aa, Homo sapiens
NTDTIPFKDKIREKQRQKLLEQQRREKTENEGRRKFIKNKAWSKQKAKKEKKKKMNEKRKREEGSDIEDEDMEELLNDTRLLKKL

SEQ ID NO: 9206 - protein, 85 aa, Homo sapiens
CNLIFRLKDLDFASLARGFALLRMPKMPELRGKQFPDFVPVDVNTDTIPFKDKIREKQRQKLLEQQRREKTENEGRRKFIKNKAW

SEQ ID NO: 9207 - protein, 84 aa, Homo sapiens
ELVSTHGYSQNQILVWKYPSLTQVAKLTGHSYRVLYLAMSPDGEAIVTGAGDETLRFWNVFSKTRSTKVKWESVSVLNLFTRIR

SEQ ID NO: 9208 - protein, 85 aa, Homo sapiens
VAGRLHRNREDYVERSAEFADGLLSKALKDIQSGALDINKAGILYGIPQKTLLLHLEALPAGKPASFKNKTRDFHDSYSYKDSKE

SEQ ID NO: 9209 - protein, 85 aa, Homo sapiens
TCAVLQKVALWARAQAERTEKSKLNLLETSEIKFPTASTYLHQLTLQKMVTQFKEKNESLQYETSNPTVQLKIPQLRVSSVSKSQ

SEQ ID NO: 9210 - protein, 85 aa, Homo sapiens
PDGSGLLDVMYQVSKTSSVLEGSALQKLKNILPKQNKIECSGPVTHSSVDSYFLHGDLSPLCLNSKNGTVDGTSENTEDGLDRKD

SEQ ID NO: 9211 - protein, 85 aa, Homo sapiens
SKQPRKKRGRYRQYDHEIMEEAIAMVMSGKMSVSKAQGIYGVPHSTLEYKVKERSGTLKTPPKKKLRLPDTGLYNMTDSGTGSCK

SEQ ID NO: 9212 - protein, 84 aa, Homo sapiens
RGRYRQYDHEIMEEAIAMVMSGKMSVSKAQGIYGVPHSTLEYKVKERSGTLKTPPKKKLRLPDTGLYNMTDSGTGSCKNSSKPV

SEQ ID NO: 9213 - protein, 85 aa, Homo sapiens
DLTVNRMQEQNTQQGDGVLDLSTKKTSIKSEESSICDPSSENSVAGRLHRNREDYVERSAEFADGLLSKALKDIQSGALDINKAG

SEQ ID NO: 9214 - protein, 85 aa, Homo sapiens
ILYGIPQKTLLLHLEALPAGKPASFKNKTRDFHDSYSYKDSKETCAVLQKVALWARAQAERTEKSKLNLLETSEIKFPTASTYLH

SEQ ID NO: 9215 - protein, 85 aa, Homo sapiens
QLTLQKMVTQFKEKNESLQYETSNPTVQLKIPQLRVSSVSKSQPDGSGLLDVMYQVSKTSSVLEGSALQKLKNILPKQNKIECSG

SEQ ID NO: 9216 - protein, 85 aa, Homo sapiens
PVTHSSVDSYFLHGDLSPLCLNSKNGTVDGTSENTEDGLDRKDSKQPRKKRGRYRQYDHEIMEEAIAMVMSGKMSVSKAQGIYGV

SEQ ID NO: 9217 - protein, 85 aa, Homo sapiens
DEKCSFCNLQREAVSDCIPSLDSSQSTPTEELSSQGQSNTDKIECQAENYLNALFRKKDLPQNCDPNIPLVAQELMKKMIRQFAI

SEQ ID NO: 9218 - protein, 85 aa, Homo sapiens
EYISKSGKTQENRNGSIGPSIVCKSIQMNQAENSLQEEQEGPLDLTVNRMQEQNTQQGDGVLDLSTKKTSIKSEESSICDPSSEN

SEQ ID NO: 9219 - protein, 85 aa, Homo sapiens
SVAGRLHRNREDYVERSAEFADGLLSKALKDIQSGALDINKAGILYGIPQKTLLLHLEALPAGKPASFKNKTRDFHDSYSYKDSK

SEQ ID NO: 9220 - protein, 85 aa, Homo sapiens
ETCAVLQKVALWARAQAERTEKSKLNLLETSEIKFPTASTYLHQLTLQKMVTQFKEKNESLQYETSNPTVQLKIPQLRVSSVSKS

SEQ ID NO: 9221 - protein, 85 aa, Homo sapiens
QPDGSGLLDVMYQVSKTSSVLEGSALQKLKNILPKQNKIECSGPVTHSSVDSYFLHGDLSPLCLNSKNGTVDGTSENTEDGLDRK

SEQ ID NO: 9222 - protein, 85 aa, Homo sapiens
DSKQPRKKRGRYRQYDHEIMEEAIAMVMSGKMSVSKAQGIYGVPHSTLEYKVKERSGTLKTPPKKKLRLPDTGLYNMTDSGTGSC

SEQ ID NO: 9223 - protein, 85 aa, Homo sapiens
IECQAENYLNALFRKKDLPQNCDPNIPLVAQELMKKMIRQFAIEYISKSGKTQENRNGSIGPSIVCKSIQMNQAENSLQEEQEGP

SEQ ID NO: 9224 - protein, 85 aa, Homo sapiens
LDLTVNRMQEQNTQQGDGVLDLSTKKTSIKSEESSICDPSSENSVAGRLHRNREDYVERSAEFADGLLSKALKDIQSGALDINKA

SEQ ID NO: 9225 - protein, 85 aa, Homo sapiens
GILYGIPQKTLLLHLEALPAGKPASFKNKTRDFHDSYSYKDSKETCAVLQKVALWARAQAERTEKSKLNLLETSEIKFPTASTYL

SEQ ID NO: 9226 - protein, 85 aa, Homo sapiens
HQLTLQKMVTQFKEKNESLQYETSNPTVQLKIPQLRVSSVSKSQPDGSGLLDVMYQVSKTSSVLEGSALQKLKNILPKQNKIECS

SEQ ID NO: 9227 - protein, 85 aa, Homo sapiens
GPVTHSSVDSYFLHGDLSPLCLNSKNGTVDGTSENTEDGLDRKDSKQPRKKRGRYRQYDHEIMEEAIAMVMSGKMSVSKAQGIYG

SEQ ID NO: 9228 - protein, 85 aa, Homo sapiens
PAAPPVPAANEIATNKPKITWQALNLPVITQISQALPTTEVTNTQASSVTAQPKKANKMKRVTAKAAQGSQSPTGHEGGTIQLKS

SEQ ID NO: 9229 - protein, 83 aa, Homo sapiens
PTATTTGGASMTAQGTCCTGGRRPPTAASCERLSASSVSMTTSLSTTSGPIRSGCGSTAQSTHFPGSSTHMTSSSSLPLPRTG

SEQ ID NO: 9230 - protein, 56 aa, Homo sapiens
TTSLSTTSGPIRSGCGSTAQSTHFPGSSTHMTSSSSLPLPRTGASSGGRSPSTCRC

SEQ ID NO: 9231 - protein, 85 aa, Homo sapiens
ASSLNEDPEGSRITYVKGDLFACPKTDSLAHCISEDCRMGAGIAVLFKKKFGGVQELLNQQKKSGEVAVLKRDGRYIYYLITKKR

SEQ ID NO: 9232 - protein, 84 aa, Homo sapiens
AVLKRDGRYIYYLITKKRASHKPTYENLQKSLEAMKSHCLKNGVTDLSMPRIGCGLDRLQWENVSAMIEEVFEATDIKITVYTL

SEQ ID NO: 9233 - protein, 85 aa, Homo sapiens
IAVLFKKKFGGVQELLNQQKKSGEVAVLKRDGRYIYYLITKKRASHKPTYENLQKSLEAMKSHCLKNGVTDLSMPRIGCGLDRLQ

SEQ ID NO: 9234 - protein, 84 aa, Homo sapiens
PGIDYVQIGFPPLLSIVSRMNQATVTSVLEYLSNWFGERDFTPELGRWLYALLACLEKPLLPEAHSLIRQLARRCSEVRLLVVF

SEQ ID NO: 9235 - protein, 85 aa, Homo sapiens
GGAEWESEQTGVKTFGPFGSGSQDNLTMYMDLVDGIFLNQIMLQIDPRPTNQRINKHVNNDVNLRIQNLTILVRNIKTYYQDRPF

SEQ ID NO: 9236 - protein, 84 aa, Homo sapiens
EWESEQTGVKTFGPFGSGSQDNLTMYMDLVDGIFLNQIMLQIDPRPTNQRINKHVNNDVNLRIQNLTILVRNIKTYYQDRPFFR

SEQ ID NO: 9237 - protein, 85 aa, Homo sapiens
DLKNCNKNYHFFCAKKDDAVPQSDGVRGIYKLLCQQHAQFPIIAQSAKFSGVKRKRGRKKPLSGNHVQPPETMKCNTFIRQVKEE

SEQ ID NO: 9238 - protein, 84 aa, Homo sapiens
DSHYLESRSINEKDYHSRRYIDEYRNDYTQGCEPGHRQRDHESRYQNHSSKSSGRSGRSSYKSKHRIHHSTSHRRSHGMKLLIL

SEQ ID NO: 9239 - protein, 85 aa, Homo sapiens
AAHSQICPGGKPHECSVCGRAFSRKAQLIQHQRTERGEKPHGCGECGKTFMRKIQLTEHQRTHTGEKPHECSECGKAFSRKSQLM

SEQ ID NO: 9240 - protein, 85 aa, Homo sapiens
VHQRTHTGEKPYRCSKCGKAFSRKCRLNRHQRSHTGEKLYGCSVCGKAFSQKAYLTAHQRLHTGDKPYKCSDCGRTFYFKSDLTR

SEQ ID NO: 9241 - protein, 85 aa, Homo sapiens
HQRIHTGEKPYECSECEKAFRSKSKLIQHQRTHTGERPYSCRECGKAFAHMSVLIKHEKTHIRETAINSLTVEKPSSRSHTSLYM

SEQ ID NO: 9242 - protein, 85 aa, Homo sapiens
SELIQEQKTVNTVPIEMPSSGTPPLLNKSERLVGRNVVIVEQPFPRNQAFVVNQEFEQRISLTNEVNVAPSVINYILYLTDIVSE

SEQ ID NO: 9243 - protein, 85 aa, Homo sapiens
QKVLYKEVMLENYINLVSIGYRGTKPDSLFKLEQGEPPGIAEGAAHSQICPGGKPHECSVCGRAFSRKAQLIQHQRTERGEKPHG

SEQ ID NO: 9244 - protein, 85 aa, Homo sapiens
CGECGKTFMRKIQLTEHQRTHTGEKPHECSECGKAFSRKSQLMVHQRTHTGEKPYRCSKCGKAFSRKCRLNRHQRSHTGEKLYGC

SEQ ID NO: 9245 - protein, 85 aa, Homo sapiens
SVCGKAFSQKAYLTAHQRLHTGDKPYKCSDCGRTFYFKSDLTRHQRIHTGEKPYECSECEKAFRSKSKLIQHQRTHTGERPYSCR

SEQ ID NO: 9246 - protein, 85 aa, Homo sapiens
ECGKAFAHMSVLIKHEKTHIRETAINSLTVEKPSSRSHTSLYMSELIQEQKTVNTVPIEMPSSGTPPLLNKSERLVGRNVVIVEQ

SEQ ID NO: 9247 - protein, 85 aa, Homo sapiens
ALEGMSKRKRKRSVQEGENPDDGVRGSPPEDYRLGQVASSLFRGEHHSRGGTGRLASLFSSLEPQIQPVYVPVPKQTIKKTKRNE

SEQ ID NO: 9248 - protein, 85 aa, Homo sapiens
EEESTSQIERPLSQEPAKKVKAKKKHTNAEKKLADRESALASADLEEEIHQKQGQKRKNSQPGVKVADRKILDDTEDTVVSQRKK

SEQ ID NO: 9249 - protein, 85 aa, Homo sapiens
IQINQEEERLKNERTVFVGNLPVTCNKKKLKSFFKEYGQIESVRFRSLIPAEGTLSKKLAAIKRKIHPDQKNINAYVVFKEESAA

SEQ ID NO: 9250 - protein, 85 aa, Homo sapiens
TQALKRNGAQIADGFRIRVDLASETSSRDKRSVFVGNLPYKVEESAIEKHFLDCGSIMAVRIVRDKMTGIGKGFGYVLFENTDSV

SEQ ID NO: 9251 - protein, 85 aa, Homo sapiens
HLALKLNNSELMGRKLRVMRSVNKEKFKQQNSNPRLKNVSKPKQGLNFTSKTAEGHPKSLFIGEKAVLLKTKKKGQKKSGRPKKQ

SEQ ID NO: 9252 - protein, 84 aa, Homo sapiens
LNNSELMGRKLRVMRSVNKEKFKQQNSNPRLKNVSKPKQGLNFTSKTAEGHPKSLFIGEKAVLLKTKKKGQKKSGRPKKQRKQK

SEQ ID NO: 9253 - protein, 85 aa, Homo sapiens
RGEHHSRGGTGRLASLFSSLEPQIQPVYVPVPKQTIKKTKRNEEEESTSQIERPLSQEPAKKVKAKKKHTNAEKKLADRESALAS

SEQ ID NO: 9254 - protein, 85 aa, Homo sapiens
ADLEEEIHQKQGQKRKNSQPGVKVADRKILDDTEDTVVSQRKKIQINQEEERLKNERTVFVGNLPVTCNKKKLKSFFKEYGQIES

SEQ ID NO: 9255 - protein, 85 aa, Homo sapiens
VRFRSLIPAEGTLSKKLAAIKRKIHPDQKNINAYVVFKEESAATQALKRNGAQIADGFRIRVDLASETSSRDKRSVFVGNLPYKV

SEQ ID NO: 9256 - protein, 85 aa, Homo sapiens
EESAIEKHFLDCGSIMAVRIVRDKMTGIGKGFGYVLFENTDSVHLALKLNNSELMGRKLRVMRSVNKEKFKQQNSNPRLKNVSKP

SEQ ID NO: 9257 - protein, 84 aa, Homo sapiens
GSSHSNSSSSSLTEKDQHHPKHHHHHHHHHHRHSSSHHKISNLSPEEEQGLWKQSHKSSATIQNETPKKKPKLESKPSNGDRCM

SEQ ID NO: 9258 - protein, 85 aa, Homo sapiens
EGLEASIEQFQFNPRLNISDDLKIGFFSTDHATQTDSSEILSVKELSSSTQKLAQMMKSLQVDFGFLKQLLQLKFEDRLKEESLS

SEQ ID NO: 9259 - protein, 85 aa, Homo sapiens
LFTILHDRILEIEKHYQQNEDKMRKSFNQQLADAIAVIKGMYQQFFEVEEENVSLQDASTVKTNILLRKLKEKEEVIKELKEELD

SEQ ID NO: 9260 - protein, 85 aa, Homo sapiens
QYKDFGFHKMESFAKETSSPKSNLEKENLEYKVENERLLQIISELEEEIQINLKENSGLEDELISMKEMAEKDHKTIQKLMDSRD

SEQ ID NO: 9261 - protein, 85 aa, Homo sapiens
RLLQIISELEEEIQINLKENSGLEDELISMKEMAEKDHKTIQKLMDSRDRLREELHYEKSLVQDVINKQKEDKEMRKKYGSLSVK

SEQ ID NO: 9262 - protein, 85 aa, Homo sapiens
VKELSSSTQKLAQMMKSLQVDFGFLKQLLQLKFEDRLKEESLSLFTILHDRILEIEKHYQQNEDKMRKSFNQQLADAIAVIKGMY

SEQ ID NO: 9263 - protein, 85 aa, Homo sapiens
QQFFEVEEENVSLQDASTVKTNILLRKLKEKEEVIKELKEELDQYKDFGFHKMESFAKETSSPKSNLEKENLEYKVENERLLQII

SEQ ID NO: 9264 - protein, 20 aa, Homo sapiens
FYGCEVSSLASPSIGISTAC

SEQ ID NO: 9265 - protein, 6 aa, Homo sapiens
PSWNNL

SEQ ID NO: 9266 - protein, 84 aa, Homo sapiens
VTTQEVQVGQKHQGAGEPSRGDPHTSNSASLQGIDSQCVNQPEQLVSSAPTLSAPEKESTGTSGPLQRPQLSKVKRKKPRGLFS

SEQ ID NO: 9267 - protein, 5 aa, Homo sapiens
HYSAK

SEQ ID NO: 9268 - protein, 85 aa, Homo sapiens
IKVRNKTANGDCRRDPRERSRSPIERAVAPTMSLHGSHLYTSLPSLGLEQPLALTKNSLDASRPAGLSPTLTPGERQQNRPSVIT

SEQ ID NO: 9269 - protein, 85 aa, Homo sapiens
IEDKGPRVADYFVVAGLTDVSKPLEEEIHFNDACHKVAKPKEPITDVSVIIKSLGEEVPQDYICIDVTPTGLSADLNNGSLVGPQ

SEQ ID NO: 9270 - protein, 85 aa, Homo sapiens
IYLCYRRGRDKPPLTDLGVLYDWKERLKQGCEIIQSTPYGRPANISGSTSSQRIYITYRRASENMTQNTLAVTDICIIIPSKGES

SEQ ID NO: 9271 - protein, 85 aa, Homo sapiens
PPHTFCKVDKNLNNSMWGSAVYLCYKKSVAKTNTVSYKAGLICRYPQEDYESFSLPESVPLFCLPMGATIECWPSNSKYPLPVFS

SEQ ID NO: 9272 - protein, 85 aa, Homo sapiens
TFVLTGASAEKVYGAAIQFYEPYSEENLTEKQRLLLGLTSADGKSDSSKTIHTNKCICLLSHWPFFDAFRKFLTFLYRYSISGPH

SEQ ID NO: 9273 - protein, 85 aa, Homo sapiens
VLPIEKHISHFMHKVPFPSPQRPRILVQLSPHDNLILSQPVSSPLPLSGGKFSTLLQNLGPENAVTLLVFAVTEHKILIHSLRPS

SEQ ID NO: 9274 - protein, 85 aa, Homo sapiens
VLTSVTEALVSMIFPFHWPCPYVPLCPLALADVLSAPCPFIVGIDSRYFDLYDPPPDVSCVDVDTNTISQIGDKKNVAWKILPKK

SEQ ID NO: 9275 - protein, 85 aa, Homo sapiens
PCKNLMNTLNNLHQQLAKLQQRPRDDGLMDLAINDYDFNSGKRLHMIDLEIQEAFLFFMASILKGYRSYLRPITQAPSETATDAA

SEQ ID NO: 9276 - protein, 85 aa, Homo sapiens
SLFALQAFLRSRDRSHQKFYNMMTKTQMFIRFIEECSFVSDKDASLAFFDDCVDKVDMDKSGEVRLIELDESFKSEHTVFVTPPE

SEQ ID NO: 9277 - protein, 85 aa, Homo sapiens
IPHLPNGEEPPLQYSYNGFPVLRNNLFERPEGFLQAKKNKLPSKSSSPNSPLPMFRRTKQEIKSAHKIAKRYSSIPQMWSRCLLR

SEQ ID NO: 9278 - protein, 85 aa, Homo sapiens
HCYGLWFICLPAYVKVCHSKVRALKTAYDVLKKMQSKKMDPPDEVCYRILMQLCGQYDQPVLAVRVLFEMQKAGIDPNAITYGYY

SEQ ID NO: 9279 - protein, 85 aa, Homo sapiens
NKAVLESTWPSRSRSGYFLWTKVRNVVLGVTQFKRALKKHAHLSQTTLSADGSDLDAVSHGSMDSGHGTHTVEQAPFNTGLIKVY

SEQ ID NO: 9280 - protein, 85 aa, Homo sapiens
ATDDRSSTGGQSDLGYNSLSKDEVRRGDTSTEDIQEEKDKKGSDCSSLSESESTKGSADCLPKLSYQNSSSIVRLTGTSNNSAGK

SEQ ID NO: 9281 - protein, 85 aa, Homo sapiens
ISGESMESTPELLLISSLEDTNETRNIQSRCFRKRHKSDNETNLQQQVVWGNRNRNLSGGVLMGFMLNRINQEATPGDIVEKLGA

SEQ ID NO: 9282 - protein, 85 aa, Homo sapiens
DAKILSNVISKSTRPNTLDIGKPPLRSKRDSLEKESSDDDTPFDGSNYLADKVDSPVIFDLEDLDSETDVSKAGCVATQNPKRIQ

SEQ ID NO: 9283 - protein, 85 aa, Homo sapiens
RMNSSFSVKPFEKTDVATGFDPLSLLVAETEQQQKEEEEEDEDDSKSISTPSARRDLAEEIVMYMNNMSSPLTSRTPSIDLQRAC

SEQ ID NO: 9284 - protein, 85 aa, Homo sapiens
DDKLNKKSPPLVKACRRSSLPPNSPKPVRLTKSKSYTKSEEKPRDRLWSSPAFSPTCPFREESQDTLTHSSPSFNLDTLLVPKLD

SEQ ID NO: 9285 - protein, 85 aa, Homo sapiens
VLRNSMFTAGKGVAEKASKWYSRFTMYTTSSKDQSSDRTSLSSVGAQDSESTSLTDEDVCHELEGPISSQETSATSGTKRIDLSR

SEQ ID NO: 9286 - protein, 85 aa, Homo sapiens
ISLESSASLEGSLSKFALPGKSEVTSSFNASNTNIFQNYAMEVLISSCSRCRTCDCLVHDEEIMAGWTADDSNLNTTCPFCGNIF

SEQ ID NO: 9287 - protein, 85 aa, Homo sapiens
LPFLNIEIRDLRRPGRYFLKSSPSTENMHFPSSISSQTRQSCISTSASGLDTSALSVQGNFDLNSKSKLQENFCTRSIQIPANRS

SEQ ID NO: 9288 - protein, 85 aa, Homo sapiens
KTAMSKCPIFPMARSISTSGPLDKEDTGRQKLISTGSLPATLQGATDSLGLEWHLPSPDPVTVPYLSPLVVWKELESLLENEGDH

SEQ ID NO: 9289 - protein, 85 aa, Homo sapiens
AITVADFVDHHPIVFWNLVWYFRRLDLPSNLPGLILSSEHCNKYSKIPRHCMSEDSKYVLIQMLWDNMKLHQDPGQPLYILWNAH

SEQ ID NO: 9290 - protein, 85 aa, Homo sapiens
TQKYPMVHLLQKSDNSFNQELLKSMVKSIKMNDVYGPMSQILETLNKCPHFKRQRSLYREILFLSLVALGRENIDIDAFDKEYKM

SEQ ID NO: 9291 - protein, 84 aa, Homo sapiens
MSQILETLNKCPHFKRQRSLYREILFLSLVALGRENIDIDAFDKEYKMAYDRLTPSQVKSTHNCDRPPSTGVMECRKTFGEPYL

SEQ ID NO: 9292 - protein, 85 aa, Homo sapiens
PITDVSVIIKSLGEEVPQDYICIDVTPTGLSADLNNGSLVGPQIYLCYRRGRDKPPLTDLGVLYDWKERLKQGCEIIQSTPYGRP

SEQ ID NO: 9293 - protein, 85 aa, Homo sapiens
ANISGSTSSQRIYITYRRASENMTQNTLAVTDICIIIPSKGESPPHTFCKVDKNLNNSMWGSAVYLCYKKSVAKTNTVSYKAGLI

SEQ ID NO: 9294 - protein, 85 aa, Homo sapiens
CRYPQEDYESFSLPESVPLFCLPMGATIECWPSNSKYPLPVFSTFVLTGASAEKVYGAAIQFYEPYSEENLTEKQRLLLGLTSAD

SEQ ID NO: 9295 - protein, 85 aa, Homo sapiens
GKSDSSKTIHTNKCICLLSHWPFFDAFRKFLTFLYRYSISGPHVLPIEKHISHFMHKVPFPSPQRPRILVQLSPHDNLILSQPVS

SEQ ID NO: 9296 - protein, 85 aa, Homo sapiens
SPLPLSGGKFSTLLQNLGPENAVTLLVFAVTEHKILIHSLRPSVLTSVTEALVSMIFPFHWPCPYVPLCPLALADVLSAPCPFIV

SEQ ID NO: 9297 - protein, 85 aa, Homo sapiens
GIDSRYFDLYDPPPDVSCVDVDTNTISQIGDKKNVAWKILPKKPCKNLMNTLNNLHQQLAKLQQRPRDDGLMDLAINDYDFNSGK

SEQ ID NO: 9298 - protein, 85 aa, Homo sapiens
RLHMIDLEIQEAFLFFMASILKGYRSYLRPITQAPSETATDAASLFALQAFLRSRDRSHQKFYNMMTKTQMFIRFIEECSFVSDK

SEQ ID NO: 9299 - protein, 85 aa, Homo sapiens
DASLAFFDDCVDKVDMDKSGEVRLIELDESFKSEHTVFVTPPEIPHLPNGEEPPLQYSYNGFPVLRNNLFERPEGFLQAKKNKLP

SEQ ID NO: 9300 - protein, 85 aa, Homo sapiens
SKSSSPNSPLPMFRRTKQEIKSAHKIAKRYSSIPQMWSRCLLRHCYGLWFICLPAYVKVCHSKVRALKTAYDVLKKMQSKKMDPP

SEQ ID NO: 9301 - protein, 85 aa, Homo sapiens
DEVCYRILMQLCGQYDQPVLAVRVLFEMQKAGIDPNAITYGYYNKAVLESTWPSRSRSGYFLWTKVRNVVLGVTQFKRALKKHAH

SEQ ID NO: 9302 - protein, 85 aa, Homo sapiens
LSQTTLSADGSDLDAVSHGSMDSGHGTHTVEQAPFNTGLIKVYATDDRSSTGGQSDLGYNSLSKDEVRRGDTSTEDIQEEKDKKG

SEQ ID NO: 9303 - protein, 85 aa, Homo sapiens
SDCSSLSESESTKGSADCLPKLSYQNSSSIVRLTGTSNNSAGKISGESMESTPELLLISSLEDTNETRNIQSRCFRKRHKSDNET

SEQ ID NO: 9304 - protein, 85 aa, Homo sapiens
NLQQQVVWGNRNRNLSGGVLMGFMLNRINQEATPGDIVEKLGADAKILSNVISKSTRPNTLDIGKPPLRSKRDSLEKESSDDDTP

SEQ ID NO: 9305 - protein, 85 aa, Homo sapiens
FDGSNYLADKVDSPVIFDLEDLDSETDVSKAGCVATQNPKRIQRMNSSFSVKPFEKTDVATGFDPLSLLVAETEQQQKEEEEEDE

SEQ ID NO: 9306 - protein, 85 aa, Homo sapiens
DDSKSISTPSARRDLAEEIVMYMNNMSSPLTSRTPSIDLQRACDDKLNKKSPPLVKACRRSSLPPNSPKPVRLTKSKSYTKSEEK

SEQ ID NO: 9307 - protein, 85 aa, Homo sapiens
PRDRLWSSPAFSPTCPFREESQDTLTHSSPSFNLDTLLVPKLDVLRNSMFTAGKGVAEKASKWYSRFTMYTTSSKDQSSDRTSLS

SEQ ID NO: 9308 - protein, 85 aa, Homo sapiens
SVGAQDSESTSLTDEDVCHELEGPISSQETSATSGTKRIDLSRISLESSASLEGSLSKFALPGKSEVTSSFNASNTNIFQNYAME

SEQ ID NO: 9309 - protein, 85 aa, Homo sapiens
VLISSCSRCRTCDCLVHDEEIMAGWTADDSNLNTTCPFCGNIFLPFLNIEIRDLRRPGRYFLKSSPSTENMHFPSSISSQTRQSC

SEQ ID NO: 9310 - protein, 85 aa, Homo sapiens
ISTSASGLDTSALSVQGNFDLNSKSKLQENFCTRSIQIPANRSKTAMSKCPIFPMARSISTSGPLDKEDTGRQKLISTGSLPATL

SEQ ID NO: 9311 - protein, 85 aa, Homo sapiens
QGATDSLGLEWHLPSPDPVTVPYLSPLVVWKELESLLENEGDHAITVADFVDHHPIVFWNLVWYFRRLDLPSNLPGLILSSEHCN

SEQ ID NO: 9312 - protein, 85 aa, Homo sapiens
KYSKIPRHCMSEDSKYVLIQMLWDNMKLHQDPGQPLYILWNAHTQKYPMVHLLQKSDNSFNQELLKSMVKSIKMNDVYGPMSQIL

SEQ ID NO: 9313 - protein, 85 aa, Homo sapiens
FSMEPGDEDLDCDNDHVSKMSRIFNPHLNKTANGDCRRDPRERSRSPIERAVAPTMSLHGSHLYTSLPSLGLEQPLALTKNSLDA

SEQ ID NO: 9314 - protein, 85 aa, Homo sapiens
AQISSGGGGQSRCLLFALVLAICVHSQGSEMGSEKEQSPEPHLPEEGEGGKPWRVDDSEGSWIPPGEKEHGQESLSDELQETHPK

SEQ ID NO: 9315 - protein, 85 aa, Homo sapiens
EGGKPWRVDDSEGSWIPPGEKEHGQESLSDELQETHPKKPWQKVTVRARELGDPIAHPRHEADEKPFICAQCGKTFNNTSNLRTH

SEQ ID NO: 9316 - protein, 85 aa, Homo sapiens
VRSGKNGDLHLKQIAYYKRTGEYHSTTLPSERSGIRRAAKKFVFKEKKLFYVGKDRKQNRLVIVSEEEKKKVLRECHENDSGAHH

SEQ ID NO: 9317 - protein, 85 aa, Homo sapiens
GISRTLTLVESNYYWTSVTNDVKQWVYACQHCQVAKNTVIVAPKQHLLKVENPWSLVTVDLMGPFHTSNRSHVYAIIMTDLFTKW

SEQ ID NO: 9318 - protein, 85 aa, Homo sapiens
IVILPLCDVSASEVSKAIINIFFLYGPPQKIIMDQRDEFIQQINIELYRLFGIKQIVISHTSGTVNPTESTPNTIKAFLSKHCAD

SEQ ID NO: 9319 - protein, 85 aa, Homo sapiens
HPNNWDDHLSAVSFAFNVTHLEPTKNTPYFQMFSRNPYMPETSDSLHEVDGDNTSMFAKILDAIKEADKIMENKTTSLGQMENNN

SEQ ID NO: 9320 - protein, 85 aa, Homo sapiens
MDELNKSKIIVKKKPKQLNPFHLKVGHEVLRQRKNWWKDGRFQSEWVGPCVIDYITESGCAVLRDNTGVRLKRPIKMSHLKPYIR

SEQ ID NO: 9321 - protein, 85 aa, Homo sapiens
ESSEQESLYLLQGSVVADHDYIGLPEIPIGAYQANILVEDATIGIVDNELLTSSKDRELLEYRNTKISPLIDDHSSLEKQTFSLL

SEQ ID NO: 9322 - protein, 84 aa, Homo sapiens
GSVVADHDYIGLPEIPIGAYQANILVEDATIGIVDNELLTSSKDRELLEYRNTKISPLIDDHSSLEKQTFSLLDSSNQVLEYLS

SEQ ID NO: 9323 - protein, 85 aa, Homo sapiens
VFKEKKLFYVGKDRKQNRLVIVSEEEKKKVLRECHENDSGAHHGISRTLTLVESNYYWTSVTNDVKQWVYACQHCQVAKNTVIVA

SEQ ID NO: 9324 - protein, 85 aa, Homo sapiens
PKQHLLKVENPWSLVTVDLMGPFHTSNRSHVYAIIMTDLFTKWIVILPLCDVSASEVSKAIINIFFLYGPPQKIIMDQRDEFIQQ

SEQ ID NO: 9325 - protein, 85 aa, Homo sapiens
INIELYRLFGIKQIVISHTSGTVNPTESTPNTIKAFLSKHCADHPNNWDDHLSAVSFAFNVTHLEPTKNTPYFQMFSRNPYMPET

SEQ ID NO: 9326 - protein, 85 aa, Homo sapiens
SDSLHEVDGDNTSMFAKILDAIKEADKIMENKTTSLGQMENNNLDELNKSKIIVKKKPKQLNPFHLKVGHEVLRQRKNWWKDGRF

SEQ ID NO: 9327 - protein, 85 aa, Homo sapiens
QSEWVGPCVIDYITESGCAVLRDNTGVRLKRPIKMSHLKPYIRESSEQESLYLLQGSVVADHDYIGLPEIPIGAYQANILVEDAT

SEQ ID NO: 9328 - protein, 85 aa, Homo sapiens
YQRWRHLEVVLNQSEACASESQPHSSALTAPSSPGSSWMKKDQPTFTLRQVGIICERLLKDYEDKIREEYEQILNTKLAEQYESF

SEQ ID NO: 9329 - protein, 84 aa, Homo sapiens
PHSSALTAPSSPGSSWMKKDQPTFTLRQVGIICERLLKDYEDKIREEYEQILNTKLAEQYESFVKFTHDQIMRRYGTRPTSYVS

SEQ ID NO: 9330 - protein, 85 aa, Homo sapiens
EPPPPFQTQTPPQSLQQPAPPGSERRLPTPEQIFQNIKQEYSRYQRWRHLEVVLNQSEACASESQPHSSALTAPSSPGSSWMKKD

SEQ ID NO: 9331 - protein, 84 aa, Homo sapiens
PGAPSAINLDSHSYEITSQNVKDGGRYTFEDAQEHIYKLMKSDSYARFLRSNAYQDLLLAKKKPESEQGRRTSLEKFTRSVLLF

SEQ ID NO: 9332 - protein, 84 aa, Homo sapiens
MCAPVMVELEGETDPLLIAMKELNARSASEPPGEEPPWMDRGTRDEHLPSCPGCPAVASNTRCCPPAACLPGISLSRRRRLREE

SEQ ID NO: 9333 - protein, 85 aa, Homo sapiens
RPQANQKRITTPYMTKYERARVLGTRALQIAMCAPVMVELEGETDPLLIAMKELNARSASEPPGEEPPWMDRGTRDEHLPSCPGC

SEQ ID NO: 9334 - protein, 85 aa, Homo sapiens
FRRVRINFSKPEAAARARIELHETDFNGQKLKLYFAQERNMNFTREQSRHPAWWFMSVKVKLKRKKRQKTPNRKLPRRGAPTLRP

SEQ ID NO: 9335 - protein, 84 aa, Homo sapiens
VRINFSKPEAAARARIELHETDFNGQKLKLYFAQERNMNFTREQSRHPAWWFMSVKVKLKRKKRQKTPNRKLPRRGAPTLRPQR

SEQ ID NO: 9336 - protein, 85 aa, Homo sapiens
DLPTSLFACSVHEAVFEAREQKERFEALFTIYDDQVTFQLFKSFRRVRINFSKPEAAARARIELHETDFNGQKLKLYFAQERNMN

SEQ ID NO: 9337 - protein, 42 aa, Homo sapiens
APRGRKRKAEAAVVAVAEKREKLANGGEGMEEATVVIEHCTS

SEQ ID NO: 9338 - protein, 5 aa, Homo sapiens
EHCTS

SEQ ID NO: 9339 - protein, 84 aa, Homo sapiens
NIAAELYISNKQYDKALEIITDFSGIVLEKKTSEEGTSEENKAPENVTCTIPDGVPIDITVKLMVCLVHLNILEPLNVCNKICT

SEQ ID NO: 9340 - protein, 13 aa, Homo sapiens
AVHLPQWLGRQVL

SEQ ID NO: 9341 - protein, 10 aa, Homo sapiens
RHKPLLLPLS

SEQ ID NO: 9342 - protein, 27 aa, Homo sapiens
ASPPQRRGWSAADLSEGGGAEARGWAR

SEQ ID NO: 9343 - protein, 23 aa, Homo sapiens
PGRPGLCSQLHVPLLGGLCGCPL

SEQ ID NO: 9344 - protein, 14 aa, Homo sapiens
LRLPLPQWLWWQDL

SEQ ID NO: 9345 - protein, 85 aa, Homo sapiens
GADCARYTTLSLLRRARMHIQKLEDQEQRARQLKERLRSKQQSLQRQLEQLRGLAGAAERERLRADSLDSSGLSSERSDSDQEEL

SEQ ID NO: 9346 - protein, 84 aa, Homo sapiens
MRSKQQSLQRQLEQLRGLAGAAERERLRADSLDSSGLSSERSDSDQEELEVDVESLVFGGEAELLRGFVAGQEHSYSHGGGAWL

SEQ ID NO: 9347 - protein, 85 aa, Homo sapiens
MENYSHLVSMGYPVSKPDVISKLEQGEEPWIIKGDISNWIYPDEYQADGRQDRKSNLHNSQSCILGTVSFHHKILKGVTRDGSLC

SEQ ID NO: 9348 - protein, 85 aa, Homo sapiens
SILKVCQGDGQLQRFLENQDKLFRQVTFVNSKTVTEASGHKYNPLGKIFQECIETDISIQRFHKYDAFKKNLKPNIDLPSCYKSN

SEQ ID NO: 9349 - protein, 85 aa, Homo sapiens
SRKKPDQSFGGGKSSSQSEPNSNLEKIHNGVIPFDDNQCGNVFRNTQSLIQYQNVETKEKSCVCVTCGKAFAKKSQLIVHQRIHT

SEQ ID NO: 9350 - protein, 85 aa, Homo sapiens
GKKPYDCGACGKAFSEKFHLVVHQRTHTGEKPYDCSECGKAFSQKSSLIIHQRVHTGEKPYECSECGKAFSQKSPLIIHQRIHTG

SEQ ID NO: 9351 - protein, 85 aa, Homo sapiens
EKPYECRECGKAFSQKSQLIIHHRAHTGEKPYECTECGKAFCEKSHLIIHKRIHTGEKPYKCAQCEEAFSRKTELITHQLVHTGE

SEQ ID NO: 9352 - protein, 85 aa, Homo sapiens
KPYECTECGKTFSRKSQLIIHQRTHTGEKPYKCSECGKAFCQKSHLIGHQRIHTGEKPYICTECGKAFSQKSHLPGHQRIHTGEK

SEQ ID NO: 9353 - protein, 85 aa, Homo sapiens
DEYQADGRQDRKSNLHNSQSCILGTVSFHHKILKGVTRDGSLCSILKVCQGDGQLQRFLENQDKLFRQVTFVNSKTVTEASGHKY

SEQ ID NO: 9354 - protein, 85 aa, Homo sapiens
NPLGKIFQECIETDISIQRFHKYDAFKKNLKPNIDLPSCYKSNSRKKPDQSFGGGKSSSQSEPNSNLEKIHNGVIPFDDNQCGNV

SEQ ID NO: 9355 - protein, 85 aa, Homo sapiens
FRNTQSLIQYQNVETKEKSCVCVTCGKAFAKKSQLIVHQRIHTGKKPYDCGACGKAFSEKFHLVVHQRTHTGEKPYDCSECGKAF

SEQ ID NO: 9356 - protein, 85 aa, Homo sapiens
SQKSSLIIHQRVHTGEKPYECSECGKAFSQKSPLIIHQRIHTGEKPYECRECGKAFSQKSQLIIHHRAHTGEKPYECTECGKAFC

SEQ ID NO: 9357 - protein, 85 aa, Homo sapiens
EKSHLIIHKRIHTGEKPYKCAQCEEAFSRKTELITHQLVHTGEKPYECTECGKTFSRKSQLIIHQRTHTGEKPYKCSECGKAFCQ

SEQ ID NO: 9358 - protein, 85 aa, Homo sapiens
KSHLIGHQRIHTGEKPYICTECGKAFSQKSHLPGHQRIHTGEKPYICAECGKAFSQKSDLVLHQRIHTGERPYQCAICGKAFIQK

SEQ ID NO: 9359 - protein, 85 aa, Homo sapiens
MKPRPKRFIAKPCALCIGIEDSGPYQAQPNAILEKVFISITKYPDKKRLEGLSKQLDWNVRKIQCWFRHRRNQDKPPTLTKFCES

SEQ ID NO: 9360 - protein, 85 aa, Homo sapiens
MWRFTFYLCIFCYGIRFLWSSPWFWDIRQCWHNYPFQPLSSGLYHYYIMELAFYWSLMFSQFTDIKRKDFLIMFVHHLVTIGLIS

SEQ ID NO: 9361 - protein, 85 aa, Homo sapiens
FSYINNMVRVGTLIMCLHDVSDFLLEAAKLANYAKYQRLCDTLFVIFSAVFMVTRLGIYPFWILNTTLFESWEIIGPYASWWLLN

SEQ ID NO: 9362 - protein, 85 aa, Homo sapiens
YPDKKRLEGLSKQLDWNVRKIQCWFRHRRNQDKPPTLTKFCESMWRFTFYLCIFCYGIRFLWSSPWFWDIRQCWHNYPFQPLSSG

SEQ ID NO: 9363 - protein, 85 aa, Homo sapiens
LYHYYIMELAFYWSLMFSQFTDIKRKDFLIMFVHHLVTIGLISFSYINNMVRVGTLIMCLHDVSDFLLEAAKLANYAKYQRLCDT

SEQ ID NO: 9364 - protein, 85 aa, Homo sapiens
LFVIFSAVFMVTRLGIYPFWILNTTLFESWEIIGPYASWWLLNGLLLTLQLLHVIWSYLIARIALKALIRGKVSKDDRSDVESSS

SEQ ID NO: 9365 - protein, 85 aa, Homo sapiens
TSCLPALRFIATPRLSAMPHIDNDVKLDFKDVLLRPKRSTLKSRSEVDLTRSFSFRNSKQTYSGVPIIAANMDTVGTFEMAKVLC

SEQ ID NO: 9366 - protein, 85 aa, Homo sapiens
KFSLFTAVHKHYSLVQWQEFAGQNPDCLEHLAASSGTGSSDFEQLEQILEAIPQVKYICLDVANGYSEHFVEFVKDVRKRFPQHT

SEQ ID NO: 9367 - protein, 85 aa, Homo sapiens
IMAGNVVTGEMVEELILSGADIIKVGIGPGSVCTTRKKTGVGYPQLSAVMECADAAHGLKGHIISDGGCSCPGDVAKAFGAGADF

SEQ ID NO: 9368 - protein, 85 aa, Homo sapiens
VMLGGMLAGHSESGGELIERDGKKYKLFYGMSSEMAMKKYAGGVAEYRASEGKTVEVPFKGDVEHTIRDILGGIRSTCTYVGAAK

SEQ ID NO: 9369 - protein, 85 aa, Homo sapiens
SRSEVDLTRSFSFRNSKQTYSGVPIIAANMDTVGTFEMAKVLCKFSLFTAVHKHYSLVQWQEFAGQNPDCLEHLAASSGTGSSDF

SEQ ID NO: 9370 - protein, 85 aa, Homo sapiens
EQLEQILEAIPQVKYICLDVANGYSEHFVEFVKDVRKRFPQHTIMAGNVVTGEMVEELILSGADIIKVGIGPGSVCTTRKKTGVG

SEQ ID NO: 9371 - protein, 85 aa, Homo sapiens
YPQLSAVMECADAAHGLKGHIISDGGCSCPGDVAKAFGAGADFVMLGGMLAGHSESGGELIERDGKKYKLFYGMSSEMAMKKYAG

SEQ ID NO: 9372 - protein, 85 aa, Homo sapiens
GVENSWGDLEDSEKEDDEGGGDQAIILDGIKMDTGVEVSDIGSQELGFHHVGQTGLEFLTSDAPIILSDSEEEEMIILEPDKNPK

SEQ ID NO: 9373 - protein, 84 aa, Homo sapiens
MDTGVEVSDIGSQELGFHHVGQTGLEFLTSDAPIILSDSEEEEMIILEPDKNPKKIRTQTTSAKQEKAPSKKPVKRRKKKRAAN

SEQ ID NO: 9374 - protein, 85 aa, Homo sapiens
EKMRNIREVKCRVVTCKTCAYTHFKLLETCVSEQHEYHWHDGVKRFFKCPCGNRSISLDRLPNKHCSNCGLYKWERDGMLKVCHL

SEQ ID NO: 9375 - protein, 84 aa, Homo sapiens
IREVKCRVVTCKTCAYTHFKLLETCVSEQHEYHWHDGVKRFFKCPCGNRSISLDRLPNKHCSNCGLYKWERDGMLKVCHLRTNF

SEQ ID NO: 9376 - protein, 84 aa, Homo sapiens
MLDIGCGTGLSGSYLSDEGHYWVGLDISPAMLAFLLCSGSVMLTRSLKTLPSACTAFLLLFFLFSSGDPELSCSCTLRTQSSWS

SEQ ID NO: 9377 - protein, 85 aa, Homo sapiens
MELLYLPENKPCYLLDIGCGTGLSGSYLSDEGHYWVGLDISPAMLAFLLCSGSVMLTRSLKTLPSACTAFLLLFFLFSSGDPELS

SEQ ID NO: 9378 - protein, 85 aa, Homo sapiens
DDDFLGGAECSLGQIVSSQVLTLPLMLKPGKPAGRGTITVSAQELKDNRVVTMEVEARNLDKKDFLGKSDPFLEFFRQGDGKWHL

SEQ ID NO: 9379 - protein, 85 aa, Homo sapiens
CPKSLSEKNSNNEVACKKTKIKKTCRRIIPPKMKNTSSKAESTLQNSSSAVHTESNKLQPKRTADAMNLSVDVESSQDGDSDEDT

SEQ ID NO: 9380 - protein, 85 aa, Homo sapiens
TPSLDFSGLSPYERKRLKNISENADFFASLQLSESAARLREMIEKRQPPKSKRKKPKRENGIGCRRSMRLLKVDPSGVSLPAAPT

SEQ ID NO: 9381 - protein, 85 aa, Homo sapiens
PPTLVADETPLLPPGPLEMTSENQEDNNERFKGFLHTWAGMSKPSSKNTEKGLSSIKSYKANLNGMVISEDTVYKVTTGPIFSMA

SEQ ID NO: 9382 - protein, 85 aa, Homo sapiens
LHPSETRTLVAVGAKFGQVGLCDLTQQPKEDGVYVFHPHSQPVSCLYFSPANPAHILSLSYDGTLRCGDFSRAIFEEVYRNERSS

SEQ ID NO: 9383 - protein, 85 aa, Homo sapiens
FSSFDFLAEDASTLIVGHWDGNMSLVDRRTPGTSYEKLTSSSMGKIRTVHVHPVHRQYFITAGLRDTHIYDARRLNSRRSQPLIS

SEQ ID NO: 9384 - protein, 85 aa, Homo sapiens
MTEHTKSIASAYFSPLTGNRVVTTCADCNLRIFDSSCISSKIPLLTTIRHNTFTGRWLTRFQAMWDPKQEDCVIVGSMAHPRRVE

SEQ ID NO: 9385 - protein, 85 aa, Homo sapiens
TLQNSSSAVHTESNKLQPKRTADAMNLSVDVESSQDGDSDEDTTPSLDFSGLSPYERKRLKNISENADFFASLQLSESAARLREM

SEQ ID NO: 9386 - protein, 85 aa, Homo sapiens
IEKRQPPKSKRKKPKRENGIGCRRSMRLLKVDPSGVSLPAAPTPPTLVADETPLLPPGPLEMTSENQEDNNERFKGFLHTWAGMS

SEQ ID NO: 9387 - protein, 85 aa, Homo sapiens
KPSSKNTEKGLSSIKSYKANLNGMVISEDTVYKVTTGPIFSMALHPSETRTLVAVGAKFGQVGLCDLTQQPKEDGVYVFHPHSQP

SEQ ID NO: 9388 - protein, 85 aa, Homo sapiens
VSCLYFSPANPAHILSLSYDGTLRCGDFSRAIFEEVYRNERSSFSSFDFLAEDASTLIVGHWDGNMSLVDRRTPGTSYEKLTSSS

SEQ ID NO: 9389 - protein, 85 aa, Homo sapiens
MGKIRTVHVHPVHRQYFITAGLRDTHIYDARRLNSRRSQPLISLTEHTKSIASAYFSPLTGNRVVTTCADCNLRIFDSSCISSKI

SEQ ID NO: 9390 - protein, 85 aa, Homo sapiens
PLLTTIRHNTFTGRWLTRFQAMWDPKQEDCVIVGSMAHPRRVEIFHETGKRVHSFGGEYLVSVCSINAMHPTRYILAGGNSSGKI

SEQ ID NO: 9391 - protein, 85 aa, Homo sapiens
NDMWMLTADHGGYVKYWQSNMNNVKMFQAHKEAIREARFIHNIPFSVVPIVMVKLFSKCILGAEMHGLCQFLGNFLHPINTIFFF

SEQ ID NO: 9392 - protein, 84 aa, Homo sapiens
MGNFLHPINTIFFFVFTHSPFCWHLSEVVLSRYQPLQYVRDVLSAAFCTGFLFSFMINNVYTLFLFIIYCVRQEYFIPNKEFSL

SEQ ID NO: 9393 - protein, 85 aa, Homo sapiens
PEGRRLVTGASSGEFTLWNGLTFNFETILQAHDSPVRAMTWSHNDMWMLTADHGGYVKYWQSNMNNVKMFQAHKEAIREARFIHN

SEQ ID NO: 9394 - protein, 85 aa, Homo sapiens
IPFSVVPIVMVKLFSKCILGAEMHGLCQFLGNFLHPINTIFFFVFTHSPFCWHLSEVVLSRYQPLQYVRDVLSAAFCTGFLFSFM

SEQ ID NO: 9395 - protein, 85 aa, Homo sapiens
MRDVIQEYDEYFPEIIERASYTLEKMFRVNLKEIDKQSSLYILISTQESSAGILGTTKDTPKLGLLMVILSVIFMNGNKASEAVI

SEQ ID NO: 9396 - protein, 85 aa, Homo sapiens
WEVLRKLGLRPGVRHSLFGEVRKLITDEFVKQKYLEYKRVPNSRPPEYEFFWGLRSYHETSKMKVLKFACRVQKKDPKDWAVQYR

SEQ ID NO: 9397 - protein, 85 aa, Homo sapiens
EAVEMEVQAAAVAVAEAEARAEARAQMGIGEEAVAGPWNWDDMDIDCLTREELGDDAQAWSRFSFEIEARAQENADASTNVNFSR

SEQ ID NO: 9398 - protein, 85 aa, Homo sapiens
GASTRAGFSDGASISFNGAPSSSGGFSGGPGITFGVAPSTSASFSNTASISFGGTLSTSSSFSSAASISFGCAHSTSTSFSSEAS

SEQ ID NO: 9399 - protein, 85 aa, Homo sapiens
ISFGGMPCTSASFSGGVSSSFSGPLSTSATFSGGASSGFGGTLSTTAGFSGVLSTSTSFGSAPTTSTVFSSALSTSTGFGGILST

SEQ ID NO: 9400 - protein, 85 aa, Homo sapiens
SVCFGGSPSSSGSFGGTLSTSICFGGSPCTSTGFGGTLSTSVSFGGSSSTSANFGGTLSTSICFDGSPSTGAGFGGALNTSASFG

SEQ ID NO: 9401 - protein, 85 aa, Homo sapiens
SVLNTSTGFGGAMSTSADFGGTLSTSVCFGGSPGTSVSFGSALNTNAGYGGAVSTNTDFGGTLSTSVCFGGSPSTSAGFGGALNT

SEQ ID NO: 9402 - protein, 85 aa, Homo sapiens
NASFGCAVSTSASFSGAVSTSACFSGAPITNPGFGGAFSTSAGFGGALSTAADFGGTPSNSIGFGAAPSTSVSFGGAHGTSLCFG

SEQ ID NO: 9403 - protein, 85 aa, Homo sapiens
GAPSTSLCFGSASNTNLCFGGPPSTSACFSGATSPSFCDGPSTSTGFSFGNGLSTNAGFGGGLNTSAGFGGGLGTSAGFSGGLST

SEQ ID NO: 9404 - protein, 85 aa, Homo sapiens
SSGFDGGLGTSAGFGGGPGTSTGFGGGLGTSAGFSGGLGTSAGFGGGLVTSDGFGGGLGTNASFGSTLGTSAGFSGGLSTSDGFG

SEQ ID NO: 9405 - protein, 85 aa, Homo sapiens
SRPNASFDRGLSTIIGFGSGSNTSTGFTGEPSTSTGFSSGPSSIVGFSGGPSTGVGFCSGPSTSGFSGGPSTGAGFGGGPNTGAG

SEQ ID NO: 9406 - protein, 85 aa, Homo sapiens
LISTQESSAGILGTTKDTPKLGLLMVILSVIFMNGNKASEAVIWEVLRKLGLRPGVRHSLFGEVRKLITDEFVKQKYLEYKRVPN

SEQ ID NO: 9407 - protein, 85 aa, Homo sapiens
SRPPEYEFFWGLRSYHETSKMKVLKFACRVQKKDPKDWAVQYREAVEMEVQAAAVAVAEAEARAEARAQMGIGEEAVAGPWNWDD

SEQ ID NO: 9408 - protein, 85 aa, Homo sapiens
MDIDCLTREELGDDAQAWSRFSFEIEARAQENADASTNVNFSRGASTRAGFSDGASISFNGAPSSSGGFSGGPGITFGVAPSTSA

SEQ ID NO: 9409 - protein, 85 aa, Homo sapiens
SFSNTASISFGGTLSTSSSFSSAASISFGCAHSTSTSFSSEASISFGGMPCTSASFSGGVSSSFSGPLSTSATFSGGASSGFGGT

SEQ ID NO: 9410 - protein, 85 aa, Homo sapiens
LSTTAGFSGVLSTSTSFGSAPTTSTVFSSALSTSTGFGGILSTSVCFGGSPSSSGSFGGTLSTSICFGGSPCTSTGFGGTLSTSV

SEQ ID NO: 9411 - protein, 85 aa, Homo sapiens
SFGGSSSTSANFGGTLSTSICFDGSPSTGAGFGGALNTSASFGSVLNTSTGFGGAMSTSADFGGTLSTSVCFGGSPGTSVSFGSA

SEQ ID NO: 9412 - protein, 85 aa, Homo sapiens
LNTNAGYGGAVSTNTDFGGTLSTSVCFGGSPSTSAGFGGALNTNASFGCAVSTSASFSGAVSTSACFSGAPITNPGFGGAFSTSA

SEQ ID NO: 9413 - protein, 85 aa, Homo sapiens
GFGGALSTAADFGGTPSNSIGFGAAPSTSVSFGGAHGTSLCFGGAPSTSLCFGSASNTNLCFGGPPSTSACFSGATSPSFCDGPS

SEQ ID NO: 9414 - protein, 85 aa, Homo sapiens
TSTGFSFGNGLSTNAGFGGGLNTSAGFGGGLGTSAGFSGGLSTSSGFDGGLGTSAGFGGGPGTSTGFGGGLGTSAGFSGGLGTSA

SEQ ID NO: 9415 - protein, 85 aa, Homo sapiens
GFGGGLVTSDGFGGGLGTNASFGSTLGTSAGFSGGLSTSDGFGSRPNASFDRGLSTIIGFGSGSNTSTGFTGEPSTSTGFSSGPS

SEQ ID NO: 9416 - protein, 85 aa, Homo sapiens
SKRKRKRSVQEGENPDDGVRGSPPEDYRLGQVASSLFRGEHHSRGGTGRLASLFSSLEPQIQPVYVPVPKQTIKKTKRNEEEEST

SEQ ID NO: 9417 - protein, 85 aa, Homo sapiens
SQIERPLSQEPAKKVKAKKKHTNAEKKLADRESALASADLEEEIHQKQGQKRKNSQPGVKVADRKILDDTEDTVVSQRKKIQINQ

SEQ ID NO: 9418 - protein, 85 aa, Homo sapiens
EEERLKNERTVFVGNLPVTCNKKIPAEGTLSKKLAAIKRKIHPDQKNINAYVVFKEESAATQALKRNGAQIADGFRIRVDLASET

SEQ ID NO: 9419 - protein, 85 aa, Homo sapiens
SSRDKRSVFVGNLPYKVEESAIEKHFLDCGSIMAVRIVRDKMTGIGKGFGYVLFENTDSVHLALKLNNSELMGRKLRVMRSVNKE

SEQ ID NO: 9420 - protein, 85 aa, Homo sapiens
SRGGTGRLASLFSSLEPQIQPVYVPVPKQTIKKTKRNEEEESTSQIERPLSQEPAKKVKAKKKHTNAEKKLADRESALASADLEE

SEQ ID NO: 9421 - protein, 85 aa, Homo sapiens
EIHQKQGQKRKNSQPGVKVADRKILDDTEDTVVSQRKKIQINQEEERLKNERTVFVGNLPVTCNKKIPAEGTLSKKLAAIKRKIH

SEQ ID NO: 9422 - protein, 85 aa, Homo sapiens
PDQKNINAYVVFKEESAATQALKRNGAQIADGFRIRVDLASETSSRDKRSVFVGNLPYKVEESAIEKHFLDCGSIMAVRIVRDKM

SEQ ID NO: 9423 - protein, 85 aa, Homo sapiens
TGIGKGFGYVLFENTDSVHLALKLNNSELMGRKLRVMRSVNKEKFKQQNSNPRLKNVSKPKQGLNFTSKTAEGHPKSLFIGEKAV

SEQ ID NO: 9424 - protein, 85 aa, Homo sapiens
DQLLAFVEFSCKPPQYGQLETKHIANAKYNQIQLFAPAEWVALNYVPFAERSLEVVVDLYQKTACHKAVVNEKVLQNIIKTLRVP

SEQ ID NO: 9425 - protein, 85 aa, Homo sapiens
LSLKYSCPSESTWKLAVSSLLRVLSIGLPVARQHASSGKFDSMWPELANTFEDFLFTKSIPPDNLSIQEFQRNENIDVEVVQLIS

SEQ ID NO: 9426 - protein, 85 aa, Homo sapiens
NEILPYANFIPKEFVGQIMTMLNKGSIHSQSSSFTEAEIDIRLREEFSKMCFETLLQFSFSNKVTTPQEGYISRMALSVLLKRSQ

SEQ ID NO: 9427 - protein, 85 aa, Homo sapiens
DVLHRYIEDERLSGKCPLPRQQVTEIIFVLKAVSTLIDSLKKTQPENVDGNTWAQVIALYPTLVECITCSSSEVCSALKEALVPF

SEQ ID NO: 9428 - protein, 85 aa, Homo sapiens
ILPSYTEAVLTSLQEAVLTALDVLQKAICVGPENMQIMYPAIFDQLLAFVEFSCKPPQYGQLETKHIANAKYNQIQLFAPAEWVA

SEQ ID NO: 9429 - protein, 85 aa, Homo sapiens
MNYVPFAERSLEVVVDLYQKTACHKAVVNEKVLQNIIKTLRVPLSLKYSCPSESTWKLAVSSLLRVLSIGLPVARQHASSGKFDS

SEQ ID NO: 9430 - protein, 85 aa, Homo sapiens
MWPELANTFEDFLFTKSIPPDNLSIQEFQRNENIDVEVVQLISNEILPYANFIPKEFVGQIMTMLNKGSIHSQSSSFTEAEIDIR

SEQ ID NO: 9431 - protein, 85 aa, Homo sapiens
MREEFSKMCFETLLQFSFSNKVTTPQEGYISRMALSVLLKRSQDVLHRYIEDERLSGKCPLPRQQVTEIIFVLKAVSTLIDSLKK

SEQ ID NO: 9432 - protein, 85 aa, Homo sapiens
KCALFLRVKILQRVCRSRYIVHAGTCDSTAAMSGILKRKFEEVDGSSPCSSVRESDDEVSSSESADSGDSVNPSTSSHFTPSSIL

SEQ ID NO: 9433 - protein, 85 aa, Homo sapiens
KREKRLRTKNVHFSCVTVYYFTRRQGFTSVPSQGGSTLGMSSRHNSVRQYTLGEFAREQERLHREMLREHLREEKLNSLKLKMTK

SEQ ID NO: 9434 - protein, 85 aa, Homo sapiens
NGTVESEEASTLTLDDISDDDIDLDNTEVDEYFFLQPLPTKKRRALLRASGVKKIDVEEKHELRAIRLSREDCGCDCRVFCDPDT

SEQ ID NO: 9435 - protein, 85 aa, Homo sapiens
CTCSLAGIKCQVDRMSFPCGCTKEGCSNTAGRIEFNPIRVRTHFLHTIMKLELEKNREQQIPTLNGCHSEISAHSSSMGPVAHSV

SEQ ID NO: 9436 - protein, 85 aa, Homo sapiens
EYSIADSFEIETEPQAAVLHLQSAEELDCQGEEEEEEEDGSSFCSGVTDSSTQSLAPSESDEEEEEEEEEEEEEDDDDDKGDGFV

SEQ ID NO: 9437 - protein, 85 aa, Homo sapiens
EGLGTHAEVVPLPSVLCYSDGTAVHESHAKNASFYANSSTLYYQIDSHIPGTPNQISENYSERDTVKNGTLSLVPYTMTPEQFVD

SEQ ID NO: 9438 - protein, 85 aa, Homo sapiens
YARQAEEAYGASHYPAANPSVIVCCSSSENDSGVPCNSLYPEHRSNHPQVEFHSYLKGPSQEGFVSALNGDSHISEHPAENSLSL

SEQ ID NO: 9439 - protein, 85 aa, Homo sapiens
VDGSSPCSSVRESDDEVSSSESADSGDSVNPSTSSHFTPSSILKREKRLRTKNVHFSCVTVYYFTRRQGFTSVPSQGGSTLGMSS

SEQ ID NO: 9440 - protein, 85 aa, Homo sapiens
RHNSVRQYTLGEFAREQERLHREMLREHLREEKLNSLKLKMTKNGTVESEEASTLTLDDISDDDIDLDNTEVDEYFFLQPLPTKK

SEQ ID NO: 9441 - protein, 85 aa, Homo sapiens
RRALLRASGVKKIDVEEKHELRAIRLSREDCGCDCRVFCDPDTCTCSLAGIKCQVDRMSFPCGCTKEGCSNTAGRIEFNPIRVRT

SEQ ID NO: 9442 - protein, 85 aa, Homo sapiens
HFLHTIMKLELEKNREQQIPTLNGCHSEISAHSSSMGPVAHSVEYSIADSFEIETEPQAAVLHLQSAEELDCQGEEEEEEEDGSS

SEQ ID NO: 9443 - protein, 85 aa, Homo sapiens
FCSGVTDSSTQSLAPSESDEEEEEEEEEEEEEDDDDDKGDGFVEGLGTHAEVVPLPSVLCYSDGTAVHESHAKNASFYANSSTLY

SEQ ID NO: 9444 - protein, 85 aa, Homo sapiens
YQIDSHIPGTPNQISENYSERDTVKNGTLSLVPYTMTPEQFVDYARQAEEAYGASHYPAANPSVIVCCSSSENDSGVPCNSLYPE

SEQ ID NO: 9445 - protein, 85 aa, Homo sapiens
DSLPRLTSVLTLLFSGLWHLGLTATNYNCDDPLASLLSPMAFSSSSDLTGTHSPAQLNWRVGTGGWSPADSNAQQWLQMDLGNRV

SEQ ID NO: 9446 - protein, 85 aa, Homo sapiens
EITAVATQGRYGSSDWVTSYSLMFSDTGRNWKQYKQEDSIWTFAGNMNADSVVHHKLLHSVRARFVRFVPLEWNPSGKIGMRVEV

SEQ ID NO: 9447 - protein, 85 aa, Homo sapiens
YGCSYKSDVADFDGRSSLLYRFNQKLMSTLKDVISLKFKSMQGDGVLFHGEGQRGDHITLELQKGRLALHLNLGDSKARLSSSLP

SEQ ID NO: 9448 - protein, 85 aa, Homo sapiens
SATLGSLLDDQHWHSVLIERVGKQVNFTVDKHTQHFRTKGETDALDIDYELSFGGIPVPGKPGTFLKKNFHGCIENLYYNGVNII

SEQ ID NO: 9449 - protein, 85 aa, Homo sapiens
DLAKRRKHQIYTGNVTFSCSEPQIVPITFVNSSGSYLLLPGTPQIDGLSVSFQFRTWNKDGLLLSTELSEGSGTLLLSLEGGILR

SEQ ID NO: 9450 - protein, 85 aa, Homo sapiens
LVIQKMTERVAEILTGSNLNDGLWHSVSINARRNRITLTLDDEAAPPAPDSTWVQIYSGNSYYFGGCPDNLTDSQCLNPIKAFQG

SEQ ID NO: 9451 - protein, 85 aa, Homo sapiens
CMRLIFIDNQPKDLISVQQGSLGNFSDLHIDLCSIKDRCLPNYCEHGGSCSQSWTTFYCNCSDTSYTGATCHNSIYEQSCEVYRH

SEQ ID NO: 9452 - protein, 85 aa, Homo sapiens
QGNTAGFFYIDSDGSGPLGPLQVYCNITEDKIWTSVQHNNTELTRVRGANPEKPYAMALDYGGSMEQLEAVIDGSEHCEQEVAYH

SEQ ID NO: 9453 - protein, 85 aa, Homo sapiens
CRRSRLLNTPDGTPFTWWIGRSNERHPYWGGSPPGVQQCECGLDESCLDIQHFCNCDADKDEWTNDTGFLSFKDHLPVTQIVITD

SEQ ID NO: 9454 - protein, 85 aa, Homo sapiens
TDRSNSEAAWRIGPLRCYGDRRFWNAVSFYTEASYLHFPTFHAEFSADISFFFKTTALSGVFLENLGIKDFIRLEISSPSEITFA

SEQ ID NO: 9455 - protein, 85 aa, Homo sapiens
IDVGNGPVELVVQSPSLLNDNQWHYVRAERNLKETSLQVDNLPRSTRETSEEGHFRLQLNSQLFVGGTSSRQKGFLGCIRSLHLN

SEQ ID NO: 9456 - protein, 85 aa, Homo sapiens
GQKMDLEERAKVTSGVRPGCPGHCSSYGSICHNGGKCVEKHNGYLCDCTNSPYEGPFCKKEVSAVFEAGTSVTYMFQEPYPVTKN

SEQ ID NO: 9457 - protein, 85 aa, Homo sapiens
ISLSSSAIYTDSAPSKENIALSFVTTQAPSLLLFINSSSQDFVVVLLCKNGSLQVRYHLNKEETHVFTIDADNFANRRMHHLKIN

SEQ ID NO: 9458 - protein, 85 aa, Homo sapiens
REGRELTIQMDQQLRLSYNFSPEVEFRVIRSLTLGKVTENLGLDSEVAKANAMGFAGCMSSVQYNHIAPLKAALRHATVAPVTVH

SEQ ID NO: 9459 - protein, 85 aa, Homo sapiens
GTLTESSCGFMVDSDVNAVTTVHSSSDPFGKTDEREPLTNAVRSDSAVIGGVIAVVIFIIFCIIGIMTRFLYQHKQSHRTSQMKE

SEQ ID NO: 9460 - protein, 84 aa, Homo sapiens
TDEREPLTNAVRSDSAVIGGVIAVVIFIIFCIIGIMTRFLYQHKQSHRTSQMKEKEYPENLDSSFRNEIDLQNTVSECKREYFI

SEQ ID NO: 9461 - protein, 85 aa, Homo sapiens
SSSSDLTGTHSPAQLNWRVGTGGWSPADSNAQQWLQMDLGNRVEITAVATQGRYGSSDWVTSYSLMFSDTGRNWKQYKQEDSIWT

SEQ ID NO: 9462 - protein, 85 aa, Homo sapiens
FAGNMNADSVVHHKLLHSVRARFVRFVPLEWNPSGKIGMRVEVYGCSYKSDVADFDGRSSLLYRFNQKLMSTLKDVISLKFKSMQ

SEQ ID NO: 9463 - protein, 85 aa, Homo sapiens
GDGVLFHGEGQRGDHITLELQKGRLALHLNLGDSKARLSSSLPSATLGSLLDDQHWHSVLIERVGKQVNFTVDKHTQHFRTKGET

SEQ ID NO: 9464 - protein, 85 aa, Homo sapiens
DALDIDYELSFGGIPVPGKPGTFLKKNFHGCIENLYYNGVNIIDLAKRRKHQIYTGNVTFSCSEPQIVPITFVNSSGSYLLLPGT

SEQ ID NO: 9465 - protein, 85 aa, Homo sapiens
PQIDGLSVSFQFRTWNKDGLLLSTELSEGSGTLLLSLEGGILRLVIQKMTERVAEILTGSNLNDGLWHSVSINARRNRITLTLDD

SEQ ID NO: 9466 - protein, 85 aa, Homo sapiens
EAAPPAPDSTWVQIYSGNSYYFGGCPDNLTDSQCLNPIKAFQGCMRLIFIDNQPKDLISVQQGSLGNFSDLHIDLCSIKDRCLPN

SEQ ID NO: 9467 - protein, 85 aa, Homo sapiens
YCEHGGSCSQSWTTFYCNCSDTSYTGATCHNSIYEQSCEVYRHQGNTAGFFYIDSDGSGPLGPLQVYCNITEDKIWTSVQHNNTE

SEQ ID NO: 9468 - protein, 85 aa, Homo sapiens
MTRVRGANPEKPYAMALDYGGSMEQLEAVIDGSEHCEQEVAYHCRRSRLLNTPDGTPFTWWIGRSNERHPYWGGSPPGVQQCECG

SEQ ID NO: 9469 - protein, 85 aa, Homo sapiens
LDESCLDIQHFCNCDADKDEWTNDTGFLSFKDHLPVTQIVITDTDRSNSEAAWRIGPLRCYGDRRFWNAVSFYTEASYLHFPTFH

SEQ ID NO: 9470 - protein, 85 aa, Homo sapiens
AEFSADISFFFKTTALSGVFLENLGIKDFIRLEISSPSEITFAIDVGNGPVELVVQSPSLLNDNQWHYVRAERNLKETSLQVDNL

SEQ ID NO: 9471 - protein, 85 aa, Homo sapiens
PRSTRETSEEGHFRLQLNSQLFVGGTSSRQKGFLGCIRSLHLNGQKMDLEERAKVTSGVRPGCPGHCSSYGSICHNGGKCVEKHN

SEQ ID NO: 9472 - protein, 85 aa, Homo sapiens
GYLCDCTNSPYEGPFCKKEVSAVFEAGTSVTYMFQEPYPVTKNISLSSSAIYTDSAPSKENIALSFVTTQAPSLLLFINSSSQDF

SEQ ID NO: 9473 - protein, 85 aa, Homo sapiens
VVVLLCKNGSLQVRYHLNKEETHVFTIDADNFANRRMHHLKINREGRELTIQMDQQLRLSYNFSPEVEFRVIRSLTLGKVTENLG

SEQ ID NO: 9474 - protein, 85 aa, Homo sapiens
MDSEVAKANAMGFAGCMSSVQYNHIAPLKAALRHATVAPVTVHGTLTESSCGFMVDSDVNAVTTVHSSSDPFGKTDEREPLTNAV

SEQ ID NO: 9475 - protein, 84 aa, Homo sapiens
PLTGKRQDSGTMKKPHTTEEIGVPISRNGSTLGLKSQNGCIPPKLPSGSPSPKLSQTPTHMPTILDDPGKKVKKPAPPLPTGMG

SEQ ID NO: 9476 - protein, 85 aa, Homo sapiens
HKSNLIKHWRVHTGERPYKCSDCGKFFTQCSSLMQHQKVHTGEKPFKCNECGRFFRENSTLVRHQRVHTGAKPYECRECGKFFSQ

SEQ ID NO: 9477 - protein, 85 aa, Homo sapiens
EKPFKCNECGRFFRENSTLVRHQRVHTGAKPYECRECGKFFSQSSTLMQHRKVHIGEKPFKCNECGRLFRENSSLVKHQRVHTGA

SEQ ID NO: 9478 - protein, 85 aa, Homo sapiens
RQGKKSNLHNSQSCILGTVSFHHKILKGVTRDGSLCSILKVCQGDGQLQRFLENQDKLFRQVTFVNSKTVTEASGHKYNPLGKIF

SEQ ID NO: 9479 - protein, 85 aa, Homo sapiens
MVSMGYPVSKPDVISKLEQGEEPWIIKGDISNWIYPDEYQADGRQGKKSNLHNSQSCILGTVSFHHKILKGVTRDGSLCSILKVC

SEQ ID NO: 9480 - protein, 85 aa, Homo sapiens
NKAVLESTWPSRSRSGYFLWTKVRNVVLGVTQFKRALKKHAHLSQTTLSGGQSDLGYNSLSKDEVRRGDTSTEDIQEEKDKKGSD

SEQ ID NO: 9481 - protein, 85 aa, Homo sapiens
CSSLSESESTKGSADCLPKLSYQNSSSIVRLTGTSNNSAGKISGESMESTPELLLISSLEDTNETRNIQSRCFRKRHKSDNETNL

SEQ ID NO: 9482 - protein, 85 aa, Homo sapiens
QQQVVWGNRNRNLSGGVLMGFMLNRINQEATPGDIVEKLGADAKILSNVISKSTRPNTLDIGKPPLRSKRDSLEKESSDDDTPFD

SEQ ID NO: 9483 - protein, 85 aa, Homo sapiens
GSNYLADKVDSPVIFDLEDLDSETDVSKAGCVATQNPKRIQRMNSSFSVKPFEKTDVATGFDPLSLLVAETEQQQKEEEEEDEDD

SEQ ID NO: 9484 - protein, 85 aa, Homo sapiens
SKSISTPSARRDLAEEIVMYMNNMSSPLTSRTPSIDLQRACDDKLNKKSPPLVKACRRSSLPPNSPKPVRLTKSKSYTKSEEKPR

SEQ ID NO: 9485 - protein, 85 aa, Homo sapiens
DRLWSSPAFSPTCPFREESQDTLTHSSPSFNLDTLLVPKLDVLRNSMFTAGKGVAEKASKWYSRFTMYTTSSKDQSSDRTSLSSV

SEQ ID NO: 9486 - protein, 85 aa, Homo sapiens
GAQDSESTSLTDEDVCHELEGPISSQETSATSGTKRIDLSRISLESSASLEGSLSKFALPGKSEVTSSFNASNTNIFQNYAMEVL

SEQ ID NO: 9487 - protein, 85 aa, Homo sapiens
ISSCSRCRTCDCLVHDEEIMAGWTADDSNLNTTCPFCGNIFLPFLNIEIRDLRRPGRYFLKSSPSTENMHFPSSISSQTRQSCIS

SEQ ID NO: 9488 - protein, 85 aa, Homo sapiens
TSASGLDTSALSVQGNFDLNSKSKLQENFCTRSIQIPANRSKTAMSKCPIFPMARSISTSGPLDKEDTGRQKLISTGSLPATLQG

SEQ ID NO: 9489 - protein, 85 aa, Homo sapiens
ATDSLGLEWHLPSPDPVTVPYLSPLVVWKELESLLENEGDHAITVADFVDHHPIVFWNLVWYFRRLDLPSNLPGLILSSEHCNKY

SEQ ID NO: 9490 - protein, 85 aa, Homo sapiens
SKIPRHCMSEDSKYVLIQMLWDNMKLHQDPGQPLYILWNAHTQKYPMVHLLQKSDNSFNQELLKSMVKSIKMNDVYGPMSQILET

SEQ ID NO: 9491 - protein, 85 aa, Homo sapiens
LSQTTLSGGQSDLGYNSLSKDEVRRGDTSTEDIQEEKDKKGSDCSSLSESESTKGSADCLPKLSYQNSSSIVRLTGTSNNSAGKI

SEQ ID NO: 9492 - protein, 85 aa, Homo sapiens
SGESMESTPELLLISSLEDTNETRNIQSRCFRKRHKSDNETNLQQQVVWGNRNRNLSGGVLMGFMLNRINQEATPGDIVEKLGAD

SEQ ID NO: 9493 - protein, 85 aa, Homo sapiens
AKILSNVISKSTRPNTLDIGKPPLRSKRDSLEKESSDDDTPFDGSNYLADKVDSPVIFDLEDLDSETDVSKAGCVATQNPKRIQR

SEQ ID NO: 9494 - protein, 85 aa, Homo sapiens
MNSSFSVKPFEKTDVATGFDPLSLLVAETEQQQKEEEEEDEDDSKSISTPSARRDLAEEIVMYMNNMSSPLTSRTPSIDLQRACD

SEQ ID NO: 9495 - protein, 85 aa, Homo sapiens
DKLNKKSPPLVKACRRSSLPPNSPKPVRLTKSKSYTKSEEKPRDRLWSSPAFSPTCPFREESQDTLTHSSPSFNLDTLLVPKLDV

SEQ ID NO: 9496 - protein, 85 aa, Homo sapiens
LRNSMFTAGKGVAEKASKWYSRFTMYTTSSKDQSSDRTSLSSVGAQDSESTSLTDEDVCHELEGPISSQETSATSGTKRIDLSRI

SEQ ID NO: 9497 - protein, 85 aa, Homo sapiens
SLESSASLEGSLSKFALPGKSEVTSSFNASNTNIFQNYAMEVLISSCSRCRTCDCLVHDEEIMAGWTADDSNLNTTCPFCGNIFL

SEQ ID NO: 9498 - protein, 85 aa, Homo sapiens
PFLNIEIRDLRRPGRYFLKSSPSTENMHFPSSISSQTRQSCISTSASGLDTSALSVQGNFDLNSKSKLQENFCTRSIQIPANRSK

SEQ ID NO: 9499 - protein, 85 aa, Homo sapiens
TAMSKCPIFPMARSISTSGPLDKEDTGRQKLISTGSLPATLQGATDSLGLEWHLPSPDPVTVPYLSPLVVWKELESLLENEGDHA

SEQ ID NO: 9500 - protein, 85 aa, Homo sapiens
ITVADFVDHHPIVFWNLVWYFRRLDLPSNLPGLILSSEHCNKYSKIPRHCMSEDSKYVLIQMLWDNMKLHQDPGQPLYILWNAHT

SEQ ID NO: 9501 - protein, 85 aa, Homo sapiens
QKYPMVHLLQKSDNSFNQELLKSMVKSIKMNDVYGPMSQILETLNKCPHFKRQRSLYREILFLSLVALGRENIDIDAFDKEYKMA

SEQ ID NO: 9502 - protein, 84 aa, Homo sapiens
DDDDDFDDEEAEEKAPVKKSIRDTPAKNAQKSNQNGKDSKPSSTPRSKGQESFKKQEKTPKTPKGPSSVEDIKAKMQASIEKAH

SEQ ID NO: 9503 - protein, 85 aa, Homo sapiens
SAPRLNTTNAWGAAPPSLGSQPLYRSSLSHLGPQHLPPGSSTSGAVSASLPSGPSSSPGSVPATVPMQMPKPSRVQQALAGATPK

SEQ ID NO: 9504 - protein, 85 aa, Homo sapiens
PEPEPEQVIKNYTEELKVPPDEDCIICMEKLSTASGYSDVTDSKAIGSLAVGHLTKCSHAFHLLCLLAMYCNGNKDGSLQCPSCK

SEQ ID NO: 9505 - protein, 85 aa, Homo sapiens
TIYGEKTGTQPQGKMEVLRFQMSLPGHEDCGTILIVYSIPHGIQGPEHPNPGKPFTARGFPRQCYLPDNAQGRKVLELLKVAWKR

SEQ ID NO: 9506 - protein, 85 aa, Homo sapiens
SGAVSASLPSGPSSSPGSVPATVPMQMPKPSRVQQALAGATPKPEPEPEQVIKNYTEELKVPPDEDCIICMEKLSTASGYSDVTD

SEQ ID NO: 9507 - protein, 85 aa, Homo sapiens
SKAIGSLAVGHLTKCSHAFHLLCLLAMYCNGNKDGSLQCPSCKTIYGEKTGTQPQGKMEVLRFQMSLPGHEDCGTILIVYSIPHG

SEQ ID NO: 9508 - protein, 85 aa, Homo sapiens
IQGPEHPNPGKPFTARGFPRQCYLPDNAQGRKVLELLKVAWKRRLIFTVGTSSTTGETDTVVWNEIHHKTEMDRNITGHGYPDPN

SEQ ID NO: 9509 - protein, 85 aa, Homo sapiens
GAPGETPAPKLPPGEREPSQEAGTPLPGQETAEEENVEKEEKSDTQKDSQKAVDKGQGAQRLEGDVVSGTESLFKTHMCPECKRC

SEQ ID NO: 9510 - protein, 85 aa, Homo sapiens
FKKRTHLVEHLHLHFPDPSLQCPNCQKFFTSKSKLKTHLLRELGEKAHHCPLCHYSAVERNALNRHMASMHEDISNFYSDTYACP

SEQ ID NO: 9511 - protein, 85 aa, Homo sapiens
VCREEFRLSQALKEHLKSHTAAAAAEPLPLRCFQEGCSYAAPDRKAFIKHLKETHGVRAVECRHHSCPMLFATAEAMEAHHKSHY

SEQ ID NO: 9512 - protein, 85 aa, Homo sapiens
AFHCPHCDFACSNKHLFRKHKKQGHPGSEELRCTFCPFATFNPVAYQDHVGKMHAHEKIHQCPECNFATAHKRVLIRHMLLHTGE

SEQ ID NO: 9513 - protein, 85 aa, Homo sapiens
KPHKCELCDFTCRDVSYLSKHMLTHSNTKDYMCTECGYVTKWKHYLRVHMRKHAGDLRYQCNQCSYRCHRADQLSSHKLRHQGKS

SEQ ID NO: 9514 - protein, 85 aa, Homo sapiens
MMCEVCAFACKRKYELQKHMASQHHPGTPAPLYPCHYCSYQSRHKQAVLSHENCKHTRLREFHCALCDYRTFSNTTLLFHKRKAH

SEQ ID NO: 9515 - protein, 85 aa, Homo sapiens
GYVPGDQAWQLRYASQEPEGAMQGPTPPPDSEPSNQLSARPEGPGHEPGTVVDPSLDQALPEMSEEVNTGRQEGSEAPHGGDLGG

SEQ ID NO: 9516 - protein, 85 aa, Homo sapiens
SPSPAEVEEGSCTLHLEALGVELESVTEPPLEEVTETAPMEFRPLGLEGPDGLEGPELSSFEGIGTSDLSAEENPLLEKPVSEPS

SEQ ID NO: 9517 - protein, 85 aa, Homo sapiens
TNPPSLEEAPNNWVGTFKTTPPAETAPLPPLPESESLLKALRRQDKEQAEALVLEGRVQMVVIQGEGRAFRCPHCPFITRREKAL

SEQ ID NO: 9518 - protein, 85 aa, Homo sapiens
NLHSRTGCQGRREPLLCPECGASFKQQRGLSTHLLKKCPVLLRKNKGLPRPDSPIPLQPVLPGTQASEDTESGKPPPASQEAELL

SEQ ID NO: 9519 - protein, 85 aa, Homo sapiens
LPKDAPLELPREPEETEEPLATVSGSPVPPAGNSLPTEAPKKHCFDPVPPAGNSSPTEAPKKHHLDPVPPAGNSSPTEALKKHRF

SEQ ID NO: 9520 - protein, 85 aa, Homo sapiens
EQGKFHCNSCPFLCSRLSSITSHVAEGCRGGRGGGGKRGTPQTQPDVSPLSNGDSAPPKNGSTESSSGDGDTVLVQKQKGARFSC

SEQ ID NO: 9521 - protein, 85 aa, Homo sapiens
PTCPFSCQQERALRTHQIRGCPLEESGELHCSLCPFTAPAATALRLHQKRRHPTAAPARGPRPHLQCGDCGFTCKQSRCMQQHRR

SEQ ID NO: 9522 - protein, 85 aa, Homo sapiens
LKHEGVKPHQCPFCDFSTTRRYRLEAHQSRHTGIGRIPCSSCPQTFGTNSKLRLHRLRVHDKTPTHFCPLCDYSGYLRHDITRHV

SEQ ID NO: 9523 - protein, 85 aa, Homo sapiens
NSCHQGTPAFACSQCEAQFSSETALKQHALRRHPEPAQPAPGSPAETTEGPLHCSRCGLLCPSPASLRGHTRKQHPRLECGACQE

SEQ ID NO: 9524 - protein, 85 aa, Homo sapiens
AFPSRLALDEHRRQQHFSHRCQLCDFAARERVGLVKHYLEQHEETSAAVAASDGDGDAGQPPLHCPFCDFTCRHQLVLDHHVKGH

SEQ ID NO: 9525 - protein, 85 aa, Homo sapiens
GGTRLYKCTDCAYSTKNRQKITWHSRIHTGEKPYHCHLCPYACADPSRLKYHMRIHKEERKYLCPECGYKCKWVNQLKYHMTKHT

SEQ ID NO: 9526 - protein, 85 aa, Homo sapiens
GLKPYQCPECEYCTNRADALRVHQETRHREARAFMCEQCGKAFKTRFLLRTHLRKHSEAKPYVCNVCHRAFRWAAGLRHHALTHT

SEQ ID NO: 9527 - protein, 85 aa, Homo sapiens
CPSRDPAPIPTEPGCLLVEATATEEGPGNMEIIVETVAGTLTPGAPGETPAPKLPPGEREPSQEAGTPLPGQETAEEENVEKEEK

SEQ ID NO: 9528 - protein, 85 aa, Homo sapiens
SDTQKDSQKAVDKGQGAQRLEGDVVSGTESLFKTHMCPECKRCFKKRTHLVEHLHLHFPDPSLQCPNCQKFFTSKSKLKTHLLRE

SEQ ID NO: 9529 - protein, 85 aa, Homo sapiens
MGEKAHHCPLCHYSAVERNALNRHMASMHEDISNFYSDTYACPVCREEFRLSQALKEHLKSHTAAAAAEPLPLRCFQEGCSYAAP

SEQ ID NO: 9530 - protein, 85 aa, Homo sapiens
DRKAFIKHLKETHGVRAVECRHHSCPMLFATAEAMEAHHKSHYAFHCPHCDFACSNKHLFRKHKKQGHPGSEELRCTFCPFATFN

SEQ ID NO: 9531 - protein, 85 aa, Homo sapiens
PVAYQDHVGKMHAHEKIHQCPECNFATAHKRVLIRHMLLHTGEKPHKCELCDFTCRDVSYLSKHMLTHSNTKDYMCTECGYVTKW

SEQ ID NO: 9532 - protein, 85 aa, Homo sapiens
KHYLRVHMRKHAGDLRYQCNQCSYRCHRADQLSSHKLRHQGKSLMCEVCAFACKRKYELQKHMASQHHPGTPAPLYPCHYCSYQS

SEQ ID NO: 9533 - protein, 85 aa, Homo sapiens
RHKQAVLSHENCKHTRLREFHCALCDYRTFSNTTLLFHKRKAHGYVPGDQAWQLRYASQEPEGAMQGPTPPPDSEPSNQLSARPE

SEQ ID NO: 9534 - protein, 85 aa, Homo sapiens
GPGHEPGTVVDPSLDQALPEMSEEVNTGRQEGSEAPHGGDLGGSPSPAEVEEGSCTLHLEALGVELESVTEPPLEEVTETAPMEF

SEQ ID NO: 9535 - protein, 85 aa, Homo sapiens
RPLGLEGPDGLEGPELSSFEGIGTSDLSAEENPLLEKPVSEPSTNPPSLEEAPNNWVGTFKTTPPAETAPLPPLPESESLLKALR

SEQ ID NO: 9536 - protein, 85 aa, Homo sapiens
RQDKEQAEALVLEGRVQMVVIQGEGRAFRCPHCPFITRREKALNLHSRTGCQGRREPLLCPECGASFKQQRGLSTHLLKKCPVLL

SEQ ID NO: 9537 - protein, 85 aa, Homo sapiens
RKNKGLPRPDSPIPLQPVLPGTQASEDTESGKPPPASQEAELLLPKDAPLELPREPEETEEPLATVSGSPVPPAGNSLPTEAPKK

SEQ ID NO: 9538 - protein, 85 aa, Homo sapiens
HCFDPVPPAGNSSPTEAPKKHHLDPVPPAGNSSPTEALKKHRFEQGKFHCNSCPFLCSRLSSITSHVAEGCRGGRGGGGKRGTPQ

SEQ ID NO: 9539 - protein, 85 aa, Homo sapiens
TQPDVSPLSNGDSAPPKNGSTESSSGDGDTVLVQKQKGARFSCPTCPFSCQQERALRTHQIRGCPLEESGELHCSLCPFTAPAAT

SEQ ID NO: 9540 - protein, 85 aa, Homo sapiens
ALRLHQKRRHPTAAPARGPRPHLQCGDCGFTCKQSRCMQQHRRLKHEGVKPHQCPFCDFSTTRRYRLEAHQSRHTGIGRIPCSSC

SEQ ID NO: 9541 - protein, 85 aa, Homo sapiens
PQTFGTNSKLRLHRLRVHDKTPTHFCPLCDYSGYLRHDITRHVNSCHQGTPAFACSQCEAQFSSETALKQHALRRHPEPAQPAPG

SEQ ID NO: 9542 - protein, 85 aa, Homo sapiens
SPAETTEGPLHCSRCGLLCPSPASLRGHTRKQHPRLECGACQEAFPSRLALDEHRRQQHFSHRCQLCDFAARERVGLVKHYLEQH

SEQ ID NO: 9543 - protein, 85 aa, Homo sapiens
EETSAAVAASDGDGDAGQPPLHCPFCDFTCRHQLVLDHHVKGHGGTRLYKCTDCAYSTKNRQKITWHSRIHTGEKPYHCHLCPYA

SEQ ID NO: 9544 - protein, 85 aa, Homo sapiens
CADPSRLKYHMRIHKEERKYLCPECGYKCKWVNQLKYHMTKHTGLKPYQCPECEYCTNRADALRVHQETRHREARAFMCEQCGKA

SEQ ID NO: 9545 - protein, 85 aa, Homo sapiens
FKTRFLLRTHLRKHSEAKPYVCNVCHRAFRWAAGLRHHALTHTDRHPFFCRLCNYKAKQKFQVVKHVRRHHPDQADPNQGVGKDP

SEQ ID NO: 9546 - protein, 85 aa, Homo sapiens
FYGTHFIMSPPTKSKLKRQSQLLSSMLSRTLSYKYRDLDSTFSSLGASDDPAELSTQLSAPGVLKVFGDSVCTGTHYKSVLATGT

SEQ ID NO: 9547 - protein, 85 aa, Homo sapiens
SSARELVKEALERYALDPRQAGQYVLCDVVGQAGDAGQRWQARCFRVFGDSEKPLLIQELWKPREGLSRRFELRKRSDVEELAAK

SEQ ID NO: 9548 - protein, 85 aa, Homo sapiens
EVDTITAGINAQARRLQRSRAKGTPTPALGDARSSPPPRLRRTVSETSLSPVNALPAAAQGPEEPGPDAMRYSLYQSPHLLLLQG

SEQ ID NO: 9549 - protein, 85 aa, Homo sapiens
YSQQHPGVCAQPGPAHGGPADPLQQAQHQPLSPRHPASTLHHPPATAPGQRPGRGEAGPGAHPRGAHLRQLLRGGAQDRGAAPRG

SEQ ID NO: 9550 - protein, 84 aa, Homo sapiens
LRQLLRGGAQDRGAAPRGPALPGALLPAAIQGPRAGPAPARPGLGAPPGCAAELPAVRGRARGPGSRLPYSGRPAPAPAAAPGV

SEQ ID NO: 9551 - protein, 85 aa, Homo sapiens
SSLGASDDPAELSTQLSAPGVLKVFGDSVCTGTHYKSVLATGTSSARELVKEALERYALDPRQAGQYVLCDVVGQAGDAGQRWQA

SEQ ID NO: 9552 - protein, 85 aa, Homo sapiens
RCFRVFGDSEKPLLIQELWKPREGLSRRFELRKRSDVEELAAKEVDTITAGINAQARRLQRSRAKGTPTPALGDARSSPPPRLRR

SEQ ID NO: 9553 - protein, 85 aa, Homo sapiens
TVSETSLSPVNALPAAAQGPEEPGPDAMRYSLYQSPHLLLLQGYSQQHPGVCAQPGPAHGGPADPLQQAQHQPLSPRHPASTLHH

SEQ ID NO: 9554 - protein, 85 aa, Homo sapiens
PPATAPGQRPGRGEAGPGAHPRGAHLRQLLRGGAQDRGAAPRGPALPGALLPAAIQGPRAGPAPARPGLGAPPGCAAELPAVRGR

SEQ ID NO: 9555 - protein, 85 aa, Homo sapiens
TCHKRYKIQKKVREHHRKLRKEAKKRGHKKPRKDPGVPNSAPFKEALLREAELRKQRLEELKQQQKLDRQKELEKKRKLETNPDI

SEQ ID NO: 9556 - protein, 85 aa, Homo sapiens
KPSNVEPMEKEFGLCKTENKAKSGKQNSKKLYCQELKKVIEASDVVLEVLDARDPLGCRCPQVEEAIVQSGQKKLVLILNKSDLV

SEQ ID NO: 9557 - protein, 85 aa, Homo sapiens
PKENLESWLNYLKKELPTVVFRASTKPKDKGKITKRVKAKKNAAPFRSEVCFGKEGLWKLLGGFQETCSKAIRVGVIGFPNVGKS

SEQ ID NO: 9558 - protein, 85 aa, Homo sapiens
SIINSLKQEQMCNVGVSMGLTRSMQVVPLDKQITIIDSPSFIVSPLNSSSALALRSPASIEVVKPMEAASAILSQADARQVVLKY

SEQ ID NO: 9559 - protein, 85 aa, Homo sapiens
TVPGYRNSLEFFTVLAQRRGMHQKGGIPNVEGAAKLLWSEWTGASLAYYCHPPTSWTPPPYFNESIVVDMKSGFNLEELEKNNAQ

SEQ ID NO: 9560 - protein, 85 aa, Homo sapiens
SIRAIKGPHLANSILFQSSGLTNGIIEEKDIHEELPKRKERKQEEREDDKDSDQETVDEEVDENSSGMFAAEETGEALSEETTAG

SEQ ID NO: 9561 - protein, 85 aa, Homo sapiens
FKEALLREAELRKQRLEELKQQQKLDRQKELEKKRKLETNPDIKPSNVEPMEKEFGLCKTENKAKSGKQNSKKLYCQELKKVIEA

SEQ ID NO: 9562 - protein, 85 aa, Homo sapiens
SDVVLEVLDARDPLGCRCPQVEEAIVQSGQKKLVLILNKSDLVPKENLESWLNYLKKELPTVVFRASTKPKDKGKITKRVKAKKN

SEQ ID NO: 9563 - protein, 85 aa, Homo sapiens
AAPFRSEVCFGKEGLWKLLGGFQETCSKAIRVGVIGFPNVGKSSIINSLKQEQMCNVGVSMGLTRSMQVVPLDKQITIIDSPSFI

SEQ ID NO: 9564 - protein, 85 aa, Homo sapiens
VSPLNSSSALALRSPASIEVVKPMEAASAILSQADARQVVLKYTVPGYRNSLEFFTVLAQRRGMHQKGGIPNVEGAAKLLWSEWT

SEQ ID NO: 9565 - protein, 85 aa, Homo sapiens
GASLAYYCHPPTSWTPPPYFNESIVVDMKSGFNLEELEKNNAQSIRAIKGPHLANSILFQSSGLTNGIIEEKDIHEELPKRKERK

SEQ ID NO: 9566 - protein, 84 aa, Homo sapiens
VAGVARKGRRIWGSRMIDIQTRMAGRALELLYLPENKPCYLLDIGCGTGLSGSYLSDEGHYWVGLDISPAMLGPGIPSCPAAVP

SEQ ID NO: 9567 - protein, 19 aa, Homo sapiens
QNLKKIVIVFLLQIQIHGF

SEQ ID NO: 9568 - protein, 52 aa, Homo sapiens
PHPSPPPLHSAAALRQAASMTRRRWTMRSRTAMSPGPQRVPSAPKPSSAPCA

SEQ ID NO: 9569 - protein, 8 aa, Homo sapiens
MPAESRSP

SEQ ID NO: 9570 - protein, 12 aa, Homo sapiens
PSAPKPSSAPCA

SEQ ID NO: 9571 - protein, 85 aa, Homo sapiens
SARGEGAGQPSTSAQGQPAAPAPQKRGRGRPRKQQQEPTGEPSPKRPRGRPKGSKNKSPSKAAQKKAEATGEKRPRGRPRKWEEF

SEQ ID NO: 9572 - protein, 84 aa, Homo sapiens
GAGQPSTSAQGQPAAPAPQKRGRGRPRKQQQEPTGEPSPKRPRGRPKGSKNKSPSKAAQKKAEATGEKRPRGRPRKWEEFYIAA

SEQ ID NO: 9573 - protein, 42 aa, Homo sapiens
LTRSLKTLPSACTAFLLLFFLFSSGDPELSCSCTLRTQSSWS

SEQ ID NO: 9574 - protein, 84 aa, Homo sapiens
PENSEQLELITTQATKAGFSGGMVVDYPNSAKAKKFYLCLFSGPSTFIPEVPIKDVEAGNGEEESGMGAGEEGAAQAPGQGSQT

SEQ ID NO: 9575 - protein, 85 aa, Homo sapiens
NSRPPEYEFFWGLRSYHETSKMKVLKFACRVQKKDPKDWAVQYREAVEMEVQAAAVAVAEAEARAEWFQHQHWLYWRTQHQHGLQ

SEQ ID NO: 9576 - protein, 84 aa, Homo sapiens
SRPPEYEFFWGLRSYHETSKMKVLKFACRVQKKDPKDWAVQYREAVEMEVQAAAVAVAEAEARAEWFQHQHWLYWRTQHQHGLQ

SEQ ID NO: 9577 - protein, 23 aa, Homo sapiens
MSWTSIQCGEINLEYCFFCILYY

SEQ ID NO: 9578 - protein, 8 aa, Homo sapiens
DTVRLVLT

SEQ ID NO: 9579 - protein, 84 aa, Homo sapiens
LMEALRYCKVGSYLKSPKFPIWIVGSETHLTVFFAKDMALVAPEAPSEQARRVFQTYDPEDNGFIPDSLLEDVMKALDLVSDPE

SEQ ID NO: 9580 - protein, 10 aa, Homo sapiens
ILYMDMAAKV

SEQ ID NO: 9581 - protein, 85 aa, Homo sapiens
QSQPHPTTSSNGMVVNKHSEGSHGGELPVVNSSAGSNCCTCNCQSTLQAILQELKTMRKLMQIQAVGTQNRQQPPISLICSQRTA

SEQ ID NO: 9582 - protein, 85 aa, Homo sapiens
VSRKRNKKKKVPPKTVEPLTVKQKPSGSEMEKKSVVASELSALQAAEHTSPEESRVLGFGIVLESPSSDPEVQLAEGFDVFMPKS

SEQ ID NO: 9583 - protein, 85 aa, Homo sapiens
QLDSILSNYTRSGSLLFRKLVCAFFDDKTLANSLPNGKRKRGLNDNRKGLDQNIVGAIKVFTEKYCTANHVDKLPGPRDWVQILQ

SEQ ID NO: 9584 - protein, 84 aa, Homo sapiens
PNGKRKRGLNDNRKGLDQNIVGAIKVFTEKYCTANHVDKLPGPRDWVQILQDQIKLARRRLKRGSEIADSDERLDGIALPPTVV

SEQ ID NO: 9585 - protein, 85 aa, Homo sapiens
PPRLNSSAEAPQSLHPSSRGVWNELPPQSGQFSGQYGTRSRTFQSQPHPTTSSNGMVVNKHSEGSHGGELPVVNSSAGSNCCTCN

SEQ ID NO: 9586 - protein, 85 aa, Homo sapiens
CQSTLQAILQELKTMRKLMQIQAVGTQNRQQPPISLICSQRTAVSRKRNKKKKVPPKTVEPLTVKQKPSGSEMEKKSVVASELSA

SEQ ID NO: 9587 - protein, 85 aa, Homo sapiens
LQAAEHTSPEESRVLGFGIVLESPSSDPEVQLAEGFDVFMPKSQLDSILSNYTRSGSLLFRKLVCAFFDDKTLANSLPNGKRKRG

SEQ ID NO: 9588 - protein, 30 aa, Homo sapiens
PLLHSKFLDPGQIHSSSQWMSSTLLMTPET

SEQ ID NO: 9589 - protein, 84 aa, Homo sapiens
IYITCHLKVTLAEQDPDELNKACSFSKPSNRQQKSKLLLFHLSWFPVEGLADICQCCNKGDCGTPSHSRRQPRVVSQWSTSASL

SEQ ID NO: 9590 - protein, 85 aa, Homo sapiens
EHTMATPLEDVGKQVWRGALLLADYILFRQDLFRGCTALELGAGTGLASIIAATMARTVYCTDVGADLLSMCQRNIALNSHLAAT

SEQ ID NO: 9591 - protein, 85 aa, Homo sapiens
GGGIVRVKELDWLKDDLCTDPKVPFSWSQEEISDLYDHTTILFAAEVFYDDDLTDAVFKTLSRLAHRLKNACTAILSVEKRLNFT

SEQ ID NO: 9592 - protein, 84 aa, Homo sapiens
AHRLKNACTAILSVEKRLNFTLRHLDVTCEAYDHFRSCLHALEQLADGKLRFVVEPVEASFPQLLVYERLQQLELWKIIAEPVT

SEQ ID NO: 9593 - protein, 85 aa, Homo sapiens
RAASDSNPAGPLRDKVHPMILAQEEDDVLGEEAQGSPHDIIRIEHTMATPLEDVGKQVWRGALLLADYILFRQDLFRGCTALELG

SEQ ID NO: 9594 - protein, 85 aa, Homo sapiens
AGTGLASIIAATMARTVYCTDVGADLLSMCQRNIALNSHLAATGGGIVRVKELDWLKDDLCTDPKVPFSWSQEEISDLYDHTTIL

SEQ ID NO: 9595 - protein, 85 aa, Homo sapiens
FAAEVFYDDDLTDAVFKTLSRLAHRLKNACTAILSVEKRLNFTLRHLDVTCEAYDHFRSCLHALEQLADGKLRFVVEPVEASFPQ

SEQ ID NO: 9596 - protein, 84 aa, Homo sapiens
SPEFSKTLQLEYRFETVQKLRFGIYDIDNKTPELRDDDFLGGAECSLGQIVSSQVLTLPLMLKPGKPAGRGTITSPLPRSQLRN

SEQ ID NO: 9597 - protein, 85 aa, Homo sapiens
ARTYCYKQEGCHTASRSGHCAALLQTPGPHPGHQLLLFGGCNLAEPEVAGHWSHGKIKSFLSPQGGTTCCSSFDGTACKACEQWA

SEQ ID NO: 9598 - protein, 84 aa, Homo sapiens
QLLLFGGCNLAEPEVAGHWSHGKIKSFLSPQGGTTCCSSFDGTACKACEQWAGVPEGAPWTTASLMFCGRALCCAVWWRNSDQS

SEQ ID NO: 9599 - protein, 85 aa, Homo sapiens
QQIWEKSIEQTQIKGLKNKPKKMGHIKPDLIDVDLIRGSTFAKAKPEIPWTSLTRKGLVRVVFFPLFSNWWIQVTSLRIFVWLLL

SEQ ID NO: 9600 - protein, 85 aa, Homo sapiens
YSQQHDSLVYVLNRDRHTVGQRTPSSKPSISLSAPDILPLHCTIRRQPLPDSGQAAGRLVLEPIPGAHISVNFSEVGHRTVVLHH

SEQ ID NO: 9601 - protein, 85 aa, Homo sapiens
GDLLSLGLYYLLLFKDPAQAQPLPARALARLRAVPQSCRLCGAALGARGAASPTQAALPRRQQLLLEFEPHLEDTLLQRIMTLIE

SEQ ID NO: 9602 - protein, 85 aa, Homo sapiens
PGGDDHKLTPAFLLCLCIQHSATHFQPGTFGQLLLKIARLIRETVWEKTKELAEKQAQLQEPISLASCAMADLVPDLQPILFWMS

SEQ ID NO: 9603 - protein, 85 aa, Homo sapiens
NSIELLYFIQQKCPLYMQSMEEQLDITGSKESLFSCTLTASEEAMAVLEEVVLYAFQQCVYYVSKSLYICLPALLECPPFQTERR

SEQ ID NO: 9604 - protein, 85 aa, Homo sapiens
ESWSSAPELPEELRRVVSVYQAALDLLRQLQVHPEVASQMLAYLFFFSGTLLLNQLLDRGPSLSCFHWPRGVQACARLQQLLEWM

SEQ ID NO: 9605 - protein, 85 aa, Homo sapiens
RSAGFGAAGEHFFQKLSCTLNLLATPRAQLIQMSWTALRAAFPALSPAQLHRLLTHYQLASAMGPMSTWEPGAQDSPEAFRSEDV

SEQ ID NO: 9606 - protein, 85 aa, Homo sapiens
MESYENPPPIVLPSDGFQVDLEANCLDDSIYQHLLYVRHFLWGLRSRASPGSPGRPGSGASQPVCPEGMHHVVLDGHLEAPSCPL

SEQ ID NO: 9607 - protein, 85 aa, Homo sapiens
APRDPGPAAREVAPERTLPLRGAPWAQAPPGRQPSRGGSQAGPPHTDSSCLLTPPSTPLGPEPGDPDWPESGGPCGKALPERQRN

SEQ ID NO: 9608 - protein, 85 aa, Homo sapiens
GLSGLRGAAPEGDSAALAEESPPAPSSRSSSTEDFCYVFTVELERGPSGLGMGLIDGMHTHLGAPGLYIQTLLPGSPAAADGRLS

SEQ ID NO: 9609 - protein, 84 aa, Homo sapiens
DGMHTHLGAPGLYIQTLLPGSPAAADGRLSLGDRILEVNGSSLLGLGYLRAVDLIRHGGKKMRFLVAKSDVETAKKIHFRTPPL

SEQ ID NO: 9610 - protein, 85 aa, Homo sapiens
TVSETSLSPVNALPAAAQGPEEPGPDAMRYSLYQSPHLLLLQGYSQQHDSLVYVLNRDRHTVGQRTPSSKPSISLSAPDILPLHC

SEQ ID NO: 9611 - protein, 85 aa, Homo sapiens
TIRRQPLPDSGQAAGRLVLEPIPGAHISVNFSEVGHRTVVLHHGDLLSLGLYYLLLFKDPAQAQPLPARALARLRAVPQSCRLCG

SEQ ID NO: 9612 - protein, 85 aa, Homo sapiens
AALGARGAASPTQAALPRRQQLLLEFEPHLEDTLLQRIMTLIEPGGDDHKLTPAFLLCLCIQHSATHFQPGTFGQLLLKIARLIR

SEQ ID NO: 9613 - protein, 85 aa, Homo sapiens
ETVWEKTKELAEKQAQLQEPISLASCAMADLVPDLQPILFWMSNSIELLYFIQQKCPLYMQSMEEQLDITGSKESLFSCTLTASE

SEQ ID NO: 9614 - protein, 85 aa, Homo sapiens
EAMAVLEEVVLYAFQQCVYYVSKSLYICLPALLECPPFQTERRESWSSAPELPEELRRVVSVYQAALDLLRQLQVHPEVASQMLA

SEQ ID NO: 9615 - protein, 85 aa, Homo sapiens
YLFFFSGTLLLNQLLDRGPSLSCFHWPRGVQACARLQQLLEWMRSAGFGAAGEHFFQKLSCTLNLLATPRAQLIQMSWTALRAAF

SEQ ID NO: 9616 - protein, 85 aa, Homo sapiens
PALSPAQLHRLLTHYQLASAMGPMSTWEPGAQDSPEAFRSEDVLESYENPPPIVLPSDGFQVDLEANCLDDSIYQHLLYVRHFLW

SEQ ID NO: 9617 - protein, 85 aa, Homo sapiens
GLRSRASPGSPGRPGSGASQPVCPEGMHHVVLDGHLEAPSCPLAPRDPGPAAREVAPERTLPLRGAPWAQAPPGRQPSRGGSQAG

SEQ ID NO: 9618 - protein, 85 aa, Homo sapiens
PPHTDSSCLLTPPSTPLGPEPGDPDWPESGGPCGKALPERQRNGLSGLRGAAPEGDSAALAEESPPAPSSRSSSTEDFCYVFTVE

SEQ ID NO: 9619 - protein, 85 aa, Homo sapiens
MERGPSGLGMGLIDGMHTHLGAPGLYIQTLLPGSPAAADGRLSLGDRILEVNGSSLLGLGYLRAVDLIRHGGKKMRFLVAKSDVE

SEQ ID NO: 9620 - protein, 85 aa, Homo sapiens
ARVPLGRSLTLSPRLEHNGMTSAHHNFRLPGSRDSPASASQVAEIIDLEWYEKSEETHASQIELLETSSTQEPLNASEAFCPRDC

SEQ ID NO: 9621 - protein, 85 aa, Homo sapiens
MVPVVFPGPVSQEGCCQFTCELLKHIMYQRQQLPLPYEQLKHFYRKPSPQAEEMLKKKPRATTEVSSRKCQQALAELESVLSHLE

SEQ ID NO: 9622 - protein, 85 aa, Homo sapiens
DFFARTLVPRVLILLGGNALSPKEFYELDLSLLAPYSVDQSLSTAACLRRLFRAIFMADAFSELQAPPLMGTVVMAQGHRNCGED

SEQ ID NO: 9623 - protein, 85 aa, Homo sapiens
AEIIDLEWYEKSEETHASQIELLETSSTQEPLNASEAFCPRDCMVPVVFPGPVSQEGCCQFTCELLKHIMYQRQQLPLPYEQLKH

SEQ ID NO: 9624 - protein, 85 aa, Homo sapiens
FYRKPSPQAEEMLKKKPRATTEVSSRKCQQALAELESVLSHLEDFFARTLVPRVLILLGGNALSPKEFYELDLSLLAPYSVDQSL

SEQ ID NO: 9625 - protein, 85 aa, Homo sapiens
STAACLRRLFRAIFMADAFSELQAPPLMGTVVMAQGHRNCGEDWFRPKLNYRVPSRGHKLTVTLSCGRPSIRTTAWEDYIWFQAP

SEQ ID NO: 9626 - protein, 84 aa, Homo sapiens
QQQEPTGEPSPKRPRGRPKGSKNKSPSKAAQKKAEATGEKRPRGRPRKWPQQVVQKKPAQVNVALPGKDHPGNLIYLLFSKNAT

SEQ ID NO: 9627 - protein, 85 aa, Homo sapiens
IECDACKDWFHGSCVGVEEEEAPDIDIYHCPNCEKTHGKSTLKKKRTWHKHGPGQAPDVKPPKNSVDLDDYEEEQDHLDACFKDS

SEQ ID NO: 9628 - protein, 85 aa, Homo sapiens
DYVYPSLESDEDNPIFKSRSKKRKGSDDAPYSPTARVGPSVPRQDRPVREGTRVASIETGLAAAAAKLSQQEEQKSKKKKSAKRK

SEQ ID NO: 9629 - protein, 85 aa, Homo sapiens
MTPNTTSPSTSTSISAGTTSTSTTPASTTPASTTPASTSTASSQASQEGSSPEPPPESHSSSLADHEYTAAGTFTGAQAGRTSQP

SEQ ID NO: 9630 - protein, 85 aa, Homo sapiens
KKKRTWHKHGPGQAPDVKPPKNSVDLDDYEEEQDHLDACFKDSDYVYPSLESDEDNPIFKSRSKKRKGSDDAPYSPTARVGPSVP

SEQ ID NO: 9631 - protein, 85 aa, Homo sapiens
RQDRPVREGTRVASIETGLAAAAAKLSQQEEQKSKKKKSAKRKLTPNTTSPSTSTSISAGTTSTSTTPASTTPASTTPASTSTAS

SEQ ID NO: 9632 - protein, 85 aa, Homo sapiens
SQASQEGSSPEPPPESHSSSLADHEYTAAGTFTGAQAGRTSQPMAPGVFLTQRRPSASSPNNNTAAKGKRTKKGMATAKQRLGKI

SEQ ID NO: 9633 - protein, 85 aa, Homo sapiens
TRGNQRELARQKNMKKQSDSVKGKRRDDGLSAAARKQSAITSSRNFLYPAYVYFPSSVPSPPRKYTQTYYAAVPAGWWGSGGGPA

SEQ ID NO: 9634 - protein, 84 aa, Homo sapiens
KRRDDGLSAAARKQSAITSSRNFLYPAYVYFPSSVPSPPRKYTQTYYAAVPAGWWGSGGGPATQPAAGGRWRFLHILGTQPQSH

SEQ ID NO: 9635 - protein, 85 aa, Homo sapiens
SYRPVVSPVMSLTRRCMRSRTSMRTDAVFLILYKELYYRHIYAKVSGGPSLEQRFESYYNYCNLFNYILNADGPAPLELPNQWLW

SEQ ID NO: 9636 - protein, 85 aa, Homo sapiens
DIIDEFIYQFQSFSQYRCKTAKKSEEEIDFLRSNPKIWNVHSVLNVLHSLVDKSNINRQLEVYTSGGDPESVAGEYGRHSLYKML

SEQ ID NO: 9637 - protein, 85 aa, Homo sapiens
GYFSLVGLLRLHSLLGDYYQAIKVLENIELNKKSMYSRVPECQVTTYYYVGFAYLMMRRYQDAIRVFANILLYIQRTKSMFQRTT

SEQ ID NO: 9638 - protein, 85 aa, Homo sapiens
YKYEMINKQNEQMHALLAIALTMYPMRIDESIHLQLREKYGDKMLRMQKGDPQVYEELFSYSCPKFLSPVVPNYDNVHPNYHKEP

SEQ ID NO: 9639 - protein, 85 aa, Homo sapiens
FLQQLKVFSDEVQQQAQLSTIRSFLKLYTTMPVAKLAGFLDLTEQEFRIQLLVFKHKMKNLVWTSGISALDGEFQSASEVDFYID

SEQ ID NO: 9640 - protein, 85 aa, Homo sapiens
AKVSGGPSLEQRFESYYNYCNLFNYILNADGPAPLELPNQWLWDIIDEFIYQFQSFSQYRCKTAKKSEEEIDFLRSNPKIWNVHS

SEQ ID NO: 9641 - protein, 85 aa, Homo sapiens
VLNVLHSLVDKSNINRQLEVYTSGGDPESVAGEYGRHSLYKMLGYFSLVGLLRLHSLLGDYYQAIKVLENIELNKKSMYSRVPEC

SEQ ID NO: 9642 - protein, 85 aa, Homo sapiens
QVTTYYYVGFAYLMMRRYQDAIRVFANILLYIQRTKSMFQRTTYKYEMINKQNEQMHALLAIALTMYPMRIDESIHLQLREKYGD

SEQ ID NO: 9643 - protein, 85 aa, Homo sapiens
KMLRMQKGDPQVYEELFSYSCPKFLSPVVPNYDNVHPNYHKEPFLQQLKVFSDEVQQQAQLSTIRSFLKLYTTMPVAKLAGFLDL

SEQ ID NO: 9644 - protein, 85 aa, Homo sapiens
ASTDYSTYSQAAAQQGYSAYTAQPTQGYAQTTQAYGQQSYGTYGQPTDVSYTQAQTTATYGQTAYATSYGQPPTVEGTSTGYTTP

SEQ ID NO: 9645 - protein, 85 aa, Homo sapiens
TAPQAYSQPVQGYGTGAYDTTTATVTTTQASYAAQSAYGTQPAYPAYGQQPAATAPTRPQDGNKPTETSQPQSSTGGYNQPSLGY

SEQ ID NO: 9646 - protein, 85 aa, Homo sapiens
GQSNYSYPQVPGSYPMQPVTAPPSYPPTSYSSTQPTSYDQSSYSQQNTYGQPSSYGQQSSYGQQSSYGQQPPTSYPPQTGSYSQA

SEQ ID NO: 9647 - protein, 85 aa, Homo sapiens
PSQYSQQSSSYGQQSSFRQDHPSSMGVYGQESGGFSGPGENRSMSGPDNRGRGRGGFDRGGMSRGGRGGGRGGMGAGERGGFNKP

SEQ ID NO: 9648 - protein, 85 aa, Homo sapiens
GGPMDEGPDLDLGPPVDPDEDSDNSAIYVQGLNDSVTLDDLADFFKQCGVVKMNKRTGQPMIHIYLDKETGKPKGDATVSYEDPP

SEQ ID NO: 9649 - protein, 85 aa, Homo sapiens
YGQPTDVSYTQAQTTATYGQTAYATSYGQPPTVEGTSTGYTTPTAPQAYSQPVQGYGTGAYDTTTATVTTTQASYAAQSAYGTQP

SEQ ID NO: 9650 - protein, 85 aa, Homo sapiens
AYPAYGQQPAATAPTRPQDGNKPTETSQPQSSTGGYNQPSLGYGQSNYSYPQVPGSYPMQPVTAPPSYPPTSYSSTQPTSYDQSS

SEQ ID NO: 9651 - protein, 85 aa, Homo sapiens
YSQQNTYGQPSSYGQQSSYGQQSSYGQQPPTSYPPQTGSYSQAPSQYSQQSSSYGQQSSFRQDHPSSMGVYGQESGGFSGPGENR

SEQ ID NO: 9652 - protein, 85 aa, Homo sapiens
SMSGPDNRGRGRGGFDRGGMSRGGRGGGRGGMGAGERGGFNKPGGPMDEGPDLDLGPPVDPDEDSDNSAIYVQGLNDSVTLDDLA

SEQ ID NO: 9653 - protein, 85 aa, Homo sapiens
DFFKQCGVVKMNKRTGQPMIHIYLDKETGKPKGDATVSYEDPPTAKAAVEWFDGKDFQGSKLKVSLARKKPPMNSMRGGLPPREG

SEQ ID NO: 9654 - protein, 85 aa, Homo sapiens
RGMPPPLRGGPGGPGGPGGPMGRMGGRGGDRGGFPPRGPRGSRGNPSGGGNVQHRAGDWQCPNPGCGNQNFAWRTECNQCKAPKP

SEQ ID NO: 9655 - protein, 85 aa, Homo sapiens
EGFLPPPFPPPGGDRGRGGPGGMRGGRGGLMDRGGPGGMFRGGRGGDRGGFRGGRGMDRGGFGGGRRGGPGGPPGPLMEQMGGRR

SEQ ID NO: 9656 - protein, 85 aa, Homo sapiens
PSPSVSTSAASVLEGVCGRARSTYRTPEEGEEQSWSAIMAGEEINEDYPVEIHEYLSAFENSIGAVDEMLKTMMSVSRNELLQKL

SEQ ID NO: 9657 - protein, 85 aa, Homo sapiens
DPLEQAKVDLVSAYTLNSMFWVYLATQGVNPKEHPVKQELERIRVYMNRVKEITDKKKAGKLDRGAASRFVKNALWEPKSKNASK

SEQ ID NO: 9658 - protein, 85 aa, Homo sapiens
EINEDYPVEIHEYLSAFENSIGAVDEMLKTMMSVSRNELLQKLDPLEQAKVDLVSAYTLNSMFWVYLATQGVNPKEHPVKQELER

SEQ ID NO: 9659 - protein, 85 aa, Homo sapiens
KFPAAILRGLKKKGIHHPTPIQIQGIPTILSGRDMIGIAFTGSGKTLVFTLPVIMFCLEQEKRLPFSKREGPYGLIICPSRELAR

SEQ ID NO: 9660 - protein, 84 aa, Homo sapiens
CPSRELARQTHGILEYYCRLLQEDSSPLLRCALCIGGMSVKEQMETIRHAVQSSADHQRPWTRPSVHRWARPHPGGLPPRTSEY

SEQ ID NO: 9661 - protein, 85 aa, Homo sapiens
SGKTLVFTLPVIMFCLEQEKRLPFSKREGPYGLIICPSRELARQTHGILEYYCRLLQEDSSPLLRCALCIGGMSVKEQMETIRHA

SEQ ID NO: 9662 - protein, 84 aa, Homo sapiens
RRLGLVYFLYLFLFSGLEYTLSFLTHQRFQFSSLQQGKMFFLIGLTMATIQGAYARRIHPGGEVAAVKRAHQGRRARSWVHCAA

SEQ ID NO: 9663 - protein, 6 aa, Homo sapiens
PSTGTP

SEQ ID NO: 9664 - protein, 25 aa, Homo sapiens
VPQDLALNFVVTLEQMLEQTIPWWR

SEQ ID NO: 9665 - protein, 19 aa, Homo sapiens
GPDLFIEHLRKPQRACLKT

SEQ ID NO: 9666 - protein, 12 aa, Homo sapiens
RLNIKQALCAPL

SEQ ID NO: 9667 - protein, 64 aa, Homo sapiens
PSLYLLPTSVAQRRLLKMRTPSSKMEVLLNLQICTARAKVPQDLALNFVVTLEQMLEQTIPWWR

SEQ ID NO: 9668 - protein, 31 aa, Homo sapiens
KGKGSSLMLKDTVFLMAGLRTLQVLKPKVLI

SEQ ID NO: 9669 - protein, 34 aa, Homo sapiens
AVRQLLMPSTGTQQASKAKAVHLALWMTQHLIEE

SEQ ID NO: 9670 - protein, 6 aa, Homo sapiens
PLLWTA

SEQ ID NO: 9671 - protein, 85 aa, Homo sapiens
DFPSSLRPALFLTGPLGLSDVPDLSFMCSWRDALTLPEAQPQNSENGALHVTKDLLWEPATPGPLPMLPPLIDPWDPGLTARDLL

SEQ ID NO: 9672 - protein, 85 aa, Homo sapiens
FRGGCRYRKRPRVVLDVTEQISRFLLDHGDVAFAPLGKLMLENFKLEGAGSRTKKKTVVSVKKLLQDLGGHQPWGQVSLGLPQQP

SEQ ID NO: 9673 - protein, 84 aa, Homo sapiens
MLENFKLEGAGSRTKKKTVVSVKKLLQDLGGHQPWGQVSLGLPQQPTAPLLYPRGPHPGHVGGEPLGRAAARGAGAAVGAAASG

SEQ ID NO: 9674 - protein, 85 aa, Homo sapiens
NSENGALHVTKDLLWEPATPGPLPMLPPLIDPWDPGLTARDLLFRGGCRYRKRPRVVLDVTEQISRFLLDHGDVAFAPLGKLMLE

SEQ ID NO: 9675 - protein, 84 aa, Homo sapiens
LSTAIVADLGSPLARSQGMPPTCCSSSASCQRRCPWRNGRPLSPWGSVMRLICSAPWPCCASRLSLVARTHPLETGSAACAAWA

SEQ ID NO: 9676 - protein, 85 aa, Homo sapiens
TSYAVWATSRSFAAFLASRLIGGISKGNVSLSTAIVADLGSPLARSQGMPPTCCSSSASCQRRCPWRNGRPLSPWGSVMRLICSA

SEQ ID NO: 9677 - protein, 85 aa, Homo sapiens
RTWGPGTLGQKELASGDEGSPQRREKANGLSTPSESPHFHLGLKSLVDGYKQWSSSAPNLVKGPRSSPALPGFTSLMEMALLAAS

SEQ ID NO: 9678 - protein, 85 aa, Homo sapiens
WVVPIDIEEDEDSEGPGSGESRLQHSPSQSYLCIPFPRGEDGDGPSSDGIHEEPTPVNSATSTPQLTPTNSLKRGGAHHRRCEVA

SEQ ID NO: 9679 - protein, 85 aa, Homo sapiens
MLGCGAVLAATGLGFDLLEAGKCQLLPLEEPEPPAREEKKRREGLFQRSSRPRRSTSPPSRKLFKKEEPMLLLGDPSASLTLLSL

SEQ ID NO: 9680 - protein, 85 aa, Homo sapiens
SSISECNSTRSLLRSDSDEIVVYEMPVSPVEAPPLSPCTHNPLVNVRVERFKRDPNQSLTPTHVTLTTPSQPSSHRRTPSDGALK

SEQ ID NO: 9681 - protein, 85 aa, Homo sapiens
PETLLASRSPSSNGLSPSPGAGMLKTPSPSRDPGEFPRLPDPNVVFPPTPRRWNTQQDSTLERPKTLEFLPRPRPSANRQRLDPW

SEQ ID NO: 9682 - protein, 85 aa, Homo sapiens
WFVSPSHARSTSPANSSSTETPSNLDSCFASSSSTVEERPGLPALLPFQAGPLPPTERTLLDLDAEGQSQDSTVPLCRAELNTHR

SEQ ID NO: 9683 - protein, 85 aa, Homo sapiens
TIIPRLRAIQLTPGESSKTWGRSSVVPKEEGEEEEKRAPKKKGRTWGPGTLGQKELASGDEGSPQRREKANGLSTPSESPHFHLG

SEQ ID NO: 9684 - protein, 85 aa, Homo sapiens
LKSLVDGYKQWSSSAPNLVKGPRSSPALPGFTSLMEMALLAASWVVPIDIEEDEDSEGPGSGESRLQHSPSQSYLCIPFPRGEDG

SEQ ID NO: 9685 - protein, 85 aa, Homo sapiens
DGPSSDGIHEEPTPVNSATSTPQLTPTNSLKRGGAHHRRCEVALLGCGAVLAATGLGFDLLEAGKCQLLPLEEPEPPAREEKKRR

SEQ ID NO: 9686 - protein, 85 aa, Homo sapiens
EGLFQRSSRPRRSTSPPSRKLFKKEEPMLLLGDPSASLTLLSLSSISECNSTRSLLRSDSDEIVVYEMPVSPVEAPPLSPCTHNP

SEQ ID NO: 9687 - protein, 85 aa, Homo sapiens
MVNVRVERFKRDPNQSLTPTHVTLTTPSQPSSHRRTPSDGALKPETLLASRSPSSNGLSPSPGAGMLKTPSPSRDPGEFPRLPDP

SEQ ID NO: 9688 - protein, 85 aa, Homo sapiens
NVVFPPTPRRWNTQQDSTLERPKTLEFLPRPRPSANRQRLDPWWFVSPSHARSTSPANSSSTETPSNLDSCFASSSSTVEERPGL

SEQ ID NO: 9689 - protein, 85 aa, Homo sapiens
NQRISQSAPVKQPPPLAPQSPQGGVMGGSNSNQQQQMRLQQLQMEKERLRLKQQELLRQVRPQAMRNINPSTANSPKCQELALRS

SEQ ID NO: 9690 - protein, 85 aa, Homo sapiens
QLPTLEQDGGTQNPVSSPGMSQELRTMTTNSSDPFLNSGTYHSRDESTDSGLSMSSYSVPRTPDDFLNSVDEMDTGDTINQSTLP

SEQ ID NO: 9691 - protein, 85 aa, Homo sapiens
QMEKERLRLKQQELLRQVRPQAMRNINPSTANSPKCQELALRSQLPTLEQDGGTQNPVSSPGMSQELRTMTTNSSDPFLNSGTYH

SEQ ID NO: 9692 - protein, 85 aa, Homo sapiens
SRDESTDSGLSMSSYSVPRTPDDFLNSVDEMDTGDTINQSTLPSQQNRFPDYLEAIPGTNVDLGTLEGDGMNIEGEELMPSLQEA

SEQ ID NO: 9693 - protein, 85 aa, Homo sapiens
QTRGLSLSALQDLCRELHAKVEVVDEERYDIEAKCLHNTREIKDLKLKVMDLRGKFKRPPLRRVRVSADAMLRALLGSKHKVSMD

SEQ ID NO: 9694 - protein, 85 aa, Homo sapiens
HDNTVDRTTDGTGRLCDLTFEQIRKLNPAANHRLRNDFPDEKIPTLREAVAECLNHNLTIFFDVKGHAHKATEALKKMYMEFPQL

SEQ ID NO: 9695 - protein, 84 aa, Homo sapiens
AANHRLRNDFPDEKIPTLREAVAECLNHNLTIFFDVKGHAHKATEALKKMYMEFPQLYNNSVVCSFLPEVIYKVTFGIFLVHIR

SEQ ID NO: 9696 - protein, 85 aa, Homo sapiens
MQEESDLSLIIAQIVQKLKGSNLYSQLERQAWGSWEKRILKSLNSMCTELSIPLARKRPVGEQKELLNKWNEMGTDEPDLSLFRP

SEQ ID NO: 9697 - protein, 85 aa, Homo sapiens
VYAPKDFLEVLINLRNPNYENGDSLSFRTHLGLIQVPLKVKDIPELKECFVELGLNIGQLGIDDSTQVPPELFENEHVRIGQKVL

SEQ ID NO: 9698 - protein, 85 aa, Homo sapiens
LGLNIGQLGIDDSTQVPPELFENEHVRIGQKVLAEQDSAAAQQYIRQGSPTALRAELWALILNISSQPEDVLYYEQLKTNVIQHD

SEQ ID NO: 9699 - protein, 85 aa, Homo sapiens
LNSMCTELSIPLARKRPVGEQKELLNKWNEMGTDEPDLSLFRPVYAPKDFLEVLINLRNPNYENGDSLSFRTHLGLIQVPLKVKD

SEQ ID NO: 9700 - protein, 85 aa, Homo sapiens
IPELKECFVELGLNIGQLGIDDSTQVPPELFENEHVRIGQKVLAEQDSAAAQQYIRQGSPTALRAELWALILNISSQPEDVLYYE

SEQ ID NO: 9701 - protein, 84 aa, Homo sapiens
EYSIFAPLSRMEAEIVQQQAPPSYGQLIAQGAIPPVEDFPTENPNDNSVLGNLRSLLQILRQDMTPGGGPGARRRQRGRLMRRL

SEQ ID NO: 9702 - protein, 85 aa, Homo sapiens
TTEVILHYRPCESDPTQLPKIAEKAIQDFPTRPLSRFIPWFPYDGSKLPLRPKRSPPVISEEAAEDVKQYLTISEHDAKSHSYDC

SEQ ID NO: 9703 - protein, 85 aa, Homo sapiens
TVDLLEFQPSLKKQHLTWSHTLKEQTNSGNLGKQSEKGKQHKRRSWSISLPSNNCTKNVSPLSKKLQDSLKALNLHSLYRARWTI

SEQ ID NO: 9704 - protein, 84 aa, Homo sapiens
ARWTIEHTICNSQTLEDIWTKLNQIIRHNELPSCNATIQRHLGQIWVFCDIMYCEYVGSLLKGRLALTGKINLFVHKYGVIFSM

SEQ ID NO: 9705 - protein, 85 aa, Homo sapiens
YDGSKLPLRPKRSPPVISEEAAEDVKQYLTISEHDAKSHSYDCTVDLLEFQPSLKKQHLTWSHTLKEQTNSGNLGKQSEKGKQHK

SEQ ID NO: 9706 - protein, 85 aa, Homo sapiens
RRSWSISLPSNNCTKNVSPLSKKLQDSLKALNLHSLYRARWTIEHTICNSQTLEDIWTKLNQIIRHNELPSCNATIQRHLGQIWV

SEQ ID NO: 9707 - protein, 85 aa, Homo sapiens
ASNIFGTPEENQASWAKSAGAKSSGGREDLESSGLQRRNSSEASSGDFLDLKGEGDIHENVDTDLPGSLGQSEEKPVPAAPVPSP

SEQ ID NO: 9708 - protein, 85 aa, Homo sapiens
NEIEEVKVAFEIKKLALDSVLMDNMKHLLELNKLIMKSQQESWDLEEKLLDIRKKRLQLKQASESKLLEIQTEKNKQKIDLDSME

SEQ ID NO: 9709 - protein, 85 aa, Homo sapiens
LRLRAQTKQQLLEYKSMVDASEEKTPEQIMQEKQIEAKIEDLENEIEEVKVAFEIKKLALDSVLMDNMKHLLELNKLIMKSQQES

SEQ ID NO: 9710 - protein, 85 aa, Homo sapiens
WDLEEKLLDIRKKRLQLKQASESKLLEIQTEKNKQKIDLDSMENSERIKIIRQNLQMEIKITTVIQHVFQNLILGSKVNWAEDPA

SEQ ID NO: 9711 - protein, 85 aa, Homo sapiens
MCEFSDRRLLDKWVELRTTVAHCISVSQDYIFCGCADGTVRLFNPSNLHFLSTLPRPHALGTDIASVTEASRLFSGVANARYPDT

SEQ ID NO: 9712 - protein, 85 aa, Homo sapiens
IALTFDPTNQWLSCVYNDHSIYVWDVRDPKKVGKVYSALYHSSCVWSVEVYPEVKDSNQACLPPSSFITCSSDNTIRLWNTESSG

SEQ ID NO: 9713 - protein, 85 aa, Homo sapiens
VHGSTLHRNILSSDLIKIIYVDGNTQALLDTELPGGDKADASLLDPRVGIRSVCVSPNGQHLASGDRMGTLRVHELQSLSEMLKV

SEQ ID NO: 9714 - protein, 85 aa, Homo sapiens
EAHDSEILCLEYSKPDTGLKLLASASRDRLIHVLDAGREYSLQQTLDEHSSSITAVKFAASDGQVRMISCGADKSIYFRTAQKSG

SEQ ID NO: 9715 - protein, 85 aa, Homo sapiens
DGVQFTRTHHVVRKTTLYDMDVEPSWKYTAIGCQDRNIRIFNISSGKQKKLFKGSQGEDGTLIKVQTDPSGIYIATSCSDKNLSI

SEQ ID NO: 9716 - protein, 85 aa, Homo sapiens
FDFSSGECVATMFGHSEIVTGMKFSNDCKHLISVSGDSCIFVWRLSSEMTISMRQRLAELRQRQRGGKQQGPSSPQRASGPNRHQ

SEQ ID NO: 9717 - protein, 85 aa, Homo sapiens
APSMLSPGPALSSDSDKEGEDEGTEEELPALPVLAKSTKKALASVPSPALPRSLSHWEMSRAQESVGFLDPAPAANPGPRRRGRW

SEQ ID NO: 9718 - protein, 85 aa, Homo sapiens
VQPGVELSVRSMLDLRQLETLAPSLQDPSQDSLAIIPSGPRKHGQEALETSLTSQNEKPPRPQASQPCSYPHIIRLLSQEEGVFA

SEQ ID NO: 9719 - protein, 85 aa, Homo sapiens
QDLEPAPIEDGIVYPEPSDNPTMDTSEFQVQAPARGTLGRVYPGSRSSEKHSPDSACSVDYSSSCLSSPEHPTEDSESTEPLSVD

SEQ ID NO: 9720 - protein, 85 aa, Homo sapiens
GISSDLEEPAEGDEEEEEEEGGMGPYGLQEGSPQTPDQEQFLKQHFETLASGAAPGAPVQVPERSESRSISSRFLLQVQTRPLRE

SEQ ID NO: 9721 - protein, 85 aa, Homo sapiens
PSPSSSSLALMSRPAQVPQASGEQPRGNGANPPGAPPEVEPSSGNPSPQQAASVLLPRCRLNPDSSWAPKRVATASPFSGLQKAQ

SEQ ID NO: 9722 - protein, 85 aa, Homo sapiens
SVHSLVPQERHEASLQAPSPGALLSREIEAQDGLGSLPPADGRPSRPHSYQNPTTSSMAKISRSISVGENLGLVAEPQAHAPIRV

SEQ ID NO: 9723 - protein, 85 aa, Homo sapiens
SPLSKLALPSRAHLVLDIPKPLPDRPTLAAFSPVTKGRAPGEAEKPGFPVGLGKAHSTTERWACLGEGTTPKPRTECQAHPGPSS

SEQ ID NO: 9724 - protein, 85 aa, Homo sapiens
PCAQQLPVSSLFQGPENLQPPPPEKTPNPMECTKPGAALSQDSEPAVSLEQCEQLVAELRGSVRQAVRLYHSVAGCKMPSAEQSR

SEQ ID NO: 9725 - protein, 85 aa, Homo sapiens
NATVPLLGRSGLLGELRNNLFTDVACGRGKKADSTFCITSSGLLCEFSDRRLLDKWVELRTTVAHCISVSQDYIFCGCADGTVRL

SEQ ID NO: 9726 - protein, 85 aa, Homo sapiens
FNPSNLHFLSTLPRPHALGTDIASVTEASRLFSGVANARYPDTIALTFDPTNQWLSCVYNDHSIYVWDVRDPKKVGKVYSALYHS

SEQ ID NO: 9727 - protein, 85 aa, Homo sapiens
SCVWSVEVYPEVKDSNQACLPPSSFITCSSDNTIRLWNTESSGVHGSTLHRNILSSDLIKIIYVDGNTQALLDTELPGGDKADAS

SEQ ID NO: 9728 - protein, 85 aa, Homo sapiens
MLDPRVGIRSVCVSPNGQHLASGDRMGTLRVHELQSLSEMLKVEAHDSEILCLEYSKPDTGLKLLASASRDRLIHVLDAGREYSL

SEQ ID NO: 9729 - protein, 85 aa, Homo sapiens
QQTLDEHSSSITAVKFAASDGQVRMISCGADKSIYFRTAQKSGDGVQFTRTHHVVRKTTLYDMDVEPSWKYTAIGCQDRNIRIFN

SEQ ID NO: 9730 - protein, 85 aa, Homo sapiens
ISSGKQKKLFKGSQGEDGTLIKVQTDPSGIYIATSCSDKNLSIFDFSSGECVATMFGHSEIVTGMKFSNDCKHLISVSGDSCIFV

SEQ ID NO: 9731 - protein, 85 aa, Homo sapiens
WRLSSEMTISMRQRLAELRQRQRGGKQQGPSSPQRASGPNRHQAPSMLSPGPALSSDSDKEGEDEGTEEELPALPVLAKSTKKAL

SEQ ID NO: 9732 - protein, 85 aa, Homo sapiens
ASVPSPALPRSLSHWEMSRAQESVGFLDPAPAANPGPRRRGRWVQPGVELSVRSMLDLRQLETLAPSLQDPSQDSLAIIPSGPRK

SEQ ID NO: 9733 - protein, 85 aa, Homo sapiens
HGQEALETSLTSQNEKPPRPQASQPCSYPHIIRLLSQEEGVFAQDLEPAPIEDGIVYPEPSDNPTMDTSEFQVQAPARGTLGRVY

SEQ ID NO: 9734 - protein, 85 aa, Homo sapiens
PGSRSSEKHSPDSACSVDYSSSCLSSPEHPTEDSESTEPLSVDGISSDLEEPAEGDEEEEEEEGGMGPYGLQEGSPQTPDQEQFL

SEQ ID NO: 9735 - protein, 85 aa, Homo sapiens
KQHFETLASGAAPGAPVQVPERSESRSISSRFLLQVQTRPLREPSPSSSSLALMSRPAQVPQASGEQPRGNGANPPGAPPEVEPS

SEQ ID NO: 9736 - protein, 85 aa, Homo sapiens
SGNPSPQQAASVLLPRCRLNPDSSWAPKRVATASPFSGLQKAQSVHSLVPQERHEASLQAPSPGALLSREIEAQDGLGSLPPADG

SEQ ID NO: 9737 - protein, 85 aa, Homo sapiens
RPSRPHSYQNPTTSSMAKISRSISVGENLGLVAEPQAHAPIRVSPLSKLALPSRAHLVLDIPKPLPDRPTLAAFSPVTKGRAPGE

SEQ ID NO: 9738 - protein, 85 aa, Homo sapiens
AEKPGFPVGLGKAHSTTERWACLGEGTTPKPRTECQAHPGPSSPCAQQLPVSSLFQGPENLQPPPPEKTPNPMECTKPGAALSQD

SEQ ID NO: 9739 - protein, 85 aa, Homo sapiens
SEPAVSLEQCEQLVAELRGSVRQAVRLYHSVAGCKMPSAEQSRIAQLLRDTFSSVRQELEAVAGAVLSSPGSSPGAVGAEQTQAL

SEQ ID NO: 9740 - protein, 85 aa, Homo sapiens
IDWVSWPLGKNIDKWIIALLKGLAAVKKFSILIEVSLTKIEKVFSKLLYPIVRGAALSVLKYMLLTFQHSHEAFHLLLPHIPPMV

SEQ ID NO: 9741 - protein, 85 aa, Homo sapiens
ASLVKEDSNSGTSCLEQLAELVHCMVFRFPGFPDLYEPVMEAIKDLHVPNEDRIKQLLGQDAWTSQKSELAGFYPRLMAKSDTGK

SEQ ID NO: 9742 - protein, 85 aa, Homo sapiens
IGLINLGNTCYVNSILQALFMASDFRHCVLRLTENNSQPLMTKLQWLFGFLEHSQRPAISPENFLSASWTPWFSPGTQQDCSEYL

SEQ ID NO: 9743 - protein, 85 aa, Homo sapiens
KYLLDRLHEEEKTGTRICQKLKQSSSPSPPEEPPAPSSTSVEKMFGGKIVTRICCLCCLNVSSREEAFTDLSLAFPPPERCRRRR

SEQ ID NO: 9744 - protein, 85 aa, Homo sapiens
MGSVMRPTEDITARELPPPTSAQGPGRVGPRRQRKHCITEDTPPTSLYIEGLDSKEAGGQSSQEERIEREEEGKEERTEKEEVGE

SEQ ID NO: 9745 - protein, 85 aa, Homo sapiens
EEESTRGEGEREKEEEVEEEEEKVEKETEKEAEQEKEEDSLGAGTHPDAAIPSGERTCGSEGSRSVLDLVNYFLSPEKLTAENRY

SEQ ID NO: 9746 - protein, 85 aa, Homo sapiens
YCESCASLQDAEKVVELSQGPCYLILTLLRFSFDLRTMRRRKILDDVSIPLLLRLPLAGGRGQAYDLCSVVVHSGVSSESGHYYC

SEQ ID NO: 9747 - protein, 85 aa, Homo sapiens
YAREGAARPAASLGTADRPEPENQWYLFNDTRVSFSSFESVSNVTSFFPKDTAYVLFYRQRPREGPEAELGSSRVRTEPTLHKDL

SEQ ID NO: 9748 - protein, 84 aa, Homo sapiens
MGSSRVRTEPTLHKDLMEAISKDNILYLQEQEKEARSRAAYISALPTSPHWGRGFDEDKDEDEGSPGGCNPAGGNGGDFHRLVF

SEQ ID NO: 9749 - protein, 85 aa, Homo sapiens
VFSKLLYPIVRGAALSVLKYMLLTFQHSHEAFHLLLPHIPPMVASLVKEDSNSGTSCLEQLAELVHCMVFRFPGFPDLYEPVMEA

SEQ ID NO: 9750 - protein, 85 aa, Homo sapiens
IKDLHVPNEDRIKQLLGQDAWTSQKSELAGFYPRLMAKSDTGKIGLINLGNTCYVNSILQALFMASDFRHCVLRLTENNSQPLMT

SEQ ID NO: 9751 - protein, 85 aa, Homo sapiens
KLQWLFGFLEHSQRPAISPENFLSASWTPWFSPGTQQDCSEYLKYLLDRLHEEEKTGTRICQKLKQSSSPSPPEEPPAPSSTSVE

SEQ ID NO: 9752 - protein, 85 aa, Homo sapiens
KMFGGKIVTRICCLCCLNVSSREEAFTDLSLAFPPPERCRRRRLGSVMRPTEDITARELPPPTSAQGPGRVGPRRQRKHCITEDT

SEQ ID NO: 9753 - protein, 85 aa, Homo sapiens
PPTSLYIEGLDSKEAGGQSSQEERIEREEEGKEERTEKEEVGEEEESTRGEGEREKEEEVEEEEEKVEKETEKEAEQEKEEDSLG

SEQ ID NO: 9754 - protein, 85 aa, Homo sapiens
AGTHPDAAIPSGERTCGSEGSRSVLDLVNYFLSPEKLTAENRYYCESCASLQDAEKVVELSQGPCYLILTLLRFSFDLRTMRRRK

SEQ ID NO: 9755 - protein, 85 aa, Homo sapiens
ILDDVSIPLLLRLPLAGGRGQAYDLCSVVVHSGVSSESGHYYCYAREGAARPAASLGTADRPEPENQWYLFNDTRVSFSSFESVS

SEQ ID NO: 9756 - protein, 85 aa, Homo sapiens
NVTSFFPKDTAYVLFYRQRPREGPEAELGSSRVRTEPTLHKDLMEAISKDNILYLQEQEKEARSRAAYISALPTSPHWGRGFDED

SEQ ID NO: 9757 - protein, 85 aa, Homo sapiens
HDVCGSNGLPLTPNSIKILGRFQILKTITHPRLCQYVDISRGKHERLVVVAEHCERSLEDLLRERKPVSCSTVLCIAFEVLQGLQ

SEQ ID NO: 9758 - protein, 8 aa, Homo sapiens
LFSIFQNR

SEQ ID NO: 9759 - protein, 7 aa, Homo sapiens
EWEKWIF

SEQ ID NO: 9760 - protein, 84 aa, Homo sapiens
IIVVVLKLLFLLDDSFEWSLSNLAEKHNEKNKKDKPWFDFRKWYQIMKKAFDEKKQKWEEARAKYVLLPGLDAPALLLCLLLYI

SEQ ID NO: 9761 - protein, 6 aa, Homo sapiens
CLVFQT

SEQ ID NO: 9762 - protein, 84 aa, Homo sapiens
VVVAQIDPKKLKRKQSVNISLSGCQPAPEGYSPTLQWQQQQVAQFSTVRQNVNKHRSHWKSQQLDSNVTMRWGFAMLARLVLNS

SEQ ID NO: 9763 - protein, 85 aa, Homo sapiens
LLAELNTCHGQETTDSSDKKEKKSFSLEEKSKISKNRVHYMKFTKGRCQSLHSRGERNHDNQRLHHPGVLCQADGSTEEQAPGSS

SEQ ID NO: 9764 - protein, 84 aa, Homo sapiens
MNTCHGQETTDSSDKKEKKSFSLEEKSKISKNRVHYMKFTKGRCQSLHSRGERNHDNQRLHHPGVLCQADGSTEEQAPGSSSRV

SEQ ID NO: 9765 - protein, 7 aa, Homo sapiens
PQMAGVY

SEQ ID NO: 9766 - protein, 17 aa, Homo sapiens
AAAPMMPVIQLLKSLKL

SEQ ID NO: 9767 - protein, 84 aa, Homo sapiens
NDASDPTTKEFETLIKDLSAENGLESLMLRSSSNLALALYRYHSYKDLSEFLRGLVMNYPHITNLTNLGPKNLLLSSQIVFYIH

SEQ ID NO: 9768 - protein, 11 aa, Homo sapiens
MLEGIIQLPRM

SEQ ID NO: 9769 - protein, 85 aa, Homo sapiens
ATNFLAHEKIWFDKFKYDDAERRFYEQMNGPVAGASRQSSGPGASSGTSGDHGELVVRIASLEVENQSLRGVVQELQQAISKLEA

SEQ ID NO: 9770 - protein, 85 aa, Homo sapiens
RLNVLEKSSPGHRATAPQTQHVSPMRQVEPPAKKPATPAEDDEDDDIDLFGSDNEEEDKEAAQLREERLRQYAEKKAKKPALVAK

SEQ ID NO: 9771 - protein, 85 aa, Homo sapiens
SSILLDVKPWDDETDMAQLEACVRSIQLDGLVWGASKLVPVGYGIRKLQIQCVVEDDKVGTDLLEEEITKFEEHVQSVDIAAFNK

SEQ ID NO: 9772 - protein, 85 aa, Homo sapiens
GASSGTSGDHGELVVRIASLEVENQSLRGVVQELQQAISKLEARLNVLEKSSPGHRATAPQTQHVSPMRQVEPPAKKPATPAEDD

SEQ ID NO: 9773 - protein, 85 aa, Homo sapiens
EDDDIDLFGSDNEEEDKEAAQLREERLRQYAEKKAKKPALVAKSSILLDVKPWDDETDMAQLEACVRSIQLDGLVWGASKLVPVG

SEQ ID NO: 9774 - protein, 85 aa, Homo sapiens
GKAFQELAGKELCAMSEEQFRQRSPLGGDVLHAHLDIWKSASTSEESWTDSEVDSSCSGQPIHLWQFLKELLLKPHSYGRFIRWL

SEQ ID NO: 9775 - protein, 85 aa, Homo sapiens
EVLKDIETACKLLNITADPMDWSPSNVQKWLLWTEHQYRLPPMGKAFQELAGKELCAMSEEQFRQRSPLGGDVLHAHLDIWKSAS

SEQ ID NO: 9776 - protein, 85 aa, Homo sapiens
TSEESWTDSEVDSSCSGQPIHLWQFLKELLLKPHSYGRFIRWLNKEKGIFKIEDSAQVARLWGIRKNRPAMNYDKLSRSIRQYYK

SEQ ID NO: 9777 - protein, 13 aa, Homo sapiens
GDAPSPILTRSVP

SEQ ID NO: 9778 - protein, 84 aa, Homo sapiens
RRRTITYFDSQRTLNRRCPKHIAKYLQAEAVKKDRLDFHQGWKGYFKMYCKHLALSQPFSFTQQDMPKLRRQIYKELCHCKLTV

SEQ ID NO: 9779 - protein, 36 aa, Homo sapiens
GSSVTAATVSSSATMRHPLPRRVGTIPRSGRSSARG

SEQ ID NO: 9780 - protein, 7 aa, Homo sapiens
PSGPGTS

SEQ ID NO: 9781 - protein, 37 aa, Homo sapiens
MASLRRGLLSLSLRVYPPQTSVAPQSSSLTSTLTCPL

SEQ ID NO: 9782 - protein, 11 aa, Homo sapiens
GDSTPCPTYPG

SEQ ID NO: 9783 - protein, 8 aa, Homo sapiens
APSSQAGS

SEQ ID NO: 9784 - protein, 84 aa, Homo sapiens
ARPQSLPQGKGRSRRSRNKQEKPASSLDDVFLPKDMDGVEMDETDREVEYFKRFCLDSAKQTRQKVAVNWTNFSLKKTTPSTAQ

SEQ ID NO: 9785 - protein, 46 aa, Homo sapiens
RGAPWAGSLGSPPWTTEMWMSCWNSSTARSPKSPTAPGPPSGPGTS

SEQ ID NO: 9786 - protein, 14 aa, Homo sapiens
WSGPTGNWIGSTAS

SEQ ID NO: 9787 - protein, 18 aa, Homo sapiens
LRTTRYKLQASQPHHGQK

SEQ ID NO: 9788 - protein, 32 aa, Homo sapiens
MCPQVGSHRRARGRAVRPRRARQAQPPGPQPA

SEQ ID NO: 9789 - protein, 85 aa, Homo sapiens
RAAPGETGQARPRHGLRSRSLCSPQAQQGHRACPRARAAAAGAATSRRSQPPPWTMCSCPRTWTGWRWMRLTERWSTLRGSVWIL

SEQ ID NO: 9790 - protein, 12 aa, Homo sapiens
MCLKRSPDSPTD

SEQ ID NO: 9791 - protein, 84 aa, Homo sapiens
TLRHLDVTCEAYDHFRSCLHALEQLADGKLRFVVEPVEASFPQLLVYERLQQLPLCHSKIEQPRATKKGGSRPSAPAPARLLRG

SEQ ID NO: 9792 - protein, 85 aa, Homo sapiens
EIINFKQPQSHETALHCAVASLHPKRKQVTELLLRKGANVNEKNKDFMTPLHVAAERAHNDVMEVLHKHGAKVRHTPEQSARLST

SEQ ID NO: 9793 - protein, 84 aa, Homo sapiens
HPKRKQVTELLLRKGANVNEKNKDFMTPLHVAAERAHNDVMEVLHKHGAKVRHTPEQSARLSTEQPAALNTASLSPIFLKKLIL

SEQ ID NO: 9794 - protein, 84 aa, Homo sapiens
KLKSVKSPVPMVHLSWNMARNIKVSDPKLFEMIKYCLLKILKQYQTLREALVAAGKEVIWHGRTNDEPAHYCSICEALSLSSSS

SEQ ID NO: 9795 - protein, 85 aa, Homo sapiens
DDPAELSTQLSAPGVLKVFGDSVCTGTHYKSVLATGTSSARELVKEALERYALDPRQAGQYVLCDVVGQAGDAGQRWQARCFRVF

SEQ ID NO: 9796 - protein, 84 aa, Homo sapiens
MQELGGTLEYRVTFRDTYYDTPELSLMQADHWLRRREDSGWELKCPGAAGVLGPHTEYKELTAEPTIVAQLCKVCLHRRQHQPS

SEQ ID NO: 9797 - protein, 85 aa, Homo sapiens
SARGEGAGQPSTSAQGQPAAPAPQKRGRGRPRKQQQEPTGEPSPKRPRGRPKGSKNKSPSKAAQKKAEATGEKRPRGRPRKWLQN

SEQ ID NO: 9798 - protein, 84 aa, Homo sapiens
ARGEGAGQPSTSAQGQPAAPAPQKRGRGRPRKQQQEPTGEPSPKRPRGRPKGSKNKSPSKAAQKKAEATGEKRPRGRPRKWLQN

SEQ ID NO: 9799 - protein, 81 aa, Homo sapiens
RESFTFSSGSTESGWRWSLTTGCPPRMDSCSSYTRNKAMNSGVPCWRKPMPSLMVVMRLSLEVPQWRGLRISQVASLSFMT

SEQ ID NO: 9800 - protein, 84 aa, Homo sapiens
MKKPPANLYQIIRKALCAGSLLGCSIDVSSAAEAEAITSQKLVKSHAYSVTGVEEVNFQGHPEKLIRLRNPWGEVEWSGAWSDE

SEQ ID NO: 9801 - protein, 39 aa, Homo sapiens
VPCWRKPMPSLMVVMRLSLEVPQWRGLRISQVASLSFMT

SEQ ID NO: 9802 - protein, 42 aa, Homo sapiens
NLRVMKKALLFYVLRFCHVSSNKEICTALGNLLSFGVNYNKE

SEQ ID NO: 9803 - protein, 84 aa, Homo sapiens
ELTLFWSKLQQRVEPSIQVYLERCRQLSLLTKTVYHIFFLIKVINSERWGLTILPRFISNSWAQVILRALAFQSGGITGMSHHT

SEQ ID NO: 9804 - protein, 84 aa, Homo sapiens
ATQRIVQDKLKQLNQFPDFNNYLIFVLTRLKSEDEPTRSLSGLILKNNVKAHYQSFPPPVADFIKQECLNNIGDASSLIRATIG

SEQ ID NO: 9805 - protein, 84 aa, Homo sapiens
KEMKFYQGSVDREKRLQEKLHSLSQELEQYKIDNKSKTERIYDVGMQLKSQQNEFQKVKKQLSHLQDELKIKYRQSYIFRLCFC

SEQ ID NO: 9806 - protein, 85 aa, Homo sapiens
VKAMEKEMKFYQGSVDREKRLQEKLHSLSQELEQYKIDNKSKTERIYDVGMQLKSQQNEFQKVKKQLSHLQDELKIKYRQSYIFR

SEQ ID NO: 9807 - protein, 85 aa, Homo sapiens
VLLESEQFLTELTRLFQKCRTSGSVYITLKKYDGRTKPIPKKGTVEGFEPADNKCLLRATDGKKKISTVVSSKEVNKFQMVSFGC

SEQ ID NO: 9808 - protein, 84 aa, Homo sapiens
KYDGRTKPIPKKGTVEGFEPADNKCLLRATDGKKKISTVVSSKEVNKFQMVSFGCSLCFPSQGKSQYDSEHWVRLILGFTALRR

SEQ ID NO: 9809 - protein, 85 aa, Homo sapiens
GTHPKYLEMMELDIGDATQVYVAFLVYLDLMESKSWHEVNCVGLPELQLICLVGTEIEGEGLQTVVPTPITASLSHNRYWRATFE

SEQ ID NO: 9810 - protein, 84 aa, Homo sapiens
IGDATQVYVAFLVYLDLMESKSWHEVNCVGLPELQLICLVGTEIEGEGLQTVVPTPITASLSHNRYWRATFEEGKYLATLKDLH

SEQ ID NO: 9811 - protein, 85 aa, Homo sapiens
TSCLPALRFIATPRLSAMPHIDNDVKLDFKDVLLRPKRSTLKSRSEVDLTRSFSFRNSKQTYSGVPIIAANMDTVGTFEMAKVLF

SEQ ID NO: 9812 - protein, 84 aa, Homo sapiens
FIATPRLSAMPHIDNDVKLDFKDVLLRPKRSTLKSRSEVDLTRSFSFRNSKQTYSGVPIIAANMDTVGTFEMAKVLFLSLHCCP

SEQ ID NO: 9813 - protein, 85 aa, Homo sapiens
AKSDTGKIGLINLGNTCYVNSILQALFMASDFRHCVLRLTENNSQPLMTKLQWLFGFLEHSQRPAISPENFLSASWTPWFSPGTQ

SEQ ID NO: 9814 - protein, 85 aa, Homo sapiens
QDCSEYLKYLLDRLHEEEKTGTRICQKLKQSSSPSPPEEPPAPSSTSVEKMFGGKIVTRICCLCCLNVSSREEAFTDLSLAFPPP

SEQ ID NO: 9815 - protein, 85 aa, Homo sapiens
ERCRRRRLGSVMRPTEDITARELPPPTSAQGPGRVGPRRQRKHCITEDTPPTSLYIEGLDSKEAGGQSSQEERIEREEEGKEERT

SEQ ID NO: 9816 - protein, 85 aa, Homo sapiens
EKEEVGEEEESTRGEGEREKEEEVEEEEEKVEKETEKEAEQEKEEDSLGAGTHPDAAIPSGERTCGSEGSRSVLDLVNYFLSPEK

SEQ ID NO: 9817 - protein, 85 aa, Homo sapiens
MTAENRYYCESCASLQDAEKVVELSQGPCYLILTLLRFSFDLRTMRRRKILDDVSIPLLLRLPLAGGRGQAYDLCSVVVHSGVSS

SEQ ID NO: 9818 - protein, 85 aa, Homo sapiens
ESGHYYCYAREGAARPAASLGTADRPEPENQWYLFNDTRVSFSSFESVSNVTSFFPKDTAYVLFYRQRPREGPEAELGSSRVRTE

SEQ ID NO: 9819 - protein, 85 aa, Homo sapiens
NSQPLMTKLQWLFGFLEHSQRPAISPENFLSASWTPWFSPGTQQDCSEYLKYLLDRLHEEEKTGTRICQKLKQSSSPSPPEEPPA

SEQ ID NO: 9820 - protein, 85 aa, Homo sapiens
PSSTSVEKMFGGKIVTRICCLCCLNVSSREEAFTDLSLAFPPPERCRRRRLGSVMRPTEDITARELPPPTSAQGPGRVGPRRQRK

SEQ ID NO: 9821 - protein, 85 aa, Homo sapiens
HCITEDTPPTSLYIEGLDSKEAGGQSSQEERIEREEEGKEERTEKEEVGEEEESTRGEGEREKEEEVEEEEEKVEKETEKEAEQE

SEQ ID NO: 9822 - protein, 85 aa, Homo sapiens
KEEDSLGAGTHPDAAIPSGERTCGSEGSRSVLDLVNYFLSPEKLTAENRYYCESCASLQDAEKVVELSQGPCYLILTLLRFSFDL

SEQ ID NO: 9823 - protein, 85 aa, Homo sapiens
RTMRRRKILDDVSIPLLLRLPLAGGRGQAYDLCSVVVHSGVSSESGHYYCYAREGAARPAASLGTADRPEPENQWYLFNDTRVSF

SEQ ID NO: 9824 - protein, 85 aa, Homo sapiens
SSFESVSNVTSFFPKDTAYVLFYRQRPREGPEAELGSSRVRTEPTLHKDLMEAISKDNILYLQEQEKEARSRAAYISALPTSPHW

SEQ ID NO: 9825 - protein, 84 aa, Homo sapiens
VRFMTKIYHPNVDKLGRICLDILKGKCYLYQHMLLLSFLLFLLSIPCLECKHYTKIREVCGREVKQFWACFFHALSYWACCLHR

SEQ ID NO: 9826 - protein, 85 aa, Homo sapiens
DSPFEGGTFKLELFLPEEYPMAAPKVRFMTKIYHPNVDKLGRICLDILKGKCYLYQHMLLLSFLLFLLSIPCLECKHYTKIREVC

SEQ ID NO: 9827 - protein, 85 aa, Homo sapiens
EVHGKPKASPSCSSPTRDSSGVPVSKELLTAGSDGRGGIWDRLLINSQPKSRKTSTLQTVRIERSPLLDQVQTFLPQMARANEKL

SEQ ID NO: 9828 - protein, 85 aa, Homo sapiens
RKEMAAAPPGRFNIENIDGPHSKVIQMDVALFEMNQSDSKEVDSSEESSQDSSENSSESEDEDDSIPSEVTIDNIKLPNSEGGKG

SEQ ID NO: 9829 - protein, 84 aa, Homo sapiens
NIDGPHSKVIQMDVALFEMNQSDSKEVDSSEESSQDSSENSSESEDEDDSIPSEVTIDNIKLPNSEGGKGKIEVLDSPASKKKK

SEQ ID NO: 9830 - protein, 85 aa, Homo sapiens
MLINSQPKSRKTSTLQTVRIERSPLLDQVQTFLPQMARANEKLRKEMAAAPPGRFNIENIDGPHSKVIQMDVALFEMNQSDSKEV

SEQ ID NO: 9831 - protein, 84 aa, Homo sapiens
SEDSAPGVWREISVCGNVYTLRDSRSAQQRGKLVGGPLHSPPLSLPGPHKLPIPLPKPGDDLQSFCPREPQQAPYQGIPGPGGS

SEQ ID NO: 9832 - protein, 85 aa, Homo sapiens
IFLGERAAKWRTPDGLMDGLTTNGVLVMHPAGGFSEDSAPGVWREISVCGNVYTLRDSRSAQQRGKLVGGPLHSPPLSLPGPHKL

SEQ ID NO: 9833 - protein, 85 aa, Homo sapiens
GPVLSQPAGIPQAVQVKQLFSLFQVVQQPSGGNEKQVTTISHSSTLTIQKCGQKTMPVNTIIPTSQFPPASILKQITLPGNKILS

SEQ ID NO: 9834 - protein, 85 aa, Homo sapiens
LQASPTQKNRIKENVTSCFRDEDDINDVTSMAGVNLNEENACILATNSELVGTLIQSCKDEPFLFIGALQKRILDIGKKHDITEL

SEQ ID NO: 9835 - protein, 85 aa, Homo sapiens
NSDAVNLISQATQERLRGLLEKLTAIAQHRMTTYKASENYILCSDTRSQLKFLEKLDQLEKQRKDLEEREMLLKAAKSRSNKEDP

SEQ ID NO: 9836 - protein, 85 aa, Homo sapiens
EQLRLKQKAKELQQLELAQIQHRDANLTALAAIGPRKKRPLESGIEGLKDNLLASGTSSLTATKQLHRPRITRICLRDLIFCMEQ

SEQ ID NO: 9837 - protein, 85 aa, Homo sapiens
VTFGETSGAAICLPSVKPVVSSAGTTSDKPVIGTPVQIKLAQPGPVLSQPAGIPQAVQVKQLFSLFQVVQQPSGGNEKQVTTISH

SEQ ID NO: 9838 - protein, 85 aa, Homo sapiens
SSTLTIQKCGQKTMPVNTIIPTSQFPPASILKQITLPGNKILSLQASPTQKNRIKENVTSCFRDEDDINDVTSMAGVNLNEENAC

SEQ ID NO: 9839 - protein, 85 aa, Homo sapiens
ILATNSELVGTLIQSCKDEPFLFIGALQKRILDIGKKHDITELNSDAVNLISQATQERLRGLLEKLTAIAQHRMTTYKASENYIL

SEQ ID NO: 9840 - protein, 85 aa, Homo sapiens
CSDTRSQLKFLEKLDQLEKQRKDLEEREMLLKAAKSRSNKEDPEQLRLKQKAKELQQLELAQIQHRDANLTALAAIGPRKKRPLE

SEQ ID NO: 9841 - protein, 24 aa, Homo sapiens
LLWLLGWLECVHNSRRISGPAAPL

SEQ ID NO: 9842 - protein, 84 aa, Homo sapiens
HYDDVEVFILQLEGEKHWRLYHPTVPLAREYSVEAEERIGRPVHEFMLKPGDLLYFPRGTIHQADTPAGLAHSTHVTISTYQNK

SEQ ID NO: 9843 - protein, 85 aa, Homo sapiens
KDLKKRVALGYISTHTGEAALRGEPRIQTLPVASALSSHRTGPPPISPSKRKFSMEPGDEDLDCDNDHVSKMSRIFNPHLNKTAN

SEQ ID NO: 9844 - protein, 85 aa, Homo sapiens
GDCRRDPRERSRSPIERAVAPTMSLHGSHLYTSLPSLGLEQPLALTKNSLDASRPAGLSPTLTPGERQQNRPSVITCASAGARNC

SEQ ID NO: 9845 - protein, 85 aa, Homo sapiens
APTMSLHGSHLYTSLPSLGLEQPLALTKNSLDASRPAGLSPTLTPGERQQNRPSVITCASAGARNCNLSHCPIAHSGCAAPGPAS

SEQ ID NO: 9846 - protein, 85 aa, Homo sapiens
PPPISPSKRKFSMEPGDEDLDCDNDHVSKMSRIFNPHLNKTANGDCRRDPRERSRSPIERAVAPTMSLHGSHLYTSLPSLGLEQP

SEQ ID NO: 9847 - protein, 37 aa, Homo sapiens
PTAESAAWCPGFGGLAAKMGGLCGSAQQAIPSPGDPL

SEQ ID NO: 9848 - protein, 84 aa, Homo sapiens
ATSGQELADLESEHDERTQEARLPRRVGPPPETFPPPGEEEVVSLMPPDYCLPLSPAHLKRGRHHQPLQHSPVLLLCRPCQHPH

SEQ ID NO: 9849 - protein, 61 aa, Homo sapiens
QRHPSQPPFHILLGEVGVPRPRVGRSLQIWNLSMMRGLKRPGCPGGWDPHQRPSHLQERKR

SEQ ID NO: 9850 - protein, 85 aa, Homo sapiens
KDAAEELSFARVLLQRVDELEKLFKDREQFLELVSRKLSLVPGAEEVTMVTWEELEQAITDGWRASQAAGVQWCDLGSLQPSPLG

SEQ ID NO: 9851 - protein, 84 aa, Homo sapiens
FKDREQFLELVSRKLSLVPGAEEVTMVTWEELEQAITDGWRASQAAGVQWCDLGSLQPSPLGLKQSSCLSLPGSWDHSQKDHTS

SEQ ID NO: 9852 - protein, 84 aa, Homo sapiens
MEEKVKAMEKEMKFYQGSVDREKRLQEKLHSLSQELEQYKIDNKSKTESKIYFRLMLRLEVEHCQLKERMPDLQHSVTEPYIGL

SEQ ID NO: 9853 - protein, 85 aa, Homo sapiens
AAAALRDPAQVPVAADLLTDHEEGYVTFEDVAVYFSQEEWRLLDDAQRLLYRNVMLENFTLLASLGKVLTPHPSILSWARLFLLF

SEQ ID NO: 9854 - protein, 85 aa, Homo sapiens
AAALRDPAQVPVAADLLTDHEEGYVTFEDVAVYFSQEEWRLLDDAQRLLYRNVMLENFTLLASLGKVLTPHPSILSWARLFLLFL

SEQ ID NO: 9855 - protein, 84 aa, Homo sapiens
HWIKAPNYSCVMTGSWDKTLKFWDTRSSNPMMVLQLPERCYCADVIYPMAVVATAERGLIVYQLENQPSEFRRIESPLKHQRQR

SEQ ID NO: 9856 - protein, 85 aa, Homo sapiens
CPGWVRYAERVLGRPITAHLCTAKSPQQVMGSLVKDYFARQQVQEEMGSAFPVLPGGSTGWGALQMFGRTTPSPEGGSRQTWMEC

SEQ ID NO: 9857 - protein, 85 aa, Homo sapiens
WCSNLSPEKIFHVIVAPCYDKKLEALQESLPPALHGSRGADCVLTSGEIAQIMEQGDLSVRDAAVDTLFGDLKEDKVTRHDGASS

SEQ ID NO: 9858 - protein, 85 aa, Homo sapiens
DGHLAHIFRHAAKELFNEDVEEVTYRALRNKDFQEVTLEKNGEVVLRFAAAYGFRNIQNMILKLKKGKFPFHFVEVLACAGGCLN

SEQ ID NO: 9859 - protein, 85 aa, Homo sapiens
VQEEMGSAFPVLPGGSTGWGALQMFGRTTPSPEGGSRQTWMECWCSNLSPEKIFHVIVAPCYDKKLEALQESLPPALHGSRGADC

SEQ ID NO: 9860 - protein, 85 aa, Homo sapiens
VLTSGEIAQIMEQGDLSVRDAAVDTLFGDLKEDKVTRHDGASSDGHLAHIFRHAAKELFNEDVEEVTYRALRNKDFQEVTLEKNG

SEQ ID NO: 9861 - protein, 85 aa, Homo sapiens
EVVLRFAAAYGFRNIQNMILKLKKGKFPFHFVEVLACAGGCLNGRGQAQTPDGHADKALLRQMEGIYADIPVRRPESSAHVQELY

SEQ ID NO: 9862 - protein, 85 aa, Homo sapiens
ATAAQGPLSLLWGWLWSERFWLPENVSWADLEGPADGYGYPRGRHILSVFPLAAGIFFVRLLFERWCFALVAQAGVQWCSHSSLQ

SEQ ID NO: 9863 - protein, 84 aa, Homo sapiens
SLLWGWLWSERFWLPENVSWADLEGPADGYGYPRGRHILSVFPLAAGIFFVRLLFERWCFALVAQAGVQWCSHSSLQPLPPRFK

SEQ ID NO: 9864 - protein, 12 aa, Homo sapiens
YSAGARGRHGAR

SEQ ID NO: 9865 - protein, 84 aa, Homo sapiens
TDPKVPFSWSQEEISDLYDHTTILFAAEVFYDDDLTDAVFKTLSRLAHRLKNACTAILSVEKSLCVRLAGLQAQLHIETLGRHM

SEQ ID NO: 9866 - protein, 12 aa, Homo sapiens
QQPPGCHWRWYS

SEQ ID NO: 9867 - protein, 6 aa, Homo sapiens
RRTEMS

SEQ ID NO: 9868 - protein, 7 aa, Homo sapiens
GTWRRRT

SEQ ID NO: 9869 - protein, 11 aa, Homo sapiens
IRASVPNTKKP

SEQ ID NO: 9870 - protein, 84 aa, Homo sapiens
RVTELKSQMKSELAAVASEFGRLTRFLAEEQAGLERRLREMHEAQLGRAGAAASRLAEQAAQLSRLLAEAQERSQQGGLRLLQV

SEQ ID NO: 9871 - protein, 17 aa, Homo sapiens
WRRRSRRKKRVCSGPVA

SEQ ID NO: 9872 - protein, 27 aa, Homo sapiens
ASHALSAERAFLGGASAPTCSWPIWSR

SEQ ID NO: 9873 - protein, 16 aa, Homo sapiens
RWCRSTRPNCRGTWNH

SEQ ID NO: 9874 - protein, 85 aa, Homo sapiens
ASRKTKKKEGGALRAQRASSNVFSNFEQTQIQEFKEAFTLMDQNRDGFIDKEDLKDTYASLGRYPGRTPQSPWRRRTQRSSSSRR

SEQ ID NO: 9875 - protein, 84 aa, Homo sapiens
NVFSNFEQTQIQEFKEAFTLMDQNRDGFIDKEDLKDTYASLGRYPGRTPQSPWRRRTQRSSSSRRRGPSSNGARARASEAHQRP

SEQ ID NO: 9876 - protein, 84 aa, Homo sapiens
NQSHKEMHCLHPGDLYPFTRKPLFIIVDSSNSVAYKNFTNLFGQPLVCLLSPTAYPKALQACAEAYGKSVKNIFEKSTVILPSY

SEQ ID NO: 9877 - protein, 85 aa, Homo sapiens
YDFGGVLTNSNRDIINGDAIHKRNQSHKEMHCLHPGDLYPFTRKPLFIIVDSSNSVAYKNFTNLFGQPLVCLLSPTAYPKALQAC

SEQ ID NO: 9878 - protein, 24 aa, Homo sapiens
PAYRASWTNSFKRMAASYPSALMR

SEQ ID NO: 9879 - protein, 7 aa, Homo sapiens
RTGSMTR

SEQ ID NO: 9880 - protein, 7 aa, Homo sapiens
GRAWCCS

SEQ ID NO: 9881 - protein, 6 aa, Homo sapiens
PSSLLM

SEQ ID NO: 9882 - protein, 20 aa, Homo sapiens
GSRHFCPSAQCPSVPEATAG

SEQ ID NO: 9883 - protein, 84 aa, Homo sapiens
NSRLNIWGEARVGSELCAGWEEQFEVDREPSLDRNRRVRGGKSQKRKRLKKDPGKKIKRKKKGYVKKAKGCATMMKPTRVPCSG

SEQ ID NO: 9884 - protein, 85 aa, Homo sapiens
KMDVSVRAAGCSDDLSSGEADVDPKLLELTADEEKCRSIRRQYRQLMYCVRQNREDIVSSANNSLTEALEEANVLFDGVSRTREA

SEQ ID NO: 9885 - protein, 85 aa, Homo sapiens
ALDARFLVMASDLGKEKAKQLNSDMNFFNQLAFCDFLFLFVGLNWMEGDPDKLSDCDDSIALSFWKAIEKEATSWMVKAETFHFV

SEQ ID NO: 9886 - protein, 85 aa, Homo sapiens
FGSFKLERSAPKPRLEHQKKVRKMEENGNMPTKLQKLDLSSYPEATEKNVERILGLLQTYFRKYPDTPVSYFEFVIDPNSFSRTV

SEQ ID NO: 9887 - protein, 84 aa, Homo sapiens
NSFSRTVENIFYVSFIVRDGFARIRLDEDRLPILEPMNVNQMGEGNDSSCHGRKQGVISLTLQEWKNIVAAFEISEAMITYSSY

SEQ ID NO: 9888 - protein, 85 aa, Homo sapiens
YRQLMYCVRQNREDIVSSANNSLTEALEEANVLFDGVSRTREAALDARFLVMASDLGKEKAKQLNSDMNFFNQLAFCDFLFLFVG

SEQ ID NO: 9889 - protein, 85 aa, Homo sapiens
MNWMEGDPDKLSDCDDSIALSFWKAIEKEATSWMVKAETFHFVFGSFKLERSAPKPRLEHQKKVRKMEENGNMPTKLQKLDLSSY

SEQ ID NO: 9890 - protein, 85 aa, Homo sapiens
PEATEKNVERILGLLQTYFRKYPDTPVSYFEFVIDPNSFSRTVENIFYVSFIVRDGFARIRLDEDRLPILEPMNVNQMGEGNDSS

SEQ ID NO: 9891 - protein, 84 aa, Homo sapiens
STKRTNTGEDGQYFLKVLIPSYAAGSIIGKGGQTIVQLQKETGATIKLSKSKDFYPGADSCRRNCTWCCTEGISPLCHLQSETD

SEQ ID NO: 9892 - protein, 84 aa, Homo sapiens
KSLTVSQRNKVCLEKEMKNLKLLSDAAILRSQQIRTSRQQEVNLQTRCYDLQKEVLDLQCLVEALGLKLQKAVTEMDNYKEMLM

SEQ ID NO: 9893 - protein, 85 aa, Homo sapiens
EFAGQNPDCLEHLAASSGTGSSDFEQLEQILEAIPQAGNVVTGEMVEELILSGADIIKVGIGPGSVCTTRKKTGVGYPQLSAVME

SEQ ID NO: 9894 - protein, 85 aa, Homo sapiens
CADAAHGLKGHIISDGGCSCPGDVAKAFGAGADFVMLGGMLAGHSESGGELIERDGKKYKLFYGMSSEMAMKKYAGGVAEYRASE

SEQ ID NO: 9895 - protein, 85 aa, Homo sapiens
TYSGVPIIAANMDTVGTFEMAKVLCKFSLFTAVHKHYSLVQWQEFAGQNPDCLEHLAASSGTGSSDFEQLEQILEAIPQAGNVVT

SEQ ID NO: 9896 - protein, 85 aa, Homo sapiens
GEMVEELILSGADIIKVGIGPGSVCTTRKKTGVGYPQLSAVMECADAAHGLKGHIISDGGCSCPGDVAKAFGAGADFVMLGGMLA

SEQ ID NO: 9897 - protein, 85 aa, Homo sapiens
GHSESGGELIERDGKKYKLFYGMSSEMAMKKYAGGVAEYRASEGKTVEVPFKGDVEHTIRDILGGIRSTCTYVGAAKLKELSRRT

SEQ ID NO: 9898 - protein, 84 aa, Homo sapiens
ELDIGDATQVYVAFLVYLDLMESKSWHEVNCVGLPELQLICLVGTEIEGEGLQTVVPTPITASLSHNRIREILKASRKLQEYFS

SEQ ID NO: 9899 - protein, 8 aa, Homo sapiens
NMQVLMKL

SEQ ID NO: 9900 - protein, 84 aa, Homo sapiens
NIYRYAFDFARDKDQRSLDIDTAKSMLALLLGRTWPLFSVFYQYLEGLFFLMNLLSGKKSVRHHSKNYVKKMQTFQFPRVYKLM

SEQ ID NO: 9901 - protein, 8 aa, Homo sapiens
DFLPRKNG

SEQ ID NO: 9902 - protein, 85 aa, Homo sapiens
RRDKDRKRSSLSPGRGKDFKSRKDRDSKKDEEDEHGDKKPKAQPLSLEELLAKKKAEEEAEAKPKFLSKAEREAEALKRRQQEVE

SEQ ID NO: 9903 - protein, 84 aa, Homo sapiens
PFKEALLREAELRKQRLEELKQQQKLDRQKELEKKRKLETNPDIKPSNVEPMEKEFGLCKTENKAKSGKQNSKKLYCQELKKVS

SEQ ID NO: 9904 - protein, 84 aa, Homo sapiens
AARHEHQLMLMRQDLMRRQEELRRLEELRNQELQKRKQIQLRHEEEHRRREEEMIRHREQEELRRQQEGFKPNYMENGDKRKCG

SEQ ID NO: 9905 - protein, 84 aa, Homo sapiens
PFKKFSKGVAFFPLHIGDHVFIEEDCVVNAAQIGSYVHVGKNCVIGRRCVLKDCCKILDNTVLPPETVVPPFTVFSGCPGNLGC

SEQ ID NO: 9906 - protein, 84 aa, Homo sapiens
LYSCSYQVPVLYFRASFLDGRPLTLKDIWEGVHECYKMRLLQGPWDTITQQEHPILGQPFFVLHPCKTNEFMTPVLKNSQKINK

SEQ ID NO: 9907 - protein, 85 aa, Homo sapiens
SFSRKKKKKDKDKAKLLEAMGTSKKNEEEKRRGLDKRTPAQAAFEKMQEKRQMERILKKASKTHKQRVEDFNRHLDTLTEHYDIP

SEQ ID NO: 9908 - protein, 85 aa, Homo sapiens
QRGLDSETKKQLEEEEKKIISEEHWYLDLPELKEKESFIIEEQSFLLCEDLLYGRMSFRGFNPEVEKLMLQMNAKHKAEEVEDET

SEQ ID NO: 9909 - protein, 85 aa, Homo sapiens
QSFLLCEDLLYGRMSFRGFNPEVEKLMLQMNAKHKAEEVEDETVELDVSDEEMARRYETLVGTIGKKFARKRDHANYEEDENGDI

SEQ ID NO: 9910 - protein, 84 aa, Homo sapiens
AFRQRCLERMRNSRDRLLNRYRQAGSSGPGNSQNSFLVQEVMEEEWNALQSVENCPEDLAQLEELIDMAVLEEIQQELINQGTT

SEQ ID NO: 9911 - protein, 12 aa, Homo sapiens
KWEHFCYLCARL

SEQ ID NO: 9912 - protein, 5 aa, Homo sapiens
FVVVK

SEQ ID NO: 9913 - protein, 84 aa, Homo sapiens
MDFSDDNARAVITIGIPFPNVKDLQLTSATAEGTNGYAQSWVSYSKMADAALTTATDETVDIYPRNLLSPSTALVLHSTEVECY

SEQ ID NO: 9914 - protein, 4 aa, Homo sapiens
RQSL

SEQ ID NO: 9915 - protein, 85 aa, Homo sapiens
MKDYDWINAERHLFGQPNSAYDFKTNNPKEAGQRLQKLQEMKEKLGRNVNMRAMNVLTEAEERYNDLMKKKRIVENDKSKILTTI

SEQ ID NO: 9916 - protein, 84 aa, Homo sapiens
LTTIEDLDQKKNQALNIAWQKVNKDFGSIFSTLLPGANAMLAPPEGQTVLDGLEFKVALGNTWKENLTELSGGQRQKQQNHTTG

SEQ ID NO: 9917 - protein, 85 aa, Homo sapiens
EKLGRNVNMRAMNVLTEAEERYNDLMKKKRIVENDKSKILTTIEDLDQKKNQALNIAWQKVNKDFGSIFSTLLPGANAMLAPPEG

SEQ ID NO: 9918 - protein, 85 aa, Homo sapiens
ERKMRAHQVLTFLLLFVITSVASENASTSRGCGLDLLPQYVSLCDLDAIWGIVVEAVAGAGALITLLLMLILLVRLPFIKEKEKK

SEQ ID NO: 9919 - protein, 84 aa, Homo sapiens
PFVGDSEKVLSQIFRQARASTPAILFLDEIDSILGARSASKTGCDVQERVLSVLLNELDGVGLKTIERRGSKSSQQGKYKELKK

SEQ ID NO: 9920 - protein, 85 aa, Homo sapiens
PKDADLAFSASLFERAESLYTLISKFFSCFCVSTLAYTKGSTSSRIAKGGVDHTKMSLHGASGGHERSRDRRRSSDRSRDSSHER

SEQ ID NO: 9921 - protein, 85 aa, Homo sapiens
TESQLTPCIRNVTSPTRQHHVEREKDHSSSRPSSPRPQKASPNGSISSAGNSSRNSSQSSSDGSCKTAGEMVFVYENAKEGARNI

SEQ ID NO: 9922 - protein, 85 aa, Homo sapiens
RTSERVTLIVDNTRFVVDPSIFTAQPNTMLGRMFGSGREHNFTRPNEKGEYEVAEGIGSTVFRAILDYYKTGIIRCPDGISIPEL

SEQ ID NO: 9923 - protein, 85 aa, Homo sapiens
REACDYLCISFEYSTIKCRDLSALMHELSNDGARRQFEFYLEEMILPLMVASAQSGERECHIVVLTDDDVVDWDEEYPPQMGEEY

SEQ ID NO: 9924 - protein, 85 aa, Homo sapiens
SQIIYSTKLYRFFKYIENRDVAKSVLKERGLKKIRLGIEGYPTYKEKVKKRPGGRPEVIYNYVQRPFIRMSWEKEEGKSRHVDFQ

SEQ ID NO: 9925 - protein, 85 aa, Homo sapiens
SSRIAKGGVDHTKMSLHGASGGHERSRDRRRSSDRSRDSSHERTESQLTPCIRNVTSPTRQHHVEREKDHSSSRPSSPRPQKASP

SEQ ID NO: 9926 - protein, 85 aa, Homo sapiens
NGSISSAGNSSRNSSQSSSDGSCKTAGEMVFVYENAKEGARNIRTSERVTLIVDNTRFVVDPSIFTAQPNTMLGRMFGSGREHNF

SEQ ID NO: 9927 - protein, 85 aa, Homo sapiens
TRPNEKGEYEVAEGIGSTVFRAILDYYKTGIIRCPDGISIPELREACDYLCISFEYSTIKCRDLSALMHELSNDGARRQFEFYLE

SEQ ID NO: 9928 - protein, 85 aa, Homo sapiens
EMILPLMVASAQSGERECHIVVLTDDDVVDWDEEYPPQMGEEYSQIIYSTKLYRFFKYIENRDVAKSVLKERGLKKIRLGIEGYP

SEQ ID NO: 9929 - protein, 85 aa, Homo sapiens
TYKEKVKKRPGGRPEVIYNYVQRPFIRMSWEKEEGKSRHVDFQCVKSKSITNLAAAAADIPQDQLVVMHPTPQVDELDILPIHPP

SEQ ID NO: 9930 - protein, 85 aa, Homo sapiens
NLCLQRLDGRQTYDYRNIRISFGTDYGCCIVELGKTRVLGQVSCELVSPKLNRATEGILFFNLELSQMAAPAFEPGRQSDLLVKL

SEQ ID NO: 9931 - protein, 85 aa, Homo sapiens
NRLMERCLRNSKCIDTESLCVVAGEKVWQIRVDLHLLNHDGNIIDAASIAAIVALCHFRRPDVSVQGDEVTLYTPEERDPVPLSI

SEQ ID NO: 9932 - protein, 85 aa, Homo sapiens
HHMPICVSFAFFQQGTYLLVDPNEREERVMDGLLVIAMNKHREICTIQSSGGIMLLKDQVLRCSKIAGVKVAEITELILKALEND

SEQ ID NO: 9933 - protein, 85 aa, Homo sapiens
QKVRKEGGKFGFAESIANQRITAFKMEKAPIDTSDVEEKAEEIIAEAEPPSEVVSTPVLWTPGTAQIGEGVENSWGDLEDSEKED

SEQ ID NO: 9934 - protein, 85 aa, Homo sapiens
SCELVSPKLNRATEGILFFNLELSQMAAPAFEPGRQSDLLVKLNRLMERCLRNSKCIDTESLCVVAGEKVWQIRVDLHLLNHDGN

SEQ ID NO: 9935 - protein, 85 aa, Homo sapiens
IIDAASIAAIVALCHFRRPDVSVQGDEVTLYTPEERDPVPLSIHHMPICVSFAFFQQGTYLLVDPNEREERVMDGLLVIAMNKHR

SEQ ID NO: 9936 - protein, 85 aa, Homo sapiens
EICTIQSSGGIMLLKDQVLRCSKIAGVKVAEITELILKALENDQKVRKEGGKFGFAESIANQRITAFKMEKAPIDTSDVEEKAEE

SEQ ID NO: 9937 - protein, 85 aa, Homo sapiens
IIAEAEPPSEVVSTPVLWTPGTAQIGEGVENSWGDLEDSEKEDDEGGGDQAIILDGIKMDTGVEVSDIGSQDAPIILSDSEEEEM

SEQ ID NO: 9938 - protein, 85 aa, Homo sapiens
TDKTEKVAVDPETVFKRPRECDSPSYQKRQRMALLARKQGAGDSLIAGSAMSKEKKLMTGHAIPPSQLDSQIDDFTGFSKDGMMQ

SEQ ID NO: 9939 - protein, 85 aa, Homo sapiens
KPGSNAPVGGNVTSSFSGDDLECRETASSPKSQREINADIKRKLVKELRCVGQKYEKIFEMLEGVQGPTAVRKRFFESIIKEAAR

SEQ ID NO: 9940 - protein, 84 aa, Homo sapiens
DLECRETASSPKSQREINADIKRKLVKELRCVGQKYEKIFEMLEGVQGPTAVRKRFFESIIKEAARCMRRDFVKHLKKKLKRMI

SEQ ID NO: 9941 - protein, 85 aa, Homo sapiens
DSLIAGSAMSKEKKLMTGHAIPPSQLDSQIDDFTGFSKDGMMQKPGSNAPVGGNVTSSFSGDDLECRETASSPKSQREINADIKR

SEQ ID NO: 9942 - protein, 85 aa, Homo sapiens
DDSINNRFSYVTHEDICNCFNGDTLLAIQAPSGTQLEVPIPEMGQNGQKKYQINLKSHSGPIHVLLINKESSSSKPVVFPVPPPD

SEQ ID NO: 9943 - protein, 85 aa, Homo sapiens
DLTQPSSQSLTPVTPQKSSMATQNLPEQHVSERSQALQQTSATDISSAGSISGDIIDELMSSDVFPLLRLSPTPADDYNFNLDDN

SEQ ID NO: 9944 - protein, 85 aa, Homo sapiens
MGQNGQKKYQINLKSHSGPIHVLLINKESSSSKPVVFPVPPPDDLTQPSSQSLTPVTPQKSSMATQNLPEQHVSERSQALQQTSA

SEQ ID NO: 9945 - protein, 85 aa, Homo sapiens
AAFRDIEEVSQGLLSLLGANRAEAQQRRLLGRHEQVVERLLETQDGAEKQLREILTMEKEVAQSLLNAKEQVHQGGVELQQLEAG

SEQ ID NO: 9946 - protein, 85 aa, Homo sapiens
LQEAGEEDTRLKASLLQLTRELEELKEIEADLERQEKEVDEDTTVTIPSAVYVAQLYHQVIRPPWPPKVLDSRDLPTSASKYLGL

SEQ ID NO: 9947 - protein, 85 aa, Homo sapiens
VDEDTTVTIPSAVYVAQLYHQVIRPPWPPKVLDSRDLPTSASKYLGLQVCAIASGWIVSRWRETQNFLERNGGVILVPPGLFLLS

SEQ ID NO: 9948 - protein, 85 aa, Homo sapiens
TQDGAEKQLREILTMEKEVAQSLLNAKEQVHQGGVELQQLEAGLQEAGEEDTRLKASLLQLTRELEELKEIEADLERQEKEVDED

SEQ ID NO: 9949 - protein, 84 aa, Homo sapiens
AAGDVDGDVFVFSYSCQEGETKELWSSGHHLKACRAVAFSEDGQSEYWGRQPAMWWKGAVSSTMTWAPFPQSSLLSPRTKPSMF

SEQ ID NO: 9950 - protein, 85 aa, Homo sapiens
MAFHPARDLLAAGDVDGDVFVFSYSCQEGETKELWSSGHHLKACRAVAFSEDGQSEYWGRQPAMWWKGAVSSTMTWAPFPQSSLL

SEQ ID NO: 9951 - protein, 85 aa, Homo sapiens
YFSQEEWELLDPTQKALYNDVMQENYETVISLALFVLPKPKVISCLEQGEEPWVQVSPEFKDSAGKSPTGLKLKNDTENHQPVSL

SEQ ID NO: 9952 - protein, 85 aa, Homo sapiens
SDLEIQASAGVISKKAKVKVPQKTAGKENHFDMHRVGKWHQDFPVKKRKKLSTWKQELLKLMDRHKKDCAREKPFKCQECGKTFR

SEQ ID NO: 9953 - protein, 85 aa, Homo sapiens
VSSDLIKHQRIHTEEKPYKCQQCDKRFRWSSDLNKHLTTHQGIKPYKCSWCGKSFSQNTNLHTHQRTHTGEKPFTCHECGKKFSQ

SEQ ID NO: 9954 - protein, 84 aa, Homo sapiens
GIKPYKCSWCGKSFSQNTNLHTHQRTHTGEKPFTCHECGKKFSQNSHLIKHRRTHTGEQPYTCSICRRNFSRRSSLLRHQKLHL

SEQ ID NO: 9955 - protein, 85 aa, Homo sapiens
ISCLEQGEEPWVQVSPEFKDSAGKSPTGLKLKNDTENHQPVSLSDLEIQASAGVISKKAKVKVPQKTAGKENHFDMHRVGKWHQD

SEQ ID NO: 9956 - protein, 85 aa, Homo sapiens
FPVKKRKKLSTWKQELLKLMDRHKKDCAREKPFKCQECGKTFRVSSDLIKHQRIHTEEKPYKCQQCDKRFRWSSDLNKHLTTHQG

SEQ ID NO: 9957 - protein, 85 aa, Homo sapiens
MKSRISMRSRHPRRAISEGHKSEGTMPPNKEASGLSSSPAGLICLPPISEELQLVWTQAAQTSELDSNEHLLKTFSYFPYPSLAD

SEQ ID NO: 9958 - protein, 85 aa, Homo sapiens
IALLCLRYGLQMEKVKTWFMAQRLRCGISWSSEEIEETRARVVYRRDQLHFKSLLSFTHHAGRPPEEVPPPPVPAPEQVGIGIGP

SEQ ID NO: 9959 - protein, 85 aa, Homo sapiens
PTLSKPTQTKGLKVEPEEPSQMPPLPQSHQKLKESLMTPGSGAFPYQSDFWQHLQSSGLSKEQAGRGPNQSHGIGTASWNHSTTV

SEQ ID NO: 9960 - protein, 85 aa, Homo sapiens
PQPQARDKPPPIALIASSCKEESASSVTPSSSSTSSSFQVLANGATAASKPLQPLGCVPQSVSPSEQALPPHLEPAWPQGLRHNS

SEQ ID NO: 9961 - protein, 85 aa, Homo sapiens
VPGRVGPTEYLSPDMQRQRKTKRKTKEQLAILKSFFLQCQWARREDYQKLEQITGLPRPEIIQWFGDTRYALKHGQLKWFRDNAV

SEQ ID NO: 9962 - protein, 85 aa, Homo sapiens
PGAPSFQDPAIPTPPPSTRSLNERAETPPLPIPPPPPDIQPLERYWAAHQQLRETDIPQLSQASRLSTQQVLDWFDSRLPQPAEV

SEQ ID NO: 9963 - protein, 85 aa, Homo sapiens
ICLPPISEELQLVWTQAAQTSELDSNEHLLKTFSYFPYPSLADIALLCLRYGLQMEKVKTWFMAQRLRCGISWSSEEIEETRARV

SEQ ID NO: 9964 - protein, 85 aa, Homo sapiens
VYRRDQLHFKSLLSFTHHAGRPPEEVPPPPVPAPEQVGIGIGPPTLSKPTQTKGLKVEPEEPSQMPPLPQSHQKLKESLMTPGSG

SEQ ID NO: 9965 - protein, 85 aa, Homo sapiens
AFPYQSDFWQHLQSSGLSKEQAGRGPNQSHGIGTASWNHSTTVPQPQARDKPPPIALIASSCKEESASSVTPSSSSTSSSFQVLA

SEQ ID NO: 9966 - protein, 85 aa, Homo sapiens
NGATAASKPLQPLGCVPQSVSPSEQALPPHLEPAWPQGLRHNSVPGRVGPTEYLSPDMQRQRKTKRKTKEQLAILKSFFLQCQWA

SEQ ID NO: 9967 - protein, 85 aa, Homo sapiens
RREDYQKLEQITGLPRPEIIQWFGDTRYALKHGQLKWFRDNAVPGAPSFQDPAIPTPPPSTRSLNERAETPPLPIPPPPPDIQPL

SEQ ID NO: 9968 - protein, 85 aa, Homo sapiens
QNKARLELADYEAENLARLQRAFARKWEFIFMQAEAQVKIDRKKDKTERKILDSQERAFWDVHRPVPGCVNTTEMDIRKCRRLKN

SEQ ID NO: 9969 - protein, 85 aa, Homo sapiens
PQKVKKSVYGVTEESQAQSPVHVLSQPIRKTTKEDIRKQITFLNAQIDRHCLKMSKVAESLIAYTEQYVEYDPLITPAEPSNPWI

SEQ ID NO: 9970 - protein, 85 aa, Homo sapiens
SDDVALWDIEMSKEPSQQRVKRWGFSFDEILKDQVGRDQFLRFLESEFSSENLRFWLAVQDLKKQPLQDVAKRVEEIWQEFLAPG

SEQ ID NO: 9971 - protein, 85 aa, Homo sapiens
APSAINLDSHSYEITSQNVKDGGRYTFEDAQEHIYKLMKSDSYARFLRSNAYQDLLLAKKKPESEQGRRTSLEKFTRSVLYSNTP

SEQ ID NO: 9972 - protein, 84 aa, Homo sapiens
MDSHSYEITSQNVKDGGRYTFEDAQEHIYKLMKSDSYARFLRSNAYQDLLLAKKKPESEQGRRTSLEKFTRSVLYSNTPLAKRP

SEQ ID NO: 9973 - protein, 85 aa, Homo sapiens
KKDKTERKILDSQERAFWDVHRPVPGCVNTTEMDIRKCRRLKNPQKVKKSVYGVTEESQAQSPVHVLSQPIRKTTKEDIRKQITF

SEQ ID NO: 9974 - protein, 85 aa, Homo sapiens
MNAQIDRHCLKMSKVAESLIAYTEQYVEYDPLITPAEPSNPWISDDVALWDIEMSKEPSQQRVKRWGFSFDEILKDQVGRDQFLR

SEQ ID NO: 9975 - protein, 85 aa, Homo sapiens
FLESEFSSENLRFWLAVQDLKKQPLQDVAKRVEEIWQEFLAPGAPSAINLDSHSYEITSQNVKDGGRYTFEDAQEHIYKLMKSDS

SEQ ID NO: 9976 - protein, 84 aa, Homo sapiens
VAEHCERSLEDLLRERKPVSCSTVLCIAFEVLQGLQYMNKHGIVHRALSPHNILLDRKGHIKLAKFGLYHMTAHGDDVDFPIGM

SEQ ID NO: 9977 - protein, 85 aa, Homo sapiens
ALVSADSRIAELLTELHQLIKQTQEERSRSEHNLVNIQKTHERMQTENKISPYYRTKLRGLYTTAKADAEAECKLECNDAISVHC

SEQ ID NO: 9978 - protein, 84 aa, Homo sapiens
NKISPYYRTKLRGLYTTAKADAEAECKLECNDAISVHCNLCLPGSSDSLASASQHPSESSGQDRGNQVSVGREADCGQDCRSLQ

SEQ ID NO: 9979 - protein, 85 aa, Homo sapiens
RMQTENKISPYYRTKLRGLYTTAKADAEAECKLECNDAISVHCNLCLPGSSDSLASASQHPSESSGQDRGNQVSVGREADCGQDC

SEQ ID NO: 9980 - protein, 85 aa, Homo sapiens
PKAPKGKSAGREKKVIHPYSRKAAQITREAHKQEKKEKLKNEKALRLNLVGEKLQWFQNHLDPQKKRYSKKDACELIERIRENVI

SEQ ID NO: 9981 - protein, 84 aa, Homo sapiens
HPYSRKAAQITREAHKQEKKEKLKNEKALRLNLVGEKLQWFQNHLDPQKKRYSKKDACELIERIRENVIRSLYTFLDYRLLFIF

SEQ ID NO: 9982 - protein, 85 aa, Homo sapiens
ADEEAEQERLSCGEGGCVAELQRLGERLQELELQLRESRVPAVEAATDYCQQLCQISEVDCKDALEMICNLESEGDEKSALVLCT

SEQ ID NO: 9983 - protein, 85 aa, Homo sapiens
DEEAEQERLSCGEGGCVAELQRLGERLQELELQLRESRVPAVEAATDYCQQLCQISEVDCKDALEMICNLESEGDEKSALVLCTA

SEQ ID NO: 9984 - protein, 85 aa, Homo sapiens
EGRKIHVILARSTSMPQLGERSGVIRVKQYKQSLAIESDGKKGSKVFMYYFDNPGGQIPSWLINWAAKAGLELLTSSNPLASASQ

SEQ ID NO: 9985 - protein, 84 aa, Homo sapiens
GGQIPSWLINWAAKAGLELLTSSNPLASASQSAGITGMSHHTRPIRAEPSGKLRIRETSSSFWQTQTFCNRLSGRKRKDIKIKT

SEQ ID NO: 9986 - protein, 85 aa, Homo sapiens
GSKVFMYYFDNPGGQIPSWLINWAAKAGLELLTSSNPLASASQSAGITGMSHHTRPIRAEPSGKLRIRETSSSFWQTQTFCNRLS

SEQ ID NO: 9987 - protein, 85 aa, Homo sapiens
TAAASEVIKYEYHVLYSCSYQVPVLYFRASFLDGRPLTLKDIWEGVHECYKMRLLQGPWDTITQQIFTKRCSEGHISVTKNIIPE

SEQ ID NO: 9988 - protein, 84 aa, Homo sapiens
AAASEVIKYEYHVLYSCSYQVPVLYFRASFLDGRPLTLKDIWEGVHECYKMRLLQGPWDTITQQIFTKRCSEGHISVTKNIIPE

SEQ ID NO: 9989 - protein, 14 aa, Homo sapiens
RAQRGSWFLRTLGT

SEQ ID NO: 9990 - protein, 60 aa, Homo sapiens
SVAVRQKKNVPIEEAPFLKRGKDGLLDTSCQATGQPPAWYGNQNPVNQFAGKAPSGTQLA

SEQ ID NO: 9991 - protein, 60 aa, Homo sapiens
EEESTSSTHTSLSMQLTPRISTGWLSSITCGQQGARWPTSSSRRTSGTLRPVMITEDAWI

SEQ ID NO: 9992 - protein, 22 aa, Homo sapiens
ISSELSCSPASTRRSRLSSTST

SEQ ID NO: 9993 - protein, 21 aa, Homo sapiens
YGNQNPVNQFAGKAPSGTQLA

SEQ ID NO: 9994 - protein, 85 aa, Homo sapiens
EDEVVRFAKKMDKMVQKKNAAGALDLLKELKNIPMTLELLQSTRIGMSVNAIRKQSTDEEVTSLAKSLIKSWKKLLGIIDLPLHI

SEQ ID NO: 9995 - protein, 84 aa, Homo sapiens
RFAKKMDKMVQKKNAAGALDLLKELKNIPMTLELLQSTRIGMSVNAIRKQSTDEEVTSLAKSLIKSWKKLLGIIDLPLHIFMML

SEQ ID NO: 9996 - protein, 85 aa, Homo sapiens
LVPVGWMNESYYAVLYPMVYPMKITGNRAVMALVYIWLHSLIGCLPPLFGWSSVEFDEFKWMCVAAWHREPGYTAFWQIWCALFP

SEQ ID NO: 9997 - protein, 85 aa, Homo sapiens
FLVMLVCYGFIFRVARVKARKVHCGTVVIVEEDAQRTGRKNSSTSTSSSGSRRNAFQGVVYSANQCKALITILVVLGAFMVTWGP

SEQ ID NO: 9998 - protein, 85 aa, Homo sapiens
YMVVIASEALWGKSSVSPSLETWATWLSFASAVCHPLIYGLWNKTVRKELLGMCFGDRYYREPFVQRQRTSRLFSISNRITDLGL

SEQ ID NO: 9999 - protein, 85 aa, Homo sapiens
SPHLTALMAGGQPLGHSSSTGDTGFSCSQDSGTDMMLLEDYTSDDNPPSHCTCPPKRRSSVTFEDEVEQIKEAAKNSILHVKAEV

SEQ ID NO: 10000 - protein, 85 aa, Homo sapiens
GCLPPLFGWSSVEFDEFKWMCVAAWHREPGYTAFWQIWCALFPFLVMLVCYGFIFRVARVKARKVHCGTVVIVEEDAQRTGRKNS

SEQ ID NO: 10001 - protein, 85 aa, Homo sapiens
STSTSSSGSRRNAFQGVVYSANQCKALITILVVLGAFMVTWGPYMVVIASEALWGKSSVSPSLETWATWLSFASAVCHPLIYGLW

SEQ ID NO: 10002 - protein, 85 aa, Homo sapiens
NKTVRKELLGMCFGDRYYREPFVQRQRTSRLFSISNRITDLGLSPHLTALMAGGQPLGHSSSTGDTGFSCSQDSGTDMMLLEDYT

SEQ ID NO: 10003 - protein, 85 aa, Homo sapiens
SDDNPPSHCTCPPKRRSSVTFEDEVEQIKEAAKNSILHVKAEVHKSLDSYAASLAKAIEAEAKINLFGEEALPGVLVTARTVPGG

SEQ ID NO: 10004 - protein, 85 aa, Homo sapiens
MPAGFRQKDQTQKAATGPFDREHLLMYLEKEALEQKDREDFVPFTGEKKGRVFIPKEKPIETRKEEKVTLDPELEEALASASDTE

SEQ ID NO: 10005 - protein, 85 aa, Homo sapiens
LYDLAAVLGVHNLLNNPKFDEETANNKGGKGPVRNVVKGEKVKPVFEEPPNPTNVEISLQQMKANDPSLQEVNLNNIKNIPIPTL

SEQ ID NO: 10006 - protein, 85 aa, Homo sapiens
REFAKALETNTHVKKFSLAATRSNDPVAIAFADMLKVNKTLTSLNIESNFITGTGILALVEALKENDTLTEIKIDNQRQQLGTAV

SEQ ID NO: 10007 - protein, 85 aa, Homo sapiens
PFTGEKKGRVFIPKEKPIETRKEEKVTLDPELEEALASASDTELYDLAAVLGVHNLLNNPKFDEETANNKGGKGPVRNVVKGEKV

SEQ ID NO: 10008 - protein, 85 aa, Homo sapiens
KPVFEEPPNPTNVEISLQQMKANDPSLQEVNLNNIKNIPIPTLREFAKALETNTHVKKFSLAATRSNDPVAIAFADMLKVNKTLT

SEQ ID NO: 10009 - protein, 85 aa, Homo sapiens
SLNIESNFITGTGILALVEALKENDTLTEIKIDNQRQQLGTAVEMEIAQMLEENSRILKFGYQFTKQGPRTRVAAAITKNNDLVR

SEQ ID NO: 10010 - protein, 20 aa, Homo sapiens
LLPCASSPSSRNSAWRATPS

SEQ ID NO: 10011 - protein, 84 aa, Homo sapiens
LRKVNGKDASSTYSQVENLNRELTSRVTAHWEKFMATLGPEEEAEKAQADFVKSAVRDVRYGPESLSEFTQWRGWGHLGLCPAS

SEQ ID NO: 10012 - protein, 85 aa, Homo sapiens
KDFEVSAEPIQDWLSKTEKMVHESSNRLYDLPAKRREQQKLQEKVSRLDRIVAEHNQFSLGIKELQDWMTDAIHMLDSYCHPTSD

SEQ ID NO: 10013 - protein, 85 aa, Homo sapiens
EKVSRLDRIVAEHNQFSLGIKELQDWMTDAIHMLDSYCHPTSDKSVLDSRTLKLEVCIFTQKYLQPTEFVFLKISRLHPPGVMMS

SEQ ID NO: 10014 - protein, 85 aa, Homo sapiens
HILCCECGVPISPNPANICVACLRSKVDISQGIPKQVSISFCKQCQRYFQPPGTWIQCALESRELLALCLKKIKAPLSKVRLVDA

SEQ ID NO: 10015 - protein, 85 aa, Homo sapiens
KIGCAVNTCRKMTVWGEVWENAVYFVCNYSPKGNWIGEAPYKNGRPCSECPPSYGGSCRNNLCYRETYTPKPETDEMNEVETAPI

SEQ ID NO: 10016 - protein, 85 aa, Homo sapiens
PEENHVWLQPRVMRPTKPKKTSAVNYMTQVVRCDTKMKDRCKGSTCNRYQCPAGCLNHKAKIFGTLFYESSSSICRAAIHYGILD

SEQ ID NO: 10017 - protein, 85 aa, Homo sapiens
DKGGLVDITRNGKVPFFVKSERHGVQSLSKYKPSSSFMVSKVKVQDLDCYTTVAQLCPFEKPATHCPRIHCPAHCKDEPSYWAPV

SEQ ID NO: 10018 - protein, 85 aa, Homo sapiens
NGRPCSECPPSYGGSCRNNLCYRETYTPKPETDEMNEVETAPIPEENHVWLQPRVMRPTKPKKTSAVNYMTQVVRCDTKMKDRCK

SEQ ID NO: 10019 - protein, 85 aa, Homo sapiens
GSTCNRYQCPAGCLNHKAKIFGTLFYESSSSICRAAIHYGILDDKGGLVDITRNGKVPFFVKSERHGVQSLSKYKPSSSFMVSKV

SEQ ID NO: 10020 - protein, 85 aa, Homo sapiens
KVQDLDCYTTVAQLCPFEKPATHCPRIHCPAHCKDEPSYWAPVFGTNIYADTSSICKTAVHAGVISNESGGDVDVMPVDKKKTYV

SEQ ID NO: 10021 - protein, 17 aa, Homo sapiens
TQGSALTDLLMKAVYMD

SEQ ID NO: 10022 - protein, 84 aa, Homo sapiens
ACGSNCGVVNIYNQDSCLQETNPKPIKAIMNLVTGVTSLTFNPTTEILAIASEKMKEAVRLVAPLLRLLKRLFEVQLSHKRSLS

SEQ ID NO: 10023 - protein, 84 aa, Homo sapiens
EAFRQRCLERMRNSRDRLLNRYRQAGSSGPGNSQNSFLVQEVMEEEWNALQSVENCPEDLAQLEELIDMAVLEEIQQELINQGL

SEQ ID NO: 10024 - protein, 85 aa, Homo sapiens
KTSVIALMVSDTLLAIQAPSGTQLEVPIPEMGQNGQKKYQINLKSHSGPIHVLLINKESSSSKPVVFPVPPPDDLTQPSSQSLTP

SEQ ID NO: 10025 - protein, 85 aa, Homo sapiens
VTPQKSSMATQNLPEQHVSERSQALQQTSATDISSAGSISGDIIDELMSSDVFPLLRLSPTPADDYNFNLDDNEGVCDLFDVQIL

SEQ ID NO: 10026 - protein, 85 aa, Homo sapiens
LKSHSGPIHVLLINKESSSSKPVVFPVPPPDDLTQPSSQSLTPVTPQKSSMATQNLPEQHVSERSQALQQTSATDISSAGSISGD

SEQ ID NO: 10027 - protein, 85 aa, Homo sapiens
MKNQCTDVGIKEGPLSPAQTSQVTSLSSWTGYLLFQPVASSHLEQREALWIEEKGTPQASCSVSLLLPRLQCSGVISAHCNLHLP

SEQ ID NO: 10028 - protein, 84 aa, Homo sapiens
EGPLSPAQTSQVTSLSSWTGYLLFQPVASSHLEQREALWIEEKGTPQASCSVSLLLPRLQCSGVISAHCNLHLPGSSDSSASAS

SEQ ID NO: 10029 - protein, 85 aa, Homo sapiens
QVEKGATGISLSPHLPGELAICSRSGAVCLWSPEDGLRQIYRDPETLVFRDSSSWRWADFTAHPRVLTVGDRTGVKMLDTQGPPG

SEQ ID NO: 10030 - protein, 85 aa, Homo sapiens
CGLLLFRLGAEASCQKGERVLLTQYLGHSSPKCLPPTLHLVCTQFSLYLVDERLPLVPMLKWNHGLPSPLLLARLLPPPRPSCVQ

SEQ ID NO: 10031 - protein, 85 aa, Homo sapiens
PLLLGGQGGQLQLLHLAGEGASVPRLAGPPQSLPSRIDSLPAFPLLEPKIQWRLQERLKAPTIGLAAVVPPLPSAPTPGLVLFQL

SEQ ID NO: 10032 - protein, 85 aa, Homo sapiens
SAAGDVFYQQLRPQVDSSLRRDAGPPGDTQPDCHAPTASWTSQDTAGCSQWLKALLKVPLAPPVWTAPTFTHRQMLGSTELRREE

SEQ ID NO: 10033 - protein, 85 aa, Homo sapiens
EEGQRLGVLRKAMARGQLLLQRDLGSLPAAEPPPAPESGLEDKLSERLGEAWAGRGAAWWERQQGRTSEPGRQTRRPKRRTQLSS

SEQ ID NO: 10034 - protein, 85 aa, Homo sapiens
SFSLSGHVDPSEDTSSPHSPEWPPADALPLPPTTPPSQELTPDACAQGVPSEQRQMLRDYMAKLPPQRDTPGCATTPPHSQASSV

SEQ ID NO: 10035 - protein, 85 aa, Homo sapiens
DPETLVFRDSSSWRWADFTAHPRVLTVGDRTGVKMLDTQGPPGCGLLLFRLGAEASCQKGERVLLTQYLGHSSPKCLPPTLHLVC

SEQ ID NO: 10036 - protein, 85 aa, Homo sapiens
TQFSLYLVDERLPLVPMLKWNHGLPSPLLLARLLPPPRPSCVQPLLLGGQGGQLQLLHLAGEGASVPRLAGPPQSLPSRIDSLPA

SEQ ID NO: 10037 - protein, 85 aa, Homo sapiens
FPLLEPKIQWRLQERLKAPTIGLAAVVPPLPSAPTPGLVLFQLSAAGDVFYQQLRPQVDSSLRRDAGPPGDTQPDCHAPTASWTS

SEQ ID NO: 10038 - protein, 85 aa, Homo sapiens
QDTAGCSQWLKALLKVPLAPPVWTAPTFTHRQMLGSTELRREEEEGQRLGVLRKAMARGQLLLQRDLGSLPAAEPPPAPESGLED

SEQ ID NO: 10039 - protein, 85 aa, Homo sapiens
KLSERLGEAWAGRGAAWWERQQGRTSEPGRQTRRPKRRTQLSSSFSLSGHVDPSEDTSSPHSPEWPPADALPLPPTTPPSQELTP

SEQ ID NO: 10040 - protein, 85 aa, Homo sapiens
MQQSIGETNVERKAKKKRSKSVTSSSSSSSDSSASDSSSESEETSTSSSSEDSDTDESSSSSSSSASSTTSSSSSDSDSDSSSSS

SEQ ID NO: 10041 - protein, 85 aa, Homo sapiens
RCQKCLEFGHWTYECTGKRKYLHRPSRTAELKKALKEKENRLLLQQSIGETNVERKAKKKRSKSVTSSSSSSSDSSASDSSSESE

SEQ ID NO: 10042 - protein, 84 aa, Homo sapiens
QGQPAAPAPQKRGRGRPRKQQQEPTGEPSPKRPRGRPKGSKNKSPSKAAQKKAEATGEKRPRGRPRKWPQQVVQKKPAQVRHSH

SEQ ID NO: 10043 - protein, 84 aa, Homo sapiens
QEVMEEEWNALQSVENCPEDLAQLEELIDMAVLEEIQQELINQEQSIISEYEKSLQFDEKCLSIMLAEWEANPLICPVCTNLLS

SEQ ID NO: 10044 - protein, 85 aa, Homo sapiens
TPGPLPMLPPLIDPWDPGLTARDLLFRGGCRYRKRPRVVLDVTEQISRFLLDHGDVAFAPLGKLMLENFKLEGAGSRTKKKTVVS

SEQ ID NO: 10045 - protein, 85 aa, Homo sapiens
DDHFKAVESMPRGVVVTLRNIATQLESSWELHTNRQCIESENTWRDLMKTALENLIVLLKDENTISPYEMCSSGLVQALLTVLNN

SEQ ID NO: 10046 - protein, 85 aa, Homo sapiens
ATNFLAHEKIWFDKFKYDDAERRFYEQMNGPVAGASRQENGASVILRDIARARENIQKSLAGSSGPGASSGTSGDHVVQELQQAI

SEQ ID NO: 10047 - protein, 85 aa, Homo sapiens
SKLEARLNVLEKSSPGHRATAPQTQHVSPMRQVEPPAKKPATPAEDDEDDDIDLFGSDNEEEDKEAAQLREERLRQYAEKKAKKP

SEQ ID NO: 10048 - protein, 85 aa, Homo sapiens
ALVAKSSILLDVKPWDDETDMAQLEACVRSIQLDGLVWGASKLVPVGYGIRKLQIQCVVEDDKVGTDLLEEEITKFEEHVQSVDI

SEQ ID NO: 10049 - protein, 85 aa, Homo sapiens
SVILRDIARARENIQKSLAGSSGPGASSGTSGDHVVQELQQAISKLEARLNVLEKSSPGHRATAPQTQHVSPMRQVEPPAKKPAT

SEQ ID NO: 10050 - protein, 85 aa, Homo sapiens
PAEDDEDDDIDLFGSDNEEEDKEAAQLREERLRQYAEKKAKKPALVAKSSILLDVKPWDDETDMAQLEACVRSIQLDGLVWGASK

SEQ ID NO: 10051 - protein, 84 aa, Homo sapiens
REDSGWELKCPGAAGVLGPHTEYKELTAEPTIVAQLCVPAQETAPAKLIVYLQRFRPQDYQRLLEVNSSRERPQETEDPDHCLG

SEQ ID NO: 10052 - protein, 85 aa, Homo sapiens
ELSLMQADHWLRRREDSGWELKCPGAAGVLGPHTEYKELTAEPTIVAQLCVPAQETAPAKLIVYLQRFRPQDYQRLLEVNSSRER

SEQ ID NO: 10053 - protein, 12 aa, Homo sapiens
GLPSSRPCDRRK

SEQ ID NO: 10054 - protein, 10 aa, Homo sapiens
PRTWRLNSSS

SEQ ID NO: 10055 - protein, 19 aa, Homo sapiens
PSWLCFMTGCSLVQTRIAL

SEQ ID NO: 10056 - protein, 84 aa, Homo sapiens
DKDSIMNIEPAILVMHHSMKPHPAITATLLDFMCRIIPNFYPPLEGHVRQGVFSSLNHIVEKRVLACKKYWLYLRLLGICLLGS

SEQ ID NO: 10057 - protein, 18 aa, Homo sapiens
GYQNLNCFGKILSIILRP

SEQ ID NO: 10058 - protein, 8 aa, Homo sapiens
TSFATSVG

SEQ ID NO: 10059 - protein, 85 aa, Homo sapiens
RKEMAAAPPGRFNIENIDGPHSKVIQMDVALFEMNQSDSKEVDSSEESSQDSSENSSESEDEDDSIPSEVTIDNIKLPNSEGGKV

SEQ ID NO: 10060 - protein, 84 aa, Homo sapiens
VDSSEESSQDSSENSSESEDEDDSIPSEVTIDNIKLPNSEGGKVETGFHRVSQDGLNLLTSCSTLLDLPKCWDYRHEPPCPAGN

SEQ ID NO: 10061 - protein, 84 aa, Homo sapiens
ELNKEEAAQQKQAEEKGVVLNRPFHPAPPFDCLWLCLYAKLGELCVDPRPAVRKSAGQTLFSTIGAHGTLLQHSTWHTVIWKVL

SEQ ID NO: 10062 - protein, 85 aa, Homo sapiens
QMRFDGRLGFPGGFVDTQDRSLEDGLNRELREELGEAAAAFRVERTDYRSSHVGSGPRVVAHFYAKRLTLEELLAVEAGATRAKD

SEQ ID NO: 10063 - protein, 84 aa, Homo sapiens
AVEAGATRAKDHGLEVLGLVRVPLYTLRDGVGGLPTFLENSFIGSAREQLLEAALHGPMKTEMRTLVLGREGRTWECFLIGSER

SEQ ID NO: 10064 - protein, 85 aa, Homo sapiens
VERTDYRSSHVGSGPRVVAHFYAKRLTLEELLAVEAGATRAKDHGLEVLGLVRVPLYTLRDGVGGLPTFLENSFIGSAREQLLEA

SEQ ID NO: 10065 - protein, 84 aa, Homo sapiens
KPLSGNHVQPPETMKCNTFIRQVKEEHGRHTDATVKVPFLKKCKEAGLLNYLLEEILDKVHSIPEKLMDETTSESDQALPKQCA

SEQ ID NO: 10066 - protein, 19 aa, Homo sapiens
MGPEHPWARASCSPTAKIG

SEQ ID NO: 10067 - protein, 7 aa, Homo sapiens
PLLDIHT

SEQ ID NO: 10068 - protein, 28 aa, Homo sapiens
QLLGAMVVASMPPTMCGAIACLGTDPVA

SEQ ID NO: 10069 - protein, 76 aa, Homo sapiens
ATCLLTAATTRLSVLMEQMRDAVGIASLAISDAGTRSACMRRGCAMGSQTVRTAVMSGTAPMFCPARSLQLQSLAA

SEQ ID NO: 10070 - protein, 49 aa, Homo sapiens
PWAAPASSMPFAPRSTASLPPSPGWRLRLCSSRHPLPTGSSLPRVPSHL

SEQ ID NO: 10071 - protein, 21 aa, Homo sapiens
GLMPVAMALMKQVAAQTPSLA

SEQ ID NO: 10072 - protein, 71 aa, Homo sapiens
QCMCMTALGPLRAPDYCVVSPTSAMARLSLWRHCLARLLCPTTQLLGAMVVASMPPTMCGAIACLGTDPVA

SEQ ID NO: 10073 - protein, 85 aa, Homo sapiens
ATVRHSAVTAHGTVLTAQMRRTAQAAHLDTSPVGLLAPLVPQPATCLLTAATTRLSVLMEQMRDAVGIASLAISDAGTRSACMRR

SEQ ID NO: 10074 - protein, 34 aa, Homo sapiens
GCAMGSQTVRTAVMSGTAPMFCPARSLQLQSLAA

SEQ ID NO: 10075 - protein, 85 aa, Homo sapiens
AERAFVEWSQALLLAPDGSRRQGTPNTGQQVAVPDLAHQPSPPVNGQPPLGSLQALVREVWLEKPRYDAAERGFYEALFDGHPPG

SEQ ID NO: 10076 - protein, 85 aa, Homo sapiens
PVKQEAEGLALDSPWHRFRRFHLGDAPGPREALGLLRALCRDWLRPEVHTKEQMLELLVLEQFLSALPADTQAWVCSRQPQSGEE

SEQ ID NO: 10077 - protein, 85 aa, Homo sapiens
QRNKQVAMGRKKFNMDPKKGIQFLIENDLLKNTCEDIAQFLYKGEGLNKTAIGDYLGERDEFNIQVLHAFVELHEFTDLNLVQAL

SEQ ID NO: 10078 - protein, 85 aa, Homo sapiens
KGIQFLIENDLLKNTCEDIAQFLYKGEGLNKTAIGDYLGERDEFNIQVLHAFVELHEFTDLNLVQALRQFLWSFRLPGEAQKIDR

SEQ ID NO: 10079 - protein, 85 aa, Homo sapiens
YTVHTKEKQFVCQTCGKQFLRERQLRLHNDMHKGMARYVCSICDQGNFRKHDHVRHMISHLSAGETICQVCFQIFPNNEQLEQHM

SEQ ID NO: 10080 - protein, 84 aa, Homo sapiens
GMARYVCSICDQGNFRKHDHVRHMISHLSAGETICQVCFQIFPNNEQLEQHMDVHLYTCGICGAKFNLRKDMRSHYNAKHLKRT

SEQ ID NO: 10081 - protein, 85 aa, Homo sapiens
SSCLDQDMFKSAIMEENERDHRRKHFCNLCGKGFYQRCHLREHYTVHTKEKQFVCQTCGKQFLRERQLRLHNDMHKGMARYVCSI

SEQ ID NO: 10082 - protein, 85 aa, Homo sapiens
DSPRLSSFTQHHRPVIAVHSGIARSPHPSSALHFPTTSILPQTASTYFPHTAIRYPPHLNPQDPLKDLVSLACDPASQQPGPPTL

SEQ ID NO: 10083 - protein, 85 aa, Homo sapiens
ICAVQLDHGHAAAWMDLGTLYESCNQPQDAIKCYLNATRSKSCSNTSALAARIKYLQNTSDNWSGGHAVSHPPVQQQAHSWCLTP

SEQ ID NO: 10084 - protein, 85 aa, Homo sapiens
QKLQMRPTGVAQVRSTGIPNGPTADSSLPTNSVSGQQPQLALTRVPSVSQPGVRPACPGQPLANGPFSAGHVPCSTSRTLGSTDT

SEQ ID NO: 10085 - protein, 85 aa, Homo sapiens
ILIGNNHITGSGSNGNVPYLQRNALTLPHNRTNLTSSAEEPWKNQLSNSTQGLHKGQSSHSAGPNGERPLSSTGPSQHLQAAGSG

SEQ ID NO: 10086 - protein, 85 aa, Homo sapiens
IQNQNGHPTLPSNSVTQGAALNHLSSHTATSGGQQGITLTKESKPSGNILTVPETSRHTGETPNSTASVEGLPNHVHQMTADAVC

SEQ ID NO: 10087 - protein, 85 aa, Homo sapiens
SPSHGDSKSPGLLSSDNPQLSALLMGKANNNVGTGTCDKVNNIHPAVHTKTDNSVASSPSSAISTATPSPKSTEQTTTNSVTSLN

SEQ ID NO: 10088 - protein, 85 aa, Homo sapiens
SPHSGLHTINGEGMEESQSPMKTDLLLVNHKPSPQIIPSMSVSIYPSSAEVLKACRNLGKNGLSNSSILLDKCPPPRPPSSPYPP

SEQ ID NO: 10089 - protein, 85 aa, Homo sapiens
MPKDKLNPPTPSIYLENKRDAFFPPLHQFCTNPNNPVTVIRGLAGALKLDLGLFSTKTLVEANNEHMVEVRTQLLQPADENWDPT

SEQ ID NO: 10090 - protein, 85 aa, Homo sapiens
GTKKIWHCESNRSHTTIAKYAQYQASSFQESLREENEKRSHHKDHSDSESTSSDNSGRRRKGPFKTIKFGTNIDLSDDKKWKLQL

SEQ ID NO: 10091 - protein, 85 aa, Homo sapiens
HELTKLPAFVRVVSAGNLLSHVGHTILGMNTVQLYMKVPGSRTPGHQENNNFCSVNINIGPGDCEWFVVPEGYWGVLNDFCEKNN

SEQ ID NO: 10092 - protein, 85 aa, Homo sapiens
MNFLMGSWWPNLEDLYEANVPVYRFIQRPGDLVWINAGTVHWVQAIGWCNNIAWNVGPLTACQYKLAVERYEWNKLQSVKSIVPM

SEQ ID NO: 10093 - protein, 85 aa, Homo sapiens
VHLSWNMARNIKVSDPKLFEMIKYCLLRTLKQCQTLREALIAAGKEIIWHGRTKEEPAHYCSICEVEVFDLLFVTNESNSRKTYI

SEQ ID NO: 10094 - protein, 85 aa, Homo sapiens
CSNTSALAARIKYLQNTSDNWSGGHAVSHPPVQQQAHSWCLTPQKLQMRPTGVAQVRSTGIPNGPTADSSLPTNSVSGQQPQLAL

SEQ ID NO: 10095 - protein, 85 aa, Homo sapiens
TRVPSVSQPGVRPACPGQPLANGPFSAGHVPCSTSRTLGSTDTILIGNNHITGSGSNGNVPYLQRNALTLPHNRTNLTSSAEEPW

SEQ ID NO: 10096 - protein, 85 aa, Homo sapiens
KNQLSNSTQGLHKGQSSHSAGPNGERPLSSTGPSQHLQAAGSGIQNQNGHPTLPSNSVTQGAALNHLSSHTATSGGQQGITLTKE

SEQ ID NO: 10097 - protein, 85 aa, Homo sapiens
SKPSGNILTVPETSRHTGETPNSTASVEGLPNHVHQMTADAVCSPSHGDSKSPGLLSSDNPQLSALLMGKANNNVGTGTCDKVNN

SEQ ID NO: 10098 - protein, 85 aa, Homo sapiens
IHPAVHTKTDNSVASSPSSAISTATPSPKSTEQTTTNSVTSLNSPHSGLHTINGEGMEESQSPMKTDLLLVNHKPSPQIIPSMSV

SEQ ID NO: 10099 - protein, 85 aa, Homo sapiens
SIYPSSAEVLKACRNLGKNGLSNSSILLDKCPPPRPPSSPYPPLPKDKLNPPTPSIYLENKRDAFFPPLHQFCTNPNNPVTVIRG

SEQ ID NO: 10100 - protein, 85 aa, Homo sapiens
LAGALKLDLGLFSTKTLVEANNEHMVEVRTQLLQPADENWDPTGTKKIWHCESNRSHTTIAKYAQYQASSFQESLREENEKRSHH

SEQ ID NO: 10101 - protein, 85 aa, Homo sapiens
KDHSDSESTSSDNSGRRRKGPFKTIKFGTNIDLSDDKKWKLQLHELTKLPAFVRVVSAGNLLSHVGHTILGMNTVQLYMKVPGSR

SEQ ID NO: 10102 - protein, 85 aa, Homo sapiens
TPGHQENNNFCSVNINIGPGDCEWFVVPEGYWGVLNDFCEKNNLNFLMGSWWPNLEDLYEANVPVYRFIQRPGDLVWINAGTVHW

SEQ ID NO: 10103 - protein, 85 aa, Homo sapiens
VQAIGWCNNIAWNVGPLTACQYKLAVERYEWNKLQSVKSIVPMVHLSWNMARNIKVSDPKLFEMIKYCLLRTLKQCQTLREALIA

SEQ ID NO: 10104 - protein, 85 aa, Homo sapiens
AGKEIIWHGRTKEEPAHYCSICEVEVFDLLFVTNESNSRKTYIVHCQDCARKTSGNLENFVVLEQYKMEDLMQVYDQFTLAPPLP

SEQ ID NO: 10105 - protein, 85 aa, Homo sapiens
FKRMAEFGPDSGGRVKGVTIVKPIVYGNVARYFGKKREEDGHTHQWTVYVKPYRNEVTLYHLLKLFQSDTNAMLGKKTVVSEFYD

SEQ ID NO: 10106 - protein, 85 aa, Homo sapiens
EMIFQDPTAMMQQLLTTSRQLTLGAYKHETEFAELEVKTREKLEAAKKKTSFEIAELKERLKASRETINCLKNEIRKLEEDDQAK

SEQ ID NO: 10107 - protein, 85 aa, Homo sapiens
THQWTVYVKPYRNEVTLYHLLKLFQSDTNAMLGKKTVVSEFYDEMIFQDPTAMMQQLLTTSRQLTLGAYKHETEFAELEVKTREK

SEQ ID NO: 10108 - protein, 85 aa, Homo sapiens
VTRLGIYPFWILNTTLFESWEIIGPYASWWLLNGLLLTLQLLHVIWSYLIARIALKALIRGKVTCPGRIRPCTLHSFLTSFLFSM

SEQ ID NO: 10109 - protein, 84 aa, Homo sapiens
FESWEIIGPYASWWLLNGLLLTLQLLHVIWSYLIARIALKALIRGKVTCPGRIRPCTLHSFLTSFLFSMPGGSWTVSSLACIEG

SEQ ID NO: 10110 - protein, 85 aa, Homo sapiens
AEQDSAAAQQYIRQGSPTALRAELWALILNISSQPEDVLYYEQLKTNVIQHDLLVDSLIYKDVKLTASNDDYYFVFEDYLYQVLL

SEQ ID NO: 10111 - protein, 85 aa, Homo sapiens
CFSRDTSVLSHFAFNSASPPKSYIRGKLGLEEYAVFYPPNGVIPFHGFSMYVAPLCFLYHEPSKLYQIFREMYVRFFFRLHSISS

SEQ ID NO: 10112 - protein, 85 aa, Homo sapiens
HPSGIVSLCLLFETLLQTYLPQLFYHLREIGAQPLRISFKWMVRAFSGYLATDQLLLLWDRILGYNSLEILAVLAAAVFAFRAVN

SEQ ID NO: 10113 - protein, 85 aa, Homo sapiens
QLKTNVIQHDLLVDSLIYKDVKLTASNDDYYFVFEDYLYQVLLCFSRDTSVLSHFAFNSASPPKSYIRGKLGLEEYAVFYPPNGV

SEQ ID NO: 10114 - protein, 85 aa, Homo sapiens
IPFHGFSMYVAPLCFLYHEPSKLYQIFREMYVRFFFRLHSISSHPSGIVSLCLLFETLLQTYLPQLFYHLREIGAQPLRISFKWM

SEQ ID NO: 10115 - protein, 85 aa, Homo sapiens
KMNEYSTTYECNRQFEDQEEDTESQSRTTDVKIIGFLRNVEKGTQQRQLLSRLQIDPVMAETLQMSQDYYDMESMVHADTRSFIL

SEQ ID NO: 10116 - protein, 85 aa, Homo sapiens
KKPKLSEEVVVAPNQESGMKTADSLRVLSGHLMQTRDLVQPDKPASPKFIVTLDGVPSPPGYMSDQEEDMCFEGMKPVNQTAASN

SEQ ID NO: 10117 - protein, 85 aa, Homo sapiens
KGLRGLLHPQQLHLLSRQLEDPNGSFSNAEMSELSVAQKPEKLLERCKYWPACKNGDECAYHHPISPCKAFPNCKFAEKCLFVHP

SEQ ID NO: 10118 - protein, 85 aa, Homo sapiens
NCKYDAKCTKPDCPFTHVSRRIPVLSPKPAVAPPAPPSSSQLCRYFPACKKMECPFYHPKHCRFNTQCTRPDCTFYHPTINVPPR

SEQ ID NO: 10119 - protein, 85 aa, Homo sapiens
DGVPAPQKVLFPTERLSLRWERVFRVGAGLHNLGNTCFLNATIQCLTYTPPLANYLLSKEHARSCHQGSFCMLCVMQNHIVQAFA

SEQ ID NO: 10120 - protein, 85 aa, Homo sapiens
SGERPYICKICHYPFTVKANCERHLRKKHLKATRKDIEKNIEYVSSSAAELVDAFCAPDTVCRLCGEDLKHYRALRIHMRTHCGR

SEQ ID NO: 10121 - protein, 85 aa, Homo sapiens
PKAPKGKSAGREKKVIHPYSRKAAQITREAHKQEKKEKLKNEKALRLNLVGEKLQWFQNHLDPQKKRYSKKDACELIERDSRHSK

SEQ ID NO: 10122 - protein, 84 aa, Homo sapiens
PKGKSAGREKKVIHPYSRKAAQITREAHKQEKKEKLKNEKALRLNLVGEKLQWFQNHLDPQKKRYSKKDACELIERDSRHSKCK

SEQ ID NO: 10123 - protein, 85 aa, Homo sapiens
AAAVLSGPSAGSAAGVPGGTGGLSAVSSGPRLRLLLLESVSGLLQPRTGSAVAPVHPPNRSAPHLPGLMCLLRLHGSVGGAQNLS

SEQ ID NO: 10124 - protein, 85 aa, Homo sapiens
ALGALVSLSNARLSSIKTRFEGLCLLSLLVGESPTELFQQHCVSWLRSIQQVLQTQDPPATMELAVAVLRDLLRYAAQLPALFRD

SEQ ID NO: 10125 - protein, 85 aa, Homo sapiens
ISMNHLPGLLTSLLGLRPECEQSALEGMKACMTYFPRACGSLKGKLASFFLSRVDALSPQLQQLACECYSRLPSLGAGFSQGLKH

SEQ ID NO: 10126 - protein, 85 aa, Homo sapiens
TESWEQELHSLLASLHTLLGALYEGAETAPVQNEGPGVEMLLSSEDGDAHVLLQLRQRFSGLARCLGLMLSSEFGAPVSVPVQEI

SEQ ID NO: 10127 - protein, 85 aa, Homo sapiens
MDFICRTLSVSSKNISLHGDGPLRLLLLPSIHLEALDLLSALILACGSRLLRFGILIGRLLPQVLNSWSIGRDSLSPGQERPYST

SEQ ID NO: 10128 - protein, 85 aa, Homo sapiens
VRTKVYAILELWVQVCGASAGMLQGGASGEALLTHLLSDISPPADALKLRSPRGSPDGSLQTGKPSAPKKLKLDVGEAMAPPSHR

SEQ ID NO: 10129 - protein, 85 aa, Homo sapiens
KGDSNANSDVCAAALRGLSRTILMCGPLIKEETHRRLHDLVLPLVMGVQQGEVLGSSPYTSSRCRRELYCLLLALLLAPSPRCPP

SEQ ID NO: 10130 - protein, 85 aa, Homo sapiens
PLACALQAFSLGQREDSLEVSSFCSEALVTCAALTHPRVPPLQPMGPTCPTPAPVPPPEAPSPFRAPPFHPPGPMPSVGSMPSAG

SEQ ID NO: 10131 - protein, 85 aa, Homo sapiens
PMPSAGPMPSAGPVPSARPGPPTTANHLGLSVPGLVSVPPRLLPGPENHRAGSNEDPILAPSGTPPPTIPPDETFGGRVPRPAFV

SEQ ID NO: 10132 - protein, 85 aa, Homo sapiens
HYDKEEASDVEISLESDSDDSVVIVPEGLPPLPPPPPSGATPPPIAPTGPPTASPPVPAKEEPEELPAAPGPLPPPPPPPPPVPG

SEQ ID NO: 10133 - protein, 85 aa, Homo sapiens
PVTLPPPQLVPEGTPGGGGPPALEEDLTVININSSDEEEEEEEEEEEEEEEEEEEEEDFEEEEEDEEEYFEEEEEEEEEFEEEFE

SEQ ID NO: 10134 - protein, 85 aa, Homo sapiens
EEEGELEEEEEEEDEEEEEELEEVEDLEFGTAGGEVEEGAPPPPTLPPALPPPESPPKVQPEPEPEPGLLLEVEEPGTEEERGAD

SEQ ID NO: 10135 - protein, 85 aa, Homo sapiens
TAPTLAPEALPSQGEVEREGESPAAGPPPQELVEEEPSAPPTLLEEETEDGSDKVQPPPETPAEEEMETETEAEALQEKEQDDTA

SEQ ID NO: 10136 - protein, 85 aa, Homo sapiens
MLQPRTGSAVAPVHPPNRSAPHLPGLMCLLRLHGSVGGAQNLSALGALVSLSNARLSSIKTRFEGLCLLSLLVGESPTELFQQHC

SEQ ID NO: 10137 - protein, 85 aa, Homo sapiens
VSWLRSIQQVLQTQDPPATMELAVAVLRDLLRYAAQLPALFRDISMNHLPGLLTSLLGLRPECEQSALEGMKACMTYFPRACGSL

SEQ ID NO: 10138 - protein, 85 aa, Homo sapiens
KGKLASFFLSRVDALSPQLQQLACECYSRLPSLGAGFSQGLKHTESWEQELHSLLASLHTLLGALYEGAETAPVQNEGPGVEMLL

SEQ ID NO: 10139 - protein, 85 aa, Homo sapiens
SSEDGDAHVLLQLRQRFSGLARCLGLMLSSEFGAPVSVPVQEILDFICRTLSVSSKNISLHGDGPLRLLLLPSIHLEALDLLSAL

SEQ ID NO: 10140 - protein, 85 aa, Homo sapiens
ILACGSRLLRFGILIGRLLPQVLNSWSIGRDSLSPGQERPYSTVRTKVYAILELWVQVCGASAGMLQGGASGEALLTHLLSDISP

SEQ ID NO: 10141 - protein, 85 aa, Homo sapiens
PADALKLRSPRGSPDGSLQTGKPSAPKKLKLDVGEAMAPPSHRKGDSNANSDVCAAALRGLSRTILMCGPLIKEETHRRLHDLVL

SEQ ID NO: 10142 - protein, 85 aa, Homo sapiens
PLVMGVQQGEVLGSSPYTSSRCRRELYCLLLALLLAPSPRCPPPLACALQAFSLGQREDSLEVSSFCSEALVTCAALTHPRVPPL

SEQ ID NO: 10143 - protein, 85 aa, Homo sapiens
QPMGPTCPTPAPVPPPEAPSPFRAPPFHPPGPMPSVGSMPSAGPMPSAGPMPSAGPVPSARPGPPTTANHLGLSVPGLVSVPPRL

SEQ ID NO: 10144 - protein, 85 aa, Homo sapiens
LPGPENHRAGSNEDPILAPSGTPPPTIPPDETFGGRVPRPAFVHYDKEEASDVEISLESDSDDSVVIVPEGLPPLPPPPPSGATP

SEQ ID NO: 10145 - protein, 85 aa, Homo sapiens
PPIAPTGPPTASPPVPAKEEPEELPAAPGPLPPPPPPPPPVPGPVTLPPPQLVPEGTPGGGGPPALEEDLTVININSSDEEEEEE

SEQ ID NO: 10146 - protein, 85 aa, Homo sapiens
EEEEEEEEEEEEEEEDFEEEEEDEEEYFEEEEEEEEEFEEEFEEEEGELEEEEEEEDEEEEEELEEVEDLEFGTAGGEVEEGAPP

SEQ ID NO: 10147 - protein, 85 aa, Homo sapiens
PPTLPPALPPPESPPKVQPEPEPEPGLLLEVEEPGTEEERGADTAPTLAPEALPSQGEVEREGESPAAGPPPQELVEEEPSAPPT

SEQ ID NO: 10148 - protein, 50 aa, Homo sapiens
LKISKGGGDQKMLMITTSSSDFLQLRHLKLYHEELLKGMDYIYLRKMARK

SEQ ID NO: 10149 - protein, 5 aa, Homo sapiens
TCKPF

SEQ ID NO: 10150 - protein, 15 aa, Homo sapiens
ISLNLYLLLNITNYL

SEQ ID NO: 10151 - protein, 84 aa, Homo sapiens
SDRSSGIHKIQDDPQSSKFLHLNNLNSFKSTECLLLSLLHREKNKEESDSTERLQISNPGFQERCAKKMQLVNLRNRRACCNLI

SEQ ID NO: 10152 - protein, 9 aa, Homo sapiens
IYLRKMARK

SEQ ID NO: 10153 - protein, 12 aa, Homo sapiens
NQMTSLTGYYLP

SEQ ID NO: 10154 - protein, 85 aa, Homo sapiens
RTWGPGTLGQKELASGDEGSPQRREKANGLSTPSESPHFHLGLKSLVDGYKQWSSSAPNLVKGPRSSPALPGFTSLMEMEDEDSE

SEQ ID NO: 10155 - protein, 85 aa, Homo sapiens
GPGSGESRLQHSPSQSYLCIPFPRGEDGDGPSSDGIHEEPTPVNSATSTPQLTPTNSLKRGGAHHRRCEVALLGCGAVLAATGLG

SEQ ID NO: 10156 - protein, 85 aa, Homo sapiens
FDLLEAGKCQLLPLEEPEPPAREEKKRREGLFQRSSRPRRSTSPPSRKLFKKEEPMLLLGDPSASLTLLSLSSISECNSTRSLLR

SEQ ID NO: 10157 - protein, 85 aa, Homo sapiens
SDSDEIVVYEMPVSPVEAPPLSPCTHNPLVNVRVERFKRDPNQSLTPTHVTLTTPSQPSSHRRTPSDGALKPETLLASRSPSSNG

SEQ ID NO: 10158 - protein, 85 aa, Homo sapiens
MSPSPGAGMLKTPSPSRDPGEFPRLPDPNVVFPPTPRRWNTQQDSTLERPKTLEFLPRPRPSANRQRLDPWWFVSPSHARSTSPA

SEQ ID NO: 10159 - protein, 85 aa, Homo sapiens
LKSLVDGYKQWSSSAPNLVKGPRSSPALPGFTSLMEMEDEDSEGPGSGESRLQHSPSQSYLCIPFPRGEDGDGPSSDGIHEEPTP

SEQ ID NO: 10160 - protein, 85 aa, Homo sapiens
VNSATSTPQLTPTNSLKRGGAHHRRCEVALLGCGAVLAATGLGFDLLEAGKCQLLPLEEPEPPAREEKKRREGLFQRSSRPRRST

SEQ ID NO: 10161 - protein, 85 aa, Homo sapiens
SPPSRKLFKKEEPMLLLGDPSASLTLLSLSSISECNSTRSLLRSDSDEIVVYEMPVSPVEAPPLSPCTHNPLVNVRVERFKRDPN

SEQ ID NO: 10162 - protein, 85 aa, Homo sapiens
QSLTPTHVTLTTPSQPSSHRRTPSDGALKPETLLASRSPSSNGLSPSPGAGMLKTPSPSRDPGEFPRLPDPNVVFPPTPRRWNTQ

SEQ ID NO: 10163 - protein, 85 aa, Homo sapiens
QDSTLERPKTLEFLPRPRPSANRQRLDPWWFVSPSHARSTSPANSSSTETPSNLDSCFASSSSTVEERPGLPALLPFQAGPLPPT

SEQ ID NO: 10164 - protein, 85 aa, Homo sapiens
MVNAYVMTSREPPLNTAACRLLLDIMPGLETAVVFQEKEGIVENLFKWAREADQPLRTYSTGLLGGAMENQDIAANYRDENSQLV

SEQ ID NO: 10165 - protein, 85 aa, Homo sapiens
AIVLRRLRELQLQEVALRQENKRPSPRKLSSEPLLPLDEEAVDMDYGDMAVDVVDGDQEEASGDMEISFHLDSGHKTSSRVNSTT

SEQ ID NO: 10166 - protein, 85 aa, Homo sapiens
KPEDGGLKKNKSAKQGDRENFRKAKQKLGFSSSDPDRMFVELSNSSWSEMSPWVIGTNYTLYPMTPAIEQRLILQYLTPLGEYQE

SEQ ID NO: 10167 - protein, 85 aa, Homo sapiens
LLPIFMQLGSRELMMFYIDLKQTNDVLLTFEALKHLASLLLHNKFATEFVAHGGVQKLLEIPRPSMAATGVSMCLYYLSYNQDAM

SEQ ID NO: 10168 - protein, 85 aa, Homo sapiens
ERVCMHPHNVLSDVVNYTLWLMECSHASGCCHATMFFSICFSFRAVLELFDRYDGLRRLVNLISTLEILNLEDQGALLSDDEIFA

SEQ ID NO: 10169 - protein, 85 aa, Homo sapiens
SRQTGKHTCMALRKYFEAHLAIKLEQVKQSLQRTEGGILVHPQPPYKACSYTHEQIVEMMEFLIEYGPAQLYWEPAEVFLKLSCV

SEQ ID NO: 10170 - protein, 85 aa, Homo sapiens
QLLLQLISIACNWKTYYARNDTVRFALDVLAILTVVPKIQLQLAESVDVLDEAGSTVSTVGISIILGVAEGEFFIHDAEIQKSAL

SEQ ID NO: 10171 - protein, 85 aa, Homo sapiens
QIIINCVCGPDNRISSIGKFISGTPRRKLPQNPKSSEHTLAKMWNVVQSNNGIKVLLSLLSIKMPITDADQIRALACKALVGLSR

SEQ ID NO: 10172 - protein, 85 aa, Homo sapiens
SSTVRQIISKLPLFSSCQIQQLMKEPVLQDKRSDHVKFCKYAAELIERVSGKPLLIGTDVSLARLQKADVVAQSRISFPEKELLL

SEQ ID NO: 10173 - protein, 85 aa, Homo sapiens
MIRNHLISKGLGETATVLTKEADLPMTAASHSSAFTPVTAAASPVSLPRTPRIANGIATRLGSHAAVGASAPSAPTAHPQPRPPQ

SEQ ID NO: 10174 - protein, 85 aa, Homo sapiens
GPLALPGPSYAGNSPLIGRISFIRERPSPCNGRKIRVLRQKSDHGAYSQSPAIKKQLDRHLPSPPTLDSIITEYLREQHARCKNP

SEQ ID NO: 10175 - protein, 85 aa, Homo sapiens
VATCPPFSLFTPHQCPEPKQRRQAPINFTSRLNRRASFPKYGGVDGGCFDRHLIFSRFRPISVFREANEDESGFTCCAFSARERF

SEQ ID NO: 10176 - protein, 85 aa, Homo sapiens
MMLGTCTGQLKLYNVFSGQEEASYNCHNSAITHLEPSRDGSLLLTSATWSQPLSALWGMKSVFDMKHSFTEDHYVEFSKHSQDRV

SEQ ID NO: 10177 - protein, 85 aa, Homo sapiens
IGTKGDIAHIYDIQTGNKLLTLFNPDLANNYKRNCATFNPTDDLVLNDGVLWDVRSAQAIHKFDKFNMNISGVFHPNGLEVIINT

SEQ ID NO: 10178 - protein, 85 aa, Homo sapiens
EIWDLRTFHLLHTVPALDQCRVVFNHTGTVMYGAMLQADDEDDLMEERMKSPFGSSFRTFNATDYKPIATIDVKRNIFDLCTDTK

SEQ ID NO: 10179 - protein, 85 aa, Homo sapiens
DCYLAVIENQGSMDALNMDTVCRLYEVGRQRLAEDEDEEEDQEEEEQEEEDDDEDDDDTDDLDELDTDQLLEAELEEDDNNENAG

SEQ ID NO: 10180 - protein, 85 aa, Homo sapiens
KETEEYRKGDPDPFDDRHPGRADPECMLGHLLRILFKNDDFMNLVNAYVMTSREPPLNTAACRLLLDIMPGLETAVVFQEKEGIV

SEQ ID NO: 10181 - protein, 85 aa, Homo sapiens
ENLFKWAREADQPLRTYSTGLLGGAMENQDIAANYRDENSQLVAIVLRRLRELQLQEVALRQENKRPSPRKLSSEPLLPLDEEAV

SEQ ID NO: 10182 - protein, 85 aa, Homo sapiens
DMDYGDMAVDVVDGDQEEASGDMEISFHLDSGHKTSSRVNSTTKPEDGGLKKNKSAKQGDRENFRKAKQKLGFSSSDPDRMFVEL

SEQ ID NO: 10183 - protein, 85 aa, Homo sapiens
SNSSWSEMSPWVIGTNYTLYPMTPAIEQRLILQYLTPLGEYQELLPIFMQLGSRELMMFYIDLKQTNDVLLTFEALKHLASLLLH

SEQ ID NO: 10184 - protein, 85 aa, Homo sapiens
NKFATEFVAHGGVQKLLEIPRPSMAATGVSMCLYYLSYNQDAMERVCMHPHNVLSDVVNYTLWLMECSHASGCCHATMFFSICFS

SEQ ID NO: 10185 - protein, 85 aa, Homo sapiens
FRAVLELFDRYDGLRRLVNLISTLEILNLEDQGALLSDDEIFASRQTGKHTCMALRKYFEAHLAIKLEQVKQSLQRTEGGILVHP

SEQ ID NO: 10186 - protein, 85 aa, Homo sapiens
QPPYKACSYTHEQIVEMMEFLIEYGPAQLYWEPAEVFLKLSCVQLLLQLISIACNWKTYYARNDTVRFALDVLAILTVVPKIQLQ

SEQ ID NO: 10187 - protein, 85 aa, Homo sapiens
MAESVDVLDEAGSTVSTVGISIILGVAEGEFFIHDAEIQKSALQIIINCVCGPDNRISSIGKFISGTPRRKLPQNPKSSEHTLAK

SEQ ID NO: 10188 - protein, 85 aa, Homo sapiens
MWNVVQSNNGIKVLLSLLSIKMPITDADQIRALACKALVGLSRSSTVRQIISKLPLFSSCQIQQLMKEPVLQDKRSDHVKFCKYA

SEQ ID NO: 10189 - protein, 85 aa, Homo sapiens
AELIERVSGKPLLIGTDVSLARLQKADVVAQSRISFPEKELLLLIRNHLISKGLGETATVLTKEADLPMTAASHSSAFTPVTAAA

SEQ ID NO: 10190 - protein, 85 aa, Homo sapiens
SPVSLPRTPRIANGIATRLGSHAAVGASAPSAPTAHPQPRPPQGPLALPGPSYAGNSPLIGRISFIRERPSPCNGRKIRVLRQKS

SEQ ID NO: 10191 - protein, 85 aa, Homo sapiens
DHGAYSQSPAIKKQLDRHLPSPPTLDSIITEYLREQHARCKNPVATCPPFSLFTPHQCPEPKQRRQAPINFTSRLNRRASFPKYG

SEQ ID NO: 10192 - protein, 85 aa, Homo sapiens
GVDGGCFDRHLIFSRFRPISVFREANEDESGFTCCAFSARERFLMLGTCTGQLKLYNVFSGQEEASYNCHNSAITHLEPSRDGSL

SEQ ID NO: 10193 - protein, 85 aa, Homo sapiens
MLTSATWSQPLSALWGMKSVFDMKHSFTEDHYVEFSKHSQDRVIGTKGDIAHIYDIQTGNKLLTLFNPDLANNYKRNCATFNPTD

SEQ ID NO: 10194 - protein, 85 aa, Homo sapiens
DLVLNDGVLWDVRSAQAIHKFDKFNMNISGVFHPNGLEVIINTEIWDLRTFHLLHTVPALDQCRVVFNHTGTVMYGAMLQADDED

SEQ ID NO: 10195 - protein, 85 aa, Homo sapiens
DLMEERMKSPFGSSFRTFNATDYKPIATIDVKRNIFDLCTDTKDCYLAVIENQGSMDALNMDTVCRLYEVGRQRLAEDEDEEEDQ

SEQ ID NO: 10196 - protein, 85 aa, Homo sapiens
EEEEQEEEDDDEDDDDTDDLDELDTDQLLEAELEEDDNNENAGEDGDNDFSPSDEELANLLEEGEDGEDEDSDADEEVELILGDT

SEQ ID NO: 10197 - protein, 84 aa, Homo sapiens
MPSFHAIMGPLQALLTDHLADCSHPQELQELCQSTLTEMESQKQLCRPLTCEKSKPVPLKLFTPRLAGLEFPTSGNPPALAPQL

SEQ ID NO: 10198 - protein, 84 aa, Homo sapiens
SPNGSISSAGNSSRNSSQSSSDGSCKTAGEMVFVYENAKEGARNIRTSERVTLIVDNTRFVVDPSIFTAQPNTMLGRMFGSGLL

SEQ ID NO: 10199 - protein, 85 aa, Homo sapiens
EKAKEEMHRVEILPPANQEDKKMQPVTIASLQASVLPMVSMVGVQLSPPVTFQLRAGSGPVFLSGQERYEASDLTWEEEEEEEGE

SEQ ID NO: 10200 - protein, 85 aa, Homo sapiens
VEKLLSSGAFSAGCIPCGTSKILGSTDTILLGSNCIAGSESNGNVPYLQQNTHTLPHNHTDLNSSTEEPWRKQLSNSAQAYLGHL

SEQ ID NO: 10201 - protein, 85 aa, Homo sapiens
TGFIQDNCNKGLHKSQSSCLSGPNEEQPLFSTGSAQYHQATSTGIKKANEHLTLPSNSVPQGDADSHLSCHTATSGGQQGIMFTK

SEQ ID NO: 10202 - protein, 85 aa, Homo sapiens
ESKPSKNRSLVPETSRHTGDTSNGCADVKGLSNHVHQLIADAVSSPNHGDSPNLLIADNPQLSALLIGKANGNVGTGTCDKVNNI

SEQ ID NO: 10203 - protein, 85 aa, Homo sapiens
HPAVHTKTDHSVASSPSSAISTATPSPKSTEQRSINSVTSLNSPHSGLHTVNGEGLGKSQSSTKVDLPLASHRSTSQILPSMSVS

SEQ ID NO: 10204 - protein, 85 aa, Homo sapiens
ICPSSTEVLKACRNPGKNGLSNSCILLDKCPPPRPPTSPYPPLPKDKLNPPTPSIYLENKRDAFFPPLHQFCTNPKNPVTVIRGL

SEQ ID NO: 10205 - protein, 85 aa, Homo sapiens
AGALKLDLGLFSTKTLVEANNEHMVEVRTQLLQPADENWDPTGTKKIWRCESNRSHTTIAKYAQYQASSFQESLREENEKRTQHK

SEQ ID NO: 10206 - protein, 85 aa, Homo sapiens
DHSDNESTSSENSGRRRKGPFKTIKFGTNIDLSDNKKWKLQLHELTKLPAFARVVSAGNLLTHVGHTILGMNTVQLYMKVPGSRT

SEQ ID NO: 10207 - protein, 85 aa, Homo sapiens
PGHQENNNFCSVNINIGPGDCEWFVVPEDYWGVLNDFCEKNNLNFLMSSWWPNLEDLYEANVPVYRFIQRPGDLVWINAGTVHWV

SEQ ID NO: 10208 - protein, 85 aa, Homo sapiens
QAVGWCNNIAWNVGPLTACQYKLAVERYEWNKLKSVKSPVPMVHLSWNMARNIKVSDPKLFEMIKYCLLKILKQYQTLREALVAA

SEQ ID NO: 10209 - protein, 85 aa, Homo sapiens
GKEVIWHGRTNDEPAHYCSICEVEVFNLLFVTNESNTQKTYIVHCHDCARKTSKSLENFVVLEQYKMEDLIQVYDQFTLALSLSS

SEQ ID NO: 10210 - protein, 85 aa, Homo sapiens
GNVPYLQQNTHTLPHNHTDLNSSTEEPWRKQLSNSAQAYLGHLTGFIQDNCNKGLHKSQSSCLSGPNEEQPLFSTGSAQYHQATS

SEQ ID NO: 10211 - protein, 85 aa, Homo sapiens
TGIKKANEHLTLPSNSVPQGDADSHLSCHTATSGGQQGIMFTKESKPSKNRSLVPETSRHTGDTSNGCADVKGLSNHVHQLIADA

SEQ ID NO: 10212 - protein, 85 aa, Homo sapiens
VSSPNHGDSPNLLIADNPQLSALLIGKANGNVGTGTCDKVNNIHPAVHTKTDHSVASSPSSAISTATPSPKSTEQRSINSVTSLN

SEQ ID NO: 10213 - protein, 85 aa, Homo sapiens
SPHSGLHTVNGEGLGKSQSSTKVDLPLASHRSTSQILPSMSVSICPSSTEVLKACRNPGKNGLSNSCILLDKCPPPRPPTSPYPP

SEQ ID NO: 10214 - protein, 85 aa, Homo sapiens
MPKDKLNPPTPSIYLENKRDAFFPPLHQFCTNPKNPVTVIRGLAGALKLDLGLFSTKTLVEANNEHMVEVRTQLLQPADENWDPT

SEQ ID NO: 10215 - protein, 85 aa, Homo sapiens
GTKKIWRCESNRSHTTIAKYAQYQASSFQESLREENEKRTQHKDHSDNESTSSENSGRRRKGPFKTIKFGTNIDLSDNKKWKLQL

SEQ ID NO: 10216 - protein, 85 aa, Homo sapiens
HELTKLPAFARVVSAGNLLTHVGHTILGMNTVQLYMKVPGSRTPGHQENNNFCSVNINIGPGDCEWFVVPEDYWGVLNDFCEKNN

SEQ ID NO: 10217 - protein, 85 aa, Homo sapiens
MNFLMSSWWPNLEDLYEANVPVYRFIQRPGDLVWINAGTVHWVQAVGWCNNIAWNVGPLTACQYKLAVERYEWNKLKSVKSPVPM

SEQ ID NO: 10218 - protein, 85 aa, Homo sapiens
VHLSWNMARNIKVSDPKLFEMIKYCLLKILKQYQTLREALVAAGKEVIWHGRTNDEPAHYCSICEVEVFNLLFVTNESNTQKTYI

SEQ ID NO: 10219 - protein, 85 aa, Homo sapiens
DQNRDGFIDKEDLKDTYASLGKTNVKDDELDAMLKEASGPINFTMFLNLFGEKLSGTDAEETILNAFKMLDPDGKGKINKEYIKR

SEQ ID NO: 10220 - protein, 85 aa, Homo sapiens
FTMFLNLFGEKLSGTDAEETILNAFKMLDPDGKGKINKEYIKRLLMSQADKMTAEEVDQMFQFASIDVAGNLDYKALSYVITHGE

SEQ ID NO: 10221 - protein, 85 aa, Homo sapiens
MDERLQRHRTSGGDHAPDSPSGENSPAPQGRLAEVQDSSMPVPAQPKAGGSGSYWPARHSGARVILLVLYREHLNPNGHHFLTKE

SEQ ID NO: 10222 - protein, 85 aa, Homo sapiens
GSGSYWPARHSGARVILLVLYREHLNPNGHHFLTKEELLQRCAQKSPRVAPGSARPWPALRSLLHRNLVLRTHQPARYSLTPEGL

SEQ ID NO: 10223 - protein, 85 aa, Homo sapiens
PAQPKAGGSGSYWPARHSGARVILLVLYREHLNPNGHHFLTKEELLQRCAQKSPRVAPGSARPWPALRSLLHRNLVLRTHQPARY

SEQ ID NO: 10224 - protein, 85 aa, Homo sapiens
AAEEEAAAGGKVLREENQCIAPVVSSRVSPGTRPTAMGSFSSHMTEFPRKRKGSDSDPSQVEDGEHQVKMKAFREAHSQTEKRRR

SEQ ID NO: 10225 - protein, 85 aa, Homo sapiens
DKMNNLIEELSAMIPQCNPMARKLDKLTVLRMAVQHLRSLKGLTNSYVGSNYRPSFLQDNELRHLILKTAEGFLFVVGCERGKIL

SEQ ID NO: 10226 - protein, 85 aa, Homo sapiens
FVSKSVSKILNYDQASLTGQSLFDFLHPKDVAKVKEQLSSFDISPREKLIDAKTGLQVHSNLHAGRTRVYSGSRRSFFCRIKSCK

SEQ ID NO: 10227 - protein, 85 aa, Homo sapiens
ISVKEEHGCLPNSKKKEHRKFYTIHCTGYLRSWPPNIVGMEEERNSKKDNSNFTCLVAIGRLQPYIVPQNSGEINVKPTEFITRF

SEQ ID NO: 10228 - protein, 85 aa, Homo sapiens
AVNGKFVYVDQRATAILGYLPQELLGTSCYEYFHQDDHNNLTDKHKAVLQSKEKILTDSYKFRAKDGSFVTLKSQWFSFTNPWTK

SEQ ID NO: 10229 - protein, 85 aa, Homo sapiens
ELEYIVSVNTLVLGHSEPGEASFLPCSSQSSEESSRQSCMSVPGMSTGTVLGAGSIGTDIANEILDLQRLQSSSYLDDSSPTGLM

SEQ ID NO: 10230 - protein, 85 aa, Homo sapiens
KDTHTVNCRSMSNKELFPPSPSEMGELEATRQNQSTVAVHSHEPLLSDGAQLDFDALCDNDDTAMAAFMNYLEAEGGLGDPGDFS

SEQ ID NO: 10231 - protein, 85 aa, Homo sapiens
HMTEFPRKRKGSDSDPSQVEDGEHQVKMKAFREAHSQTEKRRRDKMNNLIEELSAMIPQCNPMARKLDKLTVLRMAVQHLRSLKG

SEQ ID NO: 10232 - protein, 85 aa, Homo sapiens
MTNSYVGSNYRPSFLQDNELRHLILKTAEGFLFVVGCERGKILFVSKSVSKILNYDQASLTGQSLFDFLHPKDVAKVKEQLSSFD

SEQ ID NO: 10233 - protein, 85 aa, Homo sapiens
ISPREKLIDAKTGLQVHSNLHAGRTRVYSGSRRSFFCRIKSCKISVKEEHGCLPNSKKKEHRKFYTIHCTGYLRSWPPNIVGMEE

SEQ ID NO: 10234 - protein, 85 aa, Homo sapiens
ERNSKKDNSNFTCLVAIGRLQPYIVPQNSGEINVKPTEFITRFAVNGKFVYVDQRATAILGYLPQELLGTSCYEYFHQDDHNNLT

SEQ ID NO: 10235 - protein, 85 aa, Homo sapiens
DKHKAVLQSKEKILTDSYKFRAKDGSFVTLKSQWFSFTNPWTKELEYIVSVNTLVLGHSEPGEASFLPCSSQSSEESSRQSCMSV

SEQ ID NO: 10236 - protein, 85 aa, Homo sapiens
PGMSTGTVLGAGSIGTDIANEILDLQRLQSSSYLDDSSPTGLMKDTHTVNCRSMSNKELFPPSPSEMGELEATRQNQSTVAVHSH

SEQ ID NO: 10237 - protein, 85 aa, Homo sapiens
ATNFLAHEKIWFDKFKYDDAERRFYEQMNGPVAGASRQSSGPGASSGTSGDHVVQELQQAISKLEARLNVLEKSSPGHRATAPQT

SEQ ID NO: 10238 - protein, 85 aa, Homo sapiens
QHVSPMRQVEPPAKKPATPAEDDEDDDIDLFGSDNEEEDKEAAQLREERLRQYAEKKAKKPALVAKSSILLDVKPWDDETDMAQL

SEQ ID NO: 10239 - protein, 85 aa, Homo sapiens
GASSGTSGDHVVQELQQAISKLEARLNVLEKSSPGHRATAPQTQHVSPMRQVEPPAKKPATPAEDDEDDDIDLFGSDNEEEDKEA

SEQ ID NO: 10240 - protein, 85 aa, Homo sapiens
STVKPLREPAPSEDVIDIKPEPDDLIDEDLNFVQENPLSQKKPTVTLTYGSSRPSIEIYRPPASRNADSGVHLNRLQFQQQQNSI

SEQ ID NO: 10241 - protein, 85 aa, Homo sapiens
HAAKQLDMQSSWVYETGRLCEPEVLNSLEETYSPFFRNNSEKMSMEDENFRKRKLPVVSSVVKVKKFNHDGEEEEEDDDYGSRTG

SEQ ID NO: 10242 - protein, 85 aa, Homo sapiens
SISSSVSVPAKPERRPSLPPSKQANKNLILKAISEAQESVTKTTNYSTVPQKQTLPVAPRTRTSQEELLAEVVQGQSRTPRISPP

SEQ ID NO: 10243 - protein, 85 aa, Homo sapiens
IKEEETKGDSVEKNQAEMSELSVAQKPEKLLERCKYWPACKNGDECAYHHPISPCKAFPNCKFAEKCLFVHPNCKYDAKCTKPDC

SEQ ID NO: 10244 - protein, 84 aa, Homo sapiens
TKPDCPFTHVSRRIPVLSPKPAPPSSSQLCRYFPACKKMECPFYHPKHCRFNTQCTRPDCTFYHPTINVPPRHALKWIRPQTSE

SEQ ID NO: 10245 - protein, 85 aa, Homo sapiens
PTVTLTYGSSRPSIEIYRPPASRNADSGVHLNRLQFQQQQNSIHAAKQLDMQSSWVYETGRLCEPEVLNSLEETYSPFFRNNSEK

SEQ ID NO: 10246 - protein, 85 aa, Homo sapiens
MSMEDENFRKRKLPVVSSVVKVKKFNHDGEEEEEDDDYGSRTGSISSSVSVPAKPERRPSLPPSKQANKNLILKAISEAQESVTK

SEQ ID NO: 10247 - protein, 85 aa, Homo sapiens
TTNYSTVPQKQTLPVAPRTRTSQEELLAEVVQGQSRTPRISPPIKEEETKGDSVEKNQAEMSELSVAQKPEKLLERCKYWPACKN

SEQ ID NO: 10248 - protein, 85 aa, Homo sapiens
GDECAYHHPISPCKAFPNCKFAEKCLFVHPNCKYDAKCTKPDCPFTHVSRRIPVLSPKPAPPSSSQLCRYFPACKKMECPFYHPK

SEQ ID NO: 10249 - protein, 84 aa, Homo sapiens
CGVSYLILHEFKAMEEKVKAMEKEMKFYQGSVDREKRLQEKLHSLSQELEQYKIDNKSKTERLSMFFFSIIYLVERQLQEINTL

SEQ ID NO: 10250 - protein, 6 aa, Homo sapiens
YILLWN

SEQ ID NO: 10251 - protein, 85 aa, Homo sapiens
SDFLLEAAKLANYAKYQRLCDTLFVIFSAVFMVTRLGIYPFWILNTTLFESWEIIGPYASWWLLNGLLLTLQLLHVIWSYLIARI

SEQ ID NO: 10252 - protein, 4 aa, Homo sapiens
HVST

SEQ ID NO: 10253 - protein, 7 aa, Homo sapiens
EKFMFGM

SEQ ID NO: 10254 - protein, 84 aa, Homo sapiens
IATSRNGQYVACGSNCGVVNIYNQDSCLQETNPKPIKAIMNLVTGVTSLTFNPTTEILAIASEKMKEAVRLACCLNRTEAILGF

SEQ ID NO: 10255 - protein, 85 aa, Homo sapiens
NYEGSPIKVTLATLKMSVQPTVSLGGFEITPPVVLRLKCGSGPVHISGQHLVAVEEDAESEDEEEEDVKLLSISGKRSAPGGGSK

SEQ ID NO: 10256 - protein, 85 aa, Homo sapiens
VPQKKVKLAADEDDDDDDEEDDDEDDDDDDFDDEEAEEKAPVKKSIRDTPAKNAQKSNQNGKDSKPSSTPRSKGQESFKKQEKTP

SEQ ID NO: 10257 - protein, 85 aa, Homo sapiens
PVHISGQHLVAVEEDAESEDEEEEDVKLLSISGKRSAPGGGSKVPQKKVKLAADEDDDDDDEEDDDEDDDDDDFDDEEAEEKAPV

SEQ ID NO: 10258 - protein, 85 aa, Homo sapiens
KKSIRDTPAKNAQKSNQNGKDSKPSSTPRSKGQESFKKQEKTPKTPKGPSSVEDIKAKMQASIEKGGSLPKVEAKFINYVKNCFR

SEQ ID NO: 10259 - protein, 85 aa, Homo sapiens
PHIDNDVKLDFKDVLLRPKRSTLKSRSEVDLTRSFSFRNSKQTYSGVPIIAANMDTVGTFEMAKFSLFTAVHKHYSLVQWQEFAG

SEQ ID NO: 10260 - protein, 85 aa, Homo sapiens
SLFTAVHKHYSLVQWQEFAGQNPDCLEHLAASSGTGSSDFEQLEQILEAIPQVKYICLDVANGYSEHFVEFVKDVRKRFPQHTIM

SEQ ID NO: 10261 - protein, 85 aa, Homo sapiens
TYSGVPIIAANMDTVGTFEMAKFSLFTAVHKHYSLVQWQEFAGQNPDCLEHLAASSGTGSSDFEQLEQILEAIPQVKYICLDVAN

SEQ ID NO: 10262 - protein, 85 aa, Homo sapiens
PVYVFDGKPPQLKSGELAKRSERRAEAEKQLQQAQAAGAEQEVEKFTKRLVKVTKQHNDECKHLLSLMGIPYLDAPSEAEASCAA

SEQ ID NO: 10263 - protein, 84 aa, Homo sapiens
SSTAPLGPGAAGPGTGVPAVSGALRELLEACRNGDVSRVKRLVDAANVNAKDMAGRKSSPLHFAAGQRLLNCLLRVMGLGAGSG

SEQ ID NO: 10264 - protein, 85 aa, Homo sapiens
EAYEQVQKGPLKLKGVAELGVTKRKKKKKDKDKAKLLEAMGTSKKNEEEKRRGLDKRTPAQAAFEKMQEKRDFNRHLDTLTEHYD

SEQ ID NO: 10265 - protein, 84 aa, Homo sapiens
PLKLKGVAELGVTKRKKKKKDKDKAKLLEAMGTSKKNEEEKRRGLDKRTPAQAAFEKMQEKRDFNRHLDTLTEHYDIPKVSWTK

SEQ ID NO: 10266 - protein, 85 aa, Homo sapiens
ASKPAAGKSRGEKRKRVVLTLKEKIDICTRLEKGESRKALMQEYNVGMSTLYDIRAHKAQLLRFFASSDSNKALEQRRTLHTPKL

SEQ ID NO: 10267 - protein, 85 aa, Homo sapiens
EHLDRVLYEWFLGKRSEGVPVSGPMLIEKAKDFYEQMQLTEPCVFSGGWLWRFKARHGIKKLDASSEKQSADHQAAEQFCAFFRS

SEQ ID NO: 10268 - protein, 85 aa, Homo sapiens
MAAEHGLSAEQVYNADETGLFWRCLPNPTPEGGAVPGPKQGKDRLTVLMCANATGSHRLKPLAIGKCSGPRAFKGIQHLPVAYKA

SEQ ID NO: 10269 - protein, 85 aa, Homo sapiens
QGNAWVDKEIFSDWFHHIFVPSVREHFRTIGLPEDSKAVLLLDSSRAHPQEAELVSSNVFTIFLPASVASLVQPMEQGIRRDFMR

SEQ ID NO: 10270 - protein, 85 aa, Homo sapiens
NFINPPVPLQGPHARYNMNDAIFSVACAWNAVPSHVFRRAWRKLWPSVAFAEGSSSEEELEAECFPVKPHNKSFAHILELVKEGS

SEQ ID NO: 10271 - protein, 85 aa, Homo sapiens
SCPGQLRQRQAASWGVAGREAEGGRPPAATSPAEVVWSSEKTPKADQDGRGDPGEGEEVAWEQAAVAFDAVLRFAERQPCFSAQE

SEQ ID NO: 10272 - protein, 84 aa, Homo sapiens
QDGRGDPGEGEEVAWEQAAVAFDAVLRFAERQPCFSAQEVGQLRALRAVFRSQQQETVGLEDVVVTSPEELAIPKCCLEASTET

SEQ ID NO: 10273 - protein, 85 aa, Homo sapiens
EYNVGMSTLYDIRAHKAQLLRFFASSDSNKALEQRRTLHTPKLEHLDRVLYEWFLGKRSEGVPVSGPMLIEKAKDFYEQMQLTEP

SEQ ID NO: 10274 - protein, 85 aa, Homo sapiens
CVFSGGWLWRFKARHGIKKLDASSEKQSADHQAAEQFCAFFRSLAAEHGLSAEQVYNADETGLFWRCLPNPTPEGGAVPGPKQGK

SEQ ID NO: 10275 - protein, 85 aa, Homo sapiens
DRLTVLMCANATGSHRLKPLAIGKCSGPRAFKGIQHLPVAYKAQGNAWVDKEIFSDWFHHIFVPSVREHFRTIGLPEDSKAVLLL

SEQ ID NO: 10276 - protein, 85 aa, Homo sapiens
DSSRAHPQEAELVSSNVFTIFLPASVASLVQPMEQGIRRDFMRNFINPPVPLQGPHARYNMNDAIFSVACAWNAVPSHVFRRAWR

SEQ ID NO: 10277 - protein, 85 aa, Homo sapiens
KLWPSVAFAEGSSSEEELEAECFPVKPHNKSFAHILELVKEGSSCPGQLRQRQAASWGVAGREAEGGRPPAATSPAEVVWSSEKT

SEQ ID NO: 10278 - protein, 85 aa, Homo sapiens
PKADQDGRGDPGEGEEVAWEQAAVAFDAVLRFAERQPCFSAQEVGQLRALRAVFRSQQQETVGLEDVVVTSPEELAIPKCCLEAS

SEQ ID NO: 10279 - protein, 85 aa, Homo sapiens
KRVLSCVPEPTVVMAARALCMLGLVLALLSSSSAEEYVGLSANQCAVPAKDRVDCGYPHVTPKECNNRGCCFDSRIPGVPWCFKP

SEQ ID NO: 10280 - protein, 84 aa, Homo sapiens
PTVVMAARALCMLGLVLALLSSSSAEEYVGLSANQCAVPAKDRVDCGYPHVTPKECNNRGCCFDSRIPGVPWCFKPLQEAECTF

SEQ ID NO: 10281 - protein, 85 aa, Homo sapiens
LLALCLKKIKAPLSKVRLVDAGFVWTEPHSKRLKVKLTIQKEVMNGAILQQVFVVDYVVQSQMCGDCHRVEAKDFWKAVIQVRQK

SEQ ID NO: 10282 - protein, 43 aa, Homo sapiens
RKADGQSTTLPRGTSRRMCSFPPQDPPVLRTCTAKPSSTSNQY

SEQ ID NO: 10283 - protein, 85 aa, Homo sapiens
CDKLRHDGYRSSQYYSQGPTFAANASPFCDDYQDEDEETDQKCSLSSSEEERFISIRRPKTPASSDFSDLNTQTNWTKSLPLPTP

SEQ ID NO: 10284 - protein, 83 aa, Homo sapiens
GNAISCGMMATAVLSTTLRDPPLRPTPAHSVMITKMKMKKQIKSVLCLHQKKKDLFPSGDLKHQPQVTSPTLILRRTGPSRFH

SEQ ID NO: 10285 - protein, 85 aa, Homo sapiens
SWLDPRLDPRFAMNQRISQSAPVKQPPPLAPQSPQGGVMGGSNSNQQQQMRLQQLQMEKERLRLKQQELLRQELALRSQLPTLEQ

SEQ ID NO: 10286 - protein, 85 aa, Homo sapiens
DGGTQNPVSSPGMSQELRTMTTNSSDPFLNSGTYHSRDESTDSGLSMSSYSVPRTPDDFLNSVDEMDTGDTINQSTLPSQQNRFP

SEQ ID NO: 10287 - protein, 85 aa, Homo sapiens
NSNQQQQMRLQQLQMEKERLRLKQQELLRQELALRSQLPTLEQDGGTQNPVSSPGMSQELRTMTTNSSDPFLNSGTYHSRDESTD

SEQ ID NO: 10288 - protein, 85 aa, Homo sapiens
SGLSMSSYSVPRTPDDFLNSVDEMDTGDTINQSTLPSQQNRFPDYLEAIPGTNVDLGTLEGDGMNIEGEELMPSLQEALSSDILN

SEQ ID NO: 10289 - protein, 84 aa, Homo sapiens
HLDPQKKRYSKKDACELIERYLNRFSSELEQIELHNSIRDRQGRRHCSRETVIKQTMERERQQFEGYGLEIPDILNASNLKTFR

SEQ ID NO: 10290 - protein, 85 aa, Homo sapiens
CEAAAGNPQPSYRWFKDGKELNRSRDIRIKYGNGRKNSRLQFNKVKVEDAGEYVCEAENILGKDTVRGRLYVNSEAEELYQKRVL

SEQ ID NO: 10291 - protein, 85 aa, Homo sapiens
TITGICVALLVVGIVCVVAYCKTKKQRKQMHNHLRQNMCPAHQNRSLANGPSHPRLDPEEIQMADYISKNVPATDHVIRRETETT

SEQ ID NO: 10292 - protein, 85 aa, Homo sapiens
FSGSHSCSPSHHCSTATPTSSHRHESHTWSLERSESLTSDSQSGIMLSSVGTSKCNSPACVEARARRAAAYNLEERRRATAPPYH

SEQ ID NO: 10293 - protein, 85 aa, Homo sapiens
DSVDSLRDSPHSERYVSALTTPARLSPVDFHYSLATQVPTFEITSPNSAHAVSLPPAAPISYRLAEQQPLLRHPAPPGPGPGPGP

SEQ ID NO: 10294 - protein, 85 aa, Homo sapiens
GPGPGADMQRSYDSYYYPAAGPGPRRGTCALGGSLGSLPASPFRIPEDDEYETTQECAPPPPPRPRARGASRRTSAGPRRWRRSR

SEQ ID NO: 10295 - protein, 85 aa, Homo sapiens
LNGLAAQRARAARDSLSLSSGSGGGSASASDDDADDADGALAAESTPFLGLRGAHDALRSDSPPLCPAADSRTYYSLDSHSTRAS

SEQ ID NO: 10296 - protein, 85 aa, Homo sapiens
NKVKVEDAGEYVCEAENILGKDTVRGRLYVNSEAEELYQKRVLTITGICVALLVVGIVCVVAYCKTKKQRKQMHNHLRQNMCPAH

SEQ ID NO: 10297 - protein, 85 aa, Homo sapiens
QNRSLANGPSHPRLDPEEIQMADYISKNVPATDHVIRRETETTFSGSHSCSPSHHCSTATPTSSHRHESHTWSLERSESLTSDSQ

SEQ ID NO: 10298 - protein, 85 aa, Homo sapiens
SGIMLSSVGTSKCNSPACVEARARRAAAYNLEERRRATAPPYHDSVDSLRDSPHSERYVSALTTPARLSPVDFHYSLATQVPTFE

SEQ ID NO: 10299 - protein, 85 aa, Homo sapiens
ITSPNSAHAVSLPPAAPISYRLAEQQPLLRHPAPPGPGPGPGPGPGPGADMQRSYDSYYYPAAGPGPRRGTCALGGSLGSLPASP

SEQ ID NO: 10300 - protein, 85 aa, Homo sapiens
FRIPEDDEYETTQECAPPPPPRPRARGASRRTSAGPRRWRRSRLNGLAAQRARAARDSLSLSSGSGGGSASASDDDADDADGALA

SEQ ID NO: 10301 - protein, 84 aa, Homo sapiens
SGKTLVFTLPVIMFCLEQEKRLPFSKREGPYGLIICPSRELARQTHGILEYYCRLLQEDSSPLLRCALCIGGMSVKEQMETIRQ

SEQ ID NO: 10302 - protein, 84 aa, Homo sapiens
TFCITSSGLLCEFSDRRLLDKWVELRTTVAHCISVSQDYIFCGCADGTVRLFNPSNLHFLSTLPRPHALGTDIASVTEARSTPR

SEQ ID NO: 10303 - protein, 84 aa, Homo sapiens
PSIVISEANKQHVRCQKCLEFGHWTYECTGKRKYLHRPSRTAELKKALKEKENRLLLQQRSFFPPRVYQHWRNQCRKKGQEKKV

SEQ ID NO: 10304 - protein, 85 aa, Homo sapiens
VSISCLVIRPPRPPKVLGLQEGQENVEILPSGERPQANQKRITTPYMTKYERARVLGTRALQIAMCAPVMVELEGETDPLLIAMK

SEQ ID NO: 10305 - protein, 85 aa, Homo sapiens
EILPSGERPQANQKRITTPYMTKYERARVLGTRALQIAMCAPVMVELEGETDPLLIAMKELKARKIPIIIRRYLPDGSYEDWGVD

SEQ ID NO: 10306 - protein, 84 aa, Homo sapiens
LPALRFIATPRLSAMPHIDNDVKLDFKDVLLRPKRSTLKSRSEVDLTRSFSFRNSKQTYSGVPIIAANMDTVGTFEMAKVLCKS

SEQ ID NO: 10307 - protein, 84 aa, Homo sapiens
GSELKQKIHSITGLPPAMQKVMYKGLVPEDKTLREIKVTSGAKIMVVGSTINDVLAVNTPKDAAQQDAKAEENKKEPLCRQKGP

SEQ ID NO: 10308 - protein, 85 aa, Homo sapiens
APKDRKPKRSTWRFNLDLTHPVEDGIFDSGNFEQFLREKVKVNGKTGNLGNVVHIERFKNKITVVSEKQFSKRYLKYLTKKYLKK

SEQ ID NO: 10309 - protein, 84 aa, Homo sapiens
MTAEEGVQLSQQNAKDFFRVLNLNKKCDTSKHKVLVVSVCPQSLPYFAAKFNLSVTDASRRLCGFLKSLGMLPFPSSLQACRFP

SEQ ID NO: 10310 - protein, 85 aa, Homo sapiens
ASSLNEDPEGSRITYVKGDLFACPKTDSLAHCISEDCRMGAGIAVLFKKKFGGVQELLNQREFWKPLTWFALARAPFNLLHFNKI

SEQ ID NO: 10311 - protein, 84 aa, Homo sapiens
LNEDPEGSRITYVKGDLFACPKTDSLAHCISEDCRMGAGIAVLFKKKFGGVQELLNQREFWKPLTWFALARAPFNLLHFNKICV

SEQ ID NO: 10312 - protein, 85 aa, Homo sapiens
GLGPADLALLGLSAERVWLDKSLFDQAESSYRQKLADVAAQAAWPPALAPWGLCTHGNQVACHHVTWGIWVNKSSFDQAERAFVE

SEQ ID NO: 10313 - protein, 84 aa, Homo sapiens
MRVLGSMCQRLRSMQYNGSYFDRGAKGGSRLCTPEGWFSCQGPFDMDSCLSRHSINPYSNRESRILFSTWNLDHIDGVLLCGPG

SEQ ID NO: 10314 - protein, 85 aa, Homo sapiens
KCSRKTLFYLIATLNESFRPDYDFSTARSHEFSREPSLSWVVNAVNCSLFSAVREDFKDLKPQLWNAVDEEICLAECDIYRWAGI

SEQ ID NO: 10315 - protein, 85 aa, Homo sapiens
PADGLQASRFVGHLAPHTTCHPILPSYNPDLDSDPFGEDGSLWSFNYFFYNKRLKRIVFFSCRSISGSTYTPSEAGNELDMELGE

SEQ ID NO: 10316 - protein, 85 aa, Homo sapiens
NAVNCSLFSAVREDFKDLKPQLWNAVDEEICLAECDIYRWAGIPADGLQASRFVGHLAPHTTCHPILPSYNPDLDSDPFGEDGSL

SEQ ID NO: 10317 - protein, 85 aa, Homo sapiens
RGHGTYMGEEKLIASVAGSVERVNKLICVKALKTRYIGEVGDIVVGRITEVQQKRWKVETNSRLDSVLLLSSMNLPGGELRRRSA

SEQ ID NO: 10318 - protein, 85 aa, Homo sapiens
EDELAMRGFLQEGDLISGVLVQVSPSLVKRQKTHFHDLPCGASVILGNNGFIWIYPTPEHKEEEAGGFIANLEPVSLADREVISR

SEQ ID NO: 10319 - protein, 85 aa, Homo sapiens
KTHFHDLPCGASVILGNNGFIWIYPTPEHKEEEAGGFIANLEPVSLADREVISRLRNCIISLVTQRMMLYDTSILYCYEASLPHQ

SEQ ID NO: 10320 - protein, 85 aa, Homo sapiens
IVVGRITEVQQKRWKVETNSRLDSVLLLSSMNLPGGELRRRSAEDELAMRGFLQEGDLISGVLVQVSPSLVKRQKTHFHDLPCGA

SEQ ID NO: 10321 - protein, 85 aa, Homo sapiens
KTRRRCKTVRVDPDSQNHSEIKISNPTEFQNHEKQESQDLRATAKVPSPPDEHQEAENAVSSGNRDSKVPSEGKKSLYTDESSKP

SEQ ID NO: 10322 - protein, 85 aa, Homo sapiens
GKNKRTAITTPNFKKLHEAHFKEMESIDQYIERKKKHFEEHNSMNELKQPINKGGVRTPVPPRGRLSVASTPISQRRSQGRSCGP

SEQ ID NO: 10323 - protein, 85 aa, Homo sapiens
ASQSTLGLKGSLKRSAISAAKTGVRFSAATKDNEHKRSLTKTPARKSAHVTVSGGTPKGEAVLGTHKLKTITGNSAAVITPFKLT

SEQ ID NO: 10324 - protein, 85 aa, Homo sapiens
TEATQTPVSNKKPVFDLKASLSRPLNYEPHKGKLKPWGQSKENNYLNQHVNRINFYKKTYKQPHLQTKEEQRKKREQERKEKKAK

SEQ ID NO: 10325 - protein, 85 aa, Homo sapiens
KHEARKGNENQDESQTSASSCDETEIQISNQEEAERQPLGHVTKTRRRCKTVRVDPDSQNHSEIKISNPTEFQNHEKQESQDLRA

SEQ ID NO: 10326 - protein, 85 aa, Homo sapiens
TAKVPSPPDEHQEAENAVSSGNRDSKVPSEGKKSLYTDESSKPGKNKRTAITTPNFKKLHEAHFKEMESIDQYIERKKKHFEEHN

SEQ ID NO: 10327 - protein, 85 aa, Homo sapiens
SMNELKQPINKGGVRTPVPPRGRLSVASTPISQRRSQGRSCGPASQSTLGLKGSLKRSAISAAKTGVRFSAATKDNEHKRSLTKT

SEQ ID NO: 10328 - protein, 85 aa, Homo sapiens
PARKSAHVTVSGGTPKGEAVLGTHKLKTITGNSAAVITPFKLTTEATQTPVSNKKPVFDLKASLSRPLNYEPHKGKLKPWGQSKE

SEQ ID NO: 10329 - protein, 84 aa, Homo sapiens
SGLVECEDQDPLNPDRSFDVESVKKEIQRGRKLKCKFCHKRGATVGCDLKNCNKNYHFFCAKKDDAVPQSDGVRGIYKYLIKHF

SEQ ID NO: 10330 - protein, 85 aa, Homo sapiens
ENEPLPPEILEVILSEWWLKEPIRSTGFILDGFPRYPEEAQFLGDRGFFPDAAVFIQVDDQDIFDRLLPAQIEKWKLKQKKKLER

SEQ ID NO: 10331 - protein, 85 aa, Homo sapiens
KKLIKDMKAKIRVDTIAKRRAELILERDKKRREPNKEKRKRGISENTTCYKCNHMSPWCEYAGLPYRGLLILYSATATATAGTKH

SEQ ID NO: 10332 - protein, 84 aa, Homo sapiens
ELILERDKKRREPNKEKRKRGISENTTCYKCNHMSPWCEYAGLPYRGLLILYSATATATAGTKHCRSGAKVIVALSKQNIHNQK

SEQ ID NO: 10333 - protein, 85 aa, Homo sapiens
MGDRGFFPDAAVFIQVDDQDIFDRLLPAQIEKWKLKQKKKLERKKLIKDMKAKIRVDTIAKRRAELILERDKKRREPNKEKRKRG

SEQ ID NO: 10334 - protein, 85 aa, Homo sapiens
HHISTPLVSKALSNRGQHSISYTLSRSHSVIVEYTHDSDTDMFQIGRSTENMIDFVVTDTSPGGGAAEGPSAQSTISRYACRILC

SEQ ID NO: 10335 - protein, 85 aa, Homo sapiens
DRRPPYTARIYAAGFDASSNIFLGERAAKWRTPDGLMDGLTTNGVLVMHPAGGFSEDSAPGVWREISVCGNVYTLRDSRSAQQRG

SEQ ID NO: 10336 - protein, 85 aa, Homo sapiens
GKLVENESNVLQDGSLIDLCGATLLWRTPAGLLRAPTLKQLEAQRQEANAARPQCPVGLSTLAFPSPARGRTAPDKQQPWVYVRC

SEQ ID NO: 10337 - protein, 85 aa, Homo sapiens
FQIGRSTENMIDFVVTDTSPGGGAAEGPSAQSTISRYACRILCDRRPPYTARIYAAGFDASSNIFLGERAAKWRTPDGLMDGLTT

SEQ ID NO: 10338 - protein, 85 aa, Homo sapiens
NGVLVMHPAGGFSEDSAPGVWREISVCGNVYTLRDSRSAQQRGKLVENESNVLQDGSLIDLCGATLLWRTPAGLLRAPTLKQLEA

SEQ ID NO: 10339 - protein, 85 aa, Homo sapiens
RRRTRRRHSCGRSGYGSTRRRRPRSLHWWPSPPSCWMSSLGMMRRTWPSWRPVCALSSWTGWSGGLPSWCPWATVSGSYRFSVWW

SEQ ID NO: 10340 - protein, 84 aa, Homo sapiens
SSILLDVKPWDDETDMAQLEACVRSIQLDGLVWGASKLVPVGYGIRKLQIQCVVEDDKVGTDLLEEEITKFEEHSVDIAAFNKI

SEQ ID NO: 10341 - protein, 85 aa, Homo sapiens
LKVTVPSCSASSCSSVTASAAPGTASLVPDYWIDGSNRDALSDFFEVESELGRGATSIVYRCKQKGTQKPYALKVLKKTDCGKGI

SEQ ID NO: 10342 - protein, 84 aa, Homo sapiens
TVPSCSASSCSSVTASAAPGTASLVPDYWIDGSNRDALSDFFEVESELGRGATSIVYRCKQKGTQKPYALKVLKKTDCGKGILQ

SEQ ID NO: 10343 - protein, 85 aa, Homo sapiens
ATPMHRLIARRQAEANKQHVRCQKCLEFGHWTYECTGKRKYLHRPSRTAELKKALKEKENRLLLQQRSKSVTSSSSSSSDSSASD

SEQ ID NO: 10344 - protein, 85 aa, Homo sapiens
HRPSRTAELKKALKEKENRLLLQQRSKSVTSSSSSSSDSSASDSSSESEETSTSSSSEDSDTDESSSSSSSSASSTTSSSSSDSD

SEQ ID NO: 10345 - protein, 85 aa, Homo sapiens
AKLANYAKYQRLCDTLFVIFSAVFMVTRLGIYPFCFSVLFYSTFANRTQEPYCPAFTLACADLLWTLIGPLLPQTVFLARSDPDS

SEQ ID NO: 10346 - protein, 84 aa, Homo sapiens
LCDTLFVIFSAVFMVTRLGIYPFCFSVLFYSTFANRTQEPYCPAFTLACADLLWTLIGPLLPQTVFLARSDPDSEYPAWLASQD

SEQ ID NO: 10347 - protein, 85 aa, Homo sapiens
FLIMFVHHLVTIGLISFSYINNMVRVGTLIMCLHDVSDFLLEAAKLANYAKYQRLCDTLFVIFSAVFMVTRLGIYPFCFSVLFYS

SEQ ID NO: 10348 - protein, 85 aa, Homo sapiens
EGPAMNGPGQDDPEDADEAEAPDGGSRRDPRKSQDSRKPLQKKRKRSPKSGLGPADLALLGLSAERVWLDKSLFDQAESSYRQKL

SEQ ID NO: 10349 - protein, 85 aa, Homo sapiens
MSDTPAPKRKRSPPLGGAPSPSSLSLPPSTGFPLQASGVPSPYLSSLASSRYPPFPSDYLALQLPEPSPLRPKREKRPRLPRKLK

SEQ ID NO: 10350 - protein, 84 aa, Homo sapiens
TPAPKRKRSPPLGGAPSPSSLSLPPSTGFPLQASGVPSPYLSSLASSRYPPFPSDYLALQLPEPSPLRPKREKRPRLPRKLKVP

SEQ ID NO: 10351 - protein, 6 aa, Homo sapiens
MGSRIQ

SEQ ID NO: 10352 - protein, 84 aa, Homo sapiens
DVLVTCSRDSTARIWDVRTKASVHTLSGHTNAVATVRCQAAEPQIITGSHDTTIRLWDLVAGKTRVTLTNHKKSVRAVVLHPRQ

SEQ ID NO: 10353 - protein, 9 aa, Homo sapiens
CVKGLISSL

SEQ ID NO: 10354 - protein, 85 aa, Homo sapiens
GVHVCGEGGEYETFTLDCPLFKKKIIVDSSEVVIHSADAFAPVAYLRFLELHLEDKCLTTTEHLIIYIIFEKCFGTLFIKPPFLY

SEQ ID NO: 10355 - protein, 17 aa, Homo sapiens
ILISILGKPWIKWSLIS

SEQ ID NO: 10356 - protein, 85 aa, Homo sapiens
QRGLDSETKKQLEEEEKKIISEEHWSFIIEEQSFLLCEDLLYGRMSFRGFNPEVEKLMLQMNAKHKAEEVEDETVELDVSDEEMA

SEQ ID NO: 10357 - protein, 85 aa, Homo sapiens
GRMSFRGFNPEVEKLMLQMNAKHKAEEVEDETVELDVSDEEMARRYETLVGTIGKKFARKRDHANYEEDENGDITPIKAKKMFLK

SEQ ID NO: 10358 - protein, 59 aa, Homo sapiens
LVLNVNRVLPVRIFLLSISRHCTRNPQRRKNLSARTVGRNSQLSRLCKDMFFSAQRKAV

SEQ ID NO: 10359 - protein, 84 aa, Homo sapiens
VLQCTAKSSLKESSRSFQCSVCNSSFSSASSFEQHQETCRGDARFVCKADSCGKRLKSKDALKRHQENVHTVLVHGKVKGLFYI

SEQ ID NO: 10360 - protein, 17 aa, Homo sapiens
LSRLCKDMFFSAQRKAV

SEQ ID NO: 10361 - protein, 85 aa, Homo sapiens
PGSAACGTPCCSDTELEAICPHYQQPDCDTRTEDKEFLHKEDIHEDLESQAEISENYAGDVSQVPELGDLCDDVSERDWGVPEGR

SEQ ID NO: 10362 - protein, 84 aa, Homo sapiens [sequence omitted]

SEQ ID NO: 10363 - protein, 85 aa, Homo sapiens
AGRASSKDWKRSIRYAGRPLQCLIQDGILNPHAASCTCAACCDDMTLSGPVRLFVPYKRRKKENELPTTPVKKDSPKNITLLPAT

SEQ ID NO: 10364 - protein, 85 aa, Homo sapiens
AATTFTVTPSGQITTSGALTFDRASTVEATAVISESPAQGDVFAGATVQEASVQPPCRASHPEPHYPGYQDSCQIAPFPEAALPT

SEQ ID NO: 10365 - protein, 85 aa, Homo sapiens
SHPKIVLTSLPALAVPPPTPTKAAPPALVNGLELSEPRSWLYLEEMVNSLLNTAQQLKTLFEQAKHASTYREAATNQAKIHADAE

SEQ ID NO: 10366 - protein, 84 aa, Homo sapiens
KHASTYREAATNQAKIHADAERKEQSCVNCGREAMSECTGCHKVNYCSTFCQRKRWSLTMLTSLVSISWLRAILPCQPPKVLGL

SEQ ID NO: 10367 - protein, 85 aa, Homo sapiens
DDMTLSGPVRLFVPYKRRKKENELPTTPVKKDSPKNITLLPATAATTFTVTPSGQITTSGALTFDRASTVEATAVISESPAQGDV

SEQ ID NO: 10368 - protein, 85 aa, Homo sapiens
FAGATVQEASVQPPCRASHPEPHYPGYQDSCQIAPFPEAALPTSHPKIVLTSLPALAVPPPTPTKAAPPALVNGLELSEPRSWLY

SEQ ID NO: 10369 - protein, 85 aa, Homo sapiens
LEEMVNSLLNTAQQLKTLFEQAKHASTYREAATNQAKIHADAERKEQSCVNCGREAMSECTGCHKVNYCSTFCQRKRWSLTMLTS

SEQ ID NO: 10370 - protein, 85 aa, Homo sapiens
RRIRVDYSITKRAHTPTPGIYMGRPTHSGGGGGGGGGGGGGGGGRRRDSYYDRGYDRGYDRYEDYDYRYRRRSPSPYYSRYRSRS

SEQ ID NO: 10371 - protein, 85 aa, Homo sapiens
MNSSMSSGSGSLRTSEKRSLYVRALFDYDRTRDSCLPSQGLSFSYGDILHVINASDDEWWQARLVTPHGESEQIGVIPSKKRVEK

SEQ ID NO: 10372 - protein, 85 aa, Homo sapiens
KERARLKTVKFHARTGMIESNRSIKTKRKKSFRLSRKFPFYKSKENMAQESSIQEQGVTSNTSDSESSSKGQEDAILSYEPVTRQ

SEQ ID NO: 10373 - protein, 85 aa, Homo sapiens
EIHYARPVIILGPMKDRVNDDLISEFPHKFGSCVPHTTRPRRDNEVDGQDYHFVVSREQMEKDIQDNKFIEAGQFNDNLYGTSIQ

SEQ ID NO: 10374 - protein, 85 aa, Homo sapiens
SVRAVAERGKHCILDVSGNAIKRLQQAQLYPIAIFIKPKSIEALMEMNRRQTYEQANKIYDKAMKLEQEFGEYFTAIVQGDSLEE

SEQ ID NO: 10375 - protein, 85 aa, Homo sapiens
FSYGDILHVINASDDEWWQARLVTPHGESEQIGVIPSKKRVEKKERARLKTVKFHARTGMIESNRSIKTKRKKSFRLSRKFPFYK

SEQ ID NO: 10376 - protein, 85 aa, Homo sapiens
SKENMAQESSIQEQGVTSNTSDSESSSKGQEDAILSYEPVTRQEIHYARPVIILGPMKDRVNDDLISEFPHKFGSCVPHTTRPRR

SEQ ID NO: 10377 - protein, 85 aa, Homo sapiens
DNEVDGQDYHFVVSREQMEKDIQDNKFIEAGQFNDNLYGTSIQSVRAVAERGKHCILDVSGNAIKRLQQAQLYPIAIFIKPKSIE

SEQ ID NO: 10378 - protein, 85 aa, Homo sapiens
SARGEGAGQPSTSAQGQPAAPAPQKRGRGRPRKQQQEPTGEPSPKRPRGRPKGSKNKSPSKAAQKKAEATGEKRPRGRPRKWLRA

SEQ ID NO: 10379 - protein, 84 aa, Homo sapiens
AAPAPQKRGRGRPRKQQQEPTGEPSPKRPRGRPKGSKNKSPSKAAQKKAEATGEKRPRGRPRKWLRAQALDSDGLGSNSGPSLS

SEQ ID NO: 10380 - protein, 84 aa, Homo sapiens
KVTIPSTFAAVTIKETLNANINSTNFAPDENQLEFILMVLIPLILLVLLLLSVVFLATYYKRKRTKQEPSSQGSQSALQTYLLV

SEQ ID NO: 10381 - protein, 84 aa, Homo sapiens [sequence omitted]

SEQ ID NO: 10382 - protein, 84 aa, Homo sapiens
MQLVCNALLAQEDPLPLAFFVHDAEIVSSLGKTLESQAVETEKVLDIIYQPQAIFRVRAVTRCTSSLEGHSEAVISVAFSPTGK

SEQ ID NO: 10383 - protein, 85 aa, Homo sapiens
RQFLWSFRLPGEAQKIDRMMEAFAQRYCQCNNGVFQSTDTCYVLSFAIIMLNTSLHNPNVKDKPTVERFIAMNRGINDGGDLPEE

SEQ ID NO: 10384 - protein, 85 aa, Homo sapiens
LLRNLYESIKNEPFKIPEDDGNDLTHTFFNPDREGWLLKLGGGRVKTWKRRWFILTDNCLYYFEYTTDKEPRGIIPLENLSIREV

SEQ ID NO: 10385 - protein, 85 aa, Homo sapiens
KGEGLNKTAIGDYLGERDEFNIQVLHAFVELHEFTDLNLVQALRQFLWSFRLPGEAQKIDRMMEAFAQRYCQCNNGVFQSTDTCY

SEQ ID NO: 10386 - protein, 85 aa, Homo sapiens
VLSFAIIMLNTSLHNPNVKDKPTVERFIAMNRGINDGGDLPEELLRNLYESIKNEPFKIPEDDGNDLTHTFFNPDREGWLLKLGG

SEQ ID NO: 10387 - protein, 85 aa, Homo sapiens
GRVKTWKRRWFILTDNCLYYFEYTTDKEPRGIIPLENLSIREVEDSKKPNCFELYIPDNKDQVIKACKTEADGRVVEGNHTVYRI

SEQ ID NO: 10388 - protein, 85 aa, Homo sapiens
TMDTESEIDPCKVDGTCPEVIKVYIFKADPGEDDLGGTVDIVESEPENDHGVELLDQNSSIRVPREKMVYMTVNDSQPEDEDLNV

SEQ ID NO: 10389 - protein, 85 aa, Homo sapiens
AEIADEVYMEVIVGEEDAAAAAAAAAVHEQQMDDNEIKTFMPIAWAAAYGNNSDGIENRNGTASALLHIDESAGLGRLAKQKPKK

SEQ ID NO: 10390 - protein, 85 aa, Homo sapiens
RRRPDSRQYQTAIIIGPDGHPLTVYPCMICGKKFKSRGFLKRHMKNHPEHLAKKKYRCTDCDYTTNKKISLHNHLESHKLTSKAE

SEQ ID NO: 10391 - protein, 85 aa, Homo sapiens
KAIECDECGKHFSHAGALFTHKMVHKEKGANKMHKCKFCEYETAEQGLLNRHLLAVHSKNFPHICVECGKGFRHPSELKKHMRIH

SEQ ID NO: 10392 - protein, 85 aa, Homo sapiens
TGEKPYQCQYCEYRSADSSNLKTHVKTKHSKEMPFKCDICLLTFSDTKEVQQHALIHQESKTHQCLHCDHKSSNSSDLKRHIISV

SEQ ID NO: 10393 - protein, 85 aa, Homo sapiens
HTKDYPHKCDMCDKGFHRPSELKKHVAAHKGKKMHQCRHCDFKIADPFVLSRHILSVHTKDLPFRCKRCRKGFRQQSELKKHMKT

SEQ ID NO: 10394 - protein, 85 aa, Homo sapiens
ESEPENDHGVELLDQNSSIRVPREKMVYMTVNDSQPEDEDLNVAEIADEVYMEVIVGEEDAAAAAAAAAVHEQQMDDNEIKTFMP

SEQ ID NO: 10395 - protein, 85 aa, Homo sapiens
IAWAAAYGNNSDGIENRNGTASALLHIDESAGLGRLAKQKPKKRRRPDSRQYQTAIIIGPDGHPLTVYPCMICGKKFKSRGFLKR

SEQ ID NO: 10396 - protein, 85 aa, Homo sapiens
HMKNHPEHLAKKKYRCTDCDYTTNKKISLHNHLESHKLTSKAEKAIECDECGKHFSHAGALFTHKMVHKEKGANKMHKCKFCEYE

SEQ ID NO: 10397 - protein, 85 aa, Homo sapiens
TAEQGLLNRHLLAVHSKNFPHICVECGKGFRHPSELKKHMRIHTGEKPYQCQYCEYRSADSSNLKTHVKTKHSKEMPFKCDICLL

SEQ ID NO: 10398 - protein, 85 aa, Homo sapiens
TFSDTKEVQQHALIHQESKTHQCLHCDHKSSNSSDLKRHIISVHTKDYPHKCDMCDKGFHRPSELKKHVAAHKGKKMHQCRHCDF

SEQ ID NO: 10399 - protein, 85 aa, Homo sapiens
KIADPFVLSRHILSVHTKDLPFRCKRCRKGFRQQSELKKHMKTHSGRKVYQCEYCEYSTTDASGFKRHVISIHTKDYPHRCEYCK

SEQ ID NO: 10400 - protein, 85 aa, Homo sapiens
SPPGSGHAQEEDDVLGEEAQGSPHDIIRIEHTMATPLEDVGKQVWRGALLLADYILFRQDLFRGCTALELGAGTGLASIIAATMA

SEQ ID NO: 10401 - protein, 85 aa, Homo sapiens
RTVYCTDVGADLLSMCQRNIALNSHLAATGGGIVRVKELDWLKDDLCTDPKVPFSWSQEEISDLYDHTTILFAAEVFYDDDLTDA

SEQ ID NO: 10402 - protein, 85 aa, Homo sapiens
VFKTLSRLAHRLKNACTAILSVEKRLNFTLRHLDVTCEAYDHFRSCLHALEQLADGKLRFVVEPVEASFPQLLVYERLQQLELWK

SEQ ID NO: 10403 - protein, 85 aa, Homo sapiens
PVFLSQFKLLWSQDSWTDSGAKGGSHRDVHTKEPPSAETGSTGSPPGSGHAQEEDDVLGEEAQGSPHDIIRIEHTMATPLEDVGK

SEQ ID NO: 10404 - protein, 85 aa, Homo sapiens
QVWRGALLLADYILFRQDLFRGCTALELGAGTGLASIIAATMARTVYCTDVGADLLSMCQRNIALNSHLAATGGGIVRVKELDWL

SEQ ID NO: 10405 - protein, 85 aa, Homo sapiens
KDDLCTDPKVPFSWSQEEISDLYDHTTILFAAEVFYDDDLTDAVFKTLSRLAHRLKNACTAILSVEKRLNFTLRHLDVTCEAYDH

SEQ ID NO: 10406 - protein, 84 aa, Homo sapiens
EDAWMGTHPKYLEMMELDIGDATQVYVAFLVYLDLMESKSWHEVNCVGLPELQLICLVGTEIEGEGLQTVVPTPITASLSHNRW

SEQ ID NO: 10407 - protein, 84 aa, Homo sapiens
YVTFEDVAVYFSQEEWRLLDDAQRLLYRNVMLENFTLLASLGLASSKTHEITQLESWEEPFMPAWEVVTSAIPRGSWWVELREV

SEQ ID NO: 10408 - protein, 26 aa, Homo sapiens
IWKIQCWKQLPSCSYQVLLMVQTSGQ

SEQ ID NO: 10409 - protein, 21 aa, Homo sapiens
AQQMQGSRTTAVWQKPVQKEM

SEQ ID NO: 10410 - protein, 6 aa, Homo sapiens
EDMSKL

SEQ ID NO: 10411 - protein, 11 aa, Homo sapiens
ILMNLKRVPLP

SEQ ID NO: 10412 - protein, 23 aa, Homo sapiens
NLRLYLLKEELAWKRSMMKVIHH

SEQ ID NO: 10413 - protein, 10 aa, Homo sapiens
WKLLKRVIWS

SEQ ID NO: 10414 - protein, 5 aa, Homo sapiens
VKERM

SEQ ID NO: 10415 - protein, 5 aa, Homo sapiens
PHPTI

SEQ ID NO: 10416 - protein, 45 aa, Homo sapiens
KRMHSCSPWNWLMLTNLPRRRSRSSTKQGRNKFRRNKRFWRNYRK

SEQ ID NO: 10417 - protein, 6 aa, Homo sapiens
ANTWDY

SEQ ID NO: 10418 - protein, 12 aa, Homo sapiens
AKHSWQGWGKEF

SEQ ID NO: 10419 - protein, 10 aa, Homo sapiens
HRLRVIMTRH

SEQ ID NO: 10420 - protein, 8 aa, Homo sapiens
DRRWWSYC

SEQ ID NO: 10421 - protein, 9 aa, Homo sapiens
KPIGTLPLL

SEQ ID NO: 10422 - protein, 27 aa, Homo sapiens
ITNSVSFLLAGELILMYVTRRGTLHCG

SEQ ID NO: 10423 - protein, 8 aa, Homo sapiens
QPSLIRRC

SEQ ID NO: 10424 - protein, 28 aa, Homo sapiens
MKPKIKRTLNSKLLKKKKSLKLKMSLKS

SEQ ID NO: 10425 - protein, 12 aa, Homo sapiens
IHYQFHTVSQRR

SEQ ID NO: 10426 - protein, 31 aa, Homo sapiens
NCQKLSVKGPVILYLLVQNLVHLPFLLQMGS

SEQ ID NO: 10427 - protein, 12 aa, Homo sapiens
ILINRKTRLETG

SEQ ID NO: 10428 - protein, 28 aa, Homo sapiens
CHQHLKLPQHSLCLQFLLHPLTKPLRTQ

SEQ ID NO: 10429 - protein, 5 aa, Homo sapiens
FLSGL

SEQ ID NO: 10430 - protein, 72 aa, Homo sapiens
QSQPRQATTTLHPQMPHILCLLPKNTIQYHPHLPHHHQPSQEGFLETALWIVDQHLQIKWHLPPNRKQVVHQ

SEQ ID NO: 10431 - protein, 38 aa, Homo sapiens
VLLGVHQLILISNNLRDLFLRNQDHLFSSLRFLPRKLE

SEQ ID NO: 10432 - protein, 42 aa, Homo sapiens
LMAQLPLTRIQLQCKIHLLQSSVSITLKDLTVFPLLSSYLRP

SEQ ID NO: 10433 - protein, 65 aa, Homo sapiens
PSGEDLLFHLSQHQNLCYQENPHICQIQILYISLILPKLQVLDHHYRDLLQVPQVLSIWTRHMVL

SEQ ID NO: 10434 - protein, 26 aa, Homo sapiens
TDLGHPLEEHPQLLTLTDNIFPRLVC

SEQ ID NO: 10435 - protein, 17 aa, Homo sapiens
KLERQLHLLLGAICLHQ

SEQ ID NO: 10436 - protein, 19 aa, Homo sapiens
ENCPRLMVKPLQILKYFGG

SEQ ID NO: 10437 - protein, 5 aa, Homo sapiens
RASFV

SEQ ID NO: 10438 - protein, 29 aa, Homo sapiens
SWNPVLVLRTIMKMVIPLLWKLEVLDMWK

SEQ ID NO: 10439 - protein, 10 aa, Homo sapiens
WRLAWMAMLK

SEQ ID NO: 10440 - protein, 15 aa, Homo sapiens
EQISMHRQKKLKKLP

SEQ ID NO: 10441 - protein, 4 aa, Homo sapiens
VILM

SEQ ID NO: 10442 - protein, 6 aa, Homo sapiens
KMAQLC

SEQ ID NO: 10443 - protein, 30 aa, Homo sapiens
MLLNKSPAAICQQTARMYRVTSPISLQRAL

SEQ ID NO: 10444 - protein, 9 aa, Homo sapiens
KRFWRNYRK

SEQ ID NO: 10445 - protein, 35 aa, Homo sapiens
WVLRQSSLWRCLKLCLWRQVPCLQGPSQILQNCKE

SEQ ID NO: 10446 - protein, 53 aa, Homo sapiens
HLQCQTLLPTVLLHPFPNLRLQLQVLSSLLQPCFLSTLPLILMHRLRVIMTRH

SEQ ID NO: 10447 - protein, 51 aa, Homo sapiens
HSSWLPQLVMLVLWKYCWTMVQTLKPSLKEPRTHHSPWLVLGEDRRWWSYC

SEQ ID NO: 10448 - protein, 18 aa, Homo sapiens
MQELRLTLELVANWASLL

SEQ ID NO: 10449 - protein, 34 aa, Homo sapiens
WKLPLVDMRRWAEFFWIKVLMLMPLQFPPQEIQL

SEQ ID NO: 10450 - protein, 13 aa, Homo sapiens
KQVQMWMQQITAR

SEQ ID NO: 10451 - protein, 4 aa, Homo sapiens
TWKS

SEQ ID NO: 10452 - protein, 18 aa, Homo sapiens
YLQPGQLWQVLMVKEIIP

SEQ ID NO: 10453 - protein, 18 aa, Homo sapiens
ATAVVRVTIIHQLWSLPL

SEQ ID NO: 10454 - protein, 10 aa, Homo sapiens
KRGKKDGKKL

SEQ ID NO: 10455 - protein, 10 aa, Homo sapiens
KLMNLFQRIV

SEQ ID NO: 10456 - protein, 26 aa, Homo sapiens
HILLHSLHMLCLLLRLSSRSVHQGCP

SEQ ID NO: 10457 - protein, 34 aa, Homo sapiens
QQLQPVHQLQRCLVHLQMAVQVHLLSEGSFLSQL

SEQ ID NO: 10458 - protein, 30 aa, Homo sapiens
GFLETALWIVDQHLQIKWHLPPNRKQVVHQ

SEQ ID NO: 10459 - protein, 14 aa, Homo sapiens
QQVLLQWRCLLLPQ

SEQ ID NO: 10460 - protein, 84 aa, Homo sapiens
VHKVLVRIQYIQQISLLLPISVPPYHLGPLAHCLKTALLLLMPSGEDLLFHLSQHQNLCYQENPHICQIQILYISLILPKLQVL

SEQ ID NO: 10461 - protein, 23 aa, Homo sapiens
DHHYRDLLQVPQVLSIWTRHMVL

SEQ ID NO: 10462 - protein, 15 aa, Homo sapiens
PREFVHHLLPHHQYR

SEQ ID NO: 10463 - protein, 4 aa, Homo sapiens
WEIL

SEQ ID NO: 10464 - protein, 84 aa, Homo sapiens
LDRLLQYENVDEDSSDSDATASSDNSETEGTPKLSDTPAPKRKRSPPLGGAPSPSSLSLPPSTGFPLQASGVPSPYLSSERGQA

SEQ ID NO: 10465 - protein, 29 aa, Homo sapiens
KIIRFQMELCDALHHWLTDLPVVVLTQLH

SEQ ID NO: 10466 - protein, 9 aa, Homo sapiens
SQHFAEALR

SEQ ID NO: 10467 - protein, 84 aa, Homo sapiens
SALQGDERCVLDTMRLVDLLLVLLFEGRKALPKSSAGSTGRIPGLRRLDSSGERSHRQLIDCIRSKDTDALIDAIDTGGQKIFF

SEQ ID NO: 10468 - protein, 32 aa, Homo sapiens
WLLLVVLFQDHHQHANQVAAPQELHPPLQIPN

SEQ ID NO: 10469 - protein, 85 aa, Homo sapiens
VAYVQQDATAQQTPLGRLEAKEEEDEDEDEDTEEDEEEDGEDTDLDDWEPDPPRPFDPHDLWCEECNNAHASVCPKHGPLHPIPN

SEQ ID NO: 10470 - protein, 85 aa, Homo sapiens
RPVLTRARASLPLVLYIDRFLGGVFSKRRIPKRTQFGPVEGPLVRGSELKDCYIHLKVSLDKGDRKERDLHEDLWFELSDETLCN

SEQ ID NO: 10471 - protein, 85 aa, Homo sapiens
WMMFVRPAQNHLEQNLVAYQYGHHVYYTTIKNVEPKQELKVWYAASYAEFVNQKIHDISEEERKVLREQEKNWPCYECNRRFISS

SEQ ID NO: 10472 - protein, 85 aa, Homo sapiens
EQLQQHLNSHDEKLDVFSRTRGRGRGRGKRRFGPGRRPGRPPKFIRLEITSENGEKSDDGTQDLLHFPTKEQFDEAEPATLNGLD

SEQ ID NO: 10473 - protein, 85 aa, Homo sapiens
QPEQTTIPIPQLPQETQSSLEHEPETHTLHLQPQHEESVVPTQSTLTADDMRRAKRIRNAALQHLFIRKSFRPFKCLQCGKAFRE

SEQ ID NO: 10474 - protein, 85 aa, Homo sapiens
KDKLDQHLRFHGREGNCPLTCDLCNKGFISSTSLESHMKLHSDQKTYSCIFCPESFDRLDLLKDHVAIHINDGYFTCPTCKKRFP

SEQ ID NO: 10475 - protein, 85 aa, Homo sapiens
DFIQVKKHVRSFHSEKIYQCTECDKAFCRPDKLRLHMLRHSDRKDFLCSTCGKQFKRKDKLREHMQRMHNPEREAKKADRISRSK

SEQ ID NO: 10476 - protein, 85 aa, Homo sapiens
TFKPRITSTDYDSFTFKCRLCMMGFRRRGMLVNHLSKRHPDMKIEEVPELTLPIIKPNRDYFCQYCDKVYKSASKRKAHILKNHP

SEQ ID NO: 10477 - protein, 85 aa, Homo sapiens
GAELPPSIRKLRPAGPGEPDPMLSTHTQLTGTIATPPVCCPHCSKQYSSKTKMVQHIRKKHPEFAQLSNTIHTPLTTAVISATPA

SEQ ID NO: 10478 - protein, 85 aa, Homo sapiens
VLTTDSATGETVVTTDLLTQAMTELSQTLTTDYRTPQGDYQRIQYIPVSQSASGLQQPQHIQLQVVQVASATSPHQSQQSTVDVG

SEQ ID NO: 10479 - protein, 85 aa, Homo sapiens
QLHDPQPYPQHAIQVQHIQVSGQPLSPSAQQAQQGLSPSHIQGSSSTQGQALQQQQQQQQNSSVQHTYLPSAWNSFRGYSSEIQM

SEQ ID NO: 10480 - protein, 85 aa, Homo sapiens
MTLPPGQFVITDSGVATPVTTGQVKAVTSGHYVLSESQSELEEKQTSALSGGVQVEPPAHSDSLDPQTNSQQQTTQYIITTTTNG

SEQ ID NO: 10481 - protein, 85 aa, Homo sapiens
RPPQQVVYTADGASYTSVDGPEHTLVYIHPVEAAQTLFTDPGQVAYVQQDATAQQTPLGRLEAKEEEDEDEDEDTEEDEEEDGED

SEQ ID NO: 10482 - protein, 85 aa, Homo sapiens
TDLDDWEPDPPRPFDPHDLWCEECNNAHASVCPKHGPLHPIPNRPVLTRARASLPLVLYIDRFLGGVFSKRRIPKRTQFGPVEGP

SEQ ID NO: 10483 - protein, 85 aa, Homo sapiens
LVRGSELKDCYIHLKVSLDKGDRKERDLHEDLWFELSDETLCNWMMFVRPAQNHLEQNLVAYQYGHHVYYTTIKNVEPKQELKVW

SEQ ID NO: 10484 - protein, 85 aa, Homo sapiens
YAASYAEFVNQKIHDISEEERKVLREQEKNWPCYECNRRFISSEQLQQHLNSHDEKLDVFSRTRGRGRGRGKRRFGPGRRPGRPP

SEQ ID NO: 10485 - protein, 85 aa, Homo sapiens
KFIRLEITSENGEKSDDGTQDLLHFPTKEQFDEAEPATLNGLDQPEQTTIPIPQLPQETQSSLEHEPETHTLHLQPQHEESVVPT

SEQ ID NO: 10486 - protein, 85 aa, Homo sapiens
QSTLTADDMRRAKRIRNAALQHLFIRKSFRPFKCLQCGKAFREKDKLDQHLRFHGREGNCPLTCDLCNKGFISSTSLESHMKLHS

SEQ ID NO: 10487 - protein, 85 aa, Homo sapiens
DQKTYSCIFCPESFDRLDLLKDHVAIHINDGYFTCPTCKKRFPDFIQVKKHVRSFHSEKIYQCTECDKAFCRPDKLRLHMLRHSD

SEQ ID NO: 10488 - protein, 85 aa, Homo sapiens
RKDFLCSTCGKQFKRKDKLREHMQRMHNPEREAKKADRISRSKTFKPRITSTDYDSFTFKCRLCMMGFRRRGMLVNHLSKRHPDM

SEQ ID NO: 10489 - protein, 85 aa, Homo sapiens
KIEEVPELTLPIIKPNRDYFCQYCDKVYKSASKRKAHILKNHPGAELPPSIRKLRPAGPGEPDPMLSTHTQLTGTIATPPVCCPH

SEQ ID NO: 10490 - protein, 85 aa, Homo sapiens
CSKQYSSKTKMVQHIRKKHPEFAQLSNTIHTPLTTAVISATPAVLTTDSATGETVVTTDLLTQAMTELSQTLTTDYRTPQGDYQR

SEQ ID NO: 10491 - protein, 85 aa, Homo sapiens
IQYIPVSQSASGLQQPQHIQLQVVQVASATSPHQSQQSTVDVGQLHDPQPYPQHAIQVQHIQVSGQPLSPSAQQAQQGLSPSHIQ

SEQ ID NO: 10492 - protein, 85 aa, Homo sapiens
YCYTCYVPVENVPIEQIPLVKIDIIKHPNETDGKSTAIHAKLLAPEFVNIYTYPCIPEYEEKDHEVALIFPGPQSISIKDISFHL

SEQ ID NO: 10493 - protein, 85 aa, Homo sapiens
QEVLQKAQQSGRSKCLKCGGSRMFYCYTCYVPVENVPIEQIPLVKIDIIKHPNETDGKSTAIHAKLLAPEFVNIYTYPCIPEYEE

SEQ ID NO: 10494 - protein, 85 aa, Homo sapiens
MTITFLPYTFSLMVTFPDVPLGIFLFCVCVIAIGVVQALIVGYAFHFPHLLSPQIQRSAHRALYRRHVLGIVLQGPALCFAAAIF

SEQ ID NO: 10495 - protein, 85 aa, Homo sapiens
SLFFVPLSYLLMVTVILLPYVSKVTGWCRDRLLGHREPSAHPVEVFSFDLHEPLSKERVEAFSDGVYAIVATLLILDICEDNVPD

SEQ ID NO: 10496 - protein, 85 aa, Homo sapiens
PKDVKERFSGSLVAALSATGPRFLAYFGSFATVGLLWFAHHSLFLHVRKATRAMGLLNTLSLAFVGGLPLAYQQTSAFARQPRDE

SEQ ID NO: 10497 - protein, 85 aa, Homo sapiens
MERVRVSCTIIFLASIFQLAMWTTALLHQAETLQPSVWFGGREHVLMFAKLALYPCASLLAFASTCLLSRFSVGIFHLMQIAVPC

SEQ ID NO: 10498 - protein, 85 aa, Homo sapiens
YAFHFPHLLSPQIQRSAHRALYRRHVLGIVLQGPALCFAAAIFSLFFVPLSYLLMVTVILLPYVSKVTGWCRDRLLGHREPSAHP

SEQ ID NO: 10499 - protein, 85 aa, Homo sapiens
VEVFSFDLHEPLSKERVEAFSDGVYAIVATLLILDICEDNVPDPKDVKERFSGSLVAALSATGPRFLAYFGSFATVGLLWFAHHS

SEQ ID NO: 10500 - protein, 85 aa, Homo sapiens
LFLHVRKATRAMGLLNTLSLAFVGGLPLAYQQTSAFARQPRDELERVRVSCTIIFLASIFQLAMWTTALLHQAETLQPSVWFGGR

SEQ ID NO: 10501 - protein, 85 aa, Homo sapiens
EHVLMFAKLALYPCASLLAFASTCLLSRFSVGIFHLMQIAVPCAFLLLRLLVGLALATLRVLRGLARPEHPPPAPTGQDDPQSQL

SEQ ID NO: 10502 - protein, 84 aa, Homo sapiens
TRSPVNACLLTGSLFVLLRVFSFEPVPSCRALQVLKPRDRISAIAHRGGSHDAPENTLAAIRQLRMEQQAWSWTLSLLLTGFLS

SEQ ID NO: 10503 - protein, 85 aa, Homo sapiens
MGGSNSNQQQQMRLQQLQMEKERLRLKQQELLRQELALRSQLPTLEQDGGTQNPVSSPGMSQELRTMTTNSSDPFLNSGTYHSRD

SEQ ID NO: 10504 - protein, 85 aa, Homo sapiens
ESTDSGLSMSSYSVPRTPDDFLNSVDEMDTGDTINQSTLPSQQNRFPDYLEAIPGTNVDLGTLEGDGMNIEGEELMPSLQEALSS

SEQ ID NO: 10505 - protein, 85 aa, Homo sapiens
APTSPPVQQNMMNSASAMNQRISQSAPVKQPPPLAPQSPQGGVMGGSNSNQQQQMRLQQLQMEKERLRLKQQELLRQELALRSQL

SEQ ID NO: 10506 - protein, 85 aa, Homo sapiens
PTLEQDGGTQNPVSSPGMSQELRTMTTNSSDPFLNSGTYHSRDESTDSGLSMSSYSVPRTPDDFLNSVDEMDTGDTINQSTLPSQ

SEQ ID NO: 10507 - protein, 85 aa, Homo sapiens
TESASSTSGQEFDVFSVMDWKDGVGTLPGSDLKFRVNEFGALEVITDENEMENVKKATATTTWMVPTAQEAYTGDLAKSLPLFFS

SEQ ID NO: 10508 - protein, 85 aa, Homo sapiens
KSLPLFFSSTPMVVTNTYMLMTPKSTSPAPTSPPSSRPVFPPAYWTSPPGCPTVFSEKTGMPFRLKDPVKVEGLQFCENCCQYGN

SEQ ID NO: 10509 - protein, 85 aa, Homo sapiens
EVITDENEMENVKKATATTTWMVPTAQEAYTGDLAKSLPLFFSSTPMVVTNTYMLMTPKSTSPAPTSPPSSRPVFPPAYWTSPPG

SEQ ID NO: 10510 - protein, 85 aa, Homo sapiens
MGGMLAGHSESGGELIERDGKKYKLFYGMSSEMAMKKYAGGVAEYRASEGKTVEVPFKGDVEHTIRDILGGIRSTCTYVGAAKLK

SEQ ID NO: 10511 - protein, 84 aa, Homo sapiens
SEGKTVEVPFKGDVEHTIRDILGGIRSTCTYVGAAKLKELSRRTTFIRVTQQGSCSNSVLLYLHTQNAQGTHWGGSKEANSLRK

SEQ ID NO: 10512 - protein, 85 aa, Homo sapiens
AEYRASEGKTVEVPFKGDVEHTIRDILGGIRSTCTYVGAAKLKELSRRTTFIRVTQQGSCSNSVLLYLHTQNAQGTHWGGSKEAN

SEQ ID NO: 10513 - protein, 23 aa, Homo sapiens
PRHSMLPGVTTDVTLSELNITRN

SEQ ID NO: 10514 - protein, 11 aa, Homo sapiens
KREFFRRMVIW

SEQ ID NO: 10515 - protein, 84 aa, Homo sapiens
ENPYRQLPCNCHGSMPGKTAIELGPLWSSSLFNTGFLKRMLFESLHHGLDDIQTLIKTLIFESECTPQSQFSIHASSNVNKQGD

SEQ ID NO: 10516 - protein, 13 aa, Homo sapiens
KYCLQWLWNILCW

SEQ ID NO: 10517 - protein, 85 aa, Homo sapiens
AGSRGAGRTAAPSVRPEKRRSEPELEPEPEPEASTPCPRTEMASARIGDEYAEDSSDEEDIRNTVGNVPLEWYDDFPHVGYDLDG

SEQ ID NO: 10518 - protein, 85 aa, Homo sapiens
RRIYKPLRTRDELDQFLDKMDDPDYWRTVQDPMTGRDLRLTDEQVALVRRLQSGQFGDVGFNPYEPAVDFFSGDVMIHPVTNRPA

SEQ ID NO: 10519 - protein, 85 aa, Homo sapiens
MVRRLQSGQFGDVGFNPYEPAVDFFSGDVMIHPVTNRPADKRSFIPSLVEKEKVSRMVHAIKMGWIQPRRPRDPTPSFYDLWAQE

SEQ ID NO: 10520 - protein, 85 aa, Homo sapiens
ASARIGDEYAEDSSDEEDIRNTVGNVPLEWYDDFPHVGYDLDGRRIYKPLRTRDELDQFLDKMDDPDYWRTVQDPMTGRDLRLTD

SEQ ID NO: 10521 - protein, 85 aa, Homo sapiens
EQVALVRRLQSGQFGDVGFNPYEPAVDFFSGDVMIHPVTNRPADKRSFIPSLVEKEKVSRMVHAIKMGWIQPRRPRDPTPSFYDL

SEQ ID NO: 10522 - protein, 84 aa, Homo sapiens
LSKEHARSCHQGSFCMLCVMQNHIVQAFANSGNAIKPVSFIRDLKKIARHFRFGNQEDAHEFLRYTIDAMQKACLNGCAKIKIE

SEQ ID NO: 10523 - protein, 85 aa, Homo sapiens
SQPRTPEQALDTPGDCPPGRRDEDAGEGIQCSQRMLSFSDALLSIIATVMQFDRSVQRLLATRIAVYLMTFLIVTVAWAAHTRLF

SEQ ID NO: 10524 - protein, 85 aa, Homo sapiens
QVVGKTDDTLALLNLACMMTITFLPYTFSLMVTFPDVPLGIFLFCVCVIAIGVVQALIVGYAFHFPHLLSPQIQRSAHRALYRRH

SEQ ID NO: 10525 - protein, 85 aa, Homo sapiens
TLALLNLACMMTITFLPYTFSLMVTFPDVPLGIFLFCVCVIAIGVVQALIVGYAFHFPHLLSPQIQRSAHRALYRRHVLGIVLQG

SEQ ID NO: 10526 - protein, 85 aa, Homo sapiens
MSIIATVMQFDRSVQRLLATRIAVYLMTFLIVTVAWAAHTRLFQVVGKTDDTLALLNLACMMTITFLPYTFSLMVTFPDVPLGIF

SEQ ID NO: 10527 - protein, 85 aa, Homo sapiens
ALSTDYALRTGAFEPAEASVNPQDLQGSLQELKERALSRYNLVRGQGPERLVSGSDDFTLFLWSPAEDKKPLTRMTGHQALINQV

SEQ ID NO: 10528 - protein, 85 aa, Homo sapiens
LFSPDSRIVASASFDKSIKLWDGRTGKYLASLRGHVAAVYQIAWSADSRLLVSGSSDSTLKVWDVKAQKLAMDLPGHADEVYAVD

SEQ ID NO: 10529 - protein, 85 aa, Homo sapiens
VRGQGPERLVSGSDDFTLFLWSPAEDKKPLTRMTGHQALINQVLFSPDSRIVASASFDKSIKLWDGRTGKYLASLRGHVAAVYQI

SEQ ID NO: 10530 - protein, 85 aa, Homo sapiens
DMRQHEEYIADMALDPAKKLLLTASGDGCLGIFNIKRRRFELLSEPQSGDLTSVTLMKWGKKVACGSSEGTIYLFNWNGFGATSD

SEQ ID NO: 10531 - protein, 85 aa, Homo sapiens
RFALRAESIDCMVPVTESLLCTGSTDGVIRAVNILPNRVVGSVGQHTGEPVEELALSHCGRFLASSGHDQRLKFWDMAQLRAVVV

SEQ ID NO: 10532 - protein, 85 aa, Homo sapiens
LSEPQSGDLTSVTLMKWGKKVACGSSEGTIYLFNWNGFGATSDRFALRAESIDCMVPVTESLLCTGSTDGVIRAVNILPNRVVGS

SEQ ID NO: 10533 - protein, 85 aa, Homo sapiens
VGQHTGEPVEELALSHCGRFLASSGHDQRLKFWDMAQLRAVVVDDYRRRKKKGGPLRALSSKTWSTDDFFAGLREEGEDSMAQEE

SEQ ID NO: 10534 - protein, 84 aa, Homo sapiens
MQSPLVTWVKTFGPFGSGSQDNLTMYMDLVDGIFLNQIMLQIDPRPTNQRINKHVNNDVNLRIQNLTILVRNIKTYYQDRPFFR

SEQ ID NO: 10535 - protein, 85 aa, Homo sapiens
KETPLSNCERRFLLRAIEEKKRLDGRQTYDYRNIRISFGTDYGCCIVELGKTRVLGQVSCELVSPKLNRATEGLANTCRPTFIKS

SEQ ID NO: 10536 - protein, 84 aa, Homo sapiens
ETPLSNCERRFLLRAIEEKKRLDGRQTYDYRNIRISFGTDYGCCIVELGKTRVLGQVSCELVSPKLNRATEGLANTCRPTFIKS

SEQ ID NO: 10537 - protein, 85 aa, Homo sapiens
ATNFLAHEKIWFDKFKYDDAERRFYEQMNGPVCALSSWTGWSGGLPSWCPWATVSGSYRFSVWWRTTRWGQTCWRRRSPSLRSTC

SEQ ID NO: 10538 - protein, 84 aa, Homo sapiens
FKYDDAERRFYEQMNGPVCALSSWTGWSGGLPSWCPWATVSGSYRFSVWWRTTRWGQTCWRRRSPSLRSTCRVSISQLSTRSEA

SEQ ID NO: 10539 - protein, 85 aa, Homo sapiens
EKEVAQSLLNAKEQVHQGGVELQQLEAGLQEAGEEDTRLKASLLQLTRELEELKEIEADLERQEKEVDEDTTVTIPSAVYVAQLY

SEQ ID NO: 10540 - protein, 84 aa, Homo sapiens
LQEAGEEDTRLKASLLQLTRELEELKEIEADLERQEKEVDEDTTVTIPSAVYVAQLYHQVSKIEWDYECEPGMVKGSILFGEPF

SEQ ID NO: 10541 - protein, 85 aa, Homo sapiens
SWLDPRLDPRFAMNQRISQSAPVKQPPPLAPQSPQGGVMGGSNSNQQQQMRLQQLQMEKERLRLKQQELLRQVRPQELALRSQLP

SEQ ID NO: 10542 - protein, 85 aa, Homo sapiens
TLEQDGGTQNPVSSPGMSQELRTMTTNSSDPFLNSGTYHSRDESTDSGLSMSSYSVPRTPDDFLNSVDEMDTGDTINQSTLPSQQ

SEQ ID NO: 10543 - protein, 85 aa, Homo sapiens
NSNQQQQMRLQQLQMEKERLRLKQQELLRQVRPQELALRSQLPTLEQDGGTQNPVSSPGMSQELRTMTTNSSDPFLNSGTYHSRD

SEQ ID NO: 10544 - protein, 85 aa, Homo sapiens
TRLGPRMPQDGSDDEDEEWPTLEKAATMTAAGHHAEVVVDPEDERAIEMFMNKNPPARYYLSTAVENCPRHLRSSLHSPTGSKSS

SEQ ID NO: 10545 - protein, 84 aa, Homo sapiens
AATMTAAGHHAEVVVDPEDERAIEMFMNKNPPARYYLSTAVENCPRHLRSSLHSPTGSKSSTSQSRRPGLQLPCTRPPGFLPLT

SEQ ID NO: 10546 - protein, 85 aa, Homo sapiens
MPSIRKASLALIRKMIHFCSEALLKEVCDSDVGHNLPTILVEITATVLDQEDDDDGHLLALQIIRDLVDKGGDIFLDQLARLGVI

SEQ ID NO: 10547 - protein, 85 aa, Homo sapiens
SKVSTLAGPSSDDENEEESKPEKEDEPQEDAKELQQGKPYHWRDWSIIRGRDCLYIWSDAAALELSNGSNGWFRFILDGKLATMY

SEQ ID NO: 10548 - protein, 85 aa, Homo sapiens
SSGSPEGGSDSSESRSEFLEKLQRARGQVKPSTSSQPILSAPGPTKLTVGNWSLTCLKEGEIAIHNSDGQQATILKEDLPGFVFE

SEQ ID NO: 10549 - protein, 85 aa, Homo sapiens
SNRGTKHSFTAETSLGSEFVTGWTGKRGRKLKSKLEKTKQKVRTMARDLYDDHFKAVESMPRGVVVTLRNIATQLESSWELHTNR

SEQ ID NO: 10550 - protein, 85 aa, Homo sapiens
QCIESENTWRDLMKTALENLIVLLKDENTISPYEMCSSGLVQALLTVLNNSMDLDMKQDCSQLVERINVFKTAFSENEDDESRPA

SEQ ID NO: 10551 - protein, 85 aa, Homo sapiens
VALIRKLIAVLESIERLPLHLYDTPGSTYNLQILTRRLRFRLERAPGETALIDRTGRMLKMEPLATVESLEQYLLKMVAKQWYDF

SEQ ID NO: 10552 - protein, 85 aa, Homo sapiens
DRSSFVFVRKLREGQNFIFRHQHDFDENGIIYWIGTNAKTAYEWVNPAAYGLVVVTSSEGRNLPYGRLEDILSRDNSALNCHSND

SEQ ID NO: 10553 - protein, 85 aa, Homo sapiens
DKNAWFAIDLGLWVIPSAYTLRHARGYGRSALRNWVFQVSKDGQNWTSLYTHVDDCSLNEPGSTATWPLDPPKDEKQGWRHVRIK

SEQ ID NO: 10554 - protein, 85 aa, Homo sapiens
QMGKNASGQTHYLSLSGFELYGTVNGVCEDQLGKAAKEAEANLRRQRRLVRSQVLKYMVPGARVIRGLDWKWRDQDGSPQGEGTV

SEQ ID NO: 10555 - protein, 85 aa, Homo sapiens
TGELHNGTTQSWSSLVKNNCPDKTSAAAGSSSRKGSSSSVCSVASSSDISLGSTKTERRSEIVMEHSIVSGADVHEPIVVLSSAE

SEQ ID NO: 10556 - protein, 85 aa, Homo sapiens
NVPQTEVGSSSSASTSTLTAETGSENAERKLGPDSSVRTPGESSAISMGIVSVSSPDVSSVSELTNKEAASQRPLSSSASNRLSV

SEQ ID NO: 10557 - protein, 85 aa, Homo sapiens
SSLLAAGAPMSSSASVPNLSSRETSSLESFVRRVANIARTNATNNMNLSRSSSDNNTNTLGRNVMSTATSPLMGAQSFPNLTTPG

SEQ ID NO: 10558 - protein, 85 aa, Homo sapiens
TTSTVTMSTSSVTSSSNVATATTVLSVGQSLSNTLTTSLTSTSSESDTGQEAEYSLYDFLDSCRASTLLAELDDDEDLPEPDEED

SEQ ID NO: 10559 - protein, 85 aa, Homo sapiens
DENEDDNQEDQEYEEVMILRRPSLQRRAGSRSDVTHHAVTSQLPQVPAGAGSRPIGEQEEEEYETKGGRRRTWDDDYVLKRQFSA

SEQ ID NO: 10560 - protein, 85 aa, Homo sapiens
MVPAFDPRPGRTNVQQTTDLEIPPPGTPHSELLEEVECTPSPRLALTLKVTGLGTTREVELPLTNFRSTIFYYVQKLLQLSCNGN

SEQ ID NO: 10561 - protein, 85 aa, Homo sapiens
VKSDKLRRIWEPTYTIMYREMKDSDKEKENGKMGCWSIEHVEQYLGTDELPKNDLITYLQKNADAAFLRHWKLTGTNKSIRKNRN

SEQ ID NO: 10562 - protein, 85 aa, Homo sapiens
CSQLIAAYKDFCEHGTKSGLNQGAISTLQSSDILNLTKEQPQAKAGNGQNSCGVEDVLQLLRILYIVASDPYSRISQEDGDEQPQ

SEQ ID NO: 10563 - protein, 85 aa, Homo sapiens
FCEHGTKSGLNQGAISTLQSSDILNLTKEQPQAKAGNGQNSCGVEDVLQLLRILYIVASDPYSRISQEDGDEQPQFTFPPDEFTS

SEQ ID NO: 10564 - protein, 85 aa, Homo sapiens
ITATVLDQEDDDDGHLLALQIIRDLVDKGGDIFLDQLARLGVISKVSTLAGPSSDDENEEESKPEKEDEPQEDAKELQQGKPYHW

SEQ ID NO: 10565 - protein, 85 aa, Homo sapiens
RDWSIIRGRDCLYIWSDAAALELSNGSNGWFRFILDGKLATMYSSGSPEGGSDSSESRSEFLEKLQRARGQVKPSTSSQPILSAP

SEQ ID NO: 10566 - protein, 85 aa, Homo sapiens
GPTKLTVGNWSLTCLKEGEIAIHNSDGQQATILKEDLPGFVFESNRGTKHSFTAETSLGSEFVTGWTGKRGRKLKSKLEKTKQKV

SEQ ID NO: 10567 - protein, 85 aa, Homo sapiens
RTMARDLYDDHFKAVESMPRGVVVTLRNIATQLESSWELHTNRQCIESENTWRDLMKTALENLIVLLKDENTISPYEMCSSGLVQ

SEQ ID NO: 10568 - protein, 85 aa, Homo sapiens
ALLTVLNNSMDLDMKQDCSQLVERINVFKTAFSENEDDESRPAVALIRKLIAVLESIERLPLHLYDTPGSTYNLQILTRRLRFRL

SEQ ID NO: 10569 - protein, 85 aa, Homo sapiens
ERAPGETALIDRTGRMLKMEPLATVESLEQYLLKMVAKQWYDFDRSSFVFVRKLREGQNFIFRHQHDFDENGIIYWIGTNAKTAY

SEQ ID NO: 10570 - protein, 85 aa, Homo sapiens
EWVNPAAYGLVVVTSSEGRNLPYGRLEDILSRDNSALNCHSNDDKNAWFAIDLGLWVIPSAYTLRHARGYGRSALRNWVFQVSKD

SEQ ID NO: 10571 - protein, 85 aa, Homo sapiens
GQNWTSLYTHVDDCSLNEPGSTATWPLDPPKDEKQGWRHVRIKQMGKNASGQTHYLSLSGFELYGTVNGVCEDQLGKAAKEAEAN

SEQ ID NO: 10572 - protein, 85 aa, Homo sapiens
LRRQRRLVRSQVLKYMVPGARVIRGLDWKWRDQDGSPQGEGTVTGELHNGTTQSWSSLVKNNCPDKTSAAAGSSSRKGSSSSVCS

SEQ ID NO: 10573 - protein, 85 aa, Homo sapiens
VASSSDISLGSTKTERRSEIVMEHSIVSGADVHEPIVVLSSAENVPQTEVGSSSSASTSTLTAETGSENAERKLGPDSSVRTPGE

SEQ ID NO: 10574 - protein, 85 aa, Homo sapiens
SSAISMGIVSVSSPDVSSVSELTNKEAASQRPLSSSASNRLSVSSLLAAGAPMSSSASVPNLSSRETSSLESFVRRVANIARTNA

SEQ ID NO: 10575 - protein, 85 aa, Homo sapiens
TNNMNLSRSSSDNNTNTLGRNVMSTATSPLMGAQSFPNLTTPGTTSTVTMSTSSVTSSSNVATATTVLSVGQSLSNTLTTSLTST

SEQ ID NO: 10576 - protein, 85 aa, Homo sapiens
SSESDTGQEAEYSLYDFLDSCRASTLLAELDDDEDLPEPDEEDDENEDDNQEDQEYEEVMILRRPSLQRRAGSRSDVTHHAVTSQ

SEQ ID NO: 10577 - protein, 85 aa, Homo sapiens
LPQVPAGAGSRPIGEQEEEEYETKGGRRRTWDDDYVLKRQFSALVPAFDPRPGRTNVQQTTDLEIPPPGTPHSELLEEVECTPSP

SEQ ID NO: 10578 - protein, 85 aa, Homo sapiens
RLALTLKVTGLGTTREVELPLTNFRSTIFYYVQKLLQLSCNGNVKSDKLRRIWEPTYTIMYREMKDSDKEKENGKMGCWSIEHVE

SEQ ID NO: 10579 - protein, 85 aa, Homo sapiens
QYLGTDELPKNDLITYLQKNADAAFLRHWKLTGTNKSIRKNRNCSQLIAAYKDFCEHGTKSGLNQGAISTLQSSDILNLTKEQPQ

SEQ ID NO: 10580 - protein, 85 aa, Homo sapiens
ELLQRCAQKSPRVAPGSARPWPALRSLLHRNLVLRTHQPARYSLTPEGLELAQKLAESEGLSLLNVGIGPKEPPGEETAVPGAAS

SEQ ID NO: 10581 - protein, 85 aa, Homo sapiens
AELASEAGVQQQPLELRPGEYRVLLCVDIGETRGGGHRPELLRELQRLHVTHTVRKLHVGDFVWVAQETNPRDPANPGELVLDHI

SEQ ID NO: 10582 - protein, 85 aa, Homo sapiens
VERKRLDDLCSSIIDGRFREQKFRLKRCGLERRVYLVEEHGSVHNLSLPESTLLQAVTNTQVIDGFFVKRTADIKESAAYLALLT

SEQ ID NO: 10583 - protein, 84 aa, Homo sapiens
CSSIIDGRFREQKFRLKRCGLERRVYLVEEHGSVHNLSLPESTLLQAVTNTQVIDGFFVKRTADIKESAAYLALLTRGLQRLYQ

SEQ ID NO: 10584 - protein, 85 aa, Homo sapiens
SLTPEGLELAQKLAESEGLSLLNVGIGPKEPPGEETAVPGAASAELASEAGVQQQPLELRPGEYRVLLCVDIGETRGGGHRPELL

SEQ ID NO: 10585 - protein, 85 aa, Homo sapiens
RELQRLHVTHTVRKLHVGDFVWVAQETNPRDPANPGELVLDHIVERKRLDDLCSSIIDGRFREQKFRLKRCGLERRVYLVEEHGS

SEQ ID NO: 10586 - protein, 84 aa, Homo sapiens
EVGSPRTSDLQHRGNKGSCVLSSPGEDAQPGEEPIKYGELIVLGYNGCLASGDKGRRRSRLALSRRSHANGVKPDVMHHISTPL

SEQ ID NO: 10587 - protein, 64 aa, Homo sapiens
AVCGSGTQLQAAVSASSPGTPSRSPVSGGEGTGFSTLPPRTAPSKSGELMTVCCAGLCKATATG

SEQ ID NO: 10588 - protein, 14 aa, Homo sapiens
PQLIPKTSKDPCRS

SEQ ID NO: 10589 - protein, 40 aa, Homo sapiens
SSCGMAGRAKMTFTLSPGVQVARVQRHDLGSLQPLLPGFK

SEQ ID NO: 10590 - protein, 84 aa, Homo sapiens
QPPRYLASLRGHVAAVYQIAWSADSRLLVSGSSDSTLKVWDVKAQKLAMDLPGHADEVYAVDWSPDGQRVASGGKDKCLRIWRR

SEQ ID NO: 10591 - protein, 22 aa, Homo sapiens
PSKSGELMTVCCAGLCKATATG

SEQ ID NO: 10592 - protein, 15 aa, Homo sapiens
YSCGPQQRTKSLSLG

SEQ ID NO: 10593 - protein, 39 aa, Homo sapiens
SCLSLPGTWLPYAATWLPCTRLRGQLTVGSWSAAAVTAH

SEQ ID NO: 10594 - protein, 85 aa, Homo sapiens
VQGRYQPAQGCSLPCAAWAQKHREVTHPPRILWRPFGFSGRFLKLESHSITESKSLIPVAWTSLTQMLLEAPGIFLLGQRKRFST

SEQ ID NO: 10595 - protein, 85 aa, Homo sapiens
MLLEAPGIFLLGQRKRFSTMPETETHERETELFSPPSDVRGMTKLDRTAFKKTVNIPVLKVRKEIVSKLMRSLKRAALQRPGIRR

SEQ ID NO: 10596 - protein, 85 aa, Homo sapiens
MKLESHSITESKSLIPVAWTSLTQMLLEAPGIFLLGQRKRFSTMPETETHERETELFSPPSDVRGMTKLDRTAFKKTVNIPVLKV

SEQ ID NO: 10597 - protein, 85 aa, Homo sapiens
ELTGLEVALVLILQKVENGDLSNKILKITDFGLAREWHRTTKMSAAGTYAWMAPEVIRASMFSKGSDVWSYGVLLWELLTGEVPF

SEQ ID NO: 10598 - protein, 85 aa, Homo sapiens
RGIDGLAVAYGVAMNKLALPIPSTCPEPFAKLMEDCWNPDPHSRPSFTNILDQLTTIEESGFFEMPKDSFHCLQDNWKHEIQEMF

SEQ ID NO: 10599 - protein, 85 aa, Homo sapiens
DQLRAKEKELRTWEEELTRAALQQKNQEELLRRREQELAEREIDILERELNIIIHQLCQEKPRVKKRKGKFRKSRLKLKDGNRIS

SEQ ID NO: 10600 - protein, 85 aa, Homo sapiens
LPSDFQHKFTVQASPTMDKRKSLINSRSSPPASPTIIPRLRAIQLTPGESSKTWGRSSVVPKEEGEEEEKRAPKKKGRTWGPGTL

SEQ ID NO: 10601 - protein, 85 aa, Homo sapiens
GQKELASGDEGLKSLVDGYKQWSSSAPNLVKGPRSSPALPGFTSLMEMALLAASWVVPIDIEEDEDSEGPGSGESRLQHSPSQSY

SEQ ID NO: 10602 - protein, 85 aa, Homo sapiens
LCIPFPRGEDGDGPSSDGIHEEPTPVNSATSTPQLTPTNSLKRGGAHHRRCEVALLGCGAVLAATGLGFDLLEAGKCQLLPLEEP

SEQ ID NO: 10603 - protein, 85 aa, Homo sapiens
EPPAREEKKRREGLFQRSSRPRRSTSPPSRKLFKKEEPMLLLGDPSASLTLLSLSSISECNSTRSLLRSDSDEIVVYEMPVSPVE

SEQ ID NO: 10604 - protein, 85 aa, Homo sapiens
APPLSPCTHNPLVNVRVERFKRDPNQSLTPTHVTLTTPSQPSSHRRTPSDGALKPETLLASRSPSSNGLSPSPGAGMLKTPSPSR

SEQ ID NO: 10605 - protein, 85 aa, Homo sapiens
DPGEFPRLPDPNVVFPPTPRRWNTQQDSTLERPKTLEFLPRPRPSANRQRLDPWWFVSPSHARSTSPANSSSTETPSNLDSCFAS

SEQ ID NO: 10606 - protein, 85 aa, Homo sapiens
MSAAGTYAWMAPEVIRASMFSKGSDVWSYGVLLWELLTGEVPFRGIDGLAVAYGVAMNKLALPIPSTCPEPFAKLMEDCWNPDPH

SEQ ID NO: 10607 - protein, 85 aa, Homo sapiens
SRPSFTNILDQLTTIEESGFFEMPKDSFHCLQDNWKHEIQEMFDQLRAKEKELRTWEEELTRAALQQKNQEELLRRREQELAERE

SEQ ID NO: 10608 - protein, 85 aa, Homo sapiens
IDILERELNIIIHQLCQEKPRVKKRKGKFRKSRLKLKDGNRISLPSDFQHKFTVQASPTMDKRKSLINSRSSPPASPTIIPRLRA

SEQ ID NO: 10609 - protein, 85 aa, Homo sapiens
IQLTPGESSKTWGRSSVVPKEEGEEEEKRAPKKKGRTWGPGTLGQKELASGDEGLKSLVDGYKQWSSSAPNLVKGPRSSPALPGF

SEQ ID NO: 10610 - protein, 85 aa, Homo sapiens
TSLMEMALLAASWVVPIDIEEDEDSEGPGSGESRLQHSPSQSYLCIPFPRGEDGDGPSSDGIHEEPTPVNSATSTPQLTPTNSLK

SEQ ID NO: 10611 - protein, 85 aa, Homo sapiens
RGGAHHRRCEVALLGCGAVLAATGLGFDLLEAGKCQLLPLEEPEPPAREEKKRREGLFQRSSRPRRSTSPPSRKLFKKEEPMLLL

SEQ ID NO: 10612 - protein, 85 aa, Homo sapiens
GDPSASLTLLSLSSISECNSTRSLLRSDSDEIVVYEMPVSPVEAPPLSPCTHNPLVNVRVERFKRDPNQSLTPTHVTLTTPSQPS

SEQ ID NO: 10613 - protein, 85 aa, Homo sapiens
SHRRTPSDGALKPETLLASRSPSSNGLSPSPGAGMLKTPSPSRDPGEFPRLPDPNVVFPPTPRRWNTQQDSTLERPKTLEFLPRP

SEQ ID NO: 10614 - protein, 85 aa, Homo sapiens
RPSANRQRLDPWWFVSPSHARSTSPANSSSTETPSNLDSCFASSSSTVEERPGLPALLPFQAGPLPPTERTLLDLDAEGQSQDST

SEQ ID NO: 10615 - protein, 84 aa, Homo sapiens
ESVAEGRALMSVKEMAKGITYDDPIKTSWTPPRYVLSMSEERHERVRKKYHILVEGDGIPPPIKSFKEMKFPAGVVPVLQALGL

SEQ ID NO: 10616 - protein, 85 aa, Homo sapiens
AQKKYLQAKLTQFLREDRIQLWKPPYTDENKKVGLALKDLAKQYSDRLECCENEVEKVIEEIRCKAIERGTGNDNYRTTGIATIE

SEQ ID NO: 10617 - protein, 85 aa, Homo sapiens
VFLPPRLKKDRKNLLETRLHITGRELRSKIAETFGLQENYIKIVINKKQLQLGKTLEEQGVAHNVKAMVLELKQSEEDARKNFQL

SEQ ID NO: 10618 - protein, 85 aa, Homo sapiens
QLEEEEQNEAKLKEKQIQRTKRGLEILAKRAAETVVDPEMTPYLDIANQTGRSIRIPPSERKALMLAMGYHEKGRAFLKRKEYGI

SEQ ID NO: 10619 - protein, 85 aa, Homo sapiens
QYSDRLECCENEVEKVIEEIRCKAIERGTGNDNYRTTGIATIEVFLPPRLKKDRKNLLETRLHITGRELRSKIAETFGLQENYIK

SEQ ID NO: 10620 - protein, 85 aa, Homo sapiens
IVINKKQLQLGKTLEEQGVAHNVKAMVLELKQSEEDARKNFQLEEEEQNEAKLKEKQIQRTKRGLEILAKRAAETVVDPEMTPYL

SEQ ID NO: 10621 - protein, 85 aa, Homo sapiens
TTVLWGCELSQERRTWTFRPQLEGKQSCRLLLHTICLGEKAKEEMHRVEILPPANQEDKKMQPVTIASLQASVLPMVSMVGVQLS

SEQ ID NO: 10622 - protein, 85 aa, Homo sapiens
GSFSSHMTEFPRKRKGSDSDPSHQNPLTYLLSTRIEISASSGSREAHSQTEKRRRDKMNNLIEELSAMIPQCNPMARKLDKLTVL

SEQ ID NO: 10623 - protein, 85 aa, Homo sapiens
RMAVQHLRSLKGLTNSYVGSNYRPSFLQDNELRHLILKTAEGFLFVVGCERGKILFVSKSVSKILNYDQASLTGQSLFDFLHPKD

SEQ ID NO: 10624 - protein, 85 aa, Homo sapiens
VAKVKEQLSSFDISPREKLIDAKTGLQVHSNLHAGRTRVYSGSRRSFFCRIKSCKISVKEEHGCLPNSKKKEHRKFYTIHCTGYL

SEQ ID NO: 10625 - protein, 85 aa, Homo sapiens
RSWPPNIVGMEEERNSKKDNSNFTCLVAIGRLQPYIVPQNSGEINVKPTEFITRFAVNGKFVYVDQRATAILGYLPQELLGTSCY

SEQ ID NO: 10626 - protein, 85 aa, Homo sapiens
EYFHQDDHNNLTDKHKAVLQSKEKILTDSYKFRAKDGSFVTLKSQWFSFTNPWTKELEYIVSVNTLVLGHSEPGEASFLPCSSQS

SEQ ID NO: 10627 - protein, 85 aa, Homo sapiens
SEESSRQSCMSVPGMSTGTVLGAGSIGTDIANEILDLQRLQSSSYLDDSSPTGLMKDTHTVNCRSMSNKELFPPSPSEMGELEAT

SEQ ID NO: 10628 - protein, 85 aa, Homo sapiens
SREAHSQTEKRRRDKMNNLIEELSAMIPQCNPMARKLDKLTVLRMAVQHLRSLKGLTNSYVGSNYRPSFLQDNELRHLILKTAEG

SEQ ID NO: 10629 - protein, 85 aa, Homo sapiens
FLFVVGCERGKILFVSKSVSKILNYDQASLTGQSLFDFLHPKDVAKVKEQLSSFDISPREKLIDAKTGLQVHSNLHAGRTRVYSG

SEQ ID NO: 10630 - protein, 85 aa, Homo sapiens
SRRSFFCRIKSCKISVKEEHGCLPNSKKKEHRKFYTIHCTGYLRSWPPNIVGMEEERNSKKDNSNFTCLVAIGRLQPYIVPQNSG

SEQ ID NO: 10631 - protein, 85 aa, Homo sapiens
EINVKPTEFITRFAVNGKFVYVDQRATAILGYLPQELLGTSCYEYFHQDDHNNLTDKHKAVLQSKEKILTDSYKFRAKDGSFVTL

SEQ ID NO: 10632 - protein, 85 aa, Homo sapiens
KSQWFSFTNPWTKELEYIVSVNTLVLGHSEPGEASFLPCSSQSSEESSRQSCMSVPGMSTGTVLGAGSIGTDIANEILDLQRLQS

SEQ ID NO: 10633 - protein, 85 aa, Homo sapiens
SSYLDDSSPTGLMKDTHTVNCRSMSNKELFPPSPSEMGELEATRQNQSTVAVHSHEPLLSDGAQLDFDALCDNDDTAMAAFMNYL

SEQ ID NO: 10634 - protein, 85 aa, Homo sapiens
KDKVFSEVSPLYTPFTKPASLFSSSLRCADLTLPEDISQLCKDINNDYLAERSIEEVYYLWCLAGGDLEKELVNKEIIRSKPPIC

SEQ ID NO: 10635 - protein, 84 aa, Homo sapiens
MAERSIEEVYYLWCLAGGDLEKELVNKEIIRSKPPICTLPNFLFEDGESFGQGRDRSSLLDDTTVTLSLCQLRNEQTFCLQVGS

SEQ ID NO: 10636 - protein, 85 aa, Homo sapiens
DINNDYLAERSIEEVYYLWCLAGGDLEKELVNKEIIRSKPPICTLPNFLFEDGESFGQGRDRSSLLDDTTVTLSLCQLRNEQTFC

SEQ ID NO: 10637 - protein, 85 aa, Homo sapiens
DCKLYSSGLVECEDQDPLNPDRSFDVESVKKEIQRGRKLKCKFCHKRGATVGCDLKNCNKNYHFFCAKKDDAVPQSDGVRGIYKL

SEQ ID NO: 10638 - protein, 85 aa, Homo sapiens
GATVGCDLKNCNKNYHFFCAKKDDAVPQSDGVRGIYKLLCQQHAQFPIIAQSAKFSGVKRKRGRKKPLSGNHVQPPETMKCNTFI

SEQ ID NO: 10639 - protein, 85 aa, Homo sapiens
FCHKRGATVGCDLKNCNKNYHFFCAKKDDAVPQSDGVRGIYKLLCQQHAQFPIIAQSAKFSGVKRKRGRKKPLSGNHVQPPETMK

SEQ ID NO: 10640 - protein, 84 aa, Homo sapiens
AKTEPVSILQPQTTVNPDRIKQTLPSSPTTTKSSPSDPMTTSRANQVQYHPVIYTILFTGDCLQTGEKDNGGLRIYSFIHIYAP

SEQ ID NO: 10641 - protein, 85 aa, Homo sapiens
ERENMDTDDERQYQDFLEDLEEDEAIRKNVNIYRDSAIPVESDTDDEGAPRISLAEMLEDLHISQDATGEEAKSAPEAADLESEV

SEQ ID NO: 10642 - protein, 84 aa, Homo sapiens
LEEDEAIRKNVNIYRDSAIPVESDTDDEGAPRISLAEMLEDLHISQDATGEEAKSAPEAADLESEVTEGPSVVVDACNPSTLGG

SEQ ID NO: 10643 - protein, 84 aa, Homo sapiens
VNDRFDPPVKRKKVEKSGLEKRIDQAVEEWNIEKAEELSNQLATREENHGSNVVCFSVSAIQRLVLSLCPFPDGVTSINYFSLV

SEQ ID NO: 10644 - protein, 85 aa, Homo sapiens
ELTQYFGVNDRFDPPVKRKKVEKSGLEKRIDQAVEEWNIEKAEELSNQLATREENHGSNVVCFSVSAIQRLVLSLCPFPDGVTSI

SEQ ID NO: 10645 - protein, 84 aa, Homo sapiens
TPVSSDHLFLFGGFTTDKQPLSDAWTYCISKNEWIQFNHPYTEKPRLWHTACASDEGEVIVFGGCANNLLVHHRAAKLRSSHLL

SEQ ID NO: 10646 - protein, 85 aa, Homo sapiens
VRIASLEVENQSLRGVVQELQQAISKLEARLNVLEKSSPGHRATAPQTQHVSPMRQVEPPAKKPATPAEDDEDDDIDLFGSDNEE

SEQ ID NO: 10647 - protein, 85 aa, Homo sapiens
RRPAPGKASGPLPSKCVAIDCEMVGTGPRGRVSELARCSIVSYHGNVLYDKYIRPEMPIADYRTRWSGITRQHMRKAVPFQVAQK

SEQ ID NO: 10648 - protein, 85 aa, Homo sapiens
GFMLPLIFRYSPRLMEKILQMAEGIDIGEMPSYDLVLSKPSKGQKRHLSTCDGQNPPKKQAGSKFHARPRFEPVHFVASSSKDER

SEQ ID NO: 10649 - protein, 85 aa, Homo sapiens
QEDPYGPQTKEVNEQTHFASMPRDIYQDYTQDSFSIQDGNSQYCDSSGFILTKDQPVTANMYFDSGNPAPSTTSQQANSQSTPEP

SEQ ID NO: 10650 - protein, 85 aa, Homo sapiens
SPSQTFPESVVAEKQYFIEKLTATIWKNLSNPEMTSGSDKINYTYMLTRCIQACKTNPEYIYAPLKEIPPADIPKNKKLLTDGYA

SEQ ID NO: 10651 - protein, 85 aa, Homo sapiens
CEVRCQNIYLTTGYAGSKNGSRDRATELAVKLLQKRIEVRVVRRKFKHTFGEDLVVCQIGMSSYEFPPALKPPEDLVVLGKDASG

SEQ ID NO: 10652 - protein, 85 aa, Homo sapiens
QPIFNASAKHWTNFVITENANDAIGILNNSASFNKMSIEYKYEMMPNRTWRCRVFLQDHCLAEGYGTKKTSKHAAADEALKILQK

SEQ ID NO: 10653 - protein, 85 aa, Homo sapiens
TQPTYPSVKSSQCHTGSSPRGSGKKKDIKDLVVYENSSNPVCTLNDTAQFNRMTVEYVYERMTGLRWKCKVILESEVIAEAVGVK

SEQ ID NO: 10654 - protein, 85 aa, Homo sapiens
KTVKYEAAGEAVKTLKKTQPTVINNLKKGAVEDVISRNEIQGRSAEEAYKQQIKEDNIGNQLLRKMGWTGGGLGKSGEGIREPIS

SEQ ID NO: 10655 - protein, 85 aa, Homo sapiens
VKEQHKREGLGLDVERVNKIAKRDIEQIIRNYARSESHTDLTFSRELTNDERKQIHQIAQKYGLKSKSHGVGHDRYLVVGRKRRK

SEQ ID NO: 10656 - protein, 85 aa, Homo sapiens
GQKRHLSTCDGQNPPKKQAGSKFHARPRFEPVHFVASSSKDERQEDPYGPQTKEVNEQTHFASMPRDIYQDYTQDSFSIQDGNSQ

SEQ ID NO: 10657 - protein, 85 aa, Homo sapiens
YCDSSGFILTKDQPVTANMYFDSGNPAPSTTSQQANSQSTPEPSPSQTFPESVVAEKQYFIEKLTATIWKNLSNPEMTSGSDKIN

SEQ ID NO: 10658 - protein, 85 aa, Homo sapiens
YTYMLTRCIQACKTNPEYIYAPLKEIPPADIPKNKKLLTDGYACEVRCQNIYLTTGYAGSKNGSRDRATELAVKLLQKRIEVRVV

SEQ ID NO: 10659 - protein, 85 aa, Homo sapiens
RRKFKHTFGEDLVVCQIGMSSYEFPPALKPPEDLVVLGKDASGQPIFNASAKHWTNFVITENANDAIGILNNSASFNKMSIEYKY

SEQ ID NO: 10660 - protein, 85 aa, Homo sapiens
EMMPNRTWRCRVFLQDHCLAEGYGTKKTSKHAAADEALKILQKTQPTYPSVKSSQCHTGSSPRGSGKKKDIKDLVVYENSSNPVC

SEQ ID NO: 10661 - protein, 85 aa, Homo sapiens
TLNDTAQFNRMTVEYVYERMTGLRWKCKVILESEVIAEAVGVKKTVKYEAAGEAVKTLKKTQPTVINNLKKGAVEDVISRNEIQG

SEQ ID NO: 10662 - protein, 85 aa, Homo sapiens
RSAEEAYKQQIKEDNIGNQLLRKMGWTGGGLGKSGEGIREPISVKEQHKREGLGLDVERVNKIAKRDIEQIIRNYARSESHTDLT

SEQ ID NO: 10663 - protein, 85 aa, Homo sapiens
EEPGMDTEAETVATEAPARPVNCLEAEAAAGAAAEDSGAARGSLQPAPAQPPGDPAAQASVSNGEDAGGGAGRELVDLKIIWNKT

SEQ ID NO: 10664 - protein, 85 aa, Homo sapiens
KHDVKFPLDSTGSELKQKIHSITGLPPAMQKVMYKGLVPEDKTLREIKVTSGAKIMVVGSTINDVLAVNTPKDAAQQDAKAEENK

SEQ ID NO: 10665 - protein, 85 aa, Homo sapiens
KEPLCRQKQHRKVLDKGKPEDVMPSVKGAQERLPTVPLSGMYNKSGGKVRLTFKLEQDQLWIGTKERTEKLPMGSIKNVVSEPIE

SEQ ID NO: 10666 - protein, 85 aa, Homo sapiens
SLQPAPAQPPGDPAAQASVSNGEDAGGGAGRELVDLKIIWNKTKHDVKFPLDSTGSELKQKIHSITGLPPAMQKVMYKGLVPEDK

SEQ ID NO: 10667 - protein, 85 aa, Homo sapiens
TLREIKVTSGAKIMVVGSTINDVLAVNTPKDAAQQDAKAEENKKEPLCRQKQHRKVLDKGKPEDVMPSVKGAQERLPTVPLSGMY

SEQ ID NO: 10668 - protein, 85 aa, Homo sapiens
NKSGGKVRLTFKLEQDQLWIGTKERTEKLPMGSIKNVVSEPIEGHEDYHMMAFQLGPTEASYYWVYWVPTQYVDAIKDTVLGKWQ

SEQ ID NO: 10669 - protein, 85 aa, Homo sapiens
VELCIKLLQVFRFCKSKCHKNFKKKRNPRKVRWTKAFRKAAGKELTVDNSFEFEKRRNEPIKYQRELWNKTIDAMKRVEEIKQKR

SEQ ID NO: 10670 - protein, 85 aa, Homo sapiens
KELTVDNSFEFEKRRNEPIKYQRELWNKTIDAMKRVEEIKQKRQAKFIMNRLKKNKELQKVQDIKEVKQNIHLIRAPLAGKGKQL

SEQ ID NO: 10671 - protein, 84 aa, Homo sapiens
SSRQSCMSVPGMSTGTVLGAGSIGTDIANEILDLQRLQSSSYLDDSSPTGLMKDTHTVNCRSVMVHSWISMPYVTMMTQPWLHL

SEQ ID NO: 10672 - protein, 85 aa, Homo sapiens
SGQEQDWQKMLDRLLTEMDNKLDRLELDPVKQLLEDRWKSLRQQLRERPPLYQADEAAAMRRQLLAHFHCLSCDRPLETPVTGHA

SEQ ID NO: 10673 - protein, 85 aa, Homo sapiens
IPVTPAGPGLPGHHSIRPYTVFELEQVRQHSRNLKLGSAFPRGDLAQMEQSVGRLRSMHSKMLMNIEKVQIHFGGSTKASSQIIR

SEQ ID NO: 10674 - protein, 85 aa, Homo sapiens
ELLHAQCLGSPCYKRMMRWTSWAWMATFTRDGWTQGCQASSEKTAQGPQSASPSSPGPTCTGRHPSAAMASCPLGHRAPRFRLAT

SEQ ID NO: 10675 - protein, 85 aa, Homo sapiens
AWMATFTRDGWTQGCQASSEKTAQGPQSASPSSPGPTCTGRHPSAAMASCPLGHRAPRFRLATPQKDRPSSEGRLSQPNTAHPPS

SEQ ID NO: 10676 - protein, 85 aa, Homo sapiens
QQLRERPPLYQADEAAAMRRQLLAHFHCLSCDRPLETPVTGHAIPVTPAGPGLPGHHSIRPYTVFELEQVRQHSRNLKLGSAFPR

SEQ ID NO: 10677 - protein, 85 aa, Homo sapiens
GDLAQMEQSVGRLRSMHSKMLMNIEKVQIHFGGSTKASSQIIRELLHAQCLGSPCYKRMMRWTSWAWMATFTRDGWTQGCQASSE

SEQ ID NO: 10678 - protein, 84 aa, Homo sapiens
CDEMVSRDLKQQLLLLNGRWRELFMEVKQYAQADEMDRMKKEYTDCVVTLSAFATEAHKKLSEPLEVSFMNVKLLIQDLEVRGF

SEQ ID NO: 10679 - protein, 85 aa, Homo sapiens
MMVDLKVAAYLDPQIRALWETKGPARESSGQSKKSPQMDCLDPKSSCWHFRNFTYDEAGGPREAVSKLQELCHLWLKPEIHSKEQ

SEQ ID NO: 10680 - protein, 85 aa, Homo sapiens
ILELLVLEQFLTILPRETQTQMQKHHPQSIEEAVALVEHLQRESGQTWNGVAVHELGKEAVLLGETAEASSFGLKPTESQPVGVS

SEQ ID NO: 10681 - protein, 84 aa, Homo sapiens
FGLKPTESQPVGVSQDEEFWNTYEGLQEQLSRNTHKETEPVYERAVPTQQILAFPEQTNTKDWTVTPEHVLPESQHCLCSPNLK

SEQ ID NO: 10682 - protein, 85 aa, Homo sapiens
PKSSCWHFRNFTYDEAGGPREAVSKLQELCHLWLKPEIHSKEQILELLVLEQFLTILPRETQTQMQKHHPQSIEEAVALVEHLQR

SEQ ID NO: 10683 - protein, 85 aa, Homo sapiens
ESGQTWNGVAVHELGKEAVLLGETAEASSFGLKPTESQPVGVSQDEEFWNTYEGLQEQLSRNTHKETEPVYERAVPTQQILAFPE

SEQ ID NO: 10684 - protein, 85 aa, Homo sapiens
MSDTPAPKRKRSPPLGGAPSPSSLSLPPSTGFPLQASGVPSPYLSSLPEPSPLRPKREKRPRLPRKLKMAVGPPDCPVGGPLTFP

SEQ ID NO: 10685 - protein, 84 aa, Homo sapiens
EKRPRLPRKLKMAVGPPDCPVGGPLTFPGRGSGAGVGTTLTPLPPPKMPPPTILSTVPRQMFSDAGSGDDALDGDDDLVIDIPE

SEQ ID NO: 10686 - protein, 85 aa, Homo sapiens
YLSSLPEPSPLRPKREKRPRLPRKLKMAVGPPDCPVGGPLTFPGRGSGAGVGTTLTPLPPPKMPPPTILSTVPRQMFSDAGSGDD

SEQ ID NO: 10687 - protein, 85 aa, Homo sapiens
EAYEQVQKGPLKLKGVAELGVTKRKKKKKDKDKAKLLEAMGTSKKNEEEKRRGLDKRTPAQAAFEKMQEKRQGHQTSCTATGFQG

SEQ ID NO: 10688 - protein, 84 aa, Homo sapiens
KRKKKKKDKDKAKLLEAMGTSKKNEEEKRRGLDKRTPAQAAFEKMQEKRQGHQTSCTATGFQGHKANAARSYAWTQNWYCVPSS

SEQ ID NO: 10689 - protein, 84 aa, Homo sapiens
SNKVTTPQEGYISRMALSVLLKRSQDVLHRYIEDERLSGKCPLPRQQVTEIIFVLKAVSTLIDSLKKTQPENACISLFGIPPYF

SEQ ID NO: 10690 - protein, 85 aa, Homo sapiens
KSVLIGEFLEKVRQKKKRDITVLDLGCGKGGDLLKWKKGRINKLVCTDIADVSVKQCQQRYEDMKNRRDSEYIFSAEFITADSSK

SEQ ID NO: 10691 - protein, 85 aa, Homo sapiens
ELLIDKFRDPQMCFDICSCQFVCHYSFESYEQADMMLRNACERLSPGGYFIGTTPNSFELIRRLEASETESFGNEIYTVKFQKKG

SEQ ID NO: 10692 - protein, 85 aa, Homo sapiens
DYPLFGCKYDFNLEGVVDVPEFLVYFPLLNEMAKKYNMKLVYKKTFLEFYEEKIKNNENKMLLKRMQALEPYPANESSKLVSEKV

SEQ ID NO: 10693 - protein, 85 aa, Homo sapiens
KLVCTDIADVSVKQCQQRYEDMKNRRDSEYIFSAEFITADSSKELLIDKFRDPQMCFDICSCQFVCHYSFESYEQADMMLRNACE

SEQ ID NO: 10694 - protein, 85 aa, Homo sapiens
RLSPGGYFIGTTPNSFELIRRLEASETESFGNEIYTVKFQKKGDYPLFGCKYDFNLEGVVDVPEFLVYFPLLNEMAKKYNMKLVY

SEQ ID NO: 10695 - protein, 85 aa, Homo sapiens
KKTFLEFYEEKIKNNENKMLLKRMQALEPYPANESSKLVSEKVDDYEHAAKYMKNSQVRLPLGTLSKSEWEATSIYLVFAFEKQQ

SEQ ID NO: 10696 - protein, 12 aa, Homo sapiens
SYSTVTSTSLYC

SEQ ID NO: 10697 - protein, 84 aa, Homo sapiens
HTQKNVLIEVNPQTRIPRTFDRFCGLMVQLLHKLSVRAADGPQKLLKVSVEYTEKMVSISNYPLSAALTCAKLTTAFEEVWGVI

SEQ ID NO: 10698 - protein, 13 aa, Homo sapiens
ACYRFISIHRRMF

SEQ ID NO: 10699 - protein, 85 aa, Homo sapiens
KFSLFTAVHKHYSLVQWQEFAGQNPDCLEHLAASSGTGSSDFEQLEQILEAIPQAGNVVTGEMVEELILSGADIIKVGIGPGSVC

SEQ ID NO: 10700 - protein, 85 aa, Homo sapiens
TTRKKTGVGYPQLSAVMECADAAHGLKGHIISDGGCSCPGDVAKAFGAGADFVMLGGMLAGHSESGGELIERDGKKYKLFYGMSS

SEQ ID NO: 10701 - protein, 85 aa, Homo sapiens
EQLEQILEAIPQAGNVVTGEMVEELILSGADIIKVGIGPGSVCTTRKKTGVGYPQLSAVMECADAAHGLKGHIISDGGCSCPGDV

SEQ ID NO: 10702 - protein, 85 aa, Homo sapiens
AKAFGAGADFVMLGGMLAGHSESGGELIERDGKKYKLFYGMSSEMAMKKYAGGVAEYRASEGKTVEVPFKGDVEHTIRDILGGIR

SEQ ID NO: 10703 - protein, 85 aa, Homo sapiens
EAEAPDGGSRRDPRKSQDSRKPLQKKRKRSPKSGLGPADLALLGLSAERVWLDKSLFDQAESSYRQKLADVAAQAAWPPALAPWG

SEQ ID NO: 10704 - protein, 85 aa, Homo sapiens
AVYTYLRLIVDHHGTAQLQALRQKEVDFCISLLRERFMECLMIGRDLVRLLQNVARIPEFELLWKDIIHNPQALSPQFTGILQLL

SEQ ID NO: 10705 - protein, 85 aa, Homo sapiens
QSRTSRKFLACRLTPDMETKLLFMTSRVRFGQQKRYQDWFQRQYLSTPDSQSLRCDLIRYICGVVHPSNEVLSSDILPRWAIIGW

SEQ ID NO: 10706 - protein, 85 aa, Homo sapiens
LLTTCTSNVAASNAKLALFYDWLFFSPDKDSIMNIEPAILVMHHSMKPHPAITATLLDFMCRIIPNFYPPLEGHVRQGVFSSLNH

SEQ ID NO: 10707 - protein, 85 aa, Homo sapiens
IVEKRVLAHLAPLFDNPKLDKELRAMLREKFPEFCSSPSPPVEVKIEEPVSMEMDNHMSDKDESCYDNAEAAFSDDEEDLNSKGK

SEQ ID NO: 10708 - protein, 85 aa, Homo sapiens
KREFRFHPIKETVVEEPVDITPYLDQLDESLRDKVLQLQKGSDTEAQCEVMQEIVDQVLEEDFDSEQLSVLASCLQELFKAHFRG

SEQ ID NO: 10709 - protein, 85 aa, Homo sapiens
EVLPEEITEESLEESVGKPLYLIFRNLCQMQEDNSSFSLLLDLLSELYQKQPKIGYHLLYYLRASKAAAGKMNLYESFAQATQLG

SEQ ID NO: 10710 - protein, 85 aa, Homo sapiens
DLHTCLMMDMKACQEDDVRLLCHLTPSIYTEFPDETLRSGELLNMIVAVIDSAQLQELVCHVMMGNLVMFRKDSVLNILIQSLDW

SEQ ID NO: 10711 - protein, 85 aa, Homo sapiens
ETFEQYCAWQLFLAHNIPLETIIPILQHLKYKEHPEALSCLLLQLRREKPSEEMVKMVLSRPCHPDDQFTTSILRHWCMKHDELL

SEQ ID NO: 10712 - protein, 85 aa, Homo sapiens
AEHIKSLLIKNNSLPRKRQSLRSSSSKLAQLTLEQILEHLDNLRLNLTNTKQNCMPSTLGVQCRRCCPGPDYAWSQAGGRGRTPG

SEQ ID NO: 10713 - protein, 85 aa, Homo sapiens
ATTHTRDKTTCACCLISSQTSDCFSFPALPFLPLVFSQTPILQALQHVQASCDEAHKMKFSDLFSLAEEYEDSSTKPPKSRRKAA

SEQ ID NO: 10714 - protein, 85 aa, Homo sapiens
IGRDLVRLLQNVARIPEFELLWKDIIHNPQALSPQFTGILQLLQSRTSRKFLACRLTPDMETKLLFMTSRVRFGQQKRYQDWFQR

SEQ ID NO: 10715 - protein, 85 aa, Homo sapiens
QYLSTPDSQSLRCDLIRYICGVVHPSNEVLSSDILPRWAIIGWLLTTCTSNVAASNAKLALFYDWLFFSPDKDSIMNIEPAILVM

SEQ ID NO: 10716 - protein, 85 aa, Homo sapiens
HHSMKPHPAITATLLDFMCRIIPNFYPPLEGHVRQGVFSSLNHIVEKRVLAHLAPLFDNPKLDKELRAMLREKFPEFCSSPSPPV

SEQ ID NO: 10717 - protein, 85 aa, Homo sapiens
EVKIEEPVSMEMDNHMSDKDESCYDNAEAAFSDDEEDLNSKGKKREFRFHPIKETVVEEPVDITPYLDQLDESLRDKVLQLQKGS

SEQ ID NO: 10718 - protein, 85 aa, Homo sapiens
DTEAQCEVMQEIVDQVLEEDFDSEQLSVLASCLQELFKAHFRGEVLPEEITEESLEESVGKPLYLIFRNLCQMQEDNSSFSLLLD

SEQ ID NO: 10719 - protein, 85 aa, Homo sapiens
LLSELYQKQPKIGYHLLYYLRASKAAAGKMNLYESFAQATQLGDLHTCLMMDMKACQEDDVRLLCHLTPSIYTEFPDETLRSGEL

SEQ ID NO: 10720 - protein, 85 aa, Homo sapiens
MNMIVAVIDSAQLQELVCHVMMGNLVMFRKDSVLNILIQSLDWETFEQYCAWQLFLAHNIPLETIIPILQHLKYKEHPEALSCLL

SEQ ID NO: 10721 - protein, 85 aa, Homo sapiens
LQLRREKPSEEMVKMVLSRPCHPDDQFTTSILRHWCMKHDELLAEHIKSLLIKNNSLPRKRQSLRSSSSKLAQLTLEQILEHLDN

SEQ ID NO: 10722 - protein, 85 aa, Homo sapiens
MRLNLTNTKQNCMPSTLGVQCRRCCPGPDYAWSQAGGRGRTPGATTHTRDKTTCACCLISSQTSDCFSFPALPFLPLVFSQTPIL

SEQ ID NO: 10723 - protein, 85 aa, Homo sapiens
QALQHVQASCDEAHKMKFSDLFSLAEEYEDSSTKPPKSRRKAALSSPRSRKNATQPPNAEEESGSSSASEEEDTKPKPTKRKRKG

SEQ ID NO: 10724 - protein, 65 aa, Homo sapiens
GRPPLPCPTVTSCRRMQRPPGSASLPTTAPSAATTLPRPCGWPGASKLPPCLTDPVLGLACPCPA

SEQ ID NO: 10725 - protein, 14 aa, Homo sapiens
SSNMTTQKGDSTSR

SEQ ID NO: 10726 - protein, 84 aa, Homo sapiens
LRDIARARENIQKSLAGSSGPGASSGTSGDHGELVVRIASLEVENQSLRGVVQELQQAISKLEARLNVLEKSSPGHRATAPQTQ

SEQ ID NO: 10727 - protein, 23 aa, Homo sapiens
PGASKLPPCLTDPVLGLACPCPA

SEQ ID NO: 10728 - protein, 85 aa, Homo sapiens
PVKKKRKSPGVAAAVAEDGGLKKCKISRCDCTEKLQNKFDFLRSQLNDISSFKNIYRYAFDFARDKDQRSLDIDTAKSMLALLLG

SEQ ID NO: 10729 - protein, 38 aa, Homo sapiens
PPDYCLPLSPAHLKRGRHHQPLQHSPVLLLCRPCQHPH

SEQ ID NO: 10730 - protein, 9 aa, Homo sapiens
EGSSPTGSI

SEQ ID NO: 10731 - protein, 11 aa, Homo sapiens
YAGLPAARRLP

SEQ ID NO: 10732 - protein, 34 aa, Homo sapiens
LLHLQKSGCSHSSAGPLKRPSRLRPWPGKLPKES

SEQ ID NO: 10733 - protein, 51 aa, Homo sapiens
SCTVTPGTTSVSSAPGLSALAATLSSTDVSTLEKNPCSVRYAGLPAARRLP

SEQ ID NO: 10734 - protein, 85 aa, Homo sapiens
RFVLSGNLHGGSVVASYPFDDSPEHKATGIYSKTSDDEVFKYLAKAYASNHPIMKTGEPHCPGDEDETFKDGITNGAHWYDVEGG

SEQ ID NO: 10735 - protein, 85 aa, Homo sapiens
MQDYNYVWANCFEITLELSCCKYPPASQLRQEWENNRESLITLIEKVHIGVKGFVKDSITGSGLENATISVAGINHNITTGRFGD

SEQ ID NO: 10736 - protein, 85 aa, Homo sapiens
FYRLLVPGTYNLTVVLTGYMPLTVTNVVVKEGPATEVDFSLRPTVTSVIPDTTEAVSTASTVAIPNILSGTSSSYQPIQPKDFHH

SEQ ID NO: 10737 - protein, 85 aa, Homo sapiens
HHFPDMEIFLRRFANEYPNITRLYSLGKSVESRELYVMEISDNPGVHEPGEPEFKYIGNMHGNEVVGRELLLNLIEYLCKNFGTD

SEQ ID NO: 10738 - protein, 85 aa, Homo sapiens
PEVTDLVHNTRIHLMPSMNPDGYEKSQEGDSISVIGRNNSNNFDLNRNFPDQFVQITDPTQPETIAVMSWMKSYPFVLSANLHGG

SEQ ID NO: 10739 - protein, 85 aa, Homo sapiens
SLVVNYPFDDDEQGLATYSKSPDDAVFQQIALSYSKENSQMFQGRPCKNMYPNEYFPHGITNGASWYNVPGGMQDWNYLQTNCFE

SEQ ID NO: 10740 - protein, 85 aa, Homo sapiens
VTIELGCVKYPLEKELPNFWEQNRRSLIQFMKQVHQGVRGFVLDATDGRGILNATISVAEINHPVTTYKTGDYWRLLVPGTYKIT

SEQ ID NO: 10741 - protein, 85 aa, Homo sapiens
ASARGYNPVTKNVTVKSEGAIQVNFTLVRSSTDSNNESKKGKGASSSTNDASDPTTKEFETLIKDLSAENGLESLMLRSSSNLAL

SEQ ID NO: 10742 - protein, 85 aa, Homo sapiens
ALYRYHSYKDLSEFLRGLVMNYPHITNLTNLGQSTEYRHIWSLEISNKPNVSEPEEPKIRFVAGIHGNAPVGTELLLALAEFLCL

SEQ ID NO: 10743 - protein, 85 aa, Homo sapiens
NYKKNPAVTQLVDRTRIVIVPSLNPDGRERAQEKDCTSKIGQTNARGKDLDTDFTNNASQPETKAIIENLIQKQDFSLSVALDGG

SEQ ID NO: 10744 - protein, 85 aa, Homo sapiens
SMLVTYPYDKPVQTVENKETLKHLASLYANNHPSMHMGQPSCPNKSDENIPGGVMRGAEWHSHLGSMKDYSVTYGHCPEITVYTS

SEQ ID NO: 10745 - protein, 85 aa, Homo sapiens
CCYFPSAARLPSLWADNKRSLLSMLVEVHKGVHGFVKDKTGKPISKAVIVLNEGIKVQTKEGGYFHVLLAPGVHNIIAIADGYQQ

SEQ ID NO: 10746 - protein, 85 aa, Homo sapiens
QHSQVFVHHDAASSVVIVFDTDNRIFGLPRELVVTVSGATMSALILTACIIWCICSIKSNRHKDGFHRLRQHHDEYEDEIRMMST

SEQ ID NO: 10747 - protein, 85 aa, Homo sapiens
MAKAYASNHPIMKTGEPHCPGDEDETFKDGITNGAHWYDVEGGMQDYNYVWANCFEITLELSCCKYPPASQLRQEWENNRESLIT

SEQ ID NO: 10748 - protein, 85 aa, Homo sapiens
MIEKVHIGVKGFVKDSITGSGLENATISVAGINHNITTGRFGDFYRLLVPGTYNLTVVLTGYMPLTVTNVVVKEGPATEVDFSLR

SEQ ID NO: 10749 - protein, 85 aa, Homo sapiens
PTVTSVIPDTTEAVSTASTVAIPNILSGTSSSYQPIQPKDFHHHHFPDMEIFLRRFANEYPNITRLYSLGKSVESRELYVMEISD

SEQ ID NO: 10750 - protein, 85 aa, Homo sapiens
NPGVHEPGEPEFKYIGNMHGNEVVGRELLLNLIEYLCKNFGTDPEVTDLVHNTRIHLMPSMNPDGYEKSQEGDSISVIGRNNSNN

SEQ ID NO: 10751 - protein, 85 aa, Homo sapiens
FDLNRNFPDQFVQITDPTQPETIAVMSWMKSYPFVLSANLHGGSLVVNYPFDDDEQGLATYSKSPDDAVFQQIALSYSKENSQMF

SEQ ID NO: 10752 - protein, 85 aa, Homo sapiens
QGRPCKNMYPNEYFPHGITNGASWYNVPGGMQDWNYLQTNCFEVTIELGCVKYPLEKELPNFWEQNRRSLIQFMKQVHQGVRGFV

SEQ ID NO: 10753 - protein, 85 aa, Homo sapiens
LDATDGRGILNATISVAEINHPVTTYKTGDYWRLLVPGTYKITASARGYNPVTKNVTVKSEGAIQVNFTLVRSSTDSNNESKKGK

SEQ ID NO: 10754 - protein, 85 aa, Homo sapiens
GASSSTNDASDPTTKEFETLIKDLSAENGLESLMLRSSSNLALALYRYHSYKDLSEFLRGLVMNYPHITNLTNLGQSTEYRHIWS

SEQ ID NO: 10755 - protein, 85 aa, Homo sapiens
LEISNKPNVSEPEEPKIRFVAGIHGNAPVGTELLLALAEFLCLNYKKNPAVTQLVDRTRIVIVPSLNPDGRERAQEKDCTSKIGQ

SEQ ID NO: 10756 - protein, 85 aa, Homo sapiens
TNARGKDLDTDFTNNASQPETKAIIENLIQKQDFSLSVALDGGSMLVTYPYDKPVQTVENKETLKHLASLYANNHPSMHMGQPSC

SEQ ID NO: 10757 - protein, 85 aa, Homo sapiens
PNKSDENIPGGVMRGAEWHSHLGSMKDYSVTYGHCPEITVYTSCCYFPSAARLPSLWADNKRSLLSMLVEVHKGVHGFVKDKTGK

SEQ ID NO: 10758 - protein, 85 aa, Homo sapiens
PISKAVIVLNEGIKVQTKEGGYFHVLLAPGVHNIIAIADGYQQQHSQVFVHHDAASSVVIVFDTDNRIFGLPRELVVTVSGATMS

SEQ ID NO: 10759 - protein, 85 aa, Homo sapiens
AAAALRDPAQQGYVTFEDVAVYFSQEEWRLLDDAQRLLYRNVMLENFTLLASLGCWHGAEAEEAPEQIASVGLLSSNIQQHQKQH

SEQ ID NO: 10760 - protein, 85 aa, Homo sapiens
RLLYRNVMLENFTLLASLGCWHGAEAEEAPEQIASVGLLSSNIQQHQKQHCGEKPLKRQEGRVPVLRSCKVHLSEKSLQSREVGK

SEQ ID NO: 10761 - protein, 84 aa, Homo sapiens
FVETKQSQTTSIASEDPLQNLCLASQEVLQKAQQSGRSKCLKCGGSRMFYCYTCYVPVENVPIEQIPLVKENPMPEDLSLSPMS

SEQ ID NO: 10762 - protein, 85 aa, Homo sapiens
GQEVEYFVAGTHPYPPGPGVALTADTKIQRMPSESAAQSLAVALPLQTKADANRTAPSGSEYRHPGASDRPQPTAMNSIVMETGN

SEQ ID NO: 10763 - protein, 85 aa, Homo sapiens
TKNSALMAKKAPTMPKPQWHPPWKLYRVISGHLGWVRCIAVEPGNQWFVTGSADRTIKIWDLASGKLKLSLTGHISTVRGVIVST

SEQ ID NO: 10764 - protein, 85 aa, Homo sapiens
RSPYLFSCGEDKQVKCWDLEYNKVIRHYHGHLSAVYGLDLHPTIDVLVTCSRDSTARIWDVRTKASVHTLSGHTNAVATVRCQAA

SEQ ID NO: 10765 - protein, 85 aa, Homo sapiens
EPQIITGSHDTTIRLWDLVAGKTRVTLTNHKKSVRAVVLHPRHYTFASGSPDNIKQWKFPDGSFIQNLSGHNAIINTLTVNSDGV

SEQ ID NO: 10766 - protein, 85 aa, Homo sapiens
LVSGADNGTMHLWDWRTGYNFQRVHAAVQPGSLDSESGIFACAFDQSESRLLTAEADKTIKVYREDDTATEETHPVSWKPEIIKR

SEQ ID NO: 10767 - protein, 85 aa, Homo sapiens
MAIKLRNEYGPVLHMPTSKENLKEKGPQNATDSYVHKQYPANQGQEVEYFVAGTHPYPPGPGVALTADTKIQRMPSESAAQSLAV

SEQ ID NO: 10768 - protein, 85 aa, Homo sapiens
ALPLQTKADANRTAPSGSEYRHPGASDRPQPTAMNSIVMETGNTKNSALMAKKAPTMPKPQWHPPWKLYRVISGHLGWVRCIAVE

SEQ ID NO: 10769 - protein, 85 aa, Homo sapiens
PGNQWFVTGSADRTIKIWDLASGKLKLSLTGHISTVRGVIVSTRSPYLFSCGEDKQVKCWDLEYNKVIRHYHGHLSAVYGLDLHP

SEQ ID NO: 10770 - protein, 85 aa, Homo sapiens
TIDVLVTCSRDSTARIWDVRTKASVHTLSGHTNAVATVRCQAAEPQIITGSHDTTIRLWDLVAGKTRVTLTNHKKSVRAVVLHPR

SEQ ID NO: 10771 - protein, 85 aa, Homo sapiens
HYTFASGSPDNIKQWKFPDGSFIQNLSGHNAIINTLTVNSDGVLVSGADNGTMHLWDWRTGYNFQRVHAAVQPGSLDSESGIFAC

SEQ ID NO: 10772 - protein, 85 aa, Homo sapiens
KCEHCTRKECSKKTKTDDQENVSADAPSPAQENGEASRFFSFVSAQSKLLLLFFSLGAHSTVHITALKKTEVRGHGGSRLESQHF

SEQ ID NO: 10773 - protein, 84 aa, Homo sapiens
KTDDQENVSADAPSPAQENGEASRFFSFVSAQSKLLLLFFSLGAHSTVHITALKKTEVRGHGGSRLESQHFGRPRWTDHLRSGV

SEQ ID NO: 10774 - protein, 85 aa, Homo sapiens
AQPGEEPIKYGELIVLGCCEEGGEETEAQRGEVTGPRAHSCYNGCLASGDKGRRRSRLALSRRSHANGVKPDVMHHISTPLVSKA

SEQ ID NO: 10775 - protein, 85 aa, Homo sapiens
AAERKTRLSKNLLRMKFMQRGLDSETKKQLEEEEKKIISEEHWYLDLPELKEKESFIIEEQSFLLCEDLLYGRMSFRGFNPEVEV

SEQ ID NO: 10776 - protein, 84 aa, Homo sapiens
MRMKFMQRGLDSETKKQLEEEEKKIISEEHWYLDLPELKEKESFIIEEQSFLLCEDLLYGRMSFRGFNPEVEVFLHQVPFLLII

SEQ ID NO: 10777 - protein, 84 aa, Homo sapiens
HFRRPDVSVQGDEVTLYTPEERDPVPLSIHHMPICVSFAFFQQGTYLLVDPNEREERVMDGLLVIAMNKHREICTIQSSGSEMQ

SEQ ID NO: 10778 - protein, 85 aa, Homo sapiens
RLPEASGPSFVSSHYILESPGGVSLEGSELMFPDLVQLICAYCHTRDILLLPLQLPRAIHHAATHKELEAISHLGIEFWSSSLNI

SEQ ID NO: 10779 - protein, 85 aa, Homo sapiens
KAQRGPAGGPVLPQLKARSPQELDQGTGAALCFFNPLFPGDLGPTKREKFKRSFKVRVSTETSSPLSPPAVPPPPVPVLPGAVPS

SEQ ID NO: 10780 - protein, 85 aa, Homo sapiens
QTERLPPCQLLRRESSVGYRVPAGSGPSLPPMPSLQEVDCGSPSSSEEEGVPGSRGSPATSPHLGRRRPLLRSMSAAFCSLLAPE

SEQ ID NO: 10781 - protein, 85 aa, Homo sapiens
RQVGRAAAALMQDRHTAAGQLVQDLLTQVRAGPEPQELQGIRQALSRARAMLSAELGPEKLLSPKRLVELEQVRQKLLQLLRTYS

SEQ ID NO: 10782 - protein, 85 aa, Homo sapiens
PSAQVKRLLQACKLLYMALRTQEGEGAGADEFLPLLSLVLAHCDLPELLLEAEYMSELLEPSLLTGEGGYYLTSLSASLALLSGL

SEQ ID NO: 10783 - protein, 85 aa, Homo sapiens
GQAHTLPLSPVQELRRSLSLWEQRRLPATHCFQHLLRVAYQDPSSGCTSKTLAVPPEASIATLNQLCATKFRVTQPNTFGLFLYK

SEQ ID NO: 10784 - protein, 85 aa, Homo sapiens
EQGYHRLPPGALAHRLPTTGYLVYRRAEWPETQGAVTEEEGSGQSEARSRGEEQGCQGDGDAGVKASPRDIREQSETTAEGGQGQ

SEQ ID NO: 10785 - protein, 85 aa, Homo sapiens
CHTRDILLLPLQLPRAIHHAATHKELEAISHLGIEFWSSSLNIKAQRGPAGGPVLPQLKARSPQELDQGTGAALCFFNPLFPGDL

SEQ ID NO: 10786 - protein, 85 aa, Homo sapiens
GPTKREKFKRSFKVRVSTETSSPLSPPAVPPPPVPVLPGAVPSQTERLPPCQLLRRESSVGYRVPAGSGPSLPPMPSLQEVDCGS

SEQ ID NO: 10787 - protein, 85 aa, Homo sapiens
PSSSEEEGVPGSRGSPATSPHLGRRRPLLRSMSAAFCSLLAPERQVGRAAAALMQDRHTAAGQLVQDLLTQVRAGPEPQELQGIR

SEQ ID NO: 10788 - protein, 85 aa, Homo sapiens
QALSRARAMLSAELGPEKLLSPKRLVELEQVRQKLLQLLRTYSPSAQVKRLLQACKLLYMALRTQEGEGAGADEFLPLLSLVLAH

SEQ ID NO: 10789 - protein, 85 aa, Homo sapiens
CDLPELLLEAEYMSELLEPSLLTGEGGYYLTSLSASLALLSGLGQAHTLPLSPVQELRRSLSLWEQRRLPATHCFQHLLRVAYQD

SEQ ID NO: 10790 - protein, 85 aa, Homo sapiens
PSSGCTSKTLAVPPEASIATLNQLCATKFRVTQPNTFGLFLYKEQGYHRLPPGALAHRLPTTGYLVYRRAEWPETQGAVTEEEGS

SEQ ID NO: 10791 - protein, 84 aa, Homo sapiens
TPFTARGRFATVVEELFRDGVNWGRIVAFFEFGGVMCVESVNREMSPLVDNIALWMTEYLNRHLHTWIQDNGGWVGALGDVSLG

SEQ ID NO: 10792 - protein, 85 aa, Homo sapiens
PQTQHVSPMRQVEPPAKKPATPAEDDEDDDIDLFGSDNEEEDKEAAQLREERLRQYAEKKAKKPALVAKSSILLDVKPWDDETDM

SEQ ID NO: 10793 - protein, 31 aa, Homo sapiens
MKVKIAWGCSPERRCVTASGMTLTTQRLPSA

SEQ ID NO: 10794 - protein, 10 aa, Homo sapiens
RRASLPTSSS

SEQ ID NO: 10795 - protein, 79 aa, Homo sapiens
RGSTPVSSGQACPQRRWLPSTAWALAPPTRSFWNSRSPSGALSATAYSLCGRTKQRATPSPTHLSSGTARSAALMSSTR

SEQ ID NO: 10796 - protein, 7 aa, Homo sapiens
MSATAMC

SEQ ID NO: 10797 - protein, 15 aa, Homo sapiens
WRAVRAAHTAWTRCP

SEQ ID NO: 10798 - protein, 33 aa, Homo sapiens
TLGRVARVERSPGGAGGMRMSSGRWWWSARTVS

SEQ ID NO: 10799 - protein, 50 aa, Homo sapiens
SPSGALSATAYSLCGRTKQRATPSPTHLSSGTARSAALMSSTRLSATAMC

SEQ ID NO: 10800 - protein, 80 aa, Homo sapiens
PTFQNLGESCARPGAATLTSAAPIHTRRWAPAGRMWRSWPSPCRTQRAQRQRMEAPQSSSLVTFSLPSAQNSPWMLTGAP

SEQ ID NO: 10801 - protein, 85 aa, Homo sapiens
SIVYRCKQKGTQKPYALKVLKKTVDKKIVRTEIGVLLRLSHPNIIKLKEIFETPTEISLVLELVTGGELFDRIVEKGYYSERDAA

SEQ ID NO: 10802 - protein, 84 aa, Homo sapiens
FTNHWWNELFNKTAANLVVETGQDGVQIRSLSKETTRYNHPKPNLLYQKFVKWDPVTSLAVAYLDCPDPQQELRSSGSVDPAIC

SEQ ID NO: 10803 - protein, 85 aa, Homo sapiens
TLKQDTHGVGHDPAKEFTNHWWNELFNKTAANLVVETGQDGVQIRSLSKETTRYNHPKPNLLYQKFVKWDPVTSLAVAYLDCPDP

SEQ ID NO: 10804 - protein, 84 aa, Homo sapiens
EEDVQLPRAYMENKAFSMDEHNAALRTAGFPNGSLGKRPSGSLGKRPSAPFRSNVYQPTEMAVVLNGGTEMVTHPRSLESFGAF

SEQ ID NO: 10805 - protein, 85 aa, Homo sapiens
NILVTELFDTELIGEGALPSYEHAHRHLVEENCEAVPHRATVYAQLVESGRMWSWNKLFPIHVQTSLGEQVIVPPVDVESCPGAP

SEQ ID NO: 10806 - protein, 84 aa, Homo sapiens
VHVQVVHERHKKYRCELCNKAFVTPSVLRSHKKTHTGEKEKICPYCGQKFASSGTLRVHIRSHTGEAVQVLRVQQGLQPEARPG

SEQ ID NO: 10807 - protein, 85 aa, Homo sapiens
AAVPPGLEPWNRVRIPKAGNRSAVTVQNPGAALDLCIAAVIKECHLVILSLKSQTLDAETDVLCAVLYSNHNRMGRHKPHLALKQ

SEQ ID NO: 10808 - protein, 84 aa, Homo sapiens
PGAALDLCIAAVIKECHLVILSLKSQTLDAETDVLCAVLYSNHNRMGRHKPHLALKQVEQCLKRLKNMNLEGSIQDLFELFSSK

SEQ ID NO: 10809 - protein, 85 aa, Homo sapiens
PKLVKNLLGEMPLWVCQSCRKSMEEDERQTGREHAVAISLSHTSCKSQSCGDDSHSSSSSSSSSSSSSSSSCPGNSGDWDPSSFL

SEQ ID NO: 10810 - protein, 84 aa, Homo sapiens
VAISLSHTSCKSQSCGDDSHSSSSSSSSSSSSSSSSCPGNSGDWDPSSFLSAHKLSGLWNSPHSSGAMPGSSLGSPPTIPACRS

SEQ ID NO: 10811 - protein, 85 aa, Homo sapiens
PTCSPKHEGFSPKKSASQAQLLAHAQEALSNSWCLVQDFGSTQIGMESTLSDDSTPPSSSPKIPSGPWQEAKCSYPYHTLSQSSD

SEQ ID NO: 10812 - protein, 85 aa, Homo sapiens
EFLDEPLPPVHHWTSQQVGQWLQSLNLEQYAAEFAARQVDGPQLLQLDGSKLKSLGLSNSHDRALVKRKLKEMAAAAEKERKAQE

SEQ ID NO: 10813 - protein, 85 aa, Homo sapiens
NRLSMGSRESVEGSGRSGGSPFLPFSWFTDSGKGSASSGSTTSPTCSPKHEGFSPKKSASQAQLLAHAQEALSNSWCLVQDFGST

SEQ ID NO: 10814 - protein, 85 aa, Homo sapiens
QIGMESTLSDDSTPPSSSPKIPSGPWQEAKCSYPYHTLSQSSDEFLDEPLPPVHHWTSQQVGQWLQSLNLEQYAAEFAARQVDGP

SEQ ID NO: 10815 - protein, 85 aa, Homo sapiens
AGSRGAGRTAAPSVRPEKRRSEPELEPEPEPEPPLLCTSPLSHSTGSDSGVSDSEESVFSGLEDSGSDSSEDDDEGDEEGEDGAL

SEQ ID NO: 10816 - protein, 85 aa, Homo sapiens
DDEGHSGIKKTTEEQVQASTPCPRTEMASARIGDEYAEDSSDEEDIRNTVGNVPLEWYDDFPHVGYDLDGRRIYKPLRTRDELDQ

SEQ ID NO: 10817 - protein, 85 aa, Homo sapiens
FLDKMDDPDYWRTVQDPMTGRDLRLTDEQVALVRRLQSGQFGDVGFNPYEPAVDFFSGDVMIHPVTNRPADKRSFIPSLVEKEKV

SEQ ID NO: 10818 - protein, 85 aa, Homo sapiens
SRMVHAIKMGWIQPRRPRDPTPSFYDLWAQEDPNAVLGRHKMHVPAPKLALPGHAESYNPPPEYLLSEEERLAWEQQEPGERKLS

SEQ ID NO: 10819 - protein, 85 aa, Homo sapiens
FLPRKFPSLRAVPAYGRFIQERFERCLDLYLCPRQRKMRVNVDPEDLIPKLPRPRDLQPFPTCQALVYRGHSDLVRCLSVSPGGQ

SEQ ID NO: 10820 - protein, 85 aa, Homo sapiens
WLVSGSDDGSLRLWEVATARCVRTVPVGGVVKSVAWNPSPAVCLVAAAVEDSVLLLNPALGDRLVAGSTDQLLSAFVPPEEPPLQ

SEQ ID NO: 10821 - protein, 85 aa, Homo sapiens
PARWLEASEEERQVGLRLRICHGKPVTQVTWHGRGDYLAVVLATQGHTQVLIHQLSRRRSQSPFRRSHGQVQRVAFHPARPFLLV

SEQ ID NO: 10822 - protein, 85 aa, Homo sapiens
ASQRSVRLYHLLRQELTKKLMPNCKWVSSLAVHPAGDNVICGSYDSKLVWFDLDLSTKPYRMLRHHKKALRAVAFHPRYPLFASG

SEQ ID NO: 10823 - protein, 84 aa, Homo sapiens
KKALRAVAFHPRYPLFASGSDDGSVIVCHGMVYNDLLQNPLLVPVKVLKGHVLTRDLGVLDVIFHPTQPWVFSSGADGTVRLFT

SEQ ID NO: 10824 - protein, 85 aa, Homo sapiens
HSTGSDSGVSDSEESVFSGLEDSGSDSSEDDDEGDEEGEDGALDDEGHSGIKKTTEEQVQASTPCPRTEMASARIGDEYAEDSSD

SEQ ID NO: 10825 - protein, 85 aa, Homo sapiens
EEDIRNTVGNVPLEWYDDFPHVGYDLDGRRIYKPLRTRDELDQFLDKMDDPDYWRTVQDPMTGRDLRLTDEQVALVRRLQSGQFG

SEQ ID NO: 10826 - protein, 85 aa, Homo sapiens
DVGFNPYEPAVDFFSGDVMIHPVTNRPADKRSFIPSLVEKEKVSRMVHAIKMGWIQPRRPRDPTPSFYDLWAQEDPNAVLGRHKM

SEQ ID NO: 10827 - protein, 85 aa, Homo sapiens
HVPAPKLALPGHAESYNPPPEYLLSEEERLAWEQQEPGERKLSFLPRKFPSLRAVPAYGRFIQERFERCLDLYLCPRQRKMRVNV

SEQ ID NO: 10828 - protein, 85 aa, Homo sapiens
DPEDLIPKLPRPRDLQPFPTCQALVYRGHSDLVRCLSVSPGGQWLVSGSDDGSLRLWEVATARCVRTVPVGGVVKSVAWNPSPAV

SEQ ID NO: 10829 - protein, 85 aa, Homo sapiens
CLVAAAVEDSVLLLNPALGDRLVAGSTDQLLSAFVPPEEPPLQPARWLEASEEERQVGLRLRICHGKPVTQVTWHGRGDYLAVVL

SEQ ID NO: 10830 - protein, 85 aa, Homo sapiens
ATQGHTQVLIHQLSRRRSQSPFRRSHGQVQRVAFHPARPFLLVASQRSVRLYHLLRQELTKKLMPNCKWVSSLAVHPAGDNVICG

SEQ ID NO: 10831 - protein, 85 aa, Homo sapiens
SYDSKLVWFDLDLSTKPYRMLRHHKKALRAVAFHPRYPLFASGSDDGSVIVCHGMVYNDLLQNPLLVPVKVLKGHVLTRDLGVLD

SEQ ID NO: 10832 - protein, 85 aa, Homo sapiens
ATPMHRLIARRQAEANKQHVRCQKCLEFGHWTYECTGKRKYLHRPSRTAELKKALKEKENRLLLQQRSFFPPRVYQHWRNQCRKK

SEQ ID NO: 10833 - protein, 84 aa, Homo sapiens
IARRQAEANKQHVRCQKCLEFGHWTYECTGKRKYLHRPSRTAELKKALKEKENRLLLQQRSFFPPRVYQHWRNQCRKKGQEKKV

SEQ ID NO: 10834 - protein, 85 aa, Homo sapiens
FKRMAEFGPDSGGRVKGVTIVKPIVYGNVARYFGKKREEDGHTHQWTVYVKPYRNEAKWLIPVISALWEAQAGGSLEPRSLRPDW

SEQ ID NO: 10835 - protein, 85 aa, Homo sapiens
QHSKTPSLQKKKDMSAYVKKIQFKLHESYGNPLRVVTKPPYEITETGWGEFEIIIKIFFIDPNERPVTLYHLLKLFQSDTNAMLG

SEQ ID NO: 10836 - protein, 85 aa, Homo sapiens
YEITETGWGEFEIIIKIFFIDPNERPVTLYHLLKLFQSDTNAMLGKKTVVSEFYDEMIFQDPTAMMQQLLTTSRQLTLGAYKHET

SEQ ID NO: 10837 - protein, 85 aa, Homo sapiens
THQWTVYVKPYRNEAKWLIPVISALWEAQAGGSLEPRSLRPDWQHSKTPSLQKKKDMSAYVKKIQFKLHESYGNPLRVVTKPPYE

SEQ ID NO: 10838 - protein, 85 aa, Homo sapiens
QGEAHPSASLIDRTIKMRKETEARKVVLAWGLLNVSMAGMIYTEMTGKLISSYYNVTYWPLWYIELALASLFSLNALFDFWRYFK

SEQ ID NO: 10839 - protein, 85 aa, Homo sapiens
YTVAPTSLVVSPGQQTLLGLKTAVVQTTPPHDLAATQIPPAPPSPSIQGQSVLSYSPSRSPSTSPKFTTSCMTGYSPQLQGLSSG

SEQ ID NO: 10840 - protein, 85 aa, Homo sapiens
GSGSYSPGVTYSPVSGYNKLASFSPSPPSPYPTTVGPVESSGLRSRYRSSPTVYNSPTDKEDYMTDLRTLDTFLRSEEEKQHRVK

SEQ ID NO: 10841 - protein, 85 aa, Homo sapiens
MGSPDSTSPSSSPTFWNYSRSMGDYAQTLKKFQYQLACRSQAPCANKDEADLSSKQAAEEVWARVAMNRQLLDHMDSWTAKFRNW

SEQ ID NO: 10842 - protein, 85 aa, Homo sapiens
INETILVPLVQEIESVSTQMRRMGCPELQIGEASITSLKQAALVKAPLIPTLNTIVQYLDLTPNQEYLFERIKELSQGGCMSSFR

SEQ ID NO: 10843 - protein, 85 aa, Homo sapiens
WNRGGDFKGRKWDTDLPTDSAIIMHVFCTYLDSRLPPHPKYPDGKTFTSQHFVQTPNKPDVTNENVFCIYQSAINPPHYELIYQR

SEQ ID NO: 10844 - protein, 85 aa, Homo sapiens
TEMTGKLISSYYNVTYWPLWYIELALASLFSLNALFDFWRYFKYTVAPTSLVVSPGQQTLLGLKTAVVQTTPPHDLAATQIPPAP

SEQ ID NO: 10845 - protein, 85 aa, Homo sapiens
PSPSIQGQSVLSYSPSRSPSTSPKFTTSCMTGYSPQLQGLSSGGSGSYSPGVTYSPVSGYNKLASFSPSPPSPYPTTVGPVESSG

SEQ ID NO: 10846 - protein, 85 aa, Homo sapiens
MRSRYRSSPTVYNSPTDKEDYMTDLRTLDTFLRSEEEKQHRVKLGSPDSTSPSSSPTFWNYSRSMGDYAQTLKKFQYQLACRSQA

SEQ ID NO: 10847 - protein, 85 aa, Homo sapiens
PCANKDEADLSSKQAAEEVWARVAMNRQLLDHMDSWTAKFRNWINETILVPLVQEIESVSTQMRRMGCPELQIGEASITSLKQAA

SEQ ID NO: 10848 - protein, 85 aa, Homo sapiens
MVKAPLIPTLNTIVQYLDLTPNQEYLFERIKELSQGGCMSSFRWNRGGDFKGRKWDTDLPTDSAIIMHVFCTYLDSRLPPHPKYP

SEQ ID NO: 10849 - protein, 85 aa, Homo sapiens
DGKTFTSQHFVQTPNKPDVTNENVFCIYQSAINPPHYELIYQRHVYNLPKGRNNMFHTLLMFLYIIKTKESGMLGRVNLGLSGVN

SEQ ID NO: 10850 - protein, 47 aa, Homo sapiens
GMSVPTITPSHPAKPSPIVNLLKNVCLFTQIVNMMQSVLNQIVPSLM

SEQ ID NO: 10851 - protein, 84 aa, Homo sapiens
MSPKPDWRSVLVFILLAVAPPAPPSSSQLCRYFPACKKMECPFYHPKHCRFNTQCTRPDCTFYHPTINVPPRHALKWIRPQTSE

SEQ ID NO: 10852 - protein, 5 aa, Homo sapiens
VPSLM

SEQ ID NO: 10853 - protein, 85 aa, Homo sapiens
SSSRAQQMHAFSWIRNTLEEHPETSLPKQEVYDEYKSYCDNLGYHPLSAADFGKIMKNVFPNMKARRLGTRGKSKYCYSGLRKKA

SEQ ID NO: 10854 - protein, 85 aa, Homo sapiens
FVHMPTLPNLDFHKTGDGLEGAEPSGQLQNIDEEVISSACRLVCEWAQKVLSQPFDTVLELARFLVKSHYIGTKSMAALTVMAAA

SEQ ID NO: 10855 - protein, 85 aa, Homo sapiens
PAGMKGITQPSAFIPTAESNSFQPQVKTLPSPIDAKQQLQRKIQKKQQEQKLQSPLPGESAAKKSESATSNGVTNLPNGNPSILS

SEQ ID NO: 10856 - protein, 85 aa, Homo sapiens
PQPIGIVVAAVPSPIPVQRTRQLVTSPSPMSSSDGKVLPLNVQVVTQHMQSVKQAPKTPQNVPASPGGDRSARHRYPQILPKPAN

SEQ ID NO: 10857 - protein, 85 aa, Homo sapiens
TSALTIRSPTTVLFTSSPIKTAVVPASHMSSLNVVKMTTISLTPSNSNTPLKHSASVSSATGTTEESRSVPQIKNGSVVSLQSPG

SEQ ID NO: 10858 - protein, 85 aa, Homo sapiens
SRSSSAGGTSAVEVKVEPETSSDEHPVQCQENSDEAKAPQTPSALLGQKSNTDGALQKPSNEGVIEIKATKVCDQRTKCKSRCNE

SEQ ID NO: 10859 - protein, 85 aa, Homo sapiens
MLPGTSTGNNQSTITLSVASQNLTFTSSSSPPNGDSINKDPKLCTKSPRKRLSSTLQETQVPPVKKPIVEQLSAATIEGQKQGSV

SEQ ID NO: 10860 - protein, 85 aa, Homo sapiens
KKDQKVPHSGKTEGSTAGAQIPSKVSVNVSSHIGANQPLNSSALVISDSALEQQTTPSSSPDIKVKLEGSVFLLDSDSKSVGSFN

SEQ ID NO: 10861 - protein, 85 aa, Homo sapiens
PNGWQQITKDSEFISASCEQQQDISVMTIPEHSDINDLEKSVWELEGMPQDTYSQQLHSQIQESSLNQIQAHSSDQLPLQSELKE

SEQ ID NO: 10862 - protein, 85 aa, Homo sapiens
FEPSVSQTNESYFPFDDELTQDSIVEELVLMEQQMSMNNSHSYGNCLGMTLQSQSVTPGAPMSSHTSSTHFYHPIHSNGTPIHTP

SEQ ID NO: 10863 - protein, 85 aa, Homo sapiens
TPTPTPTPTPTPTPTPTSEMIAGSQSLSRESPCSRLAQTTPVDSALGSSRHTPIGTPHSNCSSSVPPSPVECRNPFAFTPISSSM

SEQ ID NO: 10864 - protein, 85 aa, Homo sapiens
AYHDASIVSSSPVKPMQRPMATHPDKTKLEWMNNGYSGVGNSSVSGHGILPSYQELVEDRFRKPHAFAVPGQSYQSQSRHHDTHF

SEQ ID NO: 10865 - protein, 85 aa, Homo sapiens
GRLTPVSPVQHQGATVNNTNKQEGFAVPAPLDNKGTNSSASSNFRCRSVSPAVHRQRNLSGSTLYPVSNIPRSNVTPFGSPVTPE

SEQ ID NO: 10866 - protein, 85 aa, Homo sapiens
VHVFTNVHTDACANNIAQRSQSVPLTVMMQTAFPNALQKQANSKKITNVLLSKLDSDNDDAVRGLGMNNLPSNYTARMNLTQILE

SEQ ID NO: 10867 - protein, 85 aa, Homo sapiens
PSTVFPSANPQNMIDSSTSVYEFQTPSYLTKSNSTGQINFSPGDNQAQSEIGEQQLDFNSTVKDLLSGDSLQTNQQLKYPDVLGE

SEQ ID NO: 10868 - protein, 84 aa, Homo sapiens
STVFPSANPQNMIDSSTSVYEFQTPSYLTKSNSTGQINFSPGDNQAQSEIGEQQLDFNSTVKDLLSGDSLQTNQQLKYPDVLGE

SEQ ID NO: 10869 - protein, 85 aa, Homo sapiens
GYHPLSAADFGKIMKNVFPNMKARRLGTRGKSKYCYSGLRKKAFVHMPTLPNLDFHKTGDGLEGAEPSGQLQNIDEEVISSACRL

SEQ ID NO: 10870 - protein, 85 aa, Homo sapiens
VCEWAQKVLSQPFDTVLELARFLVKSHYIGTKSMAALTVMAAAPAGMKGITQPSAFIPTAESNSFQPQVKTLPSPIDAKQQLQRK

SEQ ID NO: 10871 - protein, 85 aa, Homo sapiens
IQKKQQEQKLQSPLPGESAAKKSESATSNGVTNLPNGNPSILSPQPIGIVVAAVPSPIPVQRTRQLVTSPSPMSSSDGKVLPLNV

SEQ ID NO: 10872 - protein, 85 aa, Homo sapiens
QVVTQHMQSVKQAPKTPQNVPASPGGDRSARHRYPQILPKPANTSALTIRSPTTVLFTSSPIKTAVVPASHMSSLNVVKMTTISL

SEQ ID NO: 10873 - protein, 85 aa, Homo sapiens
TPSNSNTPLKHSASVSSATGTTEESRSVPQIKNGSVVSLQSPGSRSSSAGGTSAVEVKVEPETSSDEHPVQCQENSDEAKAPQTP

SEQ ID NO: 10874 - protein, 85 aa, Homo sapiens
SALLGQKSNTDGALQKPSNEGVIEIKATKVCDQRTKCKSRCNEMLPGTSTGNNQSTITLSVASQNLTFTSSSSPPNGDSINKDPK

SEQ ID NO: 10875 - protein, 85 aa, Homo sapiens
LCTKSPRKRLSSTLQETQVPPVKKPIVEQLSAATIEGQKQGSVKKDQKVPHSGKTEGSTAGAQIPSKVSVNVSSHIGANQPLNSS

SEQ ID NO: 10876 - protein, 85 aa, Homo sapiens
ALVISDSALEQQTTPSSSPDIKVKLEGSVFLLDSDSKSVGSFNPNGWQQITKDSEFISASCEQQQDISVMTIPEHSDINDLEKSV

SEQ ID NO: 10877 - protein, 85 aa, Homo sapiens
WELEGMPQDTYSQQLHSQIQESSLNQIQAHSSDQLPLQSELKEFEPSVSQTNESYFPFDDELTQDSIVEELVLMEQQMSMNNSHS

SEQ ID NO: 10878 - protein, 85 aa, Homo sapiens
YGNCLGMTLQSQSVTPGAPMSSHTSSTHFYHPIHSNGTPIHTPTPTPTPTPTPTPTPTPTSEMIAGSQSLSRESPCSRLAQTTPV

SEQ ID NO: 10879 - protein, 85 aa, Homo sapiens
DSALGSSRHTPIGTPHSNCSSSVPPSPVECRNPFAFTPISSSMAYHDASIVSSSPVKPMQRPMATHPDKTKLEWMNNGYSGVGNS

SEQ ID NO: 10880 - protein, 85 aa, Homo sapiens
SVSGHGILPSYQELVEDRFRKPHAFAVPGQSYQSQSRHHDTHFGRLTPVSPVQHQGATVNNTNKQEGFAVPAPLDNKGTNSSASS

SEQ ID NO: 10881 - protein, 85 aa, Homo sapiens
NFRCRSVSPAVHRQRNLSGSTLYPVSNIPRSNVTPFGSPVTPEVHVFTNVHTDACANNIAQRSQSVPLTVMMQTAFPNALQKQAN

SEQ ID NO: 10882 - protein, 85 aa, Homo sapiens
SKKITNVLLSKLDSDNDDAVRGLGMNNLPSNYTARMNLTQILEPSTVFPSANPQNMIDSSTSVYEFQTPSYLTKSNSTGQINFSP

SEQ ID NO: 10883 - protein, 84 aa, Homo sapiens
MRPPGGGSNFSLGFDEPTEQPVRKNKMASNIFGTPEENQASWAKSAGAKSSGGREDLESSGLQRRNSSEASSGDFLDLKVSVTA

SEQ ID NO: 10884 - protein, 85 aa, Homo sapiens
SFDGDDFDDVEEDEGLDDLENAEEEGQENVEILPSGERPQANQKRITTPYMTKYERARVLGTRALQIAMCAPVMVELEGETDPLL

SEQ ID NO: 10885 - protein, 85 aa, Homo sapiens
AAPKVRFMTKIYHPNVDKLGRICLDILKDKWSPALQIRTVLLSIQALLSAPNPDDPLANDVAEQWKTNEAQAIETARAWTRLYAM

SEQ ID NO: 10886 - protein, 85 aa, Homo sapiens
ATISSARCSLASSSPPTCLKGWHQDALITSATATSYSTSVQCWAPTSSWRQCWLIWDHAEPGWPHRNLPWAWQAQWPHWSWLQLG

SEQ ID NO: 10887 - protein, 85 aa, Homo sapiens
TYSLLLLSQPPCFGPPVHALCCRVAHWRGVPRPNNSEAPSLTLSWRGQRPGPSADEEPRFGPNQVGTHLSLEPTGAEERGHRREG

SEQ ID NO: 10888 - protein, 85 aa, Homo sapiens
WAPTSSWRQCWLIWDHAEPGWPHRNLPWAWQAQWPHWSWLQLGTYSLLLLSQPPCFGPPVHALCCRVAHWRGVPRPNNSEAPSLT

SEQ ID NO: 10889 - protein, 85 aa, Homo sapiens
VTRDRAENRDGPKMLKPLVEKRRRDRINRSLEELRLLLLERTRDQNLRNPKLEKAEILEFAVGYLRERSRVEPPAAAAPGVPRSP

SEQ ID NO: 10890 - protein, 85 aa, Homo sapiens
VQDAEALASCYLSGFRECLLRLAAFAHDASPAARAQLFSALHGYLRPKPPRPKPVDPRPPAPRPSLDPAAPALGPALHQRPPVHQ

SEQ ID NO: 10891 - protein, 85 aa, Homo sapiens
RDQNLRNPKLEKAEILEFAVGYLRERSRVEPPAAAAPGVPRSPVQDAEALASCYLSGFRECLLRLAAFAHDASPAARAQLFSALH

SEQ ID NO: 10892 - protein, 85 aa, Homo sapiens
GYLRPKPPRPKPVDPRPPAPRPSLDPAAPALGPALHQRPPVHQGHPSPRCAWSPSLCSPRAGDSGAPAPLTGLLPPPPPPHRQDG

SEQ ID NO: 10893 - protein, 85 aa, Homo sapiens
VKAAFLAQAPSGSRSAEVQAAQSTEPAAEAGAPEGEGHRGGPPRALGSLGLCENQEARERPGGSPRGPVTSEKTGGQSGLESDVP

SEQ ID NO: 10894 - protein, 85 aa, Homo sapiens
SLHGASGGHERSRDRRRSSDRSRDSSHERTESQLTPCIRNVTSPTRQHHVEREKDHSSSRPSSPRPQKASPNGSISSAGNSSRNS

SEQ ID NO: 10895 - protein, 85 aa, Homo sapiens
SQSSSDGSCKTAGEMVFVYENAKEGARNIRTSERVTLIVDNTRFVVDPSIFTAQPNTMLGRMFGSGREHNFTRPNEKGEYEVAEG

SEQ ID NO: 10896 - protein, 85 aa, Homo sapiens
IGSTVFRAILDYYKTGIIRCPDGISIPELREACDYLCISFEYSTIKCRDLSALMHELSNDGARRQFEFYLEEMILPLMVASAQSG

SEQ ID NO: 10897 - protein, 85 aa, Homo sapiens
ERECHIVVLTDDDVVDWDEEYPPQMGEEYSQIIYSTKLYRFFKYIENRDVAKSVLKERGLKKIRLGIEGYPTYKEKVKKRPGGRP

SEQ ID NO: 10898 - protein, 85 aa, Homo sapiens
EVIYNYVQRPFIRMSWEKEEGKSRHVDFQCVKSKSITNLAAAAADIPQDQLVVMHPTPQVDELDILPIHPPSGNSDLDPDAQNPM

SEQ ID NO: 10899 - protein, 85 aa, Homo sapiens
SPTRQHHVEREKDHSSSRPSSPRPQKASPNGSISSAGNSSRNSSQSSSDGSCKTAGEMVFVYENAKEGARNIRTSERVTLIVDNT

SEQ ID NO: 10900 - protein, 85 aa, Homo sapiens
RFVVDPSIFTAQPNTMLGRMFGSGREHNFTRPNEKGEYEVAEGIGSTVFRAILDYYKTGIIRCPDGISIPELREACDYLCISFEY

SEQ ID NO: 10901 - protein, 85 aa, Homo sapiens
STIKCRDLSALMHELSNDGARRQFEFYLEEMILPLMVASAQSGERECHIVVLTDDDVVDWDEEYPPQMGEEYSQIIYSTKLYRFF

SEQ ID NO: 10902 - protein, 85 aa, Homo sapiens
KYIENRDVAKSVLKERGLKKIRLGIEGYPTYKEKVKKRPGGRPEVIYNYVQRPFIRMSWEKEEGKSRHVDFQCVKSKSITNLAAA

SEQ ID NO: 10903 - protein, 84 aa, Homo sapiens
GITQALRVTLKQDTHGVGHDPAKEFTNHWWNELFNKTAANLVVETGQDGVQIRSLSKETTRYNHPKPNLLYQKFVKTAQTLSRN

SEQ ID NO: 10904 - protein, 84 aa, Homo sapiens
NTAPEDSSPAKKTRRCQRQESKKMPVAGGKANKDRTEDKQDESVKALLLKGKAPVDPECTAKVGKAHVYCEGNDVYDVMLNQIP

SEQ ID NO: 10905 - protein, 4 aa, Homo sapiens
PRTT

SEQ ID NO: 10906 - protein, 84 aa, Homo sapiens
SFPNLTTPGTTSTVTMSTSSVTSSSNVATATTVLSVGQSLSNTLTTSLTSTSSESDTGQEAEYSLYVFMKNSLSASSFMQDNVI

SEQ ID NO: 10907 - protein, 25 aa, Homo sapiens
GTWIMRPLILPTAERFCSAILRCGG

SEQ ID NO: 10908 - protein, 19 aa, Homo sapiens
KTLTDWCTWVLMHSWPKLR

SEQ ID NO: 10909 - protein, 85 aa, Homo sapiens
AGLPRRIIKETQRLLAEPVPGIKAEPDESNARYFHVVIAGPQDSPFEGGTFKLELFLPEEYPMAAPKISGPQHCRSAQFCYRSRP

SEQ ID NO: 10910 - protein, 84 aa, Homo sapiens
MPRRIIKETQRLLAEPVPGIKAEPDESNARYFHVVIAGPQDSPFEGGTFKLELFLPEEYPMAAPKISGPQHCRSAQFCYRSRPC

SEQ ID NO: 10911 - protein, 85 aa, Homo sapiens
EIEEVSENVLQVHLNGLLQINDKIALKEITRQLNLENVVGDKVFGSFAENLSFLLEALKKGDRTSSCPVIFILDEFDLFAHHKNQ

SEQ ID NO: 10912 - protein, 85 aa, Homo sapiens
TLLYNLFDISQSAQTPIAVIGLTCRLDILELLEKRVKSRFSHRQIHLMNSFGFPQYVKIFKEQLSLPAEFPDKVFAEKWNENVQY

SEQ ID NO: 10913 - protein, 85 aa, Homo sapiens
LSEDRSVQEVLQKHFNISKNLRSLHMLLMLALNRVTASHPFMTAVDLMEASQLCSMDSKANIVHGLSVLEICLIIAMKHLNDIYE

SEQ ID NO: 10914 - protein, 85 aa, Homo sapiens
EEPFNFQMVYNEFQKFVQRKAHSVYNFEKPVVMKAFEHLQQLELIKPMERTSGNSQREYQLMKLLLDNTQIMNALQKYPNCPTDV

SEQ ID NO: 10915 - protein, 85 aa, Homo sapiens
VFGSFAENLSFLLEALKKGDRTSSCPVIFILDEFDLFAHHKNQTLLYNLFDISQSAQTPIAVIGLTCRLDILELLEKRVKSRFSH

SEQ ID NO: 10916 - protein, 85 aa, Homo sapiens
RQIHLMNSFGFPQYVKIFKEQLSLPAEFPDKVFAEKWNENVQYLSEDRSVQEVLQKHFNISKNLRSLHMLLMLALNRVTASHPFM

SEQ ID NO: 10917 - protein, 85 aa, Homo sapiens
TAVDLMEASQLCSMDSKANIVHGLSVLEICLIIAMKHLNDIYEEEPFNFQMVYNEFQKFVQRKAHSVYNFEKPVVMKAFEHLQQL

SEQ ID NO: 10918 - protein, 85 aa, Homo sapiens
EEEEQNEAKLKEKQIQRTKRGLEILAKRAAETVVDPEMTPYLDIANQTGRSIRIPPSERKALMLAMGYHEKGRAFLKRKEYGIAL

SEQ ID NO: 10919 - protein, 85 aa, Homo sapiens
PCLLDADKYFCECCRELLDTVDNYAVLQLDIVWCYFRLEQLECLDDAEKKLNLAQKCFKNCYGENHQRLVHIKGNCGKEKVLFLR

SEQ ID NO: 10920 - protein, 85 aa, Homo sapiens
LYLLQGIRNYHSGNDVEAYEYLNKARQLFKELYIDPSKVDNLLQLGFTAQEARLGLRACDGNVDHAATHITNRREELAQIRKEEK

SEQ ID NO: 10921 - protein, 85 aa, Homo sapiens
EKKRRRLENIRFLKGMGYSTHAAQQVLHAASGNLDEALKILLSNPQMWWLNDSNPETDNRQESPSQENIDRLVYMGFDALVAEAA

SEQ ID NO: 10922 - protein, 85 aa, Homo sapiens
MRVFRGNVQLAAQTLAHNGGSLPPELPLSPEDSLSPPATSPSDSAGTSSASTDEDMETEAVNEILEDIPEHEEDYLDSTLEDEEI

SEQ ID NO: 10923 - protein, 85 aa, Homo sapiens
DIANQTGRSIRIPPSERKALMLAMGYHEKGRAFLKRKEYGIALPCLLDADKYFCECCRELLDTVDNYAVLQLDIVWCYFRLEQLE

SEQ ID NO: 10924 - protein, 85 aa, Homo sapiens
CLDDAEKKLNLAQKCFKNCYGENHQRLVHIKGNCGKEKVLFLRLYLLQGIRNYHSGNDVEAYEYLNKARQLFKELYIDPSKVDNL

SEQ ID NO: 10925 - protein, 85 aa, Homo sapiens
MQLGFTAQEARLGLRACDGNVDHAATHITNRREELAQIRKEEKEKKRRRLENIRFLKGMGYSTHAAQQVLHAASGNLDEALKILL

SEQ ID NO: 10926 - protein, 85 aa, Homo sapiens
SNPQMWWLNDSNPETDNRQESPSQENIDRLVYMGFDALVAEAALRVFRGNVQLAAQTLAHNGGSLPPELPLSPEDSLSPPATSPS

SEQ ID NO: 10927 - protein, 85 aa, Homo sapiens
PSPSSSSLALMSRPAQVPQASEPAVSLEQCEQLVAELRGSVRQAVRLYHSVAGCKMPSAEQSRIAQLLRDTFSSVRQELEAVAGA

SEQ ID NO: 10928 - protein, 85 aa, Homo sapiens
KQHFETLASGAAPGAPVQVPERSESRSISSRFLLQVQTRPLREPSPSSSSLALMSRPAQVPQASEPAVSLEQCEQLVAELRGSVR

SEQ ID NO: 10929 - protein, 85 aa, Homo sapiens
DLTTTMSSKRTKTKTKKRPQRATSNVFAMFDQSQIQEFKEAFNMIDQNRDGFIDKEDLHDMLASLGKNPTDEYLDAMMNEAPGPI

SEQ ID NO: 10930 - protein, 85 aa, Homo sapiens
NFTMFLTMFGEKLNGTDPEDVIRNAFACFDEEATGTIQEDYLRELLTTMGDRFTDEEVDELYREAPIDKKGNFNYIEFTRILKHG

SEQ ID NO: 10931 - protein, 85 aa, Homo sapiens
NMIDQNRDGFIDKEDLHDMLASLGKNPTDEYLDAMMNEAPGPINFTMFLTMFGEKLNGTDPEDVIRNAFACFDEEATGTIQEDYL

SEQ ID NO: 10932 - protein, 15 aa, Homo sapiens
YGSASPSTPSWQGMW

SEQ ID NO: 10933 - protein, 84 aa, Homo sapiens
GDVAKAFGAGADFVMLGGMLAGHSESGGELIERDGKKYKLFYGMSSEMAMKKYAGGVAEYRRCGTYHPRHPRRDPLYVYLCGSS

SEQ ID NO: 10934 - protein, 15 aa, Homo sapiens
LLGRKLEWGIHSSAQ

SEQ ID NO: 10935 - protein, 43 aa, Homo sapiens
GTSSGSWPRWSVTAMPPTSMRPCSRRSSSCWPCIPRLPASTAP

SEQ ID NO: 10936 - protein, 84 aa, Homo sapiens
ILAEVVSYSHATNKYEALFQKEQLVLALYPQTTCFYRALIHAPPQRPQDDYSVLFEDTSYADGYSPPLNVAQRYVVACKEPKKK

SEQ ID NO: 10937 - protein, 84 aa, Homo sapiens
RRFYEQMNGPVAGASRQSSGPGASSGTSGDHGELVVRIASLEVENQSLRGVVQELQQAISKLEARLNVLEKSSPGHRATAPQTQ

SEQ ID NO: 10938 - protein, 85 aa, Homo sapiens
PSTVFPSANPQNMIDSSTSVYEFQTPSYLTKSNSTGQINFSPGDNQAQSEIGEQQLDFNSTVKDLLSGDSLQTNQQLVGQGASDL

SEQ ID NO: 10939 - protein, 85 aa, Homo sapiens
TNTASDFSSDIRLSSELSGSINDLNTLDPNLLFDPGRQQGQDDEATLEELKNDPLFQQICSESMNSMTSSGFEWIESKDHPTVEM

SEQ ID NO: 10940 - protein, 84 aa, Homo sapiens
ASDFSSDIRLSSELSGSINDLNTLDPNLLFDPGRQQGQDDEATLEELKNDPLFQQICSESMNSMTSSGFEWIESKDHPTVEMLG

SEQ ID NO: 10941 - protein, 85 aa, Homo sapiens
GDNQAQSEIGEQQLDFNSTVKDLLSGDSLQTNQQLVGQGASDLTNTASDFSSDIRLSSELSGSINDLNTLDPNLLFDPGRQQGQD

SEQ ID NO: 10942 - protein, 84 aa, Homo sapiens
DSGGEGRAGGPPQVAGAQAACSEDRMTLLLRLRAQTKQQLLEYKSMVDASEEKTPEQIMQEKQIEAKIEDLENEIEEDETFNCT

SEQ ID NO: 10943 - protein, 84 aa, Homo sapiens
PWSLVTVDLMGPFHTSNRSHVYAIIMTDLFTKWIVILPLCDVSASEVSKAIINIFFLYGPPQKIIMDQRDEFIQQKVFISCKVQ

SEQ ID NO: 10944 - protein, 85 aa, Homo sapiens
EMVDARKNLPRAIFISIPLVTFVYTFTNIAYFTAMSPQELLSSNAVAVTFGEKLLGYFSWVMPVSVALSTFGGINGYLFTYSSAG

SEQ ID NO: 10945 - protein, 84 aa, Homo sapiens
FGEKLLGYFSWVMPVSVALSTFGGINGYLFTYSSAGPQPSSCSWATRTRSSTMCPSSTTSATASPSWACCCCAGGGLHSTGPSR

SEQ ID NO: 10946 - protein, 85 aa, Homo sapiens
SNAVAVTFGEKLLGYFSWVMPVSVALSTFGGINGYLFTYSSAGPQPSSCSWATRTRSSTMCPSSTTSATASPSWACCCCAGGGLH

SEQ ID NO: 10947 - protein, 84 aa, Homo sapiens
VTSLKYSTSPYLLEAASHLSPENFVEDEAKICVQELQCPKIITKNSPLPSSIISRKEKSMKSSSHLPLIEKSFIIFSEMIFIWV

SEQ ID NO: 10948 - protein, 85 aa, Homo sapiens
VSIKDRTNIQDNESTLEVTSLKYSTSPYLLEAASHLSPENFVEDEAKICVQELQCPKIITKNSPLPSSIISRKEKSMKSSSHLPL

SEQ ID NO: 10949 - protein, 85 aa, Homo sapiens
NQVKIIVPNSTAGLIIGKGGATVKAVMEQSGAWVQLSQKPDGINLQERVVTVSGEPEQNRKAVELIIQKIQEDPQSGSCLNISYA

SEQ ID NO: 10950 - protein, 85 aa, Homo sapiens
NVTGPVANSNPTGSPYANTAEVLPTAAAAAGLLGHANLAGVAAFPAVLSGFTGNDLVAITSALNTLASYGYNLNTLGLGLSQAAA

SEQ ID NO: 10951 - protein, 85 aa, Homo sapiens
TGALAAAAASANPAAAAANLLATYASEASASGSTAGGTAGTFALGSLAAATAATNGYFGAASPLAASAILGTEKSTDGSKDVVEI

SEQ ID NO: 10952 - protein, 84 aa, Homo sapiens
VEIAVPENLVGAILGKGGKTLVEYQELTGARIQISKKGEFVPGTRNRKVTITGTPAATQAAQYLITQRITYEQGVRAANPQKVG

SEQ ID NO: 10953 - protein, 85 aa, Homo sapiens
KTEPVSILQPQTTVNPDRIKQTLPSSPTTTKSSPSDPMTTSRANQVKIIVPNSTAGLIIGKGGATVKAVMEQSGAWVQLSQKPDG

SEQ ID NO: 10954 - protein, 85 aa, Homo sapiens
INLQERVVTVSGEPEQNRKAVELIIQKIQEDPQSGSCLNISYANVTGPVANSNPTGSPYANTAEVLPTAAAAAGLLGHANLAGVA

SEQ ID NO: 10955 - protein, 85 aa, Homo sapiens
AFPAVLSGFTGNDLVAITSALNTLASYGYNLNTLGLGLSQAAATGALAAAAASANPAAAAANLLATYASEASASGSTAGGTAGTF

SEQ ID NO: 10956 - protein, 85 aa, Homo sapiens
ALGSLAAATAATNGYFGAASPLAASAILGTEKSTDGSKDVVEIAVPENLVGAILGKGGKTLVEYQELTGARIQISKKGEFVPGTR

SEQ ID NO: 10957 - protein, 84 aa, Homo sapiens
RSTSMPQLGERSGVIRVKQYKQSLAIESDGKKGSKVFMYYFDNPGGQIPSWLINWAAKNQSRTKREAQNQRDLIKFLANPNILQ

SEQ ID NO: 10958 - protein, 85 aa, Homo sapiens
KIHVILARSTSMPQLGERSGVIRVKQYKQSLAIESDGKKGSKVFMYYFDNPGGQIPSWLINWAAKNQSRTKREAQNQRDLIKFLA

SEQ ID NO: 10959 - protein, 85 aa, Homo sapiens
YLSSLASSRYPPFPSDYLALQLPEPSPLRPKREKRPRLPRKLKMAVGPPDCPVGGPLTFPGRGSGAGVGTTLTPLPPPKMPPPTI

SEQ ID NO: 10960 - protein, 85 aa, Homo sapiens
VETAAEMEAYVLEDILEVESFILDQDDLENPMLETASKLLLSGTADGADLRTVDPETQARLEALLEAAGIGKLSTADGKAFADPE

SEQ ID NO: 10961 - protein, 85 aa, Homo sapiens
VLRRLTSSVSCALDEAAAALTRMRAESTANAGQSDNRSLAEACSEGDVNAVRKLLIEGRSVNEHTEEGESLLCLACSAGYYELAQ

SEQ ID NO: 10962 - protein, 85 aa, Homo sapiens
VLLAMHANVEDRGIKGDITPLMAAANGGHVKIVKLLLAHKADVNAQSSTGNTALTYACAGGYVDVVKVLLESGASIEDHNENGHT

SEQ ID NO: 10963 - protein, 85 aa, Homo sapiens
PLMEAGSAGHVEVARLLLENGAGINTHSNEFKESALTLACYKGHLEMVRFLLEAGADQEHKTDEMHTALMEACMDGHVEVARLLL

SEQ ID NO: 10964 - protein, 85 aa, Homo sapiens
DSGAQVNMPADSFESPLTLAACGGHVELAALLIERGASLEEVNDEGYTPLMEAAREGHEEMVALLLGQGANINAQTEETQETALT

SEQ ID NO: 10965 - protein, 85 aa, Homo sapiens
MACCGGFLEVADFLIKAGADIELGCSTPLMEAAQEGHLELVKYLLAAGANVHATTATGDTALTYACENGHTDVADVLLQAGADLE

SEQ ID NO: 10966 - protein, 85 aa, Homo sapiens
HESEGGRTPLMKAARAGHVCTVQFLISKGANVNRTTANNDHTVLSLACAGGHLAVVELLLAHGADPTHRLKDGSTMLIEAAKGGH

SEQ ID NO: 10967 - protein, 85 aa, Homo sapiens
TSVVCYLLDYPNNLLSAPPPDVTQLTPPSHDLNRAPRVPVQALPMVVPPQEPDKPPANVATTLPIRNKAASKQKSSSHLPANSQD

SEQ ID NO: 10968 - protein, 85 aa, Homo sapiens
VQGYITNQSPESIVEEAQGKLTELEQRIKEAIEKNAQLQSLELAHADQLTKEKIEELNKTREEQIQKKQKILEELQKVERELQLK

SEQ ID NO: 10969 - protein, 85 aa, Homo sapiens
TQQQLKKQYLEVKAQRIQLQQQQQQSCQHLGLLTPVGVGEQLSEGDYARLQQVDPVLLKDEPQQTAAQMGFAPIQPLAMPQALPL

SEQ ID NO: 10970 - protein, 85 aa, Homo sapiens
AAGPLPPGSIANLTELQGVIVGQPVLGQAQLAGLGQGILTETQQGLMVASPAQTLNDTLDDIMAAVSGRASAMSNTPTHSIAASI

SEQ ID NO: 10971 - protein, 85 aa, Homo sapiens
SQPQTPTPSPIISPSAMLPIYPAIDIDAQTESNHDTALTLACAGGHEELVQTLLERGASIEHRDKKGFTPLILAATAGHVGVVEI

SEQ ID NO: 10972 - protein, 85 aa, Homo sapiens
MLDNGADIEAQSERTKDTPLSLACSGGRQEVVELLLARGANKEHRNVSDYTPLSLAASGGYVNIIKILLNAGAEINSRTGSKLGI

SEQ ID NO: 10973 - protein, 85 aa, Homo sapiens
SPLMLAAMNGHTAAVKLLLDMGSDINAQIETNRNTALTLACFQGRTEVVSLLLDRKANVEHRAKTGLTPLMEAASGGYAEVGRVL

SEQ ID NO: 10974 - protein, 85 aa, Homo sapiens
MDKGADVNAPPVPSSRDTALTIAADKGHYKFCELLIGRGAHIDVRNKKGNTPLWLAANGGHLDVVQLLVQAGADVDAADNRKITP

SEQ ID NO: 10975 - protein, 85 aa, Homo sapiens
LMAAFRKGHVKVVRYLVKEVNQFPSDSECMRYIATITDKEMLKKCHLCMESIVQAKDRQAAEANKNASILLEELDLEKLREESRR

SEQ ID NO: 10976 - protein, 85 aa, Homo sapiens
MALAAKREKRKEKRRKKKEEQRRKLEEIEAKNKENFELQAAQEKEKLKVEDEPEVLTEPPSATTTTTIGISATWTTLAGSHGKRN

SEQ ID NO: 10977 - protein, 85 aa, Homo sapiens
NTITTTSSKRKNRKNKITPENVQIIFDDPLPISYSQPEKVNGESKSSSTSESGDSDNMRISSCSDESSNSNSSRKSDNHSPAVVT

SEQ ID NO: 10978 - protein, 85 aa, Homo sapiens
TTVSSKKQPSVLVTFPKEERKSVSGKASIKLSETISEGTSNSLSTCTKSGPSPLSSPNGKLTVASPKRGQKREEGWKEVVRRSKK

SEQ ID NO: 10979 - protein, 85 aa, Homo sapiens
VSVPSTVISRVIGRGGCNINAIREFTGAHIDIDKQKDKTGDRIITIRGGTESTRQATQLINALIKDPDKEIDELIPKNRLKSSSA

SEQ ID NO: 10980 - protein, 85 aa, Homo sapiens
NSKIGSSAPTTTAANTSLMGIKMTTVALSSTSQTATALTVPAISSASTHKTIKNPVNNVRPGFPVSLPLAYPPPQFAHALLAAQT

SEQ ID NO: 10981 - protein, 85 aa, Homo sapiens
FQQIRPPRLPMTHFGGTFPPAQSTWGPFPVRPLSPARATNSPKPHMVPRHSNQNSSGSQVNSAGSLTSSPTTTTSSSASTVPGTS

SEQ ID NO: 10982 - protein, 85 aa, Homo sapiens
TNGSPSSPSVRRQLFVTVVKTSNATTTTVTTTASNNNTAPTNATYPMPTAKEHYPVSSPSSPSPPAQPGGVSRNSPLDCGSASPN

SEQ ID NO: 10983 - protein, 85 aa, Homo sapiens
KVASSSEQEAGSPPVVETTNTRPPNSSSSSGSSSAHSNQQQPPGSVSQEPRPPLQQSQVPPPEVRMTVPPLATSSAPVAVPSTAP

SEQ ID NO: 10984 - protein, 85 aa, Homo sapiens
VTYPMPQTPMGCPQPTPKMETPAIRPPPHGTTAPHKNSASVQNSSVAVLSVNHIKRPHSVPSSVQLPSTLSTQSACQNSVHPANK

SEQ ID NO: 10985 - protein, 85 aa, Homo sapiens
PIAPNFSAPLPFGPFSTLFENSPTSAHAFWGGSVVSSQSTPESMLSGKSSYLPNSDPLHQSDTSKAPGFRPPLQRPAPSPSGIVN

SEQ ID NO: 10986 - protein, 85 aa, Homo sapiens
MDSPYGSVTPSSTHLGNFASNISGGQMYGPGAPLGGAPAAANFNRQHFSPLSLLTPCSSASNDSSAQSVSSGVRAPSPAPSSVPL

SEQ ID NO: 10987 - protein, 85 aa, Homo sapiens
GSEKPSNVSQDRKVPVPIGTERSARIRQTGTSAPSVIGSNLSTSVGHSGIWSFEGIGGNQDKVDWCNPGMGNPMIHRPMSDPGVF

SEQ ID NO: 10988 - protein, 85 aa, Homo sapiens
SQHQAMERDSTGIVTPSGTFHQHVPAGYMDFPKVGGMPFSVYGNAMIPPVAPIPDGAGGPIFNGPHAADPSWNSLIKMVSSSTEN

SEQ ID NO: 10989 - protein, 85 aa, Homo sapiens
GTADGADLRTVDPETQARLEALLEAAGIGKLSTADGKAFADPEVLRRLTSSVSCALDEAAAALTRMRAESTANAGQSDNRSLAEA

SEQ ID NO: 10990 - protein, 85 aa, Homo sapiens
CSEGDVNAVRKLLIEGRSVNEHTEEGESLLCLACSAGYYELAQVLLAMHANVEDRGIKGDITPLMAAANGGHVKIVKLLLAHKAD

SEQ ID NO: 10991 - protein, 85 aa, Homo sapiens
VNAQSSTGNTALTYACAGGYVDVVKVLLESGASIEDHNENGHTPLMEAGSAGHVEVARLLLENGAGINTHSNEFKESALTLACYK

SEQ ID NO: 10992 - protein, 85 aa, Homo sapiens
GHLEMVRFLLEAGADQEHKTDEMHTALMEACMDGHVEVARLLLDSGAQVNMPADSFESPLTLAACGGHVELAALLIERGASLEEV

SEQ ID NO: 10993 - protein, 85 aa, Homo sapiens
NDEGYTPLMEAAREGHEEMVALLLGQGANINAQTEETQETALTLACCGGFLEVADFLIKAGADIELGCSTPLMEAAQEGHLELVK

SEQ ID NO: 10994 - protein, 85 aa, Homo sapiens
YLLAAGANVHATTATGDTALTYACENGHTDVADVLLQAGADLEHESEGGRTPLMKAARAGHVCTVQFLISKGANVNRTTANNDHT

SEQ ID NO: 10995 - protein, 85 aa, Homo sapiens
VLSLACAGGHLAVVELLLAHGADPTHRLKDGSTMLIEAAKGGHTSVVCYLLDYPNNLLSAPPPDVTQLTPPSHDLNRAPRVPVQA

SEQ ID NO: 10996 - protein, 85 aa, Homo sapiens
MPMVVPPQEPDKPPANVATTLPIRNKAASKQKSSSHLPANSQDVQGYITNQSPESIVEEAQGKLTELEQRIKEAIEKNAQLQSLE

SEQ ID NO: 10997 - protein, 85 aa, Homo sapiens
MAHADQLTKEKIEELNKTREEQIQKKQKILEELQKVERELQLKTQQQLKKQYLEVKAQRIQLQQQQQQSCQHLGLLTPVGVGEQL

SEQ ID NO: 10998 - protein, 85 aa, Homo sapiens
SEGDYARLQQVDPVLLKDEPQQTAAQMGFAPIQPLAMPQALPLAAGPLPPGSIANLTELQGVIVGQPVLGQAQLAGLGQGILTET

SEQ ID NO: 10999 - protein, 85 aa, Homo sapiens
QQGLMVASPAQTLNDTLDDIMAAVSGRASAMSNTPTHSIAASISQPQTPTPSPIISPSAMLPIYPAIDIDAQTESNHDTALTLAC

SEQ ID NO: 11000 - protein, 85 aa, Homo sapiens
AGGHEELVQTLLERGASIEHRDKKGFTPLILAATAGHVGVVEILLDNGADIEAQSERTKDTPLSLACSGGRQEVVELLLARGANK

SEQ ID NO: 11001 - protein, 85 aa, Homo sapiens
EHRNVSDYTPLSLAASGGYVNIIKILLNAGAEINSRTGSKLGISPLMLAAMNGHTAAVKLLLDMGSDINAQIETNRNTALTLACF

SEQ ID NO: 11002 - protein, 85 aa, Homo sapiens
QGRTEVVSLLLDRKANVEHRAKTGLTPLMEAASGGYAEVGRVLLDKGADVNAPPVPSSRDTALTIAADKGHYKFCELLIGRGAHI

SEQ ID NO: 11003 - protein, 85 aa, Homo sapiens
DVRNKKGNTPLWLAANGGHLDVVQLLVQAGADVDAADNRKITPLMAAFRKGHVKVVRYLVKEVNQFPSDSECMRYIATITDKEML

SEQ ID NO: 11004 - protein, 85 aa, Homo sapiens
KKCHLCMESIVQAKDRQAAEANKNASILLEELDLEKLREESRRLALAAKREKRKEKRRKKKEEQRRKLEEIEAKNKENFELQAAQ

SEQ ID NO: 11005 - protein, 85 aa, Homo sapiens
EKEKLKVEDEPEVLTEPPSATTTTTIGISATWTTLAGSHGKRNNTITTTSSKRKNRKNKITPENVQIIFDDPLPISYSQPEKVNG

SEQ ID NO: 11006 - protein, 85 aa, Homo sapiens
ESKSSSTSESGDSDNMRISSCSDESSNSNSSRKSDNHSPAVVTTTVSSKKQPSVLVTFPKEERKSVSGKASIKLSETISEGTSNS

SEQ ID NO: 11007 - protein, 85 aa, Homo sapiens
LSTCTKSGPSPLSSPNGKLTVASPKRGQKREEGWKEVVRRSKKVSVPSTVISRVIGRGGCNINAIREFTGAHIDIDKQKDKTGDR

SEQ ID NO: 11008 - protein, 85 aa, Homo sapiens
IITIRGGTESTRQATQLINALIKDPDKEIDELIPKNRLKSSSANSKIGSSAPTTTAANTSLMGIKMTTVALSSTSQTATALTVPA

SEQ ID NO: 11009 - protein, 85 aa, Homo sapiens
ISSASTHKTIKNPVNNVRPGFPVSLPLAYPPPQFAHALLAAQTFQQIRPPRLPMTHFGGTFPPAQSTWGPFPVRPLSPARATNSP

SEQ ID NO: 11010 - protein, 85 aa, Homo sapiens
KPHMVPRHSNQNSSGSQVNSAGSLTSSPTTTTSSSASTVPGTSTNGSPSSPSVRRQLFVTVVKTSNATTTTVTTTASNNNTAPTN

SEQ ID NO: 11011 - protein, 85 aa, Homo sapiens
ATYPMPTAKEHYPVSSPSSPSPPAQPGGVSRNSPLDCGSASPNKVASSSEQEAGSPPVVETTNTRPPNSSSSSGSSSAHSNQQQP

SEQ ID NO: 11012 - protein, 85 aa, Homo sapiens
PGSVSQEPRPPLQQSQVPPPEVRMTVPPLATSSAPVAVPSTAPVTYPMPQTPMGCPQPTPKMETPAIRPPPHGTTAPHKNSASVQ

SEQ ID NO: 11013 - protein, 85 aa, Homo sapiens
NSSVAVLSVNHIKRPHSVPSSVQLPSTLSTQSACQNSVHPANKPIAPNFSAPLPFGPFSTLFENSPTSAHAFWGGSVVSSQSTPE

SEQ ID NO: 11014 - protein, 85 aa, Homo sapiens
SMLSGKSSYLPNSDPLHQSDTSKAPGFRPPLQRPAPSPSGIVNMDSPYGSVTPSSTHLGNFASNISGGQMYGPGAPLGGAPAAAN

SEQ ID NO: 11015 - protein, 85 aa, Homo sapiens
FNRQHFSPLSLLTPCSSASNDSSAQSVSSGVRAPSPAPSSVPLGSEKPSNVSQDRKVPVPIGTERSARIRQTGTSAPSVIGSNLS

SEQ ID NO: 11016 - protein, 85 aa, Homo sapiens
TSVGHSGIWSFEGIGGNQDKVDWCNPGMGNPMIHRPMSDPGVFSQHQAMERDSTGIVTPSGTFHQHVPAGYMDFPKVGGMPFSVY

SEQ ID NO: 11017 - protein, 84 aa, Homo sapiens
LYRSCFHIICLVGTISLACNDMTPEQMATNVNCSSPERHTRSYDYMEGGDIRVRRLFCRTQWYLRIDKRGKVKGTQEMKNNYSK

SEQ ID NO: 11018 - protein, 6 aa, Homo sapiens
KVMSSK

SEQ ID NO: 11019 - protein, 84 aa, Homo sapiens
REDLHNRMLLWHGSRMSNWVGILSHGLRIAPPEAPITGYMFGKGIYFADMSSKSANYCFASRLKNTGLLLLSEEWEYSAIRTSK

SEQ ID NO: 11020 - protein, 85 aa, Homo sapiens
TLLLRLRAQTKQQLLEYKSMVDASEEKTPEQIMQEKQIEAMRLSTALKKNLEKISRQSSVLMDNMKHLLELNKLIMKSQQESWDL

SEQ ID NO: 11021 - protein, 85 aa, Homo sapiens
EEKLLDIRKKRLQLKQASESKLLEIQTEKNKQKIDLDSMENSERIKIIRQNLQMEIKITTVIQHVFQNLILGSKVNWAEDPALKE

SEQ ID NO: 11022 - protein, 85 aa, Homo sapiens
LSTALKKNLEKISRQSSVLMDNMKHLLELNKLIMKSQQESWDLEEKLLDIRKKRLQLKQASESKLLEIQTEKNKQKIDLDSMENS

SEQ ID NO: 11023 - protein, 4 aa, Homo sapiens
GWHL

SEQ ID NO: 11024 - protein, 84 aa, Homo sapiens
EEGNVWLYDVSNILKQPPLLPAALQAPTQPSPPLSPHQILKWPQPWALGQVVTKTMVNTVVANASFTYLTALTDSNIVAIWGRM

SEQ ID NO: 11025 - protein, 42 aa, Homo sapiens
WRGCNGRPPSWPTSRSAPALIRGLCSVGMRRATCGSTTSATS

SEQ ID NO: 11026 - protein, 85 aa, Homo sapiens
WINETILVPLVQEIESVSTQMRRMGCPELQIGELSQGGCMSSFRWNRGGDFKGRKWDTDLPTDSAIIMHVFCTYLDSRLPPHPKY

SEQ ID NO: 11027 - protein, 85 aa, Homo sapiens
APCANKDEADLSSKQAAEEVWARVAMNRQLLDHMDSWTAKFRNWINETILVPLVQEIESVSTQMRRMGCPELQIGELSQGGCMSS

SEQ ID NO: 11028 - protein, 85 aa, Homo sapiens
FRWNRGGDFKGRKWDTDLPTDSAIIMHVFCTYLDSRLPPHPKYPDGKTFTSQHFVQTPNKPDVTNENVFCIYQSAINPPHYELIY

SEQ ID NO: 11029 - protein, 85 aa, Homo sapiens
RGLQRLYQGHTLRSRPWGTPGNPESGAMTSPNPLCSLLTFSDFNAGAIKNKAQSVREVFARQLMQVRGVSGEKAAALVDRYSTPA

SEQ ID NO: 11030 - protein, 85 aa, Homo sapiens
VHNLSLPESTLLQAVTNTQVIDGFFVKRTADIKESAAYLALLTRGLQRLYQGHTLRSRPWGTPGNPESGAMTSPNPLCSLLTFSD

SEQ ID NO: 11031 - protein, 85 aa, Homo sapiens
FNAGAIKNKAQSVREVFARQLMQVRGVSGEKAAALVDRYSTPASLLAAYDACATPKEQETLLSTIKCGRLQRNLGPALSRTLSQL

SEQ ID NO: 11032 - protein, 85 aa, Homo sapiens
GGRRCVPGTLPMRAAPPGAKRLHVPLRAKGVGRSGHAPRLESVRTSYYAVLYPMVYPMKITGNRAVMALVYIWLHSLIGCLPPLF

SEQ ID NO: 11033 - protein, 85 aa, Homo sapiens
GWSSVEFDEFKWMCVAAWHREPGYTAFWQIWCALFPFLVMLVCYGFIFRVARVKARKVHCGTVVIVEEDAQRTGRKNSSTSTSSS

SEQ ID NO: 11034 - protein, 85 aa, Homo sapiens
GSRRNAFQGVVYSANQCKALITILVVLGAFMVTWGPYMVVIASEALWGKSSVSPSLETWATWLSFASAVCHPLIYGLWNKTVRKE

SEQ ID NO: 11035 - protein, 85 aa, Homo sapiens
LLGMCFGDRYYREPFVQRQRTSRLFSISNRITDLGLSPHLTALMAGGQPLGHSSSTGDTGFSCSQDSGTDMMLLEDYTSDDNPPS

SEQ ID NO: 11036 - protein, 85 aa, Homo sapiens
HCTCPPKRRSSVTFEDEVEQIKEAAKNSILHVKAEVHKSLDSYAASLAKAIEAEAKINLFGEEALPGVLVTARTVPGGGFGGRRG

SEQ ID NO: 11037 - protein, 85 aa, Homo sapiens
VRTSYYAVLYPMVYPMKITGNRAVMALVYIWLHSLIGCLPPLFGWSSVEFDEFKWMCVAAWHREPGYTAFWQIWCALFPFLVMLV

SEQ ID NO: 11038 - protein, 85 aa, Homo sapiens
CYGFIFRVARVKARKVHCGTVVIVEEDAQRTGRKNSSTSTSSSGSRRNAFQGVVYSANQCKALITILVVLGAFMVTWGPYMVVIA

SEQ ID NO: 11039 - protein, 85 aa, Homo sapiens
SEALWGKSSVSPSLETWATWLSFASAVCHPLIYGLWNKTVRKELLGMCFGDRYYREPFVQRQRTSRLFSISNRITDLGLSPHLTA

SEQ ID NO: 11040 - protein, 85 aa, Homo sapiens
LMAGGQPLGHSSSTGDTGFSCSQDSGTDMMLLEDYTSDDNPPSHCTCPPKRRSSVTFEDEVEQIKEAAKNSILHVKAEVHKSLDS

SEQ ID NO: 11041 - protein, 84 aa, Homo sapiens
SLLPWHNLYFWYVRTAVDQHLGPGAMVMPQAASLHAVVVEFRVCREQQDVPLVLAATLPCVLAGGCGRGCSFLTGPVADPEPLW

SEQ ID NO: 11042 - protein, 85 aa, Homo sapiens
GRKVSLLLGEPFFTTSLLPWHNLYFWYVRTAVDQHLGPGAMVMPQAASLHAVVVEFRVCREQQDVPLVLAATLPCVLAGGCGRGC

SEQ ID NO: 11043 - protein, 85 aa, Homo sapiens
KMNEYSTTYECNRQFEDQEEDTESQSRTTDVKIIGFLRNVEKDYYDMESMVHADTRSFILKKPKLSEEVVVAPNQESGMKTADSL

SEQ ID NO: 11044 - protein, 85 aa, Homo sapiens
FLRNVEKDYYDMESMVHADTRSFILKKPKLSEEVVVAPNQESGMKTADSLRVLSGHLMQTRDLVQPDKPASPKFIVTLDGVPSPP

SEQ ID NO: 11045 - protein, 85 aa, Homo sapiens
DSVAFEDVAVNFTQEEWALLDPSQKNLYREVMQETLRNLTSIGKKWNNQYIEDEHQNPRRNLRRLIGERLSESKESHQHGEVLTQ

SEQ ID NO: 11046 - protein, 85 aa, Homo sapiens
VPDDTLKKKTPGVQSYESSVCGEIGIGLSSLNRHLRAFSYSSSLAIHGRTHTGEKPYECKECGKAFRFPSSVRRHERIHSAKKPY

SEQ ID NO: 11047 - protein, 85 aa, Homo sapiens
ECKQCGKAFSFPSSVRRHERIHSAKKPYECKQCGKALSYLVSFQTHMRMHTGERPHKCNICGKAFFSPSSLKRHEKSHTGEKRYK

SEQ ID NO: 11048 - protein, 85 aa, Homo sapiens
CKQCDKAFNCPSSFQYHERTHSGEKPYECTQCRKAFRSVKYLRVHERKHTGEKPYECKLCGKGFISSTSFRYHEKTHTGEKPYEC

SEQ ID NO: 11049 - protein, 85 aa, Homo sapiens
KKCVKAFSFVKDLRIHERTHTGEKPFECKQCGKTFTSSNSFHYHERTHTGEKPYECKQCGKAFRSASVLQKHIRTHTGEKPYGCK

SEQ ID NO: 11050 - protein, 85 aa, Homo sapiens
QCGKVFRVASQLKMHERTHTGEKPYECKQCGKAFISSNSIRYHKRTHTGEKPYKCKQCGKAFISSNSFLYHERIHTGEKPYECKQ

SEQ ID NO: 11051 - protein, 84 aa, Homo sapiens
EKPYECKQCGKAFISSNSIRYHKRTHTGEKPYKCKQCGKAFISSNSFLYHERIHTGEKPYECKQCGKAFRSASILQKHVRTHAG

SEQ ID NO: 11052 - protein, 85 aa, Homo sapiens
GKKWNNQYIEDEHQNPRRNLRRLIGERLSESKESHQHGEVLTQVPDDTLKKKTPGVQSYESSVCGEIGIGLSSLNRHLRAFSYSS

SEQ ID NO: 11053 - protein, 85 aa, Homo sapiens
SLAIHGRTHTGEKPYECKECGKAFRFPSSVRRHERIHSAKKPYECKQCGKAFSFPSSVRRHERIHSAKKPYECKQCGKALSYLVS

SEQ ID NO: 11054 - protein, 85 aa, Homo sapiens
FQTHMRMHTGERPHKCNICGKAFFSPSSLKRHEKSHTGEKRYKCKQCDKAFNCPSSFQYHERTHSGEKPYECTQCRKAFRSVKYL

SEQ ID NO: 11055 - protein, 85 aa, Homo sapiens
RVHERKHTGEKPYECKLCGKGFISSTSFRYHEKTHTGEKPYECKKCVKAFSFVKDLRIHERTHTGEKPFECKQCGKTFTSSNSFH

SEQ ID NO: 11056 - protein, 85 aa, Homo sapiens
YHERTHTGEKPYECKQCGKAFRSASVLQKHIRTHTGEKPYGCKQCGKVFRVASQLKMHERTHTGEKPYECKQCGKAFISSNSIRY

SEQ ID NO: 11057 - protein, 12 aa, Homo sapiens
EEATVVIEHCTS

SEQ ID NO: 11058 - protein, 85 aa, Homo sapiens
CLDLAASWMKCPLDRAYLIKLSGLNKETYQSCLKSFECLLGLNSNIGIRDLAVQFSCIEAVNMASKILKSYESSLPQTQQVDLDL

SEQ ID NO: 11059 - protein, 85 aa, Homo sapiens
SRPLFTSAALLSACKILKLKVDKNKMVATSGVKKAIFDRLCKQLEKIGQQVDREPGDVATPPRKRKKIVVEAPAKEMEKVEEMPH

SEQ ID NO: 11060 - protein, 85 aa, Homo sapiens
NSNIGIRDLAVQFSCIEAVNMASKILKSYESSLPQTQQVDLDLSRPLFTSAALLSACKILKLKVDKNKMVATSGVKKAIFDRLCK

SEQ ID NO: 11061 - protein, 84 aa, Homo sapiens
ATVGNRGFVFGGRYRDARMNDLHYLNLDTWEWNELIPQGICPVGRSWHSLTPVSSDHLFLFGGFTTDKQPLSYGTQLVPAMKEK

SEQ ID NO: 11062 - protein, 85 aa, Homo sapiens
APSPRAAHACATVGNRGFVFGGRYRDARMNDLHYLNLDTWEWNELIPQGICPVGRSWHSLTPVSSDHLFLFGGFTTDKQPLSYGT

SEQ ID NO: 11063 - protein, 85 aa, Homo sapiens
KAKIRVDTIAKRRAELILERDKKRRENVVRDDEEISEEELEEDNDDIENILEDEFPKDEEEMSGEEDEEQETDAIERLRGELGEK

SEQ ID NO: 11064 - protein, 85 aa, Homo sapiens
FEADTHNLQIIQDELERYLIPIISINGARRNHIVQYTLNMKLKPLVENRASIFEKCHPIPAPLAQKMLTFTYKYISSFGYWDPVK

SEQ ID NO: 11065 - protein, 85 aa, Homo sapiens
LSEGETIKPVENAENPIYPVIHRQYIYFLSSKETKEKFMKNPIKYIRQPKPKPTVPIRIIIVGPPKSGKTTVAKKITSEYGLKHL

SEQ ID NO: 11066 - protein, 85 aa, Homo sapiens
SIGGALRYVLNNHPETELALMLNWHLHKGMTAPDELAIQALELSLMESVCNTAGVVIDGYPVTKHQMNLLEARSIIPMVIFELSV

SEQ ID NO: 11067 - protein, 85 aa, Homo sapiens
PSKEIFKRLLLEKENEQRLPYPLHNSAQIVAVNNVKYRKNIGEIRQYYQEQHQNWYVIDGFHSKWWVWNEVIKNVQMVNKYMQTY

SEQ ID NO: 11068 - protein, 85 aa, Homo sapiens
MERIKAGKAACIDKLCITPQELLSRLGEFEQFCPVSLAESQELFDCSATDSLEFAAEFRGHYYKMSSQEKLNKFLENPELYVPPL

SEQ ID NO: 11069 - protein, 85 aa, Homo sapiens
APHPLPSADMIPKRLTLSELKSRFPKCAELQGYCPVTYKDGNQRYEALVPGSINYALEYHNRIYICENKEKLQKFLRSPLKYWEQ

SEQ ID NO: 11070 - protein, 85 aa, Homo sapiens
KLPHKLPPLREPILLTSLPLPGYLEQGIATSLIKAMNAAGCLKPKFPFLSIRRSALLYIALHLKAFNPKGSEYTRKKYKKKMEQF

SEQ ID NO: 11071 - protein, 85 aa, Homo sapiens
DNDDIENILEDEFPKDEEEMSGEEDEEQETDAIERLRGELGEKFEADTHNLQIIQDELERYLIPIISINGARRNHIVQYTLNMKL

SEQ ID NO: 11072 - protein, 85 aa, Homo sapiens
KPLVENRASIFEKCHPIPAPLAQKMLTFTYKYISSFGYWDPVKLSEGETIKPVENAENPIYPVIHRQYIYFLSSKETKEKFMKNP

SEQ ID NO: 11073 - protein, 85 aa, Homo sapiens
IKYIRQPKPKPTVPIRIIIVGPPKSGKTTVAKKITSEYGLKHLSIGGALRYVLNNHPETELALMLNWHLHKGMTAPDELAIQALE

SEQ ID NO: 11074 - protein, 85 aa, Homo sapiens
LSLMESVCNTAGVVIDGYPVTKHQMNLLEARSIIPMVIFELSVPSKEIFKRLLLEKENEQRLPYPLHNSAQIVAVNNVKYRKNIG

SEQ ID NO: 11075 - protein, 85 aa, Homo sapiens
EIRQYYQEQHQNWYVIDGFHSKWWVWNEVIKNVQMVNKYMQTYLERIKAGKAACIDKLCITPQELLSRLGEFEQFCPVSLAESQE

SEQ ID NO: 11076 - protein, 85 aa, Homo sapiens
LFDCSATDSLEFAAEFRGHYYKMSSQEKLNKFLENPELYVPPLAPHPLPSADMIPKRLTLSELKSRFPKCAELQGYCPVTYKDGN

SEQ ID NO: 11077 - protein, 85 aa, Homo sapiens
QRYEALVPGSINYALEYHNRIYICENKEKLQKFLRSPLKYWEQKLPHKLPPLREPILLTSLPLPGYLEQGIATSLIKAMNAAGCL

SEQ ID NO: 11078 - protein, 85 aa, Homo sapiens
KPKFPFLSIRRSALLYIALHLKAFNPKGSEYTRKKYKKKMEQFMESCELITYLGAKMTRKYKEPQFRAIDFDHKLKTFLSLRNID

SEQ ID NO: 11079 - protein, 84 aa, Homo sapiens
RRDLDMEGRKIHVILARSTSMPQLGERSGVIRVKQYKQSLAIESDGKKGSKVFMYYFDNPGGQIPSWLINWAAKGGNCSGSLYH

SEQ ID NO: 11080 - protein, 85 aa, Homo sapiens
DAANFEQFLQERIKVNGKAGNLGGGVVTIERSKSKITVTSEVPFSKRYLKYLTKKYLKKNNLRDWLRVVANSKESYELRYFQINQ

SEQ ID NO: 11081 - protein, 84 aa, Homo sapiens
STLKDKRGTRYELRENIEQFFTKFVDEGKATVRLKEPPVDICLSKMESHSVTQVGVQWEELGSLQPTGHFQQFKRFPFSYETGS

SEQ ID NO: 11082 - protein, 85 aa, Homo sapiens
RAFLLISTLKDKRGTRYELRENIEQFFTKFVDEGKATVRLKEPPVDICLSKMESHSVTQVGVQWEELGSLQPTGHFQQFKRFPFS

SEQ ID NO: 11083 - protein, 84 aa, Homo sapiens
MVDRPDGTYCFRLHNDRVYYVSEKIMKLAANISGDKLVSLGTCFGKFTKTHKFRLHVTALDYLAPYAKVCGAVSNSATGDEVKD

SEQ ID NO: 11084 - protein, 85 aa, Homo sapiens
GDPGSEIIESVPPAGPEASESTTDENEDDIQFVSILFPKMPKRQGDFLHFLNVKKVKTDTENNEVSKNHCRLSKAKEPHFEYIEQ

SEQ ID NO: 11085 - protein, 85 aa, Homo sapiens
PIIEEKPSLSSKKEIDNLVLPDCWNEKQAFMFTEQYKWLEIKEGKLGCKDCSAVRHLGSKAEKHVHVSKEWIAYLVTPNGSNKTT

SEQ ID NO: 11086 - protein, 85 aa, Homo sapiens
RQASLRKKIREHDVSKAHGKIQDLLKESTNDSICNLVHKQNNKNIDATVKVFNTVYSLVKHNRPLSDIEGARELQEKNGEVNCLN

SEQ ID NO: 11087 - protein, 85 aa, Homo sapiens
TRYSATRIAEHIAKEMKMKIFKNIIEENAKICIIIDEASTVSKKTTLVIYLQCTIQSAPAPVMLFVALKELVSTIAECIVNTLLT

SEQ ID NO: 11088 - protein, 85 aa, Homo sapiens
TLNDCGFTNEYLKANLIAFCSDGANTILGRKSGVATKLLENFPEIIIWNCLNHRLQLSLDDSISEIKQINHLKIFIDKIYSIYHQ

SEQ ID NO: 11089 - protein, 85 aa, Homo sapiens
PNKNQTKLLGTVAKELETEIIKIGRVMGPRWAACSLQAATAVWHAYPILYMHFSHSYSGLAKRLANINFLQDLALMIDILEEFSV

SEQ ID NO: 11090 - protein, 85 aa, Homo sapiens
LSTALQSRSTNIKKAQKLIKRTIRALENLKIGTGKYESQIEDLIKSDKFKDIPFNKNNKFNALPRSILLDNIIQHMNLRLLSDRN

SEQ ID NO: 11091 - protein, 85 aa, Homo sapiens
HEDIFNYFDLLEPSTWPYEEITSPWIAGEKTLFHLCKILKYEVDLNDFREFVNNNIKSNNVSIPTTIYKAKKIVSTIAINSAEAE

SEQ ID NO: 11092 - protein, 85 aa, Homo sapiens
RQGDFLHFLNVKKVKTDTENNEVSKNHCRLSKAKEPHFEYIEQPIIEEKPSLSSKKEIDNLVLPDCWNEKQAFMFTEQYKWLEIK

SEQ ID NO: 11093 - protein, 85 aa, Homo sapiens
EGKLGCKDCSAVRHLGSKAEKHVHVSKEWIAYLVTPNGSNKTTRQASLRKKIREHDVSKAHGKIQDLLKESTNDSICNLVHKQNN

SEQ ID NO: 11094 - protein, 85 aa, Homo sapiens
KNIDATVKVFNTVYSLVKHNRPLSDIEGARELQEKNGEVNCLNTRYSATRIAEHIAKEMKMKIFKNIIEENAKICIIIDEASTVS

SEQ ID NO: 11095 - protein, 85 aa, Homo sapiens
KKTTLVIYLQCTIQSAPAPVMLFVALKELVSTIAECIVNTLLTTLNDCGFTNEYLKANLIAFCSDGANTILGRKSGVATKLLENF

SEQ ID NO: 11096 - protein, 85 aa, Homo sapiens
PEIIIWNCLNHRLQLSLDDSISEIKQINHLKIFIDKIYSIYHQPNKNQTKLLGTVAKELETEIIKIGRVMGPRWAACSLQAATAV

SEQ ID NO: 11097 - protein, 85 aa, Homo sapiens
WHAYPILYMHFSHSYSGLAKRLANINFLQDLALMIDILEEFSVLSTALQSRSTNIKKAQKLIKRTIRALENLKIGTGKYESQIED

SEQ ID NO: 11098 - protein, 85 aa, Homo sapiens
MIKSDKFKDIPFNKNNKFNALPRSILLDNIIQHMNLRLLSDRNHEDIFNYFDLLEPSTWPYEEITSPWIAGEKTLFHLCKILKYE

SEQ ID NO: 11099 - protein, 85 aa, Homo sapiens
VDLNDFREFVNNNIKSNNVSIPTTIYKAKKIVSTIAINSAEAERGFNLMNIICTRVRNSLTIDHVSDLMTINLLGKELADWDATP

SEQ ID NO: 11100 - protein, 85 aa, Homo sapiens
LQKPKSVKLRALRSPRKFGVAGRSCQEVLRKGCLRFQLPERGSRLCLYEDGTELTEDYFPSVPDNAELVLLTLGQAWQGWFRHVS

SEQ ID NO: 11101 - protein, 84 aa, Homo sapiens
GVAGRSCQEVLRKGCLRFQLPERGSRLCLYEDGTELTEDYFPSVPDNAELVLLTLGQAWQGWFRHVSQDSLTLLGSSCPPALVS

SEQ ID NO: 11102 - protein, 85 aa, Homo sapiens
VLPPQASRKTKKKEGGALRAQRASSNVFSNFEQTQIQEFKEAFTLMDQNRDGFIDKEDLKDTYASLGKTNVKDDELDAMLKEASG

SEQ ID NO: 11103 - protein, 85 aa, Homo sapiens
EAFTLMDQNRDGFIDKEDLKDTYASLGKTNVKDDELDAMLKEASGPINFTMFLNLFGEKLSGTDAEETILNAFKMLDPDGKGKIN

SEQ ID NO: 11104 - protein, 85 aa, Homo sapiens
MRQRPPPRRDMTIPRGLNLPKPPIPPQVEEEYYTIAEFQTTIPDGISFQAGLKVEDHKNVHLESPVEVPLRRIKMRTALGKHVAA

SEQ ID NO: 11105 - protein, 84 aa, Homo sapiens
PPRRDMTIPRGLNLPKPPIPPQVEEEYYTIAEFQTTIPDGISFQAGLKVEDHKNVHLESPVEVPLRRIKMRTALGKHVAASMEM

SEQ ID NO: 11106 - protein, 85 aa, Homo sapiens
GKNKRTAITTPNFKKLHEAHFKEMESIDQYIERKKKHFEEHNSMNELKQQPINKGGVRTPVPPRGRLSVASTPISQRRSQGRSCG

SEQ ID NO: 11107 - protein, 85 aa, Homo sapiens
SMNELKQQPINKGGVRTPVPPRGRLSVASTPISQRRSQGRSCGPASQSTLGLKGSLKRSAISAAKTGVRFSAATKDNEHKRSLTK

SEQ ID NO: 11108 - protein, 84 aa, Homo sapiens
GLMCLLRLHGSVGGAQNLSALGALVSLSNARLSSIKTRFEGLCLLSLLVGESPTELFQQHCVSWLRSIQQVLQYPCLHTLFSAR

SEQ ID NO: 11109 - protein, 85 aa, Homo sapiens
DKILEAVVTSSYPVSVKQGLVRRVLEAARQPLEREQCLALLALGARLYVGGAEELPRRVGCQLLHVAGRHHPDVFAEFFSARRVL

SEQ ID NO: 11110 - protein, 85 aa, Homo sapiens
RLLQGGAGPPGPRALACVQLGLQLLPEGPAADEVFALLRREVLRTVCERPGPAACAQVARLLARHPRCVPDGPHRLLFCQQLVRC

SEQ ID NO: 11111 - protein, 85 aa, Homo sapiens
LGRFRCPAEGEEGAVEFLEQAQQVSGLLAQLWRAQPAAILPCLKELFAVISCAEEEPPSSALASVVQHLPLELMDGVVRNLSNDD

SEQ ID NO: 11112 - protein, 85 aa, Homo sapiens
SVTDSQMLTAISRMIDWVSWPLGKNIDKWIIALLKGLAAVKKFSILIEVSLTKIEKVFSKLLYPIVRGAALSVLKYMLLTFQHSH

SEQ ID NO: 11113 - protein, 85 aa, Homo sapiens
EAFHLLLPHIPPMVASLVKEDSNSGTSCLEQLAELVHCMVFRFPGFPDLYEPVMEAIKDLHVPNEDRIKQLLGQDAWTSQKSELA

SEQ ID NO: 11114 - protein, 85 aa, Homo sapiens
GFYPRLMAKSDTGKIGLINLGNTCYVNSILQALFMASDFRHCVLRLTENNSQPLMTKLQWLFGFLEHSQRPAISPENFLSASWTP

SEQ ID NO: 11115 - protein, 85 aa, Homo sapiens
WFSPGTQQDCSEYLKYLLDRLHEEEKTGTRICQKLKQSSSPSPPEEPPAPSSTSVEKMFGGKIVTRICCLCCLNVSSREEAFTDL

SEQ ID NO: 11116 - protein, 85 aa, Homo sapiens
SLAFPPPERCRRRRLGSVMRPTEDITARELPPPTSAQGPGRVGPRRQRKHCITEDTPPTSLYIEGLDSKEAGGQSSQEERIEREE

SEQ ID NO: 11117 - protein, 85 aa, Homo sapiens
EGKEERTEKEEVGEEEESTRGEGEREKEEEVEEEEEKVEKETEKEAEQEKEEDSLGAGTHPDAAIPSGERTCGSEGSRSVLDLVN

SEQ ID NO: 11118 - protein, 85 aa, Homo sapiens
YFLSPEKLTAENRYYCESCASLQDAEKVVELSQGPCYLILTLLRFSFDLRTMRRRKILDDVSIPLLLRLPLAGGRGQAYDLCSVV

SEQ ID NO: 11119 - protein, 85 aa, Homo sapiens
VHSGVSSESGHYYCYAREGAARPAASLGTADRPEPENQWYLFNDTRVSFSSFESVSNVTSFFPKDTAYVLFYRQRPREGPEAELG

SEQ ID NO: 11120 - protein, 85 aa, Homo sapiens
MGARLYVGGAEELPRRVGCQLLHVAGRHHPDVFAEFFSARRVLRLLQGGAGPPGPRALACVQLGLQLLPEGPAADEVFALLRREV

SEQ ID NO: 11121 - protein, 85 aa, Homo sapiens
MRTVCERPGPAACAQVARLLARHPRCVPDGPHRLLFCQQLVRCLGRFRCPAEGEEGAVEFLEQAQQVSGLLAQLWRAQPAAILPC

SEQ ID NO: 11122 - protein, 85 aa, Homo sapiens
LKELFAVISCAEEEPPSSALASVVQHLPLELMDGVVRNLSNDDSVTDSQMLTAISRMIDWVSWPLGKNIDKWIIALLKGLAAVKK

SEQ ID NO: 11123 - protein, 85 aa, Homo sapiens
FSILIEVSLTKIEKVFSKLLYPIVRGAALSVLKYMLLTFQHSHEAFHLLLPHIPPMVASLVKEDSNSGTSCLEQLAELVHCMVFR

SEQ ID NO: 11124 - protein, 85 aa, Homo sapiens
FPGFPDLYEPVMEAIKDLHVPNEDRIKQLLGQDAWTSQKSELAGFYPRLMAKSDTGKIGLINLGNTCYVNSILQALFMASDFRHC

SEQ ID NO: 11125 - protein, 85 aa, Homo sapiens
VLRLTENNSQPLMTKLQWLFGFLEHSQRPAISPENFLSASWTPWFSPGTQQDCSEYLKYLLDRLHEEEKTGTRICQKLKQSSSPS

SEQ ID NO: 11126 - protein, 85 aa, Homo sapiens
PPEEPPAPSSTSVEKMFGGKIVTRICCLCCLNVSSREEAFTDLSLAFPPPERCRRRRLGSVMRPTEDITARELPPPTSAQGPGRV

SEQ ID NO: 11127 - protein, 85 aa, Homo sapiens
GPRRQRKHCITEDTPPTSLYIEGLDSKEAGGQSSQEERIEREEEGKEERTEKEEVGEEEESTRGEGEREKEEEVEEEEEKVEKET

SEQ ID NO: 11128 - protein, 85 aa, Homo sapiens
EKEAEQEKEEDSLGAGTHPDAAIPSGERTCGSEGSRSVLDLVNYFLSPEKLTAENRYYCESCASLQDAEKVVELSQGPCYLILTL

SEQ ID NO: 11129 - protein, 85 aa, Homo sapiens
MRFSFDLRTMRRRKILDDVSIPLLLRLPLAGGRGQAYDLCSVVVHSGVSSESGHYYCYAREGAARPAASLGTADRPEPENQWYLF

SEQ ID NO: 11130 - protein, 85 aa, Homo sapiens
NDTRVSFSSFESVSNVTSFFPKDTAYVLFYRQRPREGPEAELGSSRVRTEPTLHKDLMEAISKDNILYLQEQEKEARSRAAYISA

SEQ ID NO: 11131 - protein, 85 aa, Homo sapiens
PEVERKPKITASRKLLLKSLMLAKAKECWEQEHEEREAEKVRYLAERIPTLQTRGLSLSALQDLCRELHAKVEVVDEERYDIEAM

SEQ ID NO: 11132 - protein, 84 aa, Homo sapiens
MLAKAKECWEQEHEEREAEKVRYLAERIPTLQTRGLSLSALQDLCRELHAKVEVVDEERYDIEAMSGMEGRKKMFDAAKSPTSQ

SEQ ID NO: 11133 - protein, 85 aa, Homo sapiens
SVNEKCNMKIEHYFSPVSKEQQNNCSTSLMRMESRGDPRATTNTQAQRFHSPKKNPEDQTMPQNRTIYVTLKVNHRRNQDMKLKL

SEQ ID NO: 11134 - protein, 85 aa, Homo sapiens
EEEVPASQSTENRVLPAPAPRREKTNEELQEELRNLQEQMKALQEQLKVTTIKQTASPARLQKSPVEKSPRPPLKERRVQRIQES

SEQ ID NO: 11135 - protein, 85 aa, Homo sapiens
TCFSAELDVPALPRTKRVARTPKASPPDPKSSSSRMTSAPSQPLQTISRNKPSGITRGQIVGTPGSSGETTQPICVEAFSGLRLR

SEQ ID NO: 11136 - protein, 85 aa, Homo sapiens
RPRVSSTEMNKKMTGRKLIRLSQIKEKMAREKLEEIDWVTFGVILKKVTPQSVNSGKTFSIWKLNDLRDLTQCVSLFLFGEVHKA

SEQ ID NO: 11137 - protein, 85 aa, Homo sapiens
LWKTEQGTVVGILNANPMKPKDGSEEVCLSIDHPQKVLIMGEALDLGTCKAKKKNGEPCTQTVNLRDCEYCQYHVQAQYKKLSAK

SEQ ID NO: 11138 - protein, 85 aa, Homo sapiens
RADLQSTFSGGRIPKKFARRGTSLKERLCQDGFYYGGVSSASYAASIAAAVAPKKKIQTTLSNLVVKGTNLIIQETRQKLGIPQK

SEQ ID NO: 11139 - protein, 85 aa, Homo sapiens
SLSCSEEFKELMDLPTCGARNLKQHLAKATASGIMGSPKPAIKSISASALLKQQKQRMLEMRRRKSEEIQKRFLQSSSEVESPAV

SEQ ID NO: 11140 - protein, 85 aa, Homo sapiens
PSSSRQPPAQPPRTGSEFPRLEGAPATMTPKLGRGVLEGDDVLFYDESPPPRPKLSALAEAKKLAAITKLRAKGQVLTKTNPNSI

SEQ ID NO: 11141 - protein, 85 aa, Homo sapiens
KKKQKDPQDILEVKERVEKNTMFSSQAEDELEPARKKRREQLAYLESEEFQKILKAKSKHTGILKEAEAEMQERYFEPLVKKEQM

SEQ ID NO: 11142 - protein, 85 aa, Homo sapiens
EEKMRNIREVKCRVVTCKTCAYTHFKLLETCVSEQHEYHWHDGVKRFFKCPCGNRSISLDRLPNKHCSNCGLYKWERDGMLKEKT

SEQ ID NO: 11143 - protein, 85 aa, Homo sapiens
LQEQLKVTTIKQTASPARLQKSPVEKSPRPPLKERRVQRIQESTCFSAELDVPALPRTKRVARTPKASPPDPKSSSSRMTSAPSQ

SEQ ID NO: 11144 - protein, 85 aa, Homo sapiens
PLQTISRNKPSGITRGQIVGTPGSSGETTQPICVEAFSGLRLRRPRVSSTEMNKKMTGRKLIRLSQIKEKMAREKLEEIDWVTFG

SEQ ID NO: 11145 - protein, 85 aa, Homo sapiens
VILKKVTPQSVNSGKTFSIWKLNDLRDLTQCVSLFLFGEVHKALWKTEQGTVVGILNANPMKPKDGSEEVCLSIDHPQKVLIMGE

SEQ ID NO: 11146 - protein, 85 aa, Homo sapiens
ALDLGTCKAKKKNGEPCTQTVNLRDCEYCQYHVQAQYKKLSAKRADLQSTFSGGRIPKKFARRGTSLKERLCQDGFYYGGVSSAS

SEQ ID NO: 11147 - protein, 85 aa, Homo sapiens
YAASIAAAVAPKKKIQTTLSNLVVKGTNLIIQETRQKLGIPQKSLSCSEEFKELMDLPTCGARNLKQHLAKATASGIMGSPKPAI

SEQ ID NO: 11148 - protein, 85 aa, Homo sapiens
KSISASALLKQQKQRMLEMRRRKSEEIQKRFLQSSSEVESPAVPSSSRQPPAQPPRTGSEFPRLEGAPATMTPKLGRGVLEGDDV

SEQ ID NO: 11149 - protein, 85 aa, Homo sapiens
LFYDESPPPRPKLSALAEAKKLAAITKLRAKGQVLTKTNPNSIKKKQKDPQDILEVKERVEKNTMFSSQAEDELEPARKKRREQL

SEQ ID NO: 11150 - protein, 85 aa, Homo sapiens
AYLESEEFQKILKAKSKHTGILKEAEAEMQERYFEPLVKKEQMEEKMRNIREVKCRVVTCKTCAYTHFKLLETCVSEQHEYHWHD

SEQ ID NO: 11151 - protein, 85 aa, Homo sapiens
GKSCKVVVCGQASVGKTSILEQLLYGNHVVGSEMIETQEDIYVGSIETDRGVREQIAESLFSVWSCSRRRLTNPRTRRRSPSWSL

SEQ ID NO: 11152 - protein, 84 aa, Homo sapiens
SVGKTSILEQLLYGNHVVGSEMIETQEDIYVGSIETDRGVREQIAESLFSVWSCSRRRLTNPRTRRRSPSWSLATSVTYRSSGV

SEQ ID NO: 11153 - protein, 85 aa, Homo sapiens
LFKKKFGGVQELLNQQKKSGEVAVLKRDGRYIYYLITKKRASHKPTYENLQKSLEAMKSHCLKNGVTDLSMPRIGCGLDRLQWEN

SEQ ID NO: 11154 - protein, 85 aa, Homo sapiens
SVKEMAKGITYDDPIKTSWTPPRYVLSMSEERHERVRKKYHILVEGDGIPPPIKSFKEMKFPAVSSSATCRGSASFTGFGALRKY

SEQ ID NO: 11155 - protein, 84 aa, Homo sapiens
KEMAKGITYDDPIKTSWTPPRYVLSMSEERHERVRKKYHILVEGDGIPPPIKSFKEMKFPAVSSSATCRGSASFTGFGALRKYL

SEQ ID NO: 11156 - protein, 85 aa, Homo sapiens
TFLIVTVAWAAHTRLFQVVGKTDDTLALLNLACMMTITFLPYTFSLMVTFPDVPLGIFLFCVCVIAIGVVQALIVGYAFHFPHLL

SEQ ID NO: 11157 - protein, 85 aa, Homo sapiens
SPQIQRSAHRALYRRHVLGIVLQGPALCFAAAIFSLFFVPLSYLLMVTVILLPYVSKVTGWCRDRLLGHREPSAHPVEVFSFDLH

SEQ ID NO: 11158 - protein, 85 aa, Homo sapiens
EPLSKERVEAFSDGVYAIVATLLILDICEDNVPDPKDVKERFSGSLVAALSATGPRFLAYFGSFATVGLLWFAHHSLFLHVRKAT

SEQ ID NO: 11159 - protein, 85 aa, Homo sapiens
RAMGLLNTLSLAFVGGLPLAYQQTSAFARQPRDELERVRVSCTIIFLASIFQLAMWTTALLHQAETLQPSVWFGGREHVLMFAKL

SEQ ID NO: 11160 - protein, 85 aa, Homo sapiens
TFSLMVTFPDVPLGIFLFCVCVIAIGVVQALIVGYAFHFPHLLSPQIQRSAHRALYRRHVLGIVLQGPALCFAAAIFSLFFVPLS

SEQ ID NO: 11161 - protein, 85 aa, Homo sapiens
YLLMVTVILLPYVSKVTGWCRDRLLGHREPSAHPVEVFSFDLHEPLSKERVEAFSDGVYAIVATLLILDICEDNVPDPKDVKERF

SEQ ID NO: 11162 - protein, 85 aa, Homo sapiens
SGSLVAALSATGPRFLAYFGSFATVGLLWFAHHSLFLHVRKATRAMGLLNTLSLAFVGGLPLAYQQTSAFARQPRDELERVRVSC

SEQ ID NO: 11163 - protein, 85 aa, Homo sapiens
TIIFLASIFQLAMWTTALLHQAETLQPSVWFGGREHVLMFAKLALYPCASLLAFASTCLLSRFSVGIFHLMQIAVPCAFLLLRLL

SEQ ID NO: 11164 - protein, 85 aa, Homo sapiens
ETFHTPSLGDEEFEIPPISLDSDPSLAVSDVVGHFDDLADPSSSQDGSFSAQYGVQTLDMPVGMTHGLMEQGGGLLSGGLTMDLD

SEQ ID NO: 11165 - protein, 85 aa, Homo sapiens
SSQDGSFSAQYGVQTLDMPVGMTHGLMEQGGGLLSGGLTMDLDHSIGTQYSANPPVTIDVPMTDMTSGLMGHSQLTTIDQSELSS

SEQ ID NO: 11166 - protein, 7 aa, Homo sapiens
VSSLKLT

SEQ ID NO: 11167 - protein, 5 aa, Homo sapiens
IPEER

SEQ ID NO: 11168 - protein, 27 aa, Homo sapiens
GSPLQIKVFIQQIVKMKRIKEGQKRQK

SEQ ID NO: 11169 - protein, 16 aa, Homo sapiens
LPLKSLKVQVMKRNKK

SEQ ID NO: 11170 - protein, 84 aa, Homo sapiens
TSTSTEEEAIQGMLSMAGLHYSTCLQRQIQSTDCSGERNSLQDPSSCHGSNHEVRQLYRYDKPVECETRSHLCCPDWSPTPELK

SEQ ID NO: 11171 - protein, 8 aa, Homo sapiens
TLLKNFLK

SEQ ID NO: 11172 - protein, 27 aa, Homo sapiens
MENSTNISNHPPQYLNGERKIMIYDYC

SEQ ID NO: 11173 - protein, 5 aa, Homo sapiens
NLKNH

SEQ ID NO: 11174 - protein, 85 aa, Homo sapiens
FQLKGNVLPRRAQRKKLFRACCLWQGCTIPRVYKGKYKAQTAVVKETLSRIPAAAMAVTMRLGSCIAMINQWNVRRGLTYVAQTG

SEQ ID NO: 11175 - protein, 85 aa, Homo sapiens
AWVPAESAVEELMPRLLPVEPCDLTEGFDPSVPPRTPQEYLRRVQIEAAQCPDVVVAQIDPKKLKRKQSVNISLSGCQPAPEGYS

SEQ ID NO: 11176 - protein, 85 aa, Homo sapiens
PTLQWQQQQVAQFSTVRQNVNKHRSHWKSQQLDSNVTMPKSEDEEGWKKFCLGEKLCADGAVGPATNESPGIDYVQIGFPPLLSI

SEQ ID NO: 11177 - protein, 85 aa, Homo sapiens
EEGWKKFCLGEKLCADGAVGPATNESPGIDYVQIGFPPLLSIVSRMNQGRWLYALLACLEKPLLPEAHSLIRQLARRCSEVRLLV

SEQ ID NO: 11178 - protein, 85 aa, Homo sapiens
RVQIEAAQCPDVVVAQIDPKKLKRKQSVNISLSGCQPAPEGYSPTLQWQQQQVAQFSTVRQNVNKHRSHWKSQQLDSNVTMPKSE

SEQ ID NO: 11179 - protein, 85 aa, Homo sapiens
DEEGWKKFCLGEKLCADGAVGPATNESPGIDYVQIGFPPLLSIVSRMNQGRWLYALLACLEKPLLPEAHSLIRQLARRCSEVRLL

SEQ ID NO: 11180 - protein, 85 aa, Homo sapiens
PPKGKSGSGKAGKGGAASGSDSADKKAQGPKGGGNAVKVRHILCEKHGKIMEAMEKLKSGMRFNEVAAQYSEDKARQGIPSLQQH

SEQ ID NO: 11181 - protein, 85 aa, Homo sapiens
ETCDSPPISRQENGQSTSKLCGTTQLDNEVPEKVAGMEPDRENSSTDDNLKTDERKSEALLGFSVENAAATQVTSAKEIPCNECA

SEQ ID NO: 11182 - protein, 85 aa, Homo sapiens
RKSEALLGFSVENAAATQVTSAKEIPCNECATSFPSLQKYMEHHCPNARLPVLKDDNESEISELEDSDVENLTGEIVYQPDGSAY

SEQ ID NO: 11183 - protein, 85 aa, Homo sapiens
NSSTDDNLKTDERKSEALLGFSVENAAATQVTSAKEIPCNECATSFPSLQKYMEHHCPNARLPVLKDDNESEISELEDSDVENLT

SEQ ID NO: 11184 - protein, 85 aa, Homo sapiens; identical to SEQ ID NO: 1394

SEQ ID NO: 11185 - protein, 85 aa, Homo sapiens
MGCAFPYAAYSMPASWLHGHLHQFFVPAAALNSFLCTGLSCYSRTAMVTGLFLPPPSFLELESPGLSKVLRTGAFAYPFLFDNLP

SEQ ID NO: 11186 - protein, 85 aa, Homo sapiens
ILYWSPKYFRAPGVWEVPWLDRQTQATTLVHQIFGGYLRSRVKCSVCKSVSDTYDPYLDVALEIRQAANIVRALELFVKADVLSG

SEQ ID NO: 11187 - protein, 85 aa, Homo sapiens
ENAYMCAKCKKKVPASKRFTIHRTSNVLTLSLKRFANFSGGKITKDVGYPEFLNIRPYMSQNNGDPVMYGLYAVLVHSGYSCHAG

SEQ ID NO: 11188 - protein, 85 aa, Homo sapiens
HYYCYVKASNGQWYQMNDSLVHSSNVKVVLNQQAYVLFYLRIPGSKKSPEGLISRTGSSSLPGRPSVIPDHSKKNIGNGIISSPL

SEQ ID NO: 11189 - protein, 85 aa, Homo sapiens
CYVKASNGQWYQMNDSLVHSSNVKVVLNQQAYVLFYLRIPGSKKSPEGLISRTGSSSLPGRPSVIPDHSKKNIGNGIISSPLTGK

SEQ ID NO: 11190 - protein, 85 aa, Homo sapiens
KCSVCKSVSDTYDPYLDVALEIRQAANIVRALELFVKADVLSGENAYMCAKCKKKVPASKRFTIHRTSNVLTLSLKRFANFSGGK

SEQ ID NO: 11191 - protein, 85 aa, Homo sapiens
ITKDVGYPEFLNIRPYMSQNNGDPVMYGLYAVLVHSGYSCHAGHYYCYVKASNGQWYQMNDSLVHSSNVKVVLNQQAYVLFYLRI

SEQ ID NO: 11192 - protein, 85 aa, Homo sapiens
GANVHARDDGGLIPLHNACSFGHAEVVSLLLCQGADPNARDNWNYTPLHEAAIKGKIDVCIVLLQHGADPNIRNTDGKSALDLAD

SEQ ID NO: 11193 - protein, 85 aa, Homo sapiens
PSAKAVLTGEYKKDELLEAARSGNEEKLMALLTPLNVNCHASDGRKSTPLHLAAGYNRVRIVQLLLQHGADVHAKDKGGLVPLHN

SEQ ID NO: 11194 - protein, 85 aa, Homo sapiens
ACSYGHYEVTELLLKHGACVNAMDLWQFTPLHEAASKNRVEVCSLLLSHGADPTLVNCHGKSAVDMAPTPELRERLTYEFKGHSL

SEQ ID NO: 11195 - protein, 85 aa, Homo sapiens
LQAAREADLAKVKKTLALEIINFKQPQSHETALHCAVASLHPKRKQVTELLLRKGANVNEKNKDFMTPLHVAAERAHNDVMEVLH

SEQ ID NO: 11196 - protein, 85 aa, Homo sapiens
KHGAKMNALDTLGQTALHRAALAGHLQTCRLLLSYGSDPSIISLQGFTAAQMGNEAVQQILSESTPIRTSDVDYRLLEASKAGDL

SEQ ID NO: 11197 - protein, 85 aa, Homo sapiens
ETVKQLCSSQNVNCRDLEGRHSTPLHFAAGYNRVSVVEYLLHHGADVHAKDKGGLVPLHNACSYGHYEVAELLVRHGASVNVADL

SEQ ID NO: 11198 - protein, 85 aa, Homo sapiens
WKFTPLHEAAAKGKYEICKLLLKHGADPTKKNRDGNTPLDLVKEGDTDIQDLLRGDAALLDAAKKGCLARVQKLCTPENINCRDT

SEQ ID NO: 11199 - protein, 85 aa, Homo sapiens
QGRNSTPLHLAAGYNNLEVAEYLLEHGADVNAQDKGGLIPLHNAASYGHVDIAALLIKYNTCVNATDKWAFTPLHEAAQKGRTQL

SEQ ID NO: 11200 - protein, 85 aa, Homo sapiens
CALLLAHGADPTMKNQEGQTPLDLATADDIRALLIDAMPPEALPTCFKPQATVVSASLISPASTPSCLSAASSIDNLTGPLAELA

SEQ ID NO: 11201 - protein, 85 aa, Homo sapiens
VGGASNAGDGAAGTERKEGEVAGLDMNISQFLKSLGLEHLRDIFETEQITLDVLADMGHEELKEIGINAYGHRHKLIKGVERLLG

SEQ ID NO: 11202 - protein, 85 aa, Homo sapiens
GQQGTNPYLTFHCVNQGTILLDLAPEDKEYQSVEEEMQSTIREHRDGGNAGGIFNRYNVIRIQKVVNKKLRERFCHRQKEVSEEN

SEQ ID NO: 11203 - protein, 85 aa, Homo sapiens
HNHHNERMLFHGSPFINAIIHKGFDERHAYIGGMFGAGIYFAENSSKSNQYVYGIGGGTGCPTHKDRSCYICHRQMLFCRVTLGK

SEQ ID NO: 11204 - protein, 85 aa, Homo sapiens
WNYTPLHEAAIKGKIDVCIVLLQHGADPNIRNTDGKSALDLADPSAKAVLTGEYKKDELLEAARSGNEEKLMALLTPLNVNCHAS

SEQ ID NO: 11205 - protein, 85 aa, Homo sapiens
DGRKSTPLHLAAGYNRVRIVQLLLQHGADVHAKDKGGLVPLHNACSYGHYEVTELLLKHGACVNAMDLWQFTPLHEAASKNRVEV

SEQ ID NO: 11206 - protein, 85 aa, Homo sapiens
CSLLLSHGADPTLVNCHGKSAVDMAPTPELRERLTYEFKGHSLLQAAREADLAKVKKTLALEIINFKQPQSHETALHCAVASLHP

SEQ ID NO: 11207 - protein, 85 aa, Homo sapiens
KRKQVTELLLRKGANVNEKNKDFMTPLHVAAERAHNDVMEVLHKHGAKMNALDTLGQTALHRAALAGHLQTCRLLLSYGSDPSII

SEQ ID NO: 11208 - protein, 85 aa, Homo sapiens
SLQGFTAAQMGNEAVQQILSESTPIRTSDVDYRLLEASKAGDLETVKQLCSSQNVNCRDLEGRHSTPLHFAAGYNRVSVVEYLLH

SEQ ID NO: 11209 - protein, 85 aa, Homo sapiens
HGADVHAKDKGGLVPLHNACSYGHYEVAELLVRHGASVNVADLWKFTPLHEAAAKGKYEICKLLLKHGADPTKKNRDGNTPLDLV

SEQ ID NO: 11210 - protein, 85 aa, Homo sapiens
KEGDTDIQDLLRGDAALLDAAKKGCLARVQKLCTPENINCRDTQGRNSTPLHLAAGYNNLEVAEYLLEHGADVNAQDKGGLIPLH

SEQ ID NO: 11211 - protein, 85 aa, Homo sapiens
NAASYGHVDIAALLIKYNTCVNATDKWAFTPLHEAAQKGRTQLCALLLAHGADPTMKNQEGQTPLDLATADDIRALLIDAMPPEA

SEQ ID NO: 11212 - protein, 85 aa, Homo sapiens
LPTCFKPQATVVSASLISPASTPSCLSAASSIDNLTGPLAELAVGGASNAGDGAAGTERKEGEVAGLDMNISQFLKSLGLEHLRD

SEQ ID NO: 11213 - protein, 85 aa, Homo sapiens
IFETEQITLDVLADMGHEELKEIGINAYGHRHKLIKGVERLLGGQQGTNPYLTFHCVNQGTILLDLAPEDKEYQSVEEEMQSTIR

SEQ ID NO: 11214 - protein, 85 aa, Homo sapiens
EHRDGGNAGGIFNRYNVIRIQKVVNKKLRERFCHRQKEVSEENHNHHNERMLFHGSPFINAIIHKGFDERHAYIGGMFGAGIYFA

SEQ ID NO: 11215 - protein, 85 aa, Homo sapiens
ENSSKSNQYVYGIGGGTGCPTHKDRSCYICHRQMLFCRVTLGKSFLQFSTMKMAHAPPGHHSVIGRPSVNGLAYAEYVIYRGEQA

SEQ ID NO: 11216 - protein, 85 aa, Homo sapiens
LINHALKELMEIEEVSENVLQVHLNGLLQINDKIALKEITRQLNLENVVGDKVFGSFAENLSFLLEALKKGDRTSSCPVIFILDE

SEQ ID NO: 11217 - protein, 85 aa, Homo sapiens
FDLFAHHKNQTLLYNLFDISQSAQTPIAVIGLTCRLDILELLEKRVKSRFSHRQIHLMNSFGFPQYVKIFKEQLSLPAEFPDKVF

SEQ ID NO: 11218 - protein, 85 aa, Homo sapiens
AEKWNENVQYLSEDRSVQEVLQKHFNISKNLRSLHMLLMLALNRVTASHPFMTAVDLMEASQLCSMDSKANIVHGLSVLEICLII

SEQ ID NO: 11219 - protein, 85 aa, Homo sapiens
AMKHLNDIYEEEPFNFQMVYNEFQKFVQRKAHSVYNFEKPVVMKAFEHLQQLELIKPMERTSGNSQREYQLMKLLLDNTQIMNAL

SEQ ID NO: 11220 - protein, 85 aa, Homo sapiens
LNLENVVGDKVFGSFAENLSFLLEALKKGDRTSSCPVIFILDEFDLFAHHKNQTLLYNLFDISQSAQTPIAVIGLTCRLDILELL

SEQ ID NO: 11221 - protein, 85 aa, Homo sapiens
EKRVKSRFSHRQIHLMNSFGFPQYVKIFKEQLSLPAEFPDKVFAEKWNENVQYLSEDRSVQEVLQKHFNISKNLRSLHMLLMLAL

SEQ ID NO: 11222 - protein, 85 aa, Homo sapiens
NRVTASHPFMTAVDLMEASQLCSMDSKANIVHGLSVLEICLIIAMKHLNDIYEEEPFNFQMVYNEFQKFVQRKAHSVYNFEKPVV

SEQ ID NO: 11223 - protein, 85 aa, Homo sapiens
ACSSPIPGLEGRPERLPLVPESPRRMMTRSQDATFSPGSEQAEKSPGPIVSRTRSWDSSSPVDRPEPEAASPTTRTRPVTRSMGT

SEQ ID NO: 11224 - protein, 85 aa, Homo sapiens
GDTPGLEVPSSPLRKAKRARLCSSSSSDTSSRSFFDPTSQHRDWCPWVNITLGKESRENGGTEPDASAPAEPGWKAVLTILLAHK

SEQ ID NO: 11225 - protein, 85 aa, Homo sapiens
ISLLLHLLEDELDHRTDERKTTIKLGSDIQVHVTACILSVCGWACSSPIPGLEGRPERLPLVPESPRRMMTRSQDATFSPGSEQA

SEQ ID NO: 11226 - protein, 85 aa, Homo sapiens
TSFPSLQKYMEHHCPNARLPVLKDDNESEISELEDSDVENLTGEIVYQPDGSAYIIEDSKESGQNAQTGANSKLFSTAMFLDSLA

SEQ ID NO: 11227 - protein, 85 aa, Homo sapiens
SAGEKSDQSASAPMSFYPQIINTFHIASSLGKPFTADQAFPNTSALAGVGPVLHSFRVYDLRHKREKDYLTSDGSAKNSCVSKDV

SEQ ID NO: 11228 - protein, 85 aa, Homo sapiens
PNNVDLSKFDGCVSDGKRKPVLMCFLCKLSFGYIRSFVTHAVHDHRMTLNDEEQKLLSNKCVSAIIQGIGKDKEPLISFLEPKKS

SEQ ID NO: 11229 - protein, 85 aa, Homo sapiens
TSVYPHFSTTNLIGPDPTFRGLWSAFHVENGDSLPAGFAFLKGSASTSSSAEQPLGITQMPKAEVNLGGLSSLVVNTPITSVSLS

SEQ ID NO: 11230 - protein, 85 aa, Homo sapiens
HSSSESSKMSESKDQENNCERPKESNVLHPNGECPVKSEPTEPGDEDEEDAYSNELDDEEVLGELTDSIGNKDFPLLNQSISPLS

SEQ ID NO: 11231 - protein, 85 aa, Homo sapiens
SSVLKFIEKGTSSSSATVSDDTEKKKQTAAVRASGSVASNYGISGKDFADASASKDSATAAHPSEIARGDEDSSATPHQHGFTPS

SEQ ID NO: 11232 - protein, 85 aa, Homo sapiens
TPGTPGPGGDGSPGSGIECPKCDTVLGSSRSLGGHMTMMHSRNSCKTLKCPKCNWHYKYQQTLEAHMKEKHPEPGGSCVYCKTGQ

SEQ ID NO: 11233 - protein, 85 aa, Homo sapiens
PHPRLARGESYTCGYKPFRCEVCNYSTTTKGNLSIHMQSDKHLNNVQNLQNGNGEQVFGHSAPAPNTSLSGCGTPSPSKPKQKPT

SEQ ID NO: 11234 - protein, 85 aa, Homo sapiens
WRCEVCDYETNVARNLRIHMTSEKHMHNMMLLQQNMKQIQHNLHLGLAPAEAELYQYYLAQNIGLTGMKLENPADPQLMINPFQL

SEQ ID NO: 11235 - protein, 85 aa, Homo sapiens
DPATAAALAPGLGELSPYISDPALKLFQCAVCNKFTSDSLEALSVHVSSERSLPEEEWRAVIGDIYQCKLCNYNTQLKANFQLHC

SEQ ID NO: 11236 - protein, 85 aa, Homo sapiens
KTDKHMQKYQLVAHIKEGGKSNEWRLKCIAIGNPVHLKCNACDYYTNSVDKLRLHTTNHRHEAALKLYKHLQKQEGAVNPESCYY

SEQ ID NO: 11237 - protein, 85 aa, Homo sapiens
YCAVCDYTTKVKLNLVQHVRSVKHQQTEGLRKLQLHQQGLAPEEDNLSEIFFVKDCPPNELETASLGARTCDDDLTEQQLRSTSE

SEQ ID NO: 11238 - protein, 85 aa, Homo sapiens
EQSEEAEGAIKPTAVAEDDEKDTSERDNSEGKNSNKDSGIITPEKELKVSVAGGTQPLLLAKEEDVATKRSKPTEDNKFCHEQFY

SEQ ID NO: 11239 - protein, 85 aa, Homo sapiens
QCPYCNYNSRDQSRIQMHVLSQHSVQPVICCPLCQDVLSNKMHLQLHLTHLHSVSPDCVEKLLMTVPVPDVMMPNSMLLPAAASE

SEQ ID NO: 11240 - protein, 85 aa, Homo sapiens
KSERDTPAAVTAEGSGKYSGESPMDDKSMAGLEDSKANVEVKNEEQKPTKEPLEVSEWNKNSSKDVKIPDTLQDQLNEQQKRQPL

SEQ ID NO: 11241 - protein, 85 aa, Homo sapiens
SVSDRHVYKYRCNHCSLAFKTMQKLQIHSQYHAIRAATMCNLCQRSFRTFQALKKHLEAGHPELSEAELQQLYASLPVNGELWAE

SEQ ID NO: 11242 - protein, 85 aa, Homo sapiens
SETMSQDDHGLEQEMEREYEVDHEGKASPVGSDSSSIPDDMGSEPKRTLPFRKGPNFTMEKFLDPSRPYKCTVCKESFTQKNILL

SEQ ID NO: 11243 - protein, 85 aa, Homo sapiens
VHYNSVSHLHKLKKVLQEASSPVPQETNSNTDNKPYKCSICNVAYSQSSTLEIHMRSVLHQTKARAAKLEPSGHVAGGHSIAANV

SEQ ID NO: 11244 - protein, 85 aa, Homo sapiens
NSPGQGMLDSMSLAAVNSKDTHLDAKELNKKQTPDLISAQPAHHPPQSPAQIQMQLQHELQQQAAFFQPQFLNPAFLPHFPMTPE

SEQ ID NO: 11245 - protein, 85 aa, Homo sapiens
ALLQFQQPQFLFPFYIPGTEFSLGPDLGLPGSATFGMPGMTGMAGSLLEDLKQQIQTQHHVGQTQLQILQQQAQQYQATQPQLQP

SEQ ID NO: 11246 - protein, 85 aa, Homo sapiens
QKQQQQPPPPQQQQQQQASKLLKQEQSNIVSADCQIMKDVPSYKEAEDISEKPEKPKQEFISEGEGLKEGKDTKKQKSLEPSIPP

SEQ ID NO: 11247 - protein, 85 aa, Homo sapiens
PRIASGARGNAAKALLENFGFELVIQYNENRQKVQKKGKSGEGENTDKLECGTCGKLFSNVLILKSHQEHVHGQFFPYAALEKFA

SEQ ID NO: 11248 - protein, 85 aa, Homo sapiens
RQYREAYDKLYPISPSSPETPPPPPPPPPLPPAPPQPSSMGPVKIPNTVSTPLQAPPPTPPPPPPPPPPPPPPPPPPPPSAPPQV

SEQ ID NO: 11249 - protein, 85 aa, Homo sapiens
QLPVSLDLPLFPSIMMQPVQHPALPPQLALQLPQMDALSADLTQLCQQQLGLDPNFLRHSQFKRPRTRITDDQLKILRAYFDINN

SEQ ID NO: 11250 - protein, 85 aa, Homo sapiens
SPSEEQIQEMAEKSGLSQKVIKHWFRNTLFKERQRNKDSPYNFSNPPITVLEDIRIDPQPTSLEHYKSDASFSKRSSRTRFTDYQ

SEQ ID NO: 11251 - protein, 85 aa, Homo sapiens
LRVLQDFFDTNAYPKDDEIEQLSTVLNLPTRVIVVWFQNARQKARKSYENQAETKDNEKRELTNERYIRTSNMQYQCKKCNVVFP

SEQ ID NO: 11252 - protein, 85 aa, Homo sapiens
RIFDLITHQKKQCYKDEDDDAQDESQTEDSMDATDQVVYKHCTVSGQTDAAKNAAAPAASSGSGTSTPLIPSPKPEPEKTSPKPE

SEQ ID NO: 11253 - protein, 85 aa, Homo sapiens
YPAEKPKQSDPSPPSQGTKPALPLASTSSDPPQASTAQPQPQPQPPKQPQLIGRPPSASQTPVPSSPLQISMTSLQNSLPPQLLQ

SEQ ID NO: 11254 - protein, 85 aa, Homo sapiens
YQCDQCTVAFPTLELWQEHQHMHFLAAQNQFLHSPFLERPMDMPYMIFDPNNPLMTGQLLGSSLTQMPPQASSSHTTAPTTVAAS

SEQ ID NO: 11255 - protein, 85 aa, Homo sapiens
LKRKLDDKEDNNCSEKEGGNSGEDQHRDKRLRTTITPEQLEILYEKYLLDSNPTRKMLDHIAREVGLKKRVVQVWFQNTRARERK

SEQ ID NO: 11256 - protein, 85 aa, Homo sapiens
GQFRAVGPAQSHKRCPFCRALFKAKSALESHIRSRHWNEGKQAGYSLPPSPLISTEDGGESPQKYIYFDYPSLPLTKIDLSSENE

SEQ ID NO: 11257 - protein, 85 aa, Homo sapiens
MASTVSTPVSKTAELSPKNLLSPSSFKAECSEDVENLNAPPAEAGYDQNKTDFDETSSINTAISDATTGDEGNTEMESTTGSSGD

SEQ ID NO: 11258 - protein, 85 aa, Homo sapiens
VKPALSPKEPKTLDTLPKPATTPTTEVCDDKFLFSLTSPSIHFNDKDGDHDQSFYITDDPDDNADRSETSSIADPSSPNPFGSSN

SEQ ID NO: 11259 - protein, 85 aa, Homo sapiens
PFKSKSNDRPGHKRFRTQMSNLQLKVLKACFSDYRTPTMQECEMLGNEIGLPKRVVQVWFQNARAKEKKFKINIGKPFMINQGGT

SEQ ID NO: 11260 - protein, 85 aa, Homo sapiens
EGTKPECTLCGVKYSARLSIRDHIFSKQHISKVRETVGSQLDREKDYLAPTTVRQLMAQQELDRIKKASDVLGLTVQQPGMMDSS

SEQ ID NO: 11261 - protein, 85 aa, Homo sapiens
SLHGISLPTAYPGLPGLPPVLLPGMNGPSSLPGFPQNSNTLTPPGAGMLGFPTSATSSPALSLSSAPTKPLLQTPPPPPPPPPPP

SEQ ID NO: 11262 - protein, 85 aa, Homo sapiens
PSSSLSGQQTEQQNKESEKKQTKPNKVKKIKEEELEATKPEKHPKKEEKISSALSVLGKVVGETHVDPIQLQALQNAIAGDPASF

SEQ ID NO: 11263 - protein, 85 aa, Homo sapiens
IGGQFLPYFIPGFASYFTPQLPGTVQGGYFPPVCGMESLFPYGPTMPQTLAGLSPGALLQQYQQYQQNLQESLQKQQKQQQEQQQ

SEQ ID NO: 11264 - protein, 85 aa, Homo sapiens
KPVQAKTSKVESDQPQNSNDASETKEDKSTATESTKEEPQLESKSADFSDTYVVPFVKYEFICRKCQMMFTDEDAAVNHQKSFCY

SEQ ID NO: 11265 - protein, 85 aa, Homo sapiens
FGQPLIDPQETVLRVPVSKYQCLACDVAISGNEALSQHLQSSLHKEKTIKQAMRNAKEHVRLLPHSVCSPNPNTTSTSQSAASSN

SEQ ID NO: 11266 - protein, 85 aa, Homo sapiens
NTYPHLSCFSMKSWPNILFQASARRAASPPSSPPSLSLPSTVTSSLCSTSGVQTSLPTESCSDESDSELSQKLEDLDNSLEVKAK

SEQ ID NO: 11267 - protein, 84 aa, Homo sapiens
ASARRAASPPSSPPSLSLPSTVTSSLCSTSGVQTSLPTESCSDESDSELSQKLEDLDNSLEVKAKPASGLDGNFNSIRMDMFSV

SEQ ID NO: 11268 - protein, 85 aa, Homo sapiens
GEIVYQPDGSAYIIEDSKESGQNAQTGANSKLFSTAMFLDSLASAGEKSDQSASAPMSFYPQIINTFHIASSLGKPFTADQAFPN

SEQ ID NO: 11269 - protein, 85 aa, Homo sapiens
TSALAGVGPVLHSFRVYDLRHKREKDYLTSDGSAKNSCVSKDVPNNVDLSKFDGCVSDGKRKPVLMCFLCKLSFGYIRSFVTHAV

SEQ ID NO: 11270 - protein, 85 aa, Homo sapiens
HDHRMTLNDEEQKLLSNKCVSAIIQGIGKDKEPLISFLEPKKSTSVYPHFSTTNLIGPDPTFRGLWSAFHVENGDSLPAGFAFLK

SEQ ID NO: 11271 - protein, 85 aa, Homo sapiens
GSASTSSSAEQPLGITQMPKAEVNLGGLSSLVVNTPITSVSLSHSSSESSKMSESKDQENNCERPKESNVLHPNGECPVKSEPTE

SEQ ID NO: 11272 - protein, 85 aa, Homo sapiens
PGDEDEEDAYSNELDDEEVLGELTDSIGNKDFPLLNQSISPLSSSVLKFIEKGTSSSSATVSDDTEKKKQTAAVRASGSVASNYG

SEQ ID NO: 11273 - protein, 85 aa, Homo sapiens
ISGKDFADASASKDSATAAHPSEIARGDEDSSATPHQHGFTPSTPGTPGPGGDGSPGSGIECPKCDTVLGSSRSLGGHMTMMHSR

SEQ ID NO: 11274 - protein, 85 aa, Homo sapiens
NSCKTLKCPKCNWHYKYQQTLEAHMKEKHPEPGGSCVYCKTGQPHPRLARGESYTCGYKPFRCEVCNYSTTTKGNLSIHMQSDKH

SEQ ID NO: 11275 - protein, 85 aa, Homo sapiens
MNNVQNLQNGNGEQVFGHSAPAPNTSLSGCGTPSPSKPKQKPTWRCEVCDYETNVARNLRIHMTSEKHMHNMMLLQQNMKQIQHN

SEQ ID NO: 11276 - protein, 85 aa, Homo sapiens
MHLGLAPAEAELYQYYLAQNIGLTGMKLENPADPQLMINPFQLDPATAAALAPGLGELSPYISDPALKLFQCAVCNKFTSDSLEA

SEQ ID NO: 11277 - protein, 85 aa, Homo sapiens
LSVHVSSERSLPEEEWRAVIGDIYQCKLCNYNTQLKANFQLHCKTDKHMQKYQLVAHIKEGGKSNEWRLKCIAIGNPVHLKCNAC

SEQ ID NO: 11278 - protein, 85 aa, Homo sapiens
DYYTNSVDKLRLHTTNHRHEAALKLYKHLQKQEGAVNPESCYYYCAVCDYTTKVKLNLVQHVRSVKHQQTEGLRKLQLHQQGLAP

SEQ ID NO: 11279 - protein, 85 aa, Homo sapiens
EEDNLSEIFFVKDCPPNELETASLGARTCDDDLTEQQLRSTSEEQSEEAEGAIKPTAVAEDDEKDTSERDNSEGKNSNKDSGIIT

SEQ ID NO: 11280 - protein, 85 aa, Homo sapiens
PEKELKVSVAGGTQPLLLAKEEDVATKRSKPTEDNKFCHEQFYQCPYCNYNSRDQSRIQMHVLSQHSVQPVICCPLCQDVLSNKM

SEQ ID NO: 11281 - protein, 85 aa, Homo sapiens
HLQLHLTHLHSVSPDCVEKLLMTVPVPDVMMPNSMLLPAAASEKSERDTPAAVTAEGSGKYSGESPMDDKSMAGLEDSKANVEVK

SEQ ID NO: 11282 - protein, 85 aa, Homo sapiens
NEEQKPTKEPLEVSEWNKNSSKDVKIPDTLQDQLNEQQKRQPLSVSDRHVYKYRCNHCSLAFKTMQKLQIHSQYHAIRAATMCNL

SEQ ID NO: 11283 - protein, 85 aa, Homo sapiens
CQRSFRTFQALKKHLEAGHPELSEAELQQLYASLPVNGELWAESETMSQDDHGLEQEMEREYEVDHEGKASPVGSDSSSIPDDMG

SEQ ID NO: 11284 - protein, 85 aa, Homo sapiens
SEPKRTLPFRKGPNFTMEKFLDPSRPYKCTVCKESFTQKNILLVHYNSVSHLHKLKKVLQEASSPVPQETNSNTDNKPYKCSICN

SEQ ID NO: 11285 - protein, 85 aa, Homo sapiens
VAYSQSSTLEIHMRSVLHQTKARAAKLEPSGHVAGGHSIAANVNSPGQGMLDSMSLAAVNSKDTHLDAKELNKKQTPDLISAQPA

SEQ ID NO: 11286 - protein, 85 aa, Homo sapiens
HHPPQSPAQIQMQLQHELQQQAAFFQPQFLNPAFLPHFPMTPEALLQFQQPQFLFPFYIPGTEFSLGPDLGLPGSATFGMPGMTG

SEQ ID NO: 11287 - protein, 85 aa, Homo sapiens
MAGSLLEDLKQQIQTQHHVGQTQLQILQQQAQQYQATQPQLQPQKQQQQPPPPQQQQQQQASKLLKQEQSNIVSADCQIMKDVPS

SEQ ID NO: 11288 - protein, 85 aa, Homo sapiens
YKEAEDISEKPEKPKQEFISEGEGLKEGKDTKKQKSLEPSIPPPRIASGARGNAAKALLENFGFELVIQYNENRQKVQKKGKSGE

SEQ ID NO: 11289 - protein, 85 aa, Homo sapiens
GENTDKLECGTCGKLFSNVLILKSHQEHVHGQFFPYAALEKFARQYREAYDKLYPISPSSPETPPPPPPPPPLPPAPPQPSSMGP

SEQ ID NO: 11290 - protein, 85 aa, Homo sapiens
VKIPNTVSTPLQAPPPTPPPPPPPPPPPPPPPPPPPPSAPPQVQLPVSLDLPLFPSIMMQPVQHPALPPQLALQLPQMDALSADL

SEQ ID NO: 11291 - protein, 85 aa, Homo sapiens
TQLCQQQLGLDPNFLRHSQFKRPRTRITDDQLKILRAYFDINNSPSEEQIQEMAEKSGLSQKVIKHWFRNTLFKERQRNKDSPYN

SEQ ID NO: 11292 - protein, 85 aa, Homo sapiens
FSNPPITVLEDIRIDPQPTSLEHYKSDASFSKRSSRTRFTDYQLRVLQDFFDTNAYPKDDEIEQLSTVLNLPTRVIVVWFQNARQ

SEQ ID NO: 11293 - protein, 85 aa, Homo sapiens
KARKSYENQAETKDNEKRELTNERYIRTSNMQYQCKKCNVVFPRIFDLITHQKKQCYKDEDDDAQDESQTEDSMDATDQVVYKHC

SEQ ID NO: 11294 - protein, 85 aa, Homo sapiens
TVSGQTDAAKNAAAPAASSGSGTSTPLIPSPKPEPEKTSPKPEYPAEKPKQSDPSPPSQGTKPALPLASTSSDPPQASTAQPQPQ

SEQ ID NO: 11295 - protein, 85 aa, Homo sapiens
PQPPKQPQLIGRPPSASQTPVPSSPLQISMTSLQNSLPPQLLQYQCDQCTVAFPTLELWQEHQHMHFLAAQNQFLHSPFLERPMD

SEQ ID NO: 11296 - protein, 85 aa, Homo sapiens
MPYMIFDPNNPLMTGQLLGSSLTQMPPQASSSHTTAPTTVAASLKRKLDDKEDNNCSEKEGGNSGEDQHRDKRLRTTITPEQLEI

SEQ ID NO: 11297 - protein, 85 aa, Homo sapiens
LYEKYLLDSNPTRKMLDHIAREVGLKKRVVQVWFQNTRARERKGQFRAVGPAQSHKRCPFCRALFKAKSALESHIRSRHWNEGKQ

SEQ ID NO: 11298 - protein, 85 aa, Homo sapiens
AGYSLPPSPLISTEDGGESPQKYIYFDYPSLPLTKIDLSSENELASTVSTPVSKTAELSPKNLLSPSSFKAECSEDVENLNAPPA

SEQ ID NO: 11299 - protein, 85 aa, Homo sapiens
EAGYDQNKTDFDETSSINTAISDATTGDEGNTEMESTTGSSGDVKPALSPKEPKTLDTLPKPATTPTTEVCDDKFLFSLTSPSIH

SEQ ID NO: 11300 - protein, 85 aa, Homo sapiens
FNDKDGDHDQSFYITDDPDDNADRSETSSIADPSSPNPFGSSNPFKSKSNDRPGHKRFRTQMSNLQLKVLKACFSDYRTPTMQEC

SEQ ID NO: 11301 - protein, 85 aa, Homo sapiens
EMLGNEIGLPKRVVQVWFQNARAKEKKFKINIGKPFMINQGGTEGTKPECTLCGVKYSARLSIRDHIFSKQHISKVRETVGSQLD

SEQ ID NO: 11302 - protein, 85 aa, Homo sapiens
REKDYLAPTTVRQLMAQQELDRIKKASDVLGLTVQQPGMMDSSSLHGISLPTAYPGLPGLPPVLLPGMNGPSSLPGFPQNSNTLT

SEQ ID NO: 11303 - protein, 85 aa, Homo sapiens
PPGAGMLGFPTSATSSPALSLSSAPTKPLLQTPPPPPPPPPPPPSSSLSGQQTEQQNKESEKKQTKPNKVKKIKEEELEATKPEK

SEQ ID NO: 11304 - protein, 85 aa, Homo sapiens
HPKKEEKISSALSVLGKVVGETHVDPIQLQALQNAIAGDPASFIGGQFLPYFIPGFASYFTPQLPGTVQGGYFPPVCGMESLFPY

SEQ ID NO: 11305 - protein, 85 aa, Homo sapiens
GPTMPQTLAGLSPGALLQQYQQYQQNLQESLQKQQKQQQEQQQKPVQAKTSKVESDQPQNSNDASETKEDKSTATESTKEEPQLE

SEQ ID NO: 11306 - protein, 85 aa, Homo sapiens
SKSADFSDTYVVPFVKYEFICRKCQMMFTDEDAAVNHQKSFCYFGQPLIDPQETVLRVPVSKYQCLACDVAISGNEALSQHLQSS

SEQ ID NO: 11307 - protein, 85 aa, Homo sapiens
MHKEKTIKQAMRNAKEHVRLLPHSVCSPNPNTTSTSQSAASSNNTYPHLSCFSMKSWPNILFQASARRAASPPSSPPSLSLPSTV

SEQ ID NO: 11308 - protein, 4 aa, Homo sapiens
VGME

SEQ ID NO: 11309 - protein, 14 aa, Homo sapiens
IVRASLSTSSTPIC

SEQ ID NO: 11310 - protein, 22 aa, Homo sapiens
TEILGTEASTQASPIKGTDTSY

SEQ ID NO: 11311 - protein, 8 aa, Homo sapiens
PGRIPGII

SEQ ID NO: 11312 - protein, 6 aa, Homo sapiens
GWKPKI

SEQ ID NO: 11313 - protein, 30 aa, Homo sapiens
ECSGMLKAQVPLFKYKEICTAIYSTSSQSI

SEQ ID NO: 11314 - protein, 84 aa, Homo sapiens
GIKAEPDESNARYFHVVIAGPQDSPFEGGTFKLELFLPEEYPMAAPKVRFMTKIYHPNVDKLGRICLDILKARAWTRLYAMNNI

SEQ ID NO: 11315 - protein, 85 aa, Homo sapiens
LQDKPLRTSWQRKMKERQERKLAKDFARHLEEEKERRRQEKKQRRAENLKRRLENERKAEVVQVIRNPAKLKRAKKKQLRSIEKR

SEQ ID NO: 11316 - protein, 85 aa, Homo sapiens
AGARRLELGEALALGSGWRHACHALLYAPDPGMLFGRIPLRYAILMQMRFDGRLGFPGGFVDTQDRSLEDGLNRELREELGEAAA

SEQ ID NO: 11317 - protein, 85 aa, Homo sapiens
AFRVERTDYRSSHVGSGPRVVAHFYAKRLTLEELLAVEAGATRAKDHGLEVGPAWDSVPFPISSSPKAFSPPRKHPWRKVFAPLT

SEQ ID NO: 11318 - protein, 84 aa, Homo sapiens
VPFPISSSPKAFSPPRKHPWRKVFAPLTLPSPQLSWWSWDRDHLYSELVLPTWAFCKGLSHPLPGEILSRTHSSMSLCCSLLTV

SEQ ID NO: 11319 - protein, 85 aa, Homo sapiens
AILMQMRFDGRLGFPGGFVDTQDRSLEDGLNRELREELGEAAAAFRVERTDYRSSHVGSGPRVVAHFYAKRLTLEELLAVEAGAT

SEQ ID NO: 11320 - protein, 85 aa, Homo sapiens
RAKDHGLEVGPAWDSVPFPISSSPKAFSPPRKHPWRKVFAPLTLPSPQLSWWSWDRDHLYSELVLPTWAFCKGLSHPLPGEILSR

SEQ ID NO: 11321 - protein, 85 aa, Homo sapiens
PTCPPLQPHPGLHHQSSPPHPHHQPWAQLHPSPQNTPQKVPVHQHSPSEPFLEKPVPDMTQKPKQKRHRCRNPNKLDINTLTGEE

SEQ ID NO: 11322 - protein, 85 aa, Homo sapiens
RVPVVNKRNGKKMGGAMAPPMKDLPRWLEENPEFAVAPDWTDIVKQSGFVPESMFDRLLTGPVVRGEGASRRGRRPKSEIARAAA

SEQ ID NO: 11323 - protein, 85 aa, Homo sapiens
AAAAVASTSGINPLLVNSLFAGMDLTSLQNLQNLQSLQLAGLMGFPPGLATAATAGGDAKNPAAVLPLMLPGMAGLPNVFGLGGL

SEQ ID NO: 11324 - protein, 85 aa, Homo sapiens
MNNPLSAATGNTTTASSQGEPEDSTSKGEEKGNENEDENKDSEKSTDAVSAADSANGSVGAATAPAGLPSNPLAFNPFLLSTMAP

SEQ ID NO: 11325 - protein, 85 aa, Homo sapiens
GLFYPSMFLPPGLGGLTLPGFPALAGLQNAVGSSEEKAADKAEGGPFKDGETLEGSDAEESLDKTAESSLLEDEIAQGEELDSLD

SEQ ID NO: 11326 - protein, 85 aa, Homo sapiens
HQHSPSEPFLEKPVPDMTQKPKQKRHRCRNPNKLDINTLTGEERVPVVNKRNGKKMGGAMAPPMKDLPRWLEENPEFAVAPDWTD

SEQ ID NO: 11327 - protein, 85 aa, Homo sapiens
IVKQSGFVPESMFDRLLTGPVVRGEGASRRGRRPKSEIARAAAAAAAVASTSGINPLLVNSLFAGMDLTSLQNLQNLQSLQLAGL

SEQ ID NO: 11328 - protein, 85 aa, Homo sapiens
MGFPPGLATAATAGGDAKNPAAVLPLMLPGMAGLPNVFGLGGLLNNPLSAATGNTTTASSQGEPEDSTSKGEEKGNENEDENKDS

SEQ ID NO: 11329 - protein, 85 aa, Homo sapiens
EKSTDAVSAADSANGSVGAATAPAGLPSNPLAFNPFLLSTMAPGLFYPSMFLPPGLGGLTLPGFPALAGLQNAVGSSEEKAADKA

SEQ ID NO: 11330 - protein, 84 aa, Homo sapiens
KSFECLLGLNSNIGIRDLAVQFSCIEAVNMASKILKSYESSLPQTQQVDLDLSRPLFTSAALLSACKRTWRCSYSTTEEKEDSG

SEQ ID NO: 11331 - protein, 84 aa, Homo sapiens
ASLVPDYWIDGSNRDALSDFFEVESELGRGATSIVYRCKQKGTQKPYALKVLKKTVDKKIVRTEIGVLLRLSHPNIDCGKGILQ

SEQ ID NO: 11332 - protein, 85 aa, Homo sapiens
ELGEEEVEEESRSGGSGAEETSTMEEDRCVMGAMTRVLEAWSGYNRVGASSTWSKWWLLKAHCVPTSAQGPSDLYLMRRSRGPSF

SEQ ID NO: 11333 - protein, 84 aa, Homo sapiens
WSGYNRVGASSTWSKWWLLKAHCVPTSAQGPSDLYLMRRSRGPSFIQLQPMPGPVHLRGPWGLPSCWPDPGAATVLALPKAIPA

SEQ ID NO: 11334 - protein, 85 aa, Homo sapiens
GAGIAVLFKKKFGGVQELLNQQKKSGEVAVLKRDGRYIYYLITKKRASHKPTYENLQKSLEAMKSHCLKNGVTDLSMPRIGCGLD

SEQ ID NO: 11335 - protein, 85 aa, Homo sapiens
QKLQHLEQLRANRNNLNPAQKLMLEQLESQFVLMQQHQMRPTGVAQVRSTGIPNGPTADSSLPTNSVSGQQPQLALTRVPSVSQP

SEQ ID NO: 11336 - protein, 85 aa, Homo sapiens
GVRPACPGQPLANGPFSAGHVPCSTSRTLGSTDTILIGNNHITGSGSNGNVPYLQRNALTLPHNRTNLTSSAEEPWKNQLSNSTQ

SEQ ID NO: 11337 - protein, 85 aa, Homo sapiens
GLHKGQSSHSAGPNGERPLSSTGPSQHLQAAGSGIQNQNGHPTLPSNSVTQGAALNHLSSHTATSGGQQGITLTKESKPSGNILT

SEQ ID NO: 11338 - protein, 85 aa, Homo sapiens
VPETSRHTGETPNSTASVEGLPNHVHQMTADAVCSPSHGDSKSPGLLSSDNPQLSALLMGKANNNVGTGTCDKVNNIHPAVHTKT

SEQ ID NO: 11339 - protein, 85 aa, Homo sapiens
DNSVASSPSSAISTATPSPKSTEQTTTNSVTSLNSPHSGLHTINGEGMEESQSPMKTDLLLVNHKPSPQIIPSMSVSIYPSSAEV

SEQ ID NO: 11340 - protein, 85 aa, Homo sapiens
MKACRNLGKNGLSNSSILLDKCPPPRPPSSPYPPLPKDKLNPPTPSIYLENKRDAFFPPLHQFCTNPNNPVTVIRGLAGALKLDL

SEQ ID NO: 11341 - protein, 85 aa, Homo sapiens
GLFSTKTLVEANNEHMVEVRTQLLQPADENWDPTGTKKIWHCESNRSHTTIAKYAQYQASSFQESLREENEKRSHHKDHSDSEST

SEQ ID NO: 11342 - protein, 85 aa, Homo sapiens
SSDNSGRRRKGPFKTIKFGTNIDLSDDKKWKLQLHELTKLPAFVRVVSAGNLLSHVGHTILGMNTVQLYMKVPGSRTPGHQENNN

SEQ ID NO: 11343 - protein, 85 aa, Homo sapiens
FCSVNINIGPGDCEWFVVPEGYWGVLNDFCEKNNLNFLMGSWWPNLEDLYEANVPVYRFIQRPGDLVWINAGTVHWVQAIGWCNN

SEQ ID NO: 11344 - protein, 85 aa, Homo sapiens
IAWNVGPLTACQYKLAVERYEWNKLQSVKSIVPMVHLSWNMARNIKVSDPKLFEMIKYCLLRTLKQCQTLREALIAAGKEIIWHG

SEQ ID NO: 11345 - protein, 85 aa, Homo sapiens
CSNTSALAARIKYLQNTSDNWSGGHAVSHPPVQQQAHSWCLTPQKLQHLEQLRANRNNLNPAQKLMLEQLESQFVLMQQHQMRPT

SEQ ID NO: 11346 - protein, 85 aa, Homo sapiens
GVAQVRSTGIPNGPTADSSLPTNSVSGQQPQLALTRVPSVSQPGVRPACPGQPLANGPFSAGHVPCSTSRTLGSTDTILIGNNHI

SEQ ID NO: 11347 - protein, 85 aa, Homo sapiens
TGSGSNGNVPYLQRNALTLPHNRTNLTSSAEEPWKNQLSNSTQGLHKGQSSHSAGPNGERPLSSTGPSQHLQAAGSGIQNQNGHP

SEQ ID NO: 11348 - protein, 85 aa, Homo sapiens
TLPSNSVTQGAALNHLSSHTATSGGQQGITLTKESKPSGNILTVPETSRHTGETPNSTASVEGLPNHVHQMTADAVCSPSHGDSK

SEQ ID NO: 11349 - protein, 85 aa, Homo sapiens
SPGLLSSDNPQLSALLMGKANNNVGTGTCDKVNNIHPAVHTKTDNSVASSPSSAISTATPSPKSTEQTTTNSVTSLNSPHSGLHT

SEQ ID NO: 11350 - protein, 85 aa, Homo sapiens
INGEGMEESQSPMKTDLLLVNHKPSPQIIPSMSVSIYPSSAEVLKACRNLGKNGLSNSSILLDKCPPPRPPSSPYPPLPKDKLNP

SEQ ID NO: 11351 - protein, 85 aa, Homo sapiens
PTPSIYLENKRDAFFPPLHQFCTNPNNPVTVIRGLAGALKLDLGLFSTKTLVEANNEHMVEVRTQLLQPADENWDPTGTKKIWHC

SEQ ID NO: 11352 - protein, 85 aa, Homo sapiens
ESNRSHTTIAKYAQYQASSFQESLREENEKRSHHKDHSDSESTSSDNSGRRRKGPFKTIKFGTNIDLSDDKKWKLQLHELTKLPA

SEQ ID NO: 11353 - protein, 85 aa, Homo sapiens
FVRVVSAGNLLSHVGHTILGMNTVQLYMKVPGSRTPGHQENNNFCSVNINIGPGDCEWFVVPEGYWGVLNDFCEKNNLNFLMGSW

SEQ ID NO: 11354 - protein, 85 aa, Homo sapiens
WPNLEDLYEANVPVYRFIQRPGDLVWINAGTVHWVQAIGWCNNIAWNVGPLTACQYKLAVERYEWNKLQSVKSIVPMVHLSWNMA

SEQ ID NO: 11355 - protein, 85 aa, Homo sapiens
RNIKVSDPKLFEMIKYCLLRTLKQCQTLREALIAAGKEIIWHGRTKEEPAHYCSICEVEVFDLLFVTNESNSRKTYIVHCQDCAR

SEQ ID NO: 11356 - protein, 85 aa, Homo sapiens
VEEIWQEFLAPGAPSAINLDSHSYEITSQNVKDGGRYTFEDAQEHIYKLMKSDSYARFLRSNAYQDLLLAKKKGKSLAGKRLTGL

SEQ ID NO: 11357 - protein, 85 aa, Homo sapiens
ALLLLVPAFLLIGWGRSLPVLGLGLLLYSFAAAVVVPCLSSVVAGYGSPGQKGTVMGTLRSLGALARAAGPLVAASGEGAGWCWG

SEQ ID NO: 11358 - protein, 84 aa, Homo sapiens [sequence omitted]

SEQ ID NO: 11359 - protein, 85 aa, Homo sapiens
VAGYGSPGQKGTVMGTLRSLGALARAAGPLVAASGEGAGWCWGRLGAKHLPSPPKCQPPRGLGDATVSPQCTGWPGPRPASPRGP

SEQ ID NO: 11360 - protein, 85 aa, Homo sapiens
QQQGVLQDRDGTIIHLKYPLNCSDPTSERWYHGHMSGGQAETLLQAKGEPWTFLVRESLSQPGDFVLSVLSDQPKAGPGSPLRVT

SEQ ID NO: 11361 - protein, 12 aa, Homo sapiens
MCLKRSPDSPTD

SEQ ID NO: 11362 - protein, 84 aa, Homo sapiens
MKNACTAILSVEKRLNFTLRHLDVTCEAYDHFRSCLHALEQLADGKLRFVVEPVEASFPQLLVYERLQQLVGPGPEAGPLVALL

SEQ ID NO: 11363 - protein, 84 aa, Homo sapiens
IRPPFKKFSKGVAFFPLHIGDHVFIEEDCVVNAAQIGSYVHVGKNCVIGRRCVLKDCCKILDNTVLPPETVVPPFTVFSGCPAP

SEQ ID NO: 11364 - protein, 85 aa, Homo sapiens
IKTIYKTPGMIKDEQEIVQKRTFTKWINSHLAKRKPPMVVDDLFEDMKDGVKLLALLEVLSGQKLPCEQGRRMKRIHAVANIGTA

SEQ ID NO: 11365 - protein, 85 aa, Homo sapiens
LKFLEGRKSMHRGSPIKLVNINSTDIADGRPSIVLGLMWTIILYFQIEELTSNLPQLQSLSSSASSVDSIVSSETPSPPSKRKVT

SEQ ID NO: 11366 - protein, 85 aa, Homo sapiens
TKIQGNAKKALLKWVQYTAGKQTGIEVKDFGKSWRSGVAFHSVIHAIRPELVDLETVKGRSNRENLEDAFTIAETELGIPRLLDP

SEQ ID NO: 11367 - protein, 85 aa, Homo sapiens
EDVDVDKPDEKSIMTYVAQFLKHYPDIHNASTDGQEDDEILPGFPSFANSVQNFKREDRVIFKEMKVWIEQFERDLTRAQMVESN

SEQ ID NO: 11368 - protein, 85 aa, Homo sapiens
LQDKYQSFKHFRVQYEMKRKQIEHLIQPLHRDGKLSLDQALVKQSWDRVTSRLFDWHIQLDKSLPAPLGTIGAWLYRAEVALREE

SEQ ID NO: 11369 - protein, 85 aa, Homo sapiens
ITVQQVHEETANTIQRKLEQHKDLLQNTDAHKRAFHEIYRTRSVNGIPVPPDQLEDMAERFHFVSSTSELHLMKMEFLELKYRLL

SEQ ID NO: 11370 - protein, 85 aa, Homo sapiens
SLLVLAESKLKSWIIKYGRRESVEQLLQNYVSFIENSKFFEQYEVTYQILKQTAEMYVKADGSVEEAENVMKFMNETTAQWRNLS

SEQ ID NO: 11371 - protein, 85 aa, Homo sapiens
VEVRSVRSMLEEVISNWDRYGNTVASLQAWLEDAEKMLNQSENAKKDFFRNLPHWIQQHTAMNDAGNFLIETCDEMVSRDLKQQL

SEQ ID NO: 11372 - protein, 85 aa, Homo sapiens
LFEDMKDGVKLLALLEVLSGQKLPCEQGRRMKRIHAVANIGTALKFLEGRKSMHRGSPIKLVNINSTDIADGRPSIVLGLMWTII

SEQ ID NO: 11373 - protein, 85 aa, Homo sapiens
LYFQIEELTSNLPQLQSLSSSASSVDSIVSSETPSPPSKRKVTTKIQGNAKKALLKWVQYTAGKQTGIEVKDFGKSWRSGVAFHS

SEQ ID NO: 11374 - protein, 85 aa, Homo sapiens
VIHAIRPELVDLETVKGRSNRENLEDAFTIAETELGIPRLLDPEDVDVDKPDEKSIMTYVAQFLKHYPDIHNASTDGQEDDEILP

SEQ ID NO: 11375 - protein, 85 aa, Homo sapiens
GFPSFANSVQNFKREDRVIFKEMKVWIEQFERDLTRAQMVESNLQDKYQSFKHFRVQYEMKRKQIEHLIQPLHRDGKLSLDQALV

SEQ ID NO: 11376 - protein, 85 aa, Homo sapiens
KQSWDRVTSRLFDWHIQLDKSLPAPLGTIGAWLYRAEVALREEITVQQVHEETANTIQRKLEQHKDLLQNTDAHKRAFHEIYRTR

SEQ ID NO: 11377 - protein, 85 aa, Homo sapiens
SVNGIPVPPDQLEDMAERFHFVSSTSELHLMKMEFLELKYRLLSLLVLAESKLKSWIIKYGRRESVEQLLQNYVSFIENSKFFEQ

SEQ ID NO: 11378 - protein, 85 aa, Homo sapiens
YEVTYQILKQTAEMYVKADGSVEEAENVMKFMNETTAQWRNLSVEVRSVRSMLEEVISNWDRYGNTVASLQAWLEDAEKMLNQSE

SEQ ID NO: 11379 - protein, 85 aa, Homo sapiens
NAKKDFFRNLPHWIQQHTAMNDAGNFLIETCDEMVSRDLKQQLLLLNGRWRELFMEVKQYAQADEMDRMKKEYTDCVVTLSAFAT

SEQ ID NO: 11380 - protein, 85 aa, Homo sapiens
ASSPAVDVSCRRREKRRQLDARRSKCRIRLGGHMEQWCLLKERLGFSLHSQLAKFLLDRACPAALFHPQVSHFTRTACVTCGLRG

SEQ ID NO: 11381 - protein, 84 aa, Homo sapiens
RREKRRQLDARRSKCRIRLGGHMEQWCLLKERLGFSLHSQLAKFLLDRACPAALFHPQVSHFTRTACVTCGLRGSCSPPHGLSE

SEQ ID NO: 11382 - protein, 85 aa, Homo sapiens
SARGVVQHALPTPRRGALTMSLNSSLSCRKELSNLTEEEGGEGGVIITQFIAIIVITIFVCLGNLVIVVTLYKKSYLLTLSNKFV

SEQ ID NO: 11383 - protein, 85 aa, Homo sapiens
FSLTLSNFLLSVLVLPFVVTSSIRREWIFGVVWCNFSALLYLLISSASMLTLGVIAIDRYYAVLYPMVYPMKITGNRAVMALVYI

SEQ ID NO: 11384 - protein, 85 aa, Homo sapiens
WLHSLIGCLPPLFGWSSVEFDEFKWMCVAAWHREPGYTAFWQIWCALFPFLVMLVCYGFIFRVARVKARKVHCGTVVIVEEDAQR

SEQ ID NO: 11385 - protein, 85 aa, Homo sapiens
TGRKNSSTSTSSSGSRRNAFQGVVYSANQCKALITILVVLGAFMVTWGPYMVVIASEALWGKSSVSPSLETWATWLSFASAVCHP

SEQ ID NO: 11386 - protein, 85 aa, Homo sapiens
MIYGLWNKTVRKELLGMCFGDRYYREPFVQRQRTSRLFSISNRITDLGLSPHLTALMAGGQPLGHSSSTGDTGFSCSQDSGTDMM

SEQ ID NO: 11387 - protein, 85 aa, Homo sapiens
MLEDYTSDDNPPSHCTCPPKRRSSVTFEDEVEQIKEAAKNSILHVKAEVHKSLDSYAASLAKAIEAEAKINLFGEEALPGVLVTA

SEQ ID NO: 11388 - protein, 85 aa, Homo sapiens
GGVIITQFIAIIVITIFVCLGNLVIVVTLYKKSYLLTLSNKFVFSLTLSNFLLSVLVLPFVVTSSIRREWIFGVVWCNFSALLYL

SEQ ID NO: 11389 - protein, 85 aa, Homo sapiens
MISSASMLTLGVIAIDRYYAVLYPMVYPMKITGNRAVMALVYIWLHSLIGCLPPLFGWSSVEFDEFKWMCVAAWHREPGYTAFWQ

SEQ ID NO: 11390 - protein, 85 aa, Homo sapiens
IWCALFPFLVMLVCYGFIFRVARVKARKVHCGTVVIVEEDAQRTGRKNSSTSTSSSGSRRNAFQGVVYSANQCKALITILVVLGA

SEQ ID NO: 11391 - protein, 85 aa, Homo sapiens
FMVTWGPYMVVIASEALWGKSSVSPSLETWATWLSFASAVCHPLIYGLWNKTVRKELLGMCFGDRYYREPFVQRQRTSRLFSISN

SEQ ID NO: 11392 - protein, 85 aa, Homo sapiens
RITDLGLSPHLTALMAGGQPLGHSSSTGDTGFSCSQDSGTDMMLLEDYTSDDNPPSHCTCPPKRRSSVTFEDEVEQIKEAAKNSI

SEQ ID NO: 11393 - protein, 84 aa, Homo sapiens
GQTIVQLQKETGATIKLSKSKDFYPGTTERVCLIQGTVEALNAVHGFIAEKIREMPQNVAKTEPVSILQPQTTVNPDRIKQVSV

SEQ ID NO: 11394 - protein, 19 aa, Homo sapiens
TSLKLLKIFSPHRFEASLD

SEQ ID NO: 11395 - protein, 7 aa, Homo sapiens
MVLDLRQ

SEQ ID NO: 11396 - protein, 44 aa, Homo sapiens
NRYFDKQEQALQQFCFWMKLIQSWELAQPARQDVMFKNEFFLFS

SEQ ID NO: 11397 - protein, 9 aa, Homo sapiens
ILLCYDLED

SEQ ID NO: 11398 - protein, 85 aa, Homo sapiens
MRVCWLVRQDSRHQRIRLPHLEAVVIGRGPETKITDKKCSRQQVQLKAECNKGYVKVKQFEEEAKNPGLETHRKRKRSGNSDSIE

SEQ ID NO: 11399 - protein, 85 aa, Homo sapiens
RDAAQEAEAGTGLEPGSNSGQCSVPLKKGKDAPIKKESLGHWSQGLKISMQDPKMQVYKDEQVVVIKDKYPKARYHWLVLPWTSI

SEQ ID NO: 11400 - protein, 85 aa, Homo sapiens
SSLKAVAREHLELLKHMHTVGEKVIVDFAGSSKLRFRLGYHAIPSMSHVHLHVISQDFDSPCLKNKKHWNSFNTEYFLESQAVIE

SEQ ID NO: 11401 - protein, 85 aa, Homo sapiens
QVQLKAECNKGYVKVKQFEEEAKNPGLETHRKRKRSGNSDSIERDAAQEAEAGTGLEPGSNSGQCSVPLKKGKDAPIKKESLGHW

SEQ ID NO: 11402 - protein, 85 aa, Homo sapiens
SQGLKISMQDPKMQVYKDEQVVVIKDKYPKARYHWLVLPWTSISSLKAVAREHLELLKHMHTVGEKVIVDFAGSSKLRFRLGYHA

SEQ ID NO: 11403 - protein, 85 aa, Homo sapiens
IPSMSHVHLHVISQDFDSPCLKNKKHWNSFNTEYFLESQAVIEMVQEAGRVTVRDGMPELLKLPLRCHECQQLLPSIPQLKEHLR

SEQ ID NO: 11404 - protein, 85 aa, Homo sapiens
GITNFEDMKAISRHTQELLEIEEPLFKRSISLPYRDIIGLYLEQKGHTGIKSDSLTLSEFVKAAGLQDYAPEITAPEENEELPCT

SEQ ID NO: 11405 - protein, 84 aa, Homo sapiens
GATDHIKVQVKNNHLGLGATINNEDNWIAHQDDFNQLLAELNTCHGQETTDSSDKKEKKSFSLEEKSKISKNRVHYMKFTKVYC

SEQ ID NO: 11406 - protein, 84 aa, Homo sapiens
YFAAKFNLSVTDASRRLCGFLKSLGVHYVFDTTIAADFSILESQKEFVRRYRQHSEEERTLPMLTSACPGMLPFPSSLQACRFP

SEQ ID NO: 11407 - protein, 84 aa, Homo sapiens
EAFRQRCLERMRNSRDRLLNRYRQAGSSGPGNSQNSFLVQEVMEEEWNALQSVENCPEDLAQLEELIDMAVLEEIQQELINQVF

SEQ ID NO: 11408 - protein, 85 aa, Homo sapiens
EDNVPDPKDVKERFSGSLVAALSATGPRFLAYFGSFATVGLLWFAHHSLFLHVRKATRAMGLLNTLSLAFVGGLPLAYQQTSAFA

SEQ ID NO: 11409 - protein, 18 aa, Homo sapiens
WSRNCSNTHLIKLTGEKF

SEQ ID NO: 11410 - protein, 85 aa, Homo sapiens
TRRRSRPSGGAGRRERARAAGPQKPQAPEPPPPPSLEAGAGAGPPEAPAEPDHDGPREDDEPNLVPGPQVGASGETSAARALSPS

SEQ ID NO: 11411 - protein, 84 aa, Homo sapiens
EDDEPNLVPGPQVGASGETSAARALSPSPSGSGSGAGLGMGHPAAAGVAAFPRVRRRSFLPRGGNGGWTPLPKAEARSALLRLG

SEQ ID NO: 11412 - protein, 85 aa, Homo sapiens
GPPEAPAEPDHDGPREDDEPNLVPGPQVGASGETSAARALSPSPSGSGSGAGLGMGHPAAAGVAAFPRVRRRSFLPRGGNGGWTP

SEQ ID NO: 11413 - protein, 85 aa, Homo sapiens
RWFPAVCAHSKKQGKQEAADAALRVLIGENEKAERMGFTELPLTGSTFHDQIAMLSHRCFNTLTNSFQPSLLGRKILAAIIMKKD

SEQ ID NO: 11414 - protein, 85 aa, Homo sapiens
SEDMGVVVSLGTGNRCVKGDSLSLKGETVNDCHAEIISRRGFIRFLYSELMKYNSQTAKDSIFEPAKGGEKLQIKKTVSFHLYIS

SEQ ID NO: 11415 - protein, 85 aa, Homo sapiens
TAPCGDGALFDKSCSDRAMESTESRHYPVFENPKQGKLRTKVENGEGTIPVESSDIVPTWDGIRLGERLRTMSCSDKILRWNVLG

SEQ ID NO: 11416 - protein, 85 aa, Homo sapiens
MQGALLTHFLQPIYLKSVTLGYLFSQGHLTRAICCRVTRDGSAFEDGLRHPFIVNHPKVGRVSIYDSKRQSGKTKETSVNWCLAD

SEQ ID NO: 11417 - protein, 85 aa, Homo sapiens
GYDLEILDGTRGTVDGPRNELSRVSKKNIFLLFKKLCSFRYRRDLLRLSYGEAKKAARDYETAKNYFKKGLKDMGYGNWISKPQE

SEQ ID NO: 11418 - protein, 85 aa, Homo sapiens
NTNPVGGLLEYARSHGFAAEFKLVDQSGPPHEPKFVYQAKVGGRWFPAVCAHSKKQGKQEAADAALRVLIGENEKAERMGFTELP

SEQ ID NO: 11419 - protein, 85 aa, Homo sapiens
LTGSTFHDQIAMLSHRCFNTLTNSFQPSLLGRKILAAIIMKKDSEDMGVVVSLGTGNRCVKGDSLSLKGETVNDCHAEIISRRGF

SEQ ID NO: 11420 - protein, 85 aa, Homo sapiens
IRFLYSELMKYNSQTAKDSIFEPAKGGEKLQIKKTVSFHLYISTAPCGDGALFDKSCSDRAMESTESRHYPVFENPKQGKLRTKV

SEQ ID NO: 11421 - protein, 85 aa, Homo sapiens
ENGEGTIPVESSDIVPTWDGIRLGERLRTMSCSDKILRWNVLGLQGALLTHFLQPIYLKSVTLGYLFSQGHLTRAICCRVTRDGS

SEQ ID NO: 11422 - protein, 85 aa, Homo sapiens
AFEDGLRHPFIVNHPKVGRVSIYDSKRQSGKTKETSVNWCLADGYDLEILDGTRGTVDGPRNELSRVSKKNIFLLFKKLCSFRYR

SEQ ID NO: 11423 - protein, 5 aa, Homo sapiens
GPSCS

SEQ ID NO: 11424 - protein, 84 aa, Homo sapiens
SGDGEVYVWDVNSRKCLNRFVDEGSLYGLSIATSRNGQYVACGCYFSDLQSYYRNLGNCFRKNERSSQIGSSSFLYSIFKLPSH

SEQ ID NO: 11425 - protein, 16 aa, Homo sapiens
RKYTPLRGMEKFMFGM

SEQ ID NO: 11426 - protein, 84 aa, Homo sapiens
VGVEKNWGAVVRSPEGTPQKIRQLIDEGIAPEEGGVDAKDTSATSQSVNGSPQAEQPSLESTSKEAFFSRVETFSYFDQSPICA

SEQ ID NO: 11427 - protein, 85 aa, Homo sapiens
EAPLGSILSPCPGRAATGRAGTGRVGTGLRPPAVLQLCPLLAFYRCVRKMRSGKASCTLETVWEDKHKYEEAERRFYEHEATQAA

SEQ ID NO: 11428 - protein, 85 aa, Homo sapiens
ASAQQLPAEGPAMNGPGQDDPEDADEAEAPDGGSRRDPRKSQDSRKPLQKKRKRSPKSGLGPADLALLGLSAERVWLDKSLFDQA

SEQ ID NO: 11429 - protein, 85 aa, Homo sapiens
ESSYRQKLADVAAQAAWPPALAPWGLCTHGNQVACHHVTWGIWVNKSSFDQAERAFVEWSQALLLAPDGSRRQGTPNTGQQVAVP

SEQ ID NO: 11430 - protein, 85 aa, Homo sapiens
DLAHQPSPPVNGQPPLGSLQALVREVWLEKPRYDAAERGFYEALFDGHPPGKVRLQERAGLAEGARRGRRDRRGRNILGNKRAGL

SEQ ID NO: 11431 - protein, 85 aa, Homo sapiens
RRADGEAPSALPYCYFLQKDAEAPWLSKPAYDSAECRHHAAEALRVAWCLEAASLSHRPGPRSGLSVSSLRPNRKMATNFLAHEK

SEQ ID NO: 11432 - protein, 85 aa, Homo sapiens
IWFDKFKYDDAERRFYEQMNGPVAGASRQENGASVILRDIARARENIQKSLAGSSGPGASSGTSGDHGELVVRIASLEVENQSLR

SEQ ID NO: 11433 - protein, 85 aa, Homo sapiens
GVVQELQQAISKLEARLNVLEKSSPGHRATAPQTQHVSPMRQVEPPAKKPATPAEDDEDDDIDLFGSDNEEEDKEAAQLREERLR

SEQ ID NO: 11434 - protein, 85 aa, Homo sapiens
QYAEKKAKKPALVAKSSILLDVKPWDDETDMAQLEACVRSIQLDGLVWGASKLVPVGYGIRKLQIQCVVEDDKVGTDLLEEEITK

SEQ ID NO: 11435 - protein, 85 aa, Homo sapiens
FYRCVRKMRSGKASCTLETVWEDKHKYEEAERRFYEHEATQAAASAQQLPAEGPAMNGPGQDDPEDADEAEAPDGGSRRDPRKSQ

SEQ ID NO: 11436 - protein, 85 aa, Homo sapiens
DSRKPLQKKRKRSPKSGLGPADLALLGLSAERVWLDKSLFDQAESSYRQKLADVAAQAAWPPALAPWGLCTHGNQVACHHVTWGI

SEQ ID NO: 11437 - protein, 85 aa, Homo sapiens
WVNKSSFDQAERAFVEWSQALLLAPDGSRRQGTPNTGQQVAVPDLAHQPSPPVNGQPPLGSLQALVREVWLEKPRYDAAERGFYE

SEQ ID NO: 11438 - protein, 85 aa, Homo sapiens
ALFDGHPPGKVRLQERAGLAEGARRGRRDRRGRNILGNKRAGLRRADGEAPSALPYCYFLQKDAEAPWLSKPAYDSAECRHHAAE

SEQ ID NO: 11439 - protein, 85 aa, Homo sapiens
ALRVAWCLEAASLSHRPGPRSGLSVSSLRPNRKMATNFLAHEKIWFDKFKYDDAERRFYEQMNGPVAGASRQENGASVILRDIAR

SEQ ID NO: 11440 - protein, 85 aa, Homo sapiens
ARENIQKSLAGSSGPGASSGTSGDHGELVVRIASLEVENQSLRGVVQELQQAISKLEARLNVLEKSSPGHRATAPQTQHVSPMRQ

SEQ ID NO: 11441 - protein, 85 aa, Homo sapiens
VEPPAKKPATPAEDDEDDDIDLFGSDNEEEDKEAAQLREERLRQYAEKKAKKPALVAKSSILLDVKPWDDETDMAQLEACVRSIQ

SEQ ID NO: 11442 - protein, 85 aa, Homo sapiens
SYLLMVTVILLPYVSKVTGWCRDRLLGHREPSAHPVEVFSFDLHEPLSKERVEAFSDGVYAIVATLLILDICEDNVPDPKDVKER

SEQ ID NO: 11443 - protein, 85 aa, Homo sapiens
LQAFEKPTQIYRFLRTRNLIAPIFLHRTLTYMSHRNSRTNIKSLSAHLQLTFTGFFHKNDKPSPNSENEQNSVTLEVLLVKVCHK

SEQ ID NO: 11444 - protein, 85 aa, Homo sapiens
KRKDVSCPIRQVPTGKKQVPLNPDLNQTKPGNFPSLAVSSNEFEPSNSHMVKSYSLLFRVTRPGRREFNGMINGETNENIDVNEE

SEQ ID NO: 11445 - protein, 85 aa, Homo sapiens
LPARRKRNREDGEKTFVAQMTVFDKNRRLQLLDGEYEVAMQEMEECPISKKRATWETILDGKRLPPFETFSQGPTLQFTLRWTGE

SEQ ID NO: 11446 - protein, 85 aa, Homo sapiens
TNDKSTAPIAKPLATRNSESLHQENKPGSVKPTQTIAVKESLTTDLQTRKEKDTPNENRQKLRIFYQFLYNNNTRQQTEARDDLH

SEQ ID NO: 11447 - protein, 85 aa, Homo sapiens
CPWCTLNCRKLYSLLKHLKLCHSRFIFNYVYHPKGARIDVSINECYDGSYAGNPQDIHRQPGFAFSRNGPVKRTPITHILVCRPK

SEQ ID NO: 11448 - protein, 85 aa, Homo sapiens
RTKASMSEFLESEDGEVEQQRTYSSGHNRLYFHSDTCLPLRPQEMEVDSEDEKDPEWLREKTITQIEEFSDVNEGEKEVMKLWNL

SEQ ID NO: 11449 - protein, 85 aa, Homo sapiens
HVMKHGFIADNQMNHACMLFVENYGQKIIKKNLCRNFMLHLVSMHDFNLISIMSIDKAVTKLREMQQKLEKGESASPANEEITEE

SEQ ID NO: 11450 - protein, 85 aa, Homo sapiens
SLSAHLQLTFTGFFHKNDKPSPNSENEQNSVTLEVLLVKVCHKKRKDVSCPIRQVPTGKKQVPLNPDLNQTKPGNFPSLAVSSNE

SEQ ID NO: 11451 - protein, 85 aa, Homo sapiens
FEPSNSHMVKSYSLLFRVTRPGRREFNGMINGETNENIDVNEELPARRKRNREDGEKTFVAQMTVFDKNRRLQLLDGEYEVAMQE

SEQ ID NO: 11452 - protein, 85 aa, Homo sapiens
MEECPISKKRATWETILDGKRLPPFETFSQGPTLQFTLRWTGETNDKSTAPIAKPLATRNSESLHQENKPGSVKPTQTIAVKESL

SEQ ID NO: 11453 - protein, 85 aa, Homo sapiens
TTDLQTRKEKDTPNENRQKLRIFYQFLYNNNTRQQTEARDDLHCPWCTLNCRKLYSLLKHLKLCHSRFIFNYVYHPKGARIDVSI

SEQ ID NO: 11454 - protein, 85 aa, Homo sapiens
NECYDGSYAGNPQDIHRQPGFAFSRNGPVKRTPITHILVCRPKRTKASMSEFLESEDGEVEQQRTYSSGHNRLYFHSDTCLPLRP

SEQ ID NO: 11455 - protein, 85 aa, Homo sapiens
QEMEVDSEDEKDPEWLREKTITQIEEFSDVNEGEKEVMKLWNLHVMKHGFIADNQMNHACMLFVENYGQKIIKKNLCRNFMLHLV

SEQ ID NO: 11456 - protein, 85 aa, Homo sapiens
IMDQEKQEDQEGVGEFSSPGQEQLSGQAQPPEGSEDPRGFTESFGAANISQAARERDCESVCFIGRPWRVVDGHLNLPVCKGMME

SEQ ID NO: 11457 - protein, 85 aa, Homo sapiens
AMLYHIMTRPGIPESSLLRHYQGVLQPVAVLELLQGLESLGCIRKRWLRKPRPVSLFSTPVVEEVEVPSSLDESPMAFYEPTLDC

SEQ ID NO: 11458 - protein, 85 aa, Homo sapiens
SFGAANISQAARERDCESVCFIGRPWRVVDGHLNLPVCKGMMEAMLYHIMTRPGIPESSLLRHYQGVLQPVAVLELLQGLESLGC

SEQ ID NO: 11459 - protein, 84 aa, Homo sapiens
PEAPITGYMFGKGIYFADMSSKSANYCFASRLKNTGLLLLSEVALGQCNELLEANPKAEGLLQGKHSTKGLGKMAPSSAHFVTL

SEQ ID NO: 11460 - protein, 84 aa, Homo sapiens
TPDRERDRDRDRKSSPSKDRKRHRSRDRRRGGSRSRSRSRSKSAERERRHKERERDKERDRNKKDRDRDKDGHRRDKDRKRSRH

SEQ ID NO: 11461 - protein, 85 aa, Homo sapiens
WSSDEKKDIDHETVVEEQIIGENSPPDYSEYMTGKKLPPGGIPGIDLSDPKQLAEFARMKPRKIKEDDAPRTIACPHKCTFEGCG

SEQ ID NO: 11462 - protein, 84 aa, Homo sapiens
EFARMKPRKIKEDDAPRTIACPHKCTFEGCGKRFSLDFNLRTHVRIHTGDRPYVCPFDGCNKKFAQSTNLKSHILTHAKAKNNQ

SEQ ID NO: 11463 - protein, 85 aa, Homo sapiens
PGIDLSDPKQLAEFARMKPRKIKEDDAPRTIACPHKCTFEGCGKRFSLDFNLRTHVRIHTGDRPYVCPFDGCNKKFAQSTNLKSH

SEQ ID NO: 11464 - protein, 84 aa, Homo sapiens
KQIQRTKRGLEILAKRAAETVVDPEMTPYLDIANQTGRSIRIPPSERKALMLAMGYHEKGRAFLKRKEYGIALPCLLDADKYFW

SEQ ID NO: 11465 - protein, 85 aa, Homo sapiens
MLVTPRPERGGRGTELGEFCGTPLLFSKSQGLATRPRGDRYEGSYFCYDNPAALQTQVKRDMQVNTTKFMLLYAWYSWPNVVLCF

SEQ ID NO: 11466 - protein, 85 aa, Homo sapiens
GSYFCYDNPAALQTQVKRDMQVNTTKFMLLYAWYSWPNVVLCFFGGFLIDRVFGIRWGTIIFSCFVCIGQVVFALGGIFNAFWLM

SEQ ID NO: 11467 - protein, 85 aa, Homo sapiens
ETDAEGTQMTPAKRPALQDSNLAPSLGPGAEDGAEAQAPSPPPALEDTAAAGAAQEDQEGVGFTESFGAANISQAARERDCESVC

SEQ ID NO: 11468 - protein, 85 aa, Homo sapiens
FIGRPWRVVDGHLNLPVCKGMMEAMLYHIMTRPGIPESSLLRHYQGVLQPVAVLELLQGLESLGCIRKRWLRKPRPVSLFSTPVV

SEQ ID NO: 11469 - protein, 85 aa, Homo sapiens
PALEDTAAAGAAQEDQEGVGFTESFGAANISQAARERDCESVCFIGRPWRVVDGHLNLPVCKGMMEAMLYHIMTRPGIPESSLLR

SEQ ID NO: 11470 - protein, 85 aa, Homo sapiens
HYQGVLQPVAVLELLQGLESLGCIRKRWLRKPRPVSLFSTPVVEEVEVPSSLDESPMAFYEPTLDCTLRLGRVFPHEVNWNKWIH

SEQ ID NO: 11471 - protein, 85 aa, Homo sapiens
SMNPERPFKAEDKENTENNNSSSNKQNQLSPLEGGKPLMSSSEEEFSPPQSPDQNSVLLLQGNMGHARSSNYSLPGLTASQPSHG

SEQ ID NO: 11472 - protein, 84 aa, Homo sapiens
NQLSPLEGGKPLMSSSEEEFSPPQSPDQNSVLLLQGNMGHARSSNYSLPGLTASQPSHGLQTHQHQLQDSLLGPLTSSLVDLGS

SEQ ID NO: 11473 - protein, 85 aa, Homo sapiens
AFRVERTDYRSSHVGSGPRVVAHFYAKRLTLEELLAVEAGATRAKDHGLEVLGLVRVPLYTLRDGVGGLPTFLENSFIGSAREQL

SEQ ID NO: 11474 - protein, 84 aa, Homo sapiens
AKRLTLEELLAVEAGATRAKDHGLEVLGLVRVPLYTLRDGVGGLPTFLENSFIGSAREQLLEALQDLGLLQSGSISGLKIPAHH

SEQ ID NO: 11475 - protein, 85 aa, Homo sapiens
VRVGDQVTHIRIQNSGDFYDLYGGEKFATLTELVEYYTQQQGVLQDRDGTIIHLKYPLNCSDPTSERWYHGHMSGGQAETLLQAK

SEQ ID NO: 11476 - protein, 85 aa, Homo sapiens
NCSDPTSERWYHGHMSGGQAETLLQAKGEPWTFLVRESLSQPGDFVLSVLSDQPKAGPGSPLRVTHIKVMCEGGRYTVGGLETFD

SEQ ID NO: 11477 - protein, 84 aa, Homo sapiens
KAIERGTGNDNYRTTGIATIEVFLPPRLKKDRKNLLETRLHITGRELRSKAVRGGFRKWHATHMRRRPCGSAPAMGFSRETTEE

SEQ ID NO: 11478 - protein, 85 aa, Homo sapiens
QYSDRLECCENEVEKVIEEIRCKAIERGTGNDNYRTTGIATIEVFLPPRLKKDRKNLLETRLHITGRELRSKAVRGGFRKWHATH

SEQ ID NO: 11479 - protein, 84 aa, Homo sapiens
KDKQKKKKERTWAEAARLVLENYSDAPMTPKQILQVIEAEGLKEMRSGTSPLACLNAMLHSNSRGGEGLFYKLPGRISLFTLKV

SEQ ID NO: 11480 - protein, 85 aa, Homo sapiens
AKTSSGQRYFLNHIDQTTTWQDPRKAMLSQMNVTAPTSPPVQQNMMNSASGPLPDGWEQAMTQDGEIYYINHKNKTTSWLDPRLD

SEQ ID NO: 11481 - protein, 85 aa, Homo sapiens
PRFAMNQRISQSAPVKQPPPLAPQSPQGGVMGGSNSNQQQQMRLQQLQMEKERLRLKQQELLRQAMRNINPSTANSPKCQELALR

SEQ ID NO: 11482 - protein, 85 aa, Homo sapiens
SQLPTLEQDGGTQNPVSSPGMSQELRTMTTNSSDPFLNSGTYHSRDESTDSGLSMSSYSVPRTPDDFLNSVDEMDTGDTINQSTL

SEQ ID NO: 11483 - protein, 85 aa, Homo sapiens
QNMMNSASGPLPDGWEQAMTQDGEIYYINHKNKTTSWLDPRLDPRFAMNQRISQSAPVKQPPPLAPQSPQGGVMGGSNSNQQQQM

SEQ ID NO: 11484 - protein, 85 aa, Homo sapiens
RLQQLQMEKERLRLKQQELLRQAMRNINPSTANSPKCQELALRSQLPTLEQDGGTQNPVSSPGMSQELRTMTTNSSDPFLNSGTY

SEQ ID NO: 11485 - protein, 85 aa, Homo sapiens
HSRDESTDSGLSMSSYSVPRTPDDFLNSVDEMDTGDTINQSTLPSQQNRFPDYLEAIPGTNVDLGTLEGDGMNIEGEELMPSLQE

SEQ ID NO: 11486 - protein, 85 aa, Homo sapiens
KVKIKCWNGVATWLWVANDENCGICRMAFNGCCPDCWSAMARSRLAATSASRVQTVLLPQPSKQLGLQACARRRLPAGVGPVLPL

SEQ ID NO: 11487 - protein, 85 aa, Homo sapiens
RMAFNGCCPDCWSAMARSRLAATSASRVQTVLLPQPSKQLGLQACARRRLPAGVGPVLPLLPHALHPQVAARTAGAAALPHVPPG

SEQ ID NO: 11488 - protein, 84 aa, Homo sapiens
KGCLRFQLPERGSRLCLYEDGTELTEDYFPSVPDNAELVLLTLGQAWQGCEWQGLWRCERHQALPQCISRATGGAHPGRPAAAV

SEQ ID NO: 11489 - protein, 85 aa, Homo sapiens
GSFSSHMTEFPRKRKGSDSDPSQEAHSQTEKRRRDKMNNLIEELSAMIPQCNPMARKLDKLTVLRMAVQHLRSLKGLTNSYVGSN

SEQ ID NO: 11490 - protein, 85 aa, Homo sapiens
EDEVVRFAKKMDKMVQKKNAAGALDLLKELKNIPMTLELLQSTRIGMSVNAIRKQSTDEEVTSLAKSLIKSWKKLLDGPSTEKDL

SEQ ID NO: 11491 - protein, 84 aa, Homo sapiens
LKELKNIPMTLELLQSTRIGMSVNAIRKQSTDEEVTSLAKSLIKSWKKLLDGPSTEKDLDEKKKEPAITSQNSPEAREERYFTV

SEQ ID NO: 11492 - protein, 85 aa, Homo sapiens
QLVHFLRNHKQEKHLVFFSTCACVEYYGKALEVLVKGVKIMCIHGKMKYKRNKIFMEFRKLQSAFVHRCGRTARIGHGGSALVFL

SEQ ID NO: 11493 - protein, 85 aa, Homo sapiens
MPMEESYINFLAINQKCPLQEMKPQRNTADLLPKLKSMALADRAVFEKGMKAFVSYVQAYAKHECNLIFRLKDLDFASLARGFAL

SEQ ID NO: 11494 - protein, 85 aa, Homo sapiens
MRMPKMPELRGKQFPDFVPVDVNTDTIPFKDKIREKQRQKLLEQQRREKTENEGRRKFIKNKAWSKQKAKKEKKKKMNEKRKREE

SEQ ID NO: 11495 - protein, 85 aa, Homo sapiens
IHGKMKYKRNKIFMEFRKLQSAFVHRCGRTARIGHGGSALVFLLPMEESYINFLAINQKCPLQEMKPQRNTADLLPKLKSMALAD

SEQ ID NO: 11496 - protein, 85 aa, Homo sapiens
RAVFEKGMKAFVSYVQAYAKHECNLIFRLKDLDFASLARGFALLRMPKMPELRGKQFPDFVPVDVNTDTIPFKDKIREKQRQKLL

SEQ ID NO: 11497 - protein, 85 aa, Homo sapiens
EQQRREKTENEGRRKFIKNKAWSKQKAKKEKKKKMNEKRKREEGSDIEDEDMEELLNDTRLLKKLKKGKITEEEFEKGLLTTGKR

SEQ ID NO: 11498 - protein, 85 aa, Homo sapiens
VFDTTIAADFSILESQKEFVRRYRQHSEEERTLPMLTSACPGWVRYAERVLGRPITAHLCTAKSPQQVMGSLVKDYFARQQNLSP

SEQ ID NO: 11499 - protein, 85 aa, Homo sapiens
RQVEPPAKKPATPAEDDEDDDIDLFGSDNEEEDKEAAQLREERLRQYAEKKAKKPALVAKSSILLDVKPWDDETDMAQLEACVRS

SEQ ID NO: 11500 - protein, 85 aa, Homo sapiens
RLRQYAEKKAKKPALVAKSSILLDVKPWDDETDMAQLEACVRSIQLDGLVWGASKLVPVGYGIRKLQIQCVVEDDKVGTDLLEEE

SEQ ID NO: 11501 - protein, 85 aa, Homo sapiens
KSKDFYPGTTERVCLIQGTVEALNAVHGFIAEKIREMPQNVAKTEPVSILQPQTTVNPDRIKQVKIIVPNSTAGLIIGKGGATVK

SEQ ID NO: 11502 - protein, 85 aa, Homo sapiens
AVMEQSGAWVQLSQKPDGINLQERVVTVSGEPEQNRKAVELIIQKIQEDPQSGSCLNISYANVTGPVANSNPTGSPYANTAEVLP

SEQ ID NO: 11503 - protein, 85 aa, Homo sapiens
TAAAAAGLLGHANLAGVAAFPAVLSGFTGNDLVAITSALNTLASYGYNLNTLGLGLSQAAATGALAAAAASANPAAAAANLLATY

SEQ ID NO: 11504 - protein, 85 aa, Homo sapiens
ASEASASGSTAGGTAGTFALGSLAAATAATNGYFGAASPLAASAILGTEKSTDGSKDVVEIAVPENLVGAILGKGGKTLVEYQEL

SEQ ID NO: 11505 - protein, 85 aa, Homo sapiens
KTEPVSILQPQTTVNPDRIKQVKIIVPNSTAGLIIGKGGATVKAVMEQSGAWVQLSQKPDGINLQERVVTVSGEPEQNRKAVELI

SEQ ID NO: 11506 - protein, 85 aa, Homo sapiens
IQKIQEDPQSGSCLNISYANVTGPVANSNPTGSPYANTAEVLPTAAAAAGLLGHANLAGVAAFPAVLSGFTGNDLVAITSALNTL

SEQ ID NO: 11507 - protein, 85 aa, Homo sapiens
ASYGYNLNTLGLGLSQAAATGALAAAAASANPAAAAANLLATYASEASASGSTAGGTAGTFALGSLAAATAATNGYFGAASPLAA

SEQ ID NO: 11508 - protein, 85 aa, Homo sapiens
SAILGTEKSTDGSKDVVEIAVPENLVGAILGKGGKTLVEYQELTGARIQISKKGEFVPGTRNRKVTITGTPAATQAAQYLITQRI

SEQ ID NO: 11509 - protein, 19 aa, Homo sapiens
GTWIMRPLILPTAERNWPK

SEQ ID NO: 11510 - protein, 84 aa, Homo sapiens
GMGYSTHAAQQVLHAASGNLDEALKVAAPSGPLALSLSSGSCPELPPWLSSILPGSLLWAAPSSGSEGQVSPGLQPRHRLREAT

SEQ ID NO: 11511 - protein, 85 aa, Homo sapiens
QPQHIQLQVVQVASATSPHQSQQSTVDVGQLHDPQPYPQHAIQVQHIQVSEPTASAPSSAQVSGQPLSPSAQQAQQGLSPSHIQG

SEQ ID NO: 11512 - protein, 85 aa, Homo sapiens
SSSTQGQALQQQQQQQQNSSVQHTYLPSAWNSFRGYSSEIQMMTLPPGQFVITDSGVATPVTTGQVKAVTSGHYVLSESQSELEE

SEQ ID NO: 11513 - protein, 85 aa, Homo sapiens
QVQHIQVSEPTASAPSSAQVSGQPLSPSAQQAQQGLSPSHIQGSSSTQGQALQQQQQQQQNSSVQHTYLPSAWNSFRGYSSEIQM

SEQ ID NO: 11514 - protein, 85 aa, Homo sapiens
NQSDSKEVDSSEESSQDSSENSSESEDEDDSIPSEVTIDNIKLPNSEGGKVETGFHRVSQDGLNLLTSCSTLLDLPKCWDYRHEP

SEQ ID NO: 11515 - protein, 85 aa, Homo sapiens
KPASPKFIVTLDGVPSPPGYMSDQEEDMCFEGMKPVNQTAASNKGLRGLLHPQQLHLLSRQLEDPNAEMSELSVAQKPEKLLERC

SEQ ID NO: 11516 - protein, 85 aa, Homo sapiens
KYWPACKNGDECAYHHPISPCKAFPNCKFAEKCLFVHPNCKYDAKCTKPDCPFTHVSRRIPVLSPKPVAPPAPPSSSQLCRYFPA

SEQ ID NO: 11517 - protein, 85 aa, Homo sapiens
NKGLRGLLHPQQLHLLSRQLEDPNAEMSELSVAQKPEKLLERCKYWPACKNGDECAYHHPISPCKAFPNCKFAEKCLFVHPNCKY

SEQ ID NO: 11518 - protein, 85 aa, Homo sapiens
DAKCTKPDCPFTHVSRRIPVLSPKPVAPPAPPSSSQLCRYFPACKKMECPFYHPKHCRFNTQCTRPDCTFYHPTINVPPRHALKW

SEQ ID NO: 11519 - protein, 85 aa, Homo sapiens
FPQHHHPGIPGVAHSVISTRTPPPPSPLPFPTQAILPPAPSSYFSHPTIRYPPHLNPQDTLKNYVPSYDPSSPQTSQPNGSGQVV

SEQ ID NO: 11520 - protein, 85 aa, Homo sapiens
GKVPGHFTPVLAPSPHPSAVRPVTLSMTDTKPITTSTEAYTASGTSQANRYVGLSPRDPSFLHQQQLRICDWTMNQNGRHLYPST

SEQ ID NO: 11521 - protein, 85 aa, Homo sapiens
YFSHPTIRYPPHLNPQDTLKNYVPSYDPSSPQTSQPNGSGQVVGKVPGHFTPVLAPSPHPSAVRPVTLSMTDTKPITTSTEAYTA

SEQ ID NO: 11522 - protein, 85 aa, Homo sapiens
SGTSQANRYVGLSPRDPSFLHQQQLRICDWTMNQNGRHLYPSTSEDTLGITWQSPGTWASLVPFQVSNRTPILPANVQNYGLNII

SEQ ID NO: 11523 - protein, 85 aa, Homo sapiens
AVPGCNKDSVRAGCKKCGYPGHLTFECRNFLRVDPKRDIVLDVSSTSSEDSDEENEELNKLQALQEKRINEEEEKKKEKSKEKIK

SEQ ID NO: 11524 - protein, 84 aa, Homo sapiens
EEEEKKKEKSKEKIKLKKKRKRSYSSSSTEEDTSKQKKQKYQKKEKKKEKKSKSKKGKHHKKEKKKRKKEKHSSTPNSSEFSRK

SEQ ID NO: 11525 - protein, 85 aa, Homo sapiens
VSSTSSEDSDEENEELNKLQALQEKRINEEEEKKKEKSKEKIKLKKKRKRSYSSSSTEEDTSKQKKQKYQKKEKKKEKKSKSKKG

SEQ ID NO: 11526 - protein, 85 aa, Homo sapiens
VARGQDPPSGDRLSSLRRLGLVYFLYLFLFSGLEYTLSFLTHQRFQFSRPSCCWCPPSSSSAGDVLCPCWAWGCCSTPLPPPLWC

SEQ ID NO: 11527 - protein, 84 aa, Homo sapiens
LFLFSGLEYTLSFLTHQRFQFSRPSCCWCPPSSSSAGDVLCPCWAWGCCSTPLPPPLWCPACPPWSLAMAHQGRRARSWVHCAA

SEQ ID NO: 11528 - protein, 85 aa, Homo sapiens
LEEERKKRKQFQDLGRKMLEDPQERERRERRERMERETNGNEDEEGRQKIREEKDKSKELHAIKERYLGGIKKRRRTRHLNDRKF

SEQ ID NO: 11529 - protein, 85 aa, Homo sapiens
VFEWDASEDTSIDYNPLYKERHHPHQEAPGRDHLCLTQHSSCGLRASPKLPDACFSEPSHPSFQVLTLGIWGLRKTIQLPSPDPQ

SEQ ID NO: 11530 - protein, 84 aa, Homo sapiens
HPSFQVLTLGIWGLRKTIQLPSPDPQVRRPACGAAKGEDDAVGGRESKLPQLLGPVLPFFALGLHWAISSCQAMGAASWHCSPD

SEQ ID NO: 11531 - protein, 85 aa, Homo sapiens
DEEGRQKIREEKDKSKELHAIKERYLGGIKKRRRTRHLNDRKFVFEWDASEDTSIDYNPLYKERHHPHQEAPGRDHLCLTQHSSC

SEQ ID NO: 11532 - protein, 85 aa, Homo sapiens
GLRASPKLPDACFSEPSHPSFQVLTLGIWGLRKTIQLPSPDPQVRRPACGAAKGEDDAVGGRESKLPQLLGPVLPFFALGLHWAI

SEQ ID NO: 11533 - protein, 85 aa, Homo sapiens
NVDHAATHITNRREELAQIRKEEKEKKRRRLENIRFLKGMGYSTHAAQQVLHAASGNLDEALKILLSNPQMWWLNDSNPETDNRQ

SEQ ID NO: 11534 - protein, 85 aa, Homo sapiens
ESPSQENIDRLVYMGFDALVAEAALRVFRGNVQLAAQTLAHNGGSLPPELPLSPEDSLSPPATSPSDSAGTSSASTDEDMETEAV

SEQ ID NO: 11535 - protein, 85 aa, Homo sapiens
STHAAQQVLHAASGNLDEALKILLSNPQMWWLNDSNPETDNRQESPSQENIDRLVYMGFDALVAEAALRVFRGNVQLAAQTLAHN

SEQ ID NO: 11536 - protein, 85 aa, Homo sapiens
GGSLPPELPLSPEDSLSPPATSPSDSAGTSSASTDEDMETEAVNEILEDIPEHEEDYLDSTLEDEEIIIAEYLSYVENRKSATKK

SEQ ID NO: 11537 - protein, 85 aa, Homo sapiens
EACLKEELPSPVELEESLRNGVLLAKLGHCFAPSVVPLKKIYDVEQLRYQATGLHFRHTDNINFWLSAIAHIGLPSTFFPETTDI

SEQ ID NO: 11538 - protein, 85 aa, Homo sapiens
YDKKNMPRVVYCIHALSLFLFRLGLAPQIHDLYGKVKFTAEELSNMASELAKYGLQLPAFSKIGGILANELSVDEAAVHAAVLAI

SEQ ID NO: 11539 - protein, 85 aa, Homo sapiens
NEAVERGVVEDTLAALQNPSALLENLREPLAAVYQEMLAQAKMEKAANARNHDDRESQDIYDHYLTQAEIQGNINHVNVHGALEV

SEQ ID NO: 11540 - protein, 85 aa, Homo sapiens
VDDALERQSPEALLKALQDPALALRGVRRDFADWYLEQLNSDREQKAQELGLVELLEKEEVQAGVAAANTKGDQEQAMLHAVQRI

SEQ ID NO: 11541 - protein, 85 aa, Homo sapiens
NKAIRRRVAADTVKELMCPEAQLPPVYPVASSMYQLELAVLQQQQGELGQEELFVAVEMLSAVVLINRALEARDASGFWSSLVNP

SEQ ID NO: 11542 - protein, 85 aa, Homo sapiens
ATGLAEVEGENAQRYFDALLKLRQERGMGEDFLSWNDLQATVSQVNAQTQEETDRVLAVSLINEALDKGSPEKTLSALLLPAAGL

SEQ ID NO: 11543 - protein, 85 aa, Homo sapiens
DDVSLPVAPRYHLLLVAAKRQKAQVTGDPGAVLWLEEIRQGVVRANQDTNTAQRMALGVAAINQAIKEGKAAQTERVLRNPAVAL

SEQ ID NO: 11544 - protein, 85 aa, Homo sapiens
RGVVPDCANGYQRALESAMAKKQRPADTAFWVQHDMKDGTAYYFHLQTFQGIWEQPPGCPLNTSHLTREEIQSAVTKVTAAYDRQ

SEQ ID NO: 11545 - protein, 85 aa, Homo sapiens
QLWKANVGFVIQLQARLRGFLVRQKFAEHSHFLRTWLPAVIKIQAHWRGYRQRKIYLEWLQYFKANLDAIIKIQAWARMWAARRQ

SEQ ID NO: 11546 - protein, 85 aa, Homo sapiens
YLRRLHYFQKNVNSIVKIQAFFRARKAQDDYRILVHAPHPPLSVVRRFAHLLNQSQQDFLAEAELLKLQEEVVRKIRSNQQLEQD

SEQ ID NO: 11547 - protein, 85 aa, Homo sapiens
LNIMDIKIGLLVKNRITLQEVVSHCKKLTKRNKEQLSDMMVLDKQKGLKSLSKEKRQKLEAYQHLFYLLQTQPIYLAKLIFQMPQ

SEQ ID NO: 11548 - protein, 85 aa, Homo sapiens
NKTTKFMEAVIFSLYNYASSRREAYLLLQLFKTALQEEIKSKVEQPQDVVTGNPTVVRLVVRFYRNGRGQSALQEILGKVIQDVL

SEQ ID NO: 11549 - protein, 85 aa, Homo sapiens
EDKVLSVHTDPVHLYKNWINQTEAQTGQRSHLPYDVTPEQALSHPEVQRRLDIALRNLLAMTDKFLLAITSSVDQIPYGMRYVAK

SEQ ID NO: 11550 - protein, 85 aa, Homo sapiens
VLKATLAEKFPDATDSEVYKVVGNLLYYRFLNPAVVAPDAFDIVAMAAGGALAAPQRHALGAVAQLLQHAAAGKAFSGQSQHLRV

SEQ ID NO: 11551 - protein, 85 aa, Homo sapiens
MNDYLEETHLKFRKFIHRACQVPEPEERFAVDEYSDMVAVAKPMVYITVGELVNTHRLLLEHQDCIAPDHQDPLHELLEDLGELP

SEQ ID NO: 11552 - protein, 85 aa, Homo sapiens
TIPDLIGESIAADGHTDLSKLEVSLTLTNKFEGLEADADDSNTRSLLLSTKQLLADIIQFHPGDTLKEILSLSASREQEAAHKQL

SEQ ID NO: 11553 - protein, 85 aa, Homo sapiens
MSRRQACTAQTPEPLRRHRSLTAHSLLPLAEKQRRVLRNLRRLEALGLVSARNGYQGLVDELAKDIRNQHRHRHRRKAELVKLQA

SEQ ID NO: 11554 - protein, 85 aa, Homo sapiens
TLQGLSTKTTFYEEQGDYYSQYIRACLDHLAPDSKSSGKGKKQPSLHYTAAQLLEKGVLVEIEDLPASHFRNVIFDITPGDEAGK

SEQ ID NO: 11555 - protein, 85 aa, Homo sapiens
DEKKKEPAITSQNSPEAREESTSSGNVSNRKDETNARDTYVSSFPRAPSTSDSVRLKCREMLAAALRTGDDYIAIGADEEELGSQ

SEQ ID NO: 11556 - protein, 85 aa, Homo sapiens
IEEAIYQEIRNTDMKYKNRVRSRISNLKDAKNPNLRKNVLCGNIPPDLFARMTAEEMASDELKEMRKNLTKEAIREHQMAKTGGT

SEQ ID NO: 11557 - protein, 85 aa, Homo sapiens
TRIGMSVNAIRKQSTDEEVTSLAKSLIKSWKKLLDGPSTEKDLDEKKKEPAITSQNSPEAREESTSSGNVSNRKDETNARDTYVS

SEQ ID NO: 11558 - protein, 85 aa, Homo sapiens
SFPRAPSTSDSVRLKCREMLAAALRTGDDYIAIGADEEELGSQIEEAIYQEIRNTDMKYKNRVRSRISNLKDAKNPNLRKNVLCG

SEQ ID NO: 11559 - protein, 85 aa, Homo sapiens
NIPPDLFARMTAEEMASDELKEMRKNLTKEAIREHQMAKTGGTQTDLFTCGKCKKKNCTYTQVQTRSADEPMTTFVVCNECGNRW

SEQ ID NO: 11560 - protein, 84 aa, Homo sapiens
ETEANLDTRKSVSDKQSAVTESSEGTVSLLRSHKNLFLSKLQHGTQQQDLNKKERRVGTPQSMALGRRQEFEIWREEIWRGKLV

SEQ ID NO: 11561 - protein, 85 aa, Homo sapiens
DLCKNRLVSGGRDCQVKVWDVDTGKCLKTFRHKDPILATRINDTYIVSSCERGLVKVWHIAMAQLVKEALMAWSWPGAWWGSTSA

SEQ ID NO: 11562 - protein, 84 aa, Homo sapiens
CKNRLVSGGRDCQVKVWDVDTGKCLKTFRHKDPILATRINDTYIVSSCERGLVKVWHIAMAQLVKEALMAWSWPGAWWGSTSAA

SEQ ID NO: 11563 - protein, 85 aa, Homo sapiens
DTSKHKVLVVSVCPQSLPYFAAKFNLSVTDASRRLCGFLKSLGWVRYAERVLGRPITAHLCTAKSPQQVMGSLVKDYFARQQNLS

SEQ ID NO: 11564 - protein, 85 aa, Homo sapiens
GWVRYAERVLGRPITAHLCTAKSPQQVMGSLVKDYFARQQNLSPEKIFHVIVAPCYDKKLEALQESLPPALHGSRGADCVLTSGE

SEQ ID NO: 11565 - protein, 85 aa, Homo sapiens
RKLFEKYGKAGEVFIHKDKGFGFIRLETRTLAEIAKVELDNMPLRGKQLRVRFACHSASLTVRNLPQYVSNELLEEAFSVFGQVE

SEQ ID NO: 11566 - protein, 85 aa, Homo sapiens
RAVVIVDDRGRPSGKGIVEFSGKPAARKALDRCSEGSFLLTTFPRPVTVEPMDQLDDEEGLPEKLVIKNQQFHKEREQPPRFAQP

SEQ ID NO: 11567 - protein, 85 aa, Homo sapiens
GSFEYEYAMRWKALIEMEKQQQDQVDRNIKEAREKLEMEMEAARHEHQVMLMRQDLMRRQEELRRMEELHNQEVQKRKQLELRQE

SEQ ID NO: 11568 - protein, 85 aa, Homo sapiens
EERRRREEEMRRQQEEMMRRQQEGFKGTFPDAREQEIRMGQMAMGGAMGINNRGAMPPAPVPAGTPAPPGPATMMPDGTLGLTPP

SEQ ID NO: 11569 - protein, 85 aa, Homo sapiens
PLRGKQLRVRFACHSASLTVRNLPQYVSNELLEEAFSVFGQVERAVVIVDDRGRPSGKGIVEFSGKPAARKALDRCSEGSFLLTT

SEQ ID NO: 11570 - protein, 85 aa, Homo sapiens
FPRPVTVEPMDQLDDEEGLPEKLVIKNQQFHKEREQPPRFAQPGSFEYEYAMRWKALIEMEKQQQDQVDRNIKEAREKLEMEMEA

SEQ ID NO: 11571 - protein, 85 aa, Homo sapiens
ARHEHQVMLMRQDLMRRQEELRRMEELHNQEVQKRKQLELRQEEERRRREEEMRRQQEEMMRRQQEGFKGTFPDAREQEIRMGQM

SEQ ID NO: 11572 - protein, 85 aa, Homo sapiens
TFLIVTVAWAAHTRLFQVVGKTDDTLALLNLFSLMVTFPDVPLGIFLFCVCVIAIGVVQALIVGYAFHFPHLLSPQIQRSAHRAL

SEQ ID NO: 11573 - protein, 85 aa, Homo sapiens
MGIFLFCVCVIAIGVVQALIVGYAFHFPHLLSPQIQRSAHRALYRRHVLGIVLQGPALCFAAAIFSLFFVPLSYLLMVTVILLPY

SEQ ID NO: 11574 - protein, 48 aa, Homo sapiens
RGGMKLQCHHLPFLARDLKKEIPEFLQVRRSQKPQMSDRLTMMELQPD

SEQ ID NO: 11575 - protein, 9 aa, Homo sapiens
IPYLRKNLQ

SEQ ID NO: 11576 - protein, 7 aa, Homo sapiens
LETTRRK

SEQ ID NO: 11577 - protein, 4 aa, Homo sapiens
LKNP

SEQ ID NO: 11578 - protein, 19 aa, Homo sapiens
VKITMTWNPWSMQTQDHLF

SEQ ID NO: 11579 - protein, 12 aa, Homo sapiens
CQIKRRTCALKE

SEQ ID NO: 11580 - protein, 40 aa, Homo sapiens
TPSHPAKPSPIVNLLKNVCLFTQIVNMMQSVLNQIVPSLM

SEQ ID NO: 11581 - protein, 6 aa, Homo sapiens
MELQPD

SEQ ID NO: 11582 - protein, 35 aa, Homo sapiens
FNSSRIVFMLPSSLICRVVGYMKQDVCVNQRCLTA

SEQ ID NO: 11583 - protein, 35 aa, Homo sapiens
MITGLEQEASPAVCLCLQSLKGDLLFHLLNKLTRI

SEQ ID NO: 11584 - protein, 4 aa, Homo sapiens
GPPE

SEQ ID NO: 11585 - protein, 30 aa, Homo sapiens
RLQIPFGYFQDTLCRHEILYNQINLQVPSL

SEQ ID NO: 11586 - protein, 11 aa, Homo sapiens
RTQMVAFLTLR

SEQ ID NO: 11587 - protein, 84 aa, Homo sapiens
RLYHPTVPLAREYSVEAEERIGRPVHEFMLKPGDLLYFPRGTIHQADTPAGLAHSTHVTISTYQNNDAGARMRRCDLRAIAPQK

SEQ ID NO: 11588 - protein, 85 aa, Homo sapiens
TRRRSRPSGGAGRRERARAAGPQKPQAPEPPPPPSLEAGAGAGPPEAPAEPDHDGPREDDEPNLVPGPQVPPASSQPVQTCCLLC

SEQ ID NO: 11589 - protein, 85 aa, Homo sapiens
HRERKGWEEGPSQNGLVLQGEKLPPDFMPKLVKNLLGEMPLWVCQSCRKSMEEDERQTGREHAVAISLSHTSCKSQSCGDDSHSS

SEQ ID NO: 11590 - protein, 85 aa, Homo sapiens
SSSSSSSSSSSSSSCPGNSGDWDPSSFLSAHKLSGLWNSPHSSGAMPGSSLGSPPTIPGEAFPVSEHHQHSDLTAPPNSPTGHHP

SEQ ID NO: 11591 - protein, 85 aa, Homo sapiens
QPASLIPSHPSSFGSPPHPHLLPTTPAAPFPAQASECPVAAATAPHTPGPCQSSHLPSTSMPLLKMPPPFSGCSHPCSGHCGGHC

SEQ ID NO: 11592 - protein, 85 aa, Homo sapiens
SGPLLPPPSSQPLPSTHRDPGCKGHKFAHSGLACQLPQPCEADEGLGEEEDSSSERSSCTSSSTHQRDGKFCDCCYCEFFGHNAE

SEQ ID NO: 11593 - protein, 85 aa, Homo sapiens
KEKAQLAAEALKQANRVSGSREPRPARERLLEWPDRELDRVNSFLSSRLQEIKNTVKDSIRASFSVCELSMDSNGFSKEGAAEPE

SEQ ID NO: 11594 - protein, 85 aa, Homo sapiens
PQSLPPSNLSGSSEQQPDINLDLSPLTLGSPQNHTLQAPGEPAPPWAEMRGPHPPWTEVRGPPPGIVPENGLVRRLNTVPNLSRV

SEQ ID NO: 11595 - protein, 85 aa, Homo sapiens
IWVKTPKPGYPSSEEPSSKEVPSCKQELPEPVSSGGKPQKGKRQGSQAKKSEASPAPRPPASLEVPSAKGQVAGPKQPGRVLELP

SEQ ID NO: 11596 - protein, 85 aa, Homo sapiens
KVGSCAEAGEGSRGSRPGPGWAGSPKTEKEKGSSWRNWPGEAKARPQEQESVQPSGPARPQSLPQGKGRSRRSRNKQEKPASSLD

SEQ ID NO: 11597 - protein, 85 aa, Homo sapiens
GPPEAPAEPDHDGPREDDEPNLVPGPQVPPASSQPVQTCCLLCHRERKGWEEGPSQNGLVLQGEKLPPDFMPKLVKNLLGEMPLW

SEQ ID NO: 11598 - protein, 85 aa, Homo sapiens
VCQSCRKSMEEDERQTGREHAVAISLSHTSCKSQSCGDDSHSSSSSSSSSSSSSSSSCPGNSGDWDPSSFLSAHKLSGLWNSPHS

SEQ ID NO: 11599 - protein, 85 aa, Homo sapiens
SGAMPGSSLGSPPTIPGEAFPVSEHHQHSDLTAPPNSPTGHHPQPASLIPSHPSSFGSPPHPHLLPTTPAAPFPAQASECPVAAA

SEQ ID NO: 11600 - protein, 85 aa, Homo sapiens
TAPHTPGPCQSSHLPSTSMPLLKMPPPFSGCSHPCSGHCGGHCSGPLLPPPSSQPLPSTHRDPGCKGHKFAHSGLACQLPQPCEA

SEQ ID NO: 11601 - protein, 85 aa, Homo sapiens
DEGLGEEEDSSSERSSCTSSSTHQRDGKFCDCCYCEFFGHNAEKEKAQLAAEALKQANRVSGSREPRPARERLLEWPDRELDRVN

SEQ ID NO: 11602 - protein, 85 aa, Homo sapiens
SFLSSRLQEIKNTVKDSIRASFSVCELSMDSNGFSKEGAAEPEPQSLPPSNLSGSSEQQPDINLDLSPLTLGSPQNHTLQAPGEP

SEQ ID NO: 11603 - protein, 85 aa, Homo sapiens
APPWAEMRGPHPPWTEVRGPPPGIVPENGLVRRLNTVPNLSRVIWVKTPKPGYPSSEEPSSKEVPSCKQELPEPVSSGGKPQKGK

SEQ ID NO: 11604 - protein, 85 aa, Homo sapiens
RQGSQAKKSEASPAPRPPASLEVPSAKGQVAGPKQPGRVLELPKVGSCAEAGEGSRGSRPGPGWAGSPKTEKEKGSSWRNWPGEA

SEQ ID NO: 11605 - protein, 85 aa, Homo sapiens
KARPQEQESVQPSGPARPQSLPQGKGRSRRSRNKQEKPASSLDDVFLPKDMDGVEMDETDREVEYFKRFCLDSAKQTRQKVAVNW

SEQ ID NO: 11606 - protein, 85 aa, Homo sapiens
FKCHRSNGTNTSAPQDIYAVNGIAFHPVHGTLATVGSDGRFSFWDKDARTKLKTSEQLDQPISACCFNHNGNIFAYASSYDWSKV

SEQ ID NO: 11607 - protein, 85 aa, Homo sapiens
RTPGPALGAPRQQSQALGSEGLGLSCDSSQDSRVSLGRSPSPPCKGKLQDFLKWLWGFSTAFGQNPAHRKCSASVSHYGLLCSWA

SEQ ID NO: 11608 - protein, 84 aa, Homo sapiens
QSQALGSEGLGLSCDSSQDSRVSLGRSPSPPCKGKLQDFLKWLWGFSTAFGQNPAHRKCSASVSHYGLLCSWAQKHRQAGGCTL

SEQ ID NO: 11609 - protein, 85 aa, Homo sapiens
FWDKDARTKLKTSEQLDQPISACCFNHNGNIFAYASSYDWSKVRTPGPALGAPRQQSQALGSEGLGLSCDSSQDSRVSLGRSPSP

SEQ ID NO: 11610 - protein, 85 aa, Homo sapiens
VMLGGMLAGHSESGGELIERDGKKYKLFYGMSSEMAMKKYAGGVAEYRYVWRPRSLVIVWRQNSWLLRGGWYSSQRSMVNRGSML

SEQ ID NO: 11611 - protein, 85 aa, Homo sapiens
GSVEKSLGLRNPEGEDNKVFPTLRASEGKTVEVPFKGDVEHTIRDILGGIRSTCTYVGAAKLKELSRRTTFIRVTQQVNPIFSEA

SEQ ID NO: 11612 - protein, 84 aa, Homo sapiens
VEKSLGLRNPEGEDNKVFPTLRASEGKTVEVPFKGDVEHTIRDILGGIRSTCTYVGAAKLKELSRRTTFIRVTQQVNPIFSEAC

SEQ ID NO: 11613 - protein, 85 aa, Homo sapiens
GVAEYRYVWRPRSLVIVWRQNSWLLRGGWYSSQRSMVNRGSMLGSVEKSLGLRNPEGEDNKVFPTLRASEGKTVEVPFKGDVEHT

SEQ ID NO: 11614 - protein, 85 aa, Homo sapiens
HLKPLMTELLKRILDGNKRVQEAACSAFATLEEEACTELVPYLSYILDTLVFAFGKYQHKNLLILYDAIGTLADSVGHHLNQPVP

SEQ ID NO: 11615 - protein, 84 aa, Homo sapiens
SAFATLEEEACTELVPYLSYILDTLVFAFGKYQHKNLLILYDAIGTLADSVGHHLNQPVPESQSATPTQGAPISCSLSRNTSRS

SEQ ID NO: 11616 - protein, 84 aa, Homo sapiens
LRNEYGPVLHMPTSKENLKEKGPQNATDSYVHKQYPANQGQEVEYFVAGTHPYPPGPGLMQIVLPLVEVNTDILGLLTVHSLQR

SEQ ID NO: 11617 - protein, 85 aa, Homo sapiens
MAIKLRNEYGPVLHMPTSKENLKEKGPQNATDSYVHKQYPANQGQEVEYFVAGTHPYPPGPGLMQIVLPLVEVNTDILGLLTVHS

SEQ ID NO: 11618 - protein, 44 aa, Homo sapiens
MQQFIRPWCTSLRNIRDNEEKDSAFRGICMMIGVNPGGVVQPPG

SEQ ID NO: 11619 - protein, 84 aa, Homo sapiens
VHVPQEHQGQRGEGLSLPRHLHDDRCQPGGRCAASWVSPKDDLRDMFYKILHGFKDQVGEDNWQQFSEQFPPLLKERLAAFYGV

SEQ ID NO: 11620 - protein, 85 aa, Homo sapiens
WKGRPFPCGACGRSFKCSSDAAKHRSIHSGEKPYECSDCGKAFIHSSHVVRHQRAHSGERPYACAECGKAFGQSFNLLRHQRVHT

SEQ ID NO: 11621 - protein, 85 aa, Homo sapiens
TTPATELDAWLAKYPPSQVTRYGDPGSPNSEPVGWIAVYGQGYSPNSGDVQGLQAAWEALQTSGRPITPGTLRQLAITHHVLSGK

SEQ ID NO: 11622 - protein, 85 aa, Homo sapiens
WLMHLAPGFKLDHAWAGIARAVVEGQLQVAKVSPRAKEGGRQVICVYTDDFTDRLGVLEADSAIRAAGIKCLLTYKPDVYTYLGI

SEQ ID NO: 11623 - protein, 85 aa, Homo sapiens
SAAGTYAWMAPEVIRASMFSKGSDVWSYGVLLWELLTGEVPFRGIDGLAVAYGVAMNKLALPIPSTCPEPFAKLMEDCWNPDPHS

SEQ ID NO: 11624 - protein, 85 aa, Homo sapiens
RPSFTNILDQLTTIEESGFFEMPKDSFHCLQDNWKHEIQEMFDQLRAKEKELRTWEEELTRAALQQKNQEELLRRREQELAEREI

SEQ ID NO: 11625 - protein, 85 aa, Homo sapiens
DILERELNIIIHQLCQEKPRVKKRKGKFRKSRLKLKDGNRISLPSDFQHKFTVQASPTMDKRKSLINSRSSPPASPTIIPRLRAI

SEQ ID NO: 11626 - protein, 85 aa, Homo sapiens
QCETVSQISWGQNTQGHLSPALSSHRLVQACSIHNFCHLSSTMCIYMHILTPGESSKTWGRSSVVPKEEGEEEEKRAPKKKGRTW

SEQ ID NO: 11627 - protein, 85 aa, Homo sapiens
GPGTLGQKELASGDEGLKSLVDGYKQWSSSAPNLVKGPRSSPALPGFTSLMEMALLAASWVVPIDIEEDEDSEGPGSGESRLQHS

SEQ ID NO: 11628 - protein, 85 aa, Homo sapiens
PSQSYLCIPFPRGEDGDGPSSDGIHEEPTPVNSATSTPQLTPTNSLKRGGAHHRRCEVALLGCGAVLAATGLGFDLLEAGKCQLL

SEQ ID NO: 11629 - protein, 85 aa, Homo sapiens
PLEEPEPPAREEKKRREGLFQRSSRPRRSTSPPSRKLFKKEEPMLLLGDPSASLTLLSLSSISECNSTRSLLRSDSDEIVVYEMP

SEQ ID NO: 11630 - protein, 85 aa, Homo sapiens
VSPVEAPPLSPCTHNPLVNVRVERFKRDPNQSLTPTHVTLTTPSQPSSHRRTPSDGALKPETLLASRSPSSNGLSPSPGAGMLKT

SEQ ID NO: 11631 - protein, 85 aa, Homo sapiens
PSPSRDPGEFPRLPDPNVVFPPTPRRWNTQQDSTLERPKTLEFLPRPRPSANRQRLDPWWFVSPSHARSTSPANSSSTETPSNLD

SEQ ID NO: 11632 - protein, 85 aa, Homo sapiens
LPSDFQHKFTVQASPTMDKRKSLINSRSSPPASPTIIPRLRAIQCETVSQISWGQNTQGHLSPALSSHRLVQACSIHNFCHLSST

SEQ ID NO: 11633 - protein, 85 aa, Homo sapiens
MCIYMHILTPGESSKTWGRSSVVPKEEGEEEEKRAPKKKGRTWGPGTLGQKELASGDEGLKSLVDGYKQWSSSAPNLVKGPRSSP

SEQ ID NO: 11634 - protein, 85 aa, Homo sapiens
ALPGFTSLMEMALLAASWVVPIDIEEDEDSEGPGSGESRLQHSPSQSYLCIPFPRGEDGDGPSSDGIHEEPTPVNSATSTPQLTP

SEQ ID NO: 11635 - protein, 85 aa, Homo sapiens
TNSLKRGGAHHRRCEVALLGCGAVLAATGLGFDLLEAGKCQLLPLEEPEPPAREEKKRREGLFQRSSRPRRSTSPPSRKLFKKEE

SEQ ID NO: 11636 - protein, 85 aa, Homo sapiens
PMLLLGDPSASLTLLSLSSISECNSTRSLLRSDSDEIVVYEMPVSPVEAPPLSPCTHNPLVNVRVERFKRDPNQSLTPTHVTLTT

SEQ ID NO: 11637 - protein, 85 aa, Homo sapiens
PSQPSSHRRTPSDGALKPETLLASRSPSSNGLSPSPGAGMLKTPSPSRDPGEFPRLPDPNVVFPPTPRRWNTQQDSTLERPKTLE

SEQ ID NO: 11638 - protein, 85 aa, Homo sapiens
FLPRPRPSANRQRLDPWWFVSPSHARSTSPANSSSTETPSNLDSCFASSSSTVEERPGLPALLPFQAGPLPPTERTLLDLDAEGQ

SEQ ID NO: 11639 - protein, 85 aa, Homo sapiens
LVTSRDAFITAICKAYSVQGQSVMMISPSSESHQQVVAVGQPLAVQPQGTVMLTSKNIQCMRTLLNLAHCHGAVLGTSWQLVLAT

SEQ ID NO: 11640 - protein, 85 aa, Homo sapiens
LQHLVWILGLKPSSGGALKPGRAVEGPSTVLTTAVMTDLPVISNILSRLFESSQYLDDVSLHHLINALCSLSLEAMDMAYGNNKE

SEQ ID NO: 11641 - protein, 85 aa, Homo sapiens
PSLFAVAKLLETGLVNMHRIEILWRPLTGHLLEVCQHPNSRMREWGAEALTSLIKAGLTFNHDPPLSQNQRLQLLLLNPLKEMSN

SEQ ID NO: 11642 - protein, 85 aa, Homo sapiens
INHPDIRLKQLECVLQILQSQGDSLGPGWPLVLGVMGAIRNDQGESLIRTAFQCLQLVVTDFLPTMPCTCLQIVVDVAGSFGLHN

SEQ ID NO: 11643 - protein, 85 aa, Homo sapiens
QELNISLTSIGLLWNISDYFFQRGETIEKELNKEEAAQQKQAEEKGVVLNRPFHPAPPFDCLWLCLYAKLGELCVDPRPAVRKSA

SEQ ID NO: 11644 - protein, 85 aa, Homo sapiens
GQTLFSTIGAHGTLLQHSTWHTVIWKVLFHLLDRVRESSTTADKEKIESGGGNILIHHSRDTAEKQWAETWVLTLAGVARIFNTR

SEQ ID NO: 11645 - protein, 85 aa, Homo sapiens
RYLLQPLGDFSRAWDVLLDHIQSAALSKNNEVSLAALKSFQEILQIVSPVRDSDKPETPPVVNVPVPVLIGPISGMSRPFVRTDS

SEQ ID NO: 11646 - protein, 85 aa, Homo sapiens
IGEKLGRYSSSEPPIVTDELEDLNLWWAAWNTWYRIGSESTKPPITFDKLTFIPSQPFLTALIQIFPALYQHIKTGFNMDDLQKL

SEQ ID NO: 11647 - protein, 85 aa, Homo sapiens
GVILHSAISVPISSDASPFILPSYTEAVLTSLQEAVLTALDVLQKAICVGPENMQIMYPAIFDQLLAFVEFSCKPPQYGQLETKH

SEQ ID NO: 11648 - protein, 85 aa, Homo sapiens
IANAKYNQAEWVALNYVPFAERSLEVVVDLYQKTACHKAVVNEKVLQNIIKTLRVPLSLKYSCPSESTWKLAVSSLLRVLSIGLP

SEQ ID NO: 11649 - protein, 85 aa, Homo sapiens
VARQHASSGKFDSMWPELANTFEDFLFTKSIPPDNLSIQEFQRNENIDVEVVQLISNEILPYANFIPKEFVGQIMTMLNKGSIHS

SEQ ID NO: 11650 - protein, 85 aa, Homo sapiens
QSSSFTEAEIDIRLREEFSKMCFETLLQFSFSNKVTTPQEGYISRMALSVLLKRSQDVLHRYIEDERLSGKCPLPRQQVTEIIFV

SEQ ID NO: 11651 - protein, 85 aa, Homo sapiens
VNACWCGLLAALSLLLDASTDEAATENILKAELTMAALCGRLGLVTSRDAFITAICKAYSVQGQSVMMISPSSESHQQVVAVGQP

SEQ ID NO: 11652 - protein, 85 aa, Homo sapiens
LAVQPQGTVMLTSKNIQCMRTLLNLAHCHGAVLGTSWQLVLATLQHLVWILGLKPSSGGALKPGRAVEGPSTVLTTAVMTDLPVI

SEQ ID NO: 11653 - protein, 85 aa, Homo sapiens
SNILSRLFESSQYLDDVSLHHLINALCSLSLEAMDMAYGNNKEPSLFAVAKLLETGLVNMHRIEILWRPLTGHLLEVCQHPNSRM

SEQ ID NO: 11654 - protein, 85 aa, Homo sapiens
REWGAEALTSLIKAGLTFNHDPPLSQNQRLQLLLLNPLKEMSNINHPDIRLKQLECVLQILQSQGDSLGPGWPLVLGVMGAIRND

SEQ ID NO: 11655 - protein, 85 aa, Homo sapiens
QGESLIRTAFQCLQLVVTDFLPTMPCTCLQIVVDVAGSFGLHNQELNISLTSIGLLWNISDYFFQRGETIEKELNKEEAAQQKQA

SEQ ID NO: 11656 - protein, 85 aa, Homo sapiens
EEKGVVLNRPFHPAPPFDCLWLCLYAKLGELCVDPRPAVRKSAGQTLFSTIGAHGTLLQHSTWHTVIWKVLFHLLDRVRESSTTA

SEQ ID NO: 11657 - protein, 85 aa, Homo sapiens
DKEKIESGGGNILIHHSRDTAEKQWAETWVLTLAGVARIFNTRRYLLQPLGDFSRAWDVLLDHIQSAALSKNNEVSLAALKSFQE

SEQ ID NO: 11658 - protein, 85 aa, Homo sapiens
ILQIVSPVRDSDKPETPPVVNVPVPVLIGPISGMSRPFVRTDSIGEKLGRYSSSEPPIVTDELEDLNLWWAAWNTWYRIGSESTK

SEQ ID NO: 11659 - protein, 85 aa, Homo sapiens
PPITFDKLTFIPSQPFLTALIQIFPALYQHIKTGFNMDDLQKLGVILHSAISVPISSDASPFILPSYTEAVLTSLQEAVLTALDV

SEQ ID NO: 11660 - protein, 85 aa, Homo sapiens
LQKAICVGPENMQIMYPAIFDQLLAFVEFSCKPPQYGQLETKHIANAKYNQAEWVALNYVPFAERSLEVVVDLYQKTACHKAVVN

SEQ ID NO: 11661 - protein, 85 aa, Homo sapiens
EKVLQNIIKTLRVPLSLKYSCPSESTWKLAVSSLLRVLSIGLPVARQHASSGKFDSMWPELANTFEDFLFTKSIPPDNLSIQEFQ

SEQ ID NO: 11662 - protein, 85 aa, Homo sapiens
RNENIDVEVVQLISNEILPYANFIPKEFVGQIMTMLNKGSIHSQSSSFTEAEIDIRLREEFSKMCFETLLQFSFSNKVTTPQEGY

SEQ ID NO: 11663 - protein, 85 aa, Homo sapiens
ISRMALSVLLKRSQDVLHRYIEDERLSGKCPLPRQQVTEIIFVLKAVSTLIDSLKKTQPENVDGNTWAQVIALYPTLVECITCSS

SEQ ID NO: 11664 - protein, 85 aa, Homo sapiens
SARGEGAGQPSTSAQGQPAAPAPQKRGRGRPRKQQQEPTGEPSPKRPRGRPKGSKNKSPSKAAQKKAEATGEKRPRGRPRKWAGV

SEQ ID NO: 11665 - protein, 84 aa, Homo sapiens
AQKKAEATGEKRPRGRPRKWAGVQWYNLGSLQPPPPRFKQFSCLRLLSSWDYRHPPPHPANFCIFSRDRVSPCWPGWSRTPDLR

SEQ ID NO: 11666 - protein, 85 aa, Homo sapiens
SPKRPRGRPKGSKNKSPSKAAQKKAEATGEKRPRGRPRKWAGVQWYNLGSLQPPPPRFKQFSCLRLLSSWDYRHPPPHPANFCIF

SEQ ID NO: 11667 - protein, 85 aa, Homo sapiens
MAKAKECWEQEHEEREAEKVRYLAERIPTLQTRGLSLSALQDLCRELHAKVEVVDEERYDIEAKCLHNTREIKDLKLKVMDLRGK

SEQ ID NO: 11668 - protein, 85 aa, Homo sapiens
ELHAKVEVVDEERYDIEAKCLHNTREIKDLKLKVMDLRGKFKRPPLRRVRVSADAMLRALLGSKHKVSMDLRANLKSVKKEDTEK

SEQ ID NO: 11669 - protein, 85 aa, Homo sapiens
MCRELHAKVEVVDEERYDIEAKCLHNTREIKDLKLKVMDLRGKFKRPPLRRVRVSADAMLRALLGSKHKVSMDLRANLKSVKKED

SEQ ID NO: 11670 - protein, 85 aa, Homo sapiens
AQGQRKFQAHKPAKSKTAAAASEKNRGPRKGGRVIAPKKARVVQQQKLKKNLEVGIRKKIEHDVVMKASSSLPKKLALLKAPAKK

SEQ ID NO: 11671 - protein, 84 aa, Homo sapiens
SKTAAAASEKNRGPRKGGRVIAPKKARVVQQQKLKKNLEVGIRKKIEHDVVMKASSSLPKKLALLKAPAKKKGAAAATSSKTPS

SEQ ID NO: 11672 - protein, 85 aa, Homo sapiens
HHHHHHHHHRHSSSHHKISNLSPEEEQGLWKQSHKSSATIQNETPKKKPKLESKPSNGDSSINQSADSGGTDNFVLISQLKEEVM

SEQ ID NO: 11673 - protein, 85 aa, Homo sapiens
ETPKKKPKLESKPSNGDSSINQSADSGGTDNFVLISQLKEEVMSLKRLLQQRDQTILEKDKKLTELKADFQYQESNLRTKMNSME

SEQ ID NO: 11674 - protein, 84 aa, Homo sapiens
DITEFLGQPYFEAFKKKMPIAFAAKGINKLLNKLFLINEQSPRASEETLLGISKKAKQMKINVQNNVDLGQPVKNKRVFKGDQF

SEQ ID NO: 11675 - protein, 85 aa, Homo sapiens
QFQHSVLSTSTQLLFKDLLQNTDAHKRAFHEIYRTRSVNGIPVPPDQLEDMAERFHFVSSTSELHLMKMEFLELKYRLLSLLVLA

SEQ ID NO: 11676 - protein, 85 aa, Homo sapiens
ESKLKSWIIKYGRRESVEQLLQNYVSFIENSKFFEQYEVTYQILKQTAEMYVKADGSVEEAENVMKFMNETTAQWRNLSVEVRSV

SEQ ID NO: 11677 - protein, 85 aa, Homo sapiens
RSMLEEVISNWDRYGNTVASLQAWLEDAEKMLNQSENAKKDFFRNLPHWIQQHTAMNDAGNFLIETCDEMVSRDLKQQLLLLNGR

SEQ ID NO: 11678 - protein, 85 aa, Homo sapiens
WRELFMEVKQYAQADEMDRMKKEYTDCVVTLSAFATEAHKKLSEPLEVSFMNVKLLIQDLEDIEQRVPVMDAQYKIITKTAHLIT

SEQ ID NO: 11679 - protein, 85 aa, Homo sapiens
KESPQEEGKEMFATMSKLKEQLTKVKECYSPLLYESQQLLIPLEELEKQMTSFYDSLGKINEIITVLEREAQSSALFKQKHQELL

SEQ ID NO: 11680 - protein, 85 aa, Homo sapiens
ACQENCKKTLTLIEKGSQSVQKFVTLSNVLKHFDQTRLQRQIADIHVAFQSMVKKTGDWKKHVETNSRLMKKFEESRAELEKVLR

SEQ ID NO: 11681 - protein, 85 aa, Homo sapiens
IAQEGLEEKGDPEELLRRHTEFFSQLDQRVLNAFLKACDELTDILPEQEQQGLQEAVRKLHKQWKVSQDRTETPCILNEGRSLSV

SEQ ID NO: 11682 - protein, 84 aa, Homo sapiens
RHTEFFSQLDQRVLNAFLKACDELTDILPEQEQQGLQEAVRKLHKQWKVSQDRTETPCILNEGRSLSVLRSKCKRNLEIPGKSL

SEQ ID NO: 11683 - protein, 85 aa, Homo sapiens
VPPDQLEDMAERFHFVSSTSELHLMKMEFLELKYRLLSLLVLAESKLKSWIIKYGRRESVEQLLQNYVSFIENSKFFEQYEVTYQ

SEQ ID NO: 11684 - protein, 85 aa, Homo sapiens
ILKQTAEMYVKADGSVEEAENVMKFMNETTAQWRNLSVEVRSVRSMLEEVISNWDRYGNTVASLQAWLEDAEKMLNQSENAKKDF

SEQ ID NO: 11685 - protein, 85 aa, Homo sapiens
FRNLPHWIQQHTAMNDAGNFLIETCDEMVSRDLKQQLLLLNGRWRELFMEVKQYAQADEMDRMKKEYTDCVVTLSAFATEAHKKL

SEQ ID NO: 11686 - protein, 85 aa, Homo sapiens
SEPLEVSFMNVKLLIQDLEDIEQRVPVMDAQYKIITKTAHLITKESPQEEGKEMFATMSKLKEQLTKVKECYSPLLYESQQLLIP

SEQ ID NO: 11687 - protein, 85 aa, Homo sapiens
MEELEKQMTSFYDSLGKINEIITVLEREAQSSALFKQKHQELLACQENCKKTLTLIEKGSQSVQKFVTLSNVLKHFDQTRLQRQI

SEQ ID NO: 11688 - protein, 85 aa, Homo sapiens
ADIHVAFQSMVKKTGDWKKHVETNSRLMKKFEESRAELEKVLRIAQEGLEEKGDPEELLRRHTEFFSQLDQRVLNAFLKACDELT

SEQ ID NO: 11689 - protein, 85 aa, Homo sapiens
EDEVVRFAKKMDKMVQKKNAAGALDLLKELKNIPMTLELLQEMASDELKEMRKNLTKEAIREHQMAKTGGTQTDLFTCGKCKKKN

SEQ ID NO: 11690 - protein, 84 aa, Homo sapiens
IPMTLELLQEMASDELKEMRKNLTKEAIREHQMAKTGGTQTDLFTCGKCKKKNCTYTQVQTRSADEPMTTFVVCNECGNRWKFC

SEQ ID NO: 11691 - protein, 85 aa, Homo sapiens
FRGGCRYRKRPRVVLDVTEQISRFLLDHGDVAFAPLGKLMLENFKLEGAGSRTKKKTVVSVKKLLQDLGGHQPWGCPWAYLSNRQ

SEQ ID NO: 11692 - protein, 85 aa, Homo sapiens
RRFSILGGPILGTSVASHLAELLHEELVLRWEQLLLDEACTGGALAWVPGRTPQFGQLVYPAGGAQDRLHFQEVVLTPGDNPQFL

SEQ ID NO: 11693 - protein, 85 aa, Homo sapiens
GKPGRIQLQGPVRQVVTCTVQGESKALIYTFLPHWLTCYLTPGPFHPSSALLAVRSDYHCAVWKFGKQWQPTLLQAMQVEKGATG

SEQ ID NO: 11694 - protein, 85 aa, Homo sapiens
ISLSPHLPGELAICSRSGAVCLWSPEDGLRQIYRDPETLVFRDSSSWRWADFTAHPRVLTVGDRTGVKMLDTQGPPGCGLLLFRL

SEQ ID NO: 11695 - protein, 85 aa, Homo sapiens
GAEASCQKGERVLLTQYLGHSSPKCLPPTLHLVCTQFSLYLVDERLPLVPMLKWNHGLPSPLLLARLLPPPRPSCVQPLLLGGQG

SEQ ID NO: 11696 - protein, 85 aa, Homo sapiens
GQLQLLHLAGEGASVPRLAGPPQSLPSRIDSLPAFPLLEPKIQWRLQERLKAPTIGLAAVVPPLPSAPTPGLVLFQLSAAGDVFY

SEQ ID NO: 11697 - protein, 85 aa, Homo sapiens
QQLRPQVDSSLRRDAGPPGDTQPDCHAPTASWTSQDTAGCSQWLKALLKVPLAPPVWTAPTFTHRQMLGSTELRREEEEGQRLGV

SEQ ID NO: 11698 - protein, 85 aa, Homo sapiens
LRKAMARGQLLLQRDLGSLPAAEPPPAPESGLEDKLSERLGEAWAGRGAAWWERQQGRTSEPGRQTRRPKRRTQLSSSFSLSGHV

SEQ ID NO: 11699 - protein, 85 aa, Homo sapiens
DPSEDTSSPHSPEWPPADALPLPPTTPPSQELTPDACAQGVPSEQRQMLRDYMAKLPPQRDTPGCATTPPHSQASSVRATRSQQH

SEQ ID NO: 11700 - protein, 85 aa, Homo sapiens
NFKLEGAGSRTKKKTVVSVKKLLQDLGGHQPWGCPWAYLSNRQRRFSILGGPILGTSVASHLAELLHEELVLRWEQLLLDEACTG

SEQ ID NO: 11701 - protein, 85 aa, Homo sapiens
GALAWVPGRTPQFGQLVYPAGGAQDRLHFQEVVLTPGDNPQFLGKPGRIQLQGPVRQVVTCTVQGESKALIYTFLPHWLTCYLTP

SEQ ID NO: 11702 - protein, 85 aa, Homo sapiens
GPFHPSSALLAVRSDYHCAVWKFGKQWQPTLLQAMQVEKGATGISLSPHLPGELAICSRSGAVCLWSPEDGLRQIYRDPETLVFR

SEQ ID NO: 11703 - protein, 85 aa, Homo sapiens
DSSSWRWADFTAHPRVLTVGDRTGVKMLDTQGPPGCGLLLFRLGAEASCQKGERVLLTQYLGHSSPKCLPPTLHLVCTQFSLYLV

SEQ ID NO: 11704 - protein, 85 aa, Homo sapiens
DERLPLVPMLKWNHGLPSPLLLARLLPPPRPSCVQPLLLGGQGGQLQLLHLAGEGASVPRLAGPPQSLPSRIDSLPAFPLLEPKI

SEQ ID NO: 11705 - protein, 85 aa, Homo sapiens
QWRLQERLKAPTIGLAAVVPPLPSAPTPGLVLFQLSAAGDVFYQQLRPQVDSSLRRDAGPPGDTQPDCHAPTASWTSQDTAGCSQ

SEQ ID NO: 11706 - protein, 85 aa, Homo sapiens
WLKALLKVPLAPPVWTAPTFTHRQMLGSTELRREEEEGQRLGVLRKAMARGQLLLQRDLGSLPAAEPPPAPESGLEDKLSERLGE

SEQ ID NO: 11707 - protein, 85 aa, Homo sapiens
AWAGRGAAWWERQQGRTSEPGRQTRRPKRRTQLSSSFSLSGHVDPSEDTSSPHSPEWPPADALPLPPTTPPSQELTPDACAQGVP

SEQ ID NO: 11708 - protein, 84 aa, Homo sapiens
GVQSLSKYKPSSSFMVSKVKVQDLDCYTTVAQLCPFEKPATHCPRIHCPAHCKDEPSYWAPVFGTNIYADVSRMHFQQLSRKAC

SEQ ID NO: 11709 - protein, 85 aa, Homo sapiens
APAFEPGRQSDLLVKLNRLMERCLRNSKCIDTESLCVVAGEKYTPEERDPVPLSIHHMPICVSFAFFQQGTYLLVDPNEREERVM

SEQ ID NO: 11710 - protein, 85 aa, Homo sapiens
YTPEERDPVPLSIHHMPICVSFAFFQQGTYLLVDPNEREERVMDGLLVIAMNKHREICTIQSSGGIMLLKDQVLRCSKIAGVKVA

SEQ ID NO: 11711 - protein, 44 aa, Homo sapiens
ISLIAAVPVLYWLSSMMMRTYLSQMKKMMRMKMTIRRTKNTRRF

SEQ ID NO: 11712 - protein, 19 aa, Homo sapiens
KKSTKLKEDAGEHGMMIMC

SEQ ID NO: 11713 - protein, 26 aa, Homo sapiens
NYHSPISDQPSFTMYKNCFNCPVMAM

SEQ ID NO: 11714 - protein, 13 aa, Homo sapiens
RRMQTLLSCATGN

SEQ ID NO: 11715 - protein, 6 aa, Homo sapiens
FCVFYI

SEQ ID NO: 11716 - protein, 7 aa, Homo sapiens
HLAPQEQ

SEQ ID NO: 11717 - protein, 37 aa, Homo sapiens
SFMLWWQQNSRELTWELGFVMIIFQMMNLVTLILEVD

SEQ ID NO: 11718 - protein, 25 aa, Homo sapiens
TIDLWTYLFLNLFLNLCVWVTLKAI

SEQ ID NO: 11719 - protein, 6 aa, Homo sapiens
LGKTLN

SEQ ID NO: 11720 - protein, 8 aa, Homo sapiens
SSQVVKMR

SEQ ID NO: 11721 - protein, 8 aa, Homo sapiens
IHVTALVS

SEQ ID NO: 11722 - protein, 14 aa, Homo sapiens
DAHPCNVELAPALM

SEQ ID NO: 11723 - protein, 23 aa, Homo sapiens
KYHPQGPLIQSSWKKSNVLRHLD

SEQ ID NO: 11724 - protein, 4 aa, Homo sapiens
CTEK

SEQ ID NO: 11725 - protein, 15 aa, Homo sapiens
TRGPFLLFKVVIFLI

SEQ ID NO: 11726 - protein, 22 aa, Homo sapiens
YYSRLRNHWHWQVGLCQTGVNN

SEQ ID NO: 11727 - protein, 7 aa, Homo sapiens
KFHVASH

SEQ ID NO: 11728 - protein, 68 aa, Homo sapiens
LLDIMCRGHVDCSQHHFHRIVMSLKGSRNCFISLEFSWPNAFKTIDLWTYLFLNLFLNLCVWVTLKAI

SEQ ID NO: 11729 - protein, 16 aa, Homo sapiens
KVSLKLLQKKVMIHSR

SEQ ID NO: 11730 - protein, 6 aa, Homo sapiens
TQNYRN

SEQ ID NO: 11731 - protein, 8 aa, Homo sapiens
IKFFQWRN

SEQ ID NO: 11732 - protein, 85 aa, Homo sapiens
AYFVRERDTTDFQESFVTSGVFSVTELIQVSRTPVVTGTGPNFSLGELQGHLAYDLNPASTGLRRTLPSTSSSGSKRHKSGSMEE

SEQ ID NO: 11733 - protein, 85 aa, Homo sapiens
DVDTSPGGDYYTSPSSPTSSSRNWTEDMEGGISSPVKKTEMDKSPFNSPSPQDSPRLSSFTQHHRPVIAVHSGIARSPHPSSALH

SEQ ID NO: 11734 - protein, 85 aa, Homo sapiens
FKGIPLESTDGERLVKAAQCGHPVLCVQPHHIGVAVKELDLYLAYFVRERDTTDFQESFVTSGVFSVTELIQVSRTPVVTGTGPN

SEQ ID NO: 11735 - protein, 85 aa, Homo sapiens
FSLGELQGHLAYDLNPASTGLRRTLPSTSSSGSKRHKSGSMEEDVDTSPGGDYYTSPSSPTSSSRNWTEDMEGGISSPVKKTEMD

SEQ ID NO: 11736 - protein, 85 aa, Homo sapiens
KSPFNSPSPQDSPRLSSFTQHHRPVIAVHSGIARSPHPSSALHFPTTSILPQTASTYFPHTAIRYPPHLNPQDPLKDLVSLACDP

SEQ ID NO: 11737 - protein, 85 aa, Homo sapiens
PGHRATAPQTQHVSPMRQVEPPAKKPATPAEDDEDDDIDLFGSDNEEEDKEAAQLREERLRQYAEKKAKKPALVAKSSILLDVKP

SEQ ID NO: 11738 - protein, 85 aa, Homo sapiens
GKPGRIQLQGPVRQVVTCTVQGETLLAVRSDYHCAVWKFGKQWQPTLLQAMQVEKGATGISLSPHLPGELAICSRSGAVCLWSPE

SEQ ID NO: 11739 - protein, 85 aa, Homo sapiens
DGLRQIYRDPETLVFRDSSSWRWADFTAHPRVLTVGDRTGVKMLDTQGPPGCGLLLFRLGAEASCQKGERVLLTQYLGHSSPKCL

SEQ ID NO: 11740 - protein, 85 aa, Homo sapiens
PPTLHLVCTQFSLYLVDERLPLVPMLKWNHGLPSPLLLARLLPPPRPSCVQPLLLGGQGGQLQLLHLAGEGASVPRLAGPPQSLP

SEQ ID NO: 11741 - protein, 85 aa, Homo sapiens
SRIDSLPAFPLLEPKIQWRLQERLKAPTIGLAAVVPPLPSAPTPGLVLFQLSAAGDVFYQQLRPQVDSSLRRDAGPPGDTQPDCH

SEQ ID NO: 11742 - protein, 85 aa, Homo sapiens
APTASWTSQDTAGCSQWLKALLKVPLAPPVWTAPTFTHRQMLGSTELRREEEEGQRLGVLRKAMARGQLLLQRDLGSLPAAEPPP

SEQ ID NO: 11743 - protein, 85 aa, Homo sapiens
APESGLEDKLSERLGEAWAGRGAAWWERQQGRTSEPGRQTRRPKRRTQLSSSFSLSGHVDPSEDTSSPHSPEWPPADALPLPPTT

SEQ ID NO: 11744 - protein, 85 aa, Homo sapiens
GALAWVPGRTPQFGQLVYPAGGAQDRLHFQEVVLTPGDNPQFLGKPGRIQLQGPVRQVVTCTVQGETLLAVRSDYHCAVWKFGKQ

SEQ ID NO: 11745 - protein, 85 aa, Homo sapiens
WQPTLLQAMQVEKGATGISLSPHLPGELAICSRSGAVCLWSPEDGLRQIYRDPETLVFRDSSSWRWADFTAHPRVLTVGDRTGVK

SEQ ID NO: 11746 - protein, 85 aa, Homo sapiens
MLDTQGPPGCGLLLFRLGAEASCQKGERVLLTQYLGHSSPKCLPPTLHLVCTQFSLYLVDERLPLVPMLKWNHGLPSPLLLARLL

SEQ ID NO: 11747 - protein, 85 aa, Homo sapiens
PPPRPSCVQPLLLGGQGGQLQLLHLAGEGASVPRLAGPPQSLPSRIDSLPAFPLLEPKIQWRLQERLKAPTIGLAAVVPPLPSAP

SEQ ID NO: 11748 - protein, 85 aa, Homo sapiens
TPGLVLFQLSAAGDVFYQQLRPQVDSSLRRDAGPPGDTQPDCHAPTASWTSQDTAGCSQWLKALLKVPLAPPVWTAPTFTHRQML

SEQ ID NO: 11749 - protein, 85 aa, Homo sapiens
GSTELRREEEEGQRLGVLRKAMARGQLLLQRDLGSLPAAEPPPAPESGLEDKLSERLGEAWAGRGAAWWERQQGRTSEPGRQTRR

SEQ ID NO: 11750 - protein, 85 aa, Homo sapiens
PKRRTQLSSSFSLSGHVDPSEDTSSPHSPEWPPADALPLPPTTPPSQELTPDACAQGVPSEQRQMLRDYMAKLPPQRDTPGCATT

SEQ ID NO: 11751 - protein, 84 aa, Homo sapiens
KYQHNESHSRVRRAIPREDKEEILMLHNKLRGQVQPQASNMEYMTWDDELEKSAAAWASQCIWEHGPTSLLVSIGQNLGAHWGR

SEQ ID NO: 11752 - protein, 85 aa, Homo sapiens
GDKATKESYAIQYLQKSLEADPNSGQSWYFLGSVLYQQQNQPMDALQAYICAVQLDHGHAAAWMDLGTLYESCNQPQDAIKCYLN

SEQ ID NO: 11753 - protein, 85 aa, Homo sapiens
AARSKRCSNTSTLAARIKFLQAQLCNLPQSSLQNKTKLLPSIEEAWSLPIPAELTSRQGAMNTAQQQSLSLHMITSSQVEGLSSP

SEQ ID NO: 11754 - protein, 85 aa, Homo sapiens
AKKKRTSSPTKNGSDNWNGGQSLSHHPVQQVYSLCLTPQKLQHLEQLRANRDNLNPAQKHQLEQLESQFVLMQQMRHKEVAQVRT

SEQ ID NO: 11755 - protein, 85 aa, Homo sapiens
TGIHNGAITDSSLPTNSVSNRQPHGALTRVSSVSQPGVRPACVEKLLSSGAFSAGCIPCGTSKILGSTDTILLGSNCIAGSESNG

SEQ ID NO: 11756 - protein, 85 aa, Homo sapiens
NVPYLQQNTHTLPHNHTDLNSSTEEPWRKQLSNSAQGLHKSQSSCLSGPNEEQPLFSTGSAQYHQATSTGIKKANEHLTLPSNSV

SEQ ID NO: 11757 - protein, 85 aa, Homo sapiens
PQGDADSHLSCHTATSGGQQGIMFTKESKPSKNRSLVPETSRHTGDTSNGCADVKGLSNHVHQLIADAVSSPNHGDSPNLLIADN

SEQ ID NO: 11758 - protein, 85 aa, Homo sapiens
PQLSALLIGKANGNVGTGTCDKVNNIHPAVHTKTDHSVASSPSSAISTATPSPKSTEQRSINSVTSLNSPHSGLHTVNGEGLGKS

SEQ ID NO: 11759 - protein, 85 aa, Homo sapiens
QSSTKVDLPLASHRSTSQILPSMSVSICPSSTEVLKACRNPGKNGLSNSCILLDKCPPPRPPTSPYPPLPKDKLNPPTPSIYLEN

SEQ ID NO: 11760 - protein, 85 aa, Homo sapiens
KRDAFFPPLHQFCTNPKNPVTVIRGLAGALKLDLGLFSTKTLVEANNEHMVEVRTQLLQPADENWDPTGTKKIWRCESNRSHTTI

SEQ ID NO: 11761 - protein, 85 aa, Homo sapiens
AKYAQYQASSFQESLREENEKRTQHKDHSDNESTSSENSGRRRKGPFKTIKFGTNIDLSDNKKWKLQLHELTKLPAFARVVSAGN

SEQ ID NO: 11762 - protein, 85 aa, Homo sapiens
LLTHVGHTILGMNTVQLYMKVPGSRTPGHQENNNFCSVNINIGPGDCEWFVVPEDYWGVLNDFCEKNNLNFLMSSWWPNLEDLYE

SEQ ID NO: 11763 - protein, 85 aa, Homo sapiens
ANVPVYRFIQRPGDLVWINAGTVHWVQAVGWCNNIAWNVGPLTACQYKLAVERYEWNKLKSVKSPVPMVHLSWNMARNIKVSDPK

SEQ ID NO: 11764 - protein, 85 aa, Homo sapiens
LFEMIKYCLLKILKQYQTLREALVAAGKEVIWHGRTNDEPAHYCSICEVEVFNLLFVTNESNTQKTYIVHCHDCARKTSKSLENF

SEQ ID NO: 11765 - protein, 85 aa, Homo sapiens
TQRKYHSAKEAYEQLLQTENLPAQVKATVLQQLGWMHHNMDLVGDKATKESYAIQYLQKSLEADPNSGQSWYFLGSVLYQQQNQP

SEQ ID NO: 11766 - protein, 85 aa, Homo sapiens
MDALQAYICAVQLDHGHAAAWMDLGTLYESCNQPQDAIKCYLNAARSKRCSNTSTLAARIKFLQAQLCNLPQSSLQNKTKLLPSI

SEQ ID NO: 11767 - protein, 85 aa, Homo sapiens
EEAWSLPIPAELTSRQGAMNTAQQQSLSLHMITSSQVEGLSSPAKKKRTSSPTKNGSDNWNGGQSLSHHPVQQVYSLCLTPQKLQ

SEQ ID NO: 11768 - protein, 85 aa, Homo sapiens
AAAVPDEAVARDVQRLLVQFQDEGGQLLGSPFDVPVDITPDRLQLVCNALLAQVPGQWLWRHHRALLGSQHRDTTFHMQGTQTLG

SEQ ID NO: 11769 - protein, 84 aa, Homo sapiens
AVPDEAVARDVQRLLVQFQDEGGQLLGSPFDVPVDITPDRLQLVCNALLAQVPGQWLWRHHRALLGSQHRDTTFHMQGTQTLGP

SEQ ID NO: 11770 - protein, 85 aa, Homo sapiens
PEKIFHVIVAPCYDKKLEALQESLPPALHGSRGADCVLTSGEIAQIMEQGDLSVRDAAVDTLFGDLKEDKVTRHDGASSDGHLAH

SEQ ID NO: 11771 - protein, 85 aa, Homo sapiens
VIVAPCYDKKLEALQESLPPALHGSRGADCVLTSGEIAQIMEQGDLSVRDAAVDTLFGDLKEDKVTRHDGASSDGHLAHIFRHAA

SEQ ID NO: 11772 - protein, 85 aa, Homo sapiens; identical to SEQ ID NO: 11564

SEQ ID NO: 11773 - protein, 85 aa, Homo sapiens
SNRNNNKLPSNLPQLQNLIKRDPPAYIEEFLQQYNHYKSNVEIFKLQPNKPSKELAELVMFMAQERKRATSEEPLLCYRLVTATQ

SEQ ID NO: 11774 - protein, 84 aa, Homo sapiens
NNNKLPSNLPQLQNLIKRDPPAYIEEFLQQYNHYKSNVEIFKLQPNKPSKELAELVMFMAQERKRATSEEPLLCYRLVTATQST

SEQ ID NO: 11775 - protein, 85 aa, Homo sapiens
NHIVQAFANSGNAIKPVSFIRDLKKIARHFRFGNQEDAHEFLRYTIDAMQKACLNGCAKCVLPHPPSQGFGHLFYMVAAEHSYGN

SEQ ID NO: 11776 - protein, 84 aa, Homo sapiens
RFGNQEDAHEFLRYTIDAMQKACLNGCAKCVLPHPPSQGFGHLFYMVAAEHSYGNSQPGTFLPRLPLGRRGRICLWVLKLLEPK

SEQ ID NO: 11777 - protein, 9 aa, Homo sapiens
TSHSLPPSP

SEQ ID NO: 11778 - protein, 84 aa, Homo sapiens
QHVSERSQALQQTSATDISSAGSISGDIIDELMSSDGGKLKDTTGHQKQVGQGLITCLIFLLPLNCLYFCMSFYPNRRSLPLVK

SEQ ID NO: 11779 - protein, 84 aa, Homo sapiens
RTCCGCRFPLLLALLQLALGIAVTVVGFLMASISSSLLVRDTPFWAGIIVCLVAYLGLFMLCVSYQVDERTCIQFSMKIHCHDF

SEQ ID NO: 11780 - protein, 85 aa, Homo sapiens
PRTCCGCRFPLLLALLQLALGIAVTVVGFLMASISSSLLVRDTPFWAGIIVCLVAYLGLFMLCVSYQVDERTCIQFSMKIHCHDF

SEQ ID NO: 11781 - protein, 84 aa, Homo sapiens
PSPSSLSLPPSTGFPLQASGVPSPYLSSLASSRYPPFPSDYLALQLPEPSPLRPKREKRPRLPRKLKTLVVREQTERWSELGRE

SEQ ID NO: 11782 - protein, 34 aa, Homo sapiens
RIRNKENGERKRRTVHINLLKAPCQKLNQTVRIV

SEQ ID NO: 11783 - protein, 84 aa, Homo sapiens
HKSSESSMSETESDSKDSLKKKKKSKDGTEKEKDIKGLSKKRKMYSEDKPLSSESLSESEYIEEVRAKKKKSSEEREKATASIS

SEQ ID NO: 11784 - protein, 4 aa, Homo sapiens
GKKF

SEQ ID NO: 11785 - protein, 84 aa, Homo sapiens
RVAASTFSSDSKKVYASSGDGEVYVWDVNSRKCLNRFVDEGSLYGLSIATSRNGQYVACGLKLGKLLVYISLPPFANWSLGGKF

SEQ ID NO: 11786 - protein, 9 aa, Homo sapiens
SPQMGPSCS

SEQ ID NO: 11787 - protein, 85 aa, Homo sapiens
MFVRPAQNHLEQNLVAYQYGHHVYYTTIKNVEPKQELKVWYAASYAEFVNQKIHDISEEERKVLREQEKNWPCYECNRRFISSEQ

SEQ ID NO: 11788 - protein, 85 aa, Homo sapiens
MQQHLNSHDEKLDVFSRTRGRGRGRGKRRFGPGRRPGRPPKFIRLEITSENGEKSDDGTQDLLHFPTKEQFDEAEPATLNGLDQP

SEQ ID NO: 11789 - protein, 85 aa, Homo sapiens
EQTTIPIPQLPQETQSSLEHEPETHTLHLQPQHEESVVPTQSTLTADDMRRAKRIRNAALQHLFIRKSFRPFKCLQCGKAFREKD

SEQ ID NO: 11790 - protein, 85 aa, Homo sapiens
KLDQHLRFHGREGNCPLTCDLCNKGFISSTSLESHMKLHSDQKTYSCIFCPESFDRLDLLKDHVAIHINDGYFTCPTCKKRFPDF

SEQ ID NO: 11791 - protein, 85 aa, Homo sapiens
IQVKKHVRSFHSEKIYQCTECDKAFCRPDKLRLHMLRHSDRKDFLCSTCGKQFKRKDKLREHMQRMHNPEREAKKADRISRSKTF

SEQ ID NO: 11792 - protein, 85 aa, Homo sapiens
KPRITSTDYDSFTFKCRLCMMGFRRRGMLVNHLSKRHPDMKIEEVPELTLPIIKPNRDYFCQYCDKVYKSASKRKAHILKNHPGA

SEQ ID NO: 11793 - protein, 85 aa, Homo sapiens
ELPPSIRKLRPAGPGEPDPMLSTHTQLTGTIATPPVCCPHCSKQYSSKTKMVQHIRKKHPEFAQLSNTIHTPLTTAVISATPAVL

SEQ ID NO: 11794 - protein, 85 aa, Homo sapiens
TTDSATGETVVTTDLLTQAMTELSQTLTTDYRTPQGDYQRIQYIPVSQSASGLQQPQHIQLQVVQVASATSPHQSQQSTVDVGQL

SEQ ID NO: 11795 - protein, 85 aa, Homo sapiens
HDPQPYPQHAIQVQHIQVSEPTASAPSSAQVSGQPLSPSAQQAQQGLSPSHIQGSSSTQGQALQQQQQQQQNSSVQHTYLPSAWN

SEQ ID NO: 11796 - protein, 85 aa, Homo sapiens
SFRGYSSEIQMMTLPPGQFVITDSGVATPVTTGQVKAVTSGHYVLSESQSELEEKQTSALSGGVQVEPPAHSDSLDPQTNSQQQT

SEQ ID NO: 11797 - protein, 85 aa, Homo sapiens
ASYAEFVNQKIHDISEEERKVLREQEKNWPCYECNRRFISSEQLQQHLNSHDEKLDVFSRTRGRGRGRGKRRFGPGRRPGRPPKF

SEQ ID NO: 11798 - protein, 85 aa, Homo sapiens
IRLEITSENGEKSDDGTQDLLHFPTKEQFDEAEPATLNGLDQPEQTTIPIPQLPQETQSSLEHEPETHTLHLQPQHEESVVPTQS

SEQ ID NO: 11799 - protein, 85 aa, Homo sapiens
TLTADDMRRAKRIRNAALQHLFIRKSFRPFKCLQCGKAFREKDKLDQHLRFHGREGNCPLTCDLCNKGFISSTSLESHMKLHSDQ

SEQ ID NO: 11800 - protein, 85 aa, Homo sapiens
KTYSCIFCPESFDRLDLLKDHVAIHINDGYFTCPTCKKRFPDFIQVKKHVRSFHSEKIYQCTECDKAFCRPDKLRLHMLRHSDRK

SEQ ID NO: 11801 - protein, 85 aa, Homo sapiens
DFLCSTCGKQFKRKDKLREHMQRMHNPEREAKKADRISRSKTFKPRITSTDYDSFTFKCRLCMMGFRRRGMLVNHLSKRHPDMKI

SEQ ID NO: 11802 - protein, 85 aa, Homo sapiens
EEVPELTLPIIKPNRDYFCQYCDKVYKSASKRKAHILKNHPGAELPPSIRKLRPAGPGEPDPMLSTHTQLTGTIATPPVCCPHCS

SEQ ID NO: 11803 - protein, 85 aa, Homo sapiens
KQYSSKTKMVQHIRKKHPEFAQLSNTIHTPLTTAVISATPAVLTTDSATGETVVTTDLLTQAMTELSQTLTTDYRTPQGDYQRIQ

SEQ ID NO: 11804 - protein, 85 aa, Homo sapiens
YIPVSQSASGLQQPQHIQLQVVQVASATSPHQSQQSTVDVGQLHDPQPYPQHAIQVQHIQVSEPTASAPSSAQVSGQPLSPSAQQ

SEQ ID NO: 11805 - protein, 85 aa, Homo sapiens
AQQGLSPSHIQGSSSTQGQALQQQQQQQQNSSVQHTYLPSAWNSFRGYSSEIQMMTLPPGQFVITDSGVATPVTTGQVKAVTSGH

SEQ ID NO: 11806 - protein, 85 aa, Homo sapiens
ELTSRQGAMNTAQQAYRAHDPNTEHVLNHSQTPILQQSLSLHMITSSQVEGLSSPAKKKRTSSPTKNGSDNWNGGQSLSHHPVQQ

SEQ ID NO: 11807 - protein, 85 aa, Homo sapiens
VYSLCLTPQKLQHLEQLRANRDNLNPAQKHQLEQLESQFVLMQQMRHKEVAQVRTTGIHNGAITDSSLPTNSVSNRQPHGALTRV

SEQ ID NO: 11808 - protein, 85 aa, Homo sapiens
SSVSQPGVRPACVEKLLSSGAFSAGCIPCGTSKILGSTDTILLGSNCIAGSESNGNVPYLQQNTHTLPHNHTDLNSSTEEPWRKQ

SEQ ID NO: 11809 - protein, 85 aa, Homo sapiens
LSNSAQGLHKSQSSCLSGPNEEQPLFSTGSAQYHQATSTGIKKANEHLTLPSNSVPQGDADSHLSCHTATSGGQQGIMFTKESKP

SEQ ID NO: 11810 - protein, 85 aa, Homo sapiens
SKNRSLVPETSRHTGDTSNGCADVKGLSNHVHQLIADAVSSPNHGDSPNLLIADNPQLSALLIGKANGNVGTGTCDKVNNIHPAV

SEQ ID NO: 11811 - protein, 85 aa, Homo sapiens
HTKTDHSVASSPSSAISTATPSPKSTEQRSINSVTSLNSPHSGLHTVNGEGLGKSQSSTKVDLPLASHRSTSQILPSMSVSICPS

SEQ ID NO: 11812 - protein, 85 aa, Homo sapiens
STEVLKACRNPGKNGLSNSCILLDKCPPPRPPTSPYPPLPKDKLNPPTPSIYLENKRDAFFPPLHQFCTNPKNPVTVIRGLAGAL

SEQ ID NO: 11813 - protein, 85 aa, Homo sapiens
KLDLGLFSTKTLVEANNEHMVEVRTQLLQPADENWDPTGTKKIWRCESNRSHTTIAKYAQYQASSFQESLREENEKRTQHKDHSD

SEQ ID NO: 11814 - protein, 85 aa, Homo sapiens
NESTSSENSGRRRKGPFKTIKFGTNIDLSDNKKWKLQLHELTKLPAFARVVSAGNLLTHVGHTILGMNTVQLYMKVPGSRTPGHQ

SEQ ID NO: 11815 - protein, 85 aa, Homo sapiens
ENNNFCSVNINIGPGDCEWFVVPEDYWGVLNDFCEKNNLNFLMSSWWPNLEDLYEANVPVYRFIQRPGDLVWINAGTVHWVQAVG

SEQ ID NO: 11816 - protein, 85 aa, Homo sapiens
WCNNIAWNVGPLTACQYKLAVERYEWNKLKSVKSPVPMVHLSWNMARNIKVSDPKLFEMIKYCLLKILKQYQTLREALVAAGKEV

SEQ ID NO: 11817 - protein, 85 aa, Homo sapiens
TSTLAARIKFLQAQLCNLPQSSLQNKTKLLPSIEEAWSLPIPAELTSRQGAMNTAQQAYRAHDPNTEHVLNHSQTPILQQSLSLH

SEQ ID NO: 11818 - protein, 85 aa, Homo sapiens
MITSSQVEGLSSPAKKKRTSSPTKNGSDNWNGGQSLSHHPVQQVYSLCLTPQKLQHLEQLRANRDNLNPAQKHQLEQLESQFVLM

SEQ ID NO: 11819 - protein, 85 aa, Homo sapiens
QQMRHKEVAQVRTTGIHNGAITDSSLPTNSVSNRQPHGALTRVSSVSQPGVRPACVEKLLSSGAFSAGCIPCGTSKILGSTDTIL

SEQ ID NO: 11820 - protein, 85 aa, Homo sapiens
LGSNCIAGSESNGNVPYLQQNTHTLPHNHTDLNSSTEEPWRKQLSNSAQGLHKSQSSCLSGPNEEQPLFSTGSAQYHQATSTGIK

SEQ ID NO: 11821 - protein, 85 aa, Homo sapiens
KANEHLTLPSNSVPQGDADSHLSCHTATSGGQQGIMFTKESKPSKNRSLVPETSRHTGDTSNGCADVKGLSNHVHQLIADAVSSP

SEQ ID NO: 11822 - protein, 85 aa, Homo sapiens
NHGDSPNLLIADNPQLSALLIGKANGNVGTGTCDKVNNIHPAVHTKTDHSVASSPSSAISTATPSPKSTEQRSINSVTSLNSPHS

SEQ ID NO: 11823 - protein, 85 aa, Homo sapiens
GLHTVNGEGLGKSQSSTKVDLPLASHRSTSQILPSMSVSICPSSTEVLKACRNPGKNGLSNSCILLDKCPPPRPPTSPYPPLPKD

SEQ ID NO: 11824 - protein, 85 aa, Homo sapiens
KLNPPTPSIYLENKRDAFFPPLHQFCTNPKNPVTVIRGLAGALKLDLGLFSTKTLVEANNEHMVEVRTQLLQPADENWDPTGTKK

SEQ ID NO: 11825 - protein, 85 aa, Homo sapiens
IWRCESNRSHTTIAKYAQYQASSFQESLREENEKRTQHKDHSDNESTSSENSGRRRKGPFKTIKFGTNIDLSDNKKWKLQLHELT

SEQ ID NO: 11826 - protein, 85 aa, Homo sapiens
KLPAFARVVSAGNLLTHVGHTILGMNTVQLYMKVPGSRTPGHQENNNFCSVNINIGPGDCEWFVVPEDYWGVLNDFCEKNNLNFL

SEQ ID NO: 11827 - protein, 85 aa, Homo sapiens
MSSWWPNLEDLYEANVPVYRFIQRPGDLVWINAGTVHWVQAVGWCNNIAWNVGPLTACQYKLAVERYEWNKLKSVKSPVPMVHLS

SEQ ID NO: 11828 - protein, 85 aa, Homo sapiens
WNMARNIKVSDPKLFEMIKYCLLKILKQYQTLREALVAAGKEVIWHGRTNDEPAHYCSICEVEVFNLLFVTNESNTQKTYIVHCH

SEQ ID NO: 11829 - protein, 85 aa, Homo sapiens
ATAAQGPLSLLWGWLWSERFWLPENVSWADLEGPADGYGYPRGRHILSVFPLAAGIFFVRLLFERLECSGAISLQPSTPWFKRFS

SEQ ID NO: 11830 - protein, 84 aa, Homo sapiens
SLLWGWLWSERFWLPENVSWADLEGPADGYGYPRGRHILSVFPLAAGIFFVRLLFERLECSGAISLQPSTPWFKRFSCLSLPSS

SEQ ID NO: 11831 - protein, 44 aa, Homo sapiens
VGKDPRNLQCQMLQFISRQVVNQFPFLKNLKSWIRRHSAFVKKE

SEQ ID NO: 11832 - protein, 84 aa, Homo sapiens
PISEESEELDQKTFSICKERMRPVKAALKQLDRPEKGLSEREQLEHTRQCLIKIGDHITECLKEYTNPEQIKQWRNKTVIKTAT

SEQ ID NO: 11833 - protein, 84 aa, Homo sapiens
TIQLYEMYFKDPQGRVIKGSYKFHAIITTFEMILTDCPELRNIPWRCVVIDEAHRLKNRNCKLLEGLKMMDLVSDHIGDCTEPE

SEQ ID NO: 11834 - protein, 85 aa, Homo sapiens
EANPAGSGAGGGGSSGIGGEDGVHFQSYPFDFLEFLNHQRFEPMELYGEHAKAVAALPCAPGPPPQPPPQPPPPQYDYPPQSTFK

SEQ ID NO: 11835 - protein, 85 aa, Homo sapiens
PKAEVPSSSSSSSSSSSSSSSSSSSSSSSSSQAKKPDPPLPPAFGAPPPPLFDAAFPTPQWGIVDLSGHQHLFGNLKRGGPASGP

SEQ ID NO: 11836 - protein, 85 aa, Homo sapiens
GVTPGLGAPAGAPGPLPAPSQTPPGPPAAAACDPTKDDKGYFRRLKYLMERRFPCGVCQKSFKQSSHLVQHMLVHSGERPYECGV

SEQ ID NO: 11837 - protein, 85 aa, Homo sapiens
CGRTYNHVSSLIRHRRCHKDVPPAAGGPPQPGPHLPPLGLPAPAASAATAAAPSTVSSGPPATPVAPAPSADGSAAPAGVGVPPP

SEQ ID NO: 11838 - protein, 85 aa, Homo sapiens
ATGGGDGPFACPLCWKVFKKPSHLHQHQIIHTGEKPFSCSVCSKSFNRRESLKRHVKTHSADLLRLPCGICGKAFRDASYLLKHQ

SEQ ID NO: 11839 - protein, 85 aa, Homo sapiens
AAHAGAGAGGPRPVYPCDLCGKSYSAPQSLLRHKAAHAPPAAAAEAPKDGAASAPQPPPTFPPGPYLLPPDPPTTDSEKAAAAAA

SEQ ID NO: 11840 - protein, 85 aa, Homo sapiens
AVVYGAVPVPLLGAHPLLLGGAGTSGAGGSGASVPGKTFCCGICGRGFGRRETLKRHERIHTGEKPHQCPVCGKRFRESFHLSKH

SEQ ID NO: 11841 - protein, 85 aa, Homo sapiens
HVVHTRERPYKCELCGKVFGYPQSLTRHRQVHRLQLPCALAGAAGLPSTQGTPGACGPGASGTSAGPTDGLSYACSDCGEHFPDL

SEQ ID NO: 11842 - protein, 85 aa, Homo sapiens
FHVMSHKEVHMAEKPYGCDACGKTFGFIENLMWHKLVHQAAPERLLPPAPGGLQPPDGSSGTDAASVLDNGLAGEVGAAVAALAG

SEQ ID NO: 11843 - protein, 85 aa, Homo sapiens
VSGGEDAGGAAVAGAGGGASSGPERFSCATCGQSFKHFLGLVTHKYVHLVRRTLGCGLCGQSFAGAYDLLLHRRSHRQKRGFRCP

SEQ ID NO: 11844 - protein, 85 aa, Homo sapiens
VCGKRFWEAALLMRHQRCHTEQRPYRCGVCGRGFLRSWYLRQHRVVHTGERAFKCGVCAKRFAQSSSLAEHRRLHAVARPQRCSA

SEQ ID NO: 11845 - protein, 85 aa, Homo sapiens
CGKTFRYRSNLLEHQRLHLGERAYRCEHCGKGFFYLSSVLRHQRAHEPPRPELRCPACLKAFKDPGYFRKHLAAHQGGRPFRCSS

SEQ ID NO: 11846 - protein, 84 aa, Homo sapiens
MRHQRAHEPPRPELRCPACLKAFKDPGYFRKHLAAHQGGRPFRCSSCGEGFANTYGLKKHRLAHKAENLGGPGAGAGTLAGKDA

SEQ ID NO: 11847 - protein, 85 aa, Homo sapiens
PMELYGEHAKAVAALPCAPGPPPQPPPQPPPPQYDYPPQSTFKPKAEVPSSSSSSSSSSSSSSSSSSSSSSSSSQAKKPDPPLPP

SEQ ID NO: 11848 - protein, 85 aa, Homo sapiens
AFGAPPPPLFDAAFPTPQWGIVDLSGHQHLFGNLKRGGPASGPGVTPGLGAPAGAPGPLPAPSQTPPGPPAAAACDPTKDDKGYF

SEQ ID NO: 11849 - protein, 85 aa, Homo sapiens
RRLKYLMERRFPCGVCQKSFKQSSHLVQHMLVHSGERPYECGVCGRTYNHVSSLIRHRRCHKDVPPAAGGPPQPGPHLPPLGLPA

SEQ ID NO: 11850 - protein, 85 aa, Homo sapiens
PAASAATAAAPSTVSSGPPATPVAPAPSADGSAAPAGVGVPPPATGGGDGPFACPLCWKVFKKPSHLHQHQIIHTGEKPFSCSVC

SEQ ID NO: 11851 - protein, 85 aa, Homo sapiens
SKSFNRRESLKRHVKTHSADLLRLPCGICGKAFRDASYLLKHQAAHAGAGAGGPRPVYPCDLCGKSYSAPQSLLRHKAAHAPPAA

SEQ ID NO: 11852 - protein, 85 aa, Homo sapiens
AAEAPKDGAASAPQPPPTFPPGPYLLPPDPPTTDSEKAAAAAAAVVYGAVPVPLLGAHPLLLGGAGTSGAGGSGASVPGKTFCCG

SEQ ID NO: 11853 - protein, 85 aa, Homo sapiens
ICGRGFGRRETLKRHERIHTGEKPHQCPVCGKRFRESFHLSKHHVVHTRERPYKCELCGKVFGYPQSLTRHRQVHRLQLPCALAG

SEQ ID NO: 11854 - protein, 85 aa, Homo sapiens
AAGLPSTQGTPGACGPGASGTSAGPTDGLSYACSDCGEHFPDLFHVMSHKEVHMAEKPYGCDACGKTFGFIENLMWHKLVHQAAP

SEQ ID NO: 11855 - protein, 85 aa, Homo sapiens
ERLLPPAPGGLQPPDGSSGTDAASVLDNGLAGEVGAAVAALAGVSGGEDAGGAAVAGAGGGASSGPERFSCATCGQSFKHFLGLV

SEQ ID NO: 11856 - protein, 85 aa, Homo sapiens
THKYVHLVRRTLGCGLCGQSFAGAYDLLLHRRSHRQKRGFRCPVCGKRFWEAALLMRHQRCHTEQRPYRCGVCGRGFLRSWYLRQ

SEQ ID NO: 11857 - protein, 85 aa, Homo sapiens
HRVVHTGERAFKCGVCAKRFAQSSSLAEHRRLHAVARPQRCSACGKTFRYRSNLLEHQRLHLGERAYRCEHCGKGFFYLSSVLRH

SEQ ID NO: 11858 - protein, 21 aa, Homo sapiens
SRKTGSPRGQPGGLIWTLLIQ

SEQ ID NO: 11859 - protein, 85 aa, Homo sapiens
RITEVQQKRWKVETNSRLDSVLLLSSMNLPGGELRRRSAEDELAMRGFLQEGDLISGVLVQVSPSLVKRQKTHFHDLPCGASVIL

SEQ ID NO: 11860 - protein, 85 aa, Homo sapiens
GNNGFIWIYPTPEHKEEEAGGFIANLEPVSLADREVISRLRNCIISLVTQRMMLYDTSILYCYEASLPHQIKDILKPEIMEEIVM

SEQ ID NO: 11861 - protein, 85 aa, Homo sapiens
LAMRGFLQEGDLISGVLVQVSPSLVKRQKTHFHDLPCGASVILGNNGFIWIYPTPEHKEEEAGGFIANLEPVSLADREVISRLRN

SEQ ID NO: 11862 - protein, 85 aa, Homo sapiens
AADDDNGDGTSLFDVFSASPLKNNDEGSLDIYAGLDSAVSDSASKSCVPSRNCLDLYEEILTEEGTAKEATYNDLQVEYGKCQLQ

SEQ ID NO: 11863 - protein, 85 aa, Homo sapiens
MKELMKKFKEIQTQNFSLINENQSLKKNISALIKTARVEINRKDEEISNLHQRLSEFPHFRNNHKTARTFDTVKTKDLKSRSPHL

SEQ ID NO: 11864 - protein, 85 aa, Homo sapiens
DDCSKTDHRAKSDVSKDVHHSTSLPNLEKEGKPHSDKRSTSHLPTSVEKHCTNGVWSRSHYQVGEGSSNEDSRRGRKDIRHSQFN

SEQ ID NO: 11865 - protein, 85 aa, Homo sapiens
RGTERVRKDLSTGCGDGEPRILEASQRLQGHPEKYGKGEPKTESKSSKFKSNSDSDYKGERINSSWEKETPGERSHSRVDSQSDK

SEQ ID NO: 11866 - protein, 85 aa, Homo sapiens
KLERQSERSQNINRKEVKSQDKEERKVDQKPKSVVKDQDHWRRSERASLPHSKNEITFSHNSSKYHLEERRGWEDCKRDKSVNSH

SEQ ID NO: 11867 - protein, 85 aa, Homo sapiens
SFQDGRCPSSLSNSRTHKNIDSKEVDAMHQWENTPLKAERHRTEDKRKREQESKEENRHIRNEKRVPTEHLQKTNKETKKTTTDL

SEQ ID NO: 11868 - protein, 85 aa, Homo sapiens
KKQNEPKTDKGEVLDNGVSEGADNKELAMKAESGPNETKNKDLKLSFMKKLNLTLSPAKKQPVSQDNQHKITDIPKSSGVCDSES

SEQ ID NO: 11869 - protein, 85 aa, Homo sapiens
SMQVKTVAYVPSISEHILGEAAVSEHTMGETKSTLLEPKVALLAVTEPRIGISETNKEDENSLLVRSVDNTMHCEEPICGTETSF

SEQ ID NO: 11870 - protein, 85 aa, Homo sapiens
PSPMEIQQTESLFPSTGMKQTINNGRAAAPVVMDVLQTDVSQNFGLELDTKRNDNSDYCGISEGMEMKVALSTTVSETTESILQP

SEQ ID NO: 11871 - protein, 85 aa, Homo sapiens
SIEEADILPIMLSEDNNPKFEPSVIVTPLVESKSCHLEPCLPKETLDSSLQQTELMDHRMATGETNSVYHDDDNSVLSIDLNHLR

SEQ ID NO: 11872 - protein, 85 aa, Homo sapiens
PIPEAISPLNSPVRPVAKVLRNESPPQVPVYNNSHKDVFLPNSAHSTSKSQSDLNKENQKPIYKSDKCTEADTCKNSPLDELEEG

SEQ ID NO: 11873 - protein, 85 aa, Homo sapiens
EIRSDSETSKPQESFEKNSKRRVSADVRKSKTIPRRGKSTVCLDKDSRKTHVRIHQTNNKWNKRPDKSSRSSKTEKKDKVMSTSS

SEQ ID NO: 11874 - protein, 85 aa, Homo sapiens
MEKIVPIIAVPSSEQEIMHMLRMIRKHVRKNYMKFKAKFSLIQFHRIIESAILSFTSLIKHLNLHKISKSVTTLQKNLCDIIESK

SEQ ID NO: 11875 - protein, 85 aa, Homo sapiens
LKQVKKNGIVDRLFEQQLPDMKKKLWKFVDDQLDYLFAKLKKILVCDSKSFGRDSDEGKLEKTSKQNAQYSNSQKRSVDNSNREL

SEQ ID NO: 11876 - protein, 85 aa, Homo sapiens
MKEKLSKSEDPVHYKSLVGCKKSEENYQDQNNSSINTVKHDIKKNFNICFDNIKNSQSEERSLEVHCPSTPKSEKNEGSSIEDAQ

SEQ ID NO: 11877 - protein, 85 aa, Homo sapiens
TSQHATLKPERSFEILTEQQASSLTFNLVSDAQMGEIFKSLLQGSDLLDSSVNCTEKSEWELKTPEKQLLETLKCESIPACTTEE

SEQ ID NO: 11878 - protein, 85 aa, Homo sapiens
LVSGVASPCPKMISDDNWSLLSSEKGPSLSSGLSLPVHPDVLDESCMFEVSTNLPLSKDNVCSVEKSKPCVSSILLEDLAVSLTV

SEQ ID NO: 11879 - protein, 85 aa, Homo sapiens
PSPLKSDGHLSFLKPDMSSSSTPEEVISAHFSEDALLEEEDASEQDIHLALESDNSSSKSSCSSSWTSRSVAPGFQYHPNLPMHA

SEQ ID NO: 11880 - protein, 85 aa, Homo sapiens
VIMEKSNDHFIVKIRRATPSTSSGLKQSMMPDELLTSLPRHGKEADEGPEKEYISCQNTVFKSVEELENSNKNVDGSKSTHEEQS

SEQ ID NO: 11881 - protein, 85 aa, Homo sapiens
SMIQTQVPDIYEFLKDASDKMGHSDEVADECFKLHQVWETKVPESIEELPSMEEISHSVGEHLPNTYVDLTKDPVTETKNLGEFI

SEQ ID NO: 11882 - protein, 85 aa, Homo sapiens
EVTVLHIDQLGCSGGNLNQSAQILDNSLQADTVGAFIDLTQDASSEAKSEGNHPALAVEDLGCGVIQVDEDNCKEEKAQVANRPL

SEQ ID NO: 11883 - protein, 85 aa, Homo sapiens
KCIVEETYIDLTTESPSSCEVKKDELKSEPGSNCDNSELPGTLHNSHKKRRNISDLNHPHKKQRKETDLTNKEKTKKPTQDSCEN

SEQ ID NO: 11884 - protein, 85 aa, Homo sapiens
TEAHQKKASKKKAPPVTKDPSSLKATPGIKDSSAALATSTSLSAKNVIKKKGEIIILWTRNDDREILLECQKRGPSFKTFAYLAA

SEQ ID NO: 11885 - protein, 85 aa, Homo sapiens
SKKKAPPVTKDPSSLKATPGIKDSSAALATSTSLSAKNVIKKKGEIIILWTRNDDREILLECQKRGPSFKTFAYLAAKLDKNPNQ

SEQ ID NO: 11886 - protein, 85 aa, Homo sapiens
ASKSCVPSRNCLDLYEEILTEEGTAKEATYNDLQVEYGKCQLQMKELMKKFKEIQTQNFSLINENQSLKKNISALIKTARVEINR

SEQ ID NO: 11887 - protein, 85 aa, Homo sapiens
KDEEISNLHQRLSEFPHFRNNHKTARTFDTVKTKDLKSRSPHLDDCSKTDHRAKSDVSKDVHHSTSLPNLEKEGKPHSDKRSTSH

SEQ ID NO: 11888 - protein, 85 aa, Homo sapiens
LPTSVEKHCTNGVWSRSHYQVGEGSSNEDSRRGRKDIRHSQFNRGTERVRKDLSTGCGDGEPRILEASQRLQGHPEKYGKGEPKT

SEQ ID NO: 11889 - protein, 85 aa, Homo sapiens
ESKSSKFKSNSDSDYKGERINSSWEKETPGERSHSRVDSQSDKKLERQSERSQNINRKEVKSQDKEERKVDQKPKSVVKDQDHWR

SEQ ID NO: 11890 - protein, 85 aa, Homo sapiens
RSERASLPHSKNEITFSHNSSKYHLEERRGWEDCKRDKSVNSHSFQDGRCPSSLSNSRTHKNIDSKEVDAMHQWENTPLKAERHR

SEQ ID NO: 11891 - protein, 85 aa, Homo sapiens
TEDKRKREQESKEENRHIRNEKRVPTEHLQKTNKETKKTTTDLKKQNEPKTDKGEVLDNGVSEGADNKELAMKAESGPNETKNKD

SEQ ID NO: 11892 - protein, 85 aa, Homo sapiens
LKLSFMKKLNLTLSPAKKQPVSQDNQHKITDIPKSSGVCDSESSMQVKTVAYVPSISEHILGEAAVSEHTMGETKSTLLEPKVAL

SEQ ID NO: 11893 - protein, 85 aa, Homo sapiens
LAVTEPRIGISETNKEDENSLLVRSVDNTMHCEEPICGTETSFPSPMEIQQTESLFPSTGMKQTINNGRAAAPVVMDVLQTDVSQ

SEQ ID NO: 11894 - protein, 85 aa, Homo sapiens
NFGLELDTKRNDNSDYCGISEGMEMKVALSTTVSETTESILQPSIEEADILPIMLSEDNNPKFEPSVIVTPLVESKSCHLEPCLP

SEQ ID NO: 11895 - protein, 85 aa, Homo sapiens
KETLDSSLQQTELMDHRMATGETNSVYHDDDNSVLSIDLNHLRPIPEAISPLNSPVRPVAKVLRNESPPQVPVYNNSHKDVFLPN

SEQ ID NO: 11896 - protein, 85 aa, Homo sapiens
SAHSTSKSQSDLNKENQKPIYKSDKCTEADTCKNSPLDELEEGEIRSDSETSKPQESFEKNSKRRVSADVRKSKTIPRRGKSTVC

SEQ ID NO: 11897 - protein, 85 aa, Homo sapiens
LDKDSRKTHVRIHQTNNKWNKRPDKSSRSSKTEKKDKVMSTSSLEKIVPIIAVPSSEQEIMHMLRMIRKHVRKNYMKFKAKFSLI

SEQ ID NO: 11898 - protein, 85 aa, Homo sapiens
QFHRIIESAILSFTSLIKHLNLHKISKSVTTLQKNLCDIIESKLKQVKKNGIVDRLFEQQLPDMKKKLWKFVDDQLDYLFAKLKK

SEQ ID NO: 11899 - protein, 85 aa, Homo sapiens
ILVCDSKSFGRDSDEGKLEKTSKQNAQYSNSQKRSVDNSNRELLKEKLSKSEDPVHYKSLVGCKKSEENYQDQNNSSINTVKHDI

SEQ ID NO: 11900 - protein, 85 aa, Homo sapiens
KKNFNICFDNIKNSQSEERSLEVHCPSTPKSEKNEGSSIEDAQTSQHATLKPERSFEILTEQQASSLTFNLVSDAQMGEIFKSLL

SEQ ID NO: 11901 - protein, 85 aa, Homo sapiens
QGSDLLDSSVNCTEKSEWELKTPEKQLLETLKCESIPACTTEELVSGVASPCPKMISDDNWSLLSSEKGPSLSSGLSLPVHPDVL

SEQ ID NO: 11902 - protein, 85 aa, Homo sapiens
DESCMFEVSTNLPLSKDNVCSVEKSKPCVSSILLEDLAVSLTVPSPLKSDGHLSFLKPDMSSSSTPEEVISAHFSEDALLEEEDA

SEQ ID NO: 11903 - protein, 85 aa, Homo sapiens
SEQDIHLALESDNSSSKSSCSSSWTSRSVAPGFQYHPNLPMHAVIMEKSNDHFIVKIRRATPSTSSGLKQSMMPDELLTSLPRHG

SEQ ID NO: 11904 - protein, 85 aa, Homo sapiens
KEADEGPEKEYISCQNTVFKSVEELENSNKNVDGSKSTHEEQSSMIQTQVPDIYEFLKDASDKMGHSDEVADECFKLHQVWETKV

SEQ ID NO: 11905 - protein, 85 aa, Homo sapiens
PESIEELPSMEEISHSVGEHLPNTYVDLTKDPVTETKNLGEFIEVTVLHIDQLGCSGGNLNQSAQILDNSLQADTVGAFIDLTQD

SEQ ID NO: 11906 - protein, 85 aa, Homo sapiens
ASSEAKSEGNHPALAVEDLGCGVIQVDEDNCKEEKAQVANRPLKCIVEETYIDLTTESPSSCEVKKDELKSEPGSNCDNSELPGT

SEQ ID NO: 11907 - protein, 85 aa, Homo sapiens
MHNSHKKRRNISDLNHPHKKQRKETDLTNKEKTKKPTQDSCENTEAHQKKASKKKAPPVTKDPSSLKATPGIKDSSAALATSTSL

SEQ ID NO: 11908 - protein, 84 aa, Homo sapiens
QTTSIASEDPLQNLCLASQEVLQKAQQSGRSKCLKCGGSRMFYCYTCYVPVENVPIEQIPLVKFSLYHLGQSMVSSASKITCIG

SEQ ID NO: 11909 - protein, 85 aa, Homo sapiens
QHHRPVIAVHSGIARSPHPSSALHFPTTSILPQTASTYFPHTAIRYPPHLNPQDPLKDLVSLACDPASQQPGPLNGSGQLKMPSH

SEQ ID NO: 11910 - protein, 85 aa, Homo sapiens
AIRYPPHLNPQDPLKDLVSLACDPASQQPGPLNGSGQLKMPSHCLSAQMLAPPPPGLPRLALPPATKPATTSEGGATSPTSPSYS

SEQ ID NO: 11911 - protein, 84 aa, Homo sapiens
QQPPERRVVTVVFLGLLLDLLAFTLLLPLLPGLLESHGRAHDPLYGSWQGGVDWFATAIGMPVEKRYNSVLFGVSVCATHWGHL

SEQ ID NO: 11912 - protein, 85 aa, Homo sapiens
SLHSQLAKFLLDRYTSSGCVLCAGPEPLPPKGLQYLVLLSHAHSRECSLVPGLRGPGGQDGGLVWECSAGHTFSWGPSLSPTPSE

SEQ ID NO: 11913 - protein, 85 aa, Homo sapiens
YDAKCTKPDCPFTHVSRRIPVLSPKPAVAPPAPPSSSQLCRYFPACKKMECPFYHPKHCRFNTQCTRPDCTFYHPTINVPPRHAL

SEQ ID NO: 11914 - protein, 85 aa, Homo sapiens
APRTRTSQEELLAEVVQGQSRTPRISPPIKEEETKGDSVEKNQGTQQRQLLSRLQIDPVMAETLQMSQAEMSELSVAQKPEKLLE

SEQ ID NO: 11915 - protein, 85 aa, Homo sapiens
RCKYWPACKNGDECAYHHPISPCKAFPNCKFAEKCLFVHPNCKYDAKCTKPDCPFTHVSRRIPVLSPKPAVAPPAPPSSSQLCRY

SEQ ID NO: 11916 - protein, 85 aa, Homo sapiens
RGGSRSRSRSRSKSAERERRHKERERDKERDRNKKDRDRDKDGHRRDKDRKRSSLSPGRGKDFKSRKDRDSKKDEEDEHGDKKPK

SEQ ID NO: 11917 - protein, 85 aa, Homo sapiens
MVGCADRTVKHFSTEDGIFQGQRHCPGGEGMFRGLAQADGTLITCVDSGILRVWHDKDKDTSSDPLLELRVGPGVCRMRQDPAHP

SEQ ID NO: 11918 - protein, 85 aa, Homo sapiens
HVVATGGKENALKIWDLQGSEEPVFRAKNVRNDWLDLRVPIWDQDIQFLPGSQKLVTCTGYHQVRVYDPASPQRRPVLETTYGEY

SEQ ID NO: 11919 - protein, 85 aa, Homo sapiens
PLTAMTLTPGGNSVIVGNTHGQLAEIDLRQGRLLGCLKGLAGSVRGLQCHPSKPLLASCGLDRVLRIHRIQNPRGLEHKVYLKSQ

SEQ ID NO: 11920 - protein, 85 aa, Homo sapiens
ITCVDSGILRVWHDKDKDTSSDPLLELRVGPGVCRMRQDPAHPHVVATGGKENALKIWDLQGSEEPVFRAKNVRNDWLDLRVPIW

SEQ ID NO: 11921 - protein, 85 aa, Homo sapiens
DQDIQFLPGSQKLVTCTGYHQVRVYDPASPQRRPVLETTYGEYPLTAMTLTPGGNSVIVGNTHGQLAEIDLRQGRLLGCLKGLAG

SEQ ID NO: 11922 - protein, 85 aa, Homo sapiens
SVRGLQCHPSKPLLASCGLDRVLRIHRIQNPRGLEHKVYLKSQLNCLLLSGRDNWEDEPQEPQEPNKVPLEDTETDELWASLEAA

SEQ ID NO: 11923 - protein, 34 aa, Homo sapiens
KRPCVSTLLVKNCNGFKIILIPKKRDIQRKMLVN

SEQ ID NO: 11924 - protein, 50 aa, Homo sapiens
SAVSWSRLSYITVSGTGRGGGTVPGRPSSSRRWSGSDSSLRDMALRFQTF

SEQ ID NO: 11925 - protein, 85 aa, Homo sapiens
PGKNKRTAITTPNFKKLHEAHFKEMESIDQYIERKKKHFEEHNSMNELKQQPINKGGVRTPVPPRGRLSVASTPISQRRSQGRSC

SEQ ID NO: 11926 - protein, 85 aa, Homo sapiens
GPASQSTLGLKGSLKRSAISAAKTGVRFSAATKDNEHKRSLTKTPARKSAHVTVSGGTPKGEAVLGTHKLKTITGNSAAVITPFK

SEQ ID NO: 11927 - protein, 85 aa, Homo sapiens
MTTEATQTPVSNKKPVFDLKASLSRPLNYEPHKGKLKPWGQSKENNYLNQHVNRINFYKKTYKQPHLQTKEEQRKKREQERKEKK

SEQ ID NO: 11928 - protein, 85 aa, Homo sapiens
NSMNELKQQPINKGGVRTPVPPRGRLSVASTPISQRRSQGRSCGPASQSTLGLKGSLKRSAISAAKTGVRFSAATKDNEHKRSLT

SEQ ID NO: 11929 - protein, 85 aa, Homo sapiens
KTPARKSAHVTVSGGTPKGEAVLGTHKLKTITGNSAAVITPFKLTTEATQTPVSNKKPVFDLKASLSRPLNYEPHKGKLKPWGQS

SEQ ID NO: 11930 - protein, 6 aa, Homo sapiens
TVHFPM

SEQ ID NO: 11931 - protein, 5 aa, Homo sapiens
LPPSP

SEQ ID NO: 11932 - protein, 8 aa, Homo sapiens
DKRNTRSI

SEQ ID NO: 11933 - protein, 85 aa, Homo sapiens
RDTPASVDSIPLEWDHDYDLSRDLESAMSRALPSEDEEGQDDKDFYLRGAVGLSGDHSALESQIRQLGKALDDSRFQIQQTENII

SEQ ID NO: 11934 - protein, 85 aa, Homo sapiens
RSKTPTGPELDTSYKGYMKLLGECSSSIDSVKRLEHKLKEEEESLPGFVNLHSTETQTAGVIDRWELLQAQALSKELRMKQNLQK

SEQ ID NO: 11935 - protein, 85 aa, Homo sapiens
WQQFNSDLNSIWAWLGDTEEELEQLQRLELSTDIQTIELQIKKLKELQKAVDHRKAIILSINLCSPEFTQADSKESRDLQDRLSQ

SEQ ID NO: 11936 - protein, 85 aa, Homo sapiens
MNGRWDRVCSLLEEWRGLLQDALMQCQGFHEMSHGLLLMLENIDRRKNEIVPIDSNLDAEILQDHHKQLMQIKHELLESQLRVAS

SEQ ID NO: 11937 - protein, 85 aa, Homo sapiens
MQDMSCQLLVNAEGTDCLEAKEKVHVIGNRLKLLLKEVSRHIKELEKLLDVSSSQQDLSSWSSADELDTSGSVSPTSGRSTPNRQ

SEQ ID NO: 11938 - protein, 85 aa, Homo sapiens
KTPRGKCSLSQPGPSVSSPHSRSTKGGSDSSLSEPGPGRSGRGFLFRVLRAALPLQLLLLLLIGLACLVPMSEEDYSCALSNNFA

SEQ ID NO: 11939 - protein, 85 aa, Homo sapiens
KDFYLRGAVGLSGDHSALESQIRQLGKALDDSRFQIQQTENIIRSKTPTGPELDTSYKGYMKLLGECSSSIDSVKRLEHKLKEEE

SEQ ID NO: 11940 - protein, 85 aa, Homo sapiens
ESLPGFVNLHSTETQTAGVIDRWELLQAQALSKELRMKQNLQKWQQFNSDLNSIWAWLGDTEEELEQLQRLELSTDIQTIELQIK

SEQ ID NO: 11941 - protein, 85 aa, Homo sapiens
KLKELQKAVDHRKAIILSINLCSPEFTQADSKESRDLQDRLSQMNGRWDRVCSLLEEWRGLLQDALMQCQGFHEMSHGLLLMLEN

SEQ ID NO: 11942 - protein, 85 aa, Homo sapiens
IDRRKNEIVPIDSNLDAEILQDHHKQLMQIKHELLESQLRVASLQDMSCQLLVNAEGTDCLEAKEKVHVIGNRLKLLLKEVSRHI

SEQ ID NO: 11943 - protein, 85 aa, Homo sapiens
KELEKLLDVSSSQQDLSSWSSADELDTSGSVSPTSGRSTPNRQKTPRGKCSLSQPGPSVSSPHSRSTKGGSDSSLSEPGPGRSGR

SEQ ID NO: 11944 - protein, 84 aa, Homo sapiens
KRVEEIWQEFLAPGAPSAINLDSHSYEITSQNVKDGGRYTFEDAQEHIYKLMKSDSYARFLRSNAYQDLLLAKKKKVSKVVELP

SEQ ID NO: 11945 - protein, 70 aa, Homo sapiens
MFPQVTEIQRYLQKERNLSTQMSHPNLEKIKELQSLLQTLRSFMKLILRKWSPLINILREKRNILKNTIP

SEQ ID NO: 11946 - protein, 84 aa, Homo sapiens
QYIERKKKHFEEHNSMNELKQPINKGGVRTPVPPRGRLSVASTPISQRRSQGRSCGPASQSTLGLKGSLKRSAISAAKTGVRFK

SEQ ID NO: 11947 - protein, 28 aa, Homo sapiens
FMKLILRKWSPLINILREKRNILKNTIP

SEQ ID NO: 11948 - protein, 85 aa, Homo sapiens
SGHPGSWEMNSVAFEDVAVNFTQEEWALLDPSQKNLYRDVMQETFRNLASIGNKGEDQSIEDQYKNSSRNLRHIISHSGNNPYGC

SEQ ID NO: 11949 - protein, 85 aa, Homo sapiens
EECGKKPCTCKQCQKTSLSVTRVHRDTVMHTGNGHYGCTICEKVFNIPSSFQIHQRNHTGEKPYECMECGKALGFSRSLNRHKRI

SEQ ID NO: 11950 - protein, 85 aa, Homo sapiens
HTGEKRYECKQCGKAFSRSSHLRDHERTHTGEKPYECKHCGKAFRYSNCLHYHERTHTGEKPYVCMECGKAFSCLSSLQGHIKAH

SEQ ID NO: 11951 - protein, 85 aa, Homo sapiens
AGEEPYPCKQCGKAFRYASSLQKHEKTHIAQKPYVCNNCGKGFRCSSSLRDHERTHTGEKPYECQKCGKAFSRASTLWKHKKTHT

SEQ ID NO: 11952 - protein, 85 aa, Homo sapiens
ETFRNLASIGNKGEDQSIEDQYKNSSRNLRHIISHSGNNPYGCEECGKKPCTCKQCQKTSLSVTRVHRDTVMHTGNGHYGCTICE

SEQ ID NO: 11953 - protein, 85 aa, Homo sapiens
KVFNIPSSFQIHQRNHTGEKPYECMECGKALGFSRSLNRHKRIHTGEKRYECKQCGKAFSRSSHLRDHERTHTGEKPYECKHCGK

SEQ ID NO: 11954 - protein, 85 aa, Homo sapiens
AFRYSNCLHYHERTHTGEKPYVCMECGKAFSCLSSLQGHIKAHAGEEPYPCKQCGKAFRYASSLQKHEKTHIAQKPYVCNNCGKG

SEQ ID NO: 11955 - protein, 84 aa, Homo sapiens
LEMMELDIGDATQVYVAFLVYLDLMESKSWHEVNCVGLPELQLICLVGTEIEGEGLQTVVPTPITASLSHNRSGPGREDLLHCC

SEQ ID NO: 11956 - protein, 85 aa, Homo sapiens
PKYLEMMELDIGDATQVYVAFLVYLDLMESKSWHEVNCVGLPELQLICLVGTEIEGEGLQTVVPTPITASLSHNRSGPGREDLLH

SEQ ID NO: 11957 - protein, 84 aa, Homo sapiens
KSMPKFFKPRLGMTKEEMMIFIEASSENPCSLYSSVCYSPQAEKVYKLCSPPADLHKVGTVVTPDNDIYIAGGQVPLKHKNKSQ

SEQ ID NO: 11958 - protein, 85 aa, Homo sapiens
IQNLIKIQAIAVCMENGNFKEAEEVFERIFGDPNSHMAAAKVVESKRTRTITSQDKPSGNDVEMETEANLDTRKSVSDKQSAVTE

SEQ ID NO: 11959 - protein, 85 aa, Homo sapiens
SSEGTVSLLRSHKNLFLSKLQHGTQQQDLNKKERRVGTPQSTKKKKESRRATESRIPVSKSQPVTPEKHRARKRQAWLWEEDKNL

SEQ ID NO: 11960 - protein, 85 aa, Homo sapiens
MTRIAAGKTLDAQFENDERITPLESALMIWGSIEKEHDKLHEEIQNLIKIQAIAVCMENGNFKEAEEVFERIFGDPNSHMAAAKV

SEQ ID NO: 11961 - protein, 85 aa, Homo sapiens
VESKRTRTITSQDKPSGNDVEMETEANLDTRKSVSDKQSAVTESSEGTVSLLRSHKNLFLSKLQHGTQQQDLNKKERRVGTPQST

SEQ ID NO: 11962 - protein, 85 aa, Homo sapiens
KKKKESRRATESRIPVSKSQPVTPEKHRARKRQAWLWEEDKNLRSGVRKYGEGNWSKILLHYKFNNRTSVMLKDRWRTMKKLKLI

SEQ ID NO: 11963 - protein, 84 aa, Homo sapiens
VGQLKRVPRTGWVYRNVQRPESVSDHMYRMAVMAMVIKDDRLNKDRCVRLALVHDMAECIVGDIAPADNIPKEEKHRREEKRKT

SEQ ID NO: 11964 - protein, 85 aa, Homo sapiens
TDKTEKVAVDPETVFKRPRECDSPSYQKRQRMALLARKQGAGDSLIAGSAMSKAKKLMTGHAIPPSQLDSQIDDFTGFSKDRMMQ

SEQ ID NO: 11965 - protein, 85 aa, Homo sapiens
DSLIAGSAMSKAKKLMTGHAIPPSQLDSQIDDFTGFSKDRMMQKPGSNAPVGGNVTSSFSGDDLECRETASSPKSQREINADIKR

SEQ ID NO: 11966 - protein, 84 aa, Homo sapiens
EKCSFCNLQREAVSDCIPSLDSSQSTPTEELSSQGQSNTDKIECQAENYLNALFRKKADSSIWVSKRSPTNGWIFLRTVILTFP

SEQ ID NO: 11967 - protein, 5 aa, Homo sapiens
TAMQK

SEQ ID NO: 11968 - protein, 84 aa, Homo sapiens
TAPCGDGALFDKSCSDRAMESTESRHYPVFENPKQGKLRTKVENVVSHCTAYTSKTCCDHPASSHATFPIPRICSVHTGSLSGA

SEQ ID NO: 11969 - protein, 83 aa, Homo sapiens
KRLCHSICISALLRVEMAPSLTSPAATVLWKAQNPATTLSSRIPNKESSAPRWRTWFPTALHIQAKPAVITRPPLMPLSPSLA

SEQ ID NO: 11970 - protein, 84 aa, Homo sapiens
ACQYKLAVERYEWNKLQSVKSIVPMVHLSWNMARNIKVSDPKLFEMIKIFSLSPNFRAEKCLRDHLVQPLRSNGEPEPLRFTGE

SEQ ID NO: 11971 - protein, 85 aa, Homo sapiens
WVQAIGWCNNIAWNVGPLTACQYKLAVERYEWNKLQSVKSIVPMVHLSWNMARNIKVSDPKLFEMIKIFSLSPNFRAEKCLRDHL

SEQ ID NO: 11972 - protein, 84 aa, Homo sapiens
EEDTRLKASLLQLTRELEELKEIEADLERQEKEVDEDTTVTIPSAVYVAQLYHQLLEWPQLGNQRESTYLCQACSFTSVTGWDK

SEQ ID NO: 11973 - protein, 85 aa, Homo sapiens
TTIAKYAQYQASSFQESLREENEKRTQHKDHSDNESTSSEKWKLQLHELTKLPAFARVVSAGNLLTHVGHTILGMNTVQLYMKVP

SEQ ID NO: 11974 - protein, 85 aa, Homo sapiens
GSRTPGHQENNNFCSVNINIGPGDCEWFVVPEDYWGVLNDFCEKNNLNFLMSSWWPNLEDLYEANVPVYRFIQRPGDLVWINAGT

SEQ ID NO: 11975 - protein, 85 aa, Homo sapiens
VHWVQAVGWCNNIAWNVGPLTACQYKLAVERYEWNKLKSVKSPVPMVHLSWNMARNIKVSDPKLFEMIKYCLLKILKQYQTLREA

SEQ ID NO: 11976 - protein, 85 aa, Homo sapiens
LVAAGKEVIWHGRTNDEPAHYCSICEVEVFNLLFVTNESNTQKTYIVHCHDCARKTSKSLENFVVLEQYKMEDLIQVYDQFTLAL

SEQ ID NO: 11977 - protein, 85 aa, Homo sapiens
KTLVEANNEHMVEVRTQLLQPADENWDPTGTKKIWRCESNRSHTTIAKYAQYQASSFQESLREENEKRTQHKDHSDNESTSSEKW

SEQ ID NO: 11978 - protein, 85 aa, Homo sapiens
KLQLHELTKLPAFARVVSAGNLLTHVGHTILGMNTVQLYMKVPGSRTPGHQENNNFCSVNINIGPGDCEWFVVPEDYWGVLNDFC

SEQ ID NO: 11979 - protein, 85 aa, Homo sapiens
EKNNLNFLMSSWWPNLEDLYEANVPVYRFIQRPGDLVWINAGTVHWVQAVGWCNNIAWNVGPLTACQYKLAVERYEWNKLKSVKS

SEQ ID NO: 11980 - protein, 85 aa, Homo sapiens
PVPMVHLSWNMARNIKVSDPKLFEMIKYCLLKILKQYQTLREALVAAGKEVIWHGRTNDEPAHYCSICEVEVFNLLFVTNESNTQ

SEQ ID NO: 11981 - protein, 85 aa, Homo sapiens
GTHPKYLEMMELDIGDATQVYVAFLVYLDLMESKSWHEVNCVGLPELQLICLVGTEIEGEGLQTVVPTPITASLSHNRRNNPYIF

SEQ ID NO: 11982 - protein, 84 aa, Homo sapiens
SLSHNRRNNPYIFIKDINKKQLSPSCESDPNPLTSSLIQLYTEESPYEDTARRWLSSSQEERPHQRWNVPALRSGFLVSRTVRK

SEQ ID NO: 11983 - protein, 85 aa, Homo sapiens
GLPELQLICLVGTEIEGEGLQTVVPTPITASLSHNRRNNPYIFIKDINKKQLSPSCESDPNPLTSSLIQLYTEESPYEDTARRWL

SEQ ID NO: 11984 - protein, 85 aa, Homo sapiens
SVTLLKASEVEEILDGNDEKYKAVSISTEPPTYLREQKAKRNSQWVPTLPNSSHHLDAVPCSTTINRNRMGRDKKRTFPLCFDDH

SEQ ID NO: 11985 - protein, 85 aa, Homo sapiens
DPAVIHENASQPEVLVPIRLDMEIDGQKLRDAFTWNMNEKLMTPEMFSEILCDDLDLNPLTFVPAIASAIRQQIESYPTDSILED

SEQ ID NO: 11986 - protein, 85 aa, Homo sapiens
QSDQRVIIKLNIHVGNISLVDQFEWDMSEKENSPEKFALKLCSELGLGGEFVTTIAYSIRGQLSWHQKTYAFSENPLPTVEIAIR

SEQ ID NO: 11987 - protein, 85 aa, Homo sapiens
YKRYPSLWRRLATVEERKKIVASSHGKKTKPNTKDHGYTTLATSVTLLKASEVEEILDGNDEKYKAVSISTEPPTYLREQKAKRN

SEQ ID NO: 11988 - protein, 85 aa, Homo sapiens
SQWVPTLPNSSHHLDAVPCSTTINRNRMGRDKKRTFPLCFDDHDPAVIHENASQPEVLVPIRLDMEIDGQKLRDAFTWNMNEKLM

SEQ ID NO: 11989 - protein, 85 aa, Homo sapiens
TPEMFSEILCDDLDLNPLTFVPAIASAIRQQIESYPTDSILEDQSDQRVIIKLNIHVGNISLVDQFEWDMSEKENSPEKFALKLC

SEQ ID NO: 11990 - protein, 85 aa, Homo sapiens
SELGLGGEFVTTIAYSIRGQLSWHQKTYAFSENPLPTVEIAIRNTGDADQWCPLLETLTDAEMEKKIRDQDRNTRRMRRLANTAP

SEQ ID NO: 11991 - protein, 85 aa, Homo sapiens
MEFDGNFNTNVSRTISCDRLSTTVNSRAFNPGRDLNSVLADNLKSNPGIKWQYFSSEEGIFTVFPAHKFRCKGSYEHRSRPIYVS

SEQ ID NO: 11992 - protein, 85 aa, Homo sapiens
TVRPQSKHIVVILDHGASVTDTQLQIAKDAAQVILSAIDEHDKISVLTVADTVRTCSLDQCYKTFLSPATSETKRKMSTFVSSVK

SEQ ID NO: 11993 - protein, 85 aa, Homo sapiens
SSDSPTQHAVGFQKAFQLIRSTNNNTKFQANTDMVIIYLSAGITSKDSSEEDKKATLQVINEENSFLNNSVMILTYALMNDGVTG

SEQ ID NO: 11994 - protein, 85 aa, Homo sapiens
MKELAFLRDLAEQNSGKYGVPDRMALPVIKGSMMVLNQLSNLETTVGRFYTNLPNRMIDEAVFSLPFSDEMGDGLIMTVSKPCYF

SEQ ID NO: 11995 - protein, 85 aa, Homo sapiens
GNLLLGIVGVDVNLAYILEDVTYYQDSLASYTFLIDDKGYTLMHPSLTRPYLLSEPPLHTDIIHYENIPKFELVRQNILSLPLGS

SEQ ID NO: 11996 - protein, 85 aa, Homo sapiens
QIIAVPVNSSLSWHINKLRETGKEAYNVSYAWKMVQDTSFILCIVVIQPEIPVKQLKNLNTVPSSKLLYHRLDLLGQPSACLHFK

SEQ ID NO: 11997 - protein, 85 aa, Homo sapiens
QLATLESPTIMLSAGSFSSPYEHLSQPETKRMVEHYTAYLSDNTRLIANPGLKFSVRNEVMATSHVTDEWMTQMEMSSLNTYIVR

SEQ ID NO: 11998 - protein, 85 aa, Homo sapiens
RYIATPNGVLRIYPGSLMDKAFDPTRRQWYLHAVANPGLISLTGPYLDVGGAGYVVTISHTIHSSSTQLSSGHTVAVMGIDFTLR

SEQ ID NO: 11999 - protein, 85 aa, Homo sapiens
YFYKVLMDLLPVCNQDGGNKIRCFIMEDRGYLVAHPTLIDPKGHAPVEQQHITHKEPLVANDILNHPNFVKKNLCNSFSDRTVQR

SEQ ID NO: 12000 - protein, 85 aa, Homo sapiens
FYKFNTSLAGDLTNLVHGSHCSKYRLARIPGTNAFVGIVNETCDSLAFCACSMVDRLCLNCHRMEQNECECPCECPLEVNECTGN

SEQ ID NO: 12001 - protein, 85 aa, Homo sapiens
LTNAENRNPSCEVHQEPVTYTAIDPGLQDALHQCVNSRCSQRLESGDCFGVLDCEWCMVDSDGKTHLDKPYCAPQKECFGGIVGA

SEQ ID NO: 12002 - protein, 85 aa, Homo sapiens
KSPYVDDMGAIGDEVITLNMIKSAPVGPVAGGIMGCIMVLVLAVYAYRHQIHRRSHQHMSPLAAQEMSVRMSNLENDRDERDDDS

SEQ ID NO: 12003 - protein, 85 aa, Homo sapiens
HEDRGIISNTRFIAAVIERHAHSPERRRRYWGRSGTESDHGYSTMSPQEDSENPPCNNDPLSAGVDVGNHDEDLDLDTPPQTAAL

SEQ ID NO: 12004 - protein, 85 aa, Homo sapiens
MKSNPGIKWQYFSSEEGIFTVFPAHKFRCKGSYEHRSRPIYVSTVRPQSKHIVVILDHGASVTDTQLQIAKDAAQVILSAIDEHD

SEQ ID NO: 12005 - protein, 85 aa, Homo sapiens
KISVLTVADTVRTCSLDQCYKTFLSPATSETKRKMSTFVSSVKSSDSPTQHAVGFQKAFQLIRSTNNNTKFQANTDMVIIYLSAG

SEQ ID NO: 12006 - protein, 85 aa, Homo sapiens
ITSKDSSEEDKKATLQVINEENSFLNNSVMILTYALMNDGVTGLKELAFLRDLAEQNSGKYGVPDRMALPVIKGSMMVLNQLSNL

SEQ ID NO: 12007 - protein, 85 aa, Homo sapiens
ETTVGRFYTNLPNRMIDEAVFSLPFSDEMGDGLIMTVSKPCYFGNLLLGIVGVDVNLAYILEDVTYYQDSLASYTFLIDDKGYTL

SEQ ID NO: 12008 - protein, 85 aa, Homo sapiens
MHPSLTRPYLLSEPPLHTDIIHYENIPKFELVRQNILSLPLGSQIIAVPVNSSLSWHINKLRETGKEAYNVSYAWKMVQDTSFIL

SEQ ID NO: 12009 - protein, 85 aa, Homo sapiens
CIVVIQPEIPVKQLKNLNTVPSSKLLYHRLDLLGQPSACLHFKQLATLESPTIMLSAGSFSSPYEHLSQPETKRMVEHYTAYLSD

SEQ ID NO: 12010 - protein, 85 aa, Homo sapiens
NTRLIANPGLKFSVRNEVMATSHVTDEWMTQMEMSSLNTYIVRRYIATPNGVLRIYPGSLMDKAFDPTRRQWYLHAVANPGLISL

SEQ ID NO: 12011 - protein, 85 aa, Homo sapiens
TGPYLDVGGAGYVVTISHTIHSSSTQLSSGHTVAVMGIDFTLRYFYKVLMDLLPVCNQDGGNKIRCFIMEDRGYLVAHPTLIDPK

SEQ ID NO: 12012 - protein, 85 aa, Homo sapiens
GHAPVEQQHITHKEPLVANDILNHPNFVKKNLCNSFSDRTVQRFYKFNTSLAGDLTNLVHGSHCSKYRLARIPGTNAFVGIVNET

SEQ ID NO: 12013 - protein, 85 aa, Homo sapiens
CDSLAFCACSMVDRLCLNCHRMEQNECECPCECPLEVNECTGNLTNAENRNPSCEVHQEPVTYTAIDPGLQDALHQCVNSRCSQR

SEQ ID NO: 12014 - protein, 85 aa, Homo sapiens
MESGDCFGVLDCEWCMVDSDGKTHLDKPYCAPQKECFGGIVGAKSPYVDDMGAIGDEVITLNMIKSAPVGPVAGGIMGCIMVLVL

SEQ ID NO: 12015 - protein, 85 aa, Homo sapiens
AVYAYRHQIHRRSHQHMSPLAAQEMSVRMSNLENDRDERDDDSHEDRGIISNTRFIAAVIERHAHSPERRRRYWGRSGTESDHGY

SEQ ID NO: 12016 - protein, 85 aa, Homo sapiens
TDKTEKVAVDPETVFKRPRECDSPSYQKRQRMALLARKQGAGDSLIAGSAMSKEKKLMTGHAIPPSQLDSQIDDFTGFSKDRMMQ

SEQ ID NO: 12017 - protein, 85 aa, Homo sapiens
KPGSNAPVGGNVTSSFSGDDLECRETAFSPKSQQEINADIKRQLVKELRCVGQKYEKIFEMLEGVQGPTAVRKRFFESIIKEAAR

SEQ ID NO: 12018 - protein, 84 aa, Homo sapiens
DLECRETAFSPKSQQEINADIKRQLVKELRCVGQKYEKIFEMLEGVQGPTAVRKRFFESIIKEAARCMRRDFVKHLKKKLKRMI

SEQ ID NO: 12019 - protein, 85 aa, Homo sapiens
DSLIAGSAMSKEKKLMTGHAIPPSQLDSQIDDFTGFSKDRMMQKPGSNAPVGGNVTSSFSGDDLECRETAFSPKSQQEINADIKR

SEQ ID NO: 12020 - protein, 85 aa, Homo sapiens
IPAELTSRQGAMNTAQQACKPHHPNTEPVLGLSQTPISQQSLPLHMIPSSQVDDLSSPAKRKRTSSPTKNTSDNWSGGHAVSHPP

SEQ ID NO: 12021 - protein, 85 aa, Homo sapiens
VQQQAHSWCLTPQKLQHLEQLRANRNNLNPAQKLMLEQLESQFVLMQQHQMRPTGVAQVRSTGIPNGPTADSSLPTNSVSGQQPQ

SEQ ID NO: 12022 - protein, 85 aa, Homo sapiens
LALTRVPSVSQPGVRPACPGQPLANGPFSAGHVPCSTSRTLGSTDTILIGNNHITGSGSNGNVPYLQRNALTLPHNRTNLTSSAE

SEQ ID NO: 12023 - protein, 85 aa, Homo sapiens
EPWKNQLSNSTQGLHKGQSSHSAGPNGERPLSSTGPSQHLQAAGSGIQNQNGHPTLPSNSVTQGAALNHLSSHTATSGGQQGITL

SEQ ID NO: 12024 - protein, 85 aa, Homo sapiens
TKESKPSGNILTVPETSRHTGETPNSTASVEGLPNHVHQMTADAVCSPSHGDSKSPGLLSSDNPQLSALLMGKANNNVGTGTCDK

SEQ ID NO: 12025 - protein, 85 aa, Homo sapiens
VNNIHPAVHTKTDNSVASSPSSAISTATPSPKSTEQTTTNSVTSLNSPHSGLHTINGEGMEESQSPMKTDLLLVNHKPSPQIIPS

SEQ ID NO: 12026 - protein, 85 aa, Homo sapiens
MSVSIYPSSAEVLKACRNLGKNGLSNSSILLDKCPPPRPPSSPYPPLPKDKLNPPTPSIYLENKRDAFFPPLHQFCTNPNNPVTV

SEQ ID NO: 12027 - protein, 85 aa, Homo sapiens
IRGLAGALKLDLGLFSTKTLVEANNEHMVEVRTQLLQPADENWDPTGTKKIWHCESNRSHTTIAKYAQYQASSFQESLREENEKR

SEQ ID NO: 12028 - protein, 85 aa, Homo sapiens
SHHKDHSDSESTSSDNSGRRRKGPFKTIKFGTNIDLSDDKKWKLQLHELTKLPAFVRVVSAGNLLSHVGHTILGMNTVQLYMKVP

SEQ ID NO: 12029 - protein, 85 aa, Homo sapiens
GSRTPGHQENNNFCSVNINIGPGDCEWFVVPEGYWGVLNDFCEKNNLNFLMGSWWPNLEDLYEANVPVYRFIQRPGDLVWINAGT

SEQ ID NO: 12030 - protein, 85 aa, Homo sapiens
VHWVQAIGWCNNIAWNVGPLTACQYKLAVERYEWNKLQSVKSIVPMVHLSWNMARNIKVSDPKLFEMIKYCLLRTLKQCQTLREA

SEQ ID NO: 12031 - protein, 85 aa, Homo sapiens
LIAAGKEIIWHGRTKEEPAHYCSICEVEVFDLLFVTNESNSRKTYIVHCQDCARKTSGNLENFVVLEQYKMEDLMQVYDQFTLAP

SEQ ID NO: 12032 - protein, 85 aa, Homo sapiens
CSNTSALAARIKYLQAQLCNLPQGSLQNKTKLLPSIEEAWSLPIPAELTSRQGAMNTAQQACKPHHPNTEPVLGLSQTPISQQSL

SEQ ID NO: 12033 - protein, 85 aa, Homo sapiens
PLHMIPSSQVDDLSSPAKRKRTSSPTKNTSDNWSGGHAVSHPPVQQQAHSWCLTPQKLQHLEQLRANRNNLNPAQKLMLEQLESQ

SEQ ID NO: 12034 - protein, 85 aa, Homo sapiens
FVLMQQHQMRPTGVAQVRSTGIPNGPTADSSLPTNSVSGQQPQLALTRVPSVSQPGVRPACPGQPLANGPFSAGHVPCSTSRTLG

SEQ ID NO: 12035 - protein, 85 aa, Homo sapiens
STDTILIGNNHITGSGSNGNVPYLQRNALTLPHNRTNLTSSAEEPWKNQLSNSTQGLHKGQSSHSAGPNGERPLSSTGPSQHLQA

SEQ ID NO: 12036 - protein, 85 aa, Homo sapiens
AGSGIQNQNGHPTLPSNSVTQGAALNHLSSHTATSGGQQGITLTKESKPSGNILTVPETSRHTGETPNSTASVEGLPNHVHQMTA

SEQ ID NO: 12037 - protein, 85 aa, Homo sapiens
DAVCSPSHGDSKSPGLLSSDNPQLSALLMGKANNNVGTGTCDKVNNIHPAVHTKTDNSVASSPSSAISTATPSPKSTEQTTTNSV

SEQ ID NO: 12038 - protein, 85 aa, Homo sapiens
TSLNSPHSGLHTINGEGMEESQSPMKTDLLLVNHKPSPQIIPSMSVSIYPSSAEVLKACRNLGKNGLSNSSILLDKCPPPRPPSS

SEQ ID NO: 12039 - protein, 85 aa, Homo sapiens
PYPPLPKDKLNPPTPSIYLENKRDAFFPPLHQFCTNPNNPVTVIRGLAGALKLDLGLFSTKTLVEANNEHMVEVRTQLLQPADEN

SEQ ID NO: 12040 - protein, 85 aa, Homo sapiens
WDPTGTKKIWHCESNRSHTTIAKYAQYQASSFQESLREENEKRSHHKDHSDSESTSSDNSGRRRKGPFKTIKFGTNIDLSDDKKW

SEQ ID NO: 12041 - protein, 85 aa, Homo sapiens
KLQLHELTKLPAFVRVVSAGNLLSHVGHTILGMNTVQLYMKVPGSRTPGHQENNNFCSVNINIGPGDCEWFVVPEGYWGVLNDFC

SEQ ID NO: 12042 - protein, 85 aa, Homo sapiens
EKNNLNFLMGSWWPNLEDLYEANVPVYRFIQRPGDLVWINAGTVHWVQAIGWCNNIAWNVGPLTACQYKLAVERYEWNKLQSVKS

SEQ ID NO: 12043 - protein, 85 aa, Homo sapiens
IVPMVHLSWNMARNIKVSDPKLFEMIKYCLLRTLKQCQTLREALIAAGKEIIWHGRTKEEPAHYCSICEVEVFDLLFVTNESNSR

SEQ ID NO: 12044 - protein, 85 aa, Homo sapiens
DDEDDDDDDFDDEEAEEKAPVKKSIRDTPAKNAQKSNQNGKDSKPSSTPRSKMCLASPLPSAMIVNFLWPPSHASYTAYSTGQES

SEQ ID NO: 12045 - protein, 84 aa, Homo sapiens
WPPSHASYTAYSTGQESFKKQEKTPKTPKGPSSVEDIKAKMQASIEKGGSLPKVEAKFINYVKNCFRMTDQEAIQDLWQWRKSL

SEQ ID NO: 12046 - protein, 85 aa, Homo sapiens
SKPSSTPRSKMCLASPLPSAMIVNFLWPPSHASYTAYSTGQESFKKQEKTPKTPKGPSSVEDIKAKMQASIEKGGSLPKVEAKFI

SEQ ID NO: 12047 - protein, 85 aa, Homo sapiens
VNELYPYIVEFEEEAKNPGLETHRKRKRSGNSDSIERDAAQEAEAGTGLEPGSNSGQCSVPLKKGKDAPIKKESLGHWSQGLKIS

SEQ ID NO: 12048 - protein, 85 aa, Homo sapiens
MQDPKMQVYKDEQVVVIKDKYPKARYHWLVLPWTSISSLKAVAREHLELLKHMHTVGEKVIVDFAGSSKLRFRLGYHAIPSMSHV

SEQ ID NO: 12049 - protein, 85 aa, Homo sapiens
AEAGTGLEPGSNSGQCSVPLKKGKDAPIKKESLGHWSQGLKISMQDPKMQVYKDEQVVVIKDKYPKARYHWLVLPWTSISSLKAV

SEQ ID NO: 12050 - protein, 85 aa, Homo sapiens
AREHLELLKHMHTVGEKVIVDFAGSSKLRFRLGYHAIPSMSHVHLHVISQDFDSPCLKNKKHWNSFNTEYFLESQAVIEMVQEAG

SEQ ID NO: 12051 - protein, 85 aa, Homo sapiens
YISKSGKTQENRNGSIGPSIVCKSIQMNQAENSLQEEQEGPLDLTVNRMQEQNTQQELSAGAPVFSPSKPFSEEYLPVHKTHSQC

SEQ ID NO: 12052 - protein, 84 aa, Homo sapiens
SIQMNQAENSLQEEQEGPLDLTVNRMQEQNTQQELSAGAPVFSPSKPFSEEYLPVHKTHSQCSAPLTYHMRYISSVNCLHNLYF

SEQ ID NO: 12053 - protein, 85 aa, Homo sapiens
EKVKTWFMAQRLRCGISWSSEEIEETRARVVYRRDQLHFKSLLSFTHHAGRPPEEVPPPPVPAPEQVGIGIGTASWNHSTTVPQP

SEQ ID NO: 12054 - protein, 85 aa, Homo sapiens
QARDKPPPIALIASSCKEESASSVTPSSSSTSSSFQVLANGATAASKPLQPLGCVPQSVSPSEQALPPHLEPAWPQGLRHNSVPG

SEQ ID NO: 12055 - protein, 85 aa, Homo sapiens
RVGPTEYLSPDMQRQRKTKRKTKEQLAILKSFFLQCQWARREDYQKLEQITGLPRPEIIQWFGDTRYALKHGQLKWFRDNAVPGA

SEQ ID NO: 12056 - protein, 85 aa, Homo sapiens
ALKHGQLKWFRDNAVPGAPSFQDPAIPTPPPSTRSLNERAETPPLPIPPPPPDIQPLERYWAAHQQLRETDIPQLSQASRLSTQQ

SEQ ID NO: 12057 - protein, 85 aa, Homo sapiens
LSFTHHAGRPPEEVPPPPVPAPEQVGIGIGTASWNHSTTVPQPQARDKPPPIALIASSCKEESASSVTPSSSSTSSSFQVLANGA

SEQ ID NO: 12058 - protein, 85 aa, Homo sapiens
TAASKPLQPLGCVPQSVSPSEQALPPHLEPAWPQGLRHNSVPGRVGPTEYLSPDMQRQRKTKRKTKEQLAILKSFFLQCQWARRE

SEQ ID NO: 12059 - protein, 85 aa, Homo sapiens
DYQKLEQITGLPRPEIIQWFGDTRYALKHGQLKWFRDNAVPGAPSFQDPAIPTPPPSTRSLNERAETPPLPIPPPPPDIQPLERY

SEQ ID NO: 12060 - protein, 85 aa, Homo sapiens
HCESNRSHTTIAKYAQYQASSFQESLREENEKRSHHKDHSDSESTSSDNSGRRRKGPFKTIKFGTNIDLSDDKNRKSSKPCWSYH

SEQ ID NO: 12061 - protein, 84 aa, Homo sapiens
SLREENEKRSHHKDHSDSESTSSDNSGRRRKGPFKTIKFGTNIDLSDDKNRKSSKPCWSYHIGHEHSSTIHESSREQNTRSSGK

SEQ ID NO: 12062 - protein, 33 aa, Homo sapiens
PQTDGSRRQPEMGQPAKACHLHLAQTQAFYWPA

SEQ ID NO: 12063 - protein, 13 aa, Homo sapiens
ADNCPRRTADRKE

SEQ ID NO: 12064 - protein, 30 aa, Homo sapiens
QPAFSTAFLQSLPLARSAPPERAVRTRHPG

SEQ ID NO: 12065 - protein, 24 aa, Homo sapiens
GASPGPGIEQGVEDEAEPPEVAAV

SEQ ID NO: 12066 - protein, 4 aa, Homo sapiens
VHPG

SEQ ID NO: 12067 - protein, 9 aa, Homo sapiens
SQTAYANKA

SEQ ID NO: 12068 - protein, 14 aa, Homo sapiens
QHSGLAHRDGSAAH

SEQ ID NO: 12069 - protein, 4 aa, Homo sapiens
GKIP

SEQ ID NO: 12070 - protein, 15 aa, Homo sapiens
PQSGPGVCNVQSSAL

SEQ ID NO: 12071 - protein, 10 aa, Homo sapiens
GTAPASGTQH

SEQ ID NO: 12072 - protein, 8 aa, Homo sapiens
PDAVPGFP

SEQ ID NO: 12073 - protein, 85 aa, Homo sapiens
APSAPWGPPAGPLHVQLFPCLSPLLLDARTLDPQGAPPAGWEVFDVWQGLRHQPWKQLCLELRAAPGPAESGLRPEGAASPGAGP

SEQ ID NO: 12074 - protein, 84 aa, Homo sapiens
LFPCLSPLLLDARTLDPQGAPPAGWEVFDVWQGLRHQPWKQLCLELRAAPGPAESGLRPEGAASPGAGPAGGIHQIPAAACPPN

SEQ ID NO: 12075 - protein, 85 aa, Homo sapiens
IQCETVSQISWGQNTQGHLSPALSSHRLVQACSIHNFCHLSSTMCIYMHILTPGESSKTWGRSSVVPKEEGEEEEKRAPKKKGRT

SEQ ID NO: 12076 - protein, 85 aa, Homo sapiens
WGPGTLGQKELASGDEGLKSLVDGYKQWSSSAPNLVKGPRSSPALPGFTSLMEMALLAASWVVPIDIEEDEDSEGPGSGESRLQH

SEQ ID NO: 12077 - protein, 85 aa, Homo sapiens
SPSQSYLCIPFPRGEDGDGPSSDGIHEEPTPVNSATSTPQLTPTNSLKRGGAHHRRCEVALLGCGAVLAATGLGFDLLEAGKCQL

SEQ ID NO: 12078 - protein, 85 aa, Homo sapiens
LPLEEPEPPAREEKKRREGLFQRSSRPRRSTSPPSRKLFKKEEPMLLLGDPSASLTLLSLSSISECNSTRSLLRSDSDEIVVYEM

SEQ ID NO: 12079 - protein, 85 aa, Homo sapiens
PVSPVEAPPLSPCTHNPLVNVRVERFKRDPNQSLTPTHVTLTTPSQPSSHRRTPSDGALKPETLLASRSPSSNGLSPSPGAGMLK

SEQ ID NO: 12080 - protein, 85 aa, Homo sapiens
TPSPSRDPGEFPRLPDPNVVFPPTPRRWNTQQDSTLERPKTLEFLPRPRPSANRQRLDPWWFVSPSHARSTSPANSSSTETPSNL

SEQ ID NO: 12081 - protein, 85 aa, Homo sapiens
AGPQPLALQLEQLLNPRPSEADPEADPEEATAARVIDRFDEGEDGEGDFLVVGSIRKLASASLLDTDKRYCGKTTSRKAWNEDHW

SEQ ID NO: 12082 - protein, 85 aa, Homo sapiens
EQTLPGSSDEEISDEEGSGDEDSEGLGLEEYDEDDLGAAEEQECGDHRESKKSRSHSAKTPGFSVQSISDFEKFTKGMDDLGSSE

SEQ ID NO: 12083 - protein, 85 aa, Homo sapiens
EEEDEESGMEEGDDAEDSQGESEEDRAGDRNSEDDGVVMTFSSVKVSEEVEKGRAVKNQIALWDQLLEGRIKLQKALLTTNQLPQ

SEQ ID NO: 12084 - protein, 85 aa, Homo sapiens
PDVFPLFKDKGGPEFSSALKNSHKALKALLRSLVGLQEELLFQYPDTRYLVDGTKPNAGSEEISSEDDELVEEKKQQRRRVPAKR

SEQ ID NO: 12085 - protein, 85 aa, Homo sapiens
KLEMEDYPSFMAKRFADFTVYRNRTLQKWHDKTKLASGKLGKGFGAFERSILTQIDHILMDKERLLRRTQTKRSVYRVLGKPEPA

SEQ ID NO: 12086 - protein, 85 aa, Homo sapiens
AQPVPESLPGEPEILPQAPANAHLKDLDEEIFDDDDFYHQLLRELIERKTSSLDPNDQVAMGRQWLAIQKLRSKIHKKVDRKASK

SEQ ID NO: 12087 - protein, 84 aa, Homo sapiens
SSLDPNDQVAMGRQWLAIQKLRSKIHKKVDRKASKGRKLRFHVLSKLLSFMAPIDHTTMNDDARTELYRSLFGQLHPPDEGHGD

SEQ ID NO: 12088 - protein, 85 aa, Homo sapiens
EDGEGDFLVVGSIRKLASASLLDTDKRYCGKTTSRKAWNEDHWEQTLPGSSDEEISDEEGSGDEDSEGLGLEEYDEDDLGAAEEQ

SEQ ID NO: 12089 - protein, 85 aa, Homo sapiens
ECGDHRESKKSRSHSAKTPGFSVQSISDFEKFTKGMDDLGSSEEEEDEESGMEEGDDAEDSQGESEEDRAGDRNSEDDGVVMTFS

SEQ ID NO: 12090 - protein, 85 aa, Homo sapiens
SVKVSEEVEKGRAVKNQIALWDQLLEGRIKLQKALLTTNQLPQPDVFPLFKDKGGPEFSSALKNSHKALKALLRSLVGLQEELLF

SEQ ID NO: 12091 - protein, 85 aa, Homo sapiens
QYPDTRYLVDGTKPNAGSEEISSEDDELVEEKKQQRRRVPAKRKLEMEDYPSFMAKRFADFTVYRNRTLQKWHDKTKLASGKLGK

SEQ ID NO: 12092 - protein, 85 aa, Homo sapiens
GFGAFERSILTQIDHILMDKERLLRRTQTKRSVYRVLGKPEPAAQPVPESLPGEPEILPQAPANAHLKDLDEEIFDDDDFYHQLL

SEQ ID NO: 12093 - protein, 85 aa, Homo sapiens
RELIERKTSSLDPNDQVAMGRQWLAIQKLRSKIHKKVDRKASKGRKLRFHVLSKLLSFMAPIDHTTMNDDARTELYRSLFGQLHP

SEQ ID NO: 12094 - protein, 85 aa, Homo sapiens
ARQPEEEETAVARARRPPLWLLCLVACWLLGAGAEADFSILDEAQVLASQMRRLAAEELGVVTMQRIFNSFVYTEKISNGESEVQ

SEQ ID NO: 12095 - protein, 85 aa, Homo sapiens
QLAKKIREKFNRYLDVVNRNKQVVEASYTAHLTSPLTAIQDCCTIPPSMMEFDGNFNTNVSRTISCDRLSTTVNSRAFNPGRDLN

SEQ ID NO: 12096 - protein, 85 aa, Homo sapiens
SVLADNLKSNPGIKWQYFSSEEGIFTVFPAHKFRCKGSYEHRSRPIYVSTVRPQSKHIVVILDHGASVTDTQLQIAKDAAQVILS

SEQ ID NO: 12097 - protein, 85 aa, Homo sapiens
AIDEHDKISVLTVADTVRTCSLDQCYKTFLSPATSETKRKMSTFVSSVKSSDSPTQHAVGFQKAFQLIRSTNNNTKFQANTDMVI

SEQ ID NO: 12098 - protein, 85 aa, Homo sapiens
IYLSAGITSKDSSEEDKKATLQVINEENSFLNNSVMILTYALMNDGVTGLKELAFLRDLAEQNSGKYGVPDRMALPVIKGSMMVL

SEQ ID NO: 12099 - protein, 85 aa, Homo sapiens
NQLSNLETTVGRFYTNLPNRMIDEAVFSLPFSDEMGDGLIMTVSKPCYFGNLLLGIVGVDVNLAYILEDVTYYQDSLASYTFLID

SEQ ID NO: 12100 - protein, 85 aa, Homo sapiens
DKGYTLMHPSLTRPYLLSEPPLHTDIIHYENIPKFELVRQNILSLPLGSQIIAVPVNSSLSWHINKLRETGKEAYNVSYAWKMVQ

SEQ ID NO: 12101 - protein, 85 aa, Homo sapiens
DTSFILCIVVIQPEIPVKQLKNLNTVPSSKLLYHRLDLLGQPSACLHFKQLATLESPTIMLSAGSFSSPYEHLSQPETKRMVEHY

SEQ ID NO: 12102 - protein, 85 aa, Homo sapiens
TAYLSDNTRLIANPGLKFSVRNEVMATSHVTDEWMTQMEMSSLNTYIVRRYIATPNGVLRIYPGSLMDKAFDPTRRQWYLHAVAN

SEQ ID NO: 12103 - protein, 85 aa, Homo sapiens
PGLISLTGPYLDVGGAGYVVTISHTIHSSSTQLSSGHTVAVMGIDFTLRYFYKVLMDLLPVCNQDGGNKIRCFIMEDRGYLVAHP

SEQ ID NO: 12104 - protein, 85 aa, Homo sapiens
TLIDPKGHAPVEQQHITHKEPLVANDILNHPNFVKKNLCNSFSDRTVQRFYKFNTSLAGDLTNLVHGSHCSKYRLARIPGTNAFV

SEQ ID NO: 12105 - protein, 85 aa, Homo sapiens
GIVNETCDSLAFCACSMVDRLCLNCHRMEQNECECPCECPLEVNECTGNLTNAENRNPSCEVHQEPVTYTAIDPGLQDALHQCVN

SEQ ID NO: 12106 - protein, 85 aa, Homo sapiens
SRCSQRLESGDCFGVLDCEWCMVDSDGKTHLDKPYCAPQKECFGGIVGAKSPYVDDMGAIGDEVITLNMIKSAPVGPVAGGIMGC

SEQ ID NO: 12107 - protein, 85 aa, Homo sapiens
IMVLVLAVYAYRHQIHRRSHQHMSPLAAQEMSVRMSNLENDRDERDDDSHEDRGIISNTRFIAAVIERHAHSPERRRRYWGRSGT

SEQ ID NO: 12108 - protein, 85 aa, Homo sapiens
EAQVLASQMRRLAAEELGVVTMQRIFNSFVYTEKISNGESEVQQLAKKIREKFNRYLDVVNRNKQVVEASYTAHLTSPLTAIQDC

SEQ ID NO: 12109 - protein, 85 aa, Homo sapiens
CTIPPSMMEFDGNFNTNVSRTISCDRLSTTVNSRAFNPGRDLNSVLADNLKSNPGIKWQYFSSEEGIFTVFPAHKFRCKGSYEHR

SEQ ID NO: 12110 - protein, 85 aa, Homo sapiens
SRPIYVSTVRPQSKHIVVILDHGASVTDTQLQIAKDAAQVILSAIDEHDKISVLTVADTVRTCSLDQCYKTFLSPATSETKRKMS

SEQ ID NO: 12111 - protein, 85 aa, Homo sapiens
TFVSSVKSSDSPTQHAVGFQKAFQLIRSTNNNTKFQANTDMVIIYLSAGITSKDSSEEDKKATLQVINEENSFLNNSVMILTYAL

SEQ ID NO: 12112 - protein, 85 aa, Homo sapiens
MNDGVTGLKELAFLRDLAEQNSGKYGVPDRMALPVIKGSMMVLNQLSNLETTVGRFYTNLPNRMIDEAVFSLPFSDEMGDGLIMT

SEQ ID NO: 12113 - protein, 85 aa, Homo sapiens
VSKPCYFGNLLLGIVGVDVNLAYILEDVTYYQDSLASYTFLIDDKGYTLMHPSLTRPYLLSEPPLHTDIIHYENIPKFELVRQNI

SEQ ID NO: 12114 - protein, 85 aa, Homo sapiens
LSLPLGSQIIAVPVNSSLSWHINKLRETGKEAYNVSYAWKMVQDTSFILCIVVIQPEIPVKQLKNLNTVPSSKLLYHRLDLLGQP

SEQ ID NO: 12115 - protein, 85 aa, Homo sapiens
SACLHFKQLATLESPTIMLSAGSFSSPYEHLSQPETKRMVEHYTAYLSDNTRLIANPGLKFSVRNEVMATSHVTDEWMTQMEMSS

SEQ ID NO: 12116 - protein, 85 aa, Homo sapiens
MNTYIVRRYIATPNGVLRIYPGSLMDKAFDPTRRQWYLHAVANPGLISLTGPYLDVGGAGYVVTISHTIHSSSTQLSSGHTVAVM

SEQ ID NO: 12117 - protein, 85 aa, Homo sapiens
GIDFTLRYFYKVLMDLLPVCNQDGGNKIRCFIMEDRGYLVAHPTLIDPKGHAPVEQQHITHKEPLVANDILNHPNFVKKNLCNSF

SEQ ID NO: 12118 - protein, 85 aa, Homo sapiens
SDRTVQRFYKFNTSLAGDLTNLVHGSHCSKYRLARIPGTNAFVGIVNETCDSLAFCACSMVDRLCLNCHRMEQNECECPCECPLE

SEQ ID NO: 12119 - protein, 85 aa, Homo sapiens
VNECTGNLTNAENRNPSCEVHQEPVTYTAIDPGLQDALHQCVNSRCSQRLESGDCFGVLDCEWCMVDSDGKTHLDKPYCAPQKEC

SEQ ID NO: 12120 - protein, 85 aa, Homo sapiens
FGGIVGAKSPYVDDMGAIGDEVITLNMIKSAPVGPVAGGIMGCIMVLVLAVYAYRHQIHRRSHQHMSPLAAQEMSVRMSNLENDR

SEQ ID NO: 12121 - protein, 85 aa, Homo sapiens
DERDDDSHEDRGIISNTRFIAAVIERHAHSPERRRRYWGRSGTESDHGYSTMSPQEDSENPPCNNDPLSAGVDVGNHDEDLDLDT

SEQ ID NO: 12122 - protein, 84 aa, Homo sapiens
CNKREIEGRAIRLELQGPRGSPNARSQPSKTLFVKGLSEDTTEETLKESFDGSVRARIVTDRETGSSKGGSLWIRTRRRENSQN

SEQ ID NO: 12123 - protein, 27 aa, Homo sapiens
PTAWVSFGTGQHCEARRYWTWARAPAF

SEQ ID NO: 12124 - protein, 13 aa, Homo sapiens
ASGWATDSCTSPC

SEQ ID NO: 12125 - protein, 17 aa, Homo sapiens
RDCPARTCWPGRSALLS

SEQ ID NO: 12126 - protein, 31 aa, Homo sapiens
RPAPSGNRPGRWCGSTGWRTGCTSCRDQWRL

SEQ ID NO: 12127 - protein, 15 aa, Homo sapiens
SATRCWNGAWASGAR

SEQ ID NO: 12128 - protein, 13 aa, Homo sapiens
ARRPCMALPSGSR

SEQ ID NO: 12129 - protein, 85 aa, Homo sapiens
RGAPGNCVGAEQALARRKRAQTVAIRGHPRPPGPPGDTRAESPPDPLQSAGDDEDDEEEDEEEEIDVVTVEKRRSSSNTKAVTTF

SEQ ID NO: 12130 - protein, 85 aa, Homo sapiens
TITVRPKNAALGPGRAQSSELILKRCLPIHQQHNYAAPSPYVESEDAPPQKKIKSEASPRPLKSVIPPKAKSLSPRNSDSEDSER

SEQ ID NO: 12131 - protein, 85 aa, Homo sapiens
PPDPLQSAGDDEDDEEEDEEEEIDVVTVEKRRSSSNTKAVTTFTITVRPKNAALGPGRAQSSELILKRCLPIHQQHNYAAPSPYV

SEQ ID NO: 12132 - protein, 85 aa, Homo sapiens
ESEDAPPQKKIKSEASPRPLKSVIPPKAKSLSPRNSDSEDSERRRNHNILERQRRNDLRSSFLTLRDHVPELVKNEKAAKVVILK

SEQ ID NO: 12133 - protein, 84 aa, Homo sapiens
HGLEQYLSRFEEAMKLRKQLISEKPSQEDGNTTEEFDSFRIFRLVGCALLALGVRAFVCKYLSIFAPFLTLQLAYMGLYKYFPK

SEQ ID NO: 12134 - protein, 84 aa, Homo sapiens
KHYQQNEDKMRKSFNQQLADAIAVIKGMYQQFFEVEEENVSLQDASTVKTNILLRKLKEKEEVIKELKEELDQYKDFGFHKMSK

SEQ ID NO: 12135 - protein, 84 aa, Homo sapiens
EESSICDPSSENSVAGLQTCFLYLSMLQVKTDEKLNVSDENTASCPLSPIKMCLNRPIEWNLNLTTASLTSCTVHNQNLKSEEK

SEQ ID NO: 12136 - protein, 85 aa, Homo sapiens
DLTVNRMQEQNTQQGDGVLDLSTKKTSIKSEESSICDPSSENSVAGLQTCFLYLSMLQVKTDEKLNVSDENTASCPLSPIKMCLN

SEQ ID NO: 12137 - protein, 85 aa, Homo sapiens
FRPLNKQVTNAVLKLIEKERNGETINTRLISGVVQSYEARLLEEQRRVQVYLHESTQDELARKCEQVLIEKHLEIFHTEFQNLLD

SEQ ID NO: 12138 - protein, 85 aa, Homo sapiens
ADKNEDLGRMYNLVSRIQDGLGELKKLLETHIHNQGLAAIEKCGEAALNDPKMYVQTVLDVHKKYNALVMSAFNNDAGFVAALDK

SEQ ID NO: 12139 - protein, 85 aa, Homo sapiens
ACGRFINNNAVTKMAQSSSKSPELLARYCDSLLKKSSKNPEEAELEDTLNQVMVVFKYIEDKDVFQKFYAKMLAKRLVHQNSASD

SEQ ID NO: 12140 - protein, 85 aa, Homo sapiens
DAEASMISKLKQACGFEYTSKLQRMFQDIGVSKDLNEQFKKHLTNSEPLDLDFSIQVLSSGSWPFQQSCTFALPSELERSYQRFT

SEQ ID NO: 12141 - protein, 85 aa, Homo sapiens
AFYASRHSGRKLTWLYQLSKGELVTNCFKNRYTLQASTFQMAILLQYNTEDAYTVQQLTDSTQIKMDILAQVLQILLKSKLLVLE

SEQ ID NO: 12142 - protein, 85 aa, Homo sapiens
DENANVDEVELKPDTLIKLYLGYKNKKLRVNINVPMKTEQKQEQETTHKNIEEDRKLLIQAAIVRIMKMRKVLKHQQLLGEVLTQ

SEQ ID NO: 12143 - protein, 85 aa, Homo sapiens
SSKVLNGICAYLNRHWVRRECDEGRKGIYEIYSLALVTWRDCLFRPLNKQVTNAVLKLIEKERNGETINTRLISGVVQSYEARLL

SEQ ID NO: 12144 - protein, 85 aa, Homo sapiens
EEQRRVQVYLHESTQDELARKCEQVLIEKHLEIFHTEFQNLLDADKNEDLGRMYNLVSRIQDGLGELKKLLETHIHNQGLAAIEK

SEQ ID NO: 12145 - protein, 85 aa, Homo sapiens
CGEAALNDPKMYVQTVLDVHKKYNALVMSAFNNDAGFVAALDKACGRFINNNAVTKMAQSSSKSPELLARYCDSLLKKSSKNPEE

SEQ ID NO: 12146 - protein, 85 aa, Homo sapiens
AELEDTLNQVMVVFKYIEDKDVFQKFYAKMLAKRLVHQNSASDDAEASMISKLKQACGFEYTSKLQRMFQDIGVSKDLNEQFKKH

SEQ ID NO: 12147 - protein, 85 aa, Homo sapiens
MTNSEPLDLDFSIQVLSSGSWPFQQSCTFALPSELERSYQRFTAFYASRHSGRKLTWLYQLSKGELVTNCFKNRYTLQASTFQMA

SEQ ID NO: 12148 - protein, 85 aa, Homo sapiens
ILLQYNTEDAYTVQQLTDSTQIKMDILAQVLQILLKSKLLVLEDENANVDEVELKPDTLIKLYLGYKNKKLRVNINVPMKTEQKQ

SEQ ID NO: 12149 - protein, 85 aa, Homo sapiens
SESSSKSSQPLASKQKKDGTEKRGRGRPRKQPPRQERQVRDRGVTRSKAEKVRPPTVPVPQVDIVPGRLSEAEWMALTALEEGED

SEQ ID NO: 12150 - protein, 85 aa, Homo sapiens
GRGRPRKQPPRQERQVRDRGVTRSKAEKVRPPTVPVPQVDIVPGRLSEAEWMALTALEEGEDVVGDILADLLARVMDSAFKVYLT

SEQ ID NO: 12151 - protein, 85 aa, Homo sapiens
YRDDLERFKEFKAQGVAIKFGKFSVKENKQLEKNVEDFLALTGIESADKLLYTDRYPEEKSVITNLKRRYSFRLHIGRNIARPWK

SEQ ID NO: 12152 - protein, 85 aa, Homo sapiens
LIYYRAKKMFDVNNYKGRYSEGDTEKLKMYHSLLGNDWKTIGEMVARSSLSVALKFSQISSQRNRGAWSKSETRKLIKAVEEVIL

SEQ ID NO: 12153 - protein, 85 aa, Homo sapiens
KKMSPQELKEVDSKLQENPESCLSIVREKLYKGISWVEVEAKVQTRNWMQCKSKWTEILTKRMTNGRRIYYGMNALRAKVSLIER

SEQ ID NO: 12154 - protein, 85 aa, Homo sapiens
MYEINVEDTNEIDWEDLASAIGDVPPSYVQTKFSRLKAVYVPFWQKKTFPEIIDYLYETTLPLLKEKLEKMMEKKGTKIQTPAAP

SEQ ID NO: 12155 - protein, 85 aa, Homo sapiens
GIESADKLLYTDRYPEEKSVITNLKRRYSFRLHIGRNIARPWKLIYYRAKKMFDVNNYKGRYSEGDTEKLKMYHSLLGNDWKTIG

SEQ ID NO: 12156 - protein, 85 aa, Homo sapiens
EMVARSSLSVALKFSQISSQRNRGAWSKSETRKLIKAVEEVILKKMSPQELKEVDSKLQENPESCLSIVREKLYKGISWVEVEAK

SEQ ID NO: 12157 - protein, 85 aa, Homo sapiens
VQTRNWMQCKSKWTEILTKRMTNGRRIYYGMNALRAKVSLIERLYEINVEDTNEIDWEDLASAIGDVPPSYVQTKFSRLKAVYVP

SEQ ID NO: 12158 - protein, 85 aa, Homo sapiens
FWQKKTFPEIIDYLYETTLPLLKEKLEKMMEKKGTKIQTPAAPKQVFPFRDIFYYEDDSEGEDIEKESEGQAPCMAHACNSSTLG

SEQ ID NO: 12159 - protein, 85 aa, Homo sapiens
LQDVAKRVEEIWQEFLAPGAPSAINLDSHSYEITSQNVKDGGRYTFEDAQEHIYKLMKSDSYARFLRSNAYQDLLLAKKKPESEQ

SEQ ID NO: 12160 - protein, 84 aa, Homo sapiens
KYGRIREIELKNRHGLVPFAFVRFEDPRDAEDAIYGRNGYDYGQCRLRVEFPRTYGGRGGWPRGGRNGPPTRRSDFRVLVSENY

SEQ ID NO: 12161 - protein, 85 aa, Homo sapiens
NGDDAFARRPRDDAQISEKLRKAFDDIAKYFSKKEWEKMKSSEKIVYVYMKLNYEVMTKLGFKVTLPPFMRSKRAADFHGNDFGN

SEQ ID NO: 12162 - protein, 85 aa, Homo sapiens
DRNHRNQVERPQMTFGSLQRIFPKIMPKKPAEEENGLKEVPEASGPQNDGKQLCPPGNPSTLEKINKTSGPKRGKHAWTHRLRER

SEQ ID NO: 12163 - protein, 84 aa, Homo sapiens
QRIFPKIMPKKPAEEENGLKEVPEASGPQNDGKQLCPPGNPSTLEKINKTSGPKRGKHAWTHRLRERKQLVVYEEISDPEEDDE

SEQ ID NO: 12164 - protein, 85 aa, Homo sapiens
EKIVYVYMKLNYEVMTKLGFKVTLPPFMRSKRAADFHGNDFGNDRNHRNQVERPQMTFGSLQRIFPKIMPKKPAEEENGLKEVPE

SEQ ID NO: 12165 - protein, 85 aa, Homo sapiens
SGEEAVALLEELWGPAASPDGSSATRVPQDVTQGPGATGGKEDSGMIPLGTAPGAEGPAPGDSQAVRPYKQEPSSPPLAPGLPAF

SEQ ID NO: 12166 - protein, 85 aa, Homo sapiens
LAAPGTTSCPECGKTSLKPAHLLRHRQSHSGEKPHACPECGKAFRRKEHLRRHRDTHPGSPGSPGPALRPLPAREKPHACCECGK

SEQ ID NO: 12167 - protein, 85 aa, Homo sapiens
DSGMIPLGTAPGAEGPAPGDSQAVRPYKQEPSSPPLAPGLPAFLAAPGTTSCPECGKTSLKPAHLLRHRQSHSGEKPHACPECGK

SEQ ID NO: 12168 - protein, 85 aa, Homo sapiens
AFRRKEHLRRHRDTHPGSPGSPGPALRPLPAREKPHACCECGKTFYWREHLVRHRKTHSGARPFACWECGKGFGRREHVLRHQRI

SEQ ID NO: 12169 - protein, 85 aa, Homo sapiens
RLSGNCHMVTFQLEFQILEIQNKERLSSAVTDLNIIMEPTECSELSEFVSRAEERKDLFMFFRSLHFFVEWFEYRKRTFKHLKVK

SEQ ID NO: 12170 - protein, 85 aa, Homo sapiens
VPQKKVKLAADEDDDDDDEEDDDEDDDDDDFDDEEAEEKAPVKKGQESFKKQEKTPKTPKGPSSVEDIKAKMQASIEKGGSLPKV

SEQ ID NO: 12171 - protein, 85 aa, Homo sapiens
RIEKCYFCSGPIYPGHGMMFVRNDCKVFRFCKSKCHKNFKKKRNPRKVRWTKAFRKAAGKELTVVSTDNSFEFEKRRNEPIKYQR

SEQ ID NO: 12172 - protein, 85 aa, Homo sapiens
RNPRKVRWTKAFRKAAGKELTVVSTDNSFEFEKRRNEPIKYQRELWNKTIDAMKRVEEIKQKRQAKFIMNRLKKNKELQKVQDIK

SEQ ID NO: 12173 - protein, 85 aa, Homo sapiens
PPDLRSLGFGRRVRPPQERALLVVFTRSQRKNLFAAGVRGLSLRGCMRLPAALAPGAHQPRHHPDADELHGPRLHPAQLLRAHQI

SEQ ID NO: 12174 - protein, 84 aa, Homo sapiens
RPPQERALLVVFTRSQRKNLFAAGVRGLSLRGCMRLPAALAPGAHQPRHHPDADELHGPRLHPAQLLRAHQIDSHQHSIHRRGQ

SEQ ID NO: 12175 - protein, 85 aa, Homo sapiens
VFDVWQGLRHQPWKQLCLELRAAWGELDAGEAEARARGPQQPPPPDLRSLGFGRRVRPPQERALLVVFTRSQRKNLFAAGVRGLS

SEQ ID NO: 12176 - protein, 85 aa, Homo sapiens
QYSAMDEFHPFIEALLPHVRAIAYTWFNLQARKRKYFKKHEKRMSKDEERAVKDELLSEKPEIKQKWASRLLAKLRKDIRQEYRE

SEQ ID NO: 12177 - protein, 85 aa, Homo sapiens
DFVLTVTGKKHPCCVLSNPDQKGKIRRIDCLRQADKVWRLDLVMVILFKGIPLESTDGERLMKSPHCTNPALCVQPHHITVSVKE

SEQ ID NO: 12178 - protein, 85 aa, Homo sapiens
LDLFLAYYVQEQDSGQSGSPSHNDPAKNPPGYLEDSFVKSGVFNVSELVRVSRTPITQGTGVNFPIGEIPSQPYYHDMNSGVNLQ

SEQ ID NO: 12179 - protein, 85 aa, Homo sapiens
RSLSSPPSSKRPKTISIDENMEPSPTGDFYPSPSSPAAGSRTWHERDQDMSSPTTMKKPEKPLFSSASPQDSSPRLSTFPQHHHP

SEQ ID NO: 12180 - protein, 85 aa, Homo sapiens
RMSKDEERAVKDELLSEKPEIKQKWASRLLAKLRKDIRQEYREDFVLTVTGKKHPCCVLSNPDQKGKIRRIDCLRQADKVWRLDL

SEQ ID NO: 12181 - protein, 85 aa, Homo sapiens
VMVILFKGIPLESTDGERLMKSPHCTNPALCVQPHHITVSVKELDLFLAYYVQEQDSGQSGSPSHNDPAKNPPGYLEDSFVKSGV

SEQ ID NO: 12182 - protein, 85 aa, Homo sapiens
FNVSELVRVSRTPITQGTGVNFPIGEIPSQPYYHDMNSGVNLQRSLSSPPSSKRPKTISIDENMEPSPTGDFYPSPSSPAAGSRT

SEQ ID NO: 12183 - protein, 85 aa, Homo sapiens
WHERDQDMSSPTTMKKPEKPLFSSASPQDSSPRLSTFPQHHHPGIPGVAHSVISTRTPPPPSPLPFPTQAILPPAPSSYFSHPTI

SEQ ID NO: 12184 - protein, 85 aa, Homo sapiens
EFAGQNPDCLESIWLPAQAQALLTLSSWNRSWKLFPRKYICLDVANGYSEHFVEFVKDVRKRFPQHTIMAGNVVTGEMVEELILS

SEQ ID NO: 12185 - protein, 85 aa, Homo sapiens
TYSGVPIIAANMDTVGTFEMAKVLCKFSLFTAVHKHYSLVQWQEFAGQNPDCLESIWLPAQAQALLTLSSWNRSWKLFPRKYICL

SEQ ID NO: 12186 - protein, 85 aa, Homo sapiens
EEETHTDAKIRAENGTGSSPRGPGCSLRHFACEQNLLSRPDGSASFLQGVAEKSRERLIRNTCEAVVLGTLHPRTSITVVLQVVS

SEQ ID NO: 12187 - protein, 85 aa, Homo sapiens
DAGSLLACCLNAACMALVDAGVPMRALFCGVACALDSDGTLVLDPTSKQEKEARAVLTFALDSVERKLLMSSTKGLYSDTELQQC

SEQ ID NO: 12188 - protein, 85 aa, Homo sapiens
SASFLQGVAEKSRERLIRNTCEAVVLGTLHPRTSITVVLQVVSDAGSLLACCLNAACMALVDAGVPMRALFCGVACALDSDGTLV

SEQ ID NO: 12189 - protein, 84 aa, Homo sapiens
DAQRLLYRNVMLENFTLLASLGLASSKTHEITQLESWEEPFMPAWEVVTSAILRVWLRNRSANLLTQIFFPNRQPQVAPEQGRE

SEQ ID NO: 12190 - protein, 85 aa, Homo sapiens
DEFHPFIEALLPHVRAIAYTWFNLQARKRKYFKKHEKRMSKDEERAVKDELLSEKPEIKQKWASRLLAKLRKDIRQEYREDFVLT

SEQ ID NO: 12191 - protein, 85 aa, Homo sapiens
VTGKKHPCCVLSNPDQKGKIRRIDCLRQADKVWRLDLVMVILFKGIPLESTDGERLMKSPHCTNPALCVQPHHITVSVKELDLFL

SEQ ID NO: 12192 - protein, 85 aa, Homo sapiens
AYYVQEQDSGQSGSPSHNDPAKNPPGYLEDSFVKSGVFNVSELVRVSRTPITQGTGVNFPIGEIPSQPYYHDMNSGVNLQRSLSS

SEQ ID NO: 12193 - protein, 85 aa, Homo sapiens
PPSSKRPKTISIDENMEPSPTGDFYPSPSSPAAGSRTWHERDQDMSSPTTMKKPEKPLFSSASPQDSSPRLSTFPQHHHPGIPGV

SEQ ID NO: 12194 - protein, 85 aa, Homo sapiens
EERAVKDELLSEKPEIKQKWASRLLAKLRKDIRQEYREDFVLTVTGKKHPCCVLSNPDQKGKIRRIDCLRQADKVWRLDLVMVIL

SEQ ID NO: 12195 - protein, 85 aa, Homo sapiens
FKGIPLESTDGERLMKSPHCTNPALCVQPHHITVSVKELDLFLAYYVQEQDSGQSGSPSHNDPAKNPPGYLEDSFVKSGVFNVSE

SEQ ID NO: 12196 - protein, 85 aa, Homo sapiens
LVRVSRTPITQGTGVNFPIGEIPSQPYYHDMNSGVNLQRSLSSPPSSKRPKTISIDENMEPSPTGDFYPSPSSPAAGSRTWHERD

SEQ ID NO: 12197 - protein, 85 aa, Homo sapiens
QDMSSPTTMKKPEKPLFSSASPQDSSPRLSTFPQHHHPGIPGVAHSVISTRTPPPPSPLPFPTQAILPPAPSSYFSHPTIRYPPH

SEQ ID NO: 12198 - protein, 84 aa, Homo sapiens
KMYGYVDTLLTMLAMLLKVAMNRAQVCLISSSKSGERHLYLIKVSRDKISDSNDQESANCDAKGLSKGGFLQRTKEEKEVVKET

SEQ ID NO: 12199 - protein, 85 aa, Homo sapiens
AAATLRDPAQGYVTFEDVAVYFSQEEWRLLDDAQRLLYRNVMLENFTLLASLGLASSKTHEITQLESWEEPFMPAWEVVTSAILR

SEQ ID NO: 12200 - protein, 85 aa, Homo sapiens
GSWQGAKAEAAAEQSASVEVPSSNVQQHQKQHCGEKPLKRQEGRVPVLRSCRVHLSEKSLQSREVGKDLLTSSGVLKHQVTHTGE

SEQ ID NO: 12201 - protein, 85 aa, Homo sapiens
KSHRSSKSREAFHAGKRHYKCSECGKAFGQKYLLVQHQRLHTGEKPYECSECGKLFSHKSNLFIHQIVHTGERPYGCSDCGKSFS

SEQ ID NO: 12202 - protein, 85 aa, Homo sapiens
RNADLIQHQRVHTGEKPFTCSECGKAFRHNSTLVQHHRIHTGVRPYECSECGKLFSFNSSLMKHQRVHTGERPYKCSECGKFYSH

SEQ ID NO: 12203 - protein, 85 aa, Homo sapiens
KSSLINHWRVHTGERPYECSECGKFFSQSSSLMQHRKVHTGEKPFKCNECGRFFSENSSLVKHQRVHTGAKPYECRECGKFFRHS

SEQ ID NO: 12204 - protein, 85 aa, Homo sapiens
MENFTLLASLGLASSKTHEITQLESWEEPFMPAWEVVTSAILRGSWQGAKAEAAAEQSASVEVPSSNVQQHQKQHCGEKPLKRQE

SEQ ID NO: 12205 - protein, 85 aa, Homo sapiens
GRVPVLRSCRVHLSEKSLQSREVGKDLLTSSGVLKHQVTHTGEKSHRSSKSREAFHAGKRHYKCSECGKAFGQKYLLVQHQRLHT

SEQ ID NO: 12206 - protein, 85 aa, Homo sapiens
GEKPYECSECGKLFSHKSNLFIHQIVHTGERPYGCSDCGKSFSRNADLIQHQRVHTGEKPFTCSECGKAFRHNSTLVQHHRIHTG

SEQ ID NO: 12207 - protein, 85 aa, Homo sapiens
VRPYECSECGKLFSFNSSLMKHQRVHTGERPYKCSECGKFYSHKSSLINHWRVHTGERPYECSECGKFFSQSSSLMQHRKVHTGE

SEQ ID NO: 12208 - protein, 85 aa, Homo sapiens
LRFFLWIGDVLAAHGPRSYLLKRKQLNAGLMRQEEERRRREEEMRRQQEEMMRRQQEGFKGTFPDAREQEIRMGQMAMGGAMGIN

SEQ ID NO: 12209 - protein, 85 aa, Homo sapiens
EMEAARHEHQVMLMRQDLMRRQEELRRMEELHNQEVQKRKQLELRFFLWIGDVLAAHGPRSYLLKRKQLNAGLMRQEEERRRREE

SEQ ID NO: 12210 - protein, 85 aa, Homo sapiens
EMRRQQEEMMRRQQEGFKGTFPDAREQEIRMGQMAMGGAMGINNRGAMPPAPVPAGTPAPPGPATMMPDGTLGLTPPTTERFGQA

SEQ ID NO: 12211 - protein, 85 aa, Homo sapiens
AHSVISTRTPPPPSPLPFPTQAILPPAPSSYFSHPTIRYPPHLNPQDTLKNYVPSYDPSSPQTSQLRICDWTMNQNGRHLYPSTS

SEQ ID NO: 12212 - protein, 85 aa, Homo sapiens
MNPQDTLKNYVPSYDPSSPQTSQLRICDWTMNQNGRHLYPSTSEDTLGITWQSPGTWASLVPFQVSNRTPILPANVQNYGLNIIG

SEQ ID NO: 12213 - protein, 84 aa, Homo sapiens
TQVYVAFLVYLDLMESKSWHEVNCVGLPELQLICLVGTEIEGEGLQTVVPTPITASLSHNRRIYLNLSFPWLRRMKRQETWGTP

SEQ ID NO: 12214 - protein, 85 aa, Homo sapiens
PKYLEMMELDIGDATQVYVAFLVYLDLMESKSWHEVNCVGLPELQLICLVGTEIEGEGLQTVVPTPITASLSHNRRIYLNLSFPW

SEQ ID NO: 12215 - protein, 85 aa, Homo sapiens
KVYEIQDIYENSWTKLTERFFKNTPWPEAEAIAPQVGNDAVFLILYKELYYRHIYAKVSGGPSLEQRFESYYNYCNLFNYILNAD

SEQ ID NO: 12216 - protein, 85 aa, Homo sapiens
GPAPLELPNQWLWDIIDEFIYQFQSFSQYRCKTAKKSEEEIDFLRSNPKIWNVHSVLNVLHSLVDKSNINRQLEVYTSGGDPESV

SEQ ID NO: 12217 - protein, 85 aa, Homo sapiens
AGEYGRHSLYKMLGYFSLVGLLRLHSLLGDYYQAIKVLENIELNKKSMYSRVPECQVTTYYYVGFAYLMMRRYQDAIRVFANILL

SEQ ID NO: 12218 - protein, 85 aa, Homo sapiens
YIQRTKSMFQRTTYKYEMINKQNEQMHALLAIALTMYPMRIDESIHLQLREKYGDKMLRMQKGDPQVYEELFSYSCPKFLSPVVP

SEQ ID NO: 12219 - protein, 85 aa, Homo sapiens
NYDNVHPNYHKEPFLQQLKVFSDEVQQQAQLSTIRSFLKLYTTMPVAKLAGFLDLTEQEFRIQLLVFKHKMKNLVWTSGISALDG

SEQ ID NO: 12220 - protein, 4 aa, Homo sapiens
ASTH

SEQ ID NO: 12221 - protein, 33 aa, Homo sapiens
PRSSRPRWRLWWRSWGSPSRCWWPRTQACTGSR

SEQ ID NO: 12222 - protein, 85 aa, Homo sapiens
APGRKKKDFSCADRLFALNLGLPFATPEEFFLKWPAAGFELPAFDPRTVSRSGPLCLPESRALLSASPEVVVAVGFPGAGKSTFL

SEQ ID NO: 12223 - protein, 14 aa, Homo sapiens
CGSQTPAGRTWRSC

SEQ ID NO: 12224 - protein, 85 aa, Homo sapiens
SRPTTARPYPSGTASLWETQPDARPTGPRGGRRKTSPAPIACLPSTLACPSPRLRSSFSSGQQPASSSQPLIRGLSPAQGLSASP

SEQ ID NO: 12225 - protein, 85 aa, Homo sapiens
WSSDEKKDIDHETVVEEQIIGENSPPDYSEYMTGKKLPPGGIPGIDLSDPKQLAEFARMKPRKIKEDDAPRTIACPHKLPFLGDP

SEQ ID NO: 12226 - protein, 84 aa, Homo sapiens
PPDYSEYMTGKKLPPGGIPGIDLSDPKQLAEFARMKPRKIKEDDAPRTIACPHKLPFLGDPLASFSVKKGKEAKREEGTVGDGE

SEQ ID NO: 12227 - protein, 85 aa, Homo sapiens
FTFGTAKTATTTPATGFSFSTSGTGGFNFGAPFQPATSTPSTGLFSLATQTPATQTTGFTFGTATLASGGTGFSLGIGASKLNLS

SEQ ID NO: 12228 - protein, 85 aa, Homo sapiens
NKTIDAMKRVEEIKQKRQAKFIMNRLKKNKELQKVQDIKEVKQNIHLIRAPLAGEETVGRENGTAVTRGCGHGRCSLKISVTISF

SEQ ID NO: 12229 - protein, 84 aa, Homo sapiens
DAMKRVEEIKQKRQAKFIMNRLKKNKELQKVQDIKEVKQNIHLIRAPLAGEETVGRENGTAVTRGCGHGRCSLKISVTISFMYI

SEQ ID NO: 12230 - protein, 84 aa, Homo sapiens
FEITPPVVLRLKCGSGPVHISGQHLVAVEEDAESEDEEEEDVKLLSISGKRSAPGGGSKVPQKKVKLAADEDDDDDDEEDDDEE

SEQ ID NO: 12231 - protein, 84 aa, Homo sapiens
SKGQESFKKQEKTPKTPKGPSSVEDIKAKMQASIEKFLACIHNLKEMGGSLPKVEAKFINYVKNCFRMTDQEAIQDLWQWRKSL

SEQ ID NO: 12232 - protein, 85 aa, Homo sapiens
SKPSSTPRSKGQESFKKQEKTPKTPKGPSSVEDIKAKMQASIEKFLACIHNLKEMGGSLPKVEAKFINYVKNCFRMTDQEAIQDL

SEQ ID NO: 12233 - protein, 85 aa, Homo sapiens
EDSMDMDMSPLRPQNYLFGCELKADKDYHFKVDNDENEHQLSLRTVSLGAGAKDELHIVEAEAMNYEGSPIKVTLATLKMSWKPN

SEQ ID NO: 12234 - protein, 84 aa, Homo sapiens
MDMSPLRPQNYLFGCELKADKDYHFKVDNDENEHQLSLRTVSLGAGAKDELHIVEAEAMNYEGSPIKVTLATLKMSWKPNSSIM

SEQ ID NO: 12235 - protein, 85 aa, Homo sapiens
KSCGVSLATAAAAAAAFGDEEKKMAAGKASGESEEASPSLTAEEREALGGLDSRLFGFVRFHEDGARTKALLGKNAAFLYGLGLV

SEQ ID NO: 12236 - protein, 85 aa, Homo sapiens
YFHYNAFQWAIKAFQEVLYVDPSFCRAKEIHLRLGLMFKVNTDYESSLKHFQLALVDCNPCTLSNAEIQFHIAHLYETQRKYHSA

SEQ ID NO: 12237 - protein, 85 aa, Homo sapiens
KEAYEQLLQTENLSAQVKATVLQQLGWMHHTVDLLGDKATKESYAIQYLQKSLEADPNSGQSWYFLGRCYSSIGKVQDAFISYRQ

SEQ ID NO: 12238 - protein, 85 aa, Homo sapiens
SIDKSEASADTWCSIGVLYQQQNQPMDALQAYICAVQLDHGHAAAWMDLGTLYESCNQPQDAIKCYLNATRSKSCSNTSALAARI

SEQ ID NO: 12239 - protein, 85 aa, Homo sapiens
KYLQACKPHHPNTEPVLGLSQTPISQQSLPLHMIPSSQVDDLSSPAKRKRTSSPTKNTSDNWSGGHAVSHPPVQQQAHSWCLTPQ

SEQ ID NO: 12240 - protein, 85 aa, Homo sapiens
KLQHLEQLRANRNNLNPAQKLMLEQLESQFVLMQQHQMRPTGVAQVRSTGIPNGPTADSSLPTNSVSGQQPQLALTRVPSVSQPG

SEQ ID NO: 12241 - protein, 85 aa, Homo sapiens
VRPACPGQPLANGPFSAGHVPCSTSRTLGSTDTILIGNNHITGSGSNGNVPYLQRNALTLPHNRTNLTSSAEEPWKNQLSNSTQG

SEQ ID NO: 12242 - protein, 85 aa, Homo sapiens
LHKGQSSHSAGPNGERPLSSTGPSQHLQAAGSGIQNQNGHPTLPSNSVTQGAALNHLSSHTATSGGQQGITLTKESKPSGNILTV

SEQ ID NO: 12243 - protein, 85 aa, Homo sapiens
PETSRHTGETPNSTASVEGLPNHVHQMTADAVCSPSHGDSKSPGLLSSDNPQLSALLMGKANNNVGTGTCDKVNNIHPAVHTKTD

SEQ ID NO: 12244 - protein, 85 aa, Homo sapiens
NSVASSPSSAISTATPSPKSTEQTTTNSVTSLNSPHSGLHTINGEGMEESQSPMKTDLLLVNHKPSPQIIPSMSVSIYPSSAEVL

SEQ ID NO: 12245 - protein, 85 aa, Homo sapiens
KACRNLGKNGLSNSSILLDKCPPPRPPSSPYPPLPKDKLNPPTPSIYLENKRDAFFPPLHQFCTNPNNPVTVIRGLAGALKLDLG

SEQ ID NO: 12246 - protein, 85 aa, Homo sapiens
LFSTKTLVEANNEHMVEVRTQLLQPADENWDPTGTKKIWHCESNRSHTTIAKYAQYQASSFQESLREENEKRSHHKDHSDSESTS

SEQ ID NO: 12247 - protein, 85 aa, Homo sapiens
SDNSGRRRKGPFKTIKFGTNIDLSDDKKWKLQLHELTKLPAFVRVVSAGNLLSHVGHTILGMNTVQLYMKVPGSRTPGHQENNNF

SEQ ID NO: 12248 - protein, 85 aa, Homo sapiens
CSVNINIGPGDCEWFVVPEGYWGVLNDFCEKNNLNFLMGSWWPNLEDLYEANVPVYRFIQRPGDLVWINAGTVHWVQAIGWCNNI

SEQ ID NO: 12249 - protein, 85 aa, Homo sapiens
AWNVGPLTACQYKLAVERYEWNKLQSVKSIVPMVHLSWNMARNIKVSDPKLFEMIKYCLLRTLKQCQTLREALIAAGKEIIWHGR

SEQ ID NO: 12250 - protein, 85 aa, Homo sapiens
EEREALGGLDSRLFGFVRFHEDGARTKALLGKNAAFLYGLGLVYFHYNAFQWAIKAFQEVLYVDPSFCRAKEIHLRLGLMFKVNT

SEQ ID NO: 12251 - protein, 85 aa, Homo sapiens
DYESSLKHFQLALVDCNPCTLSNAEIQFHIAHLYETQRKYHSAKEAYEQLLQTENLSAQVKATVLQQLGWMHHTVDLLGDKATKE

SEQ ID NO: 12252 - protein, 85 aa, Homo sapiens
SYAIQYLQKSLEADPNSGQSWYFLGRCYSSIGKVQDAFISYRQSIDKSEASADTWCSIGVLYQQQNQPMDALQAYICAVQLDHGH

SEQ ID NO: 12253 - protein, 85 aa, Homo sapiens
AAAWMDLGTLYESCNQPQDAIKCYLNATRSKSCSNTSALAARIKYLQACKPHHPNTEPVLGLSQTPISQQSLPLHMIPSSQVDDL

SEQ ID NO: 12254 - protein, 85 aa, Homo sapiens
SSPAKRKRTSSPTKNTSDNWSGGHAVSHPPVQQQAHSWCLTPQKLQHLEQLRANRNNLNPAQKLMLEQLESQFVLMQQHQMRPTG

SEQ ID NO: 12255 - protein, 85 aa, Homo sapiens
VAQVRSTGIPNGPTADSSLPTNSVSGQQPQLALTRVPSVSQPGVRPACPGQPLANGPFSAGHVPCSTSRTLGSTDTILIGNNHIT

SEQ ID NO: 12256 - protein, 85 aa, Homo sapiens
GSGSNGNVPYLQRNALTLPHNRTNLTSSAEEPWKNQLSNSTQGLHKGQSSHSAGPNGERPLSSTGPSQHLQAAGSGIQNQNGHPT

SEQ ID NO: 12257 - protein, 85 aa, Homo sapiens
MPSNSVTQGAALNHLSSHTATSGGQQGITLTKESKPSGNILTVPETSRHTGETPNSTASVEGLPNHVHQMTADAVCSPSHGDSKS

SEQ ID NO: 12258 - protein, 85 aa, Homo sapiens
PGLLSSDNPQLSALLMGKANNNVGTGTCDKVNNIHPAVHTKTDNSVASSPSSAISTATPSPKSTEQTTTNSVTSLNSPHSGLHTI

SEQ ID NO: 12259 - protein, 85 aa, Homo sapiens
NGEGMEESQSPMKTDLLLVNHKPSPQIIPSMSVSIYPSSAEVLKACRNLGKNGLSNSSILLDKCPPPRPPSSPYPPLPKDKLNPP

SEQ ID NO: 12260 - protein, 85 aa, Homo sapiens
TPSIYLENKRDAFFPPLHQFCTNPNNPVTVIRGLAGALKLDLGLFSTKTLVEANNEHMVEVRTQLLQPADENWDPTGTKKIWHCE

SEQ ID NO: 12261 - protein, 85 aa, Homo sapiens
SNRSHTTIAKYAQYQASSFQESLREENEKRSHHKDHSDSESTSSDNSGRRRKGPFKTIKFGTNIDLSDDKKWKLQLHELTKLPAF

SEQ ID NO: 12262 - protein, 85 aa, Homo sapiens
VRVVSAGNLLSHVGHTILGMNTVQLYMKVPGSRTPGHQENNNFCSVNINIGPGDCEWFVVPEGYWGVLNDFCEKNNLNFLMGSWW

SEQ ID NO: 12263 - protein, 85 aa, Homo sapiens
PNLEDLYEANVPVYRFIQRPGDLVWINAGTVHWVQAIGWCNNIAWNVGPLTACQYKLAVERYEWNKLQSVKSIVPMVHLSWNMAR

SEQ ID NO: 12264 - protein, 85 aa, Homo sapiens
NIKVSDPKLFEMIKYCLLRTLKQCQTLREALIAAGKEIIWHGRTKEEPAHYCSICEVEVFDLLFVTNESNSRKTYIVHCQDCARK

SEQ ID NO: 12265 - protein, 85 aa, Homo sapiens
TPGILGHWTVCPEHFSAMRGKARDCSEAAPKCNSSTVRFQGLAEGTKGTMKMDMEDADMTLWTEAEFEEKCTYIVNDHPWDSGAD

SEQ ID NO: 12266 - protein, 85 aa, Homo sapiens
GGTSVQAEASLPRNLLFKYATNSEEVIGVMSKEYIPKGTRFGPLIGEIYTNDTVPKNANRKYFWRIYSRGELHHFIDGFNEEKSN

SEQ ID NO: 12267 - protein, 85 aa, Homo sapiens
WMRYVNPAHSPREQNLAACQNGMNIYFYTIKPIPANQELLVWYCRDFAERLHYPYPGELTMMNLTQTQSSLKQPSTEKNELCPKN

SEQ ID NO: 12268 - protein, 85 aa, Homo sapiens
VPKREYSVKEILKLDSNPSKGKDLYRSNISPLTSEKDLDDFRRRGSPEMPFYPRVVYPIRAPLPEDFLKASLAYGIERPTYITRS

SEQ ID NO: 12269 - protein, 85 aa, Homo sapiens
PIPSSTTPSPSARSSPDQSLKSSSPHSSPGNTVSPVGPGSQEHRDSYAYLNASYGTEGLGSYPGYAPLPHLPPAFIPSYNAHYPK

SEQ ID NO: 12270 - protein, 85 aa, Homo sapiens
FLLPPYGMNCNGLSAVSSMNGINNFGLFPRLCPVYSNLLGGGSLPHPMLNPTSLPSSLPSDGARRLLQPEHPREVLVPAPHSAFS

SEQ ID NO: 12271 - protein, 85 aa, Homo sapiens
FTGAAASMKDKACSPTSGSPTAGTAATAEHVVQPKATSAAMAAPSSDEAMNLIKNKRNMTGYKTLPYPLKKQNGKIKYECNVCAK

SEQ ID NO: 12272 - protein, 85 aa, Homo sapiens
TFGQLSNLKVHLRVHSGERPFKCQTCNKGFTQLAHLQKHYLVHTGEKPHECQVCHKRFSSTSNLKTHLRLHSGEKPYQCKVCPAK

SEQ ID NO: 12273 - protein, 85 aa, Homo sapiens
FTQFVHLKLHKRLHTRERPHKCSQCHKNYIHLCSLKVHLKGNCAAAPAPGLPLEDLTRINEEIEKFDISDNADRLEDVEDDISVI

SEQ ID NO: 12274 - protein, 85 aa, Homo sapiens
AEGTKGTMKMDMEDADMTLWTEAEFEEKCTYIVNDHPWDSGADGGTSVQAEASLPRNLLFKYATNSEEVIGVMSKEYIPKGTRFG

SEQ ID NO: 12275 - protein, 85 aa, Homo sapiens
PLIGEIYTNDTVPKNANRKYFWRIYSRGELHHFIDGFNEEKSNWMRYVNPAHSPREQNLAACQNGMNIYFYTIKPIPANQELLVW

SEQ ID NO: 12276 - protein, 85 aa, Homo sapiens
YCRDFAERLHYPYPGELTMMNLTQTQSSLKQPSTEKNELCPKNVPKREYSVKEILKLDSNPSKGKDLYRSNISPLTSEKDLDDFR

SEQ ID NO: 12277 - protein, 85 aa, Homo sapiens
RRGSPEMPFYPRVVYPIRAPLPEDFLKASLAYGIERPTYITRSPIPSSTTPSPSARSSPDQSLKSSSPHSSPGNTVSPVGPGSQE

SEQ ID NO: 12278 - protein, 85 aa, Homo sapiens
HRDSYAYLNASYGTEGLGSYPGYAPLPHLPPAFIPSYNAHYPKFLLPPYGMNCNGLSAVSSMNGINNFGLFPRLCPVYSNLLGGG

SEQ ID NO: 12279 - protein, 85 aa, Homo sapiens
SLPHPMLNPTSLPSSLPSDGARRLLQPEHPREVLVPAPHSAFSFTGAAASMKDKACSPTSGSPTAGTAATAEHVVQPKATSAAMA

SEQ ID NO: 12280 - protein, 85 aa, Homo sapiens
APSSDEAMNLIKNKRNMTGYKTLPYPLKKQNGKIKYECNVCAKTFGQLSNLKVHLRVHSGERPFKCQTCNKGFTQLAHLQKHYLV

SEQ ID NO: 12281 - protein, 85 aa, Homo sapiens
HTGEKPHECQVCHKRFSSTSNLKTHLRLHSGEKPYQCKVCPAKFTQFVHLKLHKRLHTRERPHKCSQCHKNYIHLCSLKVHLKGN

SEQ ID NO: 12282 - protein, 85 aa, Homo sapiens
CAAAPAPGLPLEDLTRINEEIEKFDISDNADRLEDVEDDISVISVVEKEILAVVRKEKEETGLKVSLQRNMGNGLLSSGCSLYES

SEQ ID NO: 12283 - protein, 85 aa, Homo sapiens
QDPKMQVYKDEQVVVIKDKYPKARYHWLVLPWTSISSLKAVAREHLELLKHMHTVGEKVIVDFAGSSKLRFRLGYHAIPSMSHVH

SEQ ID NO: 12284 - protein, 85 aa, Homo sapiens
REHLELLKHMHTVGEKVIVDFAGSSKLRFRLGYHAIPSMSHVHLHVISQDFDSPCLKNKKHWNSFNTEYFLESQAVIEMVQEAGR

SEQ ID NO: 12285 - protein, 85 aa, Homo sapiens
DPSADTWDLSSPLISLWINRFYIYLGFAVSISLWICVQIVIEMQGFATVLAEAVTSLDLPVAIINLKEYDPDDHLIEEVTSKNVC

SEQ ID NO: 12286 - protein, 85 aa, Homo sapiens
VFLVATYTDGLPTESAEWFCKWLEEASIDFRFGKTYLKGMRDAVFGLGNSAYASHFNKVGKNVDKWLWMLGVHRVMSRGEGDCDV

SEQ ID NO: 12287 - protein, 85 aa, Homo sapiens
VKSKHGSIEANFRAWKTKFISQLQALQKGERKKSCGGHCKKGKCESHQHGSEEREEGSQEQDELHHRDTKEEEPFESSSEEEFGG

SEQ ID NO: 12288 - protein, 85 aa, Homo sapiens
EDHQSLNSIVDVEDLGKIMDHVKKEKREKEQQEEKSGLFRNMGRNEDGERRAMITPALREALTKQVDAPRERSLLQTHILWNESH

SEQ ID NO: 12289 - protein, 85 aa, Homo sapiens
RCMETTPSLACANKCVFCWWHHNNPVGTEWLWKMDQPEMILKEAIENHQNMIKQFKGVPGVKAERFEEGMTVKHCALSLVGEPIM

SEQ ID NO: 12290 - protein, 85 aa, Homo sapiens
YPEINRFLKLLHQCKISSFLVTNAQFPAEIRNLEPVTQLYVSVDASTKDSLKKIDRPLFKDFWQQFLDSLKALAVKQQRTVYRLM

SEQ ID NO: 12291 - protein, 85 aa, Homo sapiens
LVKAWNVDELQAYAQLVSLGNPDFIEVKGVTYCRESSASSLTMAHVPWHEEVVQFVRELVDLIPEYEIACEHEHSNCLLIAHRKF

SEQ ID NO: 12292 - protein, 84 aa, Homo sapiens
HSNCLLIAHRKFKIGGEWWTWIDYNRFQELIQEYEDSGGSKTFSAKDYMARTPHWALFGANERSFDPKDTRHQRKNKSKAISGC

SEQ ID NO: 12293 - protein, 85 aa, Homo sapiens
MQGFATVLAEAVTSLDLPVAIINLKEYDPDDHLIEEVTSKNVCVFLVATYTDGLPTESAEWFCKWLEEASIDFRFGKTYLKGMRD

SEQ ID NO: 12294 - protein, 85 aa, Homo sapiens
AVFGLGNSAYASHFNKVGKNVDKWLWMLGVHRVMSRGEGDCDVVKSKHGSIEANFRAWKTKFISQLQALQKGERKKSCGGHCKKG

SEQ ID NO: 12295 - protein, 85 aa, Homo sapiens
KCESHQHGSEEREEGSQEQDELHHRDTKEEEPFESSSEEEFGGEDHQSLNSIVDVEDLGKIMDHVKKEKREKEQQEEKSGLFRNM

SEQ ID NO: 12296 - protein, 85 aa, Homo sapiens
GRNEDGERRAMITPALREALTKQVDAPRERSLLQTHILWNESHRCMETTPSLACANKCVFCWWHHNNPVGTEWLWKMDQPEMILK

SEQ ID NO: 12297 - protein, 85 aa, Homo sapiens
EAIENHQNMIKQFKGVPGVKAERFEEGMTVKHCALSLVGEPIMYPEINRFLKLLHQCKISSFLVTNAQFPAEIRNLEPVTQLYVS

SEQ ID NO: 12298 - protein, 85 aa, Homo sapiens
VDASTKDSLKKIDRPLFKDFWQQFLDSLKALAVKQQRTVYRLMLVKAWNVDELQAYAQLVSLGNPDFIEVKGVTYCRESSASSLT

SEQ ID NO: 12299 - protein, 85 aa, Homo sapiens
MAHVPWHEEVVQFVRELVDLIPEYEIACEHEHSNCLLIAHRKFKIGGEWWTWIDYNRFQELIQEYEDSGGSKTFSAKDYMARTPH

SEQ ID NO: 12300 - protein, 84 aa, Homo sapiens
LDMQSSWVYETGRLCEPEVLNSLEETYSPFFRNNSEKMSMEQRQGFTVLARLVLKSWPCDPPTLILAHCNLCFPGSSDSSDSAS

SEQ ID NO: 12301 - protein, 85 aa, Homo sapiens
IYRPPASRNADSGVHLNRLQFQQQQNSIHAAKQLDMQSSWVYETGRLCEPEVLNSLEETYSPFFRNNSEKMSMEQRQGFTVLARL

SEQ ID NO: 12302 - protein, 85 aa, Homo sapiens
KRHRPVSSSDSSDESPSTSFTSGSMYRIKSKIPNEHKKPAEVFRKDLISAMKLPDSHHINPDSYYLFADTWKEEWEKGVQVPASP

SEQ ID NO: 12303 - protein, 85 aa, Homo sapiens
DTVPQPSLRIIAEKVKDVLFIRPRKYIHCSSPDTTEPGYINIMELAASVCRYDLDDMDIFWLQELNEDLAEMGCGPVDENLMEKT

SEQ ID NO: 12304 - protein, 85 aa, Homo sapiens
VEVLERHCHENMNHAIETEEGLGIEYDEDVICDVCRSPDSEEGNDMVFCDKCNVCVHQACYGILKVPEGSWLCRSCVLGIYPQCV

SEQ ID NO: 12305 - protein, 85 aa, Homo sapiens
LCPKKGGALKTTKTGTKWAHVSCALWIPEVSIACPERMEPITKISHIPPSRWALVCNLCKLKTGACIQCSIKSCITAFHVTCAFE

SEQ ID NO: 12306 - protein, 85 aa, Homo sapiens
HGLEMKTILDEGDEVKFKSYCLKHSQNRQKLGEAEYPHHRAKEQSQAKSEKTSLRAQKLRELEEEFYSLVRVEDVAAELGMPTLA

SEQ ID NO: 12307 - protein, 85 aa, Homo sapiens
VDFIYNYWKLKRKSNFNKPLFPPKEDEENGLVQPKEESIHTRMRMFMHLRQDLERVRNLCYMISRREKLKLSHNKIQEQIFGLQV

SEQ ID NO: 12308 - protein, 85 aa, Homo sapiens
QLLNQEIDAGLPLTNALENSLFYPPPRITLKLKMPKSTPEDHRNSSTETDQQPHSPDSSSSVHSIRNMQVPQESLEMRTKSYPRY

SEQ ID NO: 12309 - protein, 85 aa, Homo sapiens
PLESKNNRLLASLSHSRSEAKESSPAWRTPSSECYHGQSLGKPLVLQAALHGQSSIGNGKSQPNSKFAKSNGLEGSWSGNVTQKD

SEQ ID NO: 12310 - protein, 85 aa, Homo sapiens
SSSEMFCDQEPVFSPHLVSQGSFRKSTVEHFSRSFKETTNRWVKNTEDLQCYVKPTKNMSPKEQFWGRQVLRRSAGRAPYQENDG

SEQ ID NO: 12311 - protein, 84 aa, Homo sapiens
MSPKEQFWGRQVLRRSAGRAPYQENDGYCPDLELSDSEAESDGNKEKVRVRKDSSDRENPPHDSRRDCHGKSKTHPLSHSSMQR

SEQ ID NO: 12312 - protein, 85 aa, Homo sapiens
FRKDLISAMKLPDSHHINPDSYYLFADTWKEEWEKGVQVPASPDTVPQPSLRIIAEKVKDVLFIRPRKYIHCSSPDTTEPGYINI

SEQ ID NO: 12313 - protein, 85 aa, Homo sapiens
MELAASVCRYDLDDMDIFWLQELNEDLAEMGCGPVDENLMEKTVEVLERHCHENMNHAIETEEGLGIEYDEDVICDVCRSPDSEE

SEQ ID NO: 12314 - protein, 85 aa, Homo sapiens
GNDMVFCDKCNVCVHQACYGILKVPEGSWLCRSCVLGIYPQCVLCPKKGGALKTTKTGTKWAHVSCALWIPEVSIACPERMEPIT

SEQ ID NO: 12315 - protein, 85 aa, Homo sapiens
KISHIPPSRWALVCNLCKLKTGACIQCSIKSCITAFHVTCAFEHGLEMKTILDEGDEVKFKSYCLKHSQNRQKLGEAEYPHHRAK

SEQ ID NO: 12316 - protein, 85 aa, Homo sapiens
EQSQAKSEKTSLRAQKLRELEEEFYSLVRVEDVAAELGMPTLAVDFIYNYWKLKRKSNFNKPLFPPKEDEENGLVQPKEESIHTR

SEQ ID NO: 12317 - protein, 85 aa, Homo sapiens
MRMFMHLRQDLERVRNLCYMISRREKLKLSHNKIQEQIFGLQVQLLNQEIDAGLPLTNALENSLFYPPPRITLKLKMPKSTPEDH

SEQ ID NO: 12318 - protein, 85 aa, Homo sapiens
RNSSTETDQQPHSPDSSSSVHSIRNMQVPQESLEMRTKSYPRYPLESKNNRLLASLSHSRSEAKESSPAWRTPSSECYHGQSLGK

SEQ ID NO: 12319 - protein, 85 aa, Homo sapiens
PLVLQAALHGQSSIGNGKSQPNSKFAKSNGLEGSWSGNVTQKDSSSEMFCDQEPVFSPHLVSQGSFRKSTVEHFSRSFKETTNRW

SEQ ID NO: 12320 - protein, 85 aa, Homo sapiens
VKNTEDLQCYVKPTKNMSPKEQFWGRQVLRRSAGRAPYQENDGYCPDLELSDSEAESDGNKEKVRVRKDSSDRENPPHDSRRDCH

SEQ ID NO: 12321 - protein, 85 aa, Homo sapiens
KPGSNAPVGGNVTSNFSGDDLECRGIASSPKSQQEINADIKCQVVKEIRCLGRKYEKIFEMLEGVQGPTAVRKRFFESIIKEAAR

SEQ ID NO: 12322 - protein, 84 aa, Homo sapiens
DLECRGIASSPKSQQEINADIKCQVVKEIRCLGRKYEKIFEMLEGVQGPTAVRKRFFESIIKEAARCMRRDFVKHLKKKLKRMI

SEQ ID NO: 12323 - protein, 85 aa, Homo sapiens
DSLIAGSAMSKEKKLMTGHAIPPSQLDSQIDDFTGFSKDGMMQKPGSNAPVGGNVTSNFSGDDLECRGIASSPKSQQEINADIKC

SEQ ID NO: 12324 - protein, 85 aa, Homo sapiens
SMHRGSPIKLVNINSTDIADGRPSIVLGLMWTIILYFQIEELTSNLPQLQSLSSSASSVDSIVSSETPSPPSKRKVTTKIQGNAK

SEQ ID NO: 12325 - protein, 85 aa, Homo sapiens
KALLKWVQYTAGKQTGIEVKDFGKSWRSGVAFHSVIHAIRPELVDLETVKGRSNRENLEDAFTIAETELGIPRLLDPEDVDVDKP

SEQ ID NO: 12326 - protein, 85 aa, Homo sapiens
DEKSIMTYVAQFLKHYPDIHNASTDGQEDDEILPGFPSFANSVQNFKREDRVIFKEMKVWIEQFERDLTRAQMVESNLQDKYQSF

SEQ ID NO: 12327 - protein, 84 aa, Homo sapiens
DKSLPAPLGTIGAWLYRAEVALREEITVQQVHEETANTIQRKLEQHKKIEAIRKELPPAPTATSTHLRNCICARIHALHFCYYG

SEQ ID NO: 12328 - protein, 85 aa, Homo sapiens
VKLLALLEVLSGQKLPCEQGRRMKRIHAVANIGTALKFLEGRKSMHRGSPIKLVNINSTDIADGRPSIVLGLMWTIILYFQIEEL

SEQ ID NO: 12329 - protein, 85 aa, Homo sapiens
TSNLPQLQSLSSSASSVDSIVSSETPSPPSKRKVTTKIQGNAKKALLKWVQYTAGKQTGIEVKDFGKSWRSGVAFHSVIHAIRPE

SEQ ID NO: 12330 - protein, 85 aa, Homo sapiens
MVDLETVKGRSNRENLEDAFTIAETELGIPRLLDPEDVDVDKPDEKSIMTYVAQFLKHYPDIHNASTDGQEDDEILPGFPSFANS

SEQ ID NO: 12331 - protein, 85 aa, Homo sapiens
VQNFKREDRVIFKEMKVWIEQFERDLTRAQMVESNLQDKYQSFKHFRVQYEMKRKQIEHLIQPLHRDGKLSLDQALVKQSWDRVT

SEQ ID NO: 12332 - protein, 85 aa, Homo sapiens
SRLFDWHIQLDKSLPAPLGTIGAWLYRAEVALREEITVQQVHEETANTIQRKLEQHKKIEAIRKELPPAPTATSTHLRNCICARI

SEQ ID NO: 12333 - protein, 84 aa, Homo sapiens
AFNLFVGNLNFNKSAPELKTGISDVFAKNDLAVVDVRIGMTRKFGYVDFESAEDLEKALELTGLKVFGNEIKLEKPKGKDSKKG

SEQ ID NO: 12334 - protein, 85 aa, Homo sapiens
FLELESPGLSKVLRTGAFAYPFLFDNLPLFYRLGLCWGRGHGCGQEALSTSHGYHLFCALLTGFLFASHLPERLAPGRFDYIAPG

SEQ ID NO: 12335 - protein, 84 aa, Homo sapiens
GYHLFCALLTGFLFASHLPERLAPGRFDYIAPGWRQIIGGTSLSSYNESITGRVLHLPLLRPQPPVIPHLCSAGHPLPAGGSAG

SEQ ID NO: 12336 - protein, 85 aa, Homo sapiens
CGQEALSTSHGYHLFCALLTGFLFASHLPERLAPGRFDYIAPGWRQIIGGTSLSSYNESITGRVLHLPLLRPQPPVIPHLCSAGH

SEQ ID NO: 12337 - protein, 85 aa, Homo sapiens
RLPDLIKEVLSMDDEIQKLATELYHQKSVLIMGRGYHYATCLEGALGRPVVICDKEDTETIKNTKRTIKVPHSVDCLQGILSVIP

SEQ ID NO: 12338 - protein, 84 aa, Homo sapiens
IMGRGYHYATCLEGALGRPVVICDKEDTETIKNTKRTIKVPHSVDCLQGILSVIPLQLLAFHLAVLRGYDVDFPRNLAKSVTVE

SEQ ID NO: 12339 - protein, 85 aa, Homo sapiens
YRLESAYEKHLIIKVVLFQFVNSYLSLFYIGFYLKDMERLKELLLVLSLSQSLERQLQAVLVPLAALRFRLLLLSLRGLLLAARA

SEQ ID NO: 12340 - protein, 84 aa, Homo sapiens
LLLSLRGLLLAARAKVRAGGEPVGPRRGGQRGCAGGLARRAEGACAEGIWGRGRPASRCRRLGAHAAQCTDRARGGVETRWACP

SEQ ID NO: 12341 - protein, 85 aa, Homo sapiens
LLLVLSLSQSLERQLQAVLVPLAALRFRLLLLSLRGLLLAARAKVRAGGEPVGPRRGGQRGCAGGLARRAEGACAEGIWGRGRPA

SEQ ID NO: 12342 - protein, 85 aa, Homo sapiens
SMLPSFGFTQEQVACVCEVLQQGGNLERLGRFLWSLPACDHLHKNESVLKAKAVVAFHRGNFRELYKILESHQFSPHNHPKLQQL

SEQ ID NO: 12343 - protein, 85 aa, Homo sapiens
WLKAHYVEAEKLRGRPLGAVGKYRVRRKFPLPRTIWDGEETSYCFKEKSRGVLREWYAHNPYPSPREKRELAEATGLTTTQVSNW

SEQ ID NO: 12344 - protein, 85 aa, Homo sapiens
FKNRRQRDRAAEAKERENTENNNSSSNKQNQLSPLEGGKPLMSSSEEEFSPPQSPDQNSVLLLQGNMGHARSSNYSLPGLTASQP

SEQ ID NO: 12345 - protein, 85 aa, Homo sapiens
HKNESVLKAKAVVAFHRGNFRELYKILESHQFSPHNHPKLQQLWLKAHYVEAEKLRGRPLGAVGKYRVRRKFPLPRTIWDGEETS

SEQ ID NO: 12346 - protein, 85 aa, Homo sapiens
YCFKEKSRGVLREWYAHNPYPSPREKRELAEATGLTTTQVSNWFKNRRQRDRAAEAKERENTENNNSSSNKQNQLSPLEGGKPLM

SEQ ID NO: 12347 - protein, 84 aa, Homo sapiens
KESFDGSVRARIVTDRETGSSKGFGFVDFNSEEDAKAAKEASEEAEEEEVTTSHKERRRSLNSFCPSAFPFPFERKDSGVFTVT

SEQ ID NO: 12348 - protein, 85 aa, Homo sapiens
RLELQGPRGSPNARSQPSKTLFVKGLSEDTTEETLKESFDGSVRARIVTDRETGSSKGFGFVDFNSEEDAKAAKEASEEAEEEEV

SEQ ID NO: 12349 - protein, 21 aa, Homo sapiens
RTWMKKSLMMMTFTTSSFENS

SEQ ID NO: 12350 - protein, 84 aa, Homo sapiens
MDEEIFDDDDFYHQLLRELIERKTSSLDPNDQVAMGRQWLAIQKLRSKIHKKVDRKASKGRKLRTELYRSLFGQLHPPDEGHGD

SEQ ID NO: 12351 - protein, 85 aa, Homo sapiens
VQLDHGHAAAWMDLGTLYESCNQPQDAIKCYLNAARSKRCSNTSTLAARIKFLQAYRAHDPNTEHVLNHSQTPILQQSLSLHMIT

SEQ ID NO: 12352 - protein, 85 aa, Homo sapiens
SSQVEGLSSPAKKKRTSSPTKNGSDNWNGGQSLSHHPVQQVYSLCLTPQKLQHLEQLRANRDNLNPAQKHQLEQLESQFVLMQQM

SEQ ID NO: 12353 - protein, 85 aa, Homo sapiens
RHKEVAQVRTTGIHNGAITDSSLPTNSVSNRQPHGALTRVSSVSQPGVRPACVEKLLSSGAFSAGCIPCGTSKILGSTDTILLGS

SEQ ID NO: 12354 - protein, 85 aa, Homo sapiens
NCIAGSESNGNVPYLQQNTHTLPHNHTDLNSSTEEPWRKQLSNSAQGLHKSQSSCLSGPNEEQPLFSTGSAQYHQATSTGIKKAN

SEQ ID NO: 12355 - protein, 85 aa, Homo sapiens
EHLTLPSNSVPQGDADSHLSCHTATSGGQQGIMFTKESKPSKNRSLVPETSRHTGDTSNGCADVKGLSNHVHQLIADAVSSPNHG

SEQ ID NO: 12356 - protein, 85 aa, Homo sapiens
DSPNLLIADNPQLSALLIGKANGNVGTGTCDKVNNIHPAVHTKTDHSVASSPSSAISTATPSPKSTEQRSINSVTSLNSPHSGLH

SEQ ID NO: 12357 - protein, 85 aa, Homo sapiens
TVNGEGLGKSQSSTKVDLPLASHRSTSQILPSMSVSICPSSTEVLKACRNPGKNGLSNSCILLDKCPPPRPPTSPYPPLPKDKLN

SEQ ID NO: 12358 - protein, 85 aa, Homo sapiens
PPTPSIYLENKRDAFFPPLHQFCTNPKNPVTVIRGLAGALKLDLGLFSTKTLVEANNEHMVEVRTQLLQPADENWDPTGTKKIWR

SEQ ID NO: 12359 - protein, 85 aa, Homo sapiens
CESNRSHTTIAKYAQYQASSFQESLREENEKRTQHKDHSDNESTSSENSGRRRKGPFKTIKFGTNIDLSDNKKWKLQLHELTKLP

SEQ ID NO: 12360 - protein, 85 aa, Homo sapiens
AFARVVSAGNLLTHVGHTILGMNTVQLYMKVPGSRTPGHQENNNFCSVNINIGPGDCEWFVVPEDYWGVLNDFCEKNNLNFLMSS

SEQ ID NO: 12361 - protein, 85 aa, Homo sapiens
WWPNLEDLYEANVPVYRFIQRPGDLVWINAGTVHWVQAVGWCNNIAWNVGPLTACQYKLAVERYEWNKLKSVKSPVPMVHLSWNM

SEQ ID NO: 12362 - protein, 85 aa, Homo sapiens
ARNIKVSDPKLFEMIKYCLLKILKQYQTLREALVAAGKEVIWHGRTNDEPAHYCSICEVEVFNLLFVTNESNTQKTYIVHCHDCA

SEQ ID NO: 12363 - protein, 85 aa, Homo sapiens
TSTLAARIKFLQAYRAHDPNTEHVLNHSQTPILQQSLSLHMITSSQVEGLSSPAKKKRTSSPTKNGSDNWNGGQSLSHHPVQQVY

SEQ ID NO: 12364 - protein, 85 aa, Homo sapiens
SLCLTPQKLQHLEQLRANRDNLNPAQKHQLEQLESQFVLMQQMRHKEVAQVRTTGIHNGAITDSSLPTNSVSNRQPHGALTRVSS

SEQ ID NO: 12365 - protein, 85 aa, Homo sapiens
VSQPGVRPACVEKLLSSGAFSAGCIPCGTSKILGSTDTILLGSNCIAGSESNGNVPYLQQNTHTLPHNHTDLNSSTEEPWRKQLS

SEQ ID NO: 12366 - protein, 85 aa, Homo sapiens
NSAQGLHKSQSSCLSGPNEEQPLFSTGSAQYHQATSTGIKKANEHLTLPSNSVPQGDADSHLSCHTATSGGQQGIMFTKESKPSK

SEQ ID NO: 12367 - protein, 85 aa, Homo sapiens
NRSLVPETSRHTGDTSNGCADVKGLSNHVHQLIADAVSSPNHGDSPNLLIADNPQLSALLIGKANGNVGTGTCDKVNNIHPAVHT

SEQ ID NO: 12368 - protein, 85 aa, Homo sapiens
KTDHSVASSPSSAISTATPSPKSTEQRSINSVTSLNSPHSGLHTVNGEGLGKSQSSTKVDLPLASHRSTSQILPSMSVSICPSST

SEQ ID NO: 12369 - protein, 85 aa, Homo sapiens
EVLKACRNPGKNGLSNSCILLDKCPPPRPPTSPYPPLPKDKLNPPTPSIYLENKRDAFFPPLHQFCTNPKNPVTVIRGLAGALKL

SEQ ID NO: 12370 - protein, 85 aa, Homo sapiens
DLGLFSTKTLVEANNEHMVEVRTQLLQPADENWDPTGTKKIWRCESNRSHTTIAKYAQYQASSFQESLREENEKRTQHKDHSDNE

SEQ ID NO: 12371 - protein, 85 aa, Homo sapiens
STSSENSGRRRKGPFKTIKFGTNIDLSDNKKWKLQLHELTKLPAFARVVSAGNLLTHVGHTILGMNTVQLYMKVPGSRTPGHQEN

SEQ ID NO: 12372 - protein, 85 aa, Homo sapiens
NNFCSVNINIGPGDCEWFVVPEDYWGVLNDFCEKNNLNFLMSSWWPNLEDLYEANVPVYRFIQRPGDLVWINAGTVHWVQAVGWC

SEQ ID NO: 12373 - protein, 85 aa, Homo sapiens
NNIAWNVGPLTACQYKLAVERYEWNKLKSVKSPVPMVHLSWNMARNIKVSDPKLFEMIKYCLLKILKQYQTLREALVAAGKEVIW

SEQ ID NO: 12374 - protein, 85 aa, Homo sapiens
DVHDLFRRLGAGAKFDTRRFSADAARFQIGKRKYDFDSSEVLQGLDFFGNKKSVPGVCGASQTHQKPQNGEKKEESLTERKREQS

SEQ ID NO: 12375 - protein, 85 aa, Homo sapiens
KKKRKTMTSEIASQEEGATIQWMSSVEAKIEDKKVQRESKLTSGKLENLRKEKINFLRNKHKIHVQGTDLPDPIATFQQLDQEYK

SEQ ID NO: 12376 - protein, 85 aa, Homo sapiens
INSRLLQNILDAGFQMPTPIQMQAIPVMLHGRELLASAPTGSGKTLAFSIPILMQLKQPANKGFRALIISPTRELASQIHRELIK

SEQ ID NO: 12377 - protein, 85 aa, Homo sapiens
ISEGTGFRIHMIHKAAVAAKKFGPKSSKKFDILVTTPNRLIYLLKQDPPGIDLASVEWLVVDESDKLFEDGKTGFRDQLASIFLA

SEQ ID NO: 12378 - protein, 85 aa, Homo sapiens
CTSHKVRRAMFSATFAYDVEQWCKLNLDNVISVSIGARNSAVETVEQELLFVGSETGKLLAVRELVKKGFNPPVLVFVQSIERAK

SEQ ID NO: 12379 - protein, 85 aa, Homo sapiens
ELFHELIYEGINVDVIHAERTQQQRDNTVHSFRAGKIWVLICTALLARGIDFKGVNLVINYDFPTSSVEYIHRIGRTGRAGNKGK

SEQ ID NO: 12380 - protein, 85 aa, Homo sapiens
AITFFTEDDKPLLRSVANVIQQAGCPVPEYIKGFQKLLSKQKKKMIKKPLERESISTTPKCFLEKAKDKQKKVTGQNSKKKVALE

SEQ ID NO: 12381 - protein, 84 aa, Homo sapiens
FTEDDKPLLRSVANVIQQAGCPVPEYIKGFQKLLSKQKKKMIKKPLERESISTTPKCFLEKAKDKQKKVTGQNSKKKVALEDKS

SEQ ID NO: 12382 - protein, 85 aa, Homo sapiens
QGLDFFGNKKSVPGVCGASQTHQKPQNGEKKEESLTERKREQSKKKRKTMTSEIASQEEGATIQWMSSVEAKIEDKKVQRESKLT

SEQ ID NO: 12383 - protein, 85 aa, Homo sapiens
SGKLENLRKEKINFLRNKHKIHVQGTDLPDPIATFQQLDQEYKINSRLLQNILDAGFQMPTPIQMQAIPVMLHGRELLASAPTGS

SEQ ID NO: 12384 - protein, 85 aa, Homo sapiens
GKTLAFSIPILMQLKQPANKGFRALIISPTRELASQIHRELIKISEGTGFRIHMIHKAAVAAKKFGPKSSKKFDILVTTPNRLIY

SEQ ID NO: 12385 - protein, 85 aa, Homo sapiens
LLKQDPPGIDLASVEWLVVDESDKLFEDGKTGFRDQLASIFLACTSHKVRRAMFSATFAYDVEQWCKLNLDNVISVSIGARNSAV

SEQ ID NO: 12386 - protein, 85 aa, Homo sapiens
ETVEQELLFVGSETGKLLAVRELVKKGFNPPVLVFVQSIERAKELFHELIYEGINVDVIHAERTQQQRDNTVHSFRAGKIWVLIC

SEQ ID NO: 12387 - protein, 85 aa, Homo sapiens
TALLARGIDFKGVNLVINYDFPTSSVEYIHRIGRTGRAGNKGKAITFFTEDDKPLLRSVANVIQQAGCPVPEYIKGFQKLLSKQK

SEQ ID NO: 12388 - protein, 85 aa, Homo sapiens
DLQLTNIEHFSECDVQAKIKQLKAFQQEISLNHNKIEQIIAQGEQLIEKSEPLDAAIIEEELDELRRYCQEVFGRVERYHKKLIR

SEQ ID NO: 12389 - protein, 85 aa, Homo sapiens
MPLPDDEHDLSDRELELEDSAALSDLHWHDRSADSLLSPQPSSNLSLSLAQPLRSERSGRDTPASVDSIPLEWDHDYDLSRDLES

SEQ ID NO: 12390 - protein, 85 aa, Homo sapiens
AMSRALPSEDEEGQDDKDFYLRGAVGLSGDHSALESQIRQLGKALDDSRFQIQQTENIIRSKTPTGPELDTSYKGYMKLLGECSS

SEQ ID NO: 12391 - protein, 85 aa, Homo sapiens
SIDSVKRLEHKLKEEEESLPGFVNLHSTETQTAGVIDRWELLQAQALSKELRMKQNLQKWQQFNSDLNSIWAWLGDTEEELEQLQ

SEQ ID NO: 12392 - protein, 85 aa, Homo sapiens
RLELSTDIQTIELQIKKLKELQKAVDHRKAIILSINLCSPEFTQADSKESRDLQDRLSQMNGRWDRVCSLLEEWRGLLQDALMQC

SEQ ID NO: 12393 - protein, 85 aa, Homo sapiens
QIFTGQVGRPFLNIKGFHEMSHGLLLMLENIDRRKNEIVPIDSNLDAEILQDHHKQLMQIKHELLESQLRVASLQDMSCQLLVNA

SEQ ID NO: 12394 - protein, 85 aa, Homo sapiens
EGTDCLEAKEKVHVIGNRLKLLLKEVSRHIKELEKLLDVSSSQQDLSSWSSADELDTSGSVSPTSGRSTPNRQKTVHKRWLRFLP

SEQ ID NO: 12395 - protein, 85 aa, Homo sapiens
GEQLIEKSEPLDAAIIEEELDELRRYCQEVFGRVERYHKKLIRLPLPDDEHDLSDRELELEDSAALSDLHWHDRSADSLLSPQPS

SEQ ID NO: 12396 - protein, 85 aa, Homo sapiens
SNLSLSLAQPLRSERSGRDTPASVDSIPLEWDHDYDLSRDLESAMSRALPSEDEEGQDDKDFYLRGAVGLSGDHSALESQIRQLG

SEQ ID NO: 12397 - protein, 85 aa, Homo sapiens
KALDDSRFQIQQTENIIRSKTPTGPELDTSYKGYMKLLGECSSSIDSVKRLEHKLKEEEESLPGFVNLHSTETQTAGVIDRWELL

SEQ ID NO: 12398 - protein, 85 aa, Homo sapiens
QAQALSKELRMKQNLQKWQQFNSDLNSIWAWLGDTEEELEQLQRLELSTDIQTIELQIKKLKELQKAVDHRKAIILSINLCSPEF

SEQ ID NO: 12399 - protein, 85 aa, Homo sapiens
TQADSKESRDLQDRLSQMNGRWDRVCSLLEEWRGLLQDALMQCQIFTGQVGRPFLNIKGFHEMSHGLLLMLENIDRRKNEIVPID

SEQ ID NO: 12400 - protein, 85 aa, Homo sapiens
SNLDAEILQDHHKQLMQIKHELLESQLRVASLQDMSCQLLVNAEGTDCLEAKEKVHVIGNRLKLLLKEVSRHIKELEKLLDVSSS

SEQ ID NO: 12401 - protein, 85 aa, Homo sapiens
IPAELTSRQGAMNTAQQNTSDNWSGGHAVSHPPVQQQAHSWCLTPQKLQMRPTGVAQVRSTGIPNGPTADSSLPTNSVSGQQPQL

SEQ ID NO: 12402 - protein, 85 aa, Homo sapiens
ALTRVPSVSQPGVRPACPGQPLANGPFSAGHVPCSTSRTLGSTDTILIGNNHITGSGSNGNVPYLQRNALTLPHNRTNLTSSAEE

SEQ ID NO: 12403 - protein, 85 aa, Homo sapiens
PWKNQLSNSTQGLHKGQSSHSAGPNGERPLSSTGPSQHLQAAGSGIQNQNGHPTLPSNSVTQGAALNHLSSHTATSGGQQGITLT

SEQ ID NO: 12404 - protein, 85 aa, Homo sapiens
KESKPSGNILTVPETSRHTGETPNSTASVEGLPNHVHQMTADAVCSPSHGDSKSPGLLSSDNPQLSALLMGKANNNVGTGTCDKV

SEQ ID NO: 12405 - protein, 85 aa, Homo sapiens
NNIHPAVHTKTDNSVASSPSSAISTATPSPKSTEQTTTNSVTSLNSPHSGLHTINGEGMEESQSPMKTDLLLVNHKPSPQIIPSM

SEQ ID NO: 12406 - protein, 85 aa, Homo sapiens
SVSIYPSSAEVLKACRNLGKNGLSNSSILLDKCPPPRPPSSPYPPLPKDKLNPPTPSIYLENKRDAFFPPLHQFCTNPNNPVTVI

SEQ ID NO: 12407 - protein, 85 aa, Homo sapiens
RGLAGALKLDLGLFSTKTLVEANNEHMVEVRTQLLQPADENWDPTGTKKIWHCESNRSHTTIAKYAQYQASSFQESLREENEKRS

SEQ ID NO: 12408 - protein, 85 aa, Homo sapiens
HHKDHSDSESTSSDNSGRRRKGPFKTIKFGTNIDLSDDKKWKLQLHELTKLPAFVRVVSAGNLLSHVGHTILGMNTVQLYMKVPG

SEQ ID NO: 12409 - protein, 85 aa, Homo sapiens
SRTPGHQENNNFCSVNINIGPGDCEWFVVPEGYWGVLNDFCEKNNLNFLMGSWWPNLEDLYEANVPVYRFIQRPGDLVWINAGTV

SEQ ID NO: 12410 - protein, 85 aa, Homo sapiens
HWVQAIGWCNNIAWNVGPLTACQYKLAVERYEWNKLQSVKSIVPMVHLSWNMARNIKVSDPKLFEMIKYCLLRTLKQCQTLREAL

SEQ ID NO: 12411 - protein, 85 aa, Homo sapiens
IAAGKEIIWHGRTKEEPAHYCSICEVEVFDLLFVTNESNSRKTYIVHCQDCARKTSGNLENFVVLEQYKMEDLMQVYDQFTLAPP

SEQ ID NO: 12412 - protein, 85 aa, Homo sapiens
MTPQKLQMRPTGVAQVRSTGIPNGPTADSSLPTNSVSGQQPQLALTRVPSVSQPGVRPACPGQPLANGPFSAGHVPCSTSRTLGS

SEQ ID NO: 12413 - protein, 85 aa, Homo sapiens
TDTILIGNNHITGSGSNGNVPYLQRNALTLPHNRTNLTSSAEEPWKNQLSNSTQGLHKGQSSHSAGPNGERPLSSTGPSQHLQAA

SEQ ID NO: 12414 - protein, 85 aa, Homo sapiens
GSGIQNQNGHPTLPSNSVTQGAALNHLSSHTATSGGQQGITLTKESKPSGNILTVPETSRHTGETPNSTASVEGLPNHVHQMTAD

SEQ ID NO: 12415 - protein, 85 aa, Homo sapiens
AVCSPSHGDSKSPGLLSSDNPQLSALLMGKANNNVGTGTCDKVNNIHPAVHTKTDNSVASSPSSAISTATPSPKSTEQTTTNSVT

SEQ ID NO: 12416 - protein, 85 aa, Homo sapiens
SLNSPHSGLHTINGEGMEESQSPMKTDLLLVNHKPSPQIIPSMSVSIYPSSAEVLKACRNLGKNGLSNSSILLDKCPPPRPPSSP

SEQ ID NO: 12417 - protein, 85 aa, Homo sapiens
YPPLPKDKLNPPTPSIYLENKRDAFFPPLHQFCTNPNNPVTVIRGLAGALKLDLGLFSTKTLVEANNEHMVEVRTQLLQPADENW

SEQ ID NO: 12418 - protein, 85 aa, Homo sapiens
DPTGTKKIWHCESNRSHTTIAKYAQYQASSFQESLREENEKRSHHKDHSDSESTSSDNSGRRRKGPFKTIKFGTNIDLSDDKKWK

SEQ ID NO: 12419 - protein, 85 aa, Homo sapiens
MQLHELTKLPAFVRVVSAGNLLSHVGHTILGMNTVQLYMKVPGSRTPGHQENNNFCSVNINIGPGDCEWFVVPEGYWGVLNDFCE

SEQ ID NO: 12420 - protein, 85 aa, Homo sapiens
KNNLNFLMGSWWPNLEDLYEANVPVYRFIQRPGDLVWINAGTVHWVQAIGWCNNIAWNVGPLTACQYKLAVERYEWNKLQSVKSI

SEQ ID NO: 12421 - protein, 85 aa, Homo sapiens
VPMVHLSWNMARNIKVSDPKLFEMIKYCLLRTLKQCQTLREALIAAGKEIIWHGRTKEEPAHYCSICEVEVFDLLFVTNESNSRK

SEQ ID NO: 12422 - protein, 85 aa, Homo sapiens
GPLQFRDVAIEFSLEEWHCLDTAQRNLYRNVMLENYSNLVFLGITVSKPDLITCLEQGRKPLTMKRNEMIAKPSVMCSHFAQDLW

SEQ ID NO: 12423 - protein, 85 aa, Homo sapiens
PEQSMKDSFQKVVLRRYEKCEHDNLQLKKGCISVDECKVHKEGYNELNQCLTTTPRKICQCDKYVKVLHQFPNSNGQKRGHTGKK

SEQ ID NO: 12424 - protein, 85 aa, Homo sapiens
PFKYIECGKAFKQFSTLTTHKKIHTGGKPYKCEECGKAFNHSCSLTRHKKIHTGEKPYKCEECGKAFKHSSTLTTHKRNHTGEKP

SEQ ID NO: 12425 - protein, 85 aa, Homo sapiens
YKCDKCGKAFMSSSTLSKHEIIHTEKKPYKCEECGKAFNRSSTLTTHKIIHTGEKPYKCEECDKAFKYSYTLTTHKRIHTEDKPY

SEQ ID NO: 12426 - protein, 85 aa, Homo sapiens
KCEECGKAFKYSSTLTTHKRIHTGEKPYKCEECGKAFKRSSDLTTHKIIHTGEKPYKCEECGKAFKYSSNLTTHKKIHTGERPYK

SEQ ID NO: 12427 - protein, 85 aa, Homo sapiens
CEECGKAFNQSSILTTHRRIHTGEKFYKCEECGKAFKCSSNLTTHKKIHTGERPYKCEECGKAFNQSSILTTHERIILERNSTNV

SEQ ID NO: 12428 - protein, 84 aa, Homo sapiens
RIHTGEKFYKCEECGKAFKCSSNLTTHKKIHTGERPYKCEECGKAFNQSSILTTHERIILERNSTNVKNVAKPSSGPHTLLHIR

SEQ ID NO: 12429 - protein, 85 aa, Homo sapiens
GITVSKPDLITCLEQGRKPLTMKRNEMIAKPSVMCSHFAQDLWPEQSMKDSFQKVVLRRYEKCEHDNLQLKKGCISVDECKVHKE

SEQ ID NO: 12430 - protein, 85 aa, Homo sapiens
GYNELNQCLTTTPRKICQCDKYVKVLHQFPNSNGQKRGHTGKKPFKYIECGKAFKQFSTLTTHKKIHTGGKPYKCEECGKAFNHS

SEQ ID NO: 12431 - protein, 85 aa, Homo sapiens
CSLTRHKKIHTGEKPYKCEECGKAFKHSSTLTTHKRNHTGEKPYKCDKCGKAFMSSSTLSKHEIIHTEKKPYKCEECGKAFNRSS

SEQ ID NO: 12432 - protein, 85 aa, Homo sapiens
TLTTHKIIHTGEKPYKCEECDKAFKYSYTLTTHKRIHTEDKPYKCEECGKAFKYSSTLTTHKRIHTGEKPYKCEECGKAFKRSSD

SEQ ID NO: 12433 - protein, 85 aa, Homo sapiens
LTTHKIIHTGEKPYKCEECGKAFKYSSNLTTHKKIHTGERPYKCEECGKAFNQSSILTTHRRIHTGEKFYKCEECGKAFKCSSNL

SEQ ID NO: 12434 - protein, 85 aa, Homo sapiens
LSKPTQTKGLKVLANGATAASKPLQPLGCVPQSVSPSEQALPPHLEPAWPQGLRHNSVPGRVGPTEYLSPDMQRQRKTKRKTKEQ

SEQ ID NO: 12435 - protein, 85 aa, Homo sapiens
MAILKSFFLQCQWARREDYQKLEQITGLPRPEIIQWFGDTRYALKHGQLKWFRDNAVPGAPSFQDPAIPTPPPSTRSLNERAETP

SEQ ID NO: 12436 - protein, 85 aa, Homo sapiens
PLPIPPPPPDIQPLERYWAAHQQLRETDIPQLSQASRLSTQQVLDWFDSRLPQPAEVVVCLDEEEEEEEEELPEDDEEEEEEEEE

SEQ ID NO: 12437 - protein, 85 aa, Homo sapiens
RRDQLHFKSLLSFTHHAGRPPEEVPPPPVPAPEQVGIGIGPPTLSKPTQTKGLKVLANGATAASKPLQPLGCVPQSVSPSEQALP

SEQ ID NO: 12438 - protein, 85 aa, Homo sapiens
PHLEPAWPQGLRHNSVPGRVGPTEYLSPDMQRQRKTKRKTKEQLAILKSFFLQCQWARREDYQKLEQITGLPRPEIIQWFGDTRY

SEQ ID NO: 12439 - protein, 84 aa, Homo sapiens
VAWEQAAVAFDAVLRFAERQPCFSAQEVGQLRALRAVFRSQQQVRRRRGALGAVVKVEALQEGPGGCGATAQSPLPCSSTAGDN

SEQ ID NO: 12440 - protein, 85 aa, Homo sapiens
PKADQDGRGDPGEGEEVAWEQAAVAFDAVLRFAERQPCFSAQEVGQLRALRAVFRSQQQVRRRRGALGAVVKVEALQEGPGGCGA

SEQ ID NO: 12441 - protein, 85 aa, Homo sapiens
DPSADTWDLFSPLISLWINRFYIYLGFAVSISLWICVQIVIKTQGFATVLAEAVTSLDLPVAIINLKEYDPDDHLIEEVTSKNVC

SEQ ID NO: 12442 - protein, 85 aa, Homo sapiens
VFLVATYTDGLPTESAEWFCKWLEEASIDFRFGKTYLKGMRYAVFGLGNSAYASHFNKVGKNVDKWLWMLGAHRVMSRGEGDCDV

SEQ ID NO: 12443 - protein, 85 aa, Homo sapiens
VKSKHGSIEADFRAWKTKFISQLQALQKGERKKSCGGHCKKGKCESHQHGSEEREEGSHEQDELHHRDTEEEEPFESSSEEEFGG

SEQ ID NO: 12444 - protein, 85 aa, Homo sapiens
EDHQSLNSIVDVEDLGKIMDHVKKEKREKEQQEEKSGLFRNMGRNEDGERRAMITPALREALTKQVHAPRERRLLQTHILWNESH

SEQ ID NO: 12445 - protein, 85 aa, Homo sapiens
RCMETTPSLACANKCVFCWRHHTNPVGTEWRWKMDQPEMILKEAIENHQNMIKQFKGVPGVKAERFEEGMTVKHCALSLVGEPIM

SEQ ID NO: 12446 - protein, 85 aa, Homo sapiens
YPEINRFLKLLHQCKISSFLVTNAQFPAEIRNLEPVTQLYVSVDASTKDSLKKIDRPLFKDFWQRFLDSLKALAVKQQRTVYRLT

SEQ ID NO: 12447 - protein, 85 aa, Homo sapiens
LVKAWNVDELQAYAQLVSLGNPDFIEVKGVTYCGESSASSLTMAHVPWHEEVVQFVHELVDLIPEYEIACEHEHSNCLLIAHRKF

SEQ ID NO: 12448 - protein, 85 aa, Homo sapiens
TQGFATVLAEAVTSLDLPVAIINLKEYDPDDHLIEEVTSKNVCVFLVATYTDGLPTESAEWFCKWLEEASIDFRFGKTYLKGMRY

SEQ ID NO: 12449 - protein, 85 aa, Homo sapiens
AVFGLGNSAYASHFNKVGKNVDKWLWMLGAHRVMSRGEGDCDVVKSKHGSIEADFRAWKTKFISQLQALQKGERKKSCGGHCKKG

SEQ ID NO: 12450 - protein, 85 aa, Homo sapiens
KCESHQHGSEEREEGSHEQDELHHRDTEEEEPFESSSEEEFGGEDHQSLNSIVDVEDLGKIMDHVKKEKREKEQQEEKSGLFRNM

SEQ ID NO: 12451 - protein, 85 aa, Homo sapiens
GRNEDGERRAMITPALREALTKQVHAPRERRLLQTHILWNESHRCMETTPSLACANKCVFCWRHHTNPVGTEWRWKMDQPEMILK

SEQ ID NO: 12452 - protein, 85 aa, Homo sapiens; identical to SEQ ID NO: 12297

SEQ ID NO: 12453 - protein, 85 aa, Homo sapiens
VDASTKDSLKKIDRPLFKDFWQRFLDSLKALAVKQQRTVYRLTLVKAWNVDELQAYAQLVSLGNPDFIEVKGVTYCGESSASSLT

SEQ ID NO: 12454 - protein, 85 aa, Homo sapiens
MAHVPWHEEVVQFVHELVDLIPEYEIACEHEHSNCLLIAHRKFKIGGEWWTWIDYNRFQELIQEYEDSGGSKTFSAKDYMARTPH

SEQ ID NO: 12455 - protein, 85 aa, Homo sapiens
IKVPQNQNGKSKGYAFIEFASFEDAKEALNSCNKREIEGRAIRLELQGPRGSPNARSLAVYGFAREEERIHRTSIILPSVFTEVW

SEQ ID NO: 12456 - protein, 84 aa, Homo sapiens
NGKSKGYAFIEFASFEDAKEALNSCNKREIEGRAIRLELQGPRGSPNARSLAVYGFAREEERIHRTSIILPSVFTEVWFCRLQQ

SEQ ID NO: 12457 - protein, 85 aa, Homo sapiens
DPATAAALAPGLVNNELPPEIRLASGQLMGDDLSLLTAGELSPYISDPALKLFQCAVCNKFTSDSLEALSVHVSSERSLPEEEWR

SEQ ID NO: 12458 - protein, 85 aa, Homo sapiens
AVIGDIYQCKLCNYNTQLKANFQLHCKTDKHMQKYQLVAHIKEGGKSNEWRLKCIAIGNPVHLKCNACDYYTNSVDKLRLHTTNH

SEQ ID NO: 12459 - protein, 85 aa, Homo sapiens
RHEAALKLYKHLQKQEGAVNPESCYYYCAVCDYTTKVKLNLVQHVRSVKHQQTEGLRKLQLHQQGLAPEEDNLSEIFFVKDCPPN

SEQ ID NO: 12460 - protein, 85 aa, Homo sapiens
ELETASLGARTCDDDLTEQQLRSTSEEQSEEAEGAIKPTAVAEDDEKDTSERDNSEGKNSNKDSGIITPEKELKVSVAGGTQPLL

SEQ ID NO: 12461 - protein, 85 aa, Homo sapiens
MAKEEDVATKRSKPTEDNKFCHEQFYQCPYCNYNSRDQSRIQMHVLSQHSVQPVICCPLCQDVLSNKMHLQLHLTHLHSVSPDCV

SEQ ID NO: 12462 - protein, 85 aa, Homo sapiens
EKLLMTVPVPDVMMPNSMLLPAAASEKSERDTPAAVTAEGSGKYSGESPMDDKSMAGLEDSKANVEVKNEEQKPTKEPLEVSEWN

SEQ ID NO: 12463 - protein, 85 aa, Homo sapiens
KNSSKDVKIPDTLQDQLNEQQKRQPLSVSDRHVYKYRCNHCSLAFKTMQKLQIHSQYHAIRAATMCNLCQRSFRTFQALKKHLEA

SEQ ID NO: 12464 - protein, 85 aa, Homo sapiens
GHPELSEAELQQLYASLPVNGELWAESETMSQDDHGLEQEMEREYEVDHEGKASPVGSDSSSIPDDMGSEPKRTLPFRKGPNFTM

SEQ ID NO: 12465 - protein, 85 aa, Homo sapiens
EKFLDPSRPYKCTVCKESFTQKNILLVHYNSVSHLHKLKKVLQEASSPVPQETNSNTDNKPYKCSICNVAYSQSSTLEIHMRSVL

SEQ ID NO: 12466 - protein, 85 aa, Homo sapiens
HQTKARAAKLEPSGHVAGGHSIAANVNSPGQGMLDSMSLAAVNSKDTHLDAKELNKKQTPDLISAQPAHHPPQSPAQIQMQLQHE

SEQ ID NO: 12467 - protein, 85 aa, Homo sapiens
LQQQAAFFQPQFLNPAFLPHFPMTPEALLQFQQPQFLFPFYIPGTEFSLGPDLGLPGSATFGMPGMTGMAGSLLEDLKQQIQTQH

SEQ ID NO: 12468 - protein, 85 aa, Homo sapiens
HVGQTQLQILQQQAQQYQATQPQLQPQKQQQQPPPPQQQQQQQASKLLKQEQSNIVSADCQIMKDVPSYKEAEDISEKPEKPKQE

SEQ ID NO: 12469 - protein, 85 aa, Homo sapiens
FISEGEGLKEGKDTKKQKSLEPSIPPPRIASGARGNAAKALLENFGFELVIQYNENRQKVQKKGKSGEGENTDKLECGTCGKLFS

SEQ ID NO: 12470 - protein, 85 aa, Homo sapiens
NVLILKSHQEHVHGQFFPYAALEKFARQYREAYDKLYPISPSSPETPPPPPPPPPLPPAPPQPSSMGPVKIPNTVSTPLQAPPPT

SEQ ID NO: 12471 - protein, 85 aa, Homo sapiens
PPPPPPPPPPPPPPPPPPPPSAPPQVQLPVSLDLPLFPSIMMQPVQHPALPPQLALQLPQMDALSADLTQLCQQQLGLDPNFLRH

SEQ ID NO: 12472 - protein, 85 aa, Homo sapiens
SQFKRPRTRITDDQLKILRAYFDINNSPSEEQIQEMAEKSGLSQKVIKHWFRNTLFKERQRNKDSPYNFSNPPITVLEDIRIDPQ

SEQ ID NO: 12473 - protein, 85 aa, Homo sapiens
PTSLEHYKSDASFSKRSSRTRFTDYQLRVLQDFFDTNAYPKDDEIEQLSTVLNLPTRVIVVWFQNARQKARKSYENQAETKDNEK

SEQ ID NO: 12474 - protein, 85 aa, Homo sapiens
RELTNERYIRTSNMQYQCKKCNVVFPRIFDLITHQKKQCYKDEDDDAQDESQTEDSMDATDQVVYKHCTVSGQTDAAKNAAAPAA

SEQ ID NO: 12475 - protein, 85 aa, Homo sapiens
SSGSGTSTPLIPSPKPEPEKTSPKPEYPAEKPKQSDPSPPSQGTKPALPLASTSSDPPQASTAQPQPQPQPPKQPQLIGRPPSAS

SEQ ID NO: 12476 - protein, 85 aa, Homo sapiens
QTPVPSSPLQISMTSLQNSLPPQLLQYQCDQCTVAFPTLELWQEHQHMHFLAAQNQFLHSPFLERPMDMPYMIFDPNNPLMTGQL

SEQ ID NO: 12477 - protein, 85 aa, Homo sapiens
MGSSLTQMPPQASSSHTTAPTTVAASLKRKLDDKEDNNCSEKEGGNSGEDQHRDKRLRTTITPEQLEILYEKYLLDSNPTRKMLD

SEQ ID NO: 12478 - protein, 85 aa, Homo sapiens
HIAREVGLKKRVVQVWFQNTRARERKGQFRAVGPAQSHKRCPFCRALFKAKSALESHIRSRHWNEGKQAGYSLPPSPLISTEDGG

SEQ ID NO: 12479 - protein, 85 aa, Homo sapiens
ESPQKYIYFDYPSLPLTKIDLSSENELASTVSTPVSKTAELSPKNLLSPSSFKAECSEDVENLNAPPAEAGYDQNKTDFDETSSI

SEQ ID NO: 12480 - protein, 85 aa, Homo sapiens
NTAISDATTGDEGNTEMESTTGSSGDVKPALSPKEPKTLDTLPKPATTPTTEVCDDKFLFSLTSPSIHFNDKDGDHDQSFYITDD

SEQ ID NO: 12481 - protein, 85 aa, Homo sapiens
PDDNADRSETSSIADPSSPNPFGSSNPFKSKSNDRPGHKRFRTQMSNLQLKVLKACFSDYRTPTMQECEMLGNEIGLPKRVVQVW

SEQ ID NO: 12482 - protein, 85 aa, Homo sapiens
FQNARAKEKKFKINIGKPFMINQGGTEGTKPECTLCGVKYSARLSIRDHIFSKQHISKVRETVGSQLDREKDYLAPTTVRQLMAQ

SEQ ID NO: 12483 - protein, 85 aa, Homo sapiens
QELDRIKKASDVLGLTVQQPGMMDSSSLHGISLPTAYPGLPGLPPVLLPGMNGPSSLPGFPQNSNTLTPPGAGMLGFPTSATSSP

SEQ ID NO: 12484 - protein, 85 aa, Homo sapiens
ALSLSSAPTKPLLQTPPPPPPPPPPPPSSSLSGQQTEQQNKESEKKQTKPNKVKKIKEEELEATKPEKHPKKEEKISSALSVLGK

SEQ ID NO: 12485 - protein, 85 aa, Homo sapiens
VVGETHVDPIQLQALQNAIAGDPASFIGGQFLPYFIPGFASYFTPQLPGTVQGGYFPPVCGMESLFPYGPTMPQTLAGLSPGALL

SEQ ID NO: 12486 - protein, 85 aa, Homo sapiens
QQYQQYQQNLQESLQKQQKQQQEQQQKPVQAKTSKVESDQPQNSNDASETKEDKSTATESTKEEPQLESKSADFSDTYVVPFVKY

SEQ ID NO: 12487 - protein, 85 aa, Homo sapiens
EFICRKCQMMFTDEDAAVNHQKSFCYFGQPLIDPQETVLRVPVSKYQCLACDVAISGNEALSQHLQSSLHKEKTIKQAMRNAKEH

SEQ ID NO: 12488 - protein, 85 aa, Homo sapiens
VRLLPHSVCSPNPNTTSTSQSAASSNNTYPHLSCFSMKSWPNILFQASARRAASPPSSPPSLSLPSTVTSSLCSTSGVQTSLPTE

SEQ ID NO: 12489 - protein, 85 aa, Homo sapiens
MHLGLAPAEAELYQYYLAQNIGLTGMKLENPADPQLMINPFQLDPATAAALAPGLVNNELPPEIRLASGQLMGDDLSLLTAGELS

SEQ ID NO: 12490 - protein, 85 aa, Homo sapiens
PYISDPALKLFQCAVCNKFTSDSLEALSVHVSSERSLPEEEWRAVIGDIYQCKLCNYNTQLKANFQLHCKTDKHMQKYQLVAHIK

SEQ ID NO: 12491 - protein, 85 aa, Homo sapiens
EGGKSNEWRLKCIAIGNPVHLKCNACDYYTNSVDKLRLHTTNHRHEAALKLYKHLQKQEGAVNPESCYYYCAVCDYTTKVKLNLV

SEQ ID NO: 12492 - protein, 85 aa, Homo sapiens
QHVRSVKHQQTEGLRKLQLHQQGLAPEEDNLSEIFFVKDCPPNELETASLGARTCDDDLTEQQLRSTSEEQSEEAEGAIKPTAVA

SEQ ID NO: 12493 - protein, 85 aa, Homo sapiens
EDDEKDTSERDNSEGKNSNKDSGIITPEKELKVSVAGGTQPLLLAKEEDVATKRSKPTEDNKFCHEQFYQCPYCNYNSRDQSRIQ

SEQ ID NO: 12494 - protein, 85 aa, Homo sapiens
MHVLSQHSVQPVICCPLCQDVLSNKMHLQLHLTHLHSVSPDCVEKLLMTVPVPDVMMPNSMLLPAAASEKSERDTPAAVTAEGSG

SEQ ID NO: 12495 - protein, 85 aa, Homo sapiens
KYSGESPMDDKSMAGLEDSKANVEVKNEEQKPTKEPLEVSEWNKNSSKDVKIPDTLQDQLNEQQKRQPLSVSDRHVYKYRCNHCS

SEQ ID NO: 12496 - protein, 85 aa, Homo sapiens
MAFKTMQKLQIHSQYHAIRAATMCNLCQRSFRTFQALKKHLEAGHPELSEAELQQLYASLPVNGELWAESETMSQDDHGLEQEME

SEQ ID NO: 12497 - protein, 85 aa, Homo sapiens
REYEVDHEGKASPVGSDSSSIPDDMGSEPKRTLPFRKGPNFTMEKFLDPSRPYKCTVCKESFTQKNILLVHYNSVSHLHKLKKVL

SEQ ID NO: 12498 - protein, 85 aa, Homo sapiens
QEASSPVPQETNSNTDNKPYKCSICNVAYSQSSTLEIHMRSVLHQTKARAAKLEPSGHVAGGHSIAANVNSPGQGMLDSMSLAAV

SEQ ID NO: 12499 - protein, 85 aa, Homo sapiens
NSKDTHLDAKELNKKQTPDLISAQPAHHPPQSPAQIQMQLQHELQQQAAFFQPQFLNPAFLPHFPMTPEALLQFQQPQFLFPFYI

SEQ ID NO: 12500 - protein, 85 aa, Homo sapiens
PGTEFSLGPDLGLPGSATFGMPGMTGMAGSLLEDLKQQIQTQHHVGQTQLQILQQQAQQYQATQPQLQPQKQQQQPPPPQQQQQQ

SEQ ID NO: 12501 - protein, 85 aa, Homo sapiens
QASKLLKQEQSNIVSADCQIMKDVPSYKEAEDISEKPEKPKQEFISEGEGLKEGKDTKKQKSLEPSIPPPRIASGARGNAAKALL

SEQ ID NO: 12502 - protein, 85 aa, Homo sapiens
ENFGFELVIQYNENRQKVQKKGKSGEGENTDKLECGTCGKLFSNVLILKSHQEHVHGQFFPYAALEKFARQYREAYDKLYPISPS

SEQ ID NO: 12503 - protein, 85 aa, Homo sapiens
SPETPPPPPPPPPLPPAPPQPSSMGPVKIPNTVSTPLQAPPPTPPPPPPPPPPPPPPPPPPPPSAPPQVQLPVSLDLPLFPSIMM

SEQ ID NO: 12504 - protein, 85 aa, Homo sapiens
QPVQHPALPPQLALQLPQMDALSADLTQLCQQQLGLDPNFLRHSQFKRPRTRITDDQLKILRAYFDINNSPSEEQIQEMAEKSGL

SEQ ID NO: 12505 - protein, 85 aa, Homo sapiens
SQKVIKHWFRNTLFKERQRNKDSPYNFSNPPITVLEDIRIDPQPTSLEHYKSDASFSKRSSRTRFTDYQLRVLQDFFDTNAYPKD

SEQ ID NO: 12506 - protein, 85 aa, Homo sapiens
DEIEQLSTVLNLPTRVIVVWFQNARQKARKSYENQAETKDNEKRELTNERYIRTSNMQYQCKKCNVVFPRIFDLITHQKKQCYKD

SEQ ID NO: 12507 - protein, 85 aa, Homo sapiens
EDDDAQDESQTEDSMDATDQVVYKHCTVSGQTDAAKNAAAPAASSGSGTSTPLIPSPKPEPEKTSPKPEYPAEKPKQSDPSPPSQ

SEQ ID NO: 12508 - protein, 85 aa, Homo sapiens
GTKPALPLASTSSDPPQASTAQPQPQPQPPKQPQLIGRPPSASQTPVPSSPLQISMTSLQNSLPPQLLQYQCDQCTVAFPTLELW

SEQ ID NO: 12509 - protein, 85 aa, Homo sapiens
QEHQHMHFLAAQNQFLHSPFLERPMDMPYMIFDPNNPLMTGQLLGSSLTQMPPQASSSHTTAPTTVAASLKRKLDDKEDNNCSEK

SEQ ID NO: 12510 - protein, 85 aa, Homo sapiens
EGGNSGEDQHRDKRLRTTITPEQLEILYEKYLLDSNPTRKMLDHIAREVGLKKRVVQVWFQNTRARERKGQFRAVGPAQSHKRCP

SEQ ID NO: 12511 - protein, 85 aa, Homo sapiens
FCRALFKAKSALESHIRSRHWNEGKQAGYSLPPSPLISTEDGGESPQKYIYFDYPSLPLTKIDLSSENELASTVSTPVSKTAELS

SEQ ID NO: 12512 - protein, 85 aa, Homo sapiens
PKNLLSPSSFKAECSEDVENLNAPPAEAGYDQNKTDFDETSSINTAISDATTGDEGNTEMESTTGSSGDVKPALSPKEPKTLDTL

SEQ ID NO: 12513 - protein, 85 aa, Homo sapiens
PKPATTPTTEVCDDKFLFSLTSPSIHFNDKDGDHDQSFYITDDPDDNADRSETSSIADPSSPNPFGSSNPFKSKSNDRPGHKRFR

SEQ ID NO: 12514 - protein, 85 aa, Homo sapiens
TQMSNLQLKVLKACFSDYRTPTMQECEMLGNEIGLPKRVVQVWFQNARAKEKKFKINIGKPFMINQGGTEGTKPECTLCGVKYSA

SEQ ID NO: 12515 - protein, 85 aa, Homo sapiens
RLSIRDHIFSKQHISKVRETVGSQLDREKDYLAPTTVRQLMAQQELDRIKKASDVLGLTVQQPGMMDSSSLHGISLPTAYPGLPG

SEQ ID NO: 12516 - protein, 85 aa, Homo sapiens
LPPVLLPGMNGPSSLPGFPQNSNTLTPPGAGMLGFPTSATSSPALSLSSAPTKPLLQTPPPPPPPPPPPPSSSLSGQQTEQQNKE

SEQ ID NO: 12517 - protein, 85 aa, Homo sapiens
SEKKQTKPNKVKKIKEEELEATKPEKHPKKEEKISSALSVLGKVVGETHVDPIQLQALQNAIAGDPASFIGGQFLPYFIPGFASY

SEQ ID NO: 12518 - protein, 85 aa, Homo sapiens
FTPQLPGTVQGGYFPPVCGMESLFPYGPTMPQTLAGLSPGALLQQYQQYQQNLQESLQKQQKQQQEQQQKPVQAKTSKVESDQPQ

SEQ ID NO: 12519 - protein, 85 aa, Homo sapiens
NSNDASETKEDKSTATESTKEEPQLESKSADFSDTYVVPFVKYEFICRKCQMMFTDEDAAVNHQKSFCYFGQPLIDPQETVLRVP

SEQ ID NO: 12520 - protein, 85 aa, Homo sapiens
VSKYQCLACDVAISGNEALSQHLQSSLHKEKTIKQAMRNAKEHVRLLPHSVCSPNPNTTSTSQSAASSNNTYPHLSCFSMKSWPN

SEQ ID NO: 12521 - protein, 85 aa, Homo sapiens
ILFQASARRAASPPSSPPSLSLPSTVTSSLCSTSGVQTSLPTESCSDESDSELSQKLEDLDNSLEVKAKPASGLDGNFNSIRMDM

SEQ ID NO: 12522 - protein, 85 aa, Homo sapiens
SSALESVTVSDRPLGVSITKAEVAPEEDERKKRRRERNKIAAAKCRNKKKEKTECLQKESEKLESVNAELKAQIEELKNEKQHLI

SEQ ID NO: 12523 - protein, 85 aa, Homo sapiens
ASTDYSTYSQAAAQQGYSAYTAQPTQGYAQTTQQAYGQQSYGTYGQPTDVSYTQAQTTATYGQTAYATSYGQPPTGYTTPTAPQA

SEQ ID NO: 12524 - protein, 85 aa, Homo sapiens
YSQPVQGYGTGAYDTTTATVTTTQASYAAQSAYGTQPAYPAYGQQPAATAPTRPQDGNKPTETSQPQSSTGGYNQPSLGYGQSNY

SEQ ID NO: 12525 - protein, 85 aa, Homo sapiens
QQSSSYGQQRPMDEGPDLDLGPPVDPDEDSDNSAIYVQGLNDSVTLDDLADFFKQCGVVKMNKRTGQPMIHIYLDKETGKPKGDA

SEQ ID NO: 12526 - protein, 85 aa, Homo sapiens
TVSYEDPPTAKAAVEWFDGKDFQGSKLKVSLARKKPPMNSMRGGLPPREGRGMPPPLRGGPGGPGGPGGPMGRMGGRGGDRGGFP

SEQ ID NO: 12527 - protein, 85 aa, Homo sapiens
PRGPRGSRGNPSGGGNVQHRAGDWQCPNPGCGNQNFAWRTECNQCKAPKPEGFLPPPFPPPGGDRGRGGPGGMRGGRGGLMDRGG

SEQ ID NO: 12528 - protein, 85 aa, Homo sapiens
TYGQPTDVSYTQAQTTATYGQTAYATSYGQPPTGYTTPTAPQAYSQPVQGYGTGAYDTTTATVTTTQASYAAQSAYGTQPAYPAY

SEQ ID NO: 12529 - protein, 85 aa, Homo sapiens
GQQPAATAPTRPQDGNKPTETSQPQSSTGGYNQPSLGYGQSNYSYPQVPGSYPMQPVTAPPSYPPTSYSSTQPTSYDQSSYSQQN

SEQ ID NO: 12530 - protein, 85 aa, Homo sapiens
TYGQPSSYGQQSSYGQQSSYGQQPPTSYPPQTGSYSQAPSQYSQQSSSYGQQRPMDEGPDLDLGPPVDPDEDSDNSAIYVQGLND

SEQ ID NO: 12531 - protein, 85 aa, Homo sapiens
SVTLDDLADFFKQCGVVKMNKRTGQPMIHIYLDKETGKPKGDATVSYEDPPTAKAAVEWFDGKDFQGSKLKVSLARKKPPMNSMR

SEQ ID NO: 12532 - protein, 85 aa, Homo sapiens
GGLPPREGRGMPPPLRGGPGGPGGPGGPMGRMGGRGGDRGGFPPRGPRGSRGNPSGGGNVQHRAGDWQCPNPGCGNQNFAWRTEC

SEQ ID NO: 12533 - protein, 85 aa, Homo sapiens
NQCKAPKPEGFLPPPFPPPGGDRGRGGPGGMRGGRGGLMDRGGPGGMFRGGRGGDRGGFRGGRGMDRGGFGGGRRGGPGGPPGPL

SEQ ID NO: 12534 - protein, 84 aa, Homo sapiens
LEDRQSFRNTIESVHTEKPQPTKEEPKVPPIRIQLSRIKPPWVVKGQPTYQICPRIIPTTESSCRGWTGARTLADIKARALQSH

SEQ ID NO: 12535 - protein, 84 aa, Homo sapiens
SLFLRGLSLVGWYHSHPHSPALPSLQDIDAQMDYQLRLQGSSNGFQPCLALLCSPYYSGNPGPESKISPFWVMPPPEVPIPVQS

SEQ ID NO: 12536 - protein, 85 aa, Homo sapiens
SGEVRDKSYLLPPQPVKQFLISPPASPPVGWKQSEDAMPVINYDLLCAVSKLGPGEKYELHAGTESTPSVVVHVCESETEEEEET

SEQ ID NO: 12537 - protein, 85 aa, Homo sapiens
VIHVCDEAKNLKEDFTCPRDLLISEMKYFAEYLSMDAQRWEEVDISVHCDVHIFNWLIKYIKRNTKENKDCEMPTLEPGNVISIL

SEQ ID NO: 12538 - protein, 85 aa, Homo sapiens
ISSEFLKMDSLVEQCIQYCHKNMNAIVATPCNMNCINANLLTRIADLFSHNEVDDLKDKKDKFKSKLFCKKIERLFDPEYLNPDS

SEQ ID NO: 12539 - protein, 85 aa, Homo sapiens
RSNAATLYRCCLCKKLLTKETERRIPCIPGKINVDRRGNIVYIHIRDKTWDVHEYLNSLFEELKSWRDVYWRLWGTINWLTCSRC

SEQ ID NO: 12540 - protein, 85 aa, Homo sapiens
YQAFLCIEFSHCQYHSETVVYPTAASSLNTVGTGIYPCCNQKVLRFDPTQLTKGCKVRDHMVTLRDQGEGGDLPSCPTARMLDDL

SEQ ID NO: 12541 - protein, 85 aa, Homo sapiens
HKYRDVIVVPFSKDTVSDVGVGLCDEKGIECDVLLEPNTPWGPKTGELNAFLSLKNWTLQLKQQSLFSEEEEYTTGSEVTEDEVG

SEQ ID NO: 12542 - protein, 85 aa, Homo sapiens
DEEEVSKKQRKKEKPKKFTRQPKKQVSSPCAQRKEKALEKSASRDVSPFVMSMQKNKWDATRSLRFNQDAQREDDQRRMTEITGH

SEQ ID NO: 12543 - protein, 85 aa, Homo sapiens
VDISVHCDVHIFNWLIKYIKRNTKENKDCEMPTLEPGNVISILISSEFLKMDSLVEQCIQYCHKNMNAIVATPCNMNCINANLLT

SEQ ID NO: 12544 - protein, 85 aa, Homo sapiens
RIADLFSHNEVDDLKDKKDKFKSKLFCKKIERLFDPEYLNPDSRSNAATLYRCCLCKKLLTKETERRIPCIPGKINVDRRGNIVY

SEQ ID NO: 12545 - protein, 85 aa, Homo sapiens
IHIRDKTWDVHEYLNSLFEELKSWRDVYWRLWGTINWLTCSRCYQAFLCIEFSHCQYHSETVVYPTAASSLNTVGTGIYPCCNQK

SEQ ID NO: 12546 - protein, 85 aa, Homo sapiens
VLRFDPTQLTKGCKVRDHMVTLRDQGEGGDLPSCPTARMLDDLHKYRDVIVVPFSKDTVSDVGVGLCDEKGIECDVLLEPNTPWG

SEQ ID NO: 12547 - protein, 85 aa, Homo sapiens
PKTGELNAFLSLKNWTLQLKQQSLFSEEEEYTTGSEVTEDEVGDEEEVSKKQRKKEKPKKFTRQPKKQVSSPCAQRKEKALEKSA

SEQ ID NO: 12548 - protein, 85 aa, Homo sapiens
SRDVSPFVMSMQKNKWDATRSLRFNQDAQREDDQRRMTEITGHLIKMRLGDLDRVKSKEAKEFAGGIYSRLEAQIKASVPVSARQ

SEQ ID NO: 12549 - protein, 85 aa, Homo sapiens
AEGKVESDFFCQLGHFNLLLEDYPKALSAYQRYYSLQSDYWKMRNPWIQRAHCIPLDQYTTNAAFLYGLGLVYFHYNAFQWAIKA

SEQ ID NO: 12550 - protein, 85 aa, Homo sapiens
FQEVLYVDPSFCRAKEIHLRLGLMFKVNTDYESSLKHFQLALVDCNPCTLSNAEIQFHIAHLYETQRKYHSAKEAYEQLLQTENL

SEQ ID NO: 12551 - protein, 85 aa, Homo sapiens
SAQVKATVLQQLGWMHHTVDLLGDKATKESYAIQYLQKSLEADPNSGQSWYFLGRCYSSIGKVQDAFISYRQSIDKSEASADTWC

SEQ ID NO: 12552 - protein, 85 aa, Homo sapiens
SIGVLYQQQNQPMDALQAYICAVQLDHGHAAAWMDLGTLYESCNQPQDAIKCYLNATRSKSCSNTSALAARIKYLQACKPHHPNT

SEQ ID NO: 12553 - protein, 85 aa, Homo sapiens
EPVLGLSQTPISQQSLPLHMIPSSQVDDLSSPAKRKRTSSPTKNTSDNWSGGHAVSHPPVQQQAHSWCLTPQKLQHLEQLRANRN

SEQ ID NO: 12554 - protein, 85 aa, Homo sapiens
NLNPAQKLMLEQLESQFVLMQQHQMRPTGVAQVRSTGIPNGPTADSSLPTNSVSGQQPQLALTRVPSVSQPGVRPACPGQPLANG

SEQ ID NO: 12555 - protein, 85 aa, Homo sapiens
PFSAGHVPCSTSRTLGSTDTILIGNNHITGSGSNGNVPYLQRNALTLPHNRTNLTSSAEEPWKNQLSNSTQGLHKGQSSHSAGPN

SEQ ID NO: 12556 - protein, 85 aa, Homo sapiens
GERPLSSTGPSQHLQAAGSGIQNQNGHPTLPSNSVTQGAALNHLSSHTATSGGQQGITLTKESKPSGNILTVPETSRHTGETPNS

SEQ ID NO: 12557 - protein, 85 aa, Homo sapiens
TASVEGLPNHVHQMTADAVCSPSHGDSKSPGLLSSDNPQLSALLMGKANNNVGTGTCDKVNNIHPAVHTKTDNSVASSPSSAIST

SEQ ID NO: 12558 - protein, 85 aa, Homo sapiens
ATPSPKSTEQTTTNSVTSLNSPHSGLHTINGEGMEESQSPMKTDLLLVNHKPSPQIIPSMSVSIYPSSAEVLKACRNLGKNGLSN

SEQ ID NO: 12559 - protein, 85 aa, Homo sapiens
SSILLDKCPPPRPPSSPYPPLPKDKLNPPTPSIYLENKRDAFFPPLHQFCTNPNNPVTVIRGLAGALKLDLGLFSTKTLVEANNE

SEQ ID NO: 12560 - protein, 85 aa, Homo sapiens
HMVEVRTQLLQPADENWDPTGTKKIWHCESNRSHTTIAKYAQYQASSFQESLREENEKRSHHKDHSDSESTSSDNSGRRRKGPFK

SEQ ID NO: 12561 - protein, 85 aa, Homo sapiens
TIKFGTNIDLSDDKKWKLQLHELTKLPAFVRVVSAGNLLSHVGHTILGMNTVQLYMKVPGSRTPGHQENNNFCSVNINIGPGDCE

SEQ ID NO: 12562 - protein, 85 aa, Homo sapiens
WFVVPEGYWGVLNDFCEKNNLNFLMGSWWPNLEDLYEANVPVYRFIQRPGDLVWINAGTVHWVQAIGWCNNIAWNVGPLTACQYK

SEQ ID NO: 12563 - protein, 85 aa, Homo sapiens
MAVERYEWNKLQSVKSIVPMVHLSWNMARNIKVSDPKLFEMIKYCLLRTLKQCQTLREALIAAGKEIIWHGRTKEEPAHYCSICE

SEQ ID NO: 12564 - protein, 85 aa, Homo sapiens
MRNPWIQRAHCIPLDQYTTNAAFLYGLGLVYFHYNAFQWAIKAFQEVLYVDPSFCRAKEIHLRLGLMFKVNTDYESSLKHFQLAL

SEQ ID NO: 12565 - protein, 85 aa, Homo sapiens
VDCNPCTLSNAEIQFHIAHLYETQRKYHSAKEAYEQLLQTENLSAQVKATVLQQLGWMHHTVDLLGDKATKESYAIQYLQKSLEA

SEQ ID NO: 12566 - protein, 85 aa, Homo sapiens
DPNSGQSWYFLGRCYSSIGKVQDAFISYRQSIDKSEASADTWCSIGVLYQQQNQPMDALQAYICAVQLDHGHAAAWMDLGTLYES

SEQ ID NO: 12567 - protein, 85 aa, Homo sapiens
CNQPQDAIKCYLNATRSKSCSNTSALAARIKYLQACKPHHPNTEPVLGLSQTPISQQSLPLHMIPSSQVDDLSSPAKRKRTSSPT

SEQ ID NO: 12568 - protein, 85 aa, Homo sapiens
KNTSDNWSGGHAVSHPPVQQQAHSWCLTPQKLQHLEQLRANRNNLNPAQKLMLEQLESQFVLMQQHQMRPTGVAQVRSTGIPNGP

SEQ ID NO: 12569 - protein, 85 aa, Homo sapiens
TADSSLPTNSVSGQQPQLALTRVPSVSQPGVRPACPGQPLANGPFSAGHVPCSTSRTLGSTDTILIGNNHITGSGSNGNVPYLQR

SEQ ID NO: 12570 - protein, 85 aa, Homo sapiens
NALTLPHNRTNLTSSAEEPWKNQLSNSTQGLHKGQSSHSAGPNGERPLSSTGPSQHLQAAGSGIQNQNGHPTLPSNSVTQGAALN

SEQ ID NO: 12571 - protein, 85 aa, Homo sapiens
HLSSHTATSGGQQGITLTKESKPSGNILTVPETSRHTGETPNSTASVEGLPNHVHQMTADAVCSPSHGDSKSPGLLSSDNPQLSA

SEQ ID NO: 12572 - protein, 85 aa, Homo sapiens
MLMGKANNNVGTGTCDKVNNIHPAVHTKTDNSVASSPSSAISTATPSPKSTEQTTTNSVTSLNSPHSGLHTINGEGMEESQSPMK

SEQ ID NO: 12573 - protein, 85 aa, Homo sapiens
TDLLLVNHKPSPQIIPSMSVSIYPSSAEVLKACRNLGKNGLSNSSILLDKCPPPRPPSSPYPPLPKDKLNPPTPSIYLENKRDAF

SEQ ID NO: 12574 - protein, 85 aa, Homo sapiens
FPPLHQFCTNPNNPVTVIRGLAGALKLDLGLFSTKTLVEANNEHMVEVRTQLLQPADENWDPTGTKKIWHCESNRSHTTIAKYAQ

SEQ ID NO: 12575 - protein, 85 aa, Homo sapiens
YQASSFQESLREENEKRSHHKDHSDSESTSSDNSGRRRKGPFKTIKFGTNIDLSDDKKWKLQLHELTKLPAFVRVVSAGNLLSHV

SEQ ID NO: 12576 - protein, 85 aa, Homo sapiens
GHTILGMNTVQLYMKVPGSRTPGHQENNNFCSVNINIGPGDCEWFVVPEGYWGVLNDFCEKNNLNFLMGSWWPNLEDLYEANVPV

SEQ ID NO: 12577 - protein, 85 aa, Homo sapiens
YRFIQRPGDLVWINAGTVHWVQAIGWCNNIAWNVGPLTACQYKLAVERYEWNKLQSVKSIVPMVHLSWNMARNIKVSDPKLFEMI

SEQ ID NO: 12578 - protein, 85 aa, Homo sapiens
KYCLLRTLKQCQTLREALIAAGKEIIWHGRTKEEPAHYCSICEVEVFDLLFVTNESNSRKTYIVHCQDCARKTSGNLENFVVLEQ

SEQ ID NO: 12579 - protein, 85 aa, Homo sapiens
KEQILELLVLEQFLIILPKELQARVQEHHPESREDVVVVLEDLQLDLGETGQQDPDQPKKQKILVEEMAPLKGVQEQQVRHECEV

SEQ ID NO: 12580 - protein, 85 aa, Homo sapiens
TKPEKEKGEETRIENGKLIVVTDSCGRVESSGKISEPMEAHNEGSNLERHQAKPKEKIEYKCSEREQRFIQHLDLIEHASTHTGK

SEQ ID NO: 12581 - protein, 85 aa, Homo sapiens
KLCESDVCQSSSLTGHKKVLSREKGHQCHECGKAFQRSSHLVRHQKIHLGEKPYQCNECGKVFSQNAGLLEHLRIHTGEKPYLCI

SEQ ID NO: 12582 - protein, 85 aa, Homo sapiens
HCGKNFRRSSHLNRHQRIHSQEEPCECKECGKTFSQALLLTHHQRIHSHSKSHQCNECGKAFSLTSDLIRHHRIHTGEKPFKCNI

SEQ ID NO: 12583 - protein, 85 aa, Homo sapiens
MQLDLGETGQQDPDQPKKQKILVEEMAPLKGVQEQQVRHECEVTKPEKEKGEETRIENGKLIVVTDSCGRVESSGKISEPMEAHN

SEQ ID NO: 12584 - protein, 85 aa, Homo sapiens
EGSNLERHQAKPKEKIEYKCSEREQRFIQHLDLIEHASTHTGKKLCESDVCQSSSLTGHKKVLSREKGHQCHECGKAFQRSSHLV

SEQ ID NO: 12585 - protein, 85 aa, Homo sapiens
RHQKIHLGEKPYQCNECGKVFSQNAGLLEHLRIHTGEKPYLCIHCGKNFRRSSHLNRHQRIHSQEEPCECKECGKTFSQALLLTH

SEQ ID NO: 12586 - protein, 85 aa, Homo sapiens
HQRIHSHSKSHQCNECGKAFSLTSDLIRHHRIHTGEKPFKCNICQKAFRLNSHLAQHVRIHNEEKPYQCSECGEAFRQRSGLFQH

SEQ ID NO: 12587 - protein, 85 aa, Homo sapiens
CSHFAQDLWPEQSMKDSFQKVVLRRYEKCEHDNLQLKKGCISVDECKVHKEGYNELNQCLTTTPRKICQCDKYVKVLHQFPNSNG

SEQ ID NO: 12588 - protein, 85 aa, Homo sapiens
KEGYNELNQCLTTTPRKICQCDKYVKVLHQFPNSNGQKRGHTGKKPFKYIECGKAFKQFSTLTTHKKIHTGGKPYKCEECGKAFN

SEQ ID NO: 12589 - protein, 85 aa, Homo sapiens
VDECKVHKEGYNELNQCLTTTPRKICQCDKYVKVLHQFPNSNGQKRGHTGKKPFKYIECGKAFKQFSTLTTHKKIHTGGKPYKCE

SEQ ID NO: 12590 - protein, 85 aa, Homo sapiens
KLENPADPQLMINPFQLDPATAAALAPGLGELSPYISDPALKLFQCAVCNKFTSDSLEALSVHVSSERSLPEEEWRAVIGDIYQC

SEQ ID NO: 12591 - protein, 85 aa, Homo sapiens
KLCNYNTQLKANFQLHCKTDKHMQKYQLVAHIKEGGKSNEWRLKCIAIGNPVHLKCNACDYYTNSVDKLRLHTTNHRHEAALKLY

SEQ ID NO: 12592 - protein, 85 aa, Homo sapiens
KHLQKQEGAVNPESCYYYCAVCDYTTKVKLNLVQHVRSVKHQQTEGLRKLQLHQQGLAPEEDNLSEIFFVKDCPPNELETASLGA

SEQ ID NO: 12593 - protein, 85 aa, Homo sapiens
RTCDDDLTEQQLRSTSGIITPEKELKVSVAGGTQPLLLAKEEDVATKRSKPTEDNKFCHEQFYQCPYCNYNSRDQSRIQMHVLSQ

SEQ ID NO: 12594 - protein, 85 aa, Homo sapiens
HSVQPVICCPLCQDVLSNKMHLQLHLTHLHSVSPDCVEKLLMTVPVPDVMMPNSMLLPAAASEKSERDTPAAVTAEGSGKYSGES

SEQ ID NO: 12595 - protein, 85 aa, Homo sapiens
PMDDKSMAGLEDSKANVEVKNEEQKPTKEPLEVSEWNKNSSKDVKIPDTLQDQLNEQQKRQPLSVSDRHVYKYRCNHCSLAFKTM

SEQ ID NO: 12596 - protein, 85 aa, Homo sapiens
QKLQIHSQYHAIRAATMCNLCQRSFRTFQALKKHLEAGHPELSEAELQQLYASLPVNGELWAESETMSQDDHGLEQEMEREYEVD

SEQ ID NO: 12597 - protein, 85 aa, Homo sapiens
HEGKASPVGSDSSSIPDDMGSEPKRTLPFRKGPNFTMEKFLDPSRPYKCTVCKESFTQKNILLVHYNSVSHLHKLKKVLQEASSP

SEQ ID NO: 12598 - protein, 85 aa, Homo sapiens
PYKCTVCKESFTQKNILLVHYNSVSHLHKLKKVLQEASSPVPQETNSNTDNKPYKCSICNVAYSQSSTLEIHMRSVLHQTKARAA

SEQ ID NO: 12599 - protein, 85 aa, Homo sapiens
LFQCAVCNKFTSDSLEALSVHVSSERSLPEEEWRAVIGDIYQCKLCNYNTQLKANFQLHCKTDKHMQKYQLVAHIKEGGKSNEWR

SEQ ID NO: 12600 - protein, 85 aa, Homo sapiens
MKCIAIGNPVHLKCNACDYYTNSVDKLRLHTTNHRHEAALKLYKHLQKQEGAVNPESCYYYCAVCDYTTKVKLNLVQHVRSVKHQ

SEQ ID NO: 12601 - protein, 85 aa, Homo sapiens
QTEGLRKLQLHQQGLAPEEDNLSEIFFVKDCPPNELETASLGARTCDDDLTEQQLRSTSGIITPEKELKVSVAGGTQPLLLAKEE

SEQ ID NO: 12602 - protein, 85 aa, Homo sapiens
DVATKRSKPTEDNKFCHEQFYQCPYCNYNSRDQSRIQMHVLSQHSVQPVICCPLCQDVLSNKMHLQLHLTHLHSVSPDCVEKLLM

SEQ ID NO: 12603 - protein, 85 aa, Homo sapiens
TVPVPDVMMPNSMLLPAAASEKSERDTPAAVTAEGSGKYSGESPMDDKSMAGLEDSKANVEVKNEEQKPTKEPLEVSEWNKNSSK

SEQ ID NO: 12604 - protein, 85 aa, Homo sapiens
DVKIPDTLQDQLNEQQKRQPLSVSDRHVYKYRCNHCSLAFKTMQKLQIHSQYHAIRAATMCNLCQRSFRTFQALKKHLEAGHPEL

SEQ ID NO: 12605 - protein, 85 aa, Homo sapiens
SEAELQQLYASLPVNGELWAESETMSQDDHGLEQEMEREYEVDHEGKASPVGSDSSSIPDDMGSEPKRTLPFRKGPNFTMEKFLD

SEQ ID NO: 12606 - protein, 85 aa, Homo sapiens
PSRPYKCTVCKESFTQKNILLVHYNSVSHLHKLKKVLQEASSPVPQETNSNTDNKPYKCSICNVAYSQSSTLEIHMRSVLHQTKA

SEQ ID NO: 12607 - protein, 51 aa, Homo sapiens
ICLGNLGLRRKKSIEFYTPWQRRASYRKRQEHPLCGKSRSPLRLGTSTAEW

SEQ ID NO: 12608 - protein, 15 aa, Homo sapiens
LLQSQLRLGTSTAEW

SEQ ID NO: 12609 - protein, 20 aa, Homo sapiens
LTWKGRGMSIDKGQPLPYGI

SEQ ID NO: 12610 - protein, 12 aa, Homo sapiens
KTGKRPDQNQQD

SEQ ID NO: 12611 - protein, 7 aa, Homo sapiens
RTPSAGC

SEQ ID NO: 12612 - protein, 75 aa, Homo sapiens
PTIPQRKNQRRLQSPRPPPLQPHPSFLGRAPSPHCLSVCTNWGTPANSVSCPKKALPMNPSSNTVLQWEPKLSPV

SEQ ID NO: 12613 - protein, 7 aa, Homo sapiens
RWPQRKP

SEQ ID NO: 12614 - protein, 18 aa, Homo sapiens
HTARSKASRKQQMRLSVS

SEQ ID NO: 12615 - protein, 9 aa, Homo sapiens
SAWEQGIAV

SEQ ID NO: 12616 - protein, 83 aa, Homo sapiens
PSLTSPAATVLWKAQNPATTLSSRIPNKESSAPRWRTEKAQSLWNPVTLCLRGMAFGSGRDSVPCPVVTKSYAGTCWACKGHC

SEQ ID NO: 12617 - protein, 21 aa, Homo sapiens
TSCSPFISNLSHWVTFSAKGI

SEQ ID NO: 12618 - protein, 38 aa, Homo sapiens
TVPEALWMGHGMNCPGSPKRTFFFYLRSSAPSVTAGIY

SEQ ID NO: 12619 - protein, 9 aa, Homo sapiens
RLGTSTAEW

SEQ ID NO: 12620 - protein, 7 aa, Homo sapiens
WKILLSF

SEQ ID NO: 12621 - protein, 32 aa, Homo sapiens
FLKPLQLQSLRPKETQSSSPVIYPHQMPQITW

SEQ ID NO: 12622 - protein, 6 aa, Homo sapiens
MTSQMT

SEQ ID NO: 12623 - protein, 21 aa, Homo sapiens
MAESFPQLKLEARKWPSRMQL

SEQ ID NO: 12624 - protein, 33 aa, Homo sapiens
GTPANSVSCPKKALPMNPSSNTVLQWEPKLSPV

SEQ ID NO: 12625 - protein, 61 aa, Homo sapiens
FWSTPAPMALLLNSSWSTSPDLLTSPSSFTKQKLGVAGSQPSAHTARSKASRKQQMRLSVS

SEQ ID NO: 12626 - protein, 7 aa, Homo sapiens
ATGASTL

SEQ ID NO: 12627 - protein, 22 aa, Homo sapiens
NTTPRLRRIVYLNLLREEKSSK

SEQ ID NO: 12628 - protein, 41 aa, Homo sapiens
MWNPVTLCLRGMAFGSGRDSVPCPVVTKSYAGTCWACKGHC

SEQ ID NO: 12629 - protein, 81 aa, Homo sapiens
IPLLSTTPRLAESAYMIPKGNPGRLRRQASTGVWLMAMTWRSWTVPEALWMGHGMNCPGSPKRTFFFYLRSSAPSVTAGIY

SEQ ID NO: 12630 - protein, 85 aa, Homo sapiens
AHEGSRQVRDRGVTRSKAEKVRPPTVPVPQVDIVPGRLSEAEWMALTALEEGEDVVGDILADLLARVMDSAFKVYLTQQCIPFTI

SEQ ID NO: 12631 - protein, 85 aa, Homo sapiens
SQAREAMLQITEWRFLARDEGESAVAEDPTWGEDEEPSACTTDSWAQGSVPVLHASTSEGLENFQGEDPGGVDRIPLGRSWMGRG

SEQ ID NO: 12632 - protein, 85 aa, Homo sapiens
SQEQMESWEPSPQLRVTSAPPPTSELFQEAGPGGPVEEADGQSRGLSSAGSLSASFQLSVEEAPADDADPSLDPYLVASPQASTG

SEQ ID NO: 12633 - protein, 85 aa, Homo sapiens
RGHPLGFHLSLEDLYCCMPQLDAAGDRLELRSEGVPCIASGVLVSYPSVGGATRPSASCQQQRAGHSDVRLSAHHHRMRRKAAVK

SEQ ID NO: 12634 - protein, 85 aa, Homo sapiens
RLDPARLPCHWVRPLAEVLVPDSQTRPLEAYRGRQRGEKTKARAEPQALGPGTRVSPAAFFPLRPGIPFRDLDSGPALLFPTLNL

SEQ ID NO: 12635 - protein, 85 aa, Homo sapiens
GLSSPSLESKLPLPNSRIRFLTTHPVLPDVARSRSPKLWPSVRWPSGWEGKAELLGELWAGRTRVPPQGLELADREGQDPGRWPR

SEQ ID NO: 12636 - protein, 85 aa, Homo sapiens
WMALTALEEGEDVVGDILADLLARVMDSAFKVYLTQQCIPFTISQAREAMLQITEWRFLARDEGESAVAEDPTWGEDEEPSACTT

SEQ ID NO: 12637 - protein, 85 aa, Homo sapiens
DSWAQGSVPVLHASTSEGLENFQGEDPGGVDRIPLGRSWMGRGSQEQMESWEPSPQLRVTSAPPPTSELFQEAGPGGPVEEADGQ

SEQ ID NO: 12638 - protein, 85 aa, Homo sapiens
SRGLSSAGSLSASFQLSVEEAPADDADPSLDPYLVASPQASTGRGHPLGFHLSLEDLYCCMPQLDAAGDRLELRSEGVPCIASGV

SEQ ID NO: 12639 - protein, 85 aa, Homo sapiens
MVSYPSVGGATRPSASCQQQRAGHSDVRLSAHHHRMRRKAAVKRLDPARLPCHWVRPLAEVLVPDSQTRPLEAYRGRQRGEKTKA

SEQ ID NO: 12640 - protein, 85 aa, Homo sapiens
RAEPQALGPGTRVSPAAFFPLRPGIPFRDLDSGPALLFPTLNLGLSSPSLESKLPLPNSRIRFLTTHPVLPDVARSRSPKLWPSV

SEQ ID NO: 12641 - protein, 85 aa, Homo sapiens
RWPSGWEGKAELLGELWAGRTRVPPQGLELADREGQDPGRWPRTTPPVLEATSQVMWKPVLLPEALKLAPGVSMWNRSTQVLLSS

SEQ ID NO: 12642 - protein, 84 aa, Homo sapiens
ESKSWHEVNCVGLPELQLICLVGTEIEGEGLQTVVPTPITASLSHNSCTQKKAHMRTQQEGGCLQAKKRGLIRDGMFLHFGLDF

SEQ ID NO: 12643 - protein, 85 aa, Homo sapiens
PKYLEMMELDIGDATQVYVAFLVYLDLMESKSWHEVNCVGLPELQLICLVGTEIEGEGLQTVVPTPITASLSHNSCTQKKAHMRT

SEQ ID NO: 12644 - protein, 69 aa, Homo sapiens
STSSGSRGPAAPPRPFTGATASFLTSRCRCWTNFPWKEDRRTPSSGSSPFCQVRFSSDEATSGTWLSNA

SEQ ID NO: 12645 - protein, 18 aa, Homo sapiens
TSLSVMRCCSSLRQDLRT

SEQ ID NO: 12646 - protein, 72 aa, Homo sapiens
RSKAGSLQRASKARMGCRMSFLCSLKKSHGGIGLCPGRWAAAGLWGTCMPSAGVKRRSTQSSTRTQLGTRMK

SEQ ID NO: 12647 - protein, 22 aa, Homo sapiens
KTWKAGGRSGTRAKKAGPPPPT

SEQ ID NO: 12648 - protein, 4 aa, Homo sapiens
DHQR

SEQ ID NO: 12649 - protein, 27 aa, Homo sapiens
PSSGSSPFCQVRFSSDEATSGTWLSNA

SEQ ID NO: 12650 - protein, 7 aa, Homo sapiens
SWSSMWW

SEQ ID NO: 12651 - protein, 30 aa, Homo sapiens
GLWGTCMPSAGVKRRSTQSSTRTQLGTRMK

SEQ ID NO: 12652 - protein, 47 aa, Homo sapiens
RVPLTWMVFPGSRTRWAGRRSCSAARGTGGLKAARCPTVTPSRDHQR

SEQ ID NO: 12653 - protein, 85 aa, Homo sapiens
EAHNEGSNLERHQAKPKEKIEYKCSEREQRFIQHLDLIEHASTHTGKKLCESDVCQSSSLTGHKKVLSREKGHQCHECGKAFQRS

SEQ ID NO: 12654 - protein, 85 aa, Homo sapiens
SHLVRHQKIHLGEKPYQCNECGKVFSQNAGLLEHLRIHTGEKPYLCIHCGKNFRRSSHLNRHQRIHSQEEPCECKECGKTFSQAL

SEQ ID NO: 12655 - protein, 85 aa, Homo sapiens
LLTHHQRIHSHSKSHQCNECGKAFSLTSDLIRHHRIHTGEKPFKCNICQKAFRLNSHLAQHVRIHNEEKPYQCSECGEAFRQRSG

SEQ ID NO: 12656 - protein, 85 aa, Homo sapiens
THTGKKLCESDVCQSSSLTGHKKVLSREKGHQCHECGKAFQRSSHLVRHQKIHLGEKPYQCNECGKVFSQNAGLLEHLRIHTGEK

SEQ ID NO: 12657 - protein, 85 aa, Homo sapiens
PYLCIHCGKNFRRSSHLNRHQRIHSQEEPCECKECGKTFSQALLLTHHQRIHSHSKSHQCNECGKAFSLTSDLIRHHRIHTGEKP

SEQ ID NO: 12658 - protein, 84 aa, Homo sapiens
RGVCTHTLTKHQEPVYSVAFSPDGKYLASGSFDKCVHIWNTQSGNLVHSYRGTGGIFEVCWNARGDKVGASASDGSVAYNALQL

SEQ ID NO: 12659 - protein, 84 aa, Homo sapiens
HIMDDMIKRALDFRESREAEPHPLWEYPCRSLSEPWQILTFDFQQPVPLQPLCAEGTVELRSSGRWELTSCGHRCTIFLNPPGS

SEQ ID NO: 12660 - protein, 84 aa, Homo sapiens
AEEREALGGLDSRLFGFVRFHEDGARTKALLGKAVRCYESLILKAEGKVESDFFCQLGHFNLLLEDYPKECCLFIWSWFGLLPL

SEQ ID NO: 12661 - protein, 85 aa, Homo sapiens
RKHVLAASFSMLSLLVIMGDTDSKTDSSFIMDSDPRRCMRHHYVDSISHPLYKCSSKMVLLARCEGHCSQASRSEPLVSFSTVLK

SEQ ID NO: 12662 - protein, 84 aa, Homo sapiens
HPLYKCSSKMVLLARCEGHCSQASRSEPLVSFSTVLKQPFRSSCHCCRPQTSKLKALRLRCSGGMRLTATYRYILSCHCEECNS

SEQ ID NO: 12663 - protein, 85 aa, Homo sapiens
YVDSISHPLYKCSSKMVLLARCEGHCSQASRSEPLVSFSTVLKQPFRSSCHCCRPQTSKLKALRLRCSGGMRLTATYRYILSCHC

SEQ ID NO: 12664 - protein, 85 aa, Homo sapiens
PEVQRKPKITASRKLLLKSLMLAKAKECWEQEHEEREAEKVRYLAERIPTLQTRGLSLSALQDLCRELHAKVEVVDEERYDIEAK

SEQ ID NO: 12665 - protein, 84 aa, Homo sapiens
MTVLRAFPCRSRLGDAETAAAIEEEMLLVEFYKGSPDLVRLQEPWSQEHTYLDKLKISLASRTPKDQSLCHVLEQVCGVLKQGS

SEQ ID NO: 12666 - protein, 85 aa, Homo sapiens
SSTRSQNPHGLKQIGLDQIWDDLRAGIQQVYTRQSMAKSRYMELYTHVYNYCTSVHQFVGLELYKRLKEFLKNYLTNLLKDGEDL

SEQ ID NO: 12667 - protein, 85 aa, Homo sapiens
MDESVLKFYTQQWEDYRFSSKVLNGICAYLNRHWVRRECDEGRKGIYEIYSLALVTWRDCLFRPLNKQVTNAVLKLIEKERNGET

SEQ ID NO: 12668 - protein, 85 aa, Homo sapiens
INTRLISGVVQSYVELGLNEDDAFAKGPTLTVYKESFESQFLADTERFYTRESTEFLQQNPVTEYMKKAEARLLEEQRRVQVYLH

SEQ ID NO: 12669 - protein, 85 aa, Homo sapiens
ESTQDELARKCEQVLIEKHLEIFHTEFQNLLDADKNEDLGRMYNLVSRIQDGLGELKKLLETHIHNQGLAAIEKCGEAALNDPKM

SEQ ID NO: 12670 - protein, 85 aa, Homo sapiens
YVQTVLDVHKKYNALVMSAFNNDAGFVAALDKACGRFINNNAVTKMAQSSSKSPELLARYCDSLLKKSSKNPEEAELEDTLNQVM

SEQ ID NO: 12671 - protein, 85 aa, Homo sapiens
VVFKYIEDKDVFQKFYAKMLAKRLVHQNSASDDAEASMISKLKQACGFEYTSKLQRMFQDIGVSKDLNEQFKKHLTNSEPLDLDF

SEQ ID NO: 12672 - protein, 85 aa, Homo sapiens
SIQVLSSGSWPFQQSCTFALPSELERSYQRFTAFYASRHSGRKLTWLYQLSKGELVTNCFKNRYTLQASTFQMAILLQYNTEDAY

SEQ ID NO: 12673 - protein, 85 aa, Homo sapiens
TVQQLTDSTQIKMDILAQVLQILLKSKLLVLEDENANVDEVELKPDTLIKLYLGYKNKKLRVNINVPMKTEQKQEQETTHKNIEE

SEQ ID NO: 12674 - protein, 85 aa, Homo sapiens
ELYTHVYNYCTSVHQFVGLELYKRLKEFLKNYLTNLLKDGEDLMDESVLKFYTQQWEDYRFSSKVLNGICAYLNRHWVRRECDEG

SEQ ID NO: 12675 - protein, 85 aa, Homo sapiens
RKGIYEIYSLALVTWRDCLFRPLNKQVTNAVLKLIEKERNGETINTRLISGVVQSYVELGLNEDDAFAKGPTLTVYKESFESQFL

SEQ ID NO: 12676 - protein, 85 aa, Homo sapiens
ADTERFYTRESTEFLQQNPVTEYMKKAEARLLEEQRRVQVYLHESTQDELARKCEQVLIEKHLEIFHTEFQNLLDADKNEDLGRM

SEQ ID NO: 12677 - protein, 85 aa, Homo sapiens
YNLVSRIQDGLGELKKLLETHIHNQGLAAIEKCGEAALNDPKMYVQTVLDVHKKYNALVMSAFNNDAGFVAALDKACGRFINNNA

SEQ ID NO: 12678 - protein, 85 aa, Homo sapiens
VTKMAQSSSKSPELLARYCDSLLKKSSKNPEEAELEDTLNQVMVVFKYIEDKDVFQKFYAKMLAKRLVHQNSASDDAEASMISKL

SEQ ID NO: 12679 - protein, 85 aa, Homo sapiens
KQACGFEYTSKLQRMFQDIGVSKDLNEQFKKHLTNSEPLDLDFSIQVLSSGSWPFQQSCTFALPSELERSYQRFTAFYASRHSGR

SEQ ID NO: 12680 - protein, 85 aa, Homo sapiens
KLTWLYQLSKGELVTNCFKNRYTLQASTFQMAILLQYNTEDAYTVQQLTDSTQIKMDILAQVLQILLKSKLLVLEDENANVDEVE

SEQ ID NO: 12681 - protein, 85 aa, Homo sapiens
MKPDTLIKLYLGYKNKKLRVNINVPMKTEQKQEQETTHKNIEEDRKLLIQAAIVRIMKMRKVLKHQQLLGEVLTQLSSRFKPRVP

SEQ ID NO: 12682 - protein, 85 aa, Homo sapiens
SGSDSADKKAQGPKGGGNAVKVRHILCEKHGKIMEAMEKLKSGMRFNEVAAQYSEDKARQGGDLGWMTRGSMVGPFQEAAFALPV

SEQ ID NO: 12683 - protein, 84 aa, Homo sapiens
VNCVGLPELQLICLVGTEIEGEGLQTVVPTPITASLSHNRRNNPYIFIKDINKKQLSPSCESDPNPLTSSLIQVRGFHYCRSAL

SEQ ID NO: 12684 - protein, 6 aa, Homo sapiens
ITDTRL

SEQ ID NO: 12685 - protein, 19 aa, Homo sapiens
PSPFGVDASLHSPSVLIPP

SEQ ID NO: 12686 - protein, 84 aa, Homo sapiens
SVPSSPEKHSALTLCSPQRHSTSSPLNCCVSLTSRTLSIASLALSAVTLPCPPHLSGPSSGVTQGAVLGPFLCPQFHMSGPQPV

SEQ ID NO: 12687 - protein, 22 aa, Homo sapiens
SGNRRPRGTASGYPPCPTAPTT

SEQ ID NO: 12688 - protein, 85 aa, Homo sapiens
VCSPVTVRIAPPDRRFSRSAIPEQIISSTLSSPSSNAPDPCAKETVLSALKEKKKKRTVEEEDQIFLDGQENKRRRHDSSGSGHS

SEQ ID NO: 12689 - protein, 85 aa, Homo sapiens
AFEPLVASGVPASFVPKPGSLKRGLNSQSSDDHLNKRSRSSSMSSLTGAYTSGIPSSSRNAITSSYSSTRGISQLWKRNGPSSSP

SEQ ID NO: 12690 - protein, 85 aa, Homo sapiens
FSSPASSRSQTPERPAKKIREEELCHHSSSSTPLAADKESQGEKAADTTPRKKQNSNSQSTPGSSGQRKRKVQLLPSRRGEQLTL

SEQ ID NO: 12691 - protein, 85 aa, Homo sapiens
PPPPQLGYSITAEDLDLEKKASLQWFNQALEDKSDAASNSVTETPPTTQPSFTFTLPAAATASPPTSLLAPSTNPLLESLKKMQT

SEQ ID NO: 12692 - protein, 85 aa, Homo sapiens
ATSAPSPAPKQSFLFGTQNTSPSSPAAPAASSASPMFKPIFTAPPKSEKEGLTPPGPSVSATAPSSSSLPTTTSTTAPTFQPVFS

SEQ ID NO: 12693 - protein, 85 aa, Homo sapiens
FLFGAPQASAASFTPAMGSIFQFGKPPALPTTTTVTTFSQSLPTAVPTATSSSAADFSGFGSTLATSAPATSSQPTLTFSNTSTP

SEQ ID NO: 12694 - protein, 85 aa, Homo sapiens
TFNIPFGSSAKSPLPSYPGANPQPAFGAAEGQPPGAAKPALTPSFGSSFTFGNSAAPAPATAPTPAPASTIKIVPAHVPTPIQPT

SEQ ID NO: 12695 - protein, 85 aa, Homo sapiens
FGGATHSAFGLKATASAFGAPASSQPAFGGSTAVFSFGAATSSGFGATTQTASSGSSSSVFGSTTPSPFTFGGSAAPAGSGSFGI

SEQ ID NO: 12696 - protein, 85 aa, Homo sapiens
NVATPGSSATTGAFSFGAGQSGSTATSTPFTGGLGQNALGTTGQSTPFAFNVGSTTESKPVFGGTATPTFGQNTPAPGVGTSGSS

SEQ ID NO: 12697 - protein, 84 aa, Homo sapiens
GSTTESKPVFGGTATPTFGQNTPAPGVGTSGSSLSFGASSAPAQGFVGVGPFGSAAPSFSIGAGSKTPGARQRLQARRQHTRKK

SEQ ID NO: 12698 - protein, 85 aa, Homo sapiens
KETVLSALKEKKKKRTVEEEDQIFLDGQENKRRRHDSSGSGHSAFEPLVASGVPASFVPKPGSLKRGLNSQSSDDHLNKRSRSSS

SEQ ID NO: 12699 - protein, 85 aa, Homo sapiens
MSSLTGAYTSGIPSSSRNAITSSYSSTRGISQLWKRNGPSSSPFSSPASSRSQTPERPAKKIREEELCHHSSSSTPLAADKESQG

SEQ ID NO: 12700 - protein, 85 aa, Homo sapiens; identical to SEQ ID NO: 6175

SEQ ID NO: 12701 - protein, 85 aa, Homo sapiens
ETPPTTQPSFTFTLPAAATASPPTSLLAPSTNPLLESLKKMQTPPSLPPCPESAGAATTEALSPPKTPSLLPPLGLSQSGPPGLL

SEQ ID NO: 12702 - protein, 85 aa, Homo sapiens
PSPSFDSKPPTTLLGLIPAPSMVPATDTKAPPTLQAETATKPQATSAPSPAPKQSFLFGTQNTSPSSPAAPAASSASPMFKPIFT

SEQ ID NO: 12703 - protein, 85 aa, Homo sapiens
APPKSEKEGLTPPGPSVSATAPSSSSLPTTTSTTAPTFQPVFSSMGPPASVPLPAPFFKQTTTPATAPTTTAPLFTGLASATSAV

SEQ ID NO: 12704 - protein, 85 aa, Homo sapiens
PTAVPTATSSSAADFSGFGSTLATSAPATSSQPTLTFSNTSTPTFNIPFGSSAKSPLPSYPGANPQPAFGAAEGQPPGAAKPALT

SEQ ID NO: 12705 - protein, 85 aa, Homo sapiens
PSFGSSFTFGNSAAPAPATAPTPAPASTIKIVPAHVPTPIQPTFGGATHSAFGLKATASAFGAPASSQPAFGGSTAVFSFGAATS

SEQ ID NO: 12706 - protein, 85 aa, Homo sapiens
SGFGATTQTASSGSSSSVFGSTTPSPFTFGGSAAPAGSGSFGINVATPGSSATTGAFSFGAGQSGSTATSTPFTGGLGQNALGTT

SEQ ID NO: 12707 - protein, 85 aa, Homo sapiens
GQSTPFAFNVGSTTESKPVFGGTATPTFGQNTPAPGVGTSGSSLSFGASSAPAQGFVGVGPFGSAAPSFSIGAGSKTPGARQRLQ

SEQ ID NO: 12708 - protein, 85 aa, Homo sapiens
EPIDLSIPKNFRKGDKDLATPSEAKKPEEEAGSSEQPSPCPAPGPSLPVTLGPSGILESPMAPAPAATPEPPAQPLQGPVQLAVP

SEQ ID NO: 12709 - protein, 85 aa, Homo sapiens
IYSSALVSSPPLVGSSALLSGTALLRPLRPKPPLLLPKPPVTEELPPLASIAQIISSVSSAPTLLKTKVADPGPASTGSNTTASD

SEQ ID NO: 12710 - protein, 85 aa, Homo sapiens
SLGGSVPKAATTATPAATTSPKESSEPPAPASSPEAASPTEQGPAGTSKKRGRKRGMRSRPRANSGGVDLDSSGEFASIEKMLAT

SEQ ID NO: 12711 - protein, 85 aa, Homo sapiens
TDTNKFSPFLQTAEDNTQDEVAGAPADHHGPSDEEQGSPPEDKLLRAKRNSYTNCLQKITCPHCPRVFPWASSLQRHMLTHTDSQ

SEQ ID NO: 12712 - protein, 85 aa, Homo sapiens
SDAETAAAAGEVLDLTSRDREQPSEGATELRQVAGDAPVEQATAETASPVHREEHGRGESHEPEEEHGTEESTGDADGGRGRVEQ

SEQ ID NO: 12713 - protein, 85 aa, Homo sapiens
PEPGPGLRHQAHGLQAGGGRRRGRAGGAASQEQKLACDTCGKSFKFLGTLSRHRKAHGRQEPKDEKGDGASTAEEGPQPAPEQEE

SEQ ID NO: 12714 - protein, 85 aa, Homo sapiens
KPPETPAEVVESAPGAGEAPAEKLAEETEGPSDGESAAEKRSSEKSDDDKKPKTDSPKSVASKADKRKKVCSVCNKRFWSLQDLT

SEQ ID NO: 12715 - protein, 85 aa, Homo sapiens
RHMRSHTGERPYKCQTCERTFTLKHSLVRHQRIHQKARHAKHHGKDSDKEERGEEDSENESTHSGNNAVSENEAELAPNASNHMA

SEQ ID NO: 12716 - protein, 85 aa, Homo sapiens
PGPSLPVTLGPSGILESPMAPAPAATPEPPAQPLQGPVQLAVPIYSSALVSSPPLVGSSALLSGTALLRPLRPKPPLLLPKPPVT

SEQ ID NO: 12717 - protein, 85 aa, Homo sapiens
EELPPLASIAQIISSVSSAPTLLKTKVADPGPASTGSNTTASDSLGGSVPKAATTATPAATTSPKESSEPPAPASSPEAASPTEQ

SEQ ID NO: 12718 - protein, 85 aa, Homo sapiens
GPAGTSKKRGRKRGMRSRPRANSGGVDLDSSGEFASIEKMLATTDTNKFSPFLQTAEDNTQDEVAGAPADHHGPSDEEQGSPPED

SEQ ID NO: 12719 - protein, 85 aa, Homo sapiens
KLLRAKRNSYTNCLQKITCPHCPRVFPWASSLQRHMLTHTDSQSDAETAAAAGEVLDLTSRDREQPSEGATELRQVAGDAPVEQA

SEQ ID NO: 12720 - protein, 85 aa, Homo sapiens
TAETASPVHREEHGRGESHEPEEEHGTEESTGDADGGRGRVEQPEPGPGLRHQAHGLQAGGGRRRGRAGGAASQEQKLACDTCGK

SEQ ID NO: 12721 - protein, 85 aa, Homo sapiens
SFKFLGTLSRHRKAHGRQEPKDEKGDGASTAEEGPQPAPEQEEKPPETPAEVVESAPGAGEAPAEKLAEETEGPSDGESAAEKRS

SEQ ID NO: 12722 - protein, 85 aa, Homo sapiens
SEKSDDDKKPKTDSPKSVASKADKRKKVCSVCNKRFWSLQDLTRHMRSHTGERPYKCQTCERTFTLKHSLVRHQRIHQKARHAKH

SEQ ID NO: 12723 - protein, 85 aa, Homo sapiens
HGKDSDKEERGEEDSENESTHSGNNAVSENEAELAPNASNHMAVTRSRKEGLASATKDCSHREEKVTAGWPSEPGQGDLNPESPA

SEQ ID NO: 12724 - protein, 85 aa, Homo sapiens
HLINALCSLSLEAMDMAYGNNKEPSLFAVAKLLETGLVNMHRIEILWRPLTGHLLEKVCQHPNSRMREWGAEALTSLIKAGLTFN

SEQ ID NO: 12725 - protein, 85 aa, Homo sapiens
HDPPLSQNQRLQLLLLNPLKEMSNINHPDIRLKQLECVLQILQSQGDSLGPGWPLVLGVMGAIRNDQGESLIRTAFQCLQLVVTD

SEQ ID NO: 12726 - protein, 85 aa, Homo sapiens
FLPTMPCTCLQIVVDVAGSFGLHNQELNISLTSIGLLWNISDYFFQRGETIEKELNKEEAAQQKQAEEKGVVLNRPFHPAPPFDC

SEQ ID NO: 12727 - protein, 85 aa, Homo sapiens
MWLCLYAKLGELCVDPRPAVRKSAGQTLFSTIGAHGTLLQHSTWHTVIWKVLFHLLDRVRESSTTADKEKIESGGGNILIHHSRD

SEQ ID NO: 12728 - protein, 85 aa, Homo sapiens
TAEKQWAETWVLTLAGVARIFNTRRYLLQPLGDFSRAWDVLLDHIQSAALSKNNEVSLAALKSFQEILQIVSPVRDSDKPETPPV

SEQ ID NO: 12729 - protein, 85 aa, Homo sapiens
VNVPVPVLIGPISGMSRPFVRTDSIGEKLGRYSSSEPPIVTDELEDLNLWWAAWNTWYRIGSESTKPPITFDKLTFIPSQPFLTA

SEQ ID NO: 12730 - protein, 85 aa, Homo sapiens
LIQIFPALYQHIKTGFNMDDLQKLGVILHSAISVPISSDASPFILPSYTEAVLTSLQEAVLTALDVLQKAICVGPENMQIMYPAI

SEQ ID NO: 12731 - protein, 85 aa, Homo sapiens
FDQLLAFVEFSCKPPQYGQLETKHIANAKYNQIQLFAPAEWVALNYVPFAERSLEVVVDLYQKTACHKAVVNEKVLQNIIKTLRV

SEQ ID NO: 12732 - protein, 85 aa, Homo sapiens
PLSLKYSCPSESTWKLAVSSLLRVLSIGLPVARQHASSGKFDSMWPELANTFEDFLFTKSIPPDNLSIQEFQRNENIDVEVVQLI

SEQ ID NO: 12733 - protein, 85 aa, Homo sapiens
SNEILPYANFIPKEFVGQIMTMLNKGSIHSQSSSFTEAEIDIRLREEFSKMCFETLLQFSFSNKVTTPQEGYISRMALSVLLKRS

SEQ ID NO: 12734 - protein, 85 aa, Homo sapiens
QDVLHRYIEDERLSGKCPLPRQQVTEIIFVLKAVSTLIDSLKKTQPENVDGNTWAQVIALYPTLVECITCSSSEVCSALKEALVP

SEQ ID NO: 12735 - protein, 85 aa, Homo sapiens
IEILWRPLTGHLLEKVCQHPNSRMREWGAEALTSLIKAGLTFNHDPPLSQNQRLQLLLLNPLKEMSNINHPDIRLKQLECVLQIL

SEQ ID NO: 12736 - protein, 85 aa, Homo sapiens
QSQGDSLGPGWPLVLGVMGAIRNDQGESLIRTAFQCLQLVVTDFLPTMPCTCLQIVVDVAGSFGLHNQELNISLTSIGLLWNISD

SEQ ID NO: 12737 - protein, 85 aa, Homo sapiens
YFFQRGETIEKELNKEEAAQQKQAEEKGVVLNRPFHPAPPFDCLWLCLYAKLGELCVDPRPAVRKSAGQTLFSTIGAHGTLLQHS

SEQ ID NO: 12738 - protein, 85 aa, Homo sapiens
TWHTVIWKVLFHLLDRVRESSTTADKEKIESGGGNILIHHSRDTAEKQWAETWVLTLAGVARIFNTRRYLLQPLGDFSRAWDVLL

SEQ ID NO: 12739 - protein, 85 aa, Homo sapiens
DHIQSAALSKNNEVSLAALKSFQEILQIVSPVRDSDKPETPPVVNVPVPVLIGPISGMSRPFVRTDSIGEKLGRYSSSEPPIVTD

SEQ ID NO: 12740 - protein, 85 aa, Homo sapiens
ELEDLNLWWAAWNTWYRIGSESTKPPITFDKLTFIPSQPFLTALIQIFPALYQHIKTGFNMDDLQKLGVILHSAISVPISSDASP

SEQ ID NO: 12741 - protein, 85 aa, Homo sapiens
FILPSYTEAVLTSLQEAVLTALDVLQKAICVGPENMQIMYPAIFDQLLAFVEFSCKPPQYGQLETKHIANAKYNQIQLFAPAEWV

SEQ ID NO: 12742 - protein, 85 aa, Homo sapiens
ALNYVPFAERSLEVVVDLYQKTACHKAVVNEKVLQNIIKTLRVPLSLKYSCPSESTWKLAVSSLLRVLSIGLPVARQHASSGKFD

SEQ ID NO: 12743 - protein, 85 aa, Homo sapiens
SMWPELANTFEDFLFTKSIPPDNLSIQEFQRNENIDVEVVQLISNEILPYANFIPKEFVGQIMTMLNKGSIHSQSSSFTEAEIDI

SEQ ID NO: 12744 - protein, 85 aa, Homo sapiens
RLREEFSKMCFETLLQFSFSNKVTTPQEGYISRMALSVLLKRSQDVLHRYIEDERLSGKCPLPRQQVTEIIFVLKAVSTLIDSLK

SEQ ID NO: 12745 - protein, 52 aa, Homo sapiens
TCPAQRASWPSTRSCRASWAGGERCCSRPCGVARSWLRPAVPSAREQTPCTW

SEQ ID NO: 12746 - protein, 54 aa, Homo sapiens
CTSSALTSTGCWTGFATLTAWQPPVTSATTKLPAAAWRASTARSPGRWRHIAGP

SEQ ID NO: 12747 - protein, 6 aa, Homo sapiens
SSCSLR

SEQ ID NO: 12748 - protein, 30 aa, Homo sapiens
RSWWKEATPVQMRCVPARTTSTAGGTASWS

SEQ ID NO: 12749 - protein, 43 aa, Homo sapiens
LCRRWSRARRPFWRRQPCWLSASRRRRRGCTRARRSWAPSGAR

SEQ ID NO: 12750 - protein, 7 aa, Homo sapiens
RGPCPTA

SEQ ID NO: 12751 - protein, 38 aa, Homo sapiens
STSSSCGIYARRSWCCVTRRWRCLVRSSRAQWNRWRRP

SEQ ID NO: 12752 - protein, 84 aa, Homo sapiens
ELPGTVESVEEALKQHRDFLTTMELSQQKMQVAVQAAEGLLRQGNIYGEQAQEAVTRLLEKCLIIHPALLHPPWEPPDLPRSSS

SEQ ID NO: 12753 - protein, 10 aa, Homo sapiens
SAREQTPCTW

SEQ ID NO: 12754 - protein, 12 aa, Homo sapiens
RSPGRWRHIAGP

SEQ ID NO: 12755 - protein, 28 aa, Homo sapiens
NGCSPCVCRIHSTTSRWCSTDSRAWTKR

SEQ ID NO: 12756 - protein, 40 aa, Homo sapiens
CWWRTTCWRWPRCAPRCVRSGELWRARPGPAAPCSGVLAA

SEQ ID NO: 12757 - protein, 48 aa, Homo sapiens
LARLRPAARRWRQQGACSASYMTSTLSWTGSCAPRRRRAAARGPCPTA

SEQ ID NO: 12758 - protein, 13 aa, Homo sapiens
WPPTAQSWARAWH

SEQ ID NO: 12759 - protein, 84 aa, Homo sapiens
KVTLATLKMSVQPTVSLGGFEITPPVVLRLKCGSGPVHISGQHLVAVEEDAESEDEEEEDVKLLSISGKRSAPGGGSKVPQVEM

SEQ ID NO: 12760 - protein, 85 aa, Homo sapiens
ATVPVYCVCRLPYDVTRFMIECDACKDWFHGSCVGVEEEEAPDIDIYHCPNCEKTHGKSTLKKKRTWHKHGPGQAPDVKAAKNSV

SEQ ID NO: 12761 - protein, 85 aa, Homo sapiens
DLDDYEEEQDHLDACFKDSDYVYPSLESDEDNPIFKSRSKKRKGSDDAPYSPTARVGPSVPRQDRPVREGTRVASIETGLAAAAA

SEQ ID NO: 12762 - protein, 85 aa, Homo sapiens
KLSQQEEQKSKKKKSAKRKLTPNTTSPSTSTSISAGTTSTSTTPASTTPASTTPASTSTASSQASQEGSSPEPPPESHSSSLADH

SEQ ID NO: 12763 - protein, 85 aa, Homo sapiens
DIDIYHCPNCEKTHGKSTLKKKRTWHKHGPGQAPDVKAAKNSVDLDDYEEEQDHLDACFKDSDYVYPSLESDEDNPIFKSRSKKR

SEQ ID NO: 12764 - protein, 85 aa, Homo sapiens
KGSDDAPYSPTARVGPSVPRQDRPVREGTRVASIETGLAAAAAKLSQQEEQKSKKKKSAKRKLTPNTTSPSTSTSISAGTTSTST

SEQ ID NO: 12765 - protein, 85 aa, Homo sapiens
TPASTTPASTTPASTSTASSQASQEGSSPEPPPESHSSSLADHEYTAAGTFTGAQAGRTSQPMAPGVFLTQRRPSASSPNNNTAA

SEQ ID NO: 12766 - protein, 85 aa, Homo sapiens
PRGVVVTLRNIATQLESSWELHTNRQCIESENTWRDLMKTALENLIVLLKDENTISPYEMCSSGLVQALLTVLNNVSLSSSKEKN

SEQ ID NO: 12767 - protein, 85 aa, Homo sapiens
TVLKIISTGRKNVFKTAFSENEDDESRPAVALIRKLIAVLESIERLPLHLYDTPGSTYNLQILTRRLRFRLERAPGETALIDRTG

SEQ ID NO: 12768 - protein, 85 aa, Homo sapiens
RMLKMEPLATVESLEQYLLKMVAKQWYDFDRSSFVFVRKLREGQNFIFRHQHDFDENGIIYWIGTNAKTAYEWVNPAAYGLVVVT

SEQ ID NO: 12769 - protein, 85 aa, Homo sapiens
SSEGRNLPYGRLEDILSRDNSALNCHSNDDKNAWFAIDLGLWVIPSAYTLRHARGYGRSALRNWVFQVSKDGQNWTSLYTHVDDC

SEQ ID NO: 12770 - protein, 85 aa, Homo sapiens
SLNEPGSTATWPLDPPKDEKQGWRHVRIKQMGKNASGQTHYLSLSGFELYGTVNGVCEDQLGKAAKEAEANLRRQRRLVRSQVLK

SEQ ID NO: 12771 - protein, 85 aa, Homo sapiens
YMVPGARVIRGLDWKWRDQDGSPQGEGTVTGELHNGWIDVTWDAGGSNSYRMGAEGKFDLKLAPGYDPDTVASPKPVSSTVSGTT

SEQ ID NO: 12772 - protein, 85 aa, Homo sapiens
QSWSSLVKNNCPDKTSAAAGSSSRKGSSSSVCSVASSSDISLGSTKTERRSEIVMEHSIVSGADVHEPIVVLSSAENVPQTEVGS

SEQ ID NO: 12773 - protein, 85 aa, Homo sapiens
SSSASTSTLTAETGSENAERKLGPDSSVRTPGESSAISMGIVSVSSPDVSSVSELTNKEAASQRPLSSSASNRLSVSSLLAAGAP

SEQ ID NO: 12774 - protein, 85 aa, Homo sapiens
MSSSASVPNLSSRETSSLESFVRRVANIARTNATNNMNLSRSSSDNNTNTLGRNVMSTATSPLMGAQSFPNLTTPGTTSTVTMST

SEQ ID NO: 12775 - protein, 85 aa, Homo sapiens
SSVTSSSNVATATTVLSVGQSLSNTLTTSLTSTSSESDTGQEAEYSLYDFLDSCRASTLLAELDDDEDLPEPDEEDDENEDDNQE

SEQ ID NO: 12776 - protein, 85 aa, Homo sapiens
DQEYEEVMILRRPSLQRRAGSRSDVTHHAVTSQLPQVPAGAGSRPIGEQEEEEYETKGGRRRTWDDDYVLKRQFSALVPAFDPRP

SEQ ID NO: 12777 - protein, 85 aa, Homo sapiens
GRTNVQQTTDLEIPPPGTPHSELLEEVECTPSPRLALTLKVTGLGTTREVELPLTNFRSTIFYYVQKLLQLSCNGNVKSDKLRRI

SEQ ID NO: 12778 - protein, 85 aa, Homo sapiens
WEPTYTIMYREMKDSDKEKENGKMGCWSIEHVEQYLGTDELPKNDLITYLQKNADAAFLRHWKLTGTNKSIRKNRNCSQLIAAYK

SEQ ID NO: 12779 - protein, 85 aa, Homo sapiens
DFCEHGTKSGLNQGAISTLQSSDILNLTKEQPQAKAGNGQNSCGVEDVLQLLRILYIVASDPYSRISQEDGDEQPQFTFPPDEFT

SEQ ID NO: 12780 - protein, 85 aa, Homo sapiens
SKKITTKILQQIEEPLALASGALPDWCEQLTSKCPFLIPFETRQLYFTCTAFGASRAIVWLQNRREATVERTRTTSSVRRDDPGE

SEQ ID NO: 12781 - protein, 85 aa, Homo sapiens
FRVGRLKHERVKVPRGESLMEWAENVMQIHADRKSVLEVEFLGEEGTGLGPTLEFYALVAAEFQRTDLGAWLCDDNFPDDESRHV

SEQ ID NO: 12782 - protein, 85 aa, Homo sapiens
DLGGGLKPPGYYVQRSCGLFTAPFPQDSDELERITKLFHFLGIFLAKCIQDNRLVDLPISKPFFKLMCMGDIKSNMSKLIYESRG

SEQ ID NO: 12783 - protein, 85 aa, Homo sapiens
DRDLHCTESQSEASTEEGHDSLSVGSFEEDSKSEFILDPPKPKPPAWFNGILTWEDFELVNPHRARFLKEIKDLAIKRRQILSNK

SEQ ID NO: 12784 - protein, 85 aa, Homo sapiens
GLSEDEKNTKLQELVLKNPSGSGPPLSIEDLGLNFQFCPSSRIYGFTAVDLKPSGEDEMITMDNAEEYVDLMFDFCMHTGIQKQM

SEQ ID NO: 12785 - protein, 85 aa, Homo sapiens
EAFRDGFNKVFPMEKLSSFSHEEVQMILCGNQSPSWAAEDIINYTEPKLGYTRDSPGFLRFVRVLCGMSSDERKAFLQFTTGCST

SEQ ID NO: 12786 - protein, 85 aa, Homo sapiens
ENLIVLLKDENTISPYEMCSSGLVQALLTVLNNVSLSSSKEKNTVLKIISTGRKNVFKTAFSENEDDESRPAVALIRKLIAVLES

SEQ ID NO: 12787 - protein, 85 aa, Homo sapiens
IERLPLHLYDTPGSTYNLQILTRRLRFRLERAPGETALIDRTGRMLKMEPLATVESLEQYLLKMVAKQWYDFDRSSFVFVRKLRE

SEQ ID NO: 12788 - protein, 85 aa, Homo sapiens
GQNFIFRHQHDFDENGIIYWIGTNAKTAYEWVNPAAYGLVVVTSSEGRNLPYGRLEDILSRDNSALNCHSNDDKNAWFAIDLGLW

SEQ ID NO: 12789 - protein, 85 aa, Homo sapiens
VIPSAYTLRHARGYGRSALRNWVFQVSKDGQNWTSLYTHVDDCSLNEPGSTATWPLDPPKDEKQGWRHVRIKQMGKNASGQTHYL

SEQ ID NO: 12790 - protein, 85 aa, Homo sapiens
SLSGFELYGTVNGVCEDQLGKAAKEAEANLRRQRRLVRSQVLKYMVPGARVIRGLDWKWRDQDGSPQGEGTVTGELHNGWIDVTW

SEQ ID NO: 12791 - protein, 85 aa, Homo sapiens
DAGGSNSYRMGAEGKFDLKLAPGYDPDTVASPKPVSSTVSGTTQSWSSLVKNNCPDKTSAAAGSSSRKGSSSSVCSVASSSDISL

SEQ ID NO: 12792 - protein, 85 aa, Homo sapiens
GSTKTERRSEIVMEHSIVSGADVHEPIVVLSSAENVPQTEVGSSSSASTSTLTAETGSENAERKLGPDSSVRTPGESSAISMGIV

SEQ ID NO: 12793 - protein, 85 aa, Homo sapiens
SVSSPDVSSVSELTNKEAASQRPLSSSASNRLSVSSLLAAGAPMSSSASVPNLSSRETSSLESFVRRVANIARTNATNNMNLSRS

SEQ ID NO: 12794 - protein, 85 aa, Homo sapiens
SSDNNTNTLGRNVMSTATSPLMGAQSFPNLTTPGTTSTVTMSTSSVTSSSNVATATTVLSVGQSLSNTLTTSLTSTSSESDTGQE

SEQ ID NO: 12795 - protein, 85 aa, Homo sapiens
AEYSLYDFLDSCRASTLLAELDDDEDLPEPDEEDDENEDDNQEDQEYEEVMILRRPSLQRRAGSRSDVTHHAVTSQLPQVPAGAG

SEQ ID NO: 12796 - protein, 85 aa, Homo sapiens
SRPIGEQEEEEYETKGGRRRTWDDDYVLKRQFSALVPAFDPRPGRTNVQQTTDLEIPPPGTPHSELLEEVECTPSPRLALTLKVT

SEQ ID NO: 12797 - protein, 85 aa, Homo sapiens
GLGTTREVELPLTNFRSTIFYYVQKLLQLSCNGNVKSDKLRRIWEPTYTIMYREMKDSDKEKENGKMGCWSIEHVEQYLGTDELP

SEQ ID NO: 12798 - protein, 85 aa, Homo sapiens
KNDLITYLQKNADAAFLRHWKLTGTNKSIRKNRNCSQLIAAYKDFCEHGTKSGLNQGAISTLQSSDILNLTKEQPQAKAGNGQNS

SEQ ID NO: 12799 - protein, 85 aa, Homo sapiens
CGVEDVLQLLRILYIVASDPYSRISQEDGDEQPQFTFPPDEFTSKKITTKILQQIEEPLALASGALPDWCEQLTSKCPFLIPFET

SEQ ID NO: 12800 - protein, 85 aa, Homo sapiens
RQLYFTCTAFGASRAIVWLQNRREATVERTRTTSSVRRDDPGEFRVGRLKHERVKVPRGESLMEWAENVMQIHADRKSVLEVEFL

SEQ ID NO: 12801 - protein, 85 aa, Homo sapiens
GEEGTGLGPTLEFYALVAAEFQRTDLGAWLCDDNFPDDESRHVDLGGGLKPPGYYVQRSCGLFTAPFPQDSDELERITKLFHFLG

SEQ ID NO: 12802 - protein, 85 aa, Homo sapiens
IFLAKCIQDNRLVDLPISKPFFKLMCMGDIKSNMSKLIYESRGDRDLHCTESQSEASTEEGHDSLSVGSFEEDSKSEFILDPPKP

SEQ ID NO: 12803 - protein, 85 aa, Homo sapiens
KPPAWFNGILTWEDFELVNPHRARFLKEIKDLAIKRRQILSNKGLSEDEKNTKLQELVLKNPSGSGPPLSIEDLGLNFQFCPSSR

SEQ ID NO: 12804 - protein, 85 aa, Homo sapiens
IYGFTAVDLKPSGEDEMITMDNAEEYVDLMFDFCMHTGIQKQMEAFRDGFNKVFPMEKLSSFSHEEVQMILCGNQSPSWAAEDII

SEQ ID NO: 12805 - protein, 85 aa, Homo sapiens
NYTEPKLGYTRDSPGFLRFVRVLCGMSSDERKAFLQFTTGCSTLPPGGLANLHPRLTVVRKVDATDASYPSVNTCVHYLKLPEYS

SEQ ID NO: 12806 - protein, 84 aa, Homo sapiens
SSGEGSLSFEDVAVGFTREEWQFLDQSQKVLYKEVMLENYINLVSIGYRGTKPDSLFKLEQGEPPGIAEGAAHSQICPDADFLE

SEQ ID NO: 12807 - protein, 85 aa, Homo sapiens
TFFNPDREGWLLKLGGRVKTWKRRWFILTDNCLYYFEYTTDKEPRGIIPLENLSIREVEDSKKPNCFELYIPDNKDQVIKACKTE

SEQ ID NO: 12808 - protein, 85 aa, Homo sapiens
FIAMNRGINDGGDLPEELLRNLYESIKNEPFKIPEDDGNDLTHTFFNPDREGWLLKLGGRVKTWKRRWFILTDNCLYYFEYTTDK

SEQ ID NO: 12809 - protein, 85 aa, Homo sapiens
EPRGIIPLENLSIREVEDSKKPNCFELYIPDNKDQVIKACKTEADGRVVEGNHTVYRISAPTPEEKEEWIKCIKAAISRDPFYEM

SEQ ID NO: 12810 - protein, 85 aa, Homo sapiens
AAQLLTDEALESVTFRDVTVDFTQEEWQQLEPAQKDLYRDVMLENYRNLVSLDWETRPEMKELDPKNDISEDKLSVVGEATGGPT

SEQ ID NO: 12811 - protein, 85 aa, Homo sapiens
RNGARGPGSEGVWEPGSWPERPRGDAGAEWEPLGIPQGNKLLGGSVPACHELKAFANQGCVLVPPRLDDPTEKGACPPVRRGKNF

SEQ ID NO: 12812 - protein, 85 aa, Homo sapiens
SSTSDLSKPPMPCEEKKTYDCSECGKAFSRSSSLIKHQRIHTGEKPFECDTCGKHFIERSSLTIHQRVHTGEKPYACGDCGKAFS

SEQ ID NO: 12813 - protein, 85 aa, Homo sapiens
QRMNLTVHQRTHTGEKPYVCDVCGKAFRKTSSLTQHERIHTGEKPYACGDCGKAFSQNMHLIVHQRTHTGEKPYVCPECGRAFSQ

SEQ ID NO: 12814 - protein, 85 aa, Homo sapiens
NMHLTEHQRTHTGEKPYACKECGKAFNKSSSLTLHQRNHTGEKPYVCGECGKAFSQSSYLIQHQRFHIGVKPFECSECGKAFSKN

SEQ ID NO: 12815 - protein, 85 aa, Homo sapiens
SSLTQHQRIHTGEKPYECYICKKHFTGRSSLIVHQIVHTGEKPYVCGECGKAFSQSAYLIEHQRIHTGEKPYRCGQCGKSFIKNS

SEQ ID NO: 12816 - protein, 85 aa, Homo sapiens
MENYRNLVSLDWETRPEMKELDPKNDISEDKLSVVGEATGGPTRNGARGPGSEGVWEPGSWPERPRGDAGAEWEPLGIPQGNKLL

SEQ ID NO: 12817 - protein, 85 aa, Homo sapiens
GGSVPACHELKAFANQGCVLVPPRLDDPTEKGACPPVRRGKNFSSTSDLSKPPMPCEEKKTYDCSECGKAFSRSSSLIKHQRIHT

SEQ ID NO: 12818 - protein, 85 aa, Homo sapiens
GEKPFECDTCGKHFIERSSLTIHQRVHTGEKPYACGDCGKAFSQRMNLTVHQRTHTGEKPYVCDVCGKAFRKTSSLTQHERIHTG

SEQ ID NO: 12819 - protein, 85 aa, Homo sapiens
EKPYACGDCGKAFSQNMHLIVHQRTHTGEKPYVCPECGRAFSQNMHLTEHQRTHTGEKPYACKECGKAFNKSSSLTLHQRNHTGE

SEQ ID NO: 12820 - protein, 85 aa, Homo sapiens
KPYVCGECGKAFSQSSYLIQHQRFHIGVKPFECSECGKAFSKNSSLTQHQRIHTGEKPYECYICKKHFTGRSSLIVHQIVHTGEK

SEQ ID NO: 12821 - protein, 84 aa, Homo sapiens; identical to SEQ ID NO: 11479

SEQ ID NO: 12822 - protein, 84 aa, Homo sapiens
SHPFLSGAETFHTPSLGDEEFEIPPISLDSDPSLAVSDVVGHFDDLADPSSSQDGSFSAQYGVQTLDMPVGMTHAPCPVPIHCC

SEQ ID NO: 12823 - protein, 84 aa, Homo sapiens
QIGKRKYDFDSSEVLQGLDFFGNKKSVPGVCGASQTHQKPQNGEKKEESLTERKREQSKKKRKTMTSETGFHHVSQYGLDLLTS

SEQ ID NO: 12824 - protein, 85 aa, Homo sapiens
RERAVDAVAAAAVASAEEAAAAGPGRGAAAGPGARSPGARSHCGCSSKTRCWSLAPGCCPSTTWGRSSWATCSQTEGSCGRRPGR

SEQ ID NO: 12825 - protein, 15 aa, Homo sapiens
PSTHPAPGPPTARSW

SEQ ID NO: 12826 - protein, 53 aa, Homo sapiens
TRVGDHWGRALQSLPTRRPQPQGSGWTARSGFRSATACWAAATWPGTPTPWWK

SEQ ID NO: 12827 - protein, 18 aa, Homo sapiens
GVRSWVTWGAAGTSTARC

SEQ ID NO: 12828 - protein, 32 aa, Homo sapiens
APAMASSPASPCSAPLTILATQAPSPRSHLSG

SEQ ID NO: 12829 - protein, 58 aa, Homo sapiens
CGCSSKTRCWSLAPGCCPSTTWGRSSWATCSQTEGSCGRRPGRPSTHPAPGPPTARSW

SEQ ID NO: 12830 - protein, 27 aa, Homo sapiens
GSGCTSCTRLPRLLMRAQPVKGRRRSC

SEQ ID NO: 12831 - protein, 11 aa, Homo sapiens
TWPGTPTPWWK

SEQ ID NO: 12832 - protein, 75 aa, Homo sapiens
RSTRACSCGACPWWAGTTATHTARRCHLCRTSTHRWTTSCGCRAPAMASSPASPCSAPLTILATQAPSPRSHLSG

SEQ ID NO: 12833 - protein, 85 aa, Homo sapiens
KSCAVSLTTAAVAFGDEAKKMAEGKASRESEEESVSLTVEEREALGGMDSRLFGFVRLHEDGARTKTLLGKNAAFLYGLGLVYFY

SEQ ID NO: 12834 - protein, 85 aa, Homo sapiens
YNAFHWAIKAFQDVLYVDPSFCRAKEIHLRLGLMFKVNTDYKSSLKRKYHSAKEAYEQLLQTENLPAQVKATVLQQLGWMHHNMD

SEQ ID NO: 12835 - protein, 85 aa, Homo sapiens
LVGDKATKESYAIQYLQKSLEADPNSGQSWYFLGRCYSSIGKVQDAFISYRQSIDKSEASADTWCSIGVLYQQQNQPMDALQAYI

SEQ ID NO: 12836 - protein, 85 aa, Homo sapiens
CAVQLDHGHAAAWMDLGTLYESCNQPQDAIKCYLNAARSKRCSNTSTLAARIKFLQNGSDNWNGGQSLSHHPVQQVYSLCLTPQK

SEQ ID NO: 12837 - protein, 85 aa, Homo sapiens
LQHLEQLRANRDNLNPAQKHQLEQLESQFVLMQQMRHKEVAQVRTTGIHNGAITDSSLPTNSVSNRQPHGALTRVSSVSQPGVRP

SEQ ID NO: 12838 - protein, 85 aa, Homo sapiens
ACVEKLLSSGAFSAGCIPCGTSKILGSTDTILLGSNCIAGSESNGNVPYLQQNTHTLPHNHTDLNSSTEEPWRKQLSNSAQGLHK

SEQ ID NO: 12839 - protein, 85 aa, Homo sapiens
SQSSCLSGPNEEQPLFSTGSAQYHQATSTGIKKANEHLTLPSNSVPQGDADSHLSCHTATSGGQQGIMFTKESKPSKNRSLVPET

SEQ ID NO: 12840 - protein, 85 aa, Homo sapiens
SRHTGDTSNGCADVKGLSNHVHQLIADAVSSPNHGDSPNLLIADNPQLSALLIGKANGNVGTGTCDKVNNIHPAVHTKTDHSVAS

SEQ ID NO: 12841 - protein, 85 aa, Homo sapiens
SPSSAISTATPSPKSTEQRSINSVTSLNSPHSGLHTVNGEGLGKSQSSTKVDLPLASHRSTSQILPSMSVSICPSSTEVLKACRN

SEQ ID NO: 12842 - protein, 85 aa, Homo sapiens
PGKNGLSNSCILLDKCPPPRPPTSPYPPLPKDKLNPPTPSIYLENKRDAFFPPLHQFCTNPKNPVTVIRGLAGALKLDLGLFSTK

SEQ ID NO: 12843 - protein, 85 aa, Homo sapiens
TLVEANNEHMVEVRTQLLQPADENWDPTGTKKIWRCESNRSHTTIAKYAQYQASSFQESLREENEKRTQHKDHSDNESTSSENSG

SEQ ID NO: 12844 - protein, 85 aa, Homo sapiens
RRRKGPFKTIKFGTNIDLSDNKKWKLQLHELTKLPAFARVVSAGNLLTHVGHTILGMNTVQLYMKVPGSRTPGHQENNNFCSVNI

SEQ ID NO: 12845 - protein, 85 aa, Homo sapiens
NIGPGDCEWFVVPEDYWGVLNDFCEKNNLNFLMSSWWPNLEDLYEANVPVYRFIQRPGDLVWINAGTVHWVQAVGWCNNIAWNVG

SEQ ID NO: 12846 - protein, 85 aa, Homo sapiens
PLTACQYKLAVERYEWNKLKSVKSPVPMVHLSWNMARNIKVSDPKLFEMIKYCLLKILKQYQTLREALVAAGKEVIWHGRTNDEP

SEQ ID NO: 12847 - protein, 85 aa, Homo sapiens
EALGGMDSRLFGFVRLHEDGARTKTLLGKNAAFLYGLGLVYFYYNAFHWAIKAFQDVLYVDPSFCRAKEIHLRLGLMFKVNTDYK

SEQ ID NO: 12848 - protein, 85 aa, Homo sapiens
SSLKRKYHSAKEAYEQLLQTENLPAQVKATVLQQLGWMHHNMDLVGDKATKESYAIQYLQKSLEADPNSGQSWYFLGRCYSSIGK

SEQ ID NO: 12849 - protein, 85 aa, Homo sapiens
VQDAFISYRQSIDKSEASADTWCSIGVLYQQQNQPMDALQAYICAVQLDHGHAAAWMDLGTLYESCNQPQDAIKCYLNAARSKRC

SEQ ID NO: 12850 - protein, 85 aa, Homo sapiens
SNTSTLAARIKFLQNGSDNWNGGQSLSHHPVQQVYSLCLTPQKLQHLEQLRANRDNLNPAQKHQLEQLESQFVLMQQMRHKEVAQ

SEQ ID NO: 12851 - protein, 85 aa, Homo sapiens
EQPTSSTNGEKRKSPCESNNKKNDEMQEAPNRVLAPKQSLQKTKTIEYLTIIVYYYRKHTKINSNQLEKDQSRENSINPVQEEED

SEQ ID NO: 12852 - protein, 85 aa, Homo sapiens
EGLDSAEGSSQEDEDLDSSEGSSQEDEDLDSSEGSSQEDEDLDSSEGSSQEDEDLDSSEGSSQEDEDLDPPEGSSQEDEDLDSSE

SEQ ID NO: 12853 - protein, 84 aa, Homo sapiens
QEDEDLDSSEGSSQEDEDLDSSEGSSQEDEDLDSSEGSSQEDEDLDSSEGSSQEDEDLDPPEGSSQEDEDLDSSEGSSQEGGED

SEQ ID NO: 12854 - protein, 85 aa, Homo sapiens
TKTIEYLTIIVYYYRKHTKINSNQLEKDQSRENSINPVQEEEDEGLDSAEGSSQEDEDLDSSEGSSQEDEDLDSSEGSSQEDEDL

SEQ ID NO: 12855 - protein, 85 aa, Homo sapiens
EVMKSIIQKYQHKRISLVEAGVTRHRSIFNGLKALAEDQINSKLSKPEVVIIHDAVRPFVEEGVLLKVVTAAKEHGAAGAIRPLV

SEQ ID NO: 12856 - protein, 85 aa, Homo sapiens
STVVSPSADGCLDYSLERARHRASEMPQAFLFDVIYEAYQQCSDYDLEFGTECLQLALKYCCTKAKLVEGSPDLWKVTYKRDLYA

SEQ ID NO: 12857 - protein, 85 aa, Homo sapiens
AESIIKERISQEICVVMDTEEDNKHVGHLLEEVLKSELNHVKVTSEALGHAGRHLQQIILDQCYNFVCVNVTTSDFQETQKLLSM

SEQ ID NO: 12858 - protein, 85 aa, Homo sapiens
LEESSLCILYPVVVVSVHFLDFKLVPPSQKMENLMQIREFAKEVKERNILLYGLLISYPQDDQKLQESLRQGAIIIASLIKERNS

SEQ ID NO: 12859 - protein, 85 aa, Homo sapiens
KLSKPEVVIIHDAVRPFVEEGVLLKVVTAAKEHGAAGAIRPLVSTVVSPSADGCLDYSLERARHRASEMPQAFLFDVIYEAYQQC

SEQ ID NO: 12860 - protein, 85 aa, Homo sapiens
SDYDLEFGTECLQLALKYCCTKAKLVEGSPDLWKVTYKRDLYAAESIIKERISQEICVVMDTEEDNKHVGHLLEEVLKSELNHVK

SEQ ID NO: 12861 - protein, 85 aa, Homo sapiens
VTSEALGHAGRHLQQIILDQCYNFVCVNVTTSDFQETQKLLSMLEESSLCILYPVVVVSVHFLDFKLVPPSQKMENLMQIREFAK

SEQ ID NO: 12862 - protein, 85 aa, Homo sapiens
VAGSTVDAKSEEATKMEKRKSALNKVLESLCIHHQQQVLAMLKFLVQEQNAASLCCCNTSCVVSSESQKPLIEDDLCGLFCSCEY

SEQ ID NO: 12863 - protein, 85 aa, Homo sapiens
RLAERGCLQNEKQSPGLEPLPVCIKDLHCLSCQTVTVEHVKPVVNRGIADSYNSHRCCSGLLPNIHSTKSAFRSPLLSKEVCDLS

SEQ ID NO: 12864 - protein, 85 aa, Homo sapiens
VTLKDACRSRSPSPPPLSPIETEGFEKLKDVISEISALENNKLEANINQPPSLTPAEISSNKSDHQDKILKTKKSSNSYSLLSND

SEQ ID NO: 12865 - protein, 85 aa, Homo sapiens
SNNSTTNHEKGETAVIFQDLMDRINEKLKSIETTDMTSLVKLSSSDYNTYNDLKLGDFITSLLHNAKASDYSFMELLSQHDKKVE

SEQ ID NO: 12866 - protein, 85 aa, Homo sapiens
NKIIQTRFRKRQETLFAMRNSSDSPMFRRQSLQIKRELASLDENFTRKKYTEKSSRKLTQNNEISSSDKGEFYHDQGPSLQNSKR

SEQ ID NO: 12867 - protein, 85 aa, Homo sapiens
LQGKNHAETSFSPNYALQSLQLPLHSSETNLSFNEFSESFKTTSPEKMSIRKPQEKSADGKQFLQNDRKNPKLGNTQTLLRNDVS

SEQ ID NO: 12868 - protein, 85 aa, Homo sapiens
GLLSRTKRNIVPPGWYSVYVTNNYVFKKSPKAKKVSESTTKNDPVKNIHIESSHNIDLNKIAMNSNLQVVVKRLEDTISIAKKSW

SEQ ID NO: 12869 - protein, 85 aa, Homo sapiens
NNQPLSEGYKASKKLIEIDGKDQHADRNMTLTLNRMTCKEQSLSKSVVASGNIINSHCMPTVDLNNKRLENLKKSSILDMGRLIS

SEQ ID NO: 12870 - protein, 85 aa, Homo sapiens
SVENVPAKYEGTESSSVSNYSSPIKLMFLSEVKSSEGVKYTLTSVGTSHSNVVLPSEKPTTHHVTEEKTETNEDISNANSENYHS

SEQ ID NO: 12871 - protein, 85 aa, Homo sapiens
SHYDTDTFQRELNKFSHAKETAGSSTMFIGDINSDKPQEEPKDNSSSATDPSFKRKPGRPKKIGPQVVKQIKRPIGRPPKPKIDQ

SEQ ID NO: 12872 - protein, 85 aa, Homo sapiens
TNITVCQNEPFSAGRKSPECLISEVKEGIYKKSITVTVIYGRSRRTKRHVSEGRVNISNLMSLNNNAGDFPTEYNSPRNISEDKI

SEQ ID NO: 12873 - protein, 85 aa, Homo sapiens
DLGERISAVASLTTESEILGSGFEYVRPIKNKSVIPQPSKNIIRPNQKPLAISRKPGRPAKVKISGISVTINRTSPQEREVSISS

SEQ ID NO: 12874 - protein, 85 aa, Homo sapiens
CLPPLEQDNTSGKNLPEEKYDQQCTQMDKIRHTEADIFKNGSKRMIATVPLRHSIRDRKPSLHFLHSLASSSSLIYRNALLHKSY

SEQ ID NO: 12875 - protein, 85 aa, Homo sapiens
KLHLQKNKSQKEKHRHSKMKIAYKDTPRNRLSRNAKKCLEDNKLVPISEVSLDPIISSNPLLRWWATSASNDSLLEELNNRFEQI

SEQ ID NO: 12876 - protein, 85 aa, Homo sapiens
TNAWVQVSGDEAENCIHKKREHIENDHFKVASPLETCLLELEVSPVKMLFQKKYDLNELCTWFMQTTETQSLSLVRKANARNPLE

SEQ ID NO: 12877 - protein, 85 aa, Homo sapiens
VINTRGIKLGTKYSDFNASPFRKHFKKFALSSPSKSAEKLHILHKVANSPLLNVKSNLAIARLKRTEFKRLHHERWKREGKLHNH

SEQ ID NO: 12878 - protein, 85 aa, Homo sapiens
GTVDWNSKRRNLRFFCQNQFLNKTEGETNADIPLQGKSIVDNQCVLPPEIRGDLQQRVVMPDFKIHASFENKFKSEAKENGTNCS

SEQ ID NO: 12879 - protein, 85 aa, Homo sapiens
QKDFQKGPRLENVCPNSWRSKTLKDCRIFLRKLNCLEHRNTFKLNTIIYSPESTDSGNTHQTHMEESKRFTLRSHSARQNSFKKQ

SEQ ID NO: 12880 - protein, 85 aa, Homo sapiens
SKEIENANTNNPSADEFADHLGNSKLSKCVNFDKNPDSFEVLSNLNKRKRPPWKITEMSTKRHKRQSCNSGQMANYFSKSLACYK

SEQ ID NO: 12881 - protein, 84 aa, Homo sapiens
KEIENANTNNPSADEFADHLGNSKLSKCVNFDKNPDSFEVLSNLNKRKRPPWKITEMSTKRHKRQSCNSGQMANYFSKSLACYK

SEQ ID NO: 12882 - protein, 85 aa, Homo sapiens
DLTVNRMQEQNTQQGDGVLDLSTKKTSIKSEESSICDPSSENSVAGSTVDAKSEEATKMEKRKSALNKVLESLCIHHQQQVLAML

SEQ ID NO: 12883 - protein, 85 aa, Homo sapiens
KFLVQEQNAASLCCCNTSCVVSSESQKPLIEDDLCGLFCSCEYRLAERGCLQNEKQSPGLEPLPVCIKDLHCLSCQTVTVEHVKP

SEQ ID NO: 12884 - protein, 85 aa, Homo sapiens
VVNRGIADSYNSHRCCSGLLPNIHSTKSAFRSPLLSKEVCDLSVTLKDACRSRSPSPPPLSPIETEGFEKLKDVISEISALENNK

SEQ ID NO: 12885 - protein, 85 aa, Homo sapiens
LEANINQPPSLTPAEISSNKSDHQDKILKTKKSSNSYSLLSNDSNNSTTNHEKGETAVIFQDLMDRINEKLKSIETTDMTSLVKL

SEQ ID NO: 12886 - protein, 85 aa, Homo sapiens
SSSDYNTYNDLKLGDFITSLLHNAKASDYSFMELLSQHDKKVENKIIQTRFRKRQETLFAMRNSSDSPMFRRQSLQIKRELASLD

SEQ ID NO: 12887 - protein, 85 aa, Homo sapiens
ENFTRKKYTEKSSRKLTQNNEISSSDKGEFYHDQGPSLQNSKRLQGKNHAETSFSPNYALQSLQLPLHSSETNLSFNEFSESFKT

SEQ ID NO: 12888 - protein, 85 aa, Homo sapiens
TSPEKMSIRKPQEKSADGKQFLQNDRKNPKLGNTQTLLRNDVSGLLSRTKRNIVPPGWYSVYVTNNYVFKKSPKAKKVSESTTKN

SEQ ID NO: 12889 - protein, 85 aa, Homo sapiens
DPVKNIHIESSHNIDLNKIAMNSNLQVVVKRLEDTISIAKKSWNNQPLSEGYKASKKLIEIDGKDQHADRNMTLTLNRMTCKEQS

SEQ ID NO: 12890 - protein, 85 aa, Homo sapiens
LSKSVVASGNIINSHCMPTVDLNNKRLENLKKSSILDMGRLISSVENVPAKYEGTESSSVSNYSSPIKLMFLSEVKSSEGVKYTL

SEQ ID NO: 12891 - protein, 85 aa, Homo sapiens
TSVGTSHSNVVLPSEKPTTHHVTEEKTETNEDISNANSENYHSSHYDTDTFQRELNKFSHAKETAGSSTMFIGDINSDKPQEEPK

SEQ ID NO: 12892 - protein, 85 aa, Homo sapiens
DNSSSATDPSFKRKPGRPKKIGPQVVKQIKRPIGRPPKPKIDQTNITVCQNEPFSAGRKSPECLISEVKEGIYKKSITVTVIYGR

SEQ ID NO: 12893 - protein, 85 aa, Homo sapiens
SRRTKRHVSEGRVNISNLMSLNNNAGDFPTEYNSPRNISEDKIDLGERISAVASLTTESEILGSGFEYVRPIKNKSVIPQPSKNI

SEQ ID NO: 12894 - protein, 85 aa, Homo sapiens
IRPNQKPLAISRKPGRPAKVKISGISVTINRTSPQEREVSISSCLPPLEQDNTSGKNLPEEKYDQQCTQMDKIRHTEADIFKNGS

SEQ ID NO: 12895 - protein, 85 aa, Homo sapiens
KRMIATVPLRHSIRDRKPSLHFLHSLASSSSLIYRNALLHKSYKLHLQKNKSQKEKHRHSKMKIAYKDTPRNRLSRNAKKCLEDN

SEQ ID NO: 12896 - protein, 85 aa, Homo sapiens
KLVPISEVSLDPIISSNPLLRWWATSASNDSLLEELNNRFEQITNAWVQVSGDEAENCIHKKREHIENDHFKVASPLETCLLELE

SEQ ID NO: 12897 - protein, 85 aa, Homo sapiens
VSPVKMLFQKKYDLNELCTWFMQTTETQSLSLVRKANARNPLEVINTRGIKLGTKYSDFNASPFRKHFKKFALSSPSKSAEKLHI

SEQ ID NO: 12898 - protein, 85 aa, Homo sapiens
MHKVANSPLLNVKSNLAIARLKRTEFKRLHHERWKREGKLHNHGTVDWNSKRRNLRFFCQNQFLNKTEGETNADIPLQGKSIVDN

SEQ ID NO: 12899 - protein, 85 aa, Homo sapiens
QCVLPPEIRGDLQQRVVMPDFKIHASFENKFKSEAKENGTNCSQKDFQKGPRLENVCPNSWRSKTLKDCRIFLRKLNCLEHRNTF

SEQ ID NO: 12900 - protein, 85 aa, Homo sapiens
KLNTIIYSPESTDSGNTHQTHMEESKRFTLRSHSARQNSFKKQSKEIENANTNNPSADEFADHLGNSKLSKCVNFDKNPDSFEVL

SEQ ID NO: 12901 - protein, 85 aa, Homo sapiens
PDLFARMTAEEMASDELKEMRKNLTKEAIREHQMAKTGGTQTDLFTCGKCKKKNCTYTQVQTRSADEPMTTFVVCNECGNRWKIC

SEQ ID NO: 12902 - protein, 85 aa, Homo sapiens
DAIAVIKGMYQQFFEVEEENVSLQDASTVKTNILLRKLKEKEEVIKELKEELDQYKDFGFHKMESFAKETSSPKSNLEKENLEYK

SEQ ID NO: 12903 - protein, 85 aa, Homo sapiens
VENERLLQIISELEEEIQINLKENSGLEDELISMKEMAEKDHKTIQKLMDSRDRLREELHYEKSLVQDVINKQKEDKEMRKKYGS

SEQ ID NO: 12904 - protein, 85 aa, Homo sapiens
LSVKVARSAKGREASLSPWPKSPPSTTALRPHSATMSVSSAGAQKAKMPKKALKEDQAVVEDKHGLESQIEALKANLENEKKKVE

SEQ ID NO: 12905 - protein, 85 aa, Homo sapiens
RFRKEADRLNKSWEKRFFILRNSFHVLKNEMFTRHTLFRQFAVLADTSFNYIKVKPLLVQSRTTMTAISSSSHCTSSIDGKHVDV

SEQ ID NO: 12906 - protein, 84 aa, Homo sapiens
FAVLADTSFNYIKVKPLLVQSRTTMTAISSSSHCTSSIDGKHVDVVSDQAALQLSPKGKLSESPKEESLEEPSMRQSSPAETVD

SEQ ID NO: 12907 - protein, 85 aa, Homo sapiens
FEDRLKEESLSLFTILHDRILEIEKHYQQNEDKMRKSFNQQLADAIAVIKGMYQQFFEVEEENVSLQDASTVKTNILLRKLKEKE

SEQ ID NO: 12908 - protein, 85 aa, Homo sapiens
EVIKELKEELDQYKDFGFHKMESFAKETSSPKSNLEKENLEYKVENERLLQIISELEEEIQINLKENSGLEDELISMKEMAEKDH

SEQ ID NO: 12909 - protein, 85 aa, Homo sapiens
KTIQKLMDSRDRLREELHYEKSLVQDVINKQKEDKEMRKKYGSLSVKVARSAKGREASLSPWPKSPPSTTALRPHSATMSVSSAG

SEQ ID NO: 12910 - protein, 85 aa, Homo sapiens
AQKAKMPKKALKEDQAVVEDKHGLESQIEALKANLENEKKKVERFRKEADRLNKSWEKRFFILRNSFHVLKNEMFTRHTLFRQFA

SEQ ID NO: 12911 - protein, 85 aa, Homo sapiens
EALGHAGRHLQQIILDQCYNFVCVNVTTSDFQETQKLLSMLEESSLCILYPVVVVSVHFLDFKLVPPSQKMENLMQIREFAKEVK

SEQ ID NO: 12912 - protein, 85 aa, Homo sapiens
DSLIAGSAMSKEKKLMTGHAIPPSQLDSQIDDFTGFSKDRMMQKPGSNAPVGGNVTSSFSGDDLECRETASSPKSQREINADIKR

SEQ ID NO: 12913 - protein, 85 aa, Homo sapiens
RTVASAGWHLTDAALTVSVPSMLSERPRLQGARRRLPAGVGPVLPLLPHALHPQVAARTAGAAALPHVPPGMEVQGVRPDLALAG

SEQ ID NO: 12914 - protein, 84 aa, Homo sapiens
SAGWHLTDAALTVSVPSMLSERPRLQGARRRLPAGVGPVLPLLPHALHPQVAARTAGAAALPHVPPGMEVQGVRPDLALAGGAS

SEQ ID NO: 12915 - protein, 85 aa, Homo sapiens
VKKTGDWKKHVETNSRLMKKFEESRAELEKVLRIAQEGLEEKGDPEELLRRHTEFFSQLDQRVLNAFLKACDELTDILPEQEQQG

SEQ ID NO: 12916 - protein, 85 aa, Homo sapiens
MQEAVRKLHKQWKDLQGEAPYHLLHLKIDVEKNRFLASVEECRTELDRETKLMPQEGSEKIIKEHRVFFSDKGPHHLCEKRLQLI

SEQ ID NO: 12917 - protein, 85 aa, Homo sapiens
EELCVKLPVRDPVRDTPGTCHVTLKELRAAIDSTYRKLMEDPDKWKDYTSRFSEFSSWISTNETQLKGIKGEAIDTANHGEVKRA

SEQ ID NO: 12918 - protein, 85 aa, Homo sapiens
VEEIRNGVTKRGETLSWLKSRLKVLTEVSSENEAQKQGDELAKLSSSFKALVTLLSEVEKMLSNFGDCVQYKEIVKNSLEELISG

SEQ ID NO: 12919 - protein, 85 aa, Homo sapiens
SKEVQEQAEKILDTENLFEAQQLLLHHQQKTKRISAKKRDVQQQIAQAQQGEGGLPDRGHEELRKLESTLDGLERSRERQERRIQ

SEQ ID NO: 12920 - protein, 85 aa, Homo sapiens
VTLRKWERFETNKETVVRYLFQTGSSHERFLSFSSLESLSSELEQTKEFSKRTESIAVQAENLVKEASEIPLGPQNKQLLQQQAK

SEQ ID NO: 12921 - protein, 85 aa, Homo sapiens
GDPEELLRRHTEFFSQLDQRVLNAFLKACDELTDILPEQEQQGLQEAVRKLHKQWKDLQGEAPYHLLHLKIDVEKNRFLASVEEC

SEQ ID NO: 12922 - protein, 85 aa, Homo sapiens
RTELDRETKLMPQEGSEKIIKEHRVFFSDKGPHHLCEKRLQLIEELCVKLPVRDPVRDTPGTCHVTLKELRAAIDSTYRKLMEDP

SEQ ID NO: 12923 - protein, 85 aa, Homo sapiens
DKWKDYTSRFSEFSSWISTNETQLKGIKGEAIDTANHGEVKRAVEEIRNGVTKRGETLSWLKSRLKVLTEVSSENEAQKQGDELA

SEQ ID NO: 12924 - protein, 85 aa, Homo sapiens
KLSSSFKALVTLLSEVEKMLSNFGDCVQYKEIVKNSLEELISGSKEVQEQAEKILDTENLFEAQQLLLHHQQKTKRISAKKRDVQ

SEQ ID NO: 12925 - protein, 85 aa, Homo sapiens
QQIAQAQQGEGGLPDRGHEELRKLESTLDGLERSRERQERRIQVTLRKWERFETNKETVVRYLFQTGSSHERFLSFSSLESLSSE

SEQ ID NO: 12926 - protein, 85 aa, Homo sapiens
RHSLFGEVRKLITDEFVKQKYLEYKRVPNSRPPEYEFFWGLRSYHETSKMKVLKFACRVQKKDPKDWAVQYREAVEMEVQLQLWL

SEQ ID NO: 12927 - protein, 85 aa, Homo sapiens
WLRLKPGLSGSNTSTGFTGEPSTSTGFSSGPSSIVGFSGGPSTGVGFCSGPSTSGFSGGPSTGAGFGGGPNTGAGFGGGPSTSAG

SEQ ID NO: 12928 - protein, 85 aa, Homo sapiens
SYHETSKMKVLKFACRVQKKDPKDWAVQYREAVEMEVQLQLWLWLRLKPGLSGSNTSTGFTGEPSTSTGFSSGPSSIVGFSGGPS

SEQ ID NO: 12929 - protein, 84 aa, Homo sapiens
MEKQQQDQVDRNIKEAREKLEMEMEAARHEHQVMLMRQDLMRRQEELRRMEELHNQEVQKRKQLELRRKSAGAVKKRCGGSKKK

SEQ ID NO: 12930 - protein, 85 aa, Homo sapiens
EEEDEEARALLAGGPDEADRGAPAAPGALPALCDPSRLAHRLLVLLLMCFLGFAIFAMIILLPFRLKLNEWGTIIFSCFVCIGQV

SEQ ID NO: 12931 - protein, 85 aa, Homo sapiens
VFALGGIFNAFWLMEFGRFVFGIGGESLAVAQNTYAVSWFKGKELNLVFGLQLSMARIGSTVNMNLMGWLYSKIEALLGSAGHTT

SEQ ID NO: 12932 - protein, 85 aa, Homo sapiens
LGITLMIGGITCILSLICALALAYLDQRAERILHKEQGKTGEVIKLTDVKDFSLPLWLIFIICVCYYVAVFPFIGLGKVFFTEKF

SEQ ID NO: 12933 - protein, 85 aa, Homo sapiens
GFSSQAASAINSVVYVISAPMSPVFGLLVDKTGKNIIWVLCAVAATLVSHMMLAFTMWNPWIAMCLLGLSYSLLACALWPMVAFV

SEQ ID NO: 12934 - protein, 85 aa, Homo sapiens
VPEHQLGTAYGFMQSIQNLGLAIISIIAGMILDSRGYLFLEVFFIACVSLSLLSVVLLYLVNRAQGGNLNYSARQREEIKFSHTE

SEQ ID NO: 12935 - protein, 85 aa, Homo sapiens
MVLLLMCFLGFAIFAMIILLPFRLKLNEWGTIIFSCFVCIGQVVFALGGIFNAFWLMEFGRFVFGIGGESLAVAQNTYAVSWFKG

SEQ ID NO: 12936 - protein, 85 aa, Homo sapiens
KELNLVFGLQLSMARIGSTVNMNLMGWLYSKIEALLGSAGHTTLGITLMIGGITCILSLICALALAYLDQRAERILHKEQGKTGE

SEQ ID NO: 12937 - protein, 85 aa, Homo sapiens
VIKLTDVKDFSLPLWLIFIICVCYYVAVFPFIGLGKVFFTEKFGFSSQAASAINSVVYVISAPMSPVFGLLVDKTGKNIIWVLCA

SEQ ID NO: 12938 - protein, 85 aa, Homo sapiens
VAATLVSHMMLAFTMWNPWIAMCLLGLSYSLLACALWPMVAFVVPEHQLGTAYGFMQSIQNLGLAIISIIAGMILDSRGYLFLEV

SEQ ID NO: 12939 - protein, 85 aa, Homo sapiens
QRASRLKRELHMLATEPPPGITCWQDKDQMDDLRAQILGGANTPYEKGVFKLEVIIPERYPFEPPQIRFLTPIYHPNIDSAGRIC

SEQ ID NO: 12940 - protein, 85 aa, Homo sapiens
MDVLKLPPKGAWRPSLNIATVLTSIQLLMSEPNPDDPLMADISSEFKYNKPAFLKNARQWTEKHARQKQKADEEEMLDNLPEAGD

SEQ ID NO: 12941 - protein, 84 aa, Homo sapiens
LMSEPNPDDPLMADISSEFKYNKPAFLKNARQWTEKHARQKQKADEEEMLDNLPEAGDSRVHNSTQKRKASQLVGIEKKFHPDV

SEQ ID NO: 12942 - protein, 85 aa, Homo sapiens
TPYEKGVFKLEVIIPERYPFEPPQIRFLTPIYHPNIDSAGRICLDVLKLPPKGAWRPSLNIATVLTSIQLLMSEPNPDDPLMADI

SEQ ID NO: 12943 - protein, 85 aa, Homo sapiens
GMTHEPPALSPSIVVNSTLSSYVANQASSGAGGQPNITKLIITKQMLPSSITMSQGGMVTVIPATVVTSRGLQLGQTSTATIQPS

SEQ ID NO: 12944 - protein, 85 aa, Homo sapiens
QQAQIVTRSVLQAAAAAAAAASMQLPPPRLQPPPLQQMPQPPTQQQVTILQQPPPLQAMQQPPPQKVRINLQQQPPPLQIKSVPL

SEQ ID NO: 12945 - protein, 85 aa, Homo sapiens
PTLKMQTTLVPPTVESSPERPMNNSPEAHTVEAPSPETICEMITDVVPEVESPSQMDVELVSGSPVALSPQPRCVRSGCENPPIV

SEQ ID NO: 12946 - protein, 85 aa, Homo sapiens
MDSDPSLAVSDVVGHFDDLADPSSSQDGSFSAQYGVQTLDMPVGMTHEPPALSPSIVVNSTLSSYVANQASSGAGGQPNITKLII

SEQ ID NO: 12947 - protein, 85 aa, Homo sapiens
TKQMLPSSITMSQGGMVTVIPATVVTSRGLQLGQTSTATIQPSQQAQIVTRSVLQAAAAAAAAASMQLPPPRLQPPPLQQMPQPP

SEQ ID NO: 12948 - protein, 85 aa, Homo sapiens
TQQQVTILQQPPPLQAMQQPPPQKVRINLQQQPPPLQIKSVPLPTLKMQTTLVPPTVESSPERPMNNSPEAHTVEAPSPETICEM

SEQ ID NO: 12949 - protein, 85 aa, Homo sapiens
MYRKPVTGMWDHLQEQANDGTPISIGDSIFVGDAAGRPANWAPGRKKKDFSCADRLRTVSRSGPLCLPESRALLSASPEVVVAVG

SEQ ID NO: 12950 - protein, 85 aa, Homo sapiens
FPGAGKSTFLKKHLVSAGYVHVNRDTLGSWQRCVTTCETALKQGKRVAIDNTNPDAASRARYVQCARAAGVPCRCFLFTATLEQA

SEQ ID NO: 12951 - protein, 85 aa, Homo sapiens
PGRKKKDFSCADRLRTVSRSGPLCLPESRALLSASPEVVVAVGFPGAGKSTFLKKHLVSAGYVHVNRDTLGSWQRCVTTCETALK

SEQ ID NO: 12952 - protein, 85 aa, Homo sapiens
QGKRVAIDNTNPDAASRARYVQCARAAGVPCRCFLFTATLEQARHNNRFREMTDSSHIPVSDMVMYGYRKQFEAPTLAEGFSAIL

SEQ ID NO: 12953 - protein, 84 aa, Homo sapiens
FMRSKRAADFHGNDFGNDRNHRNQVERPQMTFGSLQRIFPKDPKGGNMPGPTDCVRESSWWFMKRSATLRKMTSNSPRGYDTCP

SEQ ID NO: 12954 - protein, 85 aa, Homo sapiens
EKIVYVYMKLNYEVMTKLGFKVTLPPFMRSKRAADFHGNDFGNDRNHRNQVERPQMTFGSLQRIFPKDPKGGNMPGPTDCVRESS

SEQ ID NO: 12955 - protein, 85 aa, Homo sapiens
GDTALTYACENGHTDVADVLLQAGADLEHESEGGRTPLMKAARAGHVCTVQFLISKGSECEPQLIMTILYSLACAGGHLAVVELL

SEQ ID NO: 12956 - protein, 85 aa, Homo sapiens
MAHGADPTHRLKDGSTMLIEAAKGGHTSVVCYLLDYPNNLLSAPPPDVTQLTPPSHDLNRAPRVPVQALPMVVPPQEPDKPPANV

SEQ ID NO: 12957 - protein, 85 aa, Homo sapiens
ATTLPIRNKAASKQKSSSHLPANSQDVQGYITNQSPESIVEEAQGKLTELEQRIKEAIEKNAQLQSLELAHADQLTKEKIEELNK

SEQ ID NO: 12958 - protein, 85 aa, Homo sapiens
TREEQIQKKQKILEELQKVERELQLKTQQQLKKQYLEVKAQRIQLQQQQQQSCQHLGLLTPVGVGEQLSEGDYARLQQVDPVLLK

SEQ ID NO: 12959 - protein, 85 aa, Homo sapiens
DEPQQTAAQMGFAPIQPLAMPQALPLAAGPLPPGSIANLTELQGVIVGQPVLGQAQLAGLGQGILTETQQGLMVASPAQTLNDTL

SEQ ID NO: 12960 - protein, 85 aa, Homo sapiens
DDIMAAVSGRASAMSNTPTHSIAASISQPQTPTPSPIISPSAMLPIYPAIDIDAQTESNHDTALTLACAGGHEELVQTLLERGAS

SEQ ID NO: 12961 - protein, 85 aa, Homo sapiens
PTHSIAASISQPQTPTPSPIISPSAMLPIYPAIDIDAQTESNHDTALTLACAGGHEELVQTLLERGASIEHRDKKGFTPLILAAT

SEQ ID NO: 12962 - protein, 85 aa, Homo sapiens
RAGHVCTVQFLISKGSECEPQLIMTILYSLACAGGHLAVVELLLAHGADPTHRLKDGSTMLIEAAKGGHTSVVCYLLDYPNNLLS

SEQ ID NO: 12963 - protein, 85 aa, Homo sapiens
APPPDVTQLTPPSHDLNRAPRVPVQALPMVVPPQEPDKPPANVATTLPIRNKAASKQKSSSHLPANSQDVQGYITNQSPESIVEE

SEQ ID NO: 12964 - protein, 85 aa, Homo sapiens
AQGKLTELEQRIKEAIEKNAQLQSLELAHADQLTKEKIEELNKTREEQIQKKQKILEELQKVERELQLKTQQQLKKQYLEVKAQR

SEQ ID NO: 12965 - protein, 85 aa, Homo sapiens
IQLQQQQQQSCQHLGLLTPVGVGEQLSEGDYARLQQVDPVLLKDEPQQTAAQMGFAPIQPLAMPQALPLAAGPLPPGSIANLTEL

SEQ ID NO: 12966 - protein, 85 aa, Homo sapiens
QGVIVGQPVLGQAQLAGLGQGILTETQQGLMVASPAQTLNDTLDDIMAAVSGRASAMSNTPTHSIAASISQPQTPTPSPIISPSA

SEQ ID NO: 12967 - protein, 85 aa, Homo sapiens; identical to SEQ ID NO: 8569

SEQ ID NO: 12968 - protein, 85 aa, Homo sapiens; identical to SEQ ID NO: 8587

SEQ ID NO: 12969 - protein, 85 aa, Homo sapiens
GEVEAPGRLWLESPPGGAPPIFLPSDGQALVLGRGPLTQVTDRKCSRTQVELVADPETRTVAVKQMRREMLSCRRSVCGSQTPAG

SEQ ID NO: 12970 - protein, 84 aa, Homo sapiens
RLWLESPPGGAPPIFLPSDGQALVLGRGPLTQVTDRKCSRTQVELVADPETRTVAVKQMRREMLSCRRSVCGSQTPAGRTWRSC

SEQ ID NO: 12971 - protein, 85 aa, Homo sapiens
EDVDVDKPDEKSIMTYVAQFLKHYPDIHNASTDGQEDDREDRVIFKEMKVWIEQFERDLTRAQMVESNLQDKYQSFKHFRVQYEM

SEQ ID NO: 12972 - protein, 85 aa, Homo sapiens
KRKQIEHLIQPLHRDGKLSLDQALVKQSWDRVTSRLFDWHIQLDKSLPAPLGTIGAWLYRAEVALREEITVQQVHEETANTIQRK

SEQ ID NO: 12973 - protein, 85 aa, Homo sapiens
LEQHKDLLQNTDAHKRAFHEIYRTRSVNGIPVPPDQLEDMAERFHFVSSTSELHLMKMEFLELKYRLLSLLVLAESKLKSWIIKY

SEQ ID NO: 12974 - protein, 85 aa, Homo sapiens
GRRESVEQLLQNYVSFIENSKFFEQYEVTYQILKQTAEMYVKADGSVEEAENVMKFMNETTAQWRNLSVEVRSVRSMLEEVISNW

SEQ ID NO: 12975 - protein, 85 aa, Homo sapiens
DRYGNTVASLQAWLEDAEKMLNQSENAKKDFFRNLPHWIQQHTAMNDAGNFLIETCDEMVSRDLKQQLLLLNGRWRELFMEVKQY

SEQ ID NO: 12976 - protein, 85 aa, Homo sapiens
AQADEMDRMKKEYTDCVVTLSAFATEAHKKLSEPLEVSFMNVKLLIQDLEDIEQRVPVMDAQYKIITKTAHLITKESPQEEGKEM

SEQ ID NO: 12977 - protein, 85 aa, Homo sapiens
FATMSKLKEQLTKVKECYSPLLYESQQLLIPLEELEKQMTSFYDSLGKINEIITVLEREAQSSALFKQKHQELLACQENCKKTLT

SEQ ID NO: 12978 - protein, 85 aa, Homo sapiens
LIEKGSQSVQKFVTLSNVLKHFDQTRLQRQIADIHVAFQSMVKKTGDWKKHVETNSRLMKKFEESRAELEKVLRIAQEGLEEKGD

SEQ ID NO: 12979 - protein, 85 aa, Homo sapiens
PEELLRRHTEFFSQLDQRVLNAFLKACDELTDILPEQEQQGLQEAVRKLHKQWKDLQGEAPYHLLHLKIDVEKNRFLASVEECRT

SEQ ID NO: 12980 - protein, 85 aa, Homo sapiens
ELDRETKLMPQEGSEKIIKEHRVFFSDKGPHHLCEKRLQLIEELCVKLPVRDPVRDTPGTCHVTLKELRAAIDSTYRKLMEDPDK

SEQ ID NO: 12981 - protein, 85 aa, Homo sapiens
WKDYTSRFSEFSSWISTNETQLKGIKGEAIDTANHGEVKRAVEEIRNGVTKRGETLSWLKSRLKVLTEVSSENEAQKQGDELAKL

SEQ ID NO: 12982 - protein, 85 aa, Homo sapiens
SSSFKALVTLLSEVEKMLSNFGDCVQYKEIVKNSLEELISGSKEVQEQAEKILDTENLFEAQQLLLHHQQKTKRISAKKRDVQQQ

SEQ ID NO: 12983 - protein, 85 aa, Homo sapiens
IAQAQQGEGGLPDRGHEELRKLESTLDGLERSRERQERRIQVTLRKWERFETNKETVVRYLFQTGSSHERFLSFSSLESLSSELE

SEQ ID NO: 12984 - protein, 85 aa, Homo sapiens
VIHAIRPELVDLETVKGRSNRENLEDAFTIAETELGIPRLLDPEDVDVDKPDEKSIMTYVAQFLKHYPDIHNASTDGQEDDREDR

SEQ ID NO: 12985 - protein, 85 aa, Homo sapiens
VIFKEMKVWIEQFERDLTRAQMVESNLQDKYQSFKHFRVQYEMKRKQIEHLIQPLHRDGKLSLDQALVKQSWDRVTSRLFDWHIQ

SEQ ID NO: 12986 - protein, 85 aa, Homo sapiens
LDKSLPAPLGTIGAWLYRAEVALREEITVQQVHEETANTIQRKLEQHKDLLQNTDAHKRAFHEIYRTRSVNGIPVPPDQLEDMAE

SEQ ID NO: 12987 - protein, 85 aa, Homo sapiens
RFHFVSSTSELHLMKMEFLELKYRLLSLLVLAESKLKSWIIKYGRRESVEQLLQNYVSFIENSKFFEQYEVTYQILKQTAEMYVK

SEQ ID NO: 12988 - protein, 85 aa, Homo sapiens
ADGSVEEAENVMKFMNETTAQWRNLSVEVRSVRSMLEEVISNWDRYGNTVASLQAWLEDAEKMLNQSENAKKDFFRNLPHWIQQH

SEQ ID NO: 12989 - protein, 85 aa, Homo sapiens
TAMNDAGNFLIETCDEMVSRDLKQQLLLLNGRWRELFMEVKQYAQADEMDRMKKEYTDCVVTLSAFATEAHKKLSEPLEVSFMNV

SEQ ID NO: 12990 - protein, 85 aa, Homo sapiens
KLLIQDLEDIEQRVPVMDAQYKIITKTAHLITKESPQEEGKEMFATMSKLKEQLTKVKECYSPLLYESQQLLIPLEELEKQMTSF

SEQ ID NO: 12991 - protein, 85 aa, Homo sapiens
YDSLGKINEIITVLEREAQSSALFKQKHQELLACQENCKKTLTLIEKGSQSVQKFVTLSNVLKHFDQTRLQRQIADIHVAFQSMV

SEQ ID NO: 12992 - protein, 85 aa, Homo sapiens
KKTGDWKKHVETNSRLMKKFEESRAELEKVLRIAQEGLEEKGDPEELLRRHTEFFSQLDQRVLNAFLKACDELTDILPEQEQQGL

SEQ ID NO: 12993 - protein, 85 aa, Homo sapiens
QEAVRKLHKQWKDLQGEAPYHLLHLKIDVEKNRFLASVEECRTELDRETKLMPQEGSEKIIKEHRVFFSDKGPHHLCEKRLQLIE

SEQ ID NO: 12994 - protein, 85 aa, Homo sapiens
ELCVKLPVRDPVRDTPGTCHVTLKELRAAIDSTYRKLMEDPDKWKDYTSRFSEFSSWISTNETQLKGIKGEAIDTANHGEVKRAV

SEQ ID NO: 12995 - protein, 85 aa, Homo sapiens
EEIRNGVTKRGETLSWLKSRLKVLTEVSSENEAQKQGDELAKLSSSFKALVTLLSEVEKMLSNFGDCVQYKEIVKNSLEELISGS

SEQ ID NO: 12996 - protein, 85 aa, Homo sapiens
KEVQEQAEKILDTENLFEAQQLLLHHQQKTKRISAKKRDVQQQIAQAQQGEGGLPDRGHEELRKLESTLDGLERSRERQERRIQV

SEQ ID NO: 12997 - protein, 85 aa, Homo sapiens
TLRKWERFETNKETVVRYLFQTGSSHERFLSFSSLESLSSELEQTKEFSKRTESIAVQAENLVKEASEIPLGPQNKQLLQQQAKS

SEQ ID NO: 12998 - protein, 85 aa, Homo sapiens
LQLICLVGTEIEGEGLQTVVPTPITASLSHNRIREILKASRKLQGDPDLPMSFTLAIVESDSTIVYYKLTDGFMLPDPQVSFEVT

SEQ ID NO: 12999 - protein, 84 aa, Homo sapiens
EGLQTVVPTPITASLSHNRIREILKASRKLQGDPDLPMSFTLAIVESDSTIVYYKLTDGFMLPDPQVSFEVTDSKKYKKRKIMT

SEQ ID NO: 13000 - protein, 84 aa, Homo sapiens
SGQHLVAVEEDAESEDEEEEDVKLLSISGKRSAPGGGSKVPQKKVKLAADEDDDDDDEEDDDEEDKNPSRNRKKLLKHQKDLVL

SEQ ID NO: 13001 - protein, 85 aa, Homo sapiens
EEEMRKLFEKYGKAGEVFIHKDKGFGFIRLETRTLAEIAKVELDNMPLRGKQLRVRFACHSASLTVRNLPQFPRPVTVEPMDQLD

SEQ ID NO: 13002 - protein, 85 aa, Homo sapiens
DEEGLPEKLVIKNQQFHKEREQPPRFAQPGSFEYEYAMRWKALIEMEKQQQDQVDRNIKEAREKLEMEMEAARHEHQVMLMRQDL

SEQ ID NO: 13003 - protein, 85 aa, Homo sapiens
MRRQEELRRMEELHNQEVQKRKQLELRQEEERRRREEEMRRQQEEMMRRQQEGFKGTFPDAREQEIRMGQMAMGGAMGINNRGAM

SEQ ID NO: 13004 - protein, 85 aa, Homo sapiens
MDNMPLRGKQLRVRFACHSASLTVRNLPQFPRPVTVEPMDQLDDEEGLPEKLVIKNQQFHKEREQPPRFAQPGSFEYEYAMRWKA

SEQ ID NO: 13005 - protein, 85 aa, Homo sapiens
LIEMEKQQQDQVDRNIKEAREKLEMEMEAARHEHQVMLMRQDLMRRQEELRRMEELHNQEVQKRKQLELRQEEERRRREEEMRRQ

SEQ ID NO: 13006 - protein, 85 aa, Homo sapiens
QEEMMRRQQEGFKGTFPDAREQEIRMGQMAMGGAMGINNRGAMPPAPVPAGTPAPPGPATMMPDGTLGLTPPTTERFGQAATMEG

SEQ ID NO: 13007 - protein, 85 aa, Homo sapiens
MKAAAKVVESKRTRTITSQDKPSGNDVEMETEANLDTRKRSHKNLFLSKLQHGTQQQDLNKKERRVGTPQITYICLTKLTMNKKE

SEQ ID NO: 13008 - protein, 85 aa, Homo sapiens
GVRKGLCFLVLLKHYRTKKKKESRRATESRIPVSKSQPVTPEKHRARKRQAWLWEEDKNLRSGVRKYGEGNWSKILLHYKFNNRT

SEQ ID NO: 13009 - protein, 85 aa, Homo sapiens
KNLFLSKLQHGTQQQDLNKKERRVGTPQITYICLTKLTMNKKEGVRKGLCFLVLLKHYRTKKKKESRRATESRIPVSKSQPVTPE

SEQ ID NO: 13010 - protein, 84 aa, Homo sapiens
NTHFFKDENNSSLLNNYVLGAQLSHGHVNNLRDPVNISFWHNQSLVLLGAPPFPLHPCPSVTLLLNTGLTRPKPVEPSWKSITL

SEQ ID NO: 13011 - protein, 85 aa, Homo sapiens
MRLICIYFSNTHFFKDENNSSLLNNYVLGAQLSHGHVNNLRDPVNISFWHNQSLVLLGAPPFPLHPCPSVTLLLNTGLTRPKPVE

SEQ ID NO: 13012 - protein, 85 aa, Homo sapiens
LRQEEERRRREEEMRRQQEEMMRRQQEGFKGTFPDAEIRMGQMAMGGAMGINNRGAMPPAPVPAGTPAPPGPATMMPDGTLGLTP

SEQ ID NO: 13013 - protein, 85 aa, Homo sapiens
EMEAARHEHQVMLMRQDLMRRQEELRRMEELHNQEVQKRKQLELRQEEERRRREEEMRRQQEEMMRRQQEGFKGTFPDAEIRMGQ

SEQ ID NO: 13014 - protein, 85 aa, Homo sapiens
MAMGGAMGINNRGAMPPAPVPAGTPAPPGPATMMPDGTLGLTPPTTERFGQAATMEGIGAIGGTPPAFNRAAPGAEFAPNKRRRY

SEQ ID NO: 13015 - protein, 85 aa, Homo sapiens
SLKAPGAASGTSTTTSTAATATATQVNAWDRTLIENGEKITSLHREVEKVKLDQKRLDQELDFILSQQKELEDLLSPLEELVKEQ

SEQ ID NO: 13016 - protein, 85 aa, Homo sapiens
SGTIYLQHADEEREKTYKLAENIDAQLKRMAQDLKDIIEHLNTSGAPADTSDPLQQICKILNAHMDSLQWIDQNSALLQRKVEEV

SEQ ID NO: 13017 - protein, 85 aa, Homo sapiens
ITSTGPSLFASIATAPTSSATTGLSLCTPVTTAGAPTAGTQGFSLKAPGAASGTSTTTSTAATATATQVNAWDRTLIENGEKITS

SEQ ID NO: 13018 - protein, 85 aa, Homo sapiens
MHREVEKVKLDQKRLDQELDFILSQQKELEDLLSPLEELVKEQSGTIYLQHADEEREKTYKLAENIDAQLKRMAQDLKDIIEHLN

SEQ ID NO: 13019 - protein, 85 aa, Homo sapiens
SVTLLKASEVEEILDGNDEKYKAVSISTEPPTYLREQKAKRNSQWVPTLPNSSHHLDAVPCSTTINRNRMGRDKKRTFPLWCGCI

SEQ ID NO: 13020 - protein, 85 aa, Homo sapiens
AALTLRADSALVLQHVSVPSSPEKHSALTLCSPQRHSTSSPLNCCVSLTSRTLSIASLALSAVTLPCPPHLSGPSSGVTQGAVLG

SEQ ID NO: 13021 - protein, 85 aa, Homo sapiens
SQWVPTLPNSSHHLDAVPCSTTINRNRMGRDKKRTFPLWCGCIAALTLRADSALVLQHVSVPSSPEKHSALTLCSPQRHSTSSPL

SEQ ID NO: 13022 - protein, 85 aa, Homo sapiens
MELDIGDATQVYVAFLVYLDLMESKSWHEVNCVGLPELQLICLVGTEIEGEGLQTVVPTPITASLSHNSLVSCDLFSSFLVLSSV

SEQ ID NO: 13023 - protein, 84 aa, Homo sapiens
ATQVYVAFLVYLDLMESKSWHEVNCVGLPELQLICLVGTEIEGEGLQTVVPTPITASLSHNSLVSCDLFSSFLVLSSVTSHLIE

SEQ ID NO: 13024 - protein, 84 aa, Homo sapiens
QASSQNEGLTIDLKNFRKPGEKTFTQRSRLFVGNLPPDITEEEMRKLFEKYGKAGEVFIHKDKGFGFIRLISSSCDCGAHGPVR

SEQ ID NO: 13025 - protein, 85 aa, Homo sapiens
NGQQASSQNEGLTIDLKNFRKPGEKTFTQRSRLFVGNLPPDITEEEMRKLFEKYGKAGEVFIHKDKGFGFIRLISSSCDCGAHGP

SEQ ID NO: 13026 - protein, 84 aa, Homo sapiens
RTKALLGKAVRCYESLILKAEGKVESDFFCQLGHFNLLLEDYPKALSAYQRYYSLQSDYWKNAAFLYGLGLVYFHYNAFQCIFS

SEQ ID NO: 13027 - protein, 7 aa, Homo sapiens
RWPQRKP

SEQ ID NO: 13028 - protein, 84 aa, Homo sapiens
MESMMPNKVRKIGELVRYLNTNPVGGLLEYARSHGFAAEFKLVDQSGPPHEPKFVYQAKVGGRWFPAVCAHSKKQAPSHWQHLP

SEQ ID NO: 13029 - protein, 33 aa, Homo sapiens; identical to SEQ ID NO: 12624

SEQ ID NO: 13030 - protein, 84 aa, Homo sapiens
FHYNAFQWAIKAFQEVLYVDPSFCRAKEIHLRLGLMFKVNTDYESSLKHFQLALVDCNPCTLSNAEIQFHIAHLYETQVGCITL

SEQ ID NO: 13031 - protein, 85 aa, Homo sapiens
MQITEWRFLARDEGESAVAEDPTWGEDEEPSACTTDSWAQGSVPVLHASTSEGLENFQGEVHSSGASPDSSAIAPALPFPTSHCP

SEQ ID NO: 13032 - protein, 85 aa, Homo sapiens
SAFPQDPGGVDRIPLGRSWMGRGSQEQMESWEPSPQLRVTSAPPPTSELFQEAGPGGPVEEADGQSRGLSSAGSLSASFQLSVEE

SEQ ID NO: 13033 - protein, 85 aa, Homo sapiens
APADDADPSLDPYLVASPQASTGRGHPLGFHLSLEDLYCCMPQLDAAGDRLELRSEGVPCIASGVLVSYPSVGGATRPSASCQQQ

SEQ ID NO: 13034 - protein, 85 aa, Homo sapiens
RAGHSDVRLSAHHHRMRRKAAVKRLDPARLPCHWVRPLAEVLVPDSQTRPLEAYRGRQRGEKTKARAEPQALGPGTRVSPAAFFP

SEQ ID NO: 13035 - protein, 85 aa, Homo sapiens
LRPGIPFRDLDSGPALLFPTLNLGLSSPSLESKLPLPNSRIRFLTTHPVLPDVARSRSPKLWPSVRWPSGWEGKAELLGELWAGR

SEQ ID NO: 13036 - protein, 85 aa, Homo sapiens
TRVPPQGLELADREGQDPGRWPRTTPPVLEATSQVMWKPVLLPEALKLAPGVSMWNRSTQVLLSSGVPEQEDKEGSTFPPVEQHP

SEQ ID NO: 13037 - protein, 85 aa, Homo sapiens
VPVLHASTSEGLENFQGEVHSSGASPDSSAIAPALPFPTSHCPSAFPQDPGGVDRIPLGRSWMGRGSQEQMESWEPSPQLRVTSA

SEQ ID NO: 13038 - protein, 85 aa, Homo sapiens
PPPTSELFQEAGPGGPVEEADGQSRGLSSAGSLSASFQLSVEEAPADDADPSLDPYLVASPQASTGRGHPLGFHLSLEDLYCCMP

SEQ ID NO: 13039 - protein, 85 aa, Homo sapiens
QLDAAGDRLELRSEGVPCIASGVLVSYPSVGGATRPSASCQQQRAGHSDVRLSAHHHRMRRKAAVKRLDPARLPCHWVRPLAEVL

SEQ ID NO: 13040 - protein, 85 aa, Homo sapiens
VPDSQTRPLEAYRGRQRGEKTKARAEPQALGPGTRVSPAAFFPLRPGIPFRDLDSGPALLFPTLNLGLSSPSLESKLPLPNSRIR

SEQ ID NO: 13041 - protein, 85 aa, Homo sapiens
FLTTHPVLPDVARSRSPKLWPSVRWPSGWEGKAELLGELWAGRTRVPPQGLELADREGQDPGRWPRTTPPVLEATSQVMWKPVLL

SEQ ID NO: 13042 - protein, 85 aa, Homo sapiens
NSPKSKKAKKKEEPSQNDISPKTKSLRKKKEPIEKKVVSSKTKKVTKNEEPSEEEIDAPKPKKMKKEKEMNGETREKSPKLKNGF

SEQ ID NO: 13043 - protein, 85 aa, Homo sapiens
PHPEPDCNPSEAASEESNSEIEQEIPVEQKEGAFSNFPISEETIKLLKGRGVTFLFPIQAKTFHHVYSGKDLIAQARTGTGKTFS

SEQ ID NO: 13044 - protein, 85 aa, Homo sapiens
FAIPLIEKLHGELQDRKRGRAPQVLVLAPTRELANQVSKDFSDITKKLSVACFYGGTPYGGQFERMRNGIDILVGTPGRIKDHIQ

SEQ ID NO: 13045 - protein, 85 aa, Homo sapiens
NGKLDLTKLKHVVLDEVDQMLDMGFADQVEEILSVAYKKDSEDNPQTLLFSATCPHWVFNVAKKYMKSTYEQVDLIGKKTQKTAI

SEQ ID NO: 13046 - protein, 85 aa, Homo sapiens
TVEHLAIKCHWTQRAAVIGDVIRVYSGHQGRTIIFCETKKEAQELSQNSAIKQDAQSLHGDIPQKQREITLKGFRNGSFGVLVAT

SEQ ID NO: 13047 - protein, 85 aa, Homo sapiens
NVAARGLDIPEVDLVIQSSPPKDVESYIHRSGRTGRAGRTGVCICFYQHKEEYQLVQVEQKAGIKFKRIGVPSATEIIKASSKDA

SEQ ID NO: 13048 - protein, 85 aa, Homo sapiens
IRLLDSVPPTAISHFKQSAEKLIEEKGAVEALAAALAHISGATSVDQRSLINSNVGFVTMILQCSIEMPNISYAWKELKEQLGEE

SEQ ID NO: 13049 - protein, 85 aa, Homo sapiens
IDSKVKGMVFLKGKLGVCFDVPTASVTEIQEKWHDSRRWQLSVATEQPELEGPREGYGGFRGQREGSRGFRGQRDGNRRFRGQRE

SEQ ID NO: 13050 - protein, 85 aa, Homo sapiens
KKVTKNEEPSEEEIDAPKPKKMKKEKEMNGETREKSPKLKNGFPHPEPDCNPSEAASEESNSEIEQEIPVEQKEGAFSNFPISEE

SEQ ID NO: 13051 - protein, 85 aa, Homo sapiens
TIKLLKGRGVTFLFPIQAKTFHHVYSGKDLIAQARTGTGKTFSFAIPLIEKLHGELQDRKRGRAPQVLVLAPTRELANQVSKDFS

SEQ ID NO: 13052 - protein, 85 aa, Homo sapiens
DITKKLSVACFYGGTPYGGQFERMRNGIDILVGTPGRIKDHIQNGKLDLTKLKHVVLDEVDQMLDMGFADQVEEILSVAYKKDSE

SEQ ID NO: 13053 - protein, 85 aa, Homo sapiens
DNPQTLLFSATCPHWVFNVAKKYMKSTYEQVDLIGKKTQKTAITVEHLAIKCHWTQRAAVIGDVIRVYSGHQGRTIIFCETKKEA

SEQ ID NO: 13054 - protein, 85 aa, Homo sapiens
QELSQNSAIKQDAQSLHGDIPQKQREITLKGFRNGSFGVLVATNVAARGLDIPEVDLVIQSSPPKDVESYIHRSGRTGRAGRTGV

SEQ ID NO: 13055 - protein, 85 aa, Homo sapiens
CICFYQHKEEYQLVQVEQKAGIKFKRIGVPSATEIIKASSKDAIRLLDSVPPTAISHFKQSAEKLIEEKGAVEALAAALAHISGA

SEQ ID NO: 13056 - protein, 85 aa, Homo sapiens
TSVDQRSLINSNVGFVTMILQCSIEMPNISYAWKELKEQLGEEIDSKVKGMVFLKGKLGVCFDVPTASVTEIQEKWHDSRRWQLS

SEQ ID NO: 13057 - protein, 85 aa, Homo sapiens
MESSGCKALKEGVLEKRSDGLLQLWKKKCCILTEEGLLLIPPKQLQHQQQQQQQQQQQQQQQPGQGPAEPSQPSGPAVASLEPPV

SEQ ID NO: 13058 - protein, 85 aa, Homo sapiens
KLKELHFSNMKTVDCVERKGKYMYFTVVMAEGKEIDFRCPQDQGWNAEITLQMVQYKNRQAILAVKSTRQKQQHLVQQQPPSQPQ

SEQ ID NO: 13059 - protein, 85 aa, Homo sapiens
PQPQLQPQPQPQPQPQPQPQSQPQPQPQPKPQPQQLHPYPHPHPHPHSHPHSHPHPHPHPHPHQIPHPHPQPHSQPHGHRLLRST

SEQ ID NO: 13060 - protein, 85 aa, Homo sapiens
KQLQHQQQQQQQQQQQQQQQPGQGPAEPSQPSGPAVASLEPPVKLKELHFSNMKTVDCVERKGKYMYFTVVMAEGKEIDFRCPQD

SEQ ID NO: 13061 - protein, 85 aa, Homo sapiens
QGWNAEITLQMVQYKNRQAILAVKSTRQKQQHLVQQQPPSQPQPQPQLQPQPQPQPQPQPQPQSQPQPQPQPKPQPQQLHPYPHP

SEQ ID NO: 13062 - protein, 85 aa, Homo sapiens
AAAAAAAAAAAAAAQCRSPRCAAERRGFRRELDSWRHRLMHCVGFESILEGLYGPRLRRDLSLFEDCEPEELTDWSMDEKCSFCN

SEQ ID NO: 13063 - protein, 85 aa, Homo sapiens
LQREAVSDCIPSLDSSQSTPTEELSSQGQSNTDKIECQAENYLNALFRKKDLPQNCDPNIPLVAQELMKKMIRQFAIEYISKSGK

SEQ ID NO: 13064 - protein, 85 aa, Homo sapiens
TQENRNGSIGPSIVCKSIQMNQAENSLQEEQEGPLDLTVNRMQEQNTQQGDGVLDLSTKKTSIKSEESSICDPSSENSVAGRLHR

SEQ ID NO: 13065 - protein, 85 aa, Homo sapiens
NREDYVERSAEFADGLLSKALKDIQSGALDINKAGILYGIPQKTLLLHLEALPAGKPASFKNKTRDFHDSYSYKDSKETCAVLQK

SEQ ID NO: 13066 - protein, 85 aa, Homo sapiens
VALWARAQAERTEKSKLNLLETSEIKFPTASTYLHQLTLQKMVTQFKEKNESLQYETSNPTVQLKIPQLRPPDLLSLSEHATSEN

SEQ ID NO: 13067 - protein, 84 aa, Homo sapiens
ALWARAQAERTEKSKLNLLETSEIKFPTASTYLHQLTLQKMVTQFKEKNESLQYETSNPTVQLKIPQLRPPDLLSLSEHATSEN

SEQ ID NO: 13068 - protein, 85 aa, Homo sapiens
VGFESILEGLYGPRLRRDLSLFEDCEPEELTDWSMDEKCSFCNLQREAVSDCIPSLDSSQSTPTEELSSQGQSNTDKIECQAENY

SEQ ID NO: 13069 - protein, 85 aa, Homo sapiens
LNALFRKKDLPQNCDPNIPLVAQELMKKMIRQFAIEYISKSGKTQENRNGSIGPSIVCKSIQMNQAENSLQEEQEGPLDLTVNRM

SEQ ID NO: 13070 - protein, 85 aa, Homo sapiens
QEQNTQQGDGVLDLSTKKTSIKSEESSICDPSSENSVAGRLHRNREDYVERSAEFADGLLSKALKDIQSGALDINKAGILYGIPQ

SEQ ID NO: 13071 - protein, 85 aa, Homo sapiens
KTLLLHLEALPAGKPASFKNKTRDFHDSYSYKDSKETCAVLQKVALWARAQAERTEKSKLNLLETSEIKFPTASTYLHQLTLQKM

SEQ ID NO: 13072 - protein, 85 aa, Homo sapiens
GIPGVAHSVISTRTPPPPSPLPFPTQAILPPAPSSYFSHPTIRYPPHLNPQDTLKNYVPSYDPSSPQTSQPNGSGQVVGKVPGHF

SEQ ID NO: 13073 - protein, 85 aa, Homo sapiens
TPVLAPSPHPSAVRPVTLSMTDTKPITTSTEGEAASPTATTYTASGTSQANRYVGLSPRDPSFLHQQQLRICDWTMNQNGRHLYP

SEQ ID NO: 13074 - protein, 85 aa, Homo sapiens
RYPPHLNPQDTLKNYVPSYDPSSPQTSQPNGSGQVVGKVPGHFTPVLAPSPHPSAVRPVTLSMTDTKPITTSTEGEAASPTATTY

SEQ ID NO: 13075 - protein, 85 aa, Homo sapiens
TASGTSQANRYVGLSPRDPSFLHQQQLRICDWTMNQNGRHLYPSTSEDTLGITWQSPGTWASLVPFQVSNRTPILPANVQNYGLN

SEQ ID NO: 13076 - protein, 18 aa, Homo sapiens
GVRSWVTWGAAGTSTARC

SEQ ID NO: 13077 - protein, 26 aa, Homo sapiens
CLLPSKGPVTMASPWMWRWPTSRTAS

SEQ ID NO: 13078 - protein, 46 aa, Homo sapiens
RTSTHRWTTSCGCRAPAMASSPASPCSAPLTILATQAPSPRSHLSG

SEQ ID NO: 13079 - protein, 85 aa, Homo sapiens
LTFLWQRDSGQSGSPSHNDPAKNPPGYLEDSFVKSGVFNVSELVRVSRTPITQGTGVNFPIGEIPSQPYYHDMNSGVNLQRSLSS

SEQ ID NO: 13080 - protein, 85 aa, Homo sapiens
PKYLEMMELDIGDATQVYVAFLVYLDLMESKSWHEVNCVGLPELQLICLVGTEIEGEGLQTVVPTPITASLSHNRYWRATFEEGK

SEQ ID NO: 13081 - protein, 15 aa, Homo sapiens
KTQEIQLWNLKDQIK

SEQ ID NO: 13082 - protein, 85 aa, Homo sapiens
TYYKRKRTKQEPSSQGSQSALQTYELGSENVKVPIFEEDTPSVMEIEMEELDKWMNSMNRNADFECLPTLKEEKESNHNPRDSRS

SEQ ID NO: 13083 - protein, 7 aa, Homo sapiens
MLRMKIS

SEQ ID NO: 13084 - protein, 84 aa, Homo sapiens
PPSPLPFPTQAILPPAPSSYFSHPTIRYPPHLNPQDTLKNYVPSYDPSSPQTSQLRICDWTMNQNGRHLYPSTSEDTLGITWQS

SEQ ID NO: 13085 - protein, 85 aa, Homo sapiens
RPMGLRFKKAHVTHPELKATFCLPILGVKKNPSSPLYTTLGVITKGTVIEVNVSELGLVTQGGKVIWGKYAQVTNNPENDGCINA

SEQ ID NO: 13086 - protein, 84 aa, Homo sapiens
RFKKAHVTHPELKATFCLPILGVKKNPSSPLYTTLGVITKGTVIEVNVSELGLVTQGGKVIWGKYAQVTNNPENDGCINAVLLV

SEQ ID NO: 13087 - protein, 85 aa, Homo sapiens
ETEVLKVIRTGKRKKKAWKRMVTKVCFVGDGFTRKPPKYERFIRPMGLRFKKAHVTHPELKATFCLPILGVKKNPSSPLYTTLGV

SEQ ID NO: 13088 - protein, 85 aa, Homo sapiens
SRAEFGDFDIKTVLQEIKRGKRMKCTLCSQPGATIGCEIKACVKTYHYHCGVQDKAKYIENMSRGIYKLYCKNHSGNDERDEEDE

SEQ ID NO: 13089 - protein, 85 aa, Homo sapiens
NKAVLESTWPSRSRSGYFLWTKVRNVVLGVTQFKRALKKHAHLSQTTLSDGSDLDAVSHGSMDSGHGTHTVEQAPFNTGLIKVYA

SEQ ID NO: 13090 - protein, 85 aa, Homo sapiens
TDDRSSTGGQSDLGYNSLSKDEVRRGDTSTEDIQEEKDKKGSDCSSLSESESTKGSADCLPKLSYQNSSSIVRLTGTSNNSAGKI

SEQ ID NO: 13091 - protein, 85 aa, Homo sapiens
ITVADFVDHHPIVFWNLVWYFRRLDLPSNLPGLILSSEHCNKYSKIPRHCMSEDSKYVLIQMLWDNMKLHQDPGQPLYILWNAHS

SEQ ID NO: 13092 - protein, 85 aa, Homo sapiens
QSRTLLFETQKYPMVHLLQKSDNSFNQELLKSMVKSIKMNDVYGPMSQILETLNKCPHFKRQRSLYREILFLSLVALGRENIDID

SEQ ID NO: 13093 - protein, 85 aa, Homo sapiens
LSQTTLSDGSDLDAVSHGSMDSGHGTHTVEQAPFNTGLIKVYATDDRSSTGGQSDLGYNSLSKDEVRRGDTSTEDIQEEKDKKGS

SEQ ID NO: 13094 - protein, 85 aa, Homo sapiens
DCSSLSESESTKGSADCLPKLSYQNSSSIVRLTGTSNNSAGKISGESMESTPELLLISSLEDTNETRNIQSRCFRKRHKSDNETN

SEQ ID NO: 13095 - protein, 85 aa, Homo sapiens
MQQQVVWGNRNRNLSGGVLMGFMLNRINQEATPGDIVEKLGADAKILSNVISKSTRPNTLDIGKPPLRSKRDSLEKESSDDDTPF

SEQ ID NO: 13096 - protein, 85 aa, Homo sapiens
DGSNYLADKVDSPVIFDLEDLDSETDVSKAGCVATQNPKRIQRMNSSFSVKPFEKTDVATGFDPLSLLVAETEQQQKEEEEEDED

SEQ ID NO: 13097 - protein, 85 aa, Homo sapiens
DSKSISTPSARRDLAEEIVMYMNNMSSPLTSRTPSIDLQRACDDKLNKKSPPLVKACRRSSLPPNSPKPVRLTKSKSYTKSEEKP

SEQ ID NO: 13098 - protein, 85 aa, Homo sapiens
RDRLWSSPAFSPTCPFREESQDTLTHSSPSFNLDTLLVPKLDVLRNSMFTAGKGVAEKASKWYSRFTMYTTSSKDQSSDRTSLSS

SEQ ID NO: 13099 - protein, 85 aa, Homo sapiens
VGAQDSESTSLTDEDVCHELEGPISSQETSATSGTKRIDLSRISLESSASLEGSLSKFALPGKSEVTSSFNASNTNIFQNYAMEV

SEQ ID NO: 13100 - protein, 85 aa, Homo sapiens
LISSCSRCRTCDCLVHDEEIMAGWTADDSNLNTTCPFCGNIFLPFLNIEIRDLRRPGRYFLKSSPSTENMHFPSSISSQTRQSCI

SEQ ID NO: 13101 - protein, 85 aa, Homo sapiens
STSASGLDTSALSVQGNFDLNSKSKLQENFCTRSIQIPANRSKTAMSKCPIFPMARSISTSGPLDKEDTGRQKLISTGSLPATLQ

SEQ ID NO: 13102 - protein, 85 aa, Homo sapiens
GATDSLGLEWHLPSPDPVTVPYLSPLVVWKELESLLENEGDHAITVADFVDHHPIVFWNLVWYFRRLDLPSNLPGLILSSEHCNK

SEQ ID NO: 13103 - protein, 85 aa, Homo sapiens
YSKIPRHCMSEDSKYVLIQMLWDNMKLHQDPGQPLYILWNAHSQSRTLLFETQKYPMVHLLQKSDNSFNQELLKSMVKSIKMNDV

SEQ ID NO: 13104 - protein, 85 aa, Homo sapiens
YGPMSQILETLNKCPHFKRQRSLYREILFLSLVALGRENIDIDAFDKEYKMAYDRLTPSQVKSTHNCDRPPSTGVMECRKTFGEP

SEQ ID NO: 13105 - protein, 85 aa, Homo sapiens
MGSRDLARNPHTLVEVTSFAAINKFQPFNVAVSSNVLFLLVCGPPCLGARGSGAQSVGSGRGSPAYQLHESWGLVCFVCYWYTVG

SEQ ID NO: 13106 - protein, 84 aa, Homo sapiens
RDLARNPHTLVEVTSFAAINKFQPFNVAVSSNVLFLLVCGPPCLGARGSGAQSVGSGRGSPAYQLHESWGLVCFVCYWYTVGAQ

SEQ ID NO: 13107 - protein, 85 aa, Homo sapiens
AAPSDGFKPRERSGGEQAQDWDALPPKRPRLGAGNKIGGRRLIVVLEGASLETVKVGKTYELLNCDKHKSILLKNGRDPGEARPD

SEQ ID NO: 13108 - protein, 85 aa, Homo sapiens
ITHQSLLMLMDSPLNRAGLLQVYIHTQKNVLIEVNPQTRIPRTFDRFCGLMVQLLHKLSVRAADGPQKLLKVIKNPVSDHFPVGC

SEQ ID NO: 13109 - protein, 84 aa, Homo sapiens
QLLHKLSVRAADGPQKLLKVIKNPVSDHFPVGCMKVGTSFSIPVVSDVRELVPSSDPIVFVVGAFAHGKVSGSYLFQSKVMMAL

SEQ ID NO: 13110 - protein, 85 aa, Homo sapiens
IVVLEGASLETVKVGKTYELLNCDKHKSILLKNGRDPGEARPDITHQSLLMLMDSPLNRAGLLQVYIHTQKNVLIEVNPQTRIPR

SEQ ID NO: 13111 - protein, 85 aa, Homo sapiens
TFDRFCGLMVQLLHKLSVRAADGPQKLLKVIKNPVSDHFPVGCMKVGTSFSIPVVSDVRELVPSSDPIVFVVGAFAHGKVSGSYL

SEQ ID NO: 13112 - protein, 85 aa, Homo sapiens
CEQQDMDLDIEFDVHLGIAHTRWATHGEPSPVNSHPQRSDKNNEFIVIHNGIITNYKDLKKFLESKGYDFESETDTETIAKLVKY

SEQ ID NO: 13113 - protein, 85 aa, Homo sapiens
MYDNRESQDTSFTTLVERVIQQLEGAFALVFKSVHFPGQAVGTRRGSPLLIGVRSEHKLSTDHIPILYRTGKDKKGSCNLSRVDS

SEQ ID NO: 13114 - protein, 85 aa, Homo sapiens
TTCLFPVEEKAVEYYFASDASAVIEHTNRVIFLEDDDVAAVVDGRLSIHRIKRTAGDHPGRAVQTLQMELQQIMKGNFSSFMQKE

SEQ ID NO: 13115 - protein, 85 aa, Homo sapiens
IFEQPESVVNTMRGRVNFDDYTVNLGGLKDHIKEIQRCRRLILIACGTSYHAGVATRQVLEELTELPVMVELASDFLDRNTPVFR

SEQ ID NO: 13116 - protein, 85 aa, Homo sapiens
DDVCFFLSQSGETADTLMGLRYCKERGALTVGITNTVGSSISRETDCGVHINAGPEIGVASTKAYTSQFVSLVMFALMMCDDRIS

SEQ ID NO: 13117 - protein, 85 aa, Homo sapiens
MQERRKEIMLGLKRLPDLIKEVLSMDDEIQKLATELYHQKSVLIMGRGYHYATCLEGALKIKEITYMHSEGILAGELKHGPLALV

SEQ ID NO: 13118 - protein, 85 aa, Homo sapiens
DKLMPVIMIIMRDHTYAKCQNALQQVVARQGRPVVICDKEDTETIKNTKRTIKVPHSVDCLQGILSVIPLQLLAFHLAVLRGYDV

SEQ ID NO: 13119 - protein, 85 aa, Homo sapiens
NEFIVIHNGIITNYKDLKKFLESKGYDFESETDTETIAKLVKYMYDNRESQDTSFTTLVERVIQQLEGAFALVFKSVHFPGQAVG

SEQ ID NO: 13120 - protein, 85 aa, Homo sapiens
TRRGSPLLIGVRSEHKLSTDHIPILYRTGKDKKGSCNLSRVDSTTCLFPVEEKAVEYYFASDASAVIEHTNRVIFLEDDDVAAVV

SEQ ID NO: 13121 - protein, 85 aa, Homo sapiens
DGRLSIHRIKRTAGDHPGRAVQTLQMELQQIMKGNFSSFMQKEIFEQPESVVNTMRGRVNFDDYTVNLGGLKDHIKEIQRCRRLI

SEQ ID NO: 13122 - protein, 85 aa, Homo sapiens
LIACGTSYHAGVATRQVLEELTELPVMVELASDFLDRNTPVFRDDVCFFLSQSGETADTLMGLRYCKERGALTVGITNTVGSSIS

SEQ ID NO: 13123 - protein, 85 aa, Homo sapiens
RETDCGVHINAGPEIGVASTKAYTSQFVSLVMFALMMCDDRISMQERRKEIMLGLKRLPDLIKEVLSMDDEIQKLATELYHQKSV

SEQ ID NO: 13124 - protein, 85 aa, Homo sapiens
MIMGRGYHYATCLEGALKIKEITYMHSEGILAGELKHGPLALVDKLMPVIMIIMRDHTYAKCQNALQQVVARQGRPVVICDKEDT

SEQ ID NO: 13125 - protein, 84 aa, Homo sapiens
KDKQKKKKERTWAEAARLVLENYSDAPMTPKQILQVIEAEGLKEMRSGTSPLACLNAMLHSNSRGGEGLFYKLPGRISLFTLKR

SEQ ID NO: 13126 - protein, 85 aa, Homo sapiens
SPAAAAAGAGERRRPIASVRDGRGRGCGGPAGAALLGLSLVGLLLYLVPAAAALAWLAVGTTAAWWGLSREPRGSRPLSSFVQKA

SEQ ID NO: 13127 - protein, 85 aa, Homo sapiens
RHRRTLFASPPAKSTANGNLLEPRTLLEGPDPAELLLMGSYLGKPGPPQPAPAPEGQDLRNRPGRRPPARPAPRSTPPSQPTHRV

SEQ ID NO: 13128 - protein, 85 aa, Homo sapiens
HHFYPSLPTPLLRPSGRPSPRDRGTLPDRFVITPRRRYPIHQTQYSCPGVLPTVCWNGYHKKAVLSPRNSRMVCSPVTVRIAPPD

SEQ ID NO: 13129 - protein, 85 aa, Homo sapiens
RRFSRSAIPEQIISSTLSSPSSNAPDPCAKETVLSALKEKKKKRTVEEEDQIFLDGQENKRRRHDSSGSGHSAFEPLVASGVPAS

SEQ ID NO: 13130 - protein, 85 aa, Homo sapiens
FVPKPGSLKRGLNSQSSDDHLNKRSRSSSMSSLTGAYTSGIPSSSRNAITSSYSSTRGISQLWKRNGPSSSPFSSPASSRSQTPE

SEQ ID NO: 13131 - protein, 85 aa, Homo sapiens
RPAKKIREEELCHHSSSSTPLAADKESQGEKAADTTPRKKQNSNSQSTPGSSGQRKRKVQLLPSRRGEQLTLPPPPQLGYSITAE

SEQ ID NO: 13132 - protein, 85 aa, Homo sapiens
DLDLEKKASLQWFNQALEDKSDAASNSVTETPPTTQPSFTFTLPAAATASPPTSLLAPSTNPLLESLKKMQTPPSLPPCPESAGA

SEQ ID NO: 13133 - protein, 85 aa, Homo sapiens
ATTEALSPPKTPSLLPPLGLSQSGPPGLLPSPSFDSKPPTTLLGLIPAPSMVPATDTKAPPTLQAETATKPQATSAPSPAPKQSF

SEQ ID NO: 13134 - protein, 85 aa, Homo sapiens
MFGTQNTSPSSPAAPAASSASPMFKPIFTAPPKSEKEGLTPPGPSVSATAPSSSSLPTTTSTTAPTFQPVFSSMGPPASVPLPAP

SEQ ID NO: 13135 - protein, 85 aa, Homo sapiens
FFKQTTTPATAPTTTAPLFTGLASATSAVAPITSASPSTDSASKPAFGFGINSVSSSSVSTTTSTATAASQPFLFGAPQASAASF

SEQ ID NO: 13136 - protein, 85 aa, Homo sapiens
TPAMGSIFQFGKPPALPTTTTVTTFSQSLPTAVPTATSSSAADFSGFGSTLATSAPATSSQPTLTFSNTSTPTFNIPFGSSAKSP

SEQ ID NO: 13137 - protein, 85 aa, Homo sapiens
LPSYPGANPQPAFGAAEGQPPGAAKPALTPSFGSSFTFGNSAAPAPATAPTPAPASTIKIVPAHVPTPIQPTFGGATHSAFGLKA

SEQ ID NO: 13138 - protein, 85 aa, Homo sapiens
TASAFGAPASSQPAFGGSTAVFSFGAATSSGFGATTQTASSGSSSSVFGSTTPSPFTFGGSAAPAGSGSFGINVATPGSSATTGA

SEQ ID NO: 13139 - protein, 85 aa, Homo sapiens
FSFGAGQSGSTATSTPFTGGLGQNALGTTGQSTPFAFNVGSTTESKPVFGGTATPTFGQNTPAPGVGTSGSSLSFGASSAPAQGF

SEQ ID NO: 13140 - protein, 85 aa, Homo sapiens
LLLYLVPAAAALAWLAVGTTAAWWGLSREPRGSRPLSSFVQKARHRRTLFASPPAKSTANGNLLEPRTLLEGPDPAELLLMGSYL

SEQ ID NO: 13141 - protein, 85 aa, Homo sapiens
GKPGPPQPAPAPEGQDLRNRPGRRPPARPAPRSTPPSQPTHRVHHFYPSLPTPLLRPSGRPSPRDRGTLPDRFVITPRRRYPIHQ

SEQ ID NO: 13142 - protein, 85 aa, Homo sapiens
TQYSCPGVLPTVCWNGYHKKAVLSPRNSRMVCSPVTVRIAPPDRRFSRSAIPEQIISSTLSSPSSNAPDPCAKETVLSALKEKKK

SEQ ID NO: 13143 - protein, 85 aa, Homo sapiens
KRTVEEEDQIFLDGQENKRRRHDSSGSGHSAFEPLVASGVPASFVPKPGSLKRGLNSQSSDDHLNKRSRSSSMSSLTGAYTSGIP

SEQ ID NO: 13144 - protein, 85 aa, Homo sapiens
SSSRNAITSSYSSTRGISQLWKRNGPSSSPFSSPASSRSQTPERPAKKIREEELCHHSSSSTPLAADKESQGEKAADTTPRKKQN

SEQ ID NO: 13145 - protein, 85 aa, Homo sapiens
SNSQSTPGSSGQRKRKVQLLPSRRGEQLTLPPPPQLGYSITAEDLDLEKKASLQWFNQALEDKSDAASNSVTETPPTTQPSFTFT

SEQ ID NO: 13146 - protein, 85 aa, Homo sapiens
MPAAATASPPTSLLAPSTNPLLESLKKMQTPPSLPPCPESAGAATTEALSPPKTPSLLPPLGLSQSGPPGLLPSPSFDSKPPTTL

SEQ ID NO: 13147 - protein, 85 aa, Homo sapiens
MGLIPAPSMVPATDTKAPPTLQAETATKPQATSAPSPAPKQSFLFGTQNTSPSSPAAPAASSASPMFKPIFTAPPKSEKEGLTPP

SEQ ID NO: 13148 - protein, 85 aa, Homo sapiens
GPSVSATAPSSSSLPTTTSTTAPTFQPVFSSMGPPASVPLPAPFFKQTTTPATAPTTTAPLFTGLASATSAVAPITSASPSTDSA

SEQ ID NO: 13149 - protein, 85 aa, Homo sapiens
SKPAFGFGINSVSSSSVSTTTSTATAASQPFLFGAPQASAASFTPAMGSIFQFGKPPALPTTTTVTTFSQSLPTAVPTATSSSAA

SEQ ID NO: 13150 - protein, 85 aa, Homo sapiens
DFSGFGSTLATSAPATSSQPTLTFSNTSTPTFNIPFGSSAKSPLPSYPGANPQPAFGAAEGQPPGAAKPALTPSFGSSFTFGNSA

SEQ ID NO: 13151 - protein, 85 aa, Homo sapiens
APAPATAPTPAPASTIKIVPAHVPTPIQPTFGGATHSAFGLKATASAFGAPASSQPAFGGSTAVFSFGAATSSGFGATTQTASSG

SEQ ID NO: 13152 - protein, 85 aa, Homo sapiens
SSSSVFGSTTPSPFTFGGSAAPAGSGSFGINVATPGSSATTGAFSFGAGQSGSTATSTPFTGGLGQNALGTTGQSTPFAFNVGST

SEQ ID NO: 13153 - protein, 85 aa, Homo sapiens
ARDLIGPALPPGFKARGTAEDEERDPSPGKRRRLRCPPGPSTHSLAGPCSLKKVGGLGGRRSGEWARPDPRELFSSQTVAGGRRL

SEQ ID NO: 13154 - protein, 84 aa, Homo sapiens
RGTAEDEERDPSPGKRRRLRCPPGPSTHSLAGPCSLKKVGGLGGRRSGEWARPDPRELFSSQTVAGGRRLGDPPRNELWRGLAS

SEQ ID NO: 13155 - protein, 84 aa, Homo sapiens
GQLKRVPRTGWVYRNVQRPESVSDHMYRMAVMAMVIKDDRLNKDRCVRLALVHDMAECIVGDIAPADNIPKEEKHRREEVSVDY

SEQ ID NO: 13156 - protein, 84 aa, Homo sapiens
NPVSDHFPVGCMKVGTSFSIPVVSDVRELVPSSDPIVFVVGAFAHGKVSVEYTEKMVSISNYPLSAALTCAKLTTAFEEVWGVI

SEQ ID NO: 13157 - protein, 85 aa, Homo sapiens
TFDRFCGLMVQLLHKLSVRAADGPQKLLKVIKNPVSDHFPVGCMKVGTSFSIPVVSDVRELVPSSDPIVFVVGAFAHGKVSVEYT

SEQ ID NO: 13158 - protein, 85 aa, Homo sapiens
ESMAVATDGGERPGVPAGSGLSASQRRAELRRRKLLMNSEQRINRIMGFHRPGSGAEESQTKSKQQDSDKLNSLSVPSVSKRVVL

SEQ ID NO: 13159 - protein, 85 aa, Homo sapiens
GDSVSTGTTDQQGGVAEVKGTQLGDKLDSFIKPPECSSDVNLELRQRNRGDLTADSVQRGSRHGLEQYLSRFEEAMKLRKQLISE

SEQ ID NO: 13160 - protein, 85 aa, Homo sapiens
KPSQEDGNTTEEFDSFRIFRLVGCALLALGVRAFVCKYLSIFAPFLTLQLAYMGLYKYFPKSEKKIKTTVLTAALLLSGIPAEVI

SEQ ID NO: 13161 - protein, 85 aa, Homo sapiens
INRIMGFHRPGSGAEESQTKSKQQDSDKLNSLSVPSVSKRVVLGDSVSTGTTDQQGGVAEVKGTQLGDKLDSFIKPPECSSDVNL

SEQ ID NO: 13162 - protein, 85 aa, Homo sapiens
ELRQRNRGDLTADSVQRGSRHGLEQYLSRFEEAMKLRKQLISEKPSQEDGNTTEEFDSFRIFRLVGCALLALGVRAFVCKYLSIF

SEQ ID NO: 13163 - protein, 85 aa, Homo sapiens
MGVGDTLYLVNGLHPLTLRWEETRTPESQPDTPPGTPLVSQDEKRDAELPKKRMRKSNPGWENLEKLLVFTAAGVKPQGKDLVPR

SEQ ID NO: 13164 - protein, 84 aa, Homo sapiens
DTLYLVNGLHPLTLRWEETRTPESQPDTPPGTPLVSQDEKRDAELPKKRMRKSNPGWENLEKLLVFTAAGVKPQGKDLVPRDSP

SEQ ID NO: 13165 - protein, 84 aa, Homo sapiens
MEKQQQDQVDRNIKEAREKLEMEMEAARHEHQVMLMRQDLMRRQEELRRMEELHNQEVQKRKQLELRESRRFGWVRWLWEVLWA

SEQ ID NO: 13166 - protein, 85 aa, Homo sapiens
MIPSSQVDDLSSPAKRKRTSSPTKNTSDNWSGGHAVSHPPVQQQAHSWCLTPQKLQMRPTGVAQVRSTGIPNGPTADSSLPTNSV

SEQ ID NO: 13167 - protein, 85 aa, Homo sapiens
SGQQPQLALTRVPSVSQPGVRPACPGQPLANGPFSAGHVPCSTSRTLGSTDTILIGNNHITGSGSNGNVPYLQRNALTLPHNRTN

SEQ ID NO: 13168 - protein, 85 aa, Homo sapiens
MTSSAEEPWKNQLSNSTQGLHKGQSSHSAGPNGERPLSSTGPSQHLQAAGSGIQNQNGHPTLPSNSVTQGAALNHLSSHTATSGG

SEQ ID NO: 13169 - protein, 85 aa, Homo sapiens
QQGITLTKESKPSGNILTVPETSRHTGETPNSTASVEGLPNHVHQMTADAVCSPSHGDSKSPGLLSSDNPQLSALLMGKANNNVG

SEQ ID NO: 13170 - protein, 85 aa, Homo sapiens
TGTCDKVNNIHPAVHTKTDNSVASSPSSAISTATPSPKSTEQTTTNSVTSLNSPHSGLHTINGEGMEESQSPMKTDLLLVNHKPS

SEQ ID NO: 13171 - protein, 85 aa, Homo sapiens
PQIIPSMSVSIYPSSAEVLKACRNLGKNGLSNSSILLDKCPPPRPPSSPYPPLPKDKLNPPTPSIYLENKRDAFFPPLHQFCTNP

SEQ ID NO: 13172 - protein, 85 aa, Homo sapiens
NNPVTVIRGLAGALKLDLGLFSTKTLVEANNEHMVEVRTQLLQPADENWDPTGTKKIWHCESNRSHTTIAKYAQYQASSFQESLR

SEQ ID NO: 13173 - protein, 85 aa, Homo sapiens
EENEKRSHHKDHSDSESTSSDNSGRRRKGPFKTIKFGTNIDLSDDKKWKLQLHELTKLPAFVRVVSAGNLLSHVGHTILGMNTVQ

SEQ ID NO: 13174 - protein, 85 aa, Homo sapiens
LYMKVPGSRTPGHQENNNFCSVNINIGPGDCEWFVVPEGYWGVLNDFCEKNNLNFLMGSWWPNLEDLYEANVPVYRFIQRPGDLV

SEQ ID NO: 13175 - protein, 85 aa, Homo sapiens
WINAGTVHWVQAIGWCNNIAWNVGPLTACQYKLAVERYEWNKLQSVKSIVPMVHLSWNMARNIKVLSSKNSEAMSDIEGSSHCCR

SEQ ID NO: 13176 - protein, 84 aa, Homo sapiens
IAWNVGPLTACQYKLAVERYEWNKLQSVKSIVPMVHLSWNMARNIKVLSSKNSEAMSDIEGSSHCCRKRDYMAWADKRRTSSLL

SEQ ID NO: 13177 - protein, 85 aa, Homo sapiens
QQAHSWCLTPQKLQMRPTGVAQVRSTGIPNGPTADSSLPTNSVSGQQPQLALTRVPSVSQPGVRPACPGQPLANGPFSAGHVPCS

SEQ ID NO: 13178 - protein, 85 aa, Homo sapiens
TSRTLGSTDTILIGNNHITGSGSNGNVPYLQRNALTLPHNRTNLTSSAEEPWKNQLSNSTQGLHKGQSSHSAGPNGERPLSSTGP

SEQ ID NO: 13179 - protein, 85 aa, Homo sapiens
SQHLQAAGSGIQNQNGHPTLPSNSVTQGAALNHLSSHTATSGGQQGITLTKESKPSGNILTVPETSRHTGETPNSTASVEGLPNH

SEQ ID NO: 13180 - protein, 85 aa, Homo sapiens
VHQMTADAVCSPSHGDSKSPGLLSSDNPQLSALLMGKANNNVGTGTCDKVNNIHPAVHTKTDNSVASSPSSAISTATPSPKSTEQ

SEQ ID NO: 13181 - protein, 85 aa, Homo sapiens
TTTNSVTSLNSPHSGLHTINGEGMEESQSPMKTDLLLVNHKPSPQIIPSMSVSIYPSSAEVLKACRNLGKNGLSNSSILLDKCPP

SEQ ID NO: 13182 - protein, 85 aa, Homo sapiens
PRPPSSPYPPLPKDKLNPPTPSIYLENKRDAFFPPLHQFCTNPNNPVTVIRGLAGALKLDLGLFSTKTLVEANNEHMVEVRTQLL

SEQ ID NO: 13183 - protein, 85 aa, Homo sapiens
QPADENWDPTGTKKIWHCESNRSHTTIAKYAQYQASSFQESLREENEKRSHHKDHSDSESTSSDNSGRRRKGPFKTIKFGTNIDL

SEQ ID NO: 13184 - protein, 85 aa, Homo sapiens
SDDKKWKLQLHELTKLPAFVRVVSAGNLLSHVGHTILGMNTVQLYMKVPGSRTPGHQENNNFCSVNINIGPGDCEWFVVPEGYWG

SEQ ID NO: 13185 - protein, 85 aa, Homo sapiens
VLNDFCEKNNLNFLMGSWWPNLEDLYEANVPVYRFIQRPGDLVWINAGTVHWVQAIGWCNNIAWNVGPLTACQYKLAVERYEWNK

SEQ ID NO: 13186 - protein, 85 aa, Homo sapiens
DSEGLEPKGLSPPYKKSKAKKPECSKDSSEDENGPEEKQSVEEMEEQSQDADGVNTVTVPGPASEEAVEDCKDEDFAKDENITKG

SEQ ID NO: 13187 - protein, 85 aa, Homo sapiens
GEVTDHSVRDQDHPDGQENDSTKNEIKIETESQSSYMETEELSSNQEDAVIVEQPEVIPLTEDQEEKEGEKAPGEDTPRMPGKSE

SEQ ID NO: 13188 - protein, 85 aa, Homo sapiens
HEVDRIIFCVFLEVDFKIYKKKMNEFFSVDDNNEEEEDVEMKEDSEGLEPKGLSPPYKKSKAKKPECSKDSSEDENGPEEKQSVE

SEQ ID NO: 13189 - protein, 85 aa, Homo sapiens
EMEEQSQDADGVNTVTVPGPASEEAVEDCKDEDFAKDENITKGGEVTDHSVRDQDHPDGQENDSTKNEIKIETESQSSYMETEEL

SEQ ID NO: 13190 - protein, 85 aa, Homo sapiens
LQEAGEEDTRLKASLLQLTRELEELKEIEADLERQEKEVDEDTTVTIPSAVYVAQLYHQVSKIEWDYECEPGMVKGIHHGPSVAQ

SEQ ID NO: 13191 - protein, 84 aa, Homo sapiens
IEADLERQEKEVDEDTTVTIPSAVYVAQLYHQVSKIEWDYECEPGMVKGIHHGPSVAQPIHLDSTQLSRKFISDYLWSLVDTEW

SEQ ID NO: 13192 - protein, 85 aa, Homo sapiens
MALVRDRRAHYVMSIVIRWVHCFSSSLRGTFGTRWEAMKAKATELRVCCARRKREAREFKPPQMRGSTRLNISDDLKIGFFSTDH

SEQ ID NO: 13193 - protein, 85 aa, Homo sapiens
ATQTDSSEILSVKELSSSTQKLAQMMKSLQVDFGFLKQLLQLKFEDRLKEESLSLFTILHDRILEIEKHYQQNEDKMRKSFNQQL

SEQ ID NO: 13194 - protein, 85 aa, Homo sapiens
TELRVCCARRKREAREFKPPQMRGSTRLNISDDLKIGFFSTDHATQTDSSEILSVKELSSSTQKLAQMMKSLQVDFGFLKQLLQL

SEQ ID NO: 13195 - protein, 85 aa, Homo sapiens
AEEQQQPPPQQPDAHQQLPPSAPNSGVALPALVPGLPGTEASALQHKIKNSICKTVQSKVDCILQEVEKFTDLEKLYLYLQLPSG

SEQ ID NO: 13196 - protein, 85 aa, Homo sapiens
LSNGEKSDQNAMSSSRAQQMHAFSWIRNTLEEHPETSLPKQEVYDEYKSYCDNLGYHPLSAADFGKIMKNVFPNMKARRLGTRGK

SEQ ID NO: 13197 - protein, 85 aa, Homo sapiens
SKYCYSGLRKKAFVHMPTLPNLDFHKTGDGLEGAEPSGQLQNIDEEVISSACRLVCEWAQKVLSQPFDTVLELARFLVKSHYIGT

SEQ ID NO: 13198 - protein, 85 aa, Homo sapiens
KSMAALTVMAAAPAGMKGITQPSAFIPTAESNSFQPQVKTLPSPIDAKQQLQRKIQKKQQEQKLQSPLPGESAAKKSESATSNGV

SEQ ID NO: 13199 - protein, 85 aa, Homo sapiens
TNLPNGNPSILSPQPIGIVVAAVPSPIPVQRTRQLVTSPSPMSSSDGKVLPLNVQVVTQHMQSVKQAPKTPQNVPASPGGDRSAR

SEQ ID NO: 13200 - protein, 85 aa, Homo sapiens
HRYPQILPKPANTSALTIRSPTTVLFTSSPIKTAVVPASHMSSLNVVKMTTISLTPSNSNTPLKHSASVSSATGTTEESRSVPQI

SEQ ID NO: 13201 - protein, 85 aa, Homo sapiens
KNGSVVSLQSPGSRSSSAGGTSAVEVKVEPETSSDEHPVQCQENSDEAKAPQTPSALLGQKSNTDGALQKPSNEGVIEIKATKVC

SEQ ID NO: 13202 - protein, 85 aa, Homo sapiens
DQRTKCKSRCNEMLPGTSTGNNQSTITLSVASQNLTFTSSSSPPNGDSINKDPKLCTKSPRKRLSSTLQETQVPPVKKPIVEQLS

SEQ ID NO: 13203 - protein, 85 aa, Homo sapiens
AATIEGQKQGSVKKDQKVPHSGKTEGSTAGAQIPSKVSVNVSSHIGANQPLNSSALVISDSALEQQTTPSSSPDIKVKLEGSVFL

SEQ ID NO: 13204 - protein, 85 aa, Homo sapiens
MDSDSKSVGSFNPNGWQQITKDSEFISASCEQQQDISVMTIPEHSDINDLEKSVWELEGMPQDTYSQQLHSQIQESSLNQIQAHS

SEQ ID NO: 13205 - protein, 85 aa, Homo sapiens
SDQLPLQSELKEFEPSVSQTNESYFPFDDELTQDSIVEELVLMEQQMSMNNSHSYGNCLGMTLQSQSVTPGAPMSSHTSSTHFYH

SEQ ID NO: 13206 - protein, 85 aa, Homo sapiens
PIHSNGTPIHTPTPTPTPTPTPTPTPTPTSEMIAGSQSLSRESPCSRLAQTTPVDSALGSSRHTPIGTPHSNCSSSVPPSPVECR

SEQ ID NO: 13207 - protein, 85 aa, Homo sapiens
NPFAFTPISSSMAYHDASIVSSSPVKPMQRPMATHPDKTKLEWMNNGYSGVGNSSVSGHGILPSYQELVEDRFRKPHAFAVPGQS

SEQ ID NO: 13208 - protein, 85 aa, Homo sapiens
YQSQSRHHDTHFGRLTPVSPVQHQGATVNNTNKQEGFAVPAPLDNKGTNSSASSNFRCRSVSPAVHRQRNLSGSTLYPVSNIPRS

SEQ ID NO: 13209 - protein, 85 aa, Homo sapiens
NVTPFGSPVTPEVHVFTNVHTDACANNIAQRSQSVPLTVMMQTAFPNALQKQANSKKITNVLLSKLDSDNDDAVRGLGMNNLPSN

SEQ ID NO: 13210 - protein, 85 aa, Homo sapiens
YTARMNLTQILEPSTVFPSANPQNMIDSSTSVYEFQTPSYLTKSNSTGQINFSPGDNQAQSEIGEQQLDFNSTVKDLLSGDSLQT

SEQ ID NO: 13211 - protein, 85 aa, Homo sapiens
NQQLVGQGASDLTNTASDFSSDIRLSSELSGSINDLNTLDPNLLFDPGRQQGQDDEATLEELKNDPLFQQICSESMNSMTSSGFE

SEQ ID NO: 13212 - protein, 85 aa, Homo sapiens
ALQHKIKNSICKTVQSKVDCILQEVEKFTDLEKLYLYLQLPSGLSNGEKSDQNAMSSSRAQQMHAFSWIRNTLEEHPETSLPKQE

SEQ ID NO: 13213 - protein, 85 aa, Homo sapiens
VYDEYKSYCDNLGYHPLSAADFGKIMKNVFPNMKARRLGTRGKSKYCYSGLRKKAFVHMPTLPNLDFHKTGDGLEGAEPSGQLQN

SEQ ID NO: 13214 - protein, 85 aa, Homo sapiens
IDEEVISSACRLVCEWAQKVLSQPFDTVLELARFLVKSHYIGTKSMAALTVMAAAPAGMKGITQPSAFIPTAESNSFQPQVKTLP

SEQ ID NO: 13215 - protein, 85 aa, Homo sapiens
SPIDAKQQLQRKIQKKQQEQKLQSPLPGESAAKKSESATSNGVTNLPNGNPSILSPQPIGIVVAAVPSPIPVQRTRQLVTSPSPM

SEQ ID NO: 13216 - protein, 85 aa, Homo sapiens
SSSDGKVLPLNVQVVTQHMQSVKQAPKTPQNVPASPGGDRSARHRYPQILPKPANTSALTIRSPTTVLFTSSPIKTAVVPASHMS

SEQ ID NO: 13217 - protein, 85 aa, Homo sapiens
SLNVVKMTTISLTPSNSNTPLKHSASVSSATGTTEESRSVPQIKNGSVVSLQSPGSRSSSAGGTSAVEVKVEPETSSDEHPVQCQ

SEQ ID NO: 13218 - protein, 85 aa, Homo sapiens
ENSDEAKAPQTPSALLGQKSNTDGALQKPSNEGVIEIKATKVCDQRTKCKSRCNEMLPGTSTGNNQSTITLSVASQNLTFTSSSS

SEQ ID NO: 13219 - protein, 85 aa, Homo sapiens
PPNGDSINKDPKLCTKSPRKRLSSTLQETQVPPVKKPIVEQLSAATIEGQKQGSVKKDQKVPHSGKTEGSTAGAQIPSKVSVNVS

SEQ ID NO: 13220 - protein, 85 aa, Homo sapiens
SHIGANQPLNSSALVISDSALEQQTTPSSSPDIKVKLEGSVFLLDSDSKSVGSFNPNGWQQITKDSEFISASCEQQQDISVMTIP

SEQ ID NO: 13221 - protein, 85 aa, Homo sapiens
EHSDINDLEKSVWELEGMPQDTYSQQLHSQIQESSLNQIQAHSSDQLPLQSELKEFEPSVSQTNESYFPFDDELTQDSIVEELVL

SEQ ID NO: 13222 - protein, 85 aa, Homo sapiens
MEQQMSMNNSHSYGNCLGMTLQSQSVTPGAPMSSHTSSTHFYHPIHSNGTPIHTPTPTPTPTPTPTPTPTPTSEMIAGSQSLSRE

SEQ ID NO: 13223 - protein, 85 aa, Homo sapiens
SPCSRLAQTTPVDSALGSSRHTPIGTPHSNCSSSVPPSPVECRNPFAFTPISSSMAYHDASIVSSSPVKPMQRPMATHPDKTKLE

SEQ ID NO: 13224 - protein, 85 aa, Homo sapiens
WMNNGYSGVGNSSVSGHGILPSYQELVEDRFRKPHAFAVPGQSYQSQSRHHDTHFGRLTPVSPVQHQGATVNNTNKQEGFAVPAP

SEQ ID NO: 13225 - protein, 85 aa, Homo sapiens
LDNKGTNSSASSNFRCRSVSPAVHRQRNLSGSTLYPVSNIPRSNVTPFGSPVTPEVHVFTNVHTDACANNIAQRSQSVPLTVMMQ

SEQ ID NO: 13226 - protein, 85 aa, Homo sapiens
TAFPNALQKQANSKKITNVLLSKLDSDNDDAVRGLGMNNLPSNYTARMNLTQILEPSTVFPSANPQNMIDSSTSVYEFQTPSYLT

SEQ ID NO: 13227 - protein, 85 aa, Homo sapiens
KSNSTGQINFSPGDNQAQSEIGEQQLDFNSTVKDLLSGDSLQTNQQLVGQGASDLTNTASDFSSDIRLSSELSGSINDLNTLDPN

SEQ ID NO: 13228 - protein, 85 aa, Homo sapiens
GLHKSQSSCLSGPNEEQPLFSTGSAQYHQATSTGIKKANEHLTLPSNSVPQGDADSHLSCHTATSGGQQGIMFTKESKPSKNRSL

SEQ ID NO: 13229 - protein, 85 aa, Homo sapiens
VPETSRHTGDTSNGCADVKGLSNHVHQLIADAVSSPNHGDSPNLLIADNPQLSALLIGKANGNVGTGTCDKVNNIHPAVHTKTDH

SEQ ID NO: 13230 - protein, 85 aa, Homo sapiens
SVASSPSSAISTATPSPKSTEQRSINSVTSLNSPHSGLHTVNGEGLGKSQSSTKVDLPLASHRSTSQILPSMSVSICPSSTEVLK

SEQ ID NO: 13231 - protein, 85 aa, Homo sapiens
ACRNPGKNGLSNSCILLDKCPPPRPPTSPYPPLPKDKLNPPTPSIYLENKRDAFFPPLHQFCTNPKNPVTVIRGLAGALKLDLGL

SEQ ID NO: 13232 - protein, 85 aa, Homo sapiens
FSTKTLVEANNEHMVEVRTQLLQPADENWDPTGTKKIWRCESNRSHTTIAKYAQYQASSFQESLREENEKRTQHKDHSDNESTSS

SEQ ID NO: 13233 - protein, 85 aa, Homo sapiens
ENSGRRRKGPFKTIKFGTNIDLSDNKKWKLQLHELTKLPAFARVVSAGNLLTHVGHTILGMNTVQLYMKVPGSRTPGHQENNNFC

SEQ ID NO: 13234 - protein, 85 aa, Homo sapiens
SVNINIGPGDCEWFVVPEDYWGVLNDFCEKNNLNFLMSSWWPNLEDLYEANVPVYRFIQRPGDLVWINAGTVHWVQAVGWCNNIA

SEQ ID NO: 13235 - protein, 85 aa, Homo sapiens
WNVGPLTACQYKLAVERYEWNKLKSVKSPVPMVHLSWNMARNIKVSDPKLFEMIKYCLLKILKQYQTLREALVAAGKEVIWHGRT

SEQ ID NO: 13236 - protein, 85 aa, Homo sapiens
KLQHLEQLRANRDNLNPAQKHQLEQLESQFVLMQQMRHKEVAQGLHKSQSSCLSGPNEEQPLFSTGSAQYHQATSTGIKKANEHL

SEQ ID NO: 13237 - protein, 85 aa, Homo sapiens
TLPSNSVPQGDADSHLSCHTATSGGQQGIMFTKESKPSKNRSLVPETSRHTGDTSNGCADVKGLSNHVHQLIADAVSSPNHGDSP

SEQ ID NO: 13238 - protein, 85 aa, Homo sapiens
NLLIADNPQLSALLIGKANGNVGTGTCDKVNNIHPAVHTKTDHSVASSPSSAISTATPSPKSTEQRSINSVTSLNSPHSGLHTVN

SEQ ID NO: 13239 - protein, 85 aa, Homo sapiens
GEGLGKSQSSTKVDLPLASHRSTSQILPSMSVSICPSSTEVLKACRNPGKNGLSNSCILLDKCPPPRPPTSPYPPLPKDKLNPPT

SEQ ID NO: 13240 - protein, 85 aa, Homo sapiens
PSIYLENKRDAFFPPLHQFCTNPKNPVTVIRGLAGALKLDLGLFSTKTLVEANNEHMVEVRTQLLQPADENWDPTGTKKIWRCES

SEQ ID NO: 13241 - protein, 85 aa, Homo sapiens
NRSHTTIAKYAQYQASSFQESLREENEKRTQHKDHSDNESTSSENSGRRRKGPFKTIKFGTNIDLSDNKKWKLQLHELTKLPAFA

SEQ ID NO: 13242 - protein, 85 aa, Homo sapiens
RVVSAGNLLTHVGHTILGMNTVQLYMKVPGSRTPGHQENNNFCSVNINIGPGDCEWFVVPEDYWGVLNDFCEKNNLNFLMSSWWP

SEQ ID NO: 13243 - protein, 85 aa, Homo sapiens
NLEDLYEANVPVYRFIQRPGDLVWINAGTVHWVQAVGWCNNIAWNVGPLTACQYKLAVERYEWNKLKSVKSPVPMVHLSWNMARN

SEQ ID NO: 13244 - protein, 85 aa, Homo sapiens
VLEGNPEVGSPRTSDLQHRGNKGSCVLSSPGEDAQPGEEPIKYGELISTPLVSKALSNRGQHSISYTLSRSHSVIVEYTHDSDTD

SEQ ID NO: 13245 - protein, 85 aa, Homo sapiens
MFQIGRSTENMIDFVVTDTSPGGGAAEGPSAQSTISRYACRILCDRRPPYTARIYAAGFDASSNIFLGERAAKWRTPDGLMDGLT

SEQ ID NO: 13246 - protein, 85 aa, Homo sapiens
TNGVLVMHPAGGFSEDSAPGVWREISVCGNVYTLRDSRSAQQRGKLVENESNVLQDGSLIDLCGATLLWRTPAGLLRAPTLKQLE

SEQ ID NO: 13247 - protein, 85 aa, Homo sapiens
AQRQEANAARPQCPVGLSTLAFPSPARGRTAPDKQQPWVYVRCGHVHGYHGWGCRRERGPQERECPLCRLVGPYVPLWLGQEAGL

SEQ ID NO: 13248 - protein, 85 aa, Homo sapiens
YGELISTPLVSKALSNRGQHSISYTLSRSHSVIVEYTHDSDTDMFQIGRSTENMIDFVVTDTSPGGGAAEGPSAQSTISRYACRI

SEQ ID NO: 13249 - protein, 85 aa, Homo sapiens
LCDRRPPYTARIYAAGFDASSNIFLGERAAKWRTPDGLMDGLTTNGVLVMHPAGGFSEDSAPGVWREISVCGNVYTLRDSRSAQQ

SEQ ID NO: 13250 - protein, 85 aa, Homo sapiens
RGKLVENESNVLQDGSLIDLCGATLLWRTPAGLLRAPTLKQLEAQRQEANAARPQCPVGLSTLAFPSPARGRTAPDKQQPWVYVR

SEQ ID NO: 13251 - protein, 85 aa, Homo sapiens
CGHVHGYHGWGCRRERGPQERECPLCRLVGPYVPLWLGQEAGLCLDPGPPSHAFAPCGHVCSEKTARYWAQTPLPHGTHAFHAAC

SEQ ID NO: 13252 - protein, 85 aa, Homo sapiens
GVSKDLNEQFKKHLTNSEPLDLDFSIQVLSSGSWPFQQSCTFALPSEASTFQMAILLQYNTEDAYTVQQLTDSTQIKMDILAQVL

SEQ ID NO: 13253 - protein, 85 aa, Homo sapiens
QILLKSKLLVLEDENANVDEVELKPDTLIKLYLGYKNKKLRVNINVPMKTEQKQEQETTHKNIEEDRKLLIQAAIVRIMKMRKVL

SEQ ID NO: 13254 - protein, 85 aa, Homo sapiens
ALPSEASTFQMAILLQYNTEDAYTVQQLTDSTQIKMDILAQVLQILLKSKLLVLEDENANVDEVELKPDTLIKLYLGYKNKKLRV

SEQ ID NO: 13255 - protein, 85 aa, Homo sapiens
NINVPMKTEQKQEQETTHKNIEEDRKLLIQAAIVRIMKMRKVLKHQQLLGEVLTQLSSRFKPRVPVIKKCIDILIEKEYLERVDG

SEQ ID NO: 13256 - protein, 85 aa, Homo sapiens
LQLICLVGTEIEGEGLQTVVPTPITASLSHNRIREILKASRKLQGDPDLPMSFTLAIVESDSTIVYYKLTDGFMLPDPQNISLRR

SEQ ID NO: 13257 - protein, 84 aa, Homo sapiens
QLICLVGTEIEGEGLQTVVPTPITASLSHNRIREILKASRKLQGDPDLPMSFTLAIVESDSTIVYYKLTDGFMLPDPQNISLRR

SEQ ID NO: 13258 - protein, 85 aa, Homo sapiens
QSVVQLIMTRDSDGYENSTDGEMCDKDALEEDSESVSEIGSDEESENEITSVGRASGDDDGSEDDEEEDEDEEEDEDEDSEDDDK

SEQ ID NO: 13259 - protein, 85 aa, Homo sapiens
SDSGPDLARGKGNIETSSEDEDDTADLFPEESGFEHAWRELDKDAPRADEITRRLAVCNMDWDRLKAKDLLALFNSFKPKGGVIF

SEQ ID NO: 13260 - protein, 85 aa, Homo sapiens
SVKIYPSEFGKERMKEEQVQGPVELLSIPEDAPEKDWTSREKLRDYQFKRLKYYYAVVDCDSPETASKIYEDCDGLEFESSCSFI

SEQ ID NO: 13261 - protein, 85 aa, Homo sapiens
DLRFIPDDITFDDEPKDVASEVNLTAYKPKYFTSAAMGTSTVEITWDETDHERITMLNRKFKKEELLDMDFQAYLASSSEDEEEI

SEQ ID NO: 13262 - protein, 85 aa, Homo sapiens
EEELQGDDGVNVEEDGKTKKSQKDDEEQIAKYRQLLQVIQEKEKKGKENDMEMEIKWVPGLKESAEEMVKNKLEGKDKLTPWEQF

SEQ ID NO: 13263 - protein, 84 aa, Homo sapiens
YRQLLQVIQEKEKKGKENDMEMEIKWVPGLKESAEEMVKNKLEGKDKLTPWEQFLEKKKEKKRLKRKQKALAEEASEEELPSLI

SEQ ID NO: 13264 - protein, 85 aa, Homo sapiens
EESENEITSVGRASGDDDGSEDDEEEDEDEEEDEDEDSEDDDKSDSGPDLARGKGNIETSSEDEDDTADLFPEESGFEHAWRELD

SEQ ID NO: 13265 - protein, 85 aa, Homo sapiens
KDAPRADEITRRLAVCNMDWDRLKAKDLLALFNSFKPKGGVIFSVKIYPSEFGKERMKEEQVQGPVELLSIPEDAPEKDWTSREK

SEQ ID NO: 13266 - protein, 85 aa, Homo sapiens
MRDYQFKRLKYYYAVVDCDSPETASKIYEDCDGLEFESSCSFIDLRFIPDDITFDDEPKDVASEVNLTAYKPKYFTSAAMGTSTV

SEQ ID NO: 13267 - protein, 85 aa, Homo sapiens
EITWDETDHERITMLNRKFKKEELLDMDFQAYLASSSEDEEEIEEELQGDDGVNVEEDGKTKKSQKDDEEQIAKYRQLLQVIQEK

SEQ ID NO: 13268 - protein, 85 aa, Homo sapiens
VSRMNQATVTSVLEYLSNWFGERDFTPELGRWLYALLACLEKPLLPEAHSLIRQLARRCSEVRLLVDSKDDERVPALNLLICLVS

SEQ ID NO: 13269 - protein, 84 aa, Homo sapiens
GERDFTPELGRWLYALLACLEKPLLPEAHSLIRQLARRCSEVRLLVDSKDDERVPALNLLICLVSSISRPHVVAQACNSSTSRD

SEQ ID NO: 13270 - protein, 85 aa, Homo sapiens
DEEGWKKFCLGEKLCADGAVGPATNESPGIDYVQIGFPPLLSIVSRMNQATVTSVLEYLSNWFGERDFTPELGRWLYALLACLEK

SEQ ID NO: 13271 - protein, 12 aa, Homo sapiens
TFQLAQWNISTG

SEQ ID NO: 13272 - protein, 84 aa, Homo sapiens
PPEAEVQALILLDEEVMALSPPSPPTATWGYTTACCVRGRHPPAWLCCNTCAHLPTAMPRPRGVCSCYRMAQPLRKDSQLFRAS

SEQ ID NO: 13273 - protein, 85 aa, Homo sapiens
RPSSDIPLDNSSTVNMEANVAQTEDGPPEAEVQALILLDEEVMALSPPSPPTATWGYTTACCVRGRHPPAWLCCNTCAHLPTAMP

SEQ ID NO: 13274 - protein, 85 aa, Homo sapiens
MSLVGWYHSHPHSPALPSLQDIDAQMDYQLRLQGSSNGFQPCLALLCSPYYSGNPGPESKISPFWVMPPPEQRPSDYGIPMDVEM

SEQ ID NO: 13275 - protein, 85 aa, Homo sapiens
LALLCSPYYSGNPGPESKISPFWVMPPPEQRPSDYGIPMDVEMAYVQDSFLTNDILHEMMLLVEFYKGSPDLVRLQEPWSQEHTY

SEQ ID NO: 13276 - protein, 84 aa, Homo sapiens
QELCHLWLKPEIHSKEQILELLVLEQFLTILPRETQTQMQKHHPQSIEEAVALVEHLQRESGQTWNGVRRKIPDMYSEIGCRWI

SEQ ID NO: 13277 - protein, 85 aa, Homo sapiens
DSLLKKSSKNPEEAELEDTLNQVQACGFEYTSKLQRMFQDIGVSKDLNEQFKKHLTNSEPLDLDFSIQVLSSGSWPFQQSCTFAL

SEQ ID NO: 13278 - protein, 85 aa, Homo sapiens
PSELERSYQRFTAFYASRHSGRKLTWLYQLSKGELVTNCFKNRYTLQASTFQMAILLQYNTEDAYTVQQLTDSTQIKMDILAQVL

SEQ ID NO: 13279 - protein, 85 aa, Homo sapiens
AFNNDAGFVAALDKACGRFINNNAVTKMAQSSSKSPELLARYCDSLLKKSSKNPEEAELEDTLNQVQACGFEYTSKLQRMFQDIG

SEQ ID NO: 13280 - protein, 85 aa, Homo sapiens
VSKDLNEQFKKHLTNSEPLDLDFSIQVLSSGSWPFQQSCTFALPSELERSYQRFTAFYASRHSGRKLTWLYQLSKGELVTNCFKN

SEQ ID NO: 13281 - protein, 85 aa, Homo sapiens
RYTLQASTFQMAILLQYNTEDAYTVQQLTDSTQIKMDILAQVLQILLKSKLLVLEDENANVDEVELKPDTLIKLYLGYKNKKLRV

SEQ ID NO: 13282 - protein, 85 aa, Homo sapiens
FEGPRRYRRPRTRFLSKQLTALRELLEKTMHPSLATMGKLASKLQLDLSVVKIWFKNQRAKWKRQQRQQMQTRPSLGPANQTTSV

SEQ ID NO: 13283 - protein, 85 aa, Homo sapiens
KKEETPSAITTANIRPVSPGISDANDHDLREPSGIKNPGGASASARVSSWDSQSYDIEQICLGASNPPWASTLFEIDEFVKIYDL

SEQ ID NO: 13284 - protein, 85 aa, Homo sapiens
KLQLDLSVVKIWFKNQRAKWKRQQRQQMQTRPSLGPANQTTSVKKEETPSAITTANIRPVSPGISDANDHDLREPSGIKNPGGAS

SEQ ID NO: 13285 - protein, 85 aa, Homo sapiens
ELYKRLKEFLKNYLTNLLKDGEDLMDESVLKFYTQQWEDYRFSSKVLNGICAYLNRHWVRRECDEGRKGIYEIYSVTNAVLKLIE

SEQ ID NO: 13286 - protein, 85 aa, Homo sapiens
KERNGETINTRLISGVVQSYVELGLNEDDAFAKGPTLTVYKESFESQFLADTERFYTRESTEFLQQNPVTEYMKKAEARLLEEQR

SEQ ID NO: 13287 - protein, 85 aa, Homo sapiens
RVQVYLHESTQDELARKCEQVLIEKHLEIFHTEFQNLLDADKNEDLGRMYNLVSRIQDGLGELKKLLETHIHNQGLAAIEKCGEA

SEQ ID NO: 13288 - protein, 85 aa, Homo sapiens
ALNDPKMYVQTVLDVHKKYNALVMSAFNNDAGFVAALDKACGRFINNNAVTKMAQSSSKSPELLARYCDSLLKKSSKNPEEAELE

SEQ ID NO: 13289 - protein, 85 aa, Homo sapiens
DTLNQVMVVFKYIEDKDVFQKFYAKMLAKRLVHQNSASDDAEASMISKLKQACGFEYTSKLQRMFQDIGVSKDLNEQFKKHLTNS

SEQ ID NO: 13290 - protein, 85 aa, Homo sapiens
EPLDLDFSIQVLSSGSWPFQQSCTFALPSELERSYQRFTAFYASRHSGRKLTWLYQLSKGELVTNCFKNRYTLQASTFQMAILLQ

SEQ ID NO: 13291 - protein, 85 aa, Homo sapiens
YNTEDAYTVQQLTDSTQIKMDILAQVLQILLKSKLLVLEDENANVDEVELKPDTLIKLYLGYKNKKLRVNINVPMKTEQKQEQET

SEQ ID NO: 13292 - protein, 85 aa, Homo sapiens
SSKVLNGICAYLNRHWVRRECDEGRKGIYEIYSVTNAVLKLIEKERNGETINTRLISGVVQSYVELGLNEDDAFAKGPTLTVYKE

SEQ ID NO: 13293 - protein, 85 aa, Homo sapiens
SFESQFLADTERFYTRESTEFLQQNPVTEYMKKAEARLLEEQRRVQVYLHESTQDELARKCEQVLIEKHLEIFHTEFQNLLDADK

SEQ ID NO: 13294 - protein, 85 aa, Homo sapiens
NEDLGRMYNLVSRIQDGLGELKKLLETHIHNQGLAAIEKCGEAALNDPKMYVQTVLDVHKKYNALVMSAFNNDAGFVAALDKACG

SEQ ID NO: 13295 - protein, 85 aa, Homo sapiens
RFINNNAVTKMAQSSSKSPELLARYCDSLLKKSSKNPEEAELEDTLNQVMVVFKYIEDKDVFQKFYAKMLAKRLVHQNSASDDAE

SEQ ID NO: 13296 - protein, 85 aa, Homo sapiens
ASMISKLKQACGFEYTSKLQRMFQDIGVSKDLNEQFKKHLTNSEPLDLDFSIQVLSSGSWPFQQSCTFALPSELERSYQRFTAFY

SEQ ID NO: 13297 - protein, 85 aa, Homo sapiens
ASRHSGRKLTWLYQLSKGELVTNCFKNRYTLQASTFQMAILLQYNTEDAYTVQQLTDSTQIKMDILAQVLQILLKSKLLVLEDEN

SEQ ID NO: 13298 - protein, 85 aa, Homo sapiens
ANVDEVELKPDTLIKLYLGYKNKKLRVNINVPMKTEQKQEQETTHKNIEEDRKLLIQAAIVRIMKMRKVLKHQQLLGEVLTQLSS

SEQ ID NO: 13299 - protein, 85 aa, Homo sapiens
DPSADTWDLSSPLISLWINRFYIYLGFAVSISLWICVQIVIEMQGFATVLAEAVTSLDLPVAIINLKEYDPDDHLIEEEEEPFES

SEQ ID NO: 13300 - protein, 85 aa, Homo sapiens
SSEEEFGGEDHQSLNSIVDVEDLGKIMDHVKKEKREKEQQEEKSGLFRNMGRNEDGERRAMITPALREALTKQVDAPRERSLLQT

SEQ ID NO: 13301 - protein, 85 aa, Homo sapiens
HILWNESHRCMETTPSLACANKCVFCWWHHNNPVGTEWLWKMDQPEMILKEAIENHQNMIKQFKGVPGVKAERFEEGMTVKHCAL

SEQ ID NO: 13302 - protein, 85 aa, Homo sapiens
SLVGEPIMYPEINRFLKLLHQCKISSFLVTNAQFPAEIRNLEPVTQLYVSVDASTKDSLKKIDRPLFKDFWQQFLDSLKALAVKQ

SEQ ID NO: 13303 - protein, 85 aa, Homo sapiens
QRTVYRLMLVKAWNVDELQAYAQLVSLGNPDFIEVKGVTYCRESSASSLTMAHVPWHEEVVQFVRELVDLIPEYEIACEHEHSNC

SEQ ID NO: 13304 - protein, 84 aa, Homo sapiens
SSLTMAHVPWHEEVVQFVRELVDLIPEYEIACEHEHSNCLLIAHRKTVLGGTPGHGVTEIQWEEWIKKRLISQARWLISVIPAH

SEQ ID NO: 13305 - protein, 85 aa, Homo sapiens
MQGFATVLAEAVTSLDLPVAIINLKEYDPDDHLIEEEEEPFESSSEEEFGGEDHQSLNSIVDVEDLGKIMDHVKKEKREKEQQEE

SEQ ID NO: 13306 - protein, 85 aa, Homo sapiens
KSGLFRNMGRNEDGERRAMITPALREALTKQVDAPRERSLLQTHILWNESHRCMETTPSLACANKCVFCWWHHNNPVGTEWLWKM

SEQ ID NO: 13307 - protein, 85 aa, Homo sapiens
DQPEMILKEAIENHQNMIKQFKGVPGVKAERFEEGMTVKHCALSLVGEPIMYPEINRFLKLLHQCKISSFLVTNAQFPAEIRNLE

SEQ ID NO: 13308 - protein, 85 aa, Homo sapiens
PVTQLYVSVDASTKDSLKKIDRPLFKDFWQQFLDSLKALAVKQQRTVYRLMLVKAWNVDELQAYAQLVSLGNPDFIEVKGVTYCR

SEQ ID NO: 13309 - protein, 85 aa, Homo sapiens
ESSASSLTMAHVPWHEEVVQFVRELVDLIPEYEIACEHEHSNCLLIAHRKTVLGGTPGHGVTEIQWEEWIKKRLISQARWLISVI

SEQ ID NO: 13310 - protein, 85 aa, Homo sapiens
ASREQEVLQGWKELLSACEDARLHVSSTADALRFHSQVRDLLSWMDGIASQIGAADKPRCPSSLLGLPASPWWPTPATPSPLTAP

SEQ ID NO: 13311 - protein, 85 aa, Homo sapiens
WICGEEALVMEKCDDEAVAEICTEMLRQFTGNPNIPKPRRILRSAWGSNPYFRGSYSYTQVGSSGADVEKLAKPLPYTESSKTAH

SEQ ID NO: 13312 - protein, 85 aa, Homo sapiens
RSAWGSNPYFRGSYSYTQVGSSGADVEKLAKPLPYTESSKTAHGSSTKQQPGHLFSSKCPEQPLDANRGAVKPMQVLFSGEATHR

SEQ ID NO: 13313 - protein, 84 aa, Homo sapiens
YAEKKAKKPALVAKSSILLDVKPWDDETDMAQLEACVRSIQLDGLVWGASKLVPVGYGIRKLQIQCVGGRQGGDRLAGGGDHQV

SEQ ID NO: 13314 - protein, 85 aa, Homo sapiens
PPTPCRPPGCTATCTSSLCLPPHSTPSCAPASPATPVSWSWKALGSVRSSAQEPSPIHSCSTTSHSFIGLAPGRFDYIGEGTPGP

SEQ ID NO: 13315 - protein, 85 aa, Homo sapiens
AREEAGADAFPEHRMNWATATSYSTSVQCWAPTSSWRQCWLIWDHAEPGWPHRNLPWAWQAQWPHWSWLQLGTYSLLLLSQPPCF

SEQ ID NO: 13316 - protein, 85 aa, Homo sapiens
GPPVHALCCRVAHWRGVPRPNNSEAPSLTLSWRGQRPGPSADEEPRFGPNQVGTHLSLEPTGAEERGHRREGREEEGCLGGLAEC

SEQ ID NO: 13317 - protein, 85 aa, Homo sapiens
ALGSVRSSAQEPSPIHSCSTTSHSFIGLAPGRFDYIGEGTPGPAREEAGADAFPEHRMNWATATSYSTSVQCWAPTSSWRQCWLI

SEQ ID NO: 13318 - protein, 85 aa, Homo sapiens
WDHAEPGWPHRNLPWAWQAQWPHWSWLQLGTYSLLLLSQPPCFGPPVHALCCRVAHWRGVPRPNNSEAPSLTLSWRGQRPGPSAD

SEQ ID NO: 13319 - protein, 85 aa, Homo sapiens
RIGMTRKFGYVDFESAEDLEKALELTGLKVFGNEIKLEKPKGKDSKKGESKTLVLSNLSYSATEETLQEVFEKATFIKVPQNQNG

SEQ ID NO: 13320 - protein, 85 aa, Homo sapiens
KSKGYAFIEFASFEDAKEALNSCNKREIEGRAIRLELQGPRGSPNARSQPSKTLFVKGLSEDTTEETLKESFDGSVRARIVTDRE

SEQ ID NO: 13321 - protein, 85 aa, Homo sapiens
TGSSKGFGFVDFNSEEDAKAAKEAMEDGEIDGNKVTLDWAKPKGEGGFGGRGGGRGGFGGRGGGRGGRGGFGGRGRGGFGGRGGF

SEQ ID NO: 13322 - protein, 85 aa, Homo sapiens
KDSKKGESKTLVLSNLSYSATEETLQEVFEKATFIKVPQNQNGKSKGYAFIEFASFEDAKEALNSCNKREIEGRAIRLELQGPRG

SEQ ID NO: 13323 - protein, 85 aa, Homo sapiens
SPNARSQPSKTLFVKGLSEDTTEETLKESFDGSVRARIVTDRETGSSKGFGFVDFNSEEDAKAAKEAMEDGEIDGNKVTLDWAKP

SEQ ID NO: 13324 - protein, 84 aa, Homo sapiens
MSSQLHLTPFTARGRFATVVEELFRDGVNWGRIVAFFEFGGVMCVESVNREMSPLVDNIALWMTEYLNRHLHTWIQDNGGWLYM

SEQ ID NO: 13325 - protein, 85 aa, Homo sapiens
MDGTLITTRSGKVFPTGPSDWRILYPEIPRKLRELEAEGYKVLVATHAGLYRKPVTGMWDHLQEQANDGTPISIGDSIFVGDAAG

SEQ ID NO: 13326 - protein, 85 aa, Homo sapiens
RPANWAPGRKKKDFSCADRLFALNLGLPFATPEEFFLKWPAAGFELPAFDPRTVSRSGPLCLPESRALLSASPEVVVAVGFPGAG

SEQ ID NO: 13327 - protein, 85 aa, Homo sapiens
KSTFLKKHLVSAGYVHVNRDTLGSWQRCVTTCETALKQGKRVAIDNTNPDAASRARYVQCARAAGVPCRCFLFTATLEQARHNNR

SEQ ID NO: 13328 - protein, 85 aa, Homo sapiens
EKRDAELPKKRMRKSNPGWENLEKLLVFTAAGVKPQGKVAGFDLDGTLITTRSGKVFPTGPSDWRILYPEIPRKLRELEAEGYKV

SEQ ID NO: 13329 - protein, 85 aa, Homo sapiens
MVATHAGLYRKPVTGMWDHLQEQANDGTPISIGDSIFVGDAAGRPANWAPGRKKKDFSCADRLFALNLGLPFATPEEFFLKWPAA

SEQ ID NO: 13330 - protein, 85 aa, Homo sapiens
GFELPAFDPRTVSRSGPLCLPESRALLSASPEVVVAVGFPGAGKSTFLKKHLVSAGYVHVNRDTLGSWQRCVTTCETALKQGKRV

SEQ ID NO: 13331 - protein, 85 aa, Homo sapiens
AIDNTNPDAASRARYVQCARAAGVPCRCFLFTATLEQARHNNRFREMTDSSHIPVSDMVMYGYRKQFEAPTLAEGFSAILEIPFR

SEQ ID NO: 13332 - protein, 84 aa, Homo sapiens
DVAVYFSQEEWRLLDDAQRLLYRNVMLENFTLLASLGLASSKTHEITQLESWEEPFMPAWEVVTSAILRVPNRQPQVAPEQGRE

SEQ ID NO: 13333 - protein, 85 aa, Homo sapiens
VHEGNQRWDNLQKRVTSILRRLKHFIGQREEFETARDSILVWLTEMDLQLTNIEHFSECDVQAKIKQLKAFQQEISLNHNKIEQI

SEQ ID NO: 13334 - protein, 85 aa, Homo sapiens
IAQGEQLIEKSEPLDAAIIEEELDELRRYCQEVFGRVERYHKKLIRLPLPDDEHDLSDRELELEDSAALSDLHWHDRSADSLLSP

SEQ ID NO: 13335 - protein, 85 aa, Homo sapiens
QPSSNLSLSLAQPLRSERSGRDTPASVDSIPLEWDHDYDLSRDLESAMSRALPSEDEEGQDDKDFYLRGAVGLSGDHSALESQIR

SEQ ID NO: 13336 - protein, 84 aa, Homo sapiens
CSLLEEWRGLLQDALMQCQGFHEMSHGLLLMLENIDRRKNEIVPIDSNLDAEILQDHHKQLMVRCVNSGSLQLFLAGLHFIYRK

SEQ ID NO: 13337 - protein, 85 aa, Homo sapiens
LTEMDLQLTNIEHFSECDVQAKIKQLKAFQQEISLNHNKIEQIIAQGEQLIEKSEPLDAAIIEEELDELRRYCQEVFGRVERYHK

SEQ ID NO: 13338 - protein, 85 aa, Homo sapiens
KLIRLPLPDDEHDLSDRELELEDSAALSDLHWHDRSADSLLSPQPSSNLSLSLAQPLRSERSGRDTPASVDSIPLEWDHDYDLSR

SEQ ID NO: 13339 - protein, 85 aa, Homo sapiens
DLESAMSRALPSEDEEGQDDKDFYLRGAVGLSGDHSALESQIRQLGKALDDSRFQIQQTENIIRSKTPTGPELDTSYKGYMKLLG

SEQ ID NO: 13340 - protein, 85 aa, Homo sapiens
ECSSSIDSVKRLEHKLKEEEESLPGFVNLHSTETQTAGVIDRWELLQAQALSKELRMKQNLQKWQQFNSDLNSIWAWLGDTEEEL

SEQ ID NO: 13341 - protein, 85 aa, Homo sapiens
EQLQRLELSTDIQTIELQIKKLKELQKAVDHRKAIILSINLCSPEFTQADSKESRDLQDRLSQMNGRWDRVCSLLEEWRGLLQDA

SEQ ID NO: 13342 - protein, 85 aa, Homo sapiens
DPNRGNQVQRPQMTFGRLQGIFPKIMPKKPAEEGNVSKEVPEASGPQNDGKQLCPPGKPTTSEKINMISGKRKQFRNNPTGFPGD

SEQ ID NO: 13343 - protein, 84 aa, Homo sapiens
EGNVSKEVPEASGPQNDGKQLCPPGKPTTSEKINMISGKRKQFRNNPTGFPGDVQVCGLGVWHGSQITLGPGWAEELAQLQMRC

SEQ ID NO: 13344 - protein, 85 aa, Homo sapiens
PSTVFPSANPQNMIDSSTSVYEFQTPSYLTKSNSTGQINFSPGDNQAQSEIGEQQLDFNSTVKDLLSGDSLQTNQQLCSCPSSLL

SEQ ID NO: 13345 - protein, 84 aa, Homo sapiens
SANPQNMIDSSTSVYEFQTPSYLTKSNSTGQINFSPGDNQAQSEIGEQQLDFNSTVKDLLSGDSLQTNQQLCSCPSSLLAGMQM

SEQ ID NO: 13346 - protein, 85 aa, Homo sapiens
VTEYMKKDPKMYVQTVLDVHKKYNALVMSAFNNDAGFVAALDKACGRFINNNAVTKMAQSSSKSPELLARYCDSLLKKSSKNPEE

SEQ ID NO: 13347 - protein, 85 aa, Homo sapiens
NEDDAFAKGPTLTVYKESFESQFLADTERFYTRESTEFLQQNPVTEYMKKDPKMYVQTVLDVHKKYNALVMSAFNNDAGFVAALD

SEQ ID NO: 13348 - protein, 85 aa, Homo sapiens
KACGRFINNNAVTKMAQSSSKSPELLARYCDSLLKKSSKNPEEAELEDTLNQVMVVFKYIEDKDVFQKFYAKMLAKRLVHQNSAS

SEQ ID NO: 13349 - protein, 85 aa, Homo sapiens
DDAEASMISKLKQACGFEYTSKLQRMFQDIGVSKDLNEQFKKHLTNSEPLDLDFSIQVLSSGSWPFQQSCTFALPSELERSYQRF

SEQ ID NO: 13350 - protein, 85 aa, Homo sapiens
TAFYASRHSGRKLTWLYQLSKGELVTNCFKNRYTLQASTFQMAILLQYNTEDAYTVQQLTDSTQIKMDILAQVLQILLKSKLLVL

SEQ ID NO: 13351 - protein, 85 aa, Homo sapiens
EDENANVDEVELKPDTLIKLYLGYKNKKLRVNINVPMKTEQKQEQETTHKNIEEDRKLLIQAAIVRIMKMRKVLKHQQLLGEVLT

SEQ ID NO: 13352 - protein, 85 aa, Homo sapiens
SPDQFLLTVSALQHARNSGEFAYPCRPQTEITDVWGPSISYPRKVLNFKGKSIQRAVDRLRLSNPPIDVKRTSIPLEIQKLQPNL

SEQ ID NO: 13353 - protein, 85 aa, Homo sapiens
KISLHSPRAQSTIPEPMIIRSRFSGSLKGGDQVTSSIERAVCSTGPLTSMQVIKPNRMLAPQVGTATLSLKKERPRIYTALDPFR

SEQ ID NO: 13354 - protein, 84 aa, Homo sapiens
RPRIYTALDPFRVNAEFVLLTVKEEKEHQEAKMKEYQARESTGVVDPGKASKAAWIRKIKGLPIDNFTKQGKTAAPELGQNVFI

SEQ ID NO: 13355 - protein, 85 aa, Homo sapiens
RKVLNFKGKSIQRAVDRLRLSNPPIDVKRTSIPLEIQKLQPNLKISLHSPRAQSTIPEPMIIRSRFSGSLKGGDQVTSSIERAVC

SEQ ID NO: 13356 - protein, 85 aa, Homo sapiens
STGPLTSMQVIKPNRMLAPQVGTATLSLKKERPRIYTALDPFRVNAEFVLLTVKEEKEHQEAKMKEYQARESTGVVDPGKASKAA

SEQ ID NO: 13357 - protein, 84 aa, Homo sapiens
QHFSYNHMMEKIKSYVNYVLSEKSSTFLMKAAAKVVESKRTRTITSQDKPSGNDVEMETEANLDTRKRIAVTDNTTCPEGRKSA

SEQ ID NO: 13358 - protein, 85 aa, Homo sapiens
MLMIISQKDTFHSFFQHFSYNHMMEKIKSYVNYVLSEKSSTFLMKAAAKVVESKRTRTITSQDKPSGNDVEMETEANLDTRKRIA

SEQ ID NO: 13359 - protein, 84 aa, Homo sapiens
TRRFSADAARFQIGKRKYDFDSSEVLQGLDFFGNKKSVPGVCGASQTHQKPQNGEKKEESLTERKREQSKKKRKTMTSDKLLAE

SEQ ID NO: 13360 - protein, 84 aa, Homo sapiens
FTAFYASRHSGRKLTWLYQLSKGELVTNCFKNRYTLQASTFQMAILLQYNTEDAYTVQQLTDSTQIKMDILAQVLQILLKSKLL

SEQ ID NO: 13361 - protein, 85 aa, Homo sapiens
TSLYMSELIQEQKTVNTVPIEMPSSGTPPLLNKSERLVGRNVVIVEQPFPRNQAFVVNQEFEQRISLTNEVNVAPSVINYILYLT

SEQ ID NO: 13362 - protein, 84 aa, Homo sapiens
YPANESSKLVSEKVDDYEHAAKYMKNSQVRLPLGTLSKSEWEATRLTVTIMREAWLSTVGPGRAPVAASSVKWGTPRPAMQFIL

SEQ ID NO: 13363 - protein, 85 aa, Homo sapiens
KYNMKLVYKKTFLEFYEEKIKNNENKMLLKRMQALEPYPANESSKLVSEKVDDYEHAAKYMKNSQVRLPLGTLSKSEWEATRLTV

SEQ ID NO: 13364 - protein, 85 aa, Homo sapiens
PPATTVSLRELADLSIGTPEVGAVNFTALHTLIVAMLKNLDLQNTRIDFQPSSPEPSRSLQSVRSSFSIPHLPAPKEVPKGAPRE

SEQ ID NO: 13365 - protein, 85 aa, Homo sapiens
KRRGVGQAPSSALESQVKDLGGQVEDLSKQLKRVDGQVQGIATHVQHFSQASGLDLAALEWPEEQEVGVRAFDRVRTGSIMKDAA

SEQ ID NO: 13366 - protein, 85 aa, Homo sapiens
EELSFARVLLQRVDELEKLFKDREQFLELVSRKLSLVPGAEEVTMVTWEELEQAITDGWRASQAGSETLMGFSKHGGFTSLTSPE

SEQ ID NO: 13367 - protein, 85 aa, Homo sapiens
GTLSGDSTKQPSIEQALDSASGLGPDRTASGSGGTAHPSDGVSSREQSKVPSGTGRQQQPRARDEAGVPRLHQSSTFQFKSDSDR

SEQ ID NO: 13368 - protein, 85 aa, Homo sapiens
HRSREKLTSTQPRRNARPGPVQQDLPLARDQPSSVPASQSQVHLRPDRRGLEPTGMNQPGLVPASTYPHGVVPLSMGQLGVPPPE

SEQ ID NO: 13369 - protein, 85 aa, Homo sapiens
MDDRELIPFVVDEQRMLPPSVPGRDQQGLELPSTDQHGLVSVSAYQHGMTFPGTDQRSMEPLGMDQRGCVISGMGQQGLVPPGID

SEQ ID NO: 13370 - protein, 85 aa, Homo sapiens
QQGLTLPVVDQHGLVLPFTDQHGLVSPGLMPISADQQGFVQPSLEATGFIQPGTEQHDLIQSGRFQRALVQRGAYQPGLVQPGAD

SEQ ID NO: 13371 - protein, 85 aa, Homo sapiens
QRGLVRPGMDQSGLAQPGADQRGLVWPGMDQSGLAQPGRDQHGLIQPGTGQHDLVQSGTGQGVLVQPGVDQPGMVQPGRFQRALV

SEQ ID NO: 13372 - protein, 85 aa, Homo sapiens
QPGAYQPGLVQPGADQIDVVQPGADQHGLVQSGADQSDLAQPGAVQHGLVQPGVDQRGLAQPRADHQRGLVPPGADQRGLVQPGA

SEQ ID NO: 13373 - protein, 85 aa, Homo sapiens
DQHGLVQPGVDQHGLAQPGEVQRSLVQPGIVQRGLVQPGAVQRGLVQPGAVQRGLVQPGVDQRGLVQPGAVQRGLVQPGAVQHGL

SEQ ID NO: 13374 - protein, 85 aa, Homo sapiens
VQPGADQRGLVQPGVDQRGLVQPGVDQRGLVQPGMDQRGLIQPGADQPGLVQPGAGQLGMVQPGIGQQGMVQPQADPHGLVQPGA

SEQ ID NO: 13375 - protein, 85 aa, Homo sapiens
YPLGLVQPGAYLHDLSQSGTYPRGLVQPGMDQYGLRQPGAYQPGLIAPGTKLRGSSTFQADSTGFISVRPYQHGMVPPGREQYGQ

SEQ ID NO: 13376 - protein, 85 aa, Homo sapiens
VSPLLASQGLASPGIDRRSLVPPETYQQGLMHPGTDQHSPIPLSTGLGSTHPDQQHVASPGPGEHDQVYPDAAQHGHAFSLFDSH

SEQ ID NO: 13377 - protein, 85 aa, Homo sapiens
DSMYPGYRGPGYLSADQHGQEGLDPNRTRASDRHGIPAQKAPGQDVTLFRSPDSVDRVLSEGSEVSSEVLSERRNSLRRMSSSFP

SEQ ID NO: 13378 - protein, 85 aa, Homo sapiens
TAVETFHLMGELSSLYVGLKESMKDLDEEQAGQTDLEKIQFLLAQMVKRTIPPELQEQLKTVKTLAKEVWQEKAKVERLQRILEG

SEQ ID NO: 13379 - protein, 85 aa, Homo sapiens
EGNQEAGKELKAGELRLQLGVLRVTVADIEKELAELRESQDRGKAAMENSVSEASLYLQDQLDKLRMIIESMLTSSSTLLSMSMA

SEQ ID NO: 13380 - protein, 85 aa, Homo sapiens
PHKAHTLAPGQIDPEATCPACSLDVSHQVSTLVRRYEQLQDMVNSLAVSRPSKKAKLQRQDEELLGRVQSAILQVQGDCEKLNIT

SEQ ID NO: 13381 - protein, 85 aa, Homo sapiens
TSNLIEDHRQKQKDIAMLYQGLEKLEKEKANREHLEMEIDVKADKSALATKVSRVQFDATTEQLNHMMQELVAKMSGQEQDWQKM

SEQ ID NO: 13382 - protein, 85 aa, Homo sapiens
MDRLLTEMDNKLDRLELDPVKQLLEDRWKSLRQQLRERPPLYQADEAAAMRRQLLAHFHCLSCDRPLETPVTGHAIPVTPAGPGL

SEQ ID NO: 13383 - protein, 85 aa, Homo sapiens
PGHHSIRPYTVFELEQVRQHSRNLKLGSAFPRGDLAQMEQSVGRLRSMHSKMLMNIEKVQIHFGGSTKASSQIIRELLHAQCLGS

SEQ ID NO: 13384 - protein, 85 aa, Homo sapiens
PCYKRVTDMADYTYSTVPRRCGGSHTLTYPYHRSRPQHLPRGLYPTEEIQIAMKHDEVDILGLDGHIYKGRMDTRLPGILRKDSS

SEQ ID NO: 13385 - protein, 85 aa, Homo sapiens
QNTRIDFQPSSPEPSRSLQSVRSSFSIPHLPAPKEVPKGAPREKRRGVGQAPSSALESQVKDLGGQVEDLSKQLKRVDGQVQGIA

SEQ ID NO: 13386 - protein, 85 aa, Homo sapiens
THVQHFSQASGLDLAALEWPEEQEVGVRAFDRVRTGSIMKDAAEELSFARVLLQRVDELEKLFKDREQFLELVSRKLSLVPGAEE

SEQ ID NO: 13387 - protein, 85 aa, Homo sapiens
VTMVTWEELEQAITDGWRASQAGSETLMGFSKHGGFTSLTSPEGTLSGDSTKQPSIEQALDSASGLGPDRTASGSGGTAHPSDGV

SEQ ID NO: 13388 - protein, 85 aa, Homo sapiens
SSREQSKVPSGTGRQQQPRARDEAGVPRLHQSSTFQFKSDSDRHRSREKLTSTQPRRNARPGPVQQDLPLARDQPSSVPASQSQV

SEQ ID NO: 13389 - protein, 85 aa, Homo sapiens
HLRPDRRGLEPTGMNQPGLVPASTYPHGVVPLSMGQLGVPPPEMDDRELIPFVVDEQRMLPPSVPGRDQQGLELPSTDQHGLVSV

SEQ ID NO: 13390 - protein, 85 aa, Homo sapiens
SAYQHGMTFPGTDQRSMEPLGMDQRGCVISGMGQQGLVPPGIDQQGLTLPVVDQHGLVLPFTDQHGLVSPGLMPISADQQGFVQP

SEQ ID NO: 13391 - protein, 85 aa, Homo sapiens
SLEATGFIQPGTEQHDLIQSGRFQRALVQRGAYQPGLVQPGADQRGLVRPGMDQSGLAQPGADQRGLVWPGMDQSGLAQPGRDQH

SEQ ID NO: 13392 - protein, 85 aa, Homo sapiens
GLIQPGTGQHDLVQSGTGQGVLVQPGVDQPGMVQPGRFQRALVQPGAYQPGLVQPGADQIDVVQPGADQHGLVQSGADQSDLAQP

SEQ ID NO: 13393 - protein, 85 aa, Homo sapiens
GAVQHGLVQPGVDQRGLAQPRADHQRGLVPPGADQRGLVQPGADQHGLVQPGVDQHGLAQPGEVQRSLVQPGIVQRGLVQPGAVQ

SEQ ID NO: 13394 - protein, 85 aa, Homo sapiens
RGLVQPGAVQRGLVQPGVDQRGLVQPGAVQRGLVQPGAVQHGLVQPGADQRGLVQPGVDQRGLVQPGVDQRGLVQPGMDQRGLIQ

SEQ ID NO: 13395 - protein, 85 aa, Homo sapiens
PGADQPGLVQPGAGQLGMVQPGIGQQGMVQPQADPHGLVQPGAYPLGLVQPGAYLHDLSQSGTYPRGLVQPGMDQYGLRQPGAYQ

SEQ ID NO: 13396 - protein, 85 aa, Homo sapiens
PGLIAPGTKLRGSSTFQADSTGFISVRPYQHGMVPPGREQYGQVSPLLASQGLASPGIDRRSLVPPETYQQGLMHPGTDQHSPIP

SEQ ID NO: 13397 - protein, 85 aa, Homo sapiens
MSTGLGSTHPDQQHVASPGPGEHDQVYPDAAQHGHAFSLFDSHDSMYPGYRGPGYLSADQHGQEGLDPNRTRASDRHGIPAQKAP

SEQ ID NO: 13398 - protein, 85 aa, Homo sapiens
GQDVTLFRSPDSVDRVLSEGSEVSSEVLSERRNSLRRMSSSFPTAVETFHLMGELSSLYVGLKESMKDLDEEQAGQTDLEKIQFL

SEQ ID NO: 13399 - protein, 85 aa, Homo sapiens
MAQMVKRTIPPELQEQLKTVKTLAKEVWQEKAKVERLQRILEGEGNQEAGKELKAGELRLQLGVLRVTVADIEKELAELRESQDR

SEQ ID NO: 13400 - protein, 85 aa, Homo sapiens
GKAAMENSVSEASLYLQDQLDKLRMIIESMLTSSSTLLSMSMAPHKAHTLAPGQIDPEATCPACSLDVSHQVSTLVRRYEQLQDM

SEQ ID NO: 13401 - protein, 85 aa, Homo sapiens
VNSLAVSRPSKKAKLQRQDEELLGRVQSAILQVQGDCEKLNITTSNLIEDHRQKQKDIAMLYQGLEKLEKEKANREHLEMEIDVK

SEQ ID NO: 13402 - protein, 85 aa, Homo sapiens
ADKSALATKVSRVQFDATTEQLNHMMQELVAKMSGQEQDWQKMLDRLLTEMDNKLDRLELDPVKQLLEDRWKSLRQQLRERPPLY

SEQ ID NO: 13403 - protein, 85 aa, Homo sapiens
QADEAAAMRRQLLAHFHCLSCDRPLETPVTGHAIPVTPAGPGLPGHHSIRPYTVFELEQVRQHSRNLKLGSAFPRGDLAQMEQSV

SEQ ID NO: 13404 - protein, 85 aa, Homo sapiens
GRLRSMHSKMLMNIEKVQIHFGGSTKASSQIIRELLHAQCLGSPCYKRVTDMADYTYSTVPRRCGGSHTLTYPYHRSRPQHLPRG

SEQ ID NO: 13405 - protein, 85 aa, Homo sapiens
MYPTEEIQIAMKHDEVDILGLDGHIYKGRMDTRLPGILRKDSSGTSKRKSQQPRPHVHRPPSLSSNGQLPSRPQSAQISAGNTSE

SEQ ID NO: 13406 - protein, 85 aa, Homo sapiens
RARIVTDRETGSSKGFGFVDFNSEEDAKAAKEAMEDGEIDGNKVTLDWAKPKGEGGFGGRGGGRGGFGGRGGFRGGRGGGGDHKP

SEQ ID NO: 13407 - protein, 84 aa, Homo sapiens
TGSSKGFGFVDFNSEEDAKAAKEAMEDGEIDGNKVTLDWAKPKGEGGFGGRGGGRGGFGGRGGFRGGRGGGGDHKPQGKKTKFE

SEQ ID NO: 13408 - protein, 5 aa, Homo sapiens
KIKCS

SEQ ID NO: 13409 - protein, 84 aa, Homo sapiens
WFVVPEGYWGVLNDFCEKNNLNFLMGSWWPNLEDLYEANVPVYRFIQRPGDLVWINAGTVHWVQAIGWCNNIAWNVGPLTGIVF

SEQ ID NO: 13410 - protein, 84 aa, Homo sapiens
AKFDTRRFSADAARFQIGKRKYDFDSSEVLQGLDFFGNKKSVPGVCGASQTHQKPQNGEKKEESLTERKREQSKKKRKTMTSGE

SEQ ID NO: 13411 - protein, 84 aa, Homo sapiens
IKVPQNQNGKSKGYAFIEFASFEDAKEALNSCNKREIEGRAIRLELQGPRGSPNARSLTFFFPSQSHPKLCLSKACLRIPLKRH

SEQ ID NO: 13412 - protein, 84 aa, Homo sapiens
HQLSLRTVSLGAGAKDELHIVEAEAMNYEGSPIKVTLATLKMSVQPTGGSLPKVEAKFINYVKNCFRMTDQEAIQDLWQWRKSL

SEQ ID NO: 13413 - protein, 84 aa, Homo sapiens
DVEEDEGLDDLENAEEEGQENVEILPSGERPQANQKRITTPYMTKYERARVLGTRALQIAMCAPVMVELEGETDPLLIAMKELK

SEQ ID NO: 13414 - protein, 85 aa, Homo sapiens
DPRTVSRSGPLCLPESRALLSASPEVVVAVGFPGAGKSTFLKKHLVSAGYVHVNRVRPVCPSRGRPLPLLPLHRHSGAGAPQQPV

SEQ ID NO: 13415 - protein, 84 aa, Homo sapiens
GFPGAGKSTFLKKHLVSAGYVHVNRVRPVCPSRGRPLPLLPLHRHSGAGAPQQPVSRDDGLLSYPRVRHGHVWLQEAVRGPNAG

SEQ ID NO: 13416 - protein, 85 aa, Homo sapiens
QSNKTFNLEKQNHTPRKHHQHHHQQQHHQQQQQQPPPPPIPANGQQASSQSVYMLDEGLTIDLKNFRKPGEKTFTQRSRLFVGNL

SEQ ID NO: 13417 - protein, 85 aa, Homo sapiens
PPDITEEEMRKLFEKYGKAGEVFIHKDKGFGFIRLETRTLAEIAKVELDNMPLRGKQLRVRFACHSASLTVRNLPQYVSNELLEE

SEQ ID NO: 13418 - protein, 85 aa, Homo sapiens
AFSVFGQVERAVVIVDDRGRPSGKGIVEFSGKPAARKALDRCSEGSFLLTTFPRPVTVEPMDQLDDEEGLPEKLVIKNQQFHKER

SEQ ID NO: 13419 - protein, 85 aa, Homo sapiens
EQPPRFAQPGSFEYEYAMRWKALIEMEKQQQDQVDRNIKEAREKLEMEMEAARHEHQVMLMRQDLMRRQEELRRMEELHNQEVQK

SEQ ID NO: 13420 - protein, 85 aa, Homo sapiens
RKQLELRQEEERRRREEEMRRQQEEMMRRQQEGFKGTFPDAREQEIRMGQMAMGGAMGINNRGAMPPAPVPAGTPAPPGPATMMP

SEQ ID NO: 13421 - protein, 85 aa, Homo sapiens
NGQQASSQSVYMLDEGLTIDLKNFRKPGEKTFTQRSRLFVGNLPPDITEEEMRKLFEKYGKAGEVFIHKDKGFGFIRLETRTLAE

SEQ ID NO: 13422 - protein, 85 aa, Homo sapiens
IAKVELDNMPLRGKQLRVRFACHSASLTVRNLPQYVSNELLEEAFSVFGQVERAVVIVDDRGRPSGKGIVEFSGKPAARKALDRC

SEQ ID NO: 13423 - protein, 85 aa, Homo sapiens
SEGSFLLTTFPRPVTVEPMDQLDDEEGLPEKLVIKNQQFHKEREQPPRFAQPGSFEYEYAMRWKALIEMEKQQQDQVDRNIKEAR

SEQ ID NO: 13424 - protein, 85 aa, Homo sapiens
EKLEMEMEAARHEHQVMLMRQDLMRRQEELRRMEELHNQEVQKRKQLELRQEEERRRREEEMRRQQEEMMRRQQEGFKGTFPDAR

SEQ ID NO: 13425 - protein, 85 aa, Homo sapiens
EQEIRMGQMAMGGAMGINNRGAMPPAPVPAGTPAPPGPATMMPDGTLGLTPPTTERFGQAATMEGIGAIGGTPPAFNRAAPGAEF

SEQ ID NO: 13426 - protein, 85 aa, Homo sapiens
SWLDPRLDPRFAMNQRISQSAPVKQPPPLAPQSPQGGVMGGSNSNQQQQMRLQQLQMEKERLRLKQQELLRQVRPQAMRNINPST

SEQ ID NO: 13427 - protein, 85 aa, Homo sapiens
ANSPKCQELALRSQLPTLEQDGGTQNPVSSPGMSQELRTMTTNSSDPFLNSGTYHSRDESTDSGLSMSSYSVPRTPDDFLNSVDE

SEQ ID NO: 13428 - protein, 85 aa, Homo sapiens
NSNQQQQMRLQQLQMEKERLRLKQQELLRQVRPQAMRNINPSTANSPKCQELALRSQLPTLEQDGGTQNPVSSPGMSQELRTMTT

SEQ ID NO: 13429 - protein, 85 aa, Homo sapiens
NSSDPFLNSGTYHSRDESTDSGLSMSSYSVPRTPDDFLNSVDEMDTGDTINQSTLPSQQNRFPDYLEAIPGTNVDLGTLEGDGMN

SEQ ID NO: 13430 - protein, 85 aa, Homo sapiens
EVPGPPVSSKPGETSVKWQLCYDTTAKMWWMDEFHPFIEALLPHVRAFAYTWFNLQARKRKYFKKHEKRMSKDEERAVKDELLGE

SEQ ID NO: 13431 - protein, 85 aa, Homo sapiens
KPEVKQKWASRLLAKLRKDIRPECREDFVLSITGKKAPGCVLSNPDQKGKMRRIDCLRQADKVWRLDLVMVILFKGIPLESTDGE

SEQ ID NO: 13432 - protein, 85 aa, Homo sapiens
RLVKAAQCGHPVLCVQPHHIGVAVKELDLYLAYFVRERDAEQSGSPRTGMGSDQEDSKPITLDTTDFQESFVTSGVFSVTELIQV

SEQ ID NO: 13433 - protein, 85 aa, Homo sapiens
SRTPVVTGTGPNFSLGELQGHLAYDLNPASTGLRRTLPSTSSSGSKRHKSGSMEEDVDTSPGGDYYTSPSSPTSSSRNWTEDMEG

SEQ ID NO: 13434 - protein, 85 aa, Homo sapiens
GISSPVKKTEMDKSPFNSPSPQDSPRLSSFTQHHRPVIAVHSGIARSPHPSSALHFPTTSILPQTASTYFPHTAIRYPPHLNPQD

SEQ ID NO: 13435 - protein, 85 aa, Homo sapiens
PLKDLVSLACDPASQQPGPLNGSGQLKMPSHCLSAQMLAPPPPGLPRLALPPATKPATTSEGGATSPTSPSYSPPDTSPANRSFV

SEQ ID NO: 13436 - protein, 85 aa, Homo sapiens
PHVRAFAYTWFNLQARKRKYFKKHEKRMSKDEERAVKDELLGEKPEVKQKWASRLLAKLRKDIRPECREDFVLSITGKKAPGCVL

SEQ ID NO: 13437 - protein, 85 aa, Homo sapiens
SNPDQKGKMRRIDCLRQADKVWRLDLVMVILFKGIPLESTDGERLVKAAQCGHPVLCVQPHHIGVAVKELDLYLAYFVRERDAEQ

SEQ ID NO: 13438 - protein, 85 aa, Homo sapiens
SGSPRTGMGSDQEDSKPITLDTTDFQESFVTSGVFSVTELIQVSRTPVVTGTGPNFSLGELQGHLAYDLNPASTGLRRTLPSTSS

SEQ ID NO: 13439 - protein, 85 aa, Homo sapiens
SGSKRHKSGSMEEDVDTSPGGDYYTSPSSPTSSSRNWTEDMEGGISSPVKKTEMDKSPFNSPSPQDSPRLSSFTQHHRPVIAVHS

SEQ ID NO: 13440 - protein, 85 aa, Homo sapiens
GIARSPHPSSALHFPTTSILPQTASTYFPHTAIRYPPHLNPQDPLKDLVSLACDPASQQPGPLNGSGQLKMPSHCLSAQMLAPPP

SEQ ID NO: 13441 - protein, 84 aa, Homo sapiens
NYLFGCELKADKDYHFKVDNDENEHQLSLRTVSLGAGAKDELHIVEAEAMNYEGSPIKVTLATLKMSVQPTVRALTYFGCCVKV

SEQ ID NO: 13442 - protein, 85 aa, Homo sapiens
DEDEFELQPQEPNSFFDGIVDDAGKIEHDGSTGVTIDAESEMDPCKVDSTCPEVIKVYIFKADPGEDDLGGTVDIVESEPENDHG

SEQ ID NO: 13443 - protein, 85 aa, Homo sapiens
VELLDQNSSIRVPREKMVYMTVNDSQQEDEDLNVAEIADEVYMEVIVGEEDAAVAAAAAAVHEQQIDEDEMKTFVPIAWAAAYGN

SEQ ID NO: 13444 - protein, 85 aa, Homo sapiens
NSDGIENRNGTASALLHIDESAGLGRLAKQKPKKKRRPDSRQYQTAIIIGPDGHPLTVYPCMICGKKFKSRGFLKRHMKNHPEHL

SEQ ID NO: 13445 - protein, 85 aa, Homo sapiens
AKKKYHCTDCDYTTNKKISLHNHLESHKLTSKAEKAIECDECGKHFSHAGALFTHKMVHKEKGANKMHKCKFCEYETAEQGLLNR

SEQ ID NO: 13446 - protein, 85 aa, Homo sapiens
HLLAVHSKNFPHICVECGKGFRHPSELRKHMRIHTGEKPYQCQYCEYRSADSSNLKTHIKTKHSKEMPFKCDICLLTFSDTKEVQ

SEQ ID NO: 13447 - protein, 85 aa, Homo sapiens
QHTLVHQESKTHQCLHCDHKSSNSSDLKRHVISVHTKDYPHKCEMCEKGFHRPSELKKHVAVHKGKKMHQCRHCDFKIADPFVLS

SEQ ID NO: 13448 - protein, 85 aa, Homo sapiens
RHILSVHTKDLPFRCKRCRKGFRQQNELKKHMKTHSGRKVYQCEYCEYSTTDASGFKRHVISIHTKDYPHRCEYCKKGFRRPSEK

SEQ ID NO: 13449 - protein, 85 aa, Homo sapiens
DPCKVDSTCPEVIKVYIFKADPGEDDLGGTVDIVESEPENDHGVELLDQNSSIRVPREKMVYMTVNDSQQEDEDLNVAEIADEVY

SEQ ID NO: 13450 - protein, 85 aa, Homo sapiens
MEVIVGEEDAAVAAAAAAVHEQQIDEDEMKTFVPIAWAAAYGNNSDGIENRNGTASALLHIDESAGLGRLAKQKPKKKRRPDSRQ

SEQ ID NO: 13451 - protein, 85 aa, Homo sapiens
YQTAIIIGPDGHPLTVYPCMICGKKFKSRGFLKRHMKNHPEHLAKKKYHCTDCDYTTNKKISLHNHLESHKLTSKAEKAIECDEC

SEQ ID NO: 13452 - protein, 85 aa, Homo sapiens
GKHFSHAGALFTHKMVHKEKGANKMHKCKFCEYETAEQGLLNRHLLAVHSKNFPHICVECGKGFRHPSELRKHMRIHTGEKPYQC

SEQ ID NO: 13453 - protein, 85 aa, Homo sapiens
QYCEYRSADSSNLKTHIKTKHSKEMPFKCDICLLTFSDTKEVQQHTLVHQESKTHQCLHCDHKSSNSSDLKRHVISVHTKDYPHK

SEQ ID NO: 13454 - protein, 85 aa, Homo sapiens
CEMCEKGFHRPSELKKHVAVHKGKKMHQCRHCDFKIADPFVLSRHILSVHTKDLPFRCKRCRKGFRQQNELKKHMKTHSGRKVYQ

SEQ ID NO: 13455 - protein, 35 aa, Homo sapiens
LFLLISLWPVAFKCGRRLVHSLFAFPDPSTVLCFY

SEQ ID NO: 13456 - protein, 84 aa, Homo sapiens
FALRLSRPQYSPLLLLKALLPLRALWEGREVNWEKCCKFRWKKKRRRRKMMMMRTRGQPHSLRLLSPREYQGFFPVLMDPTHCP

SEQ ID NO: 13457 - protein, 84 aa, Homo sapiens
METHRKRKRSGNSDSIERDAAQEAEAGTGLEPGSNSGQCSVPLKKGKDAPIKKESLGHWSQGLKISMQDPKMQPCTSSCDQPGF

SEQ ID NO: 13458 - protein, 85 aa, Homo sapiens
QEFEEEAKNPGLETHRKRKRSGNSDSIERDAAQEAEAGTGLEPGSNSGQCSVPLKKGKDAPIKKESLGHWSQGLKISMQDPKMQP

SEQ ID NO: 13459 - protein, 84 aa, Homo sapiens
SSFYCKGTHGIMSPLAKKKLLAQCPPPQTLPGLICLARTTSHNLCSAPLLPPQHQAVGQPMVLCTLWSRQGPTTGRYCCQGALN

SEQ ID NO: 13460 - protein, 85 aa, Homo sapiens
NSTEQQGLASGSSVSFVGASGCPEAYKRLLSSFYCKGTHGIMSPLAKKKLLAQCPPPQTLPGLICLARTTSHNLCSAPLLPPQHQ

SEQ ID NO: 13461 - protein, 85 aa, Homo sapiens
VSDSIKVQPLLISADNKVIIIQPQVQTQPESTAESRPPTEEPSQGAQATKKKKEDRPPTQENPEKIAFMVALGLVTTEHLEEIQS

SEQ ID NO: 13462 - protein, 85 aa, Homo sapiens
QPQALAEPAALASPLSSAGVAYAIISTSPSNAAAMAPSTAVSVVSDSIKVQPLLISADNKVIIIQPQVQTQPESTAESRPPTEEP

SEQ ID NO: 13463 - protein, 85 aa, Homo sapiens
SQGAQATKKKKEDRPPTQENPEKIAFMVALGLVTTEHLEEIQSKRQERKRRSTANPAYSGLLETERKRLASNYLNNPLFLTARAN

SEQ ID NO: 13464 - protein, 85 aa, Homo sapiens
EDPCWKNEITHDEHCAACKRGANLQPCGTCPGAYHLSCLEPPLKTAPKGVWVCPRCQQKALKKDEGVPWTGMLAIVHSYVTHKTV

SEQ ID NO: 13465 - protein, 85 aa, Homo sapiens
KEEEKQKLLQRGSELQNEHQQLEERDRRLASAVQKCLELKTSLLARQRGTQSSLDRLRALLRLIQGEQLLQVTMTTTSPAPLLAG

SEQ ID NO: 13466 - protein, 85 aa, Homo sapiens
DAAAGKKLSMLEGHTARVGALAWNAEQLSSGSRDRMILQRDIRTPPLQSERRLQGHRQEVCGLKWSTDHQLLASGGNDNKDNHCS

SEQ ID NO: 13467 - protein, 84 aa, Homo sapiens
AWNAEQLSSGSRDRMILQRDIRTPPLQSERRLQGHRQEVCGLKWSTDHQLLASGGNDNKDNHCSVSTRAPKCAIWPGPSTPTSW

SEQ ID NO: 13468 - protein, 84 aa, Homo sapiens
KVLNGICAYLNRHWVRRECDEGRKGIYEIYSLALVTWRDCLFRPLNKQVTNAVLKLIEKERNGETINTRLISGVVQSYGRGSSA

SEQ ID NO: 13469 - protein, 85 aa, Homo sapiens
SSKVLNGICAYLNRHWVRRECDEGRKGIYEIYSLALVTWRDCLFRPLNKQVTNAVLKLIEKERNGETINTRLISGVVQSYGRGSS

SEQ ID NO: 13470 - protein, 85 aa, Homo sapiens
EYREDFVLTVTGKKHPCCVLSNPDQKDSGQSGSPSHNDPAKNPPGYLEDSFVKSGVFNVSELVRVSRTPITQGTGVNFPIGEIPS

SEQ ID NO: 13471 - protein, 85 aa, Homo sapiens
GKKHPCCVLSNPDQKDSGQSGSPSHNDPAKNPPGYLEDSFVKSGVFNVSELVRVSRTPITQGTGVNFPIGEIPSQPYYHDMNSGV

SEQ ID NO: 13472 - protein, 85 aa, Homo sapiens
KHEKRMSKDEERAVKDELLSEKPEIKQKWASRLLAKLRKDIRQEYREDFVLTVTGKKHPCCVLSNPDQKDSGQSGSPSHNDPAKN

SEQ ID NO: 13473 - protein, 85 aa, Homo sapiens
SPSSDPEVQLAEGFDVFMPKSQLDSILSNYTRSGSLLFRKLVCAFFDDKTLANSLPNGKRKRGLNDNRKGLDQNIVGAIKGWSAS

SEQ ID NO: 13474 - protein, 7 aa, Homo sapiens
QRSSRRN

SEQ ID NO: 13475 - protein, 26 aa, Homo sapiens
MRMKKVRMTKISTSGELLAYQGTTVP

SEQ ID NO: 13476 - protein, 4 aa, Homo sapiens
WSTN

SEQ ID NO: 13477 - protein, 52 aa, Homo sapiens
SRPSSSRSKSSRSSRKLWTTAKPSSSPSISAALSSPRLTARRAGTCRIACRR

SEQ ID NO: 13478 - protein, 38 aa, Homo sapiens
MVCFLCWRTLTEGKMKLSLLILTLMQRYFRTITNSLCK

SEQ ID NO: 13479 - protein, 69 aa, Homo sapiens
LSPSGASGQDETPRLVWTPSPWSGITTMTSVGTWSLQCPELCPLRMKKVRMTKISTSGELLAYQGTTVP

SEQ ID NO: 13480 - protein, 19 aa, Homo sapiens
FRYSKPKISFAAKLPRGRS

SEQ ID NO: 13481 - protein, 13 aa, Homo sapiens
SRTSRSGSSLTQT

SEQ ID NO: 13482 - protein, 10 aa, Homo sapiens
AGTCRIACRR

SEQ ID NO: 13483 - protein, 7 aa, Homo sapiens
CWNPNSE

SEQ ID NO: 13484 - protein, 85 aa, Homo sapiens
PATSTPSTGLFSLATQTPATQTTGFTFGTATLASGGTGFSLGIGASKLNLSNTAATPAMANPSGFGLGSSNLTNAISSTVTSSQG

SEQ ID NO: 13485 - protein, 85 aa, Homo sapiens
LFQKKYDLNELCTWFMQTTETQSLSLVRKANARNPLEVINTRGIKLGTKYSDFNASPFRKHFKKFALSSPSKSAEKLHILHKVAN

SEQ ID NO: 13486 - protein, 85 aa, Homo sapiens
SPLLNVKSNLAIARLKRTEFKRLHHERWKREGKLHNHGTVDWNSKRRNLRFFCQNQFLNKTEGETNADIPLQGKSIVDNQCVLPP

SEQ ID NO: 13487 - protein, 85 aa, Homo sapiens
EIRGDLQQRVVMPDFKIHASFENKFKSEAKENGTNCSQKDFQKGPRLENVCPNSWRSKTLKDCRIFLRKLNCLEHRNTFKLNTII

SEQ ID NO: 13488 - protein, 85 aa, Homo sapiens
YSPESTDSGNTHQTHMEESKRFTLRSHSARQNSFKKQSKEIENANTNNPSADEFADHLGNSKLSKCVNFDKNPDSFEVLSNLNKR

SEQ ID NO: 13489 - protein, 84 aa, Homo sapiens
NANTNNPSADEFADHLGNSKLSKCVNFDKNPDSFEVLSNLNKRKRPPWKITEMSTKRHKRQSCNSGQMANYFSKSLASRPAFSI

SEQ ID NO: 13490 - protein, 85 aa, Homo sapiens
GIKLGTKYSDFNASPFRKHFKKFALSSPSKSAEKLHILHKVANSPLLNVKSNLAIARLKRTEFKRLHHERWKREGKLHNHGTVDW

SEQ ID NO: 13491 - protein, 85 aa, Homo sapiens
NSKRRNLRFFCQNQFLNKTEGETNADIPLQGKSIVDNQCVLPPEIRGDLQQRVVMPDFKIHASFENKFKSEAKENGTNCSQKDFQ

SEQ ID NO: 13492 - protein, 85 aa, Homo sapiens
KGPRLENVCPNSWRSKTLKDCRIFLRKLNCLEHRNTFKLNTIIYSPESTDSGNTHQTHMEESKRFTLRSHSARQNSFKKQSKEIE

SEQ ID NO: 13493 - protein, 85 aa, Homo sapiens
QDEEFWNTYEGLQEQLSRNTHKETEPVYERAVPTQQILAFPEQTNTKDWTVTPEHVLPESQSLLTFEEVAMYFSQEEWELLDPTQ

SEQ ID NO: 13494 - protein, 85 aa, Homo sapiens
KALYNDVMQENYETVISLALFVLPKPKVISCLEQGEEPWVQVSPEFKDSAGKSPTGLKLKNDTENHQPVSLSDLEIQASAGVISK

SEQ ID NO: 13495 - protein, 85 aa, Homo sapiens
KAKVKVPQKTAGKENHFDMHRVGKWHQDFPVKKRKKLSTWKQELLKLMDRHKKDCAREKPFKCQECGKTFRVSSDLIKHQRIHTE

SEQ ID NO: 13496 - protein, 85 aa, Homo sapiens
EKPYKCQQCDKRFRWSSDLNKHLTTHQGIKPYKCSWCGKSFSQNTNLHTHQRTHTGEKPFTCHECGKKFSQNSHLIKHRRTHTGE

SEQ ID NO: 13497 - protein, 85 aa, Homo sapiens
QTNTKDWTVTPEHVLPESQSLLTFEEVAMYFSQEEWELLDPTQKALYNDVMQENYETVISLALFVLPKPKVISCLEQGEEPWVQV

SEQ ID NO: 13498 - protein, 85 aa, Homo sapiens
SPEFKDSAGKSPTGLKLKNDTENHQPVSLSDLEIQASAGVISKKAKVKVPQKTAGKENHFDMHRVGKWHQDFPVKKRKKLSTWKQ

SEQ ID NO: 13499 - protein, 85 aa, Homo sapiens
ELLKLMDRHKKDCAREKPFKCQECGKTFRVSSDLIKHQRIHTEEKPYKCQQCDKRFRWSSDLNKHLTTHQGIKPYKCSWCGKSFS

SEQ ID NO: 13500 - protein, 85 aa, Homo sapiens
RLAHRLLVLLLMCFLGFGSYFCYDNPAALQTQVKRDMQVNTTKFMLLYAWYSWPNVVLCFFGGFLIDRVFGIRWGTIIFSCFVCI

SEQ ID NO: 13501 - protein, 85 aa, Homo sapiens
GQVVFALGGIFNAFWLMEFGRFVFGIGGESLAVAQNTYAVSWFKGKELNLVFGLQLSMARIGSTVNMNLMGWLYSKIEALLGSAG

SEQ ID NO: 13502 - protein, 85 aa, Homo sapiens
HTTLGITLMIGGITCILSLICALALAYLDQRAERILHKEQGKTGEVIKLTDVKDFSLPLWLIFIICVCYYVAVFPFIGLGKVFFT

SEQ ID NO: 13503 - protein, 85 aa, Homo sapiens
EKFGFSSQAASAINSVVYVISAPMSPVFGLLVDKTGKNIIWVLCAVAATLVSHMMLAFTMWNPWIAMCLLGLSYSLLACALWPMV

SEQ ID NO: 13504 - protein, 85 aa, Homo sapiens
AFVVPEHQLGTAYGFMQSIQNLGLAIISIIAGMILDSRGYLFLEVFFIACVSLSLLSVVLLYLVNRAQGGNLNYSARQREEIKFS

SEQ ID NO: 13505 - protein, 85 aa, Homo sapiens
PSPAGAMEEEDEEARALLAGGPDEADRGAPAAPGALPALCDPSRLAHRLLVLLLMCFLGFGSYFCYDNPAALQTQVKRDMQVNTT

SEQ ID NO: 13506 - protein, 85 aa, Homo sapiens
KFMLLYAWYSWPNVVLCFFGGFLIDRVFGIRWGTIIFSCFVCIGQVVFALGGIFNAFWLMEFGRFVFGIGGESLAVAQNTYAVSW

SEQ ID NO: 13507 - protein, 85 aa, Homo sapiens
FKGKELNLVFGLQLSMARIGSTVNMNLMGWLYSKIEALLGSAGHTTLGITLMIGGITCILSLICALALAYLDQRAERILHKEQGK

SEQ ID NO: 13508 - protein, 85 aa, Homo sapiens
TGEVIKLTDVKDFSLPLWLIFIICVCYYVAVFPFIGLGKVFFTEKFGFSSQAASAINSVVYVISAPMSPVFGLLVDKTGKNIIWV

SEQ ID NO: 13509 - protein, 85 aa, Homo sapiens
LCAVAATLVSHMMLAFTMWNPWIAMCLLGLSYSLLACALWPMVAFVVPEHQLGTAYGFMQSIQNLGLAIISIIAGMILDSRGYLF

SEQ ID NO: 13510 - protein, 84 aa, Homo sapiens
EEDTRLKASLLQLTRELEELKEIEADLERQEKEVDEDTTVTIPSAVYVAQLYHQVSKIEWDYECEPGMVKGRGMFECHGVPRLC

SEQ ID NO: 13511 - protein, 85 aa, Homo sapiens
NIALWMTEYLNRHLHTWIQDNGGWTETQDLFNSNACSPTPAALATTILLPASMNLTTLGTSHKWTHTCDWLVTLSMMSSRFIHVL

SEQ ID NO: 13512 - protein, 84 aa, Homo sapiens
MHTWIQDNGGWTETQDLFNSNACSPTPAALATTILLPASMNLTTLGTSHKWTHTCDWLVTLSMMSSRFIHVLACVTASFILKAE

SEQ ID NO: 13513 - protein, 85 aa, Homo sapiens
RFATVVEELFRDGVNWGRIVAFFEFGGVMCVESVNREMSPLVDNIALWMTEYLNRHLHTWIQDNGGWTETQDLFNSNACSPTPAA

SEQ ID NO: 13514 - protein, 85 aa, Homo sapiens
APRGRKRKAEAAVVAVAEKREKLANGGEGMEEATVVIEHCTSRVYGRNAAALSQALRLEAPELPVKVNPTKPRRGSFEVTLLRPD

SEQ ID NO: 13515 - protein, 84 aa, Homo sapiens
IEHCTSRVYGRNAAALSQALRLEAPELPVKVNPTKPRRGSFEVTLLRPDGSSAELWTGIKKGPPRKLKFPEPQEVVEELKKYLS

SEQ ID NO: 13516 - protein, 10 aa, Homo sapiens
INSVPRVMMG

SEQ ID NO: 13517 - protein, 5 aa, Homo sapiens
KVTSK

SEQ ID NO: 13518 - protein, 84 aa, Homo sapiens
NVARQNNDSDCGAFVLQYCKHLALSQPFSFTQQDMPKLRRQIYKELCHCKLTVGVWPCGLGGAVILPLPRAGSRKSVLGVVGGQ

SEQ ID NO: 13519 - protein, 13 aa, Homo sapiens
GDAPSPILTRSVP

SEQ ID NO: 13520 - protein, 85 aa, Homo sapiens
RIGMTRKFGYVDFESAEDLEKALELTGLKVFGNEIKLEKPKGKDSKKVTQDELKEVFEDAAEIRLVSKDGKSKGIAYIEFKTEAD

SEQ ID NO: 13521 - protein, 85 aa, Homo sapiens
AEKTFEEKQGTEIDGRSISLYYTGEKGQNQDYRGGKNSTWSGESKTLVLSNLSYSATEETLQEVFEKATFIKVPQNQNGKSKGYA

SEQ ID NO: 13522 - protein, 85 aa, Homo sapiens
FIEFASFEDAKEALNSCNKREIEGRAIRLELQGPRGSPNARSQPSKTLFVKGLSEDTTEETLKESFDGSVRARIVTDRETGSSKG

SEQ ID NO: 13523 - protein, 85 aa, Homo sapiens
FGFVDFNSEEDAKAAKEAMEDGEIDGNKVTLDWAKPKGEGGFGGRGGGRGGFGGRGGGRGGRGGFGGRGRGGFGGRGGFRGGRGG

SEQ ID NO: 13524 - protein, 85 aa, Homo sapiens
KDSKKVTQDELKEVFEDAAEIRLVSKDGKSKGIAYIEFKTEADAEKTFEEKQGTEIDGRSISLYYTGEKGQNQDYRGGKNSTWSG

SEQ ID NO: 13525 - protein, 85 aa, Homo sapiens
ESKTLVLSNLSYSATEETLQEVFEKATFIKVPQNQNGKSKGYAFIEFASFEDAKEALNSCNKREIEGRAIRLELQGPRGSPNARS

SEQ ID NO: 13526 - protein, 85 aa, Homo sapiens
QPSKTLFVKGLSEDTTEETLKESFDGSVRARIVTDRETGSSKGFGFVDFNSEEDAKAAKEAMEDGEIDGNKVTLDWAKPKGEGGF

SEQ ID NO: 13527 - protein, 84 aa, Homo sapiens
VLSNPDQKGKIRRIDCLRQADKVWRLDLVMVILFKGIPLESTDGERLMKSPHCTNPALCVQPHHITVSVKELDLFLAYYVQEQR

SEQ ID NO: 13528 - protein, 85 aa, Homo sapiens
GHRQRDHESRYQNHSSKSSGRSGRSSYKSKHRIHHSTSHRRSHGDEIVDTLGEGAFGKVVECIDHKAGGRHVAVKIVKNVDRYCE

SEQ ID NO: 13529 - protein, 85 aa, Homo sapiens
AARSEIQVLEHLNTTDPNSTFRCVQMLEWFEHHGHICIVFELLGLSTYDFIKENGFLPFRLDHIRKMAYQICKSVNFLHSNKLTH

SEQ ID NO: 13530 - protein, 85 aa, Homo sapiens
TDLKPENILFVQSDYTEAYNPKIKRDERTLINPDIKVVDFGSATYDDEHHSTLVSTRHYRAPEVILALGWSQPCDVWSIGCILIE

SEQ ID NO: 13531 - protein, 85 aa, Homo sapiens
YYLGFTVFPTHDSKEHLAMMERILGPLPKHMIQKTRKRKYFHHDRLDWDEHSSAGRYVSRRCKPLKEFMLSQDVEHERLFDLIQK

SEQ ID NO: 13532 - protein, 85 aa, Homo sapiens
HGDEIVDTLGEGAFGKVVECIDHKAGGRHVAVKIVKNVDRYCEAARSEIQVLEHLNTTDPNSTFRCVQMLEWFEHHGHICIVFEL

SEQ ID NO: 13533 - protein, 85 aa, Homo sapiens
MGLSTYDFIKENGFLPFRLDHIRKMAYQICKSVNFLHSNKLTHTDLKPENILFVQSDYTEAYNPKIKRDERTLINPDIKVVDFGS

SEQ ID NO: 13534 - protein, 85 aa, Homo sapiens
ATYDDEHHSTLVSTRHYRAPEVILALGWSQPCDVWSIGCILIEYYLGFTVFPTHDSKEHLAMMERILGPLPKHMIQKTRKRKYFH

SEQ ID NO: 13535 - protein, 85 aa, Homo sapiens
STVVSPSADGCLDYSLERARHRASEMPQAFLFDVIYEAYQQVTYKRDLYAAESIIKERISQEICVVMDTEEDNKHVGHLLEEVLK

SEQ ID NO: 13536 - protein, 85 aa, Homo sapiens
SELNHVKVTSEALGHAGRHLQQIILDQCYNFVCVNVTTSDFQETQKLLSMLEESSLCILYPVVVVSVHFLDFKLVPPSQKMENLM

SEQ ID NO: 13537 - protein, 85 aa, Homo sapiens
KLSKPEVVIIHDAVRPFVEEGVLLKVVTAAKEHGAAGAIRPLVSTVVSPSADGCLDYSLERARHRASEMPQAFLFDVIYEAYQQV

SEQ ID NO: 13538 - protein, 85 aa, Homo sapiens
TYKRDLYAAESIIKERISQEICVVMDTEEDNKHVGHLLEEVLKSELNHVKVTSEALGHAGRHLQQIILDQCYNFVCVNVTTSDFQ

SEQ ID NO: 13539 - protein, 85 aa, Homo sapiens
ETQKLLSMLEESSLCILYPVVVVSVHFLDFKLVPPSQKMENLMQIREFAKEVKERNILLYGLLISYPQDDQKLQESLRQGAIIIA

SEQ ID NO: 13540 - protein, 85 aa, Homo sapiens
DPSADTWDLSSPLISLWINRFYIYLGFAVSISLWICVQIVIEMQGFATVLAEAVTSLDLPVAIINLKEYDPDDHLIEEVGKNVDK

SEQ ID NO: 13541 - protein, 85 aa, Homo sapiens
WLWMLGVHRVMSRGEGDCDVVKSKHGSIEANFRAWKTKFISQLQALQKGERKKSCGGHCKKGKCESHQHGSEEREEGSQEQDELH

SEQ ID NO: 13542 - protein, 85 aa, Homo sapiens
HRDTKEEEPFESSSEEEFGGEDHQSLNSIVDVEDLGKIMDHVKKEKREKEQQEEKSGLFRNMGRNEDGERRAMITPALREALTKQ

SEQ ID NO: 13543 - protein, 85 aa, Homo sapiens
RRAMITPALREALTKQVDAPRERSLLQTHILWNESHRCMETTPSLACANKCVFCWWHHNNPVGTEWLWKMDQPEMILKEAIENHQ

SEQ ID NO: 13544 - protein, 85 aa, Homo sapiens
MQGFATVLAEAVTSLDLPVAIINLKEYDPDDHLIEEVGKNVDKWLWMLGVHRVMSRGEGDCDVVKSKHGSIEANFRAWKTKFISQ

SEQ ID NO: 13545 - protein, 85 aa, Homo sapiens
MQALQKGERKKSCGGHCKKGKCESHQHGSEEREEGSQEQDELHHRDTKEEEPFESSSEEEFGGEDHQSLNSIVDVEDLGKIMDHV

SEQ ID NO: 13546 - protein, 85 aa, Homo sapiens
KKEKREKEQQEEKSGLFRNMGRNEDGERRAMITPALREALTKQVDAPRERSLLQTHILWNESHRCMETTPSLACANKCVFCWWHH

SEQ ID NO: 13547 - protein, 15 aa, Homo sapiens
DQTGFWKTGEGFWCL

SEQ ID NO: 13548 - protein, 84 aa, Homo sapiens
SLPGEPEILPQAPANAHLKDLDEEIFDDDDFYHQLLRELIERKTSSLDPNDQVAMGRQWLAIQKLRSKIHKKVDRKASKGRKLR

SEQ ID NO: 13549 - protein, 11 aa, Homo sapiens
QALCLSSSWQT

SEQ ID NO: 13550 - protein, 85 aa, Homo sapiens
CEECGKAFNQSSILTTHRRIHTGEKFYKCEECGKAFKRSSHLTTHKIIHTGEKFYKCEECDKAFKHFSNLTTHKKIHTGKKPYRC

SEQ ID NO: 13551 - protein, 84 aa, Homo sapiens
ECGKAFKRSSHLTTHKIIHTGEKFYKCEECDKAFKHFSNLTTHKKIHTGKKPYRCEECGKAFKHSSKLTTHKRFHTGEKPYRCE

SEQ ID NO: 13552 - protein, 85 aa, Homo sapiens
LTTHKIIHTGEKPYKCEECGKAFKYSSNLTTHKKIHTGERPYKCEECGKAFNQSSILTTHRRIHTGEKFYKCEECGKAFKRSSHL

SEQ ID NO: 13553 - protein, 85 aa, Homo sapiens
MGGSNSNQQQQMRLQQLQMEKERLRLKQQELLRQVRPQELALRSQLPTLEQDGGTQNPVSSPGMSQELRTMTTNSSDPFLNSGTY

SEQ ID NO: 13554 - protein, 85 aa, Homo sapiens
APTSPPVQQNMMNSASAMNQRISQSAPVKQPPPLAPQSPQGGVMGGSNSNQQQQMRLQQLQMEKERLRLKQQELLRQVRPQELAL

SEQ ID NO: 13555 - protein, 85 aa, Homo sapiens
RSQLPTLEQDGGTQNPVSSPGMSQELRTMTTNSSDPFLNSGTYHSRDESTDSGLSMSSYSVPRTPDDFLNSVDEMDTGDTINQST

SEQ ID NO: 13556 - protein, 84 aa, Homo sapiens
SEGTVSLLRSHKNLFLSKLQHGTQQQDLNKKERRVGTPQSTKKKKESRRATESRIPVSKSQPVTPEKHRARKRQGSSVKRVFFT

SEQ ID NO: 13557 - protein, 85 aa, Homo sapiens
DKQSAVTESSEGTVSLLRSHKNLFLSKLQHGTQQQDLNKKERRVGTPQSTKKKKESRRATESRIPVSKSQPVTPEKHRARKRQGS

SEQ ID NO: 13558 - protein, 85 aa, Homo sapiens
TQENRNGSIGPSIVCKSIQMNQAENSLQEEQEGPLDLTVNRMQEQNTQQGDGVLDLSTKKTSIKSEESSICDPSSENSVAGLQTC

SEQ ID NO: 13559 - protein, 84 aa, Homo sapiens
PSIVCKSIQMNQAENSLQEEQEGPLDLTVNRMQEQNTQQGDGVLDLSTKKTSIKSEESSICDPSSENSVAGLQTCFLYLSPWII

SEQ ID NO: 13560 - protein, 85 aa, Homo sapiens
ASQSQGIQQLLQAEKRAAEKVSEARKRKNRRLKQAKEEAQAEIEQYRLQREKEFKAKEAANIYICKNRCDTLVNPLLNLRTKTLT

SEQ ID NO: 13561 - protein, 84 aa, Homo sapiens
EKRAAEKVSEARKRKNRRLKQAKEEAQAEIEQYRLQREKEFKAKEAANIYICKNRCDTLVNPLLNLRTKTLTNNGIGIPWQLQH

SEQ ID NO: 13562 - protein, 85 aa, Homo sapiens
MSFPNLNQVLENYSDAPMTPKQILQVIEAEGLKEMRSGTSPLACLNAMLHSNSRGGEGLFYKLPGRISLFTLKKDALQWSRHPAT

SEQ ID NO: 13563 - protein, 85 aa, Homo sapiens
VEGEEPEDTADVESCGSNEASTVSGENDVSLDETSSNASCSTESQSRPLSNPRDSYRASSQANKQKKKTGVMLPRVVLTPLKVNG

SEQ ID NO: 13564 - protein, 85 aa, Homo sapiens
AHVESASGQMKRNRGEEIDFETPGSILVNTNLRALINSRTFHALPSHFQQQLLFLLPEVDRQVGTDGLLRLSSSALNNEFFTHAA

SEQ ID NO: 13565 - protein, 85 aa, Homo sapiens
QSWRERLADGEFTHEMQVRIRQEMEKEKKVEQWKEKFFEDYYGQKLGLTKEESLQQNVGQEEAEIKSGLCVPGESVRIQRGPATR

SEQ ID NO: 13566 - protein, 85 aa, Homo sapiens
QRDGHFKKRSRPDLRTRARRNLYKKQESEQAGVAKDAKSVASDVPLYKDGEAKTDPAGLSSPHLPGTSSAAPDLEGPEFPVESVA

SEQ ID NO: 13567 - protein, 85 aa, Homo sapiens
SRIQAEPDNLARASASPDRIPSLPQETVDQEPKDQKRKSFEQAASASFPEKKPRLEDRQSFRNTIESVHTEKPQPTKEEPKVPPI

SEQ ID NO: 13568 - protein, 85 aa, Homo sapiens
RIQLSRIKPPWVVKGQPTYQICPRIIPTTESSCRGWTGARTLADIKARALQVRGARGHHCHREAATTAIGGGGGPGGGGGGATDE

SEQ ID NO: 13569 - protein, 85 aa, Homo sapiens
GGGRGSSSGDGGEACGHPEPRGGPSTPGKCTSDLQRTQLLPPYPLNGEHTQAGTAMSRARREDLPSLRKEESCLLQRATVGLTDG

SEQ ID NO: 13570 - protein, 85 aa, Homo sapiens
LGDASQLPVAPTGDQPCQALPLLSSQTSVAERLVEQPQLHPDVRTECESGTTSWESDDEEQGPTVPADNGPIPSLVGDDTLEKGT

SEQ ID NO: 13571 - protein, 85 aa, Homo sapiens
GQALDSHPTMKDPVNVTPSSTPESSPTDCLQNRAFDDELGLGGSCPPMRESDTRQENLKTKALVSNSSLHWIPIPSNDEVVKQPK

SEQ ID NO: 13572 - protein, 85 aa, Homo sapiens
PESREHIPSVEPQVGEEWEKAAPTPPALPGDLTAEEGLDPLDSLTSLWTVPSRGGSDSNGSYCQQVDIEKLKINGDSEALSPHGE

SEQ ID NO: 13573 - protein, 85 aa, Homo sapiens
STDTASDFEGHLTEDSSEADTREAAVTKGSSVDKDEKPNWNQSAPLSKVNGDMRLVTRTDGMVAPQSWVSRVCAVRQKIPDSLLL

SEQ ID NO: 13574 - protein, 85 aa, Homo sapiens
ASTEYQPRAVCLSMPGSSVEATNPLVMQLLQGSLPLEKVLPPAHDDSMSESPQVPLTKDQSHGSLRMGSLHGLGKNSGMVDGSSP

SEQ ID NO: 13575 - protein, 85 aa, Homo sapiens
SSLRALKEPLLPDSCETGTGLARIEATQAPGAPQKNCKAVPSFDSLHPVTNPITSSRKLEEMDSKEQFSSFSCEDQKEVRAMSQD

SEQ ID NO: 13576 - protein, 85 aa, Homo sapiens
SNSNAAPGKSPGDLTTSRTPRFSSPNVISFGPEQTGRALGDQSNVTGQGKKLFGSGNVAATLQRPRPADPMPLPAEIPPVFPSGK

SEQ ID NO: 13577 - protein, 85 aa, Homo sapiens
MGPSTNSMSGGVQTPREDWAPKPHAFVGSVKNEKTFVGGPLKANAENRKATGHSPLELVGHLEGMPFVMDLPFWKLPREPGKGLS

SEQ ID NO: 13578 - protein, 85 aa, Homo sapiens
EPLEPSSLPSQLSIKQAFYGKLSKLQLSSTSFNYSSSSPTFPKGLAGSVVQLSHKANFGASHSASLSLQMFTDSSTVESISLQCA

SEQ ID NO: 13579 - protein, 85 aa, Homo sapiens
ACLNAMLHSNSRGGEGLFYKLPGRISLFTLKKDALQWSRHPATVEGEEPEDTADVESCGSNEASTVSGENDVSLDETSSNASCST

SEQ ID NO: 13580 - protein, 85 aa, Homo sapiens
ESQSRPLSNPRDSYRASSQANKQKKKTGVMLPRVVLTPLKVNGAHVESASGQMKRNRGEEIDFETPGSILVNTNLRALINSRTFH

SEQ ID NO: 13581 - protein, 85 aa, Homo sapiens
ALPSHFQQQLLFLLPEVDRQVGTDGLLRLSSSALNNEFFTHAAQSWRERLADGEFTHEMQVRIRQEMEKEKKVEQWKEKFFEDYY

SEQ ID NO: 13582 - protein, 85 aa, Homo sapiens
GQKLGLTKEESLQQNVGQEEAEIKSGLCVPGESVRIQRGPATRQRDGHFKKRSRPDLRTRARRNLYKKQESEQAGVAKDAKSVAS

SEQ ID NO: 13583 - protein, 85 aa, Homo sapiens
DVPLYKDGEAKTDPAGLSSPHLPGTSSAAPDLEGPEFPVESVASRIQAEPDNLARASASPDRIPSLPQETVDQEPKDQKRKSFEQ

SEQ ID NO: 13584 - protein, 85 aa, Homo sapiens
AASASFPEKKPRLEDRQSFRNTIESVHTEKPQPTKEEPKVPPIRIQLSRIKPPWVVKGQPTYQICPRIIPTTESSCRGWTGARTL

SEQ ID NO: 13585 - protein, 85 aa, Homo sapiens
ADIKARALQVRGARGHHCHREAATTAIGGGGGPGGGGGGATDEGGGRGSSSGDGGEACGHPEPRGGPSTPGKCTSDLQRTQLLPP

SEQ ID NO: 13586 - protein, 85 aa, Homo sapiens
YPLNGEHTQAGTAMSRARREDLPSLRKEESCLLQRATVGLTDGLGDASQLPVAPTGDQPCQALPLLSSQTSVAERLVEQPQLHPD

SEQ ID NO: 13587 - protein, 85 aa, Homo sapiens
VRTECESGTTSWESDDEEQGPTVPADNGPIPSLVGDDTLEKGTGQALDSHPTMKDPVNVTPSSTPESSPTDCLQNRAFDDELGLG

SEQ ID NO: 13588 - protein, 85 aa, Homo sapiens
GSCPPMRESDTRQENLKTKALVSNSSLHWIPIPSNDEVVKQPKPESREHIPSVEPQVGEEWEKAAPTPPALPGDLTAEEGLDPLD

SEQ ID NO: 13589 - protein, 85 aa, Homo sapiens
SLTSLWTVPSRGGSDSNGSYCQQVDIEKLKINGDSEALSPHGESTDTASDFEGHLTEDSSEADTREAAVTKGSSVDKDEKPNWNQ

SEQ ID NO: 13590 - protein, 85 aa, Homo sapiens
SAPLSKVNGDMRLVTRTDGMVAPQSWVSRVCAVRQKIPDSLLLASTEYQPRAVCLSMPGSSVEATNPLVMQLLQGSLPLEKVLPP

SEQ ID NO: 13591 - protein, 85 aa, Homo sapiens
AHDDSMSESPQVPLTKDQSHGSLRMGSLHGLGKNSGMVDGSSPSSLRALKEPLLPDSCETGTGLARIEATQAPGAPQKNCKAVPS

SEQ ID NO: 13592 - protein, 85 aa, Homo sapiens
FDSLHPVTNPITSSRKLEEMDSKEQFSSFSCEDQKEVRAMSQDSNSNAAPGKSPGDLTTSRTPRFSSPNVISFGPEQTGRALGDQ

SEQ ID NO: 13593 - protein, 85 aa, Homo sapiens
SNVTGQGKKLFGSGNVAATLQRPRPADPMPLPAEIPPVFPSGKLGPSTNSMSGGVQTPREDWAPKPHAFVGSVKNEKTFVGGPLK

SEQ ID NO: 13594 - protein, 85 aa, Homo sapiens
ANAENRKATGHSPLELVGHLEGMPFVMDLPFWKLPREPGKGLSEPLEPSSLPSQLSIKQAFYGKLSKLQLSSTSFNYSSSSPTFP

SEQ ID NO: 13595 - protein, 85 aa, Homo sapiens
SCSSEDNLSLVCLPRSEDDDCDDDDDDAQILPSPVQACSEDSLFLRCSLRHKDEEEEDDDDIHITARIESDLTLESLSDEEIHPG

SEQ ID NO: 13596 - protein, 85 aa, Homo sapiens
DFVLTVTGKKHPCCVLSNPDQKDSGQSGSPSHNDPAKNPPGYLEDSFVKSGVFNVSELVRVSRTPITQGTGVNFPIGEIPSQPYY

SEQ ID NO: 13597 - protein, 85 aa, Homo sapiens
HDMNSGVNLQRSLSSPPSSKRPKTISIDENMEPSPTGDFYPSPSSPAAGSRTWHERDQDMSSPTTMKKPEKPLFSSASPQDSSPR

SEQ ID NO: 13598 - protein, 85 aa, Homo sapiens
MSTFPQHHHPGIPGVAHSVISTRTPPPPSPLPFPTQAILPPAPSSYFSHPTIRYPPHLNPQDTLKNYVPSYDPSSPQTSQPNGSG

SEQ ID NO: 13599 - protein, 84 aa, Homo sapiens
GQVVGKVPGHFTPVLAPSPHPSAVRPVTLSMTDTKPITTSTEGEAASPTATTYTASGTSQANRYVGLSPRDPSFLHQQQSWYLG

SEQ ID NO: 13600 - protein, 85 aa, Homo sapiens
RMSKDEERAVKDELLSEKPEIKQKWASRLLAKLRKDIRQEYREDFVLTVTGKKHPCCVLSNPDQKDSGQSGSPSHNDPAKNPPGY

SEQ ID NO: 13601 - protein, 85 aa, Homo sapiens
LEDSFVKSGVFNVSELVRVSRTPITQGTGVNFPIGEIPSQPYYHDMNSGVNLQRSLSSPPSSKRPKTISIDENMEPSPTGDFYPS

SEQ ID NO: 13602 - protein, 85 aa, Homo sapiens
PSSPAAGSRTWHERDQDMSSPTTMKKPEKPLFSSASPQDSSPRLSTFPQHHHPGIPGVAHSVISTRTPPPPSPLPFPTQAILPPA

SEQ ID NO: 13603 - protein, 85 aa, Homo sapiens
PSSYFSHPTIRYPPHLNPQDTLKNYVPSYDPSSPQTSQPNGSGQVVGKVPGHFTPVLAPSPHPSAVRPVTLSMTDTKPITTSTEG

SEQ ID NO: 13604 - protein, 84 aa, Homo sapiens
AGIQQVYTRQSMAKSRYMELYTHVYNYCTSVHQSNQARGAGVPPSKSKKGQTPGGAQFVGLELYKRLKEFLKNYLTNLLKLTCF

SEQ ID NO: 13605 - protein, 84 aa, Homo sapiens
TEEQMAETERNDEEQFECQELLECQVQVGAPEEEEEEEEDAGLVAEAEAVAAGWMLDFLCLSLCRAFRDGRSEDFRRTRNSAED

SEQ ID NO: 13606 - protein, 85 aa, Homo sapiens
DYAYLEALSTVATFKVAEMRYTFRSSTQDKVRSLEALLDDKNPAKQAGVRESYLGKQRYMIQAVRNWRGTLLLEPAGSSKVSGSE

SEQ ID NO: 13607 - protein, 85 aa, Homo sapiens
GTYWLQHPLSKSLPAINNIGYRTPQLDQITEALGAIDSDSTKEEILCSSTTHSRFPMEKWADQDSCNGAKNQDNATASPMATDMD

SEQ ID NO: 13608 - protein, 85 aa, Homo sapiens
GKCSSPPAVGYSIVGTASRCDARHLLPSKIAVIFALPDKKGAVGEQGPCRDVGIQGATHRLPAQVGLHKSSILTDRPPPLVDLVG

SEQ ID NO: 13609 - protein, 71 aa, Homo sapiens
RLSPVLCFVATPPEACEQKSSINQSLKGAQPQAEFGQKCTLPEKCSESSSFLEPSGNHEPRHDSCVVKHEQ

SEQ ID NO: 13610 - protein, 85 aa, Homo sapiens
MKFDNGTSATLPFLSRQAMYKLYVMRKENPPGCNPLGLDPLYMRFCKDEAPVGYEAVELSTLLIANSEPHGGDPVKLAAEALFGY

SEQ ID NO: 13611 - protein, 85 aa, Homo sapiens
SVSLCIIPRDHKNKLDTRKVSLLMISPDQVYLSKLPASKTPDSSLKTTRHALEKRDLDHLKLHPWRKNHESAKPIMNDKGKNNLD

SEQ ID NO: 13612 - protein, 85 aa, Homo sapiens
GECAHLNWEGSDPEASVERVLTGLEFPCQARERDTLQLHSDKQRLISNGQELLKIFPITVGRIPISAESSVGGMVLVRRSLQPQE

SEQ ID NO: 13613 - protein, 85 aa, Homo sapiens
YSSWEAFAALYLYGFTKERHRVLIKYYLPQMDCPVSYSTKAILYPILCGKNRKASHLNLLYRKGMCWQLDEILRQESQVNTQESP

SEQ ID NO: 13614 - protein, 85 aa, Homo sapiens
STVWITAKTAEISEDSLEFGGAERGHTSKMSILSHDEERKGGLYNGVSFQSCLRLPLTGESKKFPGHKHRDALQPAGCQLGANFA

SEQ ID NO: 13615 - protein, 85 aa, Homo sapiens
MLAGFYLFSKAPNQHVGELSMLEDRLTAARPEVPDAPEKVRAATFEFGYLKVLTGTSSRLESKGSEGLLLQLSAKRISERAYEDQ

SEQ ID NO: 13616 - protein, 85 aa, Homo sapiens
SNSLRFIKEVPQSPLVLLGSKKLRCIQLYQKVSKTRNSADNYLQLGEGQHRAGTFFIYLEEEWIPITPTDLEPRSLALELCLRFI

SEQ ID NO: 13617 - protein, 85 aa, Homo sapiens
EGCYERTSPEESSPAPLVEGVIQPPTASLRHAQGSREWMVIIEAPFYVLWLQKKGEDISSWIGSQDTKYYGFAQMSALHEISQSD

SEQ ID NO: 13618 - protein, 85 aa, Homo sapiens
GYTAHDFGDSALPESPQSFLRRGRAESERRSHHQGDHDVQHKNAETSQAPHWYSTTVEPPGKPMLDEESSLEEEHSTTDLRFDRG

SEQ ID NO: 13619 - protein, 85 aa, Homo sapiens
PSLAFELIGVAPCVAKKTVLEYSKSNGHLTTPDQDHPKIDALTDLCGLLTPEGGKMLGDKEFDLAGAFCASIPKGEDRVHQNHLG

SEQ ID NO: 13620 - protein, 21 aa, Homo sapiens
MTAVEKCELAVRNRPREKWSS

SEQ ID NO: 13621 - protein, 85 aa, Homo sapiens
FNTVPKWFRSVGHGAYPKCGVLSVNETSVTAQQIELPLATQRDQQGAVSIPNAKTFSIIGQSTLHDPGALVMSSSEEKQEGLLDA

SEQ ID NO: 13622 - protein, 85 aa, Homo sapiens
LLVSAGENLLGKNSSYSVEQMPRQRKVVQDRIAMLVTSKDADKPDGSIERFCLQKLHPHAYASRPQPAIAVMLYGGTWLAKGQSL

SEQ ID NO: 13623 - protein, 32 aa, Homo sapiens
TEPNDNRSKGYAGYQLHWKEVRLASSERNNRN

SEQ ID NO: 13624 - protein, 85 aa, Homo sapiens
RHRPPDPARMKISTIVEPTPRESPPMIMNTRSVAAKLRQVPEIAQSETDSTKEEYTFMPPYVLTDETLFPFKVHRQGKFASTGTR

SEQ ID NO: 13625 - protein, 85 aa, Homo sapiens
NRSSAEQQRMRPKSCWMALCYKDEHKWLINLYCAEDRPNETLLQHVEVHCDIPSDHNETKTHGFPALSPVQAHQLAEVCVQIFFK

SEQ ID NO: 13626 - protein, 85 aa, Homo sapiens
SEALWILNSGVQQCMVLFIQCMFGEGKSGKSFEIRTGWIYKRIELETLRPAYSLVFCMNIRELGNRYMHVSFLSVPDDNAKDHIQ

SEQ ID NO: 13627 - protein, 85 aa, Homo sapiens
KLPFWDQNYPGIVHAKWASREVSCFDFLSPSPPTESPERHGELTRVNLLQATGLHPAFHFEQDHPCVNQRQSGHIQNQVHDHWSS

SEQ ID NO: 13628 - protein, 85 aa, Homo sapiens
DHDPVRLKLGVLPDEHKGMQTTDSAGSCEHNDKRGGQGFLEFGSIKQICEHNPNGMIKMLFPEEEKPQDITMEHEWLSWVQWDVG

SEQ ID NO: 13629 - protein, 85 aa, Homo sapiens
GARLLTVKAAPVQVADCNSSLEMALFAKKIEPPSDAKVKKYDLGAKKLSLTPQKAGVTFSKTAGETNSLKDNQPHQTSAEIGRLL

SEQ ID NO: 13630 - protein, 85 aa, Homo sapiens
GLPVRCLLEMTKLLRLFHLGKRLYKEPDCREVIAFGFPRELIFKGSATTMKVKKAHVFSENMSLFIKLWYSDDPGATESVLLAAG

SEQ ID NO: 13631 - protein, 85 aa, Homo sapiens
EGFSLLPKLRLNVAAGLMEKQVPGGGIHKGDNWVAALSRSSQRTSKMKAYEPVKLAREFRERTVLTKHICTSHAKRHGQQTKHTV

SEQ ID NO: 13632 - protein, 40 aa, Homo sapiens
NILQNKKTSVVIYQRELGYKLCNGSLVDEPASKRVCNLVM

SEQ ID NO: 13633 - protein, 85 aa, Homo sapiens
AVVTCAVKSLKPTLSPEPIQCETKTLLSHPDFEDGEKGIREEILLNLCRKESMPAQHDSTEEDAFLTDVSAVTLLVPLPGVYGEV

SEQ ID NO: 13634 - protein, 85 aa, Homo sapiens
PQTATQIHKFLEAPLSKSLCSFARHMVSGNCIKQGQDASPNWSPNPQYFQLTEFQSQSEIIDLQERDKSRLSETVSLDNPLGRKM

SEQ ID NO: 13635 - protein, 85 aa, Homo sapiens
AQEPQEEGIGSHEYSADHSILDLAGFAAVFVVDILGTGDSFFIVLKDQDINPLNPQLLKSLGQNIVTHGCEAGYLLKIRQVNLAK

SEQ ID NO: 13636 - protein, 85 aa, Homo sapiens
TLFPYLNLADSVPNTCEAQSMAAPEEQQPLIEALHGLWASSLTKKVPSRDMLMVKLLKGPGSQMHLKTGIGLAPTTDKGKSGVSK

SEQ ID NO: 13637 - protein, 11 aa, Homo sapiens
QVGTGVVEKRY

SEQ ID NO: 13638 - protein, 85 aa, Homo sapiens
TENCVCVKKKPSLPHPQTHRNKEEGHEEKHIKESVPLRTGQDLPFAYVSGQSPPHCIKLDDGEPCRGERVESTFVAQSDCQSVEL

SEQ ID NO: 13639 - protein, 85 aa, Homo sapiens
IPWSICPSGYLQTMSFSTRLAHAHPPNLHNNHLHCPPLILSIDSKIDFEHDPIATILKSTSQRESFQEKIVVVDLANLFVYIQNY

SEQ ID NO: 13640 - protein, 85 aa, Homo sapiens
MAQLESIGTEPFGVHTLGVHSSRVRHGITFKTRVSQSLHSGLNKTMINLSPGKELRGSEPEIWKDWELGEGKIPIKVEAVLSAEP

SEQ ID NO: 13641 - protein, 85 aa, Homo sapiens
NTKGESAKKDCRPEISNWDRKCQNQDVSGKFSNVYTTGKLECGYKASKALVGVALRMMAHASQNGLEGKMSTSPRQKREEQHHRA

SEQ ID NO: 13642 - protein, 85 aa, Homo sapiens
VKLENRPVLPYLMSAHTILIWETDSVCGSELSAKFFEKGLGPVTKGTQRVELSSKRQVHSDMRYGGSADLKNRASLPDSQVPVGL

SEQ ID NO: 13643 - protein, 85 aa, Homo sapiens
MDVKNRCIVGLFLDIKSCAEHQHKLPEACDEVEHYECISAILNLTIIGGILEPSKMTGSATDTQSPKRQYNVMHEVEVGFNDRDA

SEQ ID NO: 13644 - protein, 12 aa, Homo sapiens
KPGGYSWNNTDP

SEQ ID NO: 13645 - protein, 85 aa, Homo sapiens
DHQEQWNTALFQYDPSKYTRKHTCNVLHGPQAVWNYEWSMTMFCQSNYVPGVTKILRKIERQRSSVDKKEKAKVSLVDNPVNFSP

SEQ ID NO: 13646 - protein, 85 aa, Homo sapiens
MANAEAALAALFMYRNGVVLKTSRQKGSSLAAPSKVRTFESGGTSKKGTVQMKVKMQIMLRIKKSCLAKLGPGTGTMPQLGSMMP

SEQ ID NO: 13647 - protein, 85 aa, Homo sapiens
DIVCSLEEYPSCSSEAGWPIFEEFYLETNSEASLKEIKAGFALRGQGTTCDWENKDVNMPRSSESYNGYSYAENTIPASFRKRTL

SEQ ID NO: 13648 - protein, 85 aa, Homo sapiens
VSHRWLLEFKSFKYAVQQNQAFAPNYQIKIKPDFSHYHRMTLFDPKQQEFTIDDTAPKDFPSMLCQTFTLEERPPLKAQRRKKSI

SEQ ID NO: 13649 - protein, 85 aa, Homo sapiens
SLLYNPSGIEGLSLLWGEVLIRLKQLRLYNQHVYVLKPDKQLIQEEKLKSSPSVSLVLQRSALEGWVMCETTLNQVNKEARLERK

SEQ ID NO: 13650 - protein, 85 aa, Homo sapiens
YEALIIDELSVNSKESFEREFYQALCVRSDYVGLQVVKDTQEVQVQADLGLAPGARPHHAVNPAACVLTAQLTELTKDRGSFKFY

SEQ ID NO: 13651 - protein, 85 aa, Homo sapiens
SPILKRENTKTSQSAEDVDETGAPRYVAQFEREKIFSCITSEVSRKCVAVLETKVLKKRVDPGTPLSVEGHSKSVTLTPGPNYRL

SEQ ID NO: 13652 - protein, 85 aa, Homo sapiens
PHIEGQPEPSKLRKMALPEGRLREEWVELLCQANNLVTEVYSSQLSVAFKTGCIDEELYEVVAGVHARLNKLVESAANKVLMFTL

SEQ ID NO: 13653 - protein, 85 aa, Homo sapiens
MIGVPGCNSVLREFRVRESDIPSDNKSITITLIAFCAESGCATTIIGGPTESEARKTMGPGPLEQKLPVIISVLPTRMECSGYSL

SEQ ID NO: 13654 - protein, 85 aa, Homo sapiens
TQLRQVPHLTDVLQPSDLKHSEPRHSLIAWTSAGFMQNTRWWKPLLRLPQAPPLIEEDVCSSAKKSDANLEQLYEISSAVKELDG

SEQ ID NO: 13655 - protein, 85 aa, Homo sapiens
KPAATEGEKTSKKALHHPYLAAEFRAGLRPQLCGSFEFGISPRGEQTNGSNQAFPNPADLTIGRDATMLGNMEIDAGAKHKQEVH

SEQ ID NO: 13656 - protein, 51 aa, Homo sapiens
YAVCMLTNLPAGSTDHRNELTGHAQQGSEQGSKLETASSAVGAKTEKFLTH

SEQ ID NO: 13657 - protein, 85 aa, Homo sapiens
NSMPLAREPATQIQAGSPRQNCSFGCEMQGVYSTGKVLRGYVESRPGSSPSTPTGYRFNLLSGSQSSPKGPGTCHDSQKAYKKTR

SEQ ID NO: 13658 - protein, 85 aa, Homo sapiens
PISQDRAEHPPEHLQGSECTTEGQNKQPKIFVLHDNTPKELSVQWWTSSHYRSNQSTDKVKARYQDRRKHQQTLGLFSESKNTIE

SEQ ID NO: 13659 - protein, 85 aa, Homo sapiens
AQSIHYEKLPKLKNATCKSDLERFAQIFVKLEKHFPMGEYHKIWASHAEPLTRSLKMAEEVPVLCPRLVLRLTQKQNFLVRMSSR

SEQ ID NO: 13660 - protein, 85 aa, Homo sapiens
FEQGPKVEFQTYMDAEFRAKWDRSYFPSEVPGVLHIQCEYNFLPLVLPKFEEEFGKGLNVQERLMGLEHFYLSKPPKLDTSSFEA

SEQ ID NO: 13661 - protein, 57 aa, Homo sapiens
ELLNDGQDRQALYGPPKAPSHENKSEYHKFGKTRLSELSNESSNYNGLMRRMVQYIV

SEQ ID NO: 13662 - protein, 85 aa, Homo sapiens
ETQSEKYAAFTSRLAESPIFSPAPLDILNSKNSFRERHHSDPAEDAAERITKEKERFHTQEPKHGLREEFEDEKLQRIPTETAKV

SEQ ID NO: 13663 - protein, 85 aa, Homo sapiens
IAIANDRAKALKIIFKGSESLADAVLIIEANKDKNAFCGSDDKLLCDAPSTFKNQFIPLFNPRLFQISNSMNSQPTKDKKVPQNL

SEQ ID NO: 13664 - protein, 85 aa, Homo sapiens
PNTYYNQLPNQEGLVSTLEFQETGGLFDVQVHSNAGEADKASRYPRVSEATETSDLCALDSEYLFKRAIEDTLRDESFSVPITPY

SEQ ID NO: 13665 - protein, 84 aa, Homo sapiens
RKNIGPLQGLVSWGTGSTADVRETVCKPWVYCAEGAAHTDQTYKTPTPADREATLTATWDELSGEETRGQMPLETDGLHTERGE

SEQ ID NO: 13666 - protein, 85 aa, Homo sapiens
QYLSHAEFGRQQVKDMRYTNKCYSLNLWARHVLSGNPRRDHSHDDELEVDGQDTRPLQTPVGPATESITTATQDESPARDMILQR

SEQ ID NO: 13667 - protein, 85 aa, Homo sapiens
TTEPLRAMIGIQYIVIAKKLMGYQHPPIAQNGYQREPGLVLKCNDGTRLQPLSQEVQSNLTERLAHGCVSCWRVLNKFQKKMSCS

SEQ ID NO: 13668 - protein, 85 aa, Homo sapiens
LSCVSLGLNKQPSGKFQALGDHPLKLLSSHLVQDYMLAFANASPNARSIMQYMTCSFFESAAHLYTFPEKAPEDQDKAKELDEGD

SEQ ID NO: 13669 - protein, 85 aa, Homo sapiens
LFLCRDRLGVRLGRWEEVMESKGLLLTLSDVAYSSSDEPSASPDVEQPAEINEKTSCSSDGKAVLVSKTAVTAAQTTVQTSLADV

SEQ ID NO: 13670 - protein, 85 aa, Homo sapiens
GASREHHEEPWPDRNSALKPLSVQGDLQSRIEIKGTNTPSDTPYPFCRENVVGSEKRILNKNKDGTRQGSPNLSWDTRQHVPGWQ

SEQ ID NO: 13671 - protein, 85 aa, Homo sapiens
VPTEVSNTLILTPIINNEPAELKSPIGVNFKLHSVPVTAYVPQDITCISLPYRNTIFPSFSFITIDDVPANHMMDTKKKETRHIQ

SEQ ID NO: 13672 - protein, 85 aa, Homo sapiens
ASSELGLGTVPSPKLRLLVSKVGNNMKLVKNAELDHLGVESRDTGETNSTQEGLKNMDSSAEVLSRTTGEEKDVTKVQIVLGRRP

SEQ ID NO: 13673 - protein, 85 aa, Homo sapiens
KDPQEQPYLMVIAPDPTAYLADGTLLNNAKPVKAGSQGGARIQEDTNDSGQESVEGLSESSSGEAKWSLLNSMNIPFALAYRLAM

SEQ ID NO: 13674 - protein, 85 aa, Homo sapiens
MLFLKLKVTEGGCKSFRQKTEPELCVTFPRNGIEWGKQQDWNHLVSLSEGVHSAAMKLYFCHLQNRHISIDQKQGTEELRIAQVQ

SEQ ID NO: 13675 - protein, 85 aa, Homo sapiens
HPYAPENHFLLGLPFSANAIRASGISLLDTTRRAMSFIPMYHASSRNANLSWELVRRSIGRRRQGKPEERVPMNMRIVHIHKQYH

SEQ ID NO: 13676 - protein, 12 aa, Homo sapiens
SAMEASYYVAKV

SEQ ID NO: 13677 - protein, 85 aa, Homo sapiens
SSAPCLQDERAFEEDGTQDEAGSSVDREGAVQAGSNKKIVMCEALPASYFSVAVSETNMIDTQEQAKWSFTEHSRPRQIIAQAGM

SEQ ID NO: 13678 - protein, 85 aa, Homo sapiens
NSEDNRDDRMEQCPGCRTSPDFCSLPHETTCLVRDGSDNELGSLPSLVDAYIKWTSEDFVETGGEWDNDIIPASADVFLLGAQNL

SEQ ID NO: 13679 - protein, 85 aa, Homo sapiens
EEIPRSSPRPPFSSVIEECILFPQLPLDLELDDNSDKTPSIQASNTCNGLEPEAFLESLQPVQKGLFMGDTAGAQQFFMLAKAEL

SEQ ID NO: 13680 - protein, 84 aa, Homo sapiens
PKTGRSLPGRNFDLPDANPNAQCTFPVSIESSAYRTKTPKLRQSMNILLGAWEKPPGTLEKHSARDYFAKCLILPNGKTNTHKI

SEQ ID NO: 13681 - protein, 85 aa, Homo sapiens
ELISEDCKPSSRVPDADHSSQVWAAKDSIKKVQQDITALRGPESNNHSERQRVLVPGPYRYTPCEAAIQPWGGGQDVTRATPAYN

SEQ ID NO: 13682 - protein, 85 aa, Homo sapiens
AAVRDWTNGEEEARVFLCGFMDKQTLEIETRTRNFTEILESCNACAYGFTAGVPYEPSNDKSLPSGLCAHMGPSQYACKKKRPYS

SEQ ID NO: 13683 - protein, 84 aa, Homo sapiens
PDPDHARCCPTKKEKEAQEDLKSKGPIAYSAYTGSEEEIAMHATTGQTPETLKSDMGTSILGYEFNVWSFPTYVAPGPEPGWDA

SEQ ID NO: 13684 - protein, 85 aa, Homo sapiens
LGKPKVPLTFGIVDEASWKRLGLSSGSVGYTPQQRKYLRKKGHPAQFLALDVQLQFSLQKTDSSHLLAHLTVVALHPCEAPSERP

SEQ ID NO: 13685 - protein, 85 aa, Homo sapiens
AVFPSLPMFFRTRGFLSQEIGVHSQTVMTTGRVKEGKQAFLRLVESQQLPTPPNAYCSDSISTRCKVPGRVLSKVKQKQSRSKDR

SEQ ID NO: 13686 - protein, 85 aa, Homo sapiens
PLVRFISKQWPGDKPDQPHMRASFRFDFPINLKPLTGELVRTKALNTVNFFDKNTEELIRRNRPEESVSGGREKQASWNMAFKHH

SEQ ID NO: 13687 - protein, 34 aa, Homo sapiens
MTVGAIDDKCPDFVLLGVTFETQCALNVQVCIRL

SEQ ID NO: 13688 - protein, 85 aa, Homo sapiens
MSDEALLLSLECDSLQPILLSENGDPEKPIITEREVPEHFPRGSPPKTRLDLPKSAISETHSLISTSGTGETSEATVMLSESNLK

SEQ ID NO: 13689 - protein, 84 aa, Homo sapiens
ELDTLRTSPYKKCVNASASTILIRKNMVRDDSPSSVKVFRTWTEKHSSLVVVKEGLVTSETEAIKKASLYGSSIKRPKRCRVTG

SEQ ID NO: 13690 - protein, 84 aa, Homo sapiens
AIQGTIHVRAVTPKLLGDRGKEAGLKPDLLQFDARNTESPVDACPLKLSVRANYTNHPQSPQYTNRAHISRSLKELLFAWPFRL

SEQ ID NO: 13691 - protein, 85 aa, Homo sapiens
CKVDLKIVQVRVISLSNVFVTTELEMLSCEYLNKQYHCQEKVNVKARRNLLKDLAPKYIELYPRNEGLPPGGVNDSQLCLQPAPE

SEQ ID NO: 13692 - protein, 85 aa, Homo sapiens
NRATIFKYLDELQAGKFNCVHYSPIALLLVKSFLTCHVLAIKSYDHGLLCPAVPLMKPVPTPNTEQIEMQFSNLRFHTNSSTGCR

SEQ ID NO: 13693 - protein, 85 aa, Homo sapiens
TANYALKISSKPGASIKSASFSQSDIPGCPLREESVKQGFSFFKLGLKPFQELSSLILIPQPSSRELDDATEGTDCSRADYAIGQ

SEQ ID NO: 13694 - protein, 85 aa, Homo sapiens
HGGKLHEPLNEHFPPFRDYCQSWFIGMAAQLVSKQHLRQPERREEPNHERQSSHTTFTVESHLSANMESSKSSRFMNYRKDAKPQ

SEQ ID NO: 13695 - protein, 85 aa, Homo sapiens
KRKECMTIKEGNNSLETKKVLASLSKTPLSVAGPHSESNRADFNPSKPKNLHVTILVQLSNSCYGDLRGEQASLLYAAGRFSKDL

SEQ ID NO: 13696 - protein, 85 aa, Homo sapiens
SGRILLSRKNTFGVVHNKPSLLREQPGELVRMEAAICKPNPECTRCTGSLKGQKFNVDTEGSRTTKIPIKGEAEFSEAGDEMASS

SEQ ID NO: 13697 - protein, 85 aa, Homo sapiens
FYAGSREGGAASLTLGLQSSCTQDSTVAVSQESTTVLHLEMHSMPHCKFDAFERKTESLESYLTPEAAIRKRPDNLIPYGLRIIL

SEQ ID NO: 13698 - protein, 85 aa, Homo sapiens
DPLHLEENGVRDKEEPDKYRQFALYILSICRWVKIQGKELRCHRGKQVEQSRRSDLESRISSWASPITANNPLTRNRVTHIEVVQ

SEQ ID NO: 13699 - protein, 45 aa, Homo sapiens
KLIANRQAKSQVGRERLDMTQYPLIDRLVLTSSKILRKEAFPPPC

SEQ ID NO: 13700 - protein, 85 aa, Homo sapiens
KSRMCKVVVATFSAGYKDEFTLSSSEKSREVIRGEPLFFGSVAFKSGNKYPSELGQEEGILDWYQEKSFLKESEQFQEMKKVGTN

SEQ ID NO: 13701 - protein, 85 aa, Homo sapiens
KNLCQLPIKTCCHNVKAILENGDSLVCEDAKWTDIDVDELEFQTGLPKVNISRGHLMPIKNTKLEGMEFGRWLLTVLQSNGGSGG

SEQ ID NO: 13702 - protein, 14 aa, Homo sapiens
GAAEPDYCESPSEI

SEQ ID NO: 13703 - protein, 85 aa, Homo sapiens
CPLKHDSMKLMGRSVHAPYIPYPFLFFISNIINHRPSPSVSSTSEPPTLAVDIRDKPQRLSGKRAKTSVSTTLSKFILSEPNTLS

SEQ ID NO: 13704 - protein, 85 aa, Homo sapiens
AQQKLLTQYTLQEGPTVTQLRTVKSNYQKKGDGINCCLILVTPAKGMVPMHMGTLFIGSNLRNLVQLRKKIDKGLTEEECPSVTV

SEQ ID NO: 13705 - protein, 85 aa, Homo sapiens
MSTTELATTWETRSEEALEENGWRALMSWILTGAADGDSAGHQDSFINLCEAERMKFRSTPLKEIPILVGSPGGANAAYADNLAL

SEQ ID NO: 13706 - protein, 85 aa, Homo sapiens
QNTQTLRALMSCLHIPKPRHVATSDEQPVRVNHYTHVGLFKDYRKHELFNFLPHTHPYVNIEQPSLTKDGLVDETGTKTEIALDL

SEQ ID NO: 13707 - protein, 85 aa, Homo sapiens
SEQCEEDEFIVNDVSRCWEPSSTTPRGSGRHKIFPESNSELPRGIYGVDVLEDRNCLFALSMALVRQLKQKETGELREGKGSTVR

SEQ ID NO: 13708 - protein, 80 aa, Homo sapiens
PQVRDDGMLTMLATKSPTSRELKVPANFGMPLPPGVRAPNGHSLGLEMKNAALFKFGQLIKDAGFSHKFGNTAFLKGGHG

SEQ ID NO: 13709 - protein, 53 aa, Homo sapiens
ALDKPESLTLGLISDNCVPDSDEKHVQDEFKYKRLERTDSGPIQENNDTSTQK

SEQ ID NO: 13710 - protein, 45 aa, Homo sapiens
MKLLCEGFSPGGVSQAGDRQSDHSFFVEMEFDLILTVDEDRSQIK

SEQ ID NO: 13711 - protein, 85 aa, Homo sapiens
WKGKLRVPMTKSLHASLLSGSVLEEKQCLESGNRSQYTSFSPSEDASEGPRTLLGASIQTTTNMEPHLDLEGTDIHGDFCEKAGK

SEQ ID NO: 13712 - protein, 40 aa, Homo sapiens
YDYIGGRPQEGQPALENEVTTFHKAEHIEFRMPARQKDRP

SEQ ID NO: 13713 - protein, 8 aa, Homo sapiens
IVLGKSQY

SEQ ID NO: 13714 - protein, 85 aa, Homo sapiens
NFQVEQLFQFQPESYASVHQCTRPQKRKEKGIQASLRSRMKDEKLGYKPATTWKVPHQVFSLNRKFRGHFLKNFSMDLNLYSLHA

SEQ ID NO: 13715 - protein, 9 aa, Homo sapiens
ESEDEAPVQ

SEQ ID NO: 13716 - protein, 84 aa, Homo sapiens
NKRLESKCDSHVSSSPYDVQRFAYPSKKMREKSNRATWLEEGVLSMGFLSLSVQQTGQEDQSIRISDCQHDSAISGGNLLPLSF

SEQ ID NO: 13717 - protein, 85 aa, Homo sapiens
YADENMNIVDKDHENTARSPGQCCGSGARLPKWGCGCKRFTPPSNEGLWLNTSLRSEYRTKKIVVPTSASSTLSQLGYPTAAFTT

SEQ ID NO: 13718 - protein, 85 aa, Homo sapiens
QDCVIGTDSVDDDKGIVLVVMKATYDEFGERLQGQVGARNADDNKVLVDVLSASDYVFSLLLQCDPHPEDVGQNAAFVKVAFSKK

SEQ ID NO: 13719 - protein, 85 aa, Homo sapiens
MSLNLSNEKVPQEQTDNIPSESSPEPVRTLVVQAHPEFKIIGETLPTGLVVEKTFWENCQVDLIAAPNPEYGVLLSLCKANFTHL

SEQ ID NO: 13720 - protein, 51 aa, Homo sapiens
MLLKPVIAKIPTAKIQCTMPEVKDKYSVSELSLFQSGQDPIINQAFPPAQR

SEQ ID NO: 13721 - protein, 85 aa, Homo sapiens
TSTDIRELAISTSPSIREYRASPKKHWLFQKGYSAEGNLAPACEVQTKHWLFAGCVDVLHALGYFPFSSSQANGVSAARAINGAR

SEQ ID NO: 13722 - protein, 85 aa, Homo sapiens
FVAAFTFCQKTGVPHKRPSSLPLSKCSLLCFEGQEFTVEYYMEDAGKAVRMDHCATTAVLDPVHVGGCERNKKQRLVQVPSLQVS

SEQ ID NO: 13723 - protein, 85 aa, Homo sapiens
MLAKWEECMYKISHAVLIKMNPPGREMLREIRAEINSFSNYEAQNLGIKIGVLHGPSVSKMCVVESGSLRMVNMCDGCYLNPTQV

SEQ ID NO: 13724 - protein, 85 aa, Homo sapiens
SHLTKTRPELKEVADLQYFQLCCVFDYQEASYSNLETQKCPISFKLHRRAVISFFFTMASTTPMELRGEHQANASSGQFWQVSRV

SEQ ID NO: 13725 - protein, 84 aa, Homo sapiens
QKSTTSASAYTSSTAPLLMMVGRFTPETEIGQNAKNETCYDLKLYRTTHPSSPRTPGGDPLEELLIKLVLSGMLDSNGLQSHGL

SEQ ID NO: 13726 - protein, 85 aa, Homo sapiens
IATTTKVATRPELKPYASKDISIWQRENLQKNGKLSEAPKFVQPAHLVAETIETAATAGQKLKLLKEMALSGRILAPLPRTPDEH

SEQ ID NO: 13727 - protein, 85 aa, Homo sapiens
DMLGTETLVFVSLSHVGSLCMKDPTMVWVAETPFLYMALNLYCQQDRTDMKATMPWVFTYDYLVAHGATLFSEILPALKIKKSFK

SEQ ID NO: 13728 - protein, 85 aa, Homo sapiens
PDCLETQPGSWITTYKGVKTCKVACSVIAECPMQVTECKHNYNLQVKPVGKHFSATAHPGAVLLEFNEATLEYRGLIAERAKQLT

SEQ ID NO: 13729 - protein, 85 aa, Homo sapiens
QMETLFTENRKLSSCVSDWTLISPTDGADPPCEDTPVTRKCLGHQSDAVEVKGPLYPPRINDDSLLLFYRFRPPDWKTQHNPSED

SEQ ID NO: 13730 - protein, 85 aa, Homo sapiens
DCSSYNVIASSVVHKPTSIHNIEDGSSQPMPSTLLAGKGMSGPEAYHQQHSEGELVLYLPACPTHPPDDVRIMPLNTVMRRFLVE

SEQ ID NO: 13731 - protein, 84 aa, Homo sapiens
ERQKVTAIMRMSPDGARHRSQEPEQKLTKTSRPHQPLSEMEVREPFTEYEQYSHKSNDWRTPPSMAFGSVHYSGCRSALRKDFG

SEQ ID NO: 13732 - protein, 85 aa, Homo sapiens
QILETGAASTLMHVRFEDMIPSEENPCGEDEDPRSQSPLDAQRGNIQAQISIDTVVMKMSEYGPAKQELKLALGLQLTRAPDWLP

SEQ ID NO: 13733 - protein, 85 aa, Homo sapiens
KRTQLVVYIAQFKMRLVSDALSQCGLAPSTAELGPVLEGLLACADEGAQCHTYISVTKSQLPFILSHTPGGLDHKPMNSSTQDRE

SEQ ID NO: 13734 - protein, 85 aa, Homo sapiens
PTSYTARLKSGPSWLPYSHVPQFQPYGHDTEPYGRKSPLLDAEEEDYQEQSHNSENMTPEVSRARRVRRLHTGNLIQQALLVLAC

SEQ ID NO: 13735 - protein, 85 aa, Homo sapiens
VHVIYNVYQGYEAETLSANSQYGSPLILEAKKLKMQNQVEALMKKLDTVPRSRSVLCAQQKFTGASLTYVFINYQFLGASMTPHG

SEQ ID NO: 13736 - protein, 85 aa, Homo sapiens
MEKFFHKLNHSKKSPDELYPPDRVFNPPGELYCGSQGHGSHNFGSYPRREYKRKKLLATLCAKVANSHEVRTKGIEQQTQLGMKG

SEQ ID NO: 13737 - protein, 84 aa, Homo sapiens
SSLKSQVLQVYSEARANVNKIRTLRLGGAPVIAQAFSSCFSVALVCALAEVSRYEQPGMSSHHYFEGQRDALPESPAECGHQLY

SEQ ID NO: 13738 - protein, 85 aa, Homo sapiens
NSAGLQKEEYVSAQSASDQATQSWEGVLSLIEGNRCKKPCKGYEEESKDSKPCKLVFTPQGLYGGMYVELINTRLALNGDALGLM

SEQ ID NO: 13739 - protein, 85 aa, Homo sapiens
GYIMELHLATARRKDTEPAPEVDQDMMHELLQGYDVAFLTSWSVEHIRETREVPFFTLKLAAIRQQFKDDGTGAIEPLRLSDEST

SEQ ID NO: 13740 - protein, 37 aa, Homo sapiens
PTPALYSNMMAEIELQDCRSATMAQTSPDLGYYNNQC

SEQ ID NO: 13741 - protein, 85 aa, Homo sapiens
ARFILQVQLNQGKATDCEEYGLSNAVSGPGVAWSHSARQVTPFEKMDSEQEESGTIPCIFEFLFPGTRAEYAKHRETEKRKSKSV

SEQ ID NO: 13742 - protein, 85 aa, Homo sapiens
RRVLYEGLTGSVEALYISIEQICRQYAPTVPPGFMPAELRVFHSLASGLSLSGNQVRPLRCRNSALCVTLPMLSESHDTRFLLLP

SEQ ID NO: 13743 - protein, 75 aa, Homo sapiens
MQSRGAQYGGLLAPDVGENKLPGIGSKTSVKEMHNHEQFGIDPKWEVSQGQEQIFINEKRKVLKGLESGFAKSDE

SEQ ID NO: 13744 - protein, 85 aa, Homo sapiens
QDISPERPPPNEEPGLDGKINTKCLGIEGLHGNLLLATSLVEKRGDVPTSEKSRGVADEVRVKVLYDSKEQISPANRELYKSIDE

SEQ ID NO: 13745 - protein, 85 aa, Homo sapiens
QSPATKKCPSSVKPTKLTLKAGQSIHSIRIAWPERKRAANSLSEHDYLDAKSFEMQHDQSSTRISAKDEHVSTHKVLSLQLSHKE

SEQ ID NO: 13746 - protein, 85 aa, Homo sapiens
VLHRLDISQNVMYINTLNKTIIDFAEATVGHHTSVLSSIEARHPESPKVGVCTTETIKVLSVKVDAVNSVFERHKWSGSPGAEKG

SEQ ID NO: 13747 - protein, 81 aa, Homo sapiens
QVGESSAPHLFAPIRDGPWQLDLSMRVSSLSSMLGPNIKGYCQAWGIAETGTNNGFRFRKHRTLKDLFHPCPGPPRDVSTQ

SEQ ID NO: 13748 - protein, 85 aa, Homo sapiens
QASDVVAEGPVNDMPKSSSLDNSLLYPRTSFFFDAFYLESLCSSPPGVVIAWMIICWGKGITQGKLVQLITFMMFSRGCLESPSQ

SEQ ID NO: 13749 - protein, 85 aa, Homo sapiens
GRYSNTKVLGDPHEIRLEMYMRCMPPLFTILTACVSPEKFEPTRELDNNEQELEPFGEVGLDFGHGLTQLIAQKPYQNFHPLKDE

SEQ ID NO: 13750 - protein, 84 aa, Homo sapiens
EDQNQSGKKTTEAASEEADLCSQTPVQPSHELARAIYAAGTLLQCAFNLLEHPRSISALSENEHEAFLVTFAEDSCVPWRPLRV

SEQ ID NO: 13751 - protein, 85 aa, Homo sapiens
CRRNAETGLATSPSAVRDCETILHNQACLEPIDEESAAGQDGRVVPVKKGGCHSEVKPLQLGKFEITIRWVSEPVVPAVDGNGES

SEQ ID NO: 13752 - protein, 85 aa, Homo sapiens
TYHKLEKLKRSDRHDPALAGLLWIPTVFGILAKPQRFFTASNNLVRSEVSIQHWNRKSHEVLLPKFRKTAAPSRQTPPVTSEDGI

SEQ ID NO: 13753 - protein, 84 aa, Homo sapiens
SLRDIAPSLQLHLQDTSQLYHHDRNKVCSMVTIPRTDETLQLFEESYFVLDIAEEVICPRFKNAFGSRRKASCSGEQNDLNSLF

SEQ ID NO: 13754 - protein, 85 aa, Homo sapiens
CPARLRYQESEVYKNDSSTAFNQKLIENRSKPHSCKSDSEKKGASPAFSPLDQKLPTVEVDGSNLRGPTTEPSRETDGPLTVFGR

SEQ ID NO: 13755 - protein, 85 aa, Homo sapiens
DWEVKLTESDLKGGLNEPISRNLSPKQARKISREFWNISKWVEQQPLPCHEANKTSKIVSQLSQYTCLQMVSKDVSTSLEKKKEC

SEQ ID NO: 13756 - protein, 85 aa, Homo sapiens
QDLQVEVADAVEKVELERFYINAAQGLLPPVGLNCCSDKIASAEPMYLESEKTNQSVSPAESGQQLDPEMAKYTDHCFRIKSLAT

SEQ ID NO: 13757 - protein, 85 aa, Homo sapiens
KSSVMHLDNQVITTGRGLRFHIMFVRKFSPEKHTGPWSFPVVHYGFVIFAAEETKYEPVELVYILRKRAGTNMLKGTCYLLHDII

SEQ ID NO: 13758 - protein, 85 aa, Homo sapiens
HVVQLPRATKIQFELAKKTENQCMATPYRKPTDKTVLKKIAQMLTDSHLPWVVRSLLTVSRSLTQPHGNKKDAPTFKKHANLGNL

SEQ ID NO: 13759 - protein, 41 aa, Homo sapiens
QVEDAYKLTASIVVCLAWPKAIGDASLLNFAIVVPGPRSQV

SEQ ID NO: 13760 - protein, 85 aa, Homo sapiens
KDPTEKTFSWNVCEDKTRRKRCGEFAYKGTSKMLLRTTIGAPMEGISVRLKEWLSKESDECVQLTYERTDYINAYQTQVKVLCYG

SEQ ID NO: 13761 - protein, 84 aa, Homo sapiens
GMLCSQLDDPSNDIADNEKRKAIKDSHKARTGNESRELSGPSVTMVMQQISVRAGLDTLRLSFSCKAFPEPGPHESLEKDNRFL

SEQ ID NO: 13762 - protein, 51 aa, Homo sapiens
PYPDEPKNPGHETRLCWDNLPSTCHDRGPKERVKLSVSREDSTAIARNKER

SEQ ID NO: 13763 - protein, 84 aa, Homo sapiens
YNPESGYIPLEFSGPQKLAGSKEPELTELVRKQTDLDDVSSNEYEKVCVATDSLTCPKVSTDTAMPLPLPGDCTTYCIRQPKGK

SEQ ID NO: 13764 - protein, 40 aa, Homo sapiens
MVLKENKEAENFMKGQVVKDSPQQLWKVIRLPLFHLLRFL

SEQ ID NO: 13765 - protein, 84 aa, Homo sapiens
KARLQSWQSIGGGPRTSEKAGFAEEGVDTSPLPSELLGVKSKSEQSDHDGALLPKVLLNRTGVINKPFKLDASSGELSRGNKLS

SEQ ID NO: 13766 - protein, 85 aa, Homo sapiens
QNLPRLLTKEPDQREVSESPATCRTGAFRLCSLGSHVGFNENSQEFDSNDQNPAYKVTECNDDHTDDGAPFASVVLCKDSCKKRA

SEQ ID NO: 13767 - protein, 85 aa, Homo sapiens
NQESGQPSVGTQYRRCSTLQDQEQYGCPGSYYSDLYAPSENYRTCIEIRREGGRMVKRWNLGAQDTIISHYCRFGPLVQQGVGKL

SEQ ID NO: 13768 - protein, 85 aa, Homo sapiens
RRAIRELWAARIAKAVTMPGYEGESDTMESQHPPNMALLQFKVSSVYWGDNGPKSGDRELDACPPFHTPCEGEVQQSNGKDSSPQ

SEQ ID NO: 13769 - protein, 85 aa, Homo sapiens
HCISEFLLKFDTGSMELSKGGTQCLDCAKEFLEPSALGWNSARASDPVAFFVTLRFPDEKFPGVEDTFKVNQDPGQFHVSGMGTV

SEQ ID NO: 13770 - protein, 85 aa, Homo sapiens
PKNKYRCLSPADAPTFRARGGSQGNVELRIAVDVCVLKCFTVVKPHEGNKQATKGEVGAPEQGVASSSVTAGPYVCNESRFKTKG

SEQ ID NO: 13771 - protein, 85 aa, Homo sapiens
TSCIETCKELLARSAEIDLRWAPISSNQLWLKTGVEGSYTPPTAVTQSSLAPFPILKRQTTNCLSCPCFDYKAGHGDVRALPPVY

SEQ ID NO: 13772 - protein, 85 aa, Homo sapiens
AKLSGERKATSRPGPNNCHKDRGEGSNFSTKGLAMREELPLRSKEDAQELDMKPESLQFTKNQMQLVNCALGLIYTEALEMQINE

SEQ ID NO: 13773 - protein, 85 aa, Homo sapiens
VNKDPQLKCEEEPAQIAYMDRPAPESSPTTRDRLALQGETPSQPTRKPELYPTVRSNLAPFSIEQQFKKPKESRLVFAPCNITSK

SEQ ID NO: 13774 - protein, 85 aa, Homo sapiens
EGLGAGVYMGLGLELLVLKVALLNIAQALRHDRVKFDEPPGSEGARSMVYLELEFRMAGSRDDSGLKPSLDKDRCPFEKPRRPRT

SEQ ID NO: 13775 - protein, 85 aa, Homo sapiens
EIMLVPLIRGSEDDTRHIPYNLGPLSADDRLDLPNHSGPTLSEEESQKLPAGRDESDLFPHSRLDNTFSHEFPGTGTLNGTQHVL

SEQ ID NO: 13776 - protein, 85 aa, Homo sapiens
TGPGPQDSCIIVTVYNRLGLSKRLLASPPCVPNPEQYPQETKLGVSGNDEWIHLLFHMGFTWERMPWLRKSNARRQKQDHKSQLG

SEQ ID NO: 13777 - protein, 85 aa, Homo sapiens
GGLSGCLIQEGTVVRRLTTCSEHRNRYKIKAFIVKVQPQNTEAFDGEELLGLQSEPKKQAHYQATPEHGFPPHSHELSATVHVDI

SEQ ID NO: 13778 - protein, 84 aa, Homo sapiens
GILKREHKLFIPKQLKQYLELLPDFAKQKGKAESPPDSYPEAQFNGGYFILFPDNHQDTLMNAALLFKTTASIVKDMCAERVGE

SEQ ID NO: 13779 - protein, 85 aa, Homo sapiens
DDLEALVTARLNAQDEPWSPSDDQHLLKVGGYAKKQRIKMDRADERDIYERDEPCLDCVEDYEPPPADAAYQSQMAKRQPLNGSP

SEQ ID NO: 13780 - protein, 85 aa, Homo sapiens
YTIRPRRGSDLLCSKYPTVACVFIGSSTDKSSKDASVSPKIKDGAQLDSAKTMTPINVSQLLSVHQIVQGRRLQMELFIESLTSS

SEQ ID NO: 13781 - protein, 85 aa, Homo sapiens
PSGAHFLAWGSWKFPPRLADNIHRSDDEPALIWEYLGEDLEPKCDARRELLGQDFAEFCNEASRQDPRKGTPPLICDIDTQVLQQ

SEQ ID NO: 13782 - protein, 85 aa, Homo sapiens
VWIRQADWDACKEPMHLLIYPTWRYASCADETSEYDDSQQIEHRVIESKHEADYPGYRQEVKDPRQKQQTVTNLSEATQPTFTEG

SEQ ID NO: 13783 - protein, 85 aa, Homo sapiens
PDCRLNEWPEHCPLYVKNYLDNSGMVLRGPELDAAESLIGSEDFNKLKKRCEGLVPRDGSHPTDTQKRPYTEFMNYYDGATNEVQ

SEQ ID NO: 13784 - protein, 85 aa, Homo sapiens
ANGADRMFTPSCSSSTPHIVLYEHNRIEVNPSRPEWQPRSHWQEIEVDRCKKGSLPELKVSVSDEKNGESLESPLPPIIVVLKPV

SEQ ID NO: 13785 - protein, 85 aa, Homo sapiens
VLSTAFMNNLPPQKKEDEMCAEQQGRSAEQKSERLHHMLVPVLQGVVERMMTLIQHLFKNKLMRTGINNGELGCVELPPRTQHCG

SEQ ID NO: 13786 - protein, 85 aa, Homo sapiens
SELEEPMHFVQGYLLGTRNFFCIVNLLSMPHRINTATFFLSSEQQLPENNVKGSCQVTEIYRGILQCPPKNTWRDNGAKFAHVAI

SEQ ID NO: 13787 - protein, 85 aa, Homo sapiens
ASPRPTDKLCNRKTKLQSVEIDPRVQSTRQMIATLLETNLFDQLRPTGSECPGYNVSNESPETPGQEGSLSLRLKKLVKEAEASF

SEQ ID NO: 13788 - protein, 85 aa, Homo sapiens
GTDEKINLEASSIAGHVGYIGSQEKNHDEGQTLQRAATEIRTYYNDPKGITLAISMRWVQAWNLDMPTHGICTFFSRRPLANKNR

SEQ ID NO: 13789 - protein, 85 aa, Homo sapiens
IPGLLSLSLPTSLPKCDTDSYKLRREFVSSFRGVATTADGPLKMVCDTAPGPKGRRFKLIVGRPLASSQVGGSSMELMGGTNEAG

SEQ ID NO: 13790 - protein, 85 aa, Homo sapiens
SMLLSKLTNKLKCAVAARGEKPSTTKKAEPSSDKIGDQPAQRVLYNSWTEPDELWVACLSQRSRYKPRVTFQPNVTQGLSGTEAI

SEQ ID NO: 13791 - protein, 85 aa, Homo sapiens
EAQSDGNQKRRDLFNQDRDYTSEALQIPEIKGARMELGRRNKMQRQENIRPREHWLTACTTFGAEEMTLSEETQDNVLFEWPYQT

SEQ ID NO: 13792 - protein, 85 aa, Homo sapiens
HALENVGQETGCAADRSPEHEFCAELTELHPPVQNSALHKPCYKKRPREFHKFEHTKRDKKLPEKIPEVLALELKVVTSKKATTQ

SEQ ID NO: 13793 - protein, 85 aa, Homo sapiens
SLQTGRYRPFSTLHRNALETQISVKLHFDSSSSRAVLKELGVQGTVMQTGVRYCTIPSVLITPQLQGFQKWFSKGTFEVFRQHGT

SEQ ID NO: 13794 - protein, 85 aa, Homo sapiens
SNRGRYQYDLVHASKHSEFTSMIRKISNNLMNDSNNWLLEPELSFEVEMWAPEYGNIAWIQGRAVKRNAKSRSFLKPDDEKFTQK

SEQ ID NO: 13795 - protein, 85 aa, Homo sapiens
HNWNLLTLASANIAHCLFQKKEPHGDWAKFEEDKPQNKVEDIVFRRMVLLLLWLSATATPIKQHKNAGKQLELDDKGEIGAGYYG

SEQ ID NO: 13796 - protein, 85 aa, Homo sapiens
ITLCRVPLNVHASLINDVHPKGLERDKFQPGLVPQQPWRLRIEAIGAAFRKCGCLRRQEEMGEVRFALCAYLDYGPGDSYQVEEG

SEQ ID NO: 13797 - protein, 75 aa, Homo sapiens
SSLCKKKRDWLSAQNEDADGHVPRRKEDLTKWDQVQRARRKELCLNPAQSLLFFSIGIASPEVSEELSSASLMDC

SEQ ID NO: 13798 - protein, 84 aa, Homo sapiens
GGKAQSGVLNSFLTEELAGPARHTRNNKLYYWQGVGQPRLAHTHAAEGEAPPLKAFRGLNNLYSFTSQRRKVAPQSSIPPTKPA

SEQ ID NO: 13799 - protein, 85 aa, Homo sapiens
IEDYKSHISLKLKFNEAMYNSPELPTSCTNIDWLWQNPDGSKSPTKQHEPDPEPIDGRGPFCDFAGNHQRRAVASGEKKGDDIAR

SEQ ID NO: 13800 - protein, 85 aa, Homo sapiens
RVHRIHASAMFGTSSREQIQTICKIQYTCPALDAKSRTEKSRPSFQLPEEHRIRMRSNRYAGLLGIKVVITSGKPAVTVSGQGFP

SEQ ID NO: 13801 - protein, 85 aa, Homo sapiens
SRHVLLYITSLLLEPVELEQQCLKSATVASKSNVNVGVGGMRAEQISLKGMGQVRSEYERMAECVQRHDAIIEIGVESGHLALSN

SEQ ID NO: 13802 - protein, 85 aa, Homo sapiens
WAKYLGGSSSNISFEVLVASRGYFKQKVPVERSQSRETPTGQHCGEVQDVVLMVSTRKQNEGTTYKPWESKLTEDLRPENRCFAI

SEQ ID NO: 13803 - protein, 85 aa, Homo sapiens
THFLSEVNQFKEIYIQGLSQEGWQNGPSLMWGAIQHFVLGLPVEPRLSPSGSHNERQAAYFQHRKPWENLKQFPEQEVTNVKNVS

SEQ ID NO: 13804 - protein, 85 aa, Homo sapiens
GLGLTDCHKGGAQASRRPEEKFLAQKRIWPRQNDLHIIVLPAHLKDDSAVCTSGPTKHAALLGPAPAHEGLHPRTMPDQPGSPIL

SEQ ID NO: 13805 - protein, 85 aa, Homo sapiens
HEEGFEPMRRILLAENGNILVASKREEKSGNKSKNEQQRHESRYLPGHVSMDICSLTWWLLSQKLAARRGPARLSDCFPPQRESA

SEQ ID NO: 13806 - protein, 84 aa, Homo sapiens
IEIFNQEISSGEFEMHTQSVLEKRARLESSQVLEQEVAGGTQLGPSYGTTDDQADEELCRSALPEGEKGTEKPAGASETLDDLS

SEQ ID NO: 13807 - protein, 85 aa, Homo sapiens
ECGEIYADMERGSIPVPRGGKYGGTLQSQLFSTHKKTLDLRSQALCGYTSTTIPGRNSSEAHKITKFMYVNSQRMNNCVSLVLDC

SEQ ID NO: 13808 - protein, 85 aa, Homo sapiens
ATRIEGLPVLFNGKDDDLKYERTIFQTKSCAKAKTFAPKELRVSIITCDLLDVVKTTEYSEWPGRGDDGYTASAFDEVMFAEYGH

SEQ ID NO: 13809 - protein, 85 aa, Homo sapiens
MLSCKEHHPTAKRESICSKDILCEEPRRQYRRQSDIPRIVPNNRTKTERSKDTLKIRSDTTMDNTMTQLISTDPRSVNHQLSSDP

SEQ ID NO: 13810 - protein, 85 aa, Homo sapiens
MVNANSSKKNDPPEEKTEILPLSGQMMQHALLITNLLTSTTAPGYSGQKLPIDPETQYPDAVFSEFQLCSPGASIAHNVFHRTFI

SEQ ID NO: 13811 - protein, 85 aa, Homo sapiens
DINGSQVVLAVSEVSHRQLRFLIPVAMTTEVEEAIPSQNELGRDKGTEGCMKHVISHTDIFTNHVARTATFTKECQKQFKTYLKL

SEQ ID NO: 13812 - protein, 85 aa, Homo sapiens
PATVPESEGTVMAIPRVPDDHSIEFKQVLAEAELPDVRDKYASFSRGLFGCELSLRRKALSTSLGYSNFSTGQMMAAPSNDVNAP

SEQ ID NO: 13813 - protein, 85 aa, Homo sapiens
PHLRYAPSMPVPVDARKSEILRKRACICTTQSAFMKLRDGLHSLASLLFPTQKSRTSDVPEKKRRITEHHKHTQFLNKRLCCSGK

SEQ ID NO: 13814 - protein, 50 aa, Homo sapiens
PTSKAFFVSSDDKVSAHLNALSPVQRKINLTRGFEGTEADWRTVPFMIEE

SEQ ID NO: 13815 - protein, 85 aa, Homo sapiens
MAPEETALSPSIQDPTEMLSGKSLAVHKPIHGASKETTHQQEPGIEDKFIGGASTKVELCWFLVQVLEWWRLSFLFHDQDKSIGN

SEQ ID NO: 13816 - protein, 85 aa, Homo sapiens
KEITGRPHEERIRLQPLLEINFSGKMKSPTDQLPLIEEQLNGSSLWSTPPGVLVEAPSSIKTELQIRHKNGEMTLIQLAPVVQKR

SEQ ID NO: 13817 - protein, 84 aa, Homo sapiens
LIDSLMVTKETEADHILYNEHGQLWDTHAAQPIFSKPRTGQYRGKKPTLKVALLRLFEPPKFVNYAAVKPELLSSVLLEKEYLN

SEQ ID NO: 13818 - protein, 85 aa, Homo sapiens
KSTAVELRIDGEQALGQSGAPSQGLVYAPHAPGYDHCPSDFADNPSSSKDRDLTLKDKKRCTFLNRCLRFFLLSTLAILKQKVES

SEQ ID NO: 13819 - protein, 85 aa, Homo sapiens
MVEEYGHGNDTLGHHVPSASQSVQTEGSFELKQHKSKAMAYLSNCHEREKLSETRSGETSLFTVPKDSQGSEVPKLRDQGKSYLL

SEQ ID NO: 13820 - protein, 69 aa, Homo sapiens
KDAFHHKGIYFLYTHLSLCRGQKDMVDPADWPRQTLTNSSDSSTEVKDSLLDLNLHHKLADYLPMLTDN

SEQ ID NO: 13821 - protein, 85 aa, Homo sapiens
GVVRMDPLCQPETIPHDEPLLAGILRAAGDYRILAKPEDLFPLEAISINSEHIKSNAWLGINRISKSLAVALIYYKTPACPPSAR

SEQ ID NO: 13822 - protein, 85 aa, Homo sapiens
TKINIDELVTSEEDCFFEEIEAKRCQGPNFFEHALLNETFGLERSPTSFHQTNHRDIIFTMNPQKLSDNRWVAAEVEMQVIGNKS

SEQ ID NO: 13823 - protein, 85 aa, Homo sapiens
VHSSRIERDSQSSRGYQRRLTNVGQGYLLQIEPPHRTGHLTPQESSAKQKYQPMKASVDTASAAKINSMSGYEQMGKFNGVLTDT

SEQ ID NO: 13824 - protein, 85 aa, Homo sapiens
WEIKAKKKAESNQAKDGPLGSLSFARQQDTQTFNEYQPTTGTRAPLVLEAGILRLQDFPVEQFELEQLKEADHLRIEAILLEQAV

SEQ ID NO: 13825 - protein, 85 aa, Homo sapiens
GKVLKSIKLGFEGSKTTYPNIPKAQLVPYDPGLDQPTSLKEGGLLPLIVEHAAISMEVSSAVQKKFNSPGTEYHTDQFMRLSPLD

SEQ ID NO: 13826 - protein, 85 aa, Homo sapiens
KSTGQTLTAPLDKPHTTSELEQSVLKLRDEAEIVTLMQSKEVVRNKGRSKKTSKHHTGFIRWSSSDEEAILFVLFQCGTSTVCTP

SEQ ID NO: 13827 - protein, 85 aa, Homo sapiens
KAGVLELGRHLIWNKSLETGKEGQASLSPNIVIVIRGNFKYQEVEVTRPKVSDTWQDGPRTLAPTDVPIKVAIPLKPPPASECSE

SEQ ID NO: 13828 - protein, 85 aa, Homo sapiens
EVSKGADETGSQPARQPLHCRKTKAGFFQLSKDQMISEGMPEEARMGTEASRCLRATSDAWQRSACTLQYCQASNMNKEGLVSAS

SEQ ID NO: 13829 - protein, 85 aa, Homo sapiens
TSLIDATGKGIRVTAGGEILPGEVHIAKAFRASNPQRGMEMYKQAMPARVKVPSELRFLVLDNSDMDKPNLHSIGLASMLGTQGA

SEQ ID NO: 13830 - protein, 85 aa, Homo sapiens
LLTSGDGLSLTDIRYGKESLAPKNFQPDSTVIDERISEKCSTVTLAEKRLGPMRRQPQDVKYPEEPDVGIGGVVSELILERWAEP

SEQ ID NO: 13831 - protein, 85 aa, Homo sapiens
FLSATELRANFQGPKEKLQSRDNQPQSDEQPSFSGAAAQYAAVNMPHLDIEKTRVPEELQKTPELLSTVDTDTKNKKPFKLSIDK

SEQ ID NO: 13832 - protein, 85 aa, Homo sapiens
FRHSQCHMSAVANFYTLTHKLALQVPKNRQQHPSCTFKLIPKVSVNRSPVESREPGIHWKRKNSTRSGAGQAEKHKLYKPIDPMS

SEQ ID NO: 13833 - protein, 17 aa, Homo sapiens
EPQLIEAGISLYQGCMA

SEQ ID NO: 13834 - protein, 84 aa, Homo sapiens
PCPAMGPDDSSGEVKAPLMRHLQQTWVMKTLIYLIELDNPTIKLKAIIVENSGNDQASAEHGEGLGSCSQLCNHSYALIKEGSE

SEQ ID NO: 13835 - protein, 85 aa, Homo sapiens
YAPSNAKLRPLKPPRSSENNRMEKFFQNANESPTQDEKQMKWGDNGSMEVLRKKVLCPLRENLLKRNLSFRKHEEYRSEKTDLTL

SEQ ID NO: 13836 - protein, 85 aa, Homo sapiens
IFSVLRMVFADEYLGTSIEKKGIFPGLCKGIKPPDELTDSRHTTRQKEDLPLGEATSGRQNGAPCRQNGSRVENDPLQKGELAQT

SEQ ID NO: 13837 - protein, 85 aa, Homo sapiens
TALQCPELWLSRDMDEKNKPAGSAQKKDEAERQEGAAGLQTERPSDRHAPKEARRPGRDLLSLVVVAVKSLLSMQVTNKESHCDL

SEQ ID NO: 13838 - protein, 85 aa, Homo sapiens
SSQLLLSEKTCAPQEEIEDVFNPVGLLLFEDVVSNSVSVCSLKLTKLRKLCFNARCSDECSHKTPGSSYTGKSLETEKQCLRYPE

SEQ ID NO: 13839 - protein, 84 aa, Homo sapiens
NLLAQQSSAGHHALFPSFITGNDDRGKFPNSGLLRLQCPASGKDTFGGRRRSPPENKFSHLFDQVVGPTRDAPPQSRSSTPALS

SEQ ID NO: 13840 - protein, 85 aa, Homo sapiens
EDLHPHEISPDRHPVREQTDRDDQKFQPCVAHPRGTVSFPTARSNRKEYVDFQRPELTKQTRNKTSEETVQESLTSPPDTVDLTH

SEQ ID NO: 13841 - protein, 85 aa, Homo sapiens
IHAVCPVTDLRYSVSKSMSDDCEAIRDNKRKVGGMCLRQNRQHPPSEPLGILVEVQSAQLHQVDAPEAVVSPLRRDPPEALKESH

SEQ ID NO: 13842 - protein, 6 aa, Homo sapiens
TGKFQG

SEQ ID NO: 13843 - protein, 72 aa, Homo sapiens
WDIVFRHRHELKHLSQAPKAAPAVGSLEIRRLVYQAPNTSRDLHPTPQHNSKNKVNAGNTQRSVGAASKNGS

SEQ ID NO: 13844 - protein, 85 aa, Homo sapiens
ERNVIARWTTECPDLLSAGSGSRRKFRNAQLVPDEIPTEPEKGSTSHQDKHEYMPFTCEGMEFWRALDPTSGRPILPAQGTLDAA

SEQ ID NO: 13845 - protein, 85 aa, Homo sapiens
EGKGKKTPKPYSTGLFGLAPQRSRGLDKAGFSEIGFVDHRELTNAQKQEIGVQTTKQELQFYMKVDPKSTCICMALALPRMYKSL

SEQ ID NO: 13846 - protein, 85 aa, Homo sapiens
HDMKYPPAMTGLTAPVWVMQFTHQKNFSADWDSPHLHFRTRDIAYSYCEDFYNKKDDEVEVPGNLDPKGDAIQELQISFGDLSYM

SEQ ID NO: 13847 - protein, 85 aa, Homo sapiens
DDKNMSITLHIYHVQAVWLPLGYGLGSAHDLPEVEYEPKALGSPMSPGPCFTPPMLDWLRKCSSPPNPIYTAEARESLKPSSTQR

SEQ ID NO: 13848 - protein, 85 aa, Homo sapiens
REQLNKHAFGNKVLDDEIAYFFGIGHYGLFLQAVSALLQIGFNFLSRTEGYVVDLACVVLLFVNEVVSTDSEKVPKGEQESITLV

SEQ ID NO: 13849 - protein, 85 aa, Homo sapiens
RLEPMCLENRKNWKLDMKSFLVASAVYSPIGLELRGLNRQSLFLQNEGNAVVFVMGSARSPTDKKSKLQRVTVPSKHQATAIKYP

SEQ ID NO: 13850 - protein, 85 aa, Homo sapiens
KGVGRGQSPLGEPRDYLKFWSGLCPYLPDLLVLRSPKKHQLHCRPRDIERQNEGRLMHTVWEATSAYSNVARGPRQTQGLYSTLM

SEQ ID NO: 13851 - protein, 85 aa, Homo sapiens
STNQRKGESLQVVVFRILVTSCGQYAPPSVVSLSVCPCPRKTHFLEKETELWAYGCPLLNLFLHRRTADFREGEGQIEDLTKGRR

SEQ ID NO: 13852 - protein, 85 aa, Homo sapiens
RASKSERSIGDEPRARTQSKRKSRVILRLPQNDLVEEVSSNQQQCIDLALETNKDDGALLCKANVVLQQAQEQAGYGFGIAAGKV

SEQ ID NO: 13853 - protein, 85 aa, Homo sapiens
GLPEQHEVGLVGINTGKRSSRLKCVPWTPKTHAEGEWTRLYRIRIEYSIVRHVGTKSIVENQKTKVDDCKAALWVHRHLVDARSE

SEQ ID NO: 13854 - protein, 84 aa, Homo sapiens
TFCPALEHPRATGVIFVWGEALGIHRTLLREKKWAPSVYHLKASQGTFALQSGVYPLYLNPCLTFDEATPYRHQKRYDPMLARS

SEQ ID NO: 13855 - protein, 85 aa, Homo sapiens
RIDCVGKPQDNGKSKKEQNTVSVDSNDHGTQPEVHITPVAYLLCLKVHEPQLEKQRFADSGLGKLAVHSGSHSGVIKGSENSPLM

SEQ ID NO: 13856 - protein, 84 aa, Homo sapiens
LQAIREVQFVSGPCVQMRWQTAKPFGKYETKAKREPAPLVMYNHLYPWCLRCLLIRQGFHVQSVVGLGLSSWTQKDTRLIKVMA

SEQ ID NO: 13857 - protein, 85 aa, Homo sapiens
CRISFQHDLESLAATRAGRGPAILFATTSIRLQFGTADSEWVITNDLKRAAEICDSEPQLKEAIALEKSEKLRTLELSQQLNAFM

SEQ ID NO: 13858 - protein, 85 aa, Homo sapiens
ASDERLRGVMQWPAILIDKVREKCDAFVGYEQEARGEKSKQLGESHCKPQASYIPVSEYAALLVMCQIPDVMWQMQELGGNNKRR

SEQ ID NO: 13859 - protein, 85 aa, Homo sapiens
DSKVAWGLSGDKKQLNGQTGVTPGPSHATTESTLMVGLFPSIRVAMAATMLPEDQTRIRKDRTVPFTAMAGFIGRSGGEDQLDET

SEQ ID NO: 13860 - protein, 85 aa, Homo sapiens
SSSDGENAKRVEDSVGGKWICARASSPEQTSTALTALEIDQCPLKNYGKNTESALGLEIIFYETAEALAHSNTGKLAGKVEDSHV

SEQ ID NO: 13861 - protein, 26 aa, Homo sapiens
IGFCSATVSLFNALGVHHPQSLKNKF

SEQ ID NO: 13862 - protein, 85 aa, Homo sapiens
KCGEIIAWYYGRTPKCFSIFVFLVSSGDEQWYNQDLWQLLSVKSIESPQPDLYYGTSSNNMVHNNAEVQNGEEQSNAKRGEECKL

SEQ ID NO: 13863 - protein, 85 aa, Homo sapiens
KQRQSILPKASPTAREHWPCKTNELPTIQSVEGEDAEEHVTSDGRAPCVQQDPHSTEMSLLMISGFALAAHRRCEWELSEDISHI

SEQ ID NO: 13864 - protein, 85 aa, Homo sapiens
VEIHRILITLPRIWLGAASVKIEFAPPQVPRIKIGKSLFDPSRRSCNKIAVDLLRLKKSRLGLQKGLSQGHKPGTILCGRTLINL

SEQ ID NO: 13865 - protein, 85 aa, Homo sapiens
PLRKTVSLLHMPTGEGLFSLEVSSSWSRLQQNGHRTKITVMQMKRALNVAHTCRNWSAWRNDKTVRTRPCTKNKKCVHSFKSLKK

SEQ ID NO: 13866 - protein, 85 aa, Homo sapiens
NFYHTIVMSQMLFSNLAQKVGCEKKSDLEERSQKLHGQKWDSLQYPKEEDPTMDLAVKEDHWDKTKPFPYSMSLQLGAVSMRQPQ

SEQ ID NO: 13867 - protein, 85 aa, Homo sapiens
DLLVCSQRVVRLYMDNLDAATRIDEWVYCLESNPSHQQTERLEIMLGGRFRVFGNSCPPIGRRAPLMAGEQPRQDYPRHGIKAHW

SEQ ID NO: 13868 - protein, 63 aa, Homo sapiens
ICSILLEGTLTGLMLGYNMIRPMVQLEKYAPKEKLAKMQDTNDRKNRSPATERQTLEEGHVSV

SEQ ID NO: 13869 - protein, 85 aa, Homo sapiens
ANYHERYFCLRLRTNVRKSLKFDWNEPDIENFKLVLRGDRKGFKPSERSTLRPVVCLLQGRFERPKHPQFTSSMETQREKSESHA

SEQ ID NO: 13870 - protein, 85 aa, Homo sapiens
RITDRKARPPSRAEAYDSPPLLGQEPYLPAAEQGHVDGWAHAKRAIFTTGVPRYAVNLNLILDFGQVKELDVYAVTFTQANSGES

SEQ ID NO: 13871 - protein, 85 aa, Homo sapiens
RPLESDDPQDYLELLQTAKFLPPVGGYARNSKPRIVPDHSRNGAYSILAMASRILTLLELHAGLLDRPIFQLSPNSALSLTNPNK

SEQ ID NO: 13872 - protein, 85 aa, Homo sapiens
EDFRRIPGGGGYVPPHMDDNSMLESKVKKVSGDLVMVSISRLLVSVQLQVLVCNANKVKVRGLRWRHAAVLSLSDKYASREFEPK

SEQ ID NO: 13873 - protein, 85 aa, Homo sapiens
LAVDCSSDKEDCGVAITETVQLPSDRPSSLCLSVDSSTALIGMSNVNRAKIVLVLYRLRDRCTLLIILFQLRPDVPLDTSFRHPQ

SEQ ID NO: 13874 - protein, 85 aa, Homo sapiens
PEQVGFDCPRSLDTSLEPPLQETLARLAVCEGMPNKRIKVMQDTIRFLTRAGPHFPPQQCLLVGSRFTAPSGQLSAEELGRGGTP

SEQ ID NO: 13875 - protein, 85 aa, Homo sapiens
NPHDYRHPELCPLVTGYNETGLQLNHHWHGMGPELGNDTSQKLSYRTVRAGLSKDPEISGFCNGTEEALKLRSDSLSGQLSDVCV

SEQ ID NO: 13876 - protein, 85 aa, Homo sapiens
EDQAVVRGVKSSREFHIAKSHIQCQKETYAEFSSLLLHPKQEYQEFPGCKAAFTVDNEDPQDKHNPHFLRRQGHALTECGKVSCE

SEQ ID NO: 13877 - protein, 26 aa, Homo sapiens
GPKLELWPQISYSEKQITHEPPHDPI

SEQ ID NO: 13878 - protein, 85 aa, Homo sapiens
VSAGISNDSLFFLMDYYRTCAAIAVSKMFRVPILLEVRTWPAAKQVLKPEEKSEIPDIFVSTEEERILCLTQTKECLMGHHDPKM

SEQ ID NO: 13879 - protein, 85 aa, Homo sapiens
GLSVSYPYREDLEKNISYIDAWDSTHVRDPTDGPASNLTQYVALKIKTRNEALQKYIALSRDVCPTPAQLLEWNTETSGGDLNKP

SEQ ID NO: 13880 - protein, 85 aa, Homo sapiens
PHVEMLLQTGEVPDRCILHGRSTLWLDKLLLSACQSCEAMEIQLLGEGTTTEESIVDQGLDTEETLPRTFRQIFVCGSEERPKLL

SEQ ID NO: 13881 - protein, 85 aa, Homo sapiens
KAATGKGSEDASPRQKHKKPPEKIRQPAKANFRGRENRTKTDCESAQLYDVLQTILQEYLSTDHMKLLCFFLSSLTTTQEWQALE

SEQ ID NO: 13882 - protein, 85 aa, Homo sapiens
VKHVSAGLKLKPLQVNQPDSDIQSNMFQASNLSKRGEDKKSLRWEGMNYRGKTLSEQQLIIQVNVSRGLDGTEVAKAKSLQTKTR

SEQ ID NO: 13883 - protein, 85 aa, Homo sapiens
RRVQREGDPLRERKNTLKSTEGQENIEVRSRCVSPGTEVGDQAKRLVSLTSLNLPDVQGIQPDISGRMGVEDQTRKRENKSPELD

SEQ ID NO: 13884 - protein, 85 aa, Homo sapiens
IITLQNMTFETASEEVLVRGYAMLLRYDVGRSEAHNEPRLYWRRQAGRCECPPFMSLGSRKLGYLEILHLILHKGERPKRWAELG

SEQ ID NO: 13885 - protein, 85 aa, Homo sapiens
ESQDEESECPCEKAGKKIGSQVEYLAVGTIAACKPPVLLLTKGDSVIARESEDRKSVSHEEEMVATEGMSGGQGHQDAVVYDPQP

SEQ ID NO: 13886 - protein, 85 aa, Homo sapiens
EPTATTLDLARALPSAKIWLRIADLRVNSRAGSKIAMFELGKKPAQVPPLIREASMIKCLSGLYKMPKHPIPAKDSLFPNVPQLE

SEQ ID NO: 13887 - protein, 12 aa, Homo sapiens
YQVEPYDSHNHQ

SEQ ID NO: 13888 - protein, 85 aa, Homo sapiens
MESEPHLERAAVLLSTRERWDFHPAAMLSFLALFLFTSLTYTKYHCSRPISMNGLTFPNTPADRSIKSSEQTPLCLALRPAIYIL

SEQ ID NO: 13889 - protein, 85 aa, Homo sapiens
MYGQCLTREVNWRGEQSRLVPARVACPLMSPRSQEPKDTDKKVPYDILPEDAQSGISRDLPHIWAMLEKPKDVISLEFDMPEPML

SEQ ID NO: 13890 - protein, 85 aa, Homo sapiens
TSLVSDSLKVCVIQHDANLEDHSVESVPPDQESEDPAHEGKGKMVNMRSHGTKPATILLNRRTLSAMETLPLPPGHTIEEADHGE

SEQ ID NO: 13891 - protein, 85 aa, Homo sapiens
SYVEFEFEKHTRFRAMNAYRRLQEEFIPPQLAPKQSVVADHNPPISRLTMMQGPSTGRGKMKSNALISWQRAMEGAKNSKFGPQQ

SEQ ID NO: 13892 - protein, 85 aa, Homo sapiens
GPGHKEKRYSDHGFLVKVRPIKGLETCYTHPNLPERKCVTIKASRVPCGHHVLITACPIQDEPSCLAPLMCRPGCATDAIELGQS

SEQ ID NO: 13893 - protein, 7 aa, Homo sapiens
ARTLVLL

SEQ ID NO: 13894 - protein, 85 aa, Homo sapiens
PDWILEHGLVVMGIPESCSAPQEEMPDAAGAAKGSLHFSVQLTQKGEFFDDLNGESDIEGQCQYVPFKDFFLQLFLELKKMVRPI

SEQ ID NO: 13895 - protein, 85 aa, Homo sapiens
KQSTYMPMGSRNLNDFSLQIRIAAGCPAYTKALCNTSTEVECDSKLSAGLKVAQSLMRSDVCQNDPKLVRKSVKPCQRVEGKKRQ

SEQ ID NO: 13896 - protein, 85 aa, Homo sapiens
GHSIGFVYELNQMSILAETQFRSLLAEQARLADQREVQETRLETQRLLPRKHAAEKRAEADKPTLNMDVTNRKPSKEDVQQLPVT

SEQ ID NO: 13897 - protein, 85 aa, Homo sapiens
SAYPRLKAHKLIYVIGEGDQPSPSRSLKLLEQVESCKSRDSMVALQSDLMLKVAHLKSEALHGIFVGRTAEEVDMILPVGVTSEF

SEQ ID NO: 13898 - protein, 85 aa, Homo sapiens
EAPRWDTPKDSLQVGGFLDCPFKVIPKMERIKACQMQKSKSHGSLAYGSAYARWTETTLAKGSNIAPLQIVSHDMTLGLLTTSTP

SEQ ID NO: 13899 - protein, 85 aa, Homo sapiens
HSAKLSKDLSLRDPGPNPMLEMLTELPLSNFKDVSRVEGQRILPKEYRDSNLKLAEILPLGEVLLNSSHSGEGDNKFPGPSPVSG

SEQ ID NO: 13900 - protein, 85 aa, Homo sapiens
KIETLNRTNLNRIVISQDLETSECEVNSDKTEFVIMRERNVNKDVEQSQHVFLASTCKYTAHFNPILIQSEVSDGATSEFTDAKL

SEQ ID NO: 13901 - protein, 85 aa, Homo sapiens
GVLLNRNNTVTQLSPKLQRFLLKHDIKKDGCYQPRTLDQTTQETSDGEPKRNSQNVATVSEHVLDDYPGREPADFSHHMAERLDE

SEQ ID NO: 13902 - protein, 85 aa, Homo sapiens
GLKLLMVLVVSQEAPGFEGHEICTACEWGDGLGLTEEQIEDTPGTAGAFPRQKMDRSTSELPNQVEKKAQPGLKITDVIPQTPPQ

SEQ ID NO: 13903 - protein, 85 aa, Homo sapiens
PPDEPPLAPSLRVQTPSKSVKSGSEPARAETLTPPGDFTPGPSTSNAIENTTFSEYIVTALAKPGAFPLNAEEIEQYFSDDDVAV

SEQ ID NO: 13904 - protein, 85 aa, Homo sapiens
KAVEMSAGYALLSKQKRKRTQLSLIDQLDPGKRCLGALDVDQGKGFDFNYSGKQQDHDFRAFIAVGQNEAKQRNLSQALPLEVVP

SEQ ID NO: 13905 - protein, 85 aa, Homo sapiens
AIVCDCVSAHLMVNRDGGKQDRCGQYEPQRHVCSKQWGKSSQDGALEIHGRDSEKVKAFVAEAPGKKGVGMSTDVEVGNLQEKPL

SEQ ID NO: 13906 - protein, 85 aa, Homo sapiens
FSDRNYHNELRKLVSSCYLSAGVTISFTQDYQHLTLAVARLFKEQTAPCNKSGKSLPRLVHITSSVGHISAESDEFSMLRFSIPN

SEQ ID NO: 13907 - protein, 85 aa, Homo sapiens
ALVLLSVEFHASEASRSFDNSQLEPVVPKNIEGERVERNDKSVNYVSLFVNQESTLQTPPNGGIQGHPGWKCRNRTKMVFMRPQP

SEQ ID NO: 13908 - protein, 85 aa, Homo sapiens
PQQIMDGPPSEHASAYTVPPDKRSETTMLGAVPLAESKSHEPTRPRGTKYRDSVITSIYSRSFTPEGSSTSVGSAFENTEACARP

SEQ ID NO: 13909 - protein, 85 aa, Homo sapiens
AVLEESSEADEPSPLQKGYNKKAPLKLELAMMAEKRDGMSHLLNHSSIPDGSGAGHMADTNDQWSDDSEPLPGSTMTVSGFSGHH

SEQ ID NO: 13910 - protein, 85 aa, Homo sapiens
TYSKAEWGQEYEPILGLAKMAPAFGETLLVDGAIRETPIWNLPIQPLGESQEELDKLGKAFYEGGIQKVLMDQRSIRMTVNSNNS

SEQ ID NO: 13911 - protein, 85 aa, Homo sapiens
YAVVEKKPHLGSEPFEAEQESEKVRTGESEVPHPLAKLKPQIAMFQSYRYTHTVGEISAKVNKGIFIAVDEDRGDEKEPTWPASE

SEQ ID NO: 13912 - protein, 85 aa, Homo sapiens
IEEALVSAHSRLVMGETSTSRMFFGCNAIAGCLYDTLDQEKEAQESEGIGYSNSTIIIIYPMLILPAPHTSHLDLDFTSMSAVGT

SEQ ID NO: 13913 - protein, 85 aa, Homo sapiens
SFTENGIGLASGQGQHKLGTQAKRDKPRLQSDCTLTSPKTQVLRKKEHPLWYILKGTLLYVAAHLAANMDLELSKVNSVTIALVS

SEQ ID NO: 13914 - protein, 85 aa, Homo sapiens
AKYKITCAEQSVNPYYARIKFFSFTKTGRLDKTLWITKKHGTPVIAPPEVIRDVLGECETKETSREPIQDGGRGPEFQFIKCLQD

SEQ ID NO: 13915 - protein, 85 aa, Homo sapiens
FWPDETQLETKVMARVAAEGPLGGDQNLRRASIGANMQGSHMKPLLQYSMVRDEYWPHATVPPWDLQKTNSIYEEWYICYNLRVH

SEQ ID NO: 13916 - protein, 85 aa, Homo sapiens
LSSIPWSGYSETTDSLFPKLAQGGKRAEEISIVVKASSDVFDLRGPGSCQEEPQAKERFTRRASDGIIRAEDMRGSSKHKFVTVI

SEQ ID NO: 13917 - protein, 85 aa, Homo sapiens
DCMEQVAAKEHCAAQRRMFRWQDHPKECLAEFWQRQLHLTTKYPVTPSVTLEPNAGGPGHSIGTTGDPGSNVLILEFREEREEGV

SEQ ID NO: 13918 - protein, 85 aa, Homo sapiens
YGPSNNDSACLQASGIKLSLTIWRERVAVILILECVRRELLVEIYPCTQLPQSLQFPELRRTHARAAKAEVGLRSKQHRSPFDST

SEQ ID NO: 13919 - protein, 85 aa, Homo sapiens
WDERYIPEEQAFLSDNFKSPEREAALGIPVEGIISTEARGRVEQEPKWYNETVPPLERGSLPNRPMCRKDLLGEDSHTFLGASLL

SEQ ID NO: 13920 - protein, 85 aa, Homo sapiens
PEPHHRALLVKHGPQTGDGIAFRQMGATRMADIHDRNRNDWGKNEDRKCSSELVRKSGLAKRGCKLTPPIPKWETLDHRVAQKSY

SEQ ID NO: 13921 - protein, 85 aa, Homo sapiens
GLSTRLTGELFQNNYTHALLLKAQKQRIPFTRGTKSCRGDDDGETTPSSAAQEKQPREGPILTSRWLSIFKDAQNTKINGIKFVQ

SEQ ID NO: 13922 - protein, 85 aa, Homo sapiens
MHAAPAVSTDAPAEVNIDANTMTDKRCSSPRDEGKARDLPCLGPALFWKIAGVRKASYSNPGLIIAVWTPFEQRRILLWEIRLIQ

SEQ ID NO: 13923 - protein, 85 aa, Homo sapiens
RYVHQKSGNLTITAHKAASEWEVSAVCGLLDSIQDAICEREGLEPEPAASLSSNKQDPEAVLEGQQEPLKLHINRLNSCGREPGE

SEQ ID NO: 13924 - protein, 85 aa, Homo sapiens
TPPRPAASTGSHLVIEIMHSCIEVATHSFIHLHHYQKAAEPKTQGEHHAFLSVQPHFQQFRIPTFLKHVPVPQRVLEMSLLAHPD

SEQ ID NO: 13925 - protein, 85 aa, Homo sapiens
VAKLSSTPGVEPLHSTEILSPDNEKYSSVERLRSKQTRMELPKSYALFRAQHIASIELIPEGGSESQGAEIVLQETLLVGNGPTF

SEQ ID NO: 13926 - protein, 85 aa, Homo sapiens
SETNNAALTEGQELSLKVYMNNLNILQRKDDLYFPLNDNPFRQKAFVQPQAQVLDAMPLPRAGAQAVEGQAKAEAIQEPERKEHL

SEQ ID NO: 13927 - protein, 85 aa, Homo sapiens
GQIRSGGDEPKATAIPTPYPKWAIEYGPYSPKRNKSSNAGVWSNIAPALGVLTSYPEMTKEQSPTSGPERSQKEDGDYTTSGGVN

SEQ ID NO: 13928 - protein, 85 aa, Homo sapiens
MSKKPMIPRPYLTDKHTDETDAKSLYAAMANECPLIPPINQCKRLKEALLGFRKMFTPAQQELCADETQDHVTSILDGLKGYKHS

SEQ ID NO: 13929 - protein, 85 aa, Homo sapiens
SDKEKPKRALLAESEVVTHKMLNTPATNSLIQSPPQSQATLSLGEYTCLEAAGKKMYRSGRERKVHKKRAGIEKEAVNLRCNPNC

SEQ ID NO: 13930 - protein, 85 aa, Homo sapiens
CVNPDTGLLPKSLSGKSIYDYKKPDPSPKSEKSDSDFFAVRTPKRLIEPSIRRHDERAKHDLIIFKREPYEFFRKLNGHLDNGDK

SEQ ID NO: 13931 - protein, 85 aa, Homo sapiens
KQRVKLEPALTFAQKAEGPMMPLKSTHEQMYEIGSRALEDVQVLNETIAEDGTNVNGKPAIDQQPHPMDSINIMSMKLKECTGVG

SEQ ID NO: 13932 - protein, 85 aa, Homo sapiens
DYALLIYHVRVAETDERPSQQDKAWDGSVEVRTLLLRHLNVGIGNTDFRQLQLRLAAGLILIKSTSVEQNPLTLKHQEVTIMLLI

SEQ ID NO: 13933 - protein, 85 aa, Homo sapiens
CLPAYVSSGLGFLIPSDDVLRTMARNAIKAKLPDTPCPALLHSDRKEQRNELVMRGKGEYWVQRKYCLSHHPYPGKTTDGKFTTK

SEQ ID NO: 13934 - protein, 85 aa, Homo sapiens
ALYGDESPLNYAKSFRKIANVYSIQMEPLIEEDDDIPPGEDHINWQAPRQFGKHQPKAKQLRKKVTVLKNTKKEEVQKFRPILMA

SEQ ID NO: 13935 - protein, 85 aa, Homo sapiens
VRTDVPDRKVQMRVASDEPPLEFKARHHAPSPQPALSRLKTSHILQLPRDKQSVEFDFDMKPSKELWKLTLTCLILRGLPSSKGS

SEQ ID NO: 13936 - protein, 85 aa, Homo sapiens
ELYCMRDQGGIQYRLVCSIESSTMLEAYLAESTPITTQTSHAQDTETQMVLELQQDLMHLVLDAASQRIEHLAPQKNQNFEHCLL

SEQ ID NO: 13937 - protein, 61 aa, Homo sapiens
PLLGTSEDIEGKATMQGKTTSVSATFEQPALDDVLGQVSALTDRSGQGPVGKCVVYEVRCL

SEQ ID NO: 13938 - protein, 85 aa, Homo sapiens
RIIFASSGKIGCEGSLPARSHPLIFSQREAHPGSPPMPDKTQVIKPRGWKPAQLTPCPHLHEKQLQLTNPKQVFECRSQCAPQLG

SEQ ID NO: 13939 - protein, 85 aa, Homo sapiens
SAFKGGLALQTMEASCSATETDGQDMKLEDESTAGQNPIVGSSDELPMKARHQHLLVKFMFADMHNAIRWVREELRAVTCRLVEK

SEQ ID NO: 13940 - protein, 85 aa, Homo sapiens
KVVSMEVVTALTLADRLQQVSINMWAAVNPLFTQEVERVESFLQFGPMSGLVDHLIPLDEQNTQARTKLRISPPITGMKREICEL

SEQ ID NO: 13941 - protein, 85 aa, Homo sapiens
VPIKLIRGCSHSFKPVFRQFLAPPNASNGHDESWNNPSKNAMFSTARHFMLATGGTFSILITLMLEDTGSECRRASLGYAEQEEM

SEQ ID NO: 13942 - protein, 85 aa, Homo sapiens
FDFEHNAPNKSKLTVANAIQLRYDGDPSPGYPVEKFPARVSEYTLLKTVFGTLSSNGESKLSEGQGGHLKKAVLGEDQFVKKTLN

SEQ ID NO: 13943 - protein, 85 aa, Homo sapiens
TKSRSQICYSLILVKKEAKENLTKDNSSLCLPPYMLLSLGPSGAEGKFKKAPSEKGHIVDVTASLTTPFEVSTPFLRIPLFGAKA

SEQ ID NO: 13944 - protein, 85 aa, Homo sapiens
IKDARLQGSEEVIRESPPFEKMVLVTPPPSPMELSSSEARPQRARIFDLMRWEKYKAGQEARSETMVDSKPSKAAPTEGFEDRSD

SEQ ID NO: 13945 - protein, 85 aa, Homo sapiens
RYSIRVKGDRYLKYDHVLPANGSKNDIAQSRTALCWLPGSDQCQSWQSPNVQTKPNIPNGSCTYVNSHALDTGCFIPCLTKWCEI

SEQ ID NO: 13946 - protein, 83 aa, Homo sapiens
MIMMAYVEEKLRSWEEIAEPTLYLSSLEVLKDISVRSKLAKGESDPVAIRYNALLLLQSVQVIDECPREEKKDKNEYANELNM

SEQ ID NO: 13947 - protein, 85 aa, Homo sapiens
TENPNEQGGREDEAMFPGTSPQELQYASKCGTEPAPPRLCHKYSELPAEHLLQTCLMNRGDASQFKRVFNTKHRRSSWTSPSRPS

SEQ ID NO: 13948 - protein, 85 aa, Homo sapiens
RCQDPGSSTQANDNESFEALKTIYLVSKALISLEDRYNFFKLMELRTPHLLDVPGIRSFLKDPEHLVAYQTKCNCVKKLVEFFKE

SEQ ID NO: 13949 - protein, 85 aa, Homo sapiens
KQRPINWTRSDPSEWHQTLYLTRGRIQKLFMKEALVHEDKQLNGLMDDPGQQVNVPSSQFNMLIAHQNGPIAHLTQNGHHTSSKY

SEQ ID NO: 13950 - protein, 7 aa, Homo sapiens
APDSTLG

SEQ ID NO: 13951 - protein, 85 aa, Homo sapiens
LEPGKEMKGPKEVPNELRPSSAYYDAERDHFHTQKGQHQRYPVILPKLLELKDPTEVGPSYYKCPEERGDNWEDVRGNQTSDQAA

SEQ ID NO: 13952 - protein, 84 aa, Homo sapiens
YTAPSQPSILEECSMMNPGLKDHKKRRSLEEEPIPPPRPAEMTQDPVYFKKNGKLSSRKELSQSGSGIYYPALTGPEFYLVGVE

SEQ ID NO: 13953 - protein, 85 aa, Homo sapiens
NGVRAKPESVQLGASRQQTFGQSHLDDEHTLREGFGQCFWKSCDKEQVLLGPFVKCPWEASYRPKVWRHTAWLNVVSGKETFHES

SEQ ID NO: 13954 - protein, 85 aa, Homo sapiens
WVVYMLVDEDKGSAPSRSIKHAQGVNQRSEERETTVNTDRQPTLHSIATTLKPIPEDQVEVMSPELQVGSPAEGCLGAGNRKDFY

SEQ ID NO: 13955 - protein, 85 aa, Homo sapiens
GRNLIFEEIEATVFENKISPSAVNNPLLAKTQGNEFSFGSIEQFLKTKLLEHLSDPTVHCLSESCVSGEDSDDNRAHSLVKSVRE

SEQ ID NO: 13956 - protein, 85 aa, Homo sapiens
SGGRLQLSVVSGDDTTVADKDPLSYQDGETAASVVTVMVQMYFANRLASGSSKPAWINLGGANSDVPRCNRQDTIYRTASNHLPG

SEQ ID NO: 13957 - protein, 85 aa, Homo sapiens
PRGPPYLVPQLMAQQCIRQSHCENGLPYESLYRSAGNCARERALGAKIQADKHGCLVVVTINCKLMAGFEHECDAPKKTIAKQLR

SEQ ID NO: 13958 - protein, 85 aa, Homo sapiens
VAIVRMWVLRTGESRPGFEHLLLQLAELADPSRELGEVHATFHTVGNGTYQVAPDAKKADSGAYKRRERLVKGRDDCFENKLALK

SEQ ID NO: 13959 - protein, 85 aa, Homo sapiens
ACSHLYEQKILTIQHLNQATISHTSSQGMGEPSTPVRELHNLMPQDDQSLLETAFERLPSGLVGENRLRQRELMDHTDAKFSKSL

SEQ ID NO: 13960 - protein, 85 aa, Homo sapiens
SDSMLSLKRYHGFEEQPQSVVHYTEFPEAPKDQALLGPDQLFTVEQIPVIGNRSKNEGEFVGDSRLGFAAMNADLCATNKSIMLA

SEQ ID NO: 13961 - protein, 53 aa, Homo sapiens
GFCTIDNQKVPGEHIKALFHGKDTDSLVRNVSLEELETASIDQQDAEKKLRAE

SEQ ID NO: 13962 - protein, 85 aa, Homo sapiens
SEKQLDRQEQCKLDERVVCLIHNCSLALSGTLFFLLPLQAALVKKSAAAWWSCGPRRICELAYRQAESQAKHTMCLQQQRGLVAP

SEQ ID NO: 13963 - protein, 85 aa, Homo sapiens
DPTPLAWSSYFALSDCTAVACPLSQVSRKMSMPWDTGFSATSDSKNSRSAGPGSGSEPEADNADSSQGKTKQIIKEYTDSNRALK

SEQ ID NO: 13964 - protein, 20 aa, Homo sapiens
DSHRASPRKLRQLLVVPLDE

SEQ ID NO: 13965 - protein, 85 aa, Homo sapiens
AVWRGPMQEMVRSQGEHMVGPRMQLEPGIFGHREAALFGLELVHKDPILRYPKQKEPLLNKRVPSKIPAAESKVIPEAFWGETSR

SEQ ID NO: 13966 - protein, 85 aa, Homo sapiens
IPITSQPQFVTDSYHQPQHCKIPLTDIHSTIAGIHLAESLHVFALPDRAREMELPKGSINYCTSNWKQWLVIESTKLICRFLLSL

SEQ ID NO: 13967 - protein, 85 aa, Homo sapiens
CPESRKGFGTSHKKKMRMPGCHEVRVQPCEDQESQHNRGIGLLGSFENLSKIAEHARARSGYFLTTAHPGYATGMAEQRGYLIKP

SEQ ID NO: 13968 - protein, 85 aa, Homo sapiens
PEGRANAHQTKLQKQIKLPYFNNPVPVAASTSSTALQEPAVFMRRDERLDKGNEKEGLPYENIKAQNRALEEGIPDSRDLEELDR

SEQ ID NO: 13969 - protein, 85 aa, Homo sapiens
VGMALERQTSDIRGCHLRSSPSSQTLPPASLFALSDELSLLDVKASRVCDSFAQEFNRESLMKRVIHALQEPRGLVYPARICSTL

SEQ ID NO: 13970 - protein, 85 aa, Homo sapiens
TQGLSMRIKAPFAMLWIPGEGPLFKNDDLNSPAKATLEPSQWPSQYRAPHPELKAKFAKGSGRRSMPHNRPIVIRVAELGYGLKP

SEQ ID NO: 13971 - protein, 25 aa, Homo sapiens
KGVSYSTVFETFIPVHPSAPYGHFG

SEQ ID NO: 13972 - protein, 85 aa, Homo sapiens
PKAADHIEKMTPMVIASHMSPQSIKIKSEFEKYSCESAGGSPAPRGFKEKIKDAKPLSHNCSLLREEQHLAQKKPDDKLQQEGSK

SEQ ID NO: 13973 - protein, 34 aa, Homo sapiens
MQSRTAQIKVFLWRSSLNEVESCLFKTARQPAKS

SEQ ID NO: 13974 - protein, 85 aa, Homo sapiens
GNAEWSSYKATLGVPKHSHISAPQQSTAEFTLSPSKQEKTLWHGAIAFIKSTNCDGHNHDSSAKEILNKHIKHVYDSKQAREKGP

SEQ ID NO: 13975 - protein, 85 aa, Homo sapiens
GVNSAITLPEAKLKITGTPLRPIQLEVEAKEESISELPKKSFETRKKSCPAYDGPAITPSVPREPYLGPCTVLKLYGPNLVNNFH

SEQ ID NO: 13976 - protein, 85 aa, Homo sapiens
TMLLEGNTNELKTLGDFGAVFVAKDLSGKPKNPFRKQASEPPNICTDPAKAGGFPASQIMKGDRSSSGTGPPSFEEVRVKVHHLV

SEQ ID NO: 13977 - protein, 85 aa, Homo sapiens
LGKFASDAPRAELVKTPGALLMSQLASNKVTSSEQVLNRKLCSRQEAPHTPEPTRLMEISEMAKKSVLSILNAGQEPGAKTVYLL

SEQ ID NO: 13978 - protein, 85 aa, Homo sapiens
GQQKWEYILGTFKTSQRDPLLSRNTLGLFTQRLAPSADNTLMDYPDAVYAFSQFPNKRQKLPSPLSNPTEEAAFLCSTRWWLLGP

SEQ ID NO: 13979 - protein, 84 aa, Homo sapiens
KEGLIPSELSVVSVNRFGEGPQAESGEFLKEHASIPNIMLYDKAKMTRIGPESNRTKHQPHQDEINKKALGLTLRKEDIYFEEI

SEQ ID NO: 13980 - protein, 85 aa, Homo sapiens
FNWAASSPSREPMKSELPLVREPPSVISVAVSKPGCKHQVSLGRIKAVKFEASGPTLSRHHVEPKQGRGDNIQHGMAPPKCTQDD

SEQ ID NO: 13981 - protein, 85 aa, Homo sapiens
NLCQKKNDEDINLARSMLEVLLPDKLSLSLRNVKYVGKIASEETFSNCRNPASEVPFYGLLGVLTNENAQGKLSHQPRRRGKAQP

SEQ ID NO: 13982 - protein, 85 aa, Homo sapiens
LEESKRDVKCVFDGLDRQVALALAWTVHKPACMPPADPVYKTELYALALSIEMALEVDKVIEHQTPRPPELGDQDKYVKRNAKSV

SEQ ID NO: 13983 - protein, 85 aa, Homo sapiens
MIEEKEQRDLYCDEGSQPELAEDRQSLPEEKDLAHKRTIEKLQDPPLDLTRRFSPECTLIEAVVTAEMEPPQYDLMLALVGFFSP

SEQ ID NO: 13984 - protein, 85 aa, Homo sapiens
GCLRAGGEHLEDIDLLSHNSSLNKLCVALHEGHSITLITDTPRDGRAQVTRTAPTNDKKESDGSEDALSKLSFYAQKKGEHVLDV

SEQ ID NO: 13985 - protein, 85 aa, Homo sapiens
AESEKLENESAGVVFCFQEKIIRKSVDHRAFIQDIDVSMESATDFVPQCDSFRGSDHECDEYSRAALKAETPSPENSHRTPEGKY

SEQ ID NO: 13986 - protein, 38 aa, Homo sapiens
RRLPSQRGSNVRREEVASHDPDSRLRIPSFATMMFPRE

SEQ ID NO: 13987 - protein, 85 aa, Homo sapiens
PSGTRNGGLIVAGSKSFPVVIGTKGFFEPKIKSCHCSSALLLTPVEAHISQNGCKRLASYRCQNARGKPLTPRKTKPPGEQWPGN

SEQ ID NO: 13988 - protein, 85 aa, Homo sapiens
KFPELQAGNEKEPTLNYLDLGLSFTYAYDPKQKSFDSGKSLDEYNTISEPVTDNCRSSELHEAVPEPPGRAQALALWSKYLKGPF

SEQ ID NO: 13989 - protein, 85 aa, Homo sapiens
QNIETEKKGNKHIAVNHFGQKVTEDVSETEAQVALPRSKVLQLKMGSAEVVQPYIVFASPLPIEAISQVAQVKAVTLKKPTLLKQ

SEQ ID NO: 13990 - protein, 85 aa, Homo sapiens
APQAGRGKAREFNPFDKTLLDGLQSSLVGGDGLEKHKYSSSEPCSGPLKPATVLASLWAPTPRHEGTCNQAEDPNRTSTCKDHLG

SEQ ID NO: 13991 - protein, 85 aa, Homo sapiens
QSMQISDASTKPHKSPARLACAWQGVKEQKFGTVEAERVDPIEEEIAPLQSKIVMFKIGSLPNIDPEEEKRMTHPPSCMAEGRFN

SEQ ID NO: 13992 - protein, 85 aa, Homo sapiens
KIHAAAPEGLWAPAEVQKRVLPPTRSEPNQMETRVMPLFDLLKICALQVGEKAVEYNDPGGSLQEGRLQSNQVCHTWALKALRFL

SEQ ID NO: 13993 - protein, 85 aa, Homo sapiens
SIHCCTLDSEEFSITGIGQPRHEAKSVPQTRHLMRKHDLQQDAISTDRLAQVNNIKSGPIDALLSRIPRGRSRIVRYHELDGHEL

SEQ ID NO: 13994 - protein, 85 aa, Homo sapiens
GTQDQELKPEELTTGSGEADVPPTLSLHSIENEKTNRALLKPLNPCLGQQQEIPIALSHWSRASHGSQHLLASPDEELPDELPDS

SEQ ID NO: 13995 - protein, 85 aa, Homo sapiens
AKPQERSNAPGYLAHRSPATNTRGNPRRAKAYEQKENLRAASSCSVIDGFFGLVSFHSIATAVAHESRVIHTNELQHSSFQGRFP

SEQ ID NO: 13996 - protein, 84 aa, Homo sapiens
VVRSAGALDGQESSSIQWVKTGASDGADSFVLVKASRANTRNEIRMLPRQGYLTRDEQNTSSMPGPRSVSLLPEGWQYFGLTES

SEQ ID NO: 13997 - protein, 85 aa, Homo sapiens
GTTEPSCLKKEKNFCTAPIPSFIRACQCEAQQKNPEVVVMPNQADTTQTVKERVHAMEGDVNKGKHQPPGYSNLAPYAGSGSSLV

SEQ ID NO: 13998 - protein, 85 aa, Homo sapiens
CHKDFSGISTEADGLYLEPIFKNSDGVYLVPYRTLDCKAKCTREPSQEFGDVGRLQGADQEEKIMKDNAAPLEDSQSVHPSEAAR

SEQ ID NO: 13999 - protein, 85 aa, Homo sapiens
LGDSQQPAGQNLKSGCPTQVDYVSETKNLQFIGSFPIEPPLANMETRAKQKQAHCHKPGQRFTPRERLCLHLIPKYLPDAATALL

SEQ ID NO: 14000 - protein, 85 aa, Homo sapiens
KLLKKCCQRPRQRHESQVDRPQMALENREVPVQHLGCCLTVYKVDRGRLQSFQEHCRSFASPSRMMSRLMSIRPKKGSALDYRKH

SEQ ID NO: 14001 - protein, 85 aa, Homo sapiens
VKLDLEPGEHVNPSRDTQIASEPKIHTSSHRRLNETPLSQRFSEHHKEPSMVWCKDLADKWPQPSAAQGTLRFLYTVRRSKVVGD

SEQ ID NO: 14002 - protein, 84 aa, Homo sapiens
MPFQSVAARLDLRETDNPKSESELSGADLDLRKKKAAERESGRDIIYGASKEESDTEGIDACMPKLPLQPVSKNALQYPLASVV

SEQ ID NO: 14003 - protein, 85 aa, Homo sapiens
NSNDKFDNLELQGSGLSKMGYGVRFTGLVIRKMNWGNRSSPKFVQKLSIYLLILLVDSKSAECNLSLYRTVQMLRIEDFDLDTPA

SEQ ID NO: 14004 - protein, 85 aa, Homo sapiens
RVPGELKIDGEVQNMVQWAQENLAPQLYKQGDEREVPIVKVMRPGGIEQAGRPPAISKTQEKETESYFNVRSTEANTLHLGNSRV

SEQ ID NO: 14005 - protein, 55 aa, Homo sapiens
MLTINSKEEQTELPKKSEQNEKHSLREQRLQPTDVDPPGESAQSHPTSACNNRCS

SEQ ID NO: 14006 - protein, 85 aa, Homo sapiens
LDSKELDRLKEYSHVRCLRGESPTKDAGSDSHYGLANNASGSKEQSEIRGRFDGPDMLHFQIKCSLHERLAGSFKKDLEQQVQPV

SEQ ID NO: 14007 - protein, 31 aa, Homo sapiens
QDKTDFFEHGERKPSPANHPRGLGEITDVPL

SEQ ID NO: 14008 - protein, 85 aa, Homo sapiens
MAKRWPMEFLNANHLSWWELKKGKGSPASVDMLVLRVDAFGLVHPTRVSKTPPSLRSLHECFEFEYTEREPVTYSIKFQACGEAP

SEQ ID NO: 14009 - protein, 85 aa, Homo sapiens
AFQKILGGWNLLDAPNRAAIFDILLKKTSYSHQNDSNSGEAIGVELKIWSKSVCKEGKADIPIMSSCFKALLITVASDKGSSTHH

SEQ ID NO: 14010 - protein, 84 aa, Homo sapiens
QLNLVTRSEKGADARQAVIGKKPSKQMDRISMSVREWTPVLTELRGGRRISRAMDIKNSEEAAAEIDNREFQLVKVLLRRRLGN

SEQ ID NO: 14011 - protein, 85 aa, Homo sapiens
MDIPAEKSFKMWMILSTLMDRKEKPERNYMFDKDGELLWLVQRGKMEPKLNASYLTGALKDGFSKDGLAGPIDRRVLERYKIIVE

SEQ ID NO: 14012 - protein, 85 aa, Homo sapiens
MDKAPIPELSAANLQKRECATAPIGNADPGEISDVGDLHFEFLVDEELLPKLSGMDTCSWVAVAHGGGQHISWPLMKDYLHLMPA

SEQ ID NO: 14013 - protein, 85 aa, Homo sapiens
IDLRKSKSRQAIVQFIQPNYQIAEFLSPHSNCKRDMKKPLKIGTYALAHSTRKSYSVRLKCRVAQYKMCQQPELAIEFSSCYTHR

SEQ ID NO: 14014 - protein, 85 aa, Homo sapiens
DSPLPRRSRGEILLLATREGINKYDPNVQRSPLNRALSVLVPKGKDNTSIEKELLNGWETNRKREPGVEHQLQAVSKFPESVDRR

SEQ ID NO: 14015 - protein, 85 aa, Homo sapiens
AQKLSVTQQAEPTVRLRVIALQASDQNRFELPEWRNPLYCADVEGDKEILAVGPPGENGDAQEGNYGHEVFMVVTSSPWPAELNL

SEQ ID NO: 14016 - protein, 85 aa, Homo sapiens
VFAHHSDMKNASKKMGEGKNHNGQNGQDSALKESSKPGLTFKSNPDTITDRLDKQEDRSTTISPKSACLMRPPGAAVVNPYYKIC

SEQ ID NO: 14017 - protein, 84 aa, Homo sapiens
ESDDIKASALLDTAPLALKKAPKGEPHYWKTLQSRRQCDSRGHGHRYQQQGGVKAYAEGAQSWLGAFSVQKWRDWSQSFKTSAQ

SEQ ID NO: 14018 - protein, 85 aa, Homo sapiens
SACPASTMGGDLHLASRFRYDCDRTTLEKLCLCQPELFSPLFNSLTEFLMLVRKTLKEFFDDQRLSELWKTTSEAQKCLQSPRTP

SEQ ID NO: 14019 - protein, 85 aa, Homo sapiens
IAHKHHIPHPFCREDHSQQPQKAKDGDDYSAEREQSPATPVLEEQSTEWLIISGLLLYLDRMVTRSKTPFQTRATDMVILLHLEK

SEQ ID NO: 14020 - protein, 8 aa, Homo sapiens
SLLEAITR

SEQ ID NO: 14021 - protein, 85 aa, Homo sapiens
PRDDDSVESGVAGCDCDTNYPPTVQKQCQDGEWPDGYHNYTVFFPVPLAHLPDGKVKKRTCWGFECTSGRDHDDKPIKGSTLGQM

SEQ ID NO: 14022 - protein, 85 aa, Homo sapiens
PEYANLDMGSQPSGTGPIEASMHGSKDCEPRQVDQVARLFNTGPEPFESLFFTLSQLKSNSSQSQPGNACDAQGTRSKNDILTMF

SEQ ID NO: 14023 - protein, 85 aa, Homo sapiens
FEKPKTGTSIVTLFLTLNHYIKRMSVECMDLPPASLANELHGTVEQLSVNMMMHCLETIAQSALLYGDNNTFRHHFCYCTEQPIR

SEQ ID NO: 14024 - protein, 84 aa, Homo sapiens
PVKFGLTGTEPACWAIFSLTFLELLAEPRRGLQLLNIGPWDASCDESELTPLCPMLASEDDLDVAPILCIEGAKEPLELHSRLE

SEQ ID NO: 14025 - protein, 85 aa, Homo sapiens
KNHLDRHCTPFGLPENAEPGPHLKQVEPYQSANKQLPQRTQAFAEAKRATPPSSCVKIMCVSLDASKDKKNRFLLPELLVKLRLP

SEQ ID NO: 14026 - protein, 85 aa, Homo sapiens
IGYSQDWPKNDVFESQQFAGALVSSKVFTNLIYKKKQEVIKDVQPPLCEPILQVTNPGLTLCDTLLEIEANSSMIVCNSIRERNP

SEQ ID NO: 14027 - protein, 85 aa, Homo sapiens
MRLHTDKRKSPSGKILNTADRQNEYSIRNLGTHADEKVFMVAPNFLSFNLPTPKLLEPSVEASFKGSTDVHSLVEKHEPFNNFYS

SEQ ID NO: 14028 - protein, 84 aa, Homo sapiens
ELNGTAPSESDLTEGSLQRWITRTSSSHQRWAKSTCPRLCSGVLPGLEDCSDSFQLKPEVVKKKLPTVRQAKKESLIMAMSSVL

SEQ ID NO: 14029 - protein, 85 aa, Homo sapiens
EQACDYTDFPEPFGDRSVKRKNPLFKSMAAEISLKGGHVWIKTESTIKFGVKADLISPLIGTLVAKSCWAWSRIGSSPFVLSCLL

SEQ ID NO: 14030 - protein, 85 aa, Homo sapiens
LPRLNSTTAALSRQEASPHLLSDKPKYPFAQSSKAVNTAESVLEQTPMEPGSPNMGLPVSGELVLKPFKLEPQQGPFGTPEHASR

SEQ ID NO: 14031 - protein, 85 aa, Homo sapiens
QSNGEWSDKVKGSVVDNPPGHPLSDVKAIMLQGDHLGGSIFWRKPSTTKMSSFIPSPVAQGDLSLQNFGSRRPPKEMCIGIVSGD

SEQ ID NO: 14032 - protein, 85 aa, Homo sapiens
LEFIPPGLPLFRDEGIPCPDETQVPTLERKGLVSSEQASQSYPPFSPGYRLLTLAEHAEFSFNSSPIEHAPALMEFYFHKSGPDC

SEQ ID NO: 14033 - protein, 85 aa, Homo sapiens
RPVDIGELTDVSFTIVRQHRVKVFNAQNLKALTPHGLEATHGSVEKARFSLQGGFLVRPIDPQWTPTKGIEIVCPAYLQQPSESD

SEQ ID NO: 14034 - protein, 85 aa, Homo sapiens
ERGAVKKAALDLVDQLSTSQVKQPLVIKGPNHALRKKDNLHMEPAKGHDEELSPANRVYYSGILMRAALLYLSFKPGKSVYSEKE

SEQ ID NO: 14035 - protein, 85 aa, Homo sapiens
GAKAEASVLRSGTLSIGMNSQSIDKDDQDSVAQTDREWWHDVEFLILSDDPGHDESIKTNLILLVEPEPTVKYIEYLSLPTVDKY

SEQ ID NO: 14036 - protein, 85 aa, Homo sapiens
KPKADAPVTFNNSDGLNITLDLCQSELASSKAIGGSLAKLKPVAPLRNKNKALPDLAQIAPANNQVRLPDPFMWTAQLEFELTLT

SEQ ID NO: 14037 - protein, 85 aa, Homo sapiens
WLLFRMNEEFVCEEKAGDEFTGEGSVNSRPRSTGRWEALQSFCQPLRVSSEESLLAKEVDKEGPIPIGTCYRAIQLRGYLAGLSG

SEQ ID NO: 14038 - protein, 85 aa, Homo sapiens
KSHVLYGAPPQFVASDSSNRDAAKVVERKGLPEQGKQNKGGKEIKTLRYSIFARGLKESPEAGKSSSLYLVSFDMWLGCLRSAAK

SEQ ID NO: 14039 - protein, 85 aa, Homo sapiens
DGKRECSDFEAAKGKDQSENETHLDDLTIAWCKVGDHAVIILYTIIGQQQREEKGFGFTFEWSAACTVSNINAQECYEGILMESK

SEQ ID NO: 14040 - protein, 85 aa, Homo sapiens
TTDELVPSLEPLQDESEVCTPLSQPQNQYDRWGFFTHSELLQLDELDVPDPTVMIQDVGACGKPMSSDVQASKNKVWKGKKSVDF

SEQ ID NO: 14041 - protein, 65 aa, Homo sapiens
VNHKGSLIKATKVNAYDTLKLASAEATTTTPVFVKARKSPSGMYIRYSVPRSNLDPCIIASQNYT

SEQ ID NO: 14042 - protein, 85 aa, Homo sapiens
TDKKNWTPTKLLKGSDNLAQAECASGNSIGRFRRPQMTWLAVHLQVSILSTGVREKLEELKWGVAAPVGSRKNGSAEEFEGRSKV

SEQ ID NO: 14043 - protein, 85 aa, Homo sapiens
RCMNKSKMVWGEELLEFGAWLKYMSVVHGRKNCLLIEFIDDPGQYPGPGHTTAEFKPGLCPERSQCVKLDYVSPTKKVEQCMPRL

SEQ ID NO: 14044 - protein, 85 aa, Homo sapiens
KNMQYIKAKQVPMLDISKGTQGLPKDTPIERFSVWRFFFPKNRANRLKHYKEVGYQVHDTVQDSPNKKFRTRDASALLAADQRDR

SEQ ID NO: 14045 - protein, 85 aa, Homo sapiens
MFIFFVDGLMQPILDCKKVKARYSEMLGGCTEENSDGGPTKVKTVNSAVYMVNEEKHPIARLCLIFGENLPPSQLQSDQGSKGLA

SEQ ID NO: 14046 - protein, 85 aa, Homo sapiens
AGKSEEPVLIKNRQKGQLACQLTSKPLHELLFDGRNGAKYHLRKKDARTAKSFREYPAKSKSSADKNCKGQKLESKKRHGSDKEC

SEQ ID NO: 14047 - protein, 79 aa, Homo sapiens
EVCYAPTLQQSKKLGPGKRLKVLITSLLVLNEEELETEQLETTNKTSASAPNPYRDEVKLETSIAEAHDAQTKPEQDTN

SEQ ID NO: 14048 - protein, 38 aa, Homo sapiens
EREEQVLIELYPEGTAPFTGLVQLLVLFQPIHSKVYLA

SEQ ID NO: 14049 - protein, 25 aa, Homo sapiens
QWSSLFPMAKGDVELLQGDGIPEVS

SEQ ID NO: 14050 - protein, 85 aa, Homo sapiens
TPTLLQRVSLALSEHVTWKIYGIKSPVPGQKSKVGQLVTRSMRRTFTLCEQLMLSLSTYLSKISRYSRNYSNVSCVGILTVVSDE

SEQ ID NO: 14051 - protein, 64 aa, Homo sapiens
KDTMLDADQGDLVVNSLQVSHAVVHKPMTPLATKAILQSLGCPACGQGLKPESQPDGSTSRHTH

SEQ ID NO: 14052 - protein, 85 aa, Homo sapiens
ALYAVKETKTWDSEAISTDEVLVSSDLLDKCEVALFASPMLEMADINTPTSVTHFRGVHCERVNGHHRQGLKKPYPSYRGDILCL

SEQ ID NO: 14053 - protein, 85 aa, Homo sapiens
PLRQSPAQSQAASAYLESVKKCDREMARIQSGLSLTDRKKTRDIGMVKGRVATKFLVALNPRAQHLMRLQLYQDEGQIVIGLTNP

SEQ ID NO: 14054 - protein, 60 aa, Homo sapiens
YKAADKLYTPDIGGLILATGQGLVTEMSEPEILWIDLKKGLIHTELVKQNQSTLKTECQL

SEQ ID NO: 14055 - protein, 10 aa, Homo sapiens
KISVIDETPW

SEQ ID NO: 14056 - protein, 85 aa, Homo sapiens
DFGQAYLADLSVPRNKEEALGAEERLRTGDRNKVHIHEAQESGKMSADGAGSIAWEITRTPPPFEFEASVRLEADNLFHMQPQEF

SEQ ID NO: 14057 - protein, 85 aa, Homo sapiens
VHSRAGTEYPLVLHKSTFRGCLLSRKQRNNTSKCKHTVDIGEAGQLSKDMQWDEYFSNFYRAHLELIERSSAVAVKQFNLLHTYL

SEQ ID NO: 14058 - protein, 85 aa, Homo sapiens
ESITQDGIKSVSSVEGEERATTFAKFGIQDKVAGARTLFNALEGAVYTKKAWSNDTKEPCGIGHLCSAVHGSGIPLEVHGFEEGE

SEQ ID NO: 14059 - protein, 85 aa, Homo sapiens
SSFDRKSAKSGRTDKMLEMSEIHELGPGNRAIYIKITLSQARLRVASGGPLVGKFAHQQVELELALNESDAQNHQESTLQKPVWN

SEQ ID NO: 14060 - protein, 85 aa, Homo sapiens
YESDHDKTWTEQYATQRHGEPGTDRVEYAPMQSMEVPPNSVKNGGGLLKFLFQQQETYLNMIDTANPKRYTATAPQGSPKLEGES

SEQ ID NO: 14061 - protein, 85 aa, Homo sapiens
RNSTKLLKYKKQLEPEDVQRYLPVVLMQDTQEGTSILSLSLKLVSIVCLQLSLIRFRGTECMEKAFYQAKVVCDGPLSLIMTSQW

SEQ ID NO: 14062 - protein, 85 aa, Homo sapiens
GDDGGSELSTIFSNTECCTGCIPFNPSPSKTPRWYSIRSSKIIVVSRRQLKQVPQQKFRASPLRKGALGEPHHTKTLATPSPEPN

SEQ ID NO: 14063 - protein, 65 aa, Homo sapiens
QLENELILTCHNNKVGPGQAVKVEKDWFPIVTLGVDHQAWETSQHIDPSVTEAEANPHPFCQDLR

SEQ ID NO: 14064 - protein, 85 aa, Homo sapiens
YFEYHDCIIKLPARRKCSLSEEPLTTLITTIQDCRLTITCASSNTPAHLFATMVVGETLLCSSRFEMKDMEFLFRLKVFNLMQHP

SEQ ID NO: 14065 - protein, 56 aa, Homo sapiens
PSTLKSDRSGECDKGDQNDCVKVFSLHCGAQNLAVSEQTTEPMAPQEESELFYISP

SEQ ID NO: 14066 - protein, 85 aa, Homo sapiens
EVVDLNEKFTTLNVALEHPTAIRHKSLTLQPAWRLGERVGRRLGTKAAKEFQGFYELQGKKTNSARQRLERKMMCRSLLRVAPRN

SEQ ID NO: 14067 - protein, 85 aa, Homo sapiens
RLTLPNTYALWRANPLVSDQTPIPALKNALCKSLFDIPSLGDSPPKGRLNQDPDPQTRLFTLDPQVTNTMYTLGCPKIVRGKILT

SEQ ID NO: 14068 - protein, 85 aa, Homo sapiens
NLDGAKGASDAAQSSTTVQAHQMKRISEMVIRPPNRLTWPIVQSKTPKQVVQRHTGALLVIDIPPKNRKKKTLGKGLFSRKYKLL

SEQ ID NO: 14069 - protein, 85 aa, Homo sapiens
DSVGGAEHAAVAELLHSAGTGQSTKNGSEPIEDISQIAGVMNTLPVSSEESEALEVESGGHMDLPPANPNNGEWLSFECEHGFAR

SEQ ID NO: 14070 - protein, 85 aa, Homo sapiens
MNDVLRFKVVSQLPALDNSKFQFSQLELILAPEGEIFESVLRFRSSNGGTDPFVRWMIAAILSHLLFQKAEGALASAECIVTQTH

SEQ ID NO: 14071 - protein, 4 aa, Homo sapiens
PEYI

SEQ ID NO: 14072 - protein, 85 aa, Homo sapiens
PPEDMDECEGEKSAVTCPKLDKYDEIAKNSQVRDRKVKTASTRSICLFVAYRSALQKSSKGMFPHEDCVATPQKARVTTFLRGSG

SEQ ID NO: 14073 - protein, 85 aa, Homo sapiens
RFEVIEIAPKGSLLPLCNELLSHPRSNSDIRLYKATSLTTQATDPVLRLPADEPKQISTIFLMHKQAVLHLLTQPAVHQKRKIHI

SEQ ID NO: 14074 - protein, 79 aa, Homo sapiens
QSDRTAVADQSMVQKSNLGMTFERPDEEALKLKNKEDDIDSWEGQPKIRQVTKRLDCELHETLYAWASTDAPSHAKDKL

SEQ ID NO: 14075 - protein, 85 aa, Homo sapiens
GESTLGANLTIEMCALVKWASEPITFEENQCLRQNEATLGTHGKRLRTSSAPQVEQLLNEKQARVKNLNAPTIVLEQRPPQSERL

SEQ ID NO: 14076 - protein, 37 aa, Homo sapiens
FTTISHLFKPIEAEVKATSKDFVHGHMVEMKMQRSEQ

SEQ ID NO: 14077 - protein, 85 aa, Homo sapiens
HVLQQRKQEGAKALIEIKLARHFETVLRLREPSMFIFSSSEVEDSVPSTEQGLSLHATLNLADFSSAVEEKEPGGAFVEKADSEM

SEQ ID NO: 14078 - protein, 85 aa, Homo sapiens
PLNYQVPDPLMSASVNAFLDSVTSTVLLVSYMEPTQHRHCIASLICNATSKVNTLLCYPPSREFGTGSPASSIIPLRPKELVRMG

SEQ ID NO: 14079 - protein, 83 aa, Homo sapiens
SSRVLYGGLPESLENPEGKQNVEREGYELFLFSLQRLLINDQLLECEPCEIKNPAEPRTKRAGICTEGTEPAPVQFYLQGSLC

SEQ ID NO: 14080 - protein, 85 aa, Homo sapiens
KYPDKSQQSVGEDPVPSSPKPKDTSDGGDIQSHAELPQTWHHLINLRVDDQAIGFSAFKHELRAPVEELWIEFNGVHNVYRCHTD

SEQ ID NO: 14081 - protein, 85 aa, Homo sapiens
HDPGHSRPRLQMVLKQESDQPGLLDFSKMSWLSSSAKALEPHESPHTASQRTMQESRAKKEGLQIVNLTAGTNNNDKWGSIHKSD

SEQ ID NO: 14082 - protein, 85 aa, Homo sapiens
VQQEEEKKSAATCGQRTKTLERDGPPSVMQGHLIHGIPNPHAFAHLRVPDEIECRQPYKTKNLSSPALKAMNFLELTVPMRPNHV

SEQ ID NO: 14083 - protein, 34 aa, Homo sapiens
ACQPFKARISTDFEGEHGNLAVSFILLAKLAIHP

SEQ ID NO: 14084 - protein, 85 aa, Homo sapiens
NKEPNRTTMVREAGPLYTSLEAHLSAGLAECTGSKLRLPTLTHPPIQRIEENGGVTLIGSGGHTLAFQLLNELQPTTNMHKNPET

SEQ ID NO: 14085 - protein, 85 aa, Homo sapiens
SVACQWKQVGGIDPDIVDTHLAGSISSQGSFHEAKRHSKSLTETAPALSGLRADRTCATQLGKPASKLRRPNTVVTVKNRNLIDV

SEQ ID NO: 14086 - protein, 85 aa, Homo sapiens
ASDVRGGTLETSEYVSHELMAWRTLNGQLDSYELVDCFRSSGLTETTDVHEDSRENRVALQGDSAGKSEQRTSKVECSPEATLFR

SEQ ID NO: 14087 - protein, 65 aa, Homo sapiens
MHSGPVGSLILVSSGQLAPFAEPAFEDIDAVHGPFRFDELKHFDAELALVEPQTKDECNGPQKSI

SEQ ID NO: 14088 - protein, 84 aa, Homo sapiens
RFQGKQSVLLRTISLARNCMVDHSEHAVKPRSQIGKGADIYAVFREQTSMQKRPQSDCESGQMTNKDPKWEHDLGREREHECDR

SEQ ID NO: 14089 - protein, 85 aa, Homo sapiens
WAQAGTKHENLGKQVVLAYYGVKLPEAQPDLKVNNSLRVSDVGYRSHENKKGTREAQEWKDQGSTKSHQLRSTLWPQIDMVDECD

SEQ ID NO: 14090 - protein, 85 aa, Homo sapiens
QTSRRMQGAASFRENVFQLQGIRDKFEVPVLHDHESKDRQELEETPYLEECNMLEADREFEVPDHHQRGKANRNQQLGKRNLSDA

SEQ ID NO: 14091 - protein, 22 aa, Homo sapiens
ADPEQPSLVSRYGGFRTVSMFL

SEQ ID NO: 14092 - protein, 85 aa, Homo sapiens
NISTGMSAFAADPALERFPGLAWCPRKPGSGHFHDTFSIGNGTSTKMNLEPQTTKQRIQAEDAPPFFISGQSNLFADGMGPQESD

SEQ ID NO: 14093 - protein, 85 aa, Homo sapiens
NAKEKEPEQSTSVNALAHDTKETPILQQSISICVLLGALFPRPKQLNAECPGSKDDGRTRSKTWQGASGSRSSYRIKHREIVRLR

SEQ ID NO: 14094 - protein, 84 aa, Homo sapiens
LSPILIDCIAPEGLGLKPRAASTKYAVSLTCSNTNYVTPTLITEPFNYCLPSASGSIESAASEQPLVGLLTPLPEAVQGVHSVL

SEQ ID NO: 14095 - protein, 85 aa, Homo sapiens
ENSDSGPHGHMVNKEGEKLIKSVLNAADTVTEALTKPRPPQHWSPRIGHRKWKIAYANEKSLKIGSDNTIQDDKILGSRMFDKTC

SEQ ID NO: 14096 - protein, 84 aa, Homo sapiens
NAKLKLRGEKPMRCQLVSFVTNSDALHLTVWALQKTTLVSHVRAANSASQLRQQNKDKFIGISTERESREDSEEKKKGLSKNSA

SEQ ID NO: 14097 - protein, 85 aa, Homo sapiens
NKNMLPCKNDQVRAVLLLGRREPDIVITSMLPLQTGHQRLRTKSESQERSSRRPESCWVHTSIQVEIAVNTSHECLSLPVTHCSE

SEQ ID NO: 14098 - protein, 85 aa, Homo sapiens
QCKQPAGELNFNRMLAAVAQDEDLLCHVESLAKKEASLDQAPSDAYCEHSFDHLTWVKARHRPPRTRPIKAIIYHDPPEQDSQCL

SEQ ID NO: 14099 - protein, 84 aa, Homo sapiens
LPRASDTEEKSPRMQSKACLCWQTREVLHNPDSDPHPTMTSYKALQEGTADMITAREESPAGEDFQIDKQEEEGKISPALKLES

SEQ ID NO: 14100 - protein, 85 aa, Homo sapiens
LLCLARLLTSLTEEYALRPADDASPRMHFLKDFPASFDTRHLKHTMLAQIHKFKLFKEIIVTYQQTNYQLNMSSTLGLPSINQNV

SEQ ID NO: 14101 - protein, 85 aa, Homo sapiens
AENSKSAKQIWRLGGWDSSAMNDRTRESANGIGQFREKGKQDAIKEPAAMFCGFFDRGFLGFVAPCRSELENQLSATRFGAEQGY

SEQ ID NO: 14102 - protein, 85 aa, Homo sapiens
YKMGSKSINNLILNRSISISYRTLFTRGVDISCRHFHQDAPKVEKANGAGSVAKPSTERQEHKDDCQAGVYGISPWIVDSRDSNC

SEQ ID NO: 14103 - protein, 41 aa, Homo sapiens
SDIRLPAQAQQAHKEMGDVYEFDREMNTQEIRLKSASTFVL

SEQ ID NO: 14104 - protein, 85 aa, Homo sapiens
RIEAGQTNVQEESEFLETSGATQFDTWQEPTSQTRSVGEARPKGGTNLFRPYLFSPYDVVSLSAHLTDIGEVQLRTVQLRCHNLE

SEQ ID NO: 14105 - protein, 85 aa, Homo sapiens
AERESRSPINAHKQFQYISLLHLLRLKPPINEVFSWVEKNWGGLQSRIHKTAHESVGDEKLGACINLGCGDTKTESLLVRPVIID

SEQ ID NO: 14106 - protein, 84 aa, Homo sapiens
KNDGEGGTELVPTGVLREELVYHPALTPMCWDSEERKSAETPAVGCERGDPGVVEMMSLFALNINGETVRGYKASDDLSLPVQP

SEQ ID NO: 14107 - protein, 85 aa, Homo sapiens
VAQLDQRETTISEAFFSSGASSRGYQRKPCSVRKQARQSFERSEFCGGQSLKTRPTSAAVWAIPNEQHRFTHLLTLPELSPHLLV

SEQ ID NO: 14108 - protein, 82 aa, Homo sapiens
ATGYIDESYAGVCDLEQNAKRVLRRTRGSEMVVSKDASWMQLIEDLIRLRVRIPCHLGASTHVDLNTVPPLSYELVKTALFC

SEQ ID NO: 14109 - protein, 85 aa, Homo sapiens
GMTGDETRIPTLTLKMLERGIVQTNRQRNLISPVDTKDDFWEYLLGSLGSVLKIRQILSCVLPGATKEEMGRDVTQTCKRELNVE

SEQ ID NO: 14110 - protein, 85 aa, Homo sapiens
QALTNLPMAEYAPGPMKDPVTIEEALDSGEKHNQLHAAERLSIYDSAKRAQKQLIAVKKGIVGAVVMACPYVHEEAQPLGRKSGG

SEQ ID NO: 14111 - protein, 85 aa, Homo sapiens
ACGVLWGHQPASKSTKPISKSSGHAKVGEPVIDVLPLFLTKANDFVEGMPSATQYSHPSTKHTLKGRPQYKISHVEKVSKQAVAR

SEQ ID NO: 14112 - protein, 85 aa, Homo sapiens
SARNQLTNSQECTYECSLYGVGNGAKDADLKTLKESPQSTHTSVGNEGGIPGDALMPGTGIGNALDSKLRSLTMTLKESDVKLSE

SEQ ID NO: 14113 - protein, 84 aa, Homo sapiens
GKAKKRRPISFLSPQSRKEMNIRERGDNRINVFGANQLHAKFDNKKTIESSNECDVCLLHNYDHYDSTFSLCIASAVLGLHACD

SEQ ID NO: 14114 - protein, 85 aa, Homo sapiens
SLDHCLLHGLQAFLDSAHTTVPGVLLNGPQLSSIYYMDFTHFLKIPVDGRKNMGRDMRKGTTESWPSLKWTHNMSKSSQSEFNFQ

SEQ ID NO: 14115 - protein, 34 aa, Homo sapiens
SQEKHDLCARLEIMPYDLRPICRAQTWEPTQCCI

SEQ ID NO: 14116 - protein, 85 aa, Homo sapiens
EVSAQPLHAWALSLKTLPMATIKFDQEREEKVGALPFRAGVSSAYKSETQNEVERSTKSETIKKDSDRTESPAPSGRLETMKTKS

SEQ ID NO: 14117 - protein, 85 aa, Homo sapiens
QILKNQFGACHLAAVTRKFFAFKKSVTCSGELGFGLPPLSHIRDFDERECMAASCSGTEMVMRTRVGAGAPKPPESEYLAVESAA

SEQ ID NO: 14118 - protein, 85 aa, Homo sapiens
TDILMVSMSGPELNSESWQKGMAWPSLTLGKKYRSTYLENKHKAPVGPLPSDIESTSLISSFLIMLAQREGRNDAMPGEMMNDVL

SEQ ID NO: 14119 - protein, 85 aa, Homo sapiens
PPSEEGVVLSQRPACKDARLPIEERKCVHLSQGEPDPGPSSTITNSCQFYGAPAECAEGNSWCWAFFPKFMGTNYRKPFESQDQA

SEQ ID NO: 14120 - protein, 85 aa, Homo sapiens
ELMMFHVLARTEGLVTTTRKKLSSIEIQAATNLDRAQGKRVLIGSLIRNFSKDSDSKESVHMMTSAIELSCMEVKSCLEQERVKF

SEQ ID NO: 14121 - protein, 85 aa, Homo sapiens
SAGPVEHNKGQGDTNTPIIKKANDTSRPTRLQSPNERLQHKVWFMAENYEVVKDQNDHRQLLFPCSRQEGGFHATNLPTLQRSFS

SEQ ID NO: 14122 - protein, 85 aa, Homo sapiens
PQETRYVRQRGVFPSPGLFDNVQGEKDNLSSFSKEHDTMDESTPIQSVGRSLSERTKCGIVICLTPLKEVITQQANAVSHKVLKE

SEQ ID NO: 14123 - protein, 85 aa, Homo sapiens
AQLSNIVLRISILFNSFDVSGQTVEQGTLLCGKAFQASRPILVAADDLPKLAGEEECTSQEDQAPSECNFDTKSTPGVRSHHNGP

SEQ ID NO: 14124 - protein, 85 aa, Homo sapiens
EDQCTTKDSSDTIVCGKHQQQCCGESVDPYAEILESKVALMSTTGRYAGKRSFGRGFEVRCKEADDTTCSAGMSEINNNTVPEGA

SEQ ID NO: 14125 - protein, 85 aa, Homo sapiens
QQAWFEHDLYNRRMINETLALRSPGKLYSVFNTLLQLEALRARDLLHKNKKCSLLESGRSGQHIFTTSKSKHNRGALAGTSYEGK

SEQ ID NO: 14126 - protein, 4 aa, Homo sapiens
GSQG

SEQ ID NO: 14127 - protein, 85 aa, Homo sapiens
ENWCWKFVLLTPGEEERHLDKKALKELQLVTKLLHRRCPHPNTAHDALQSSLAPKSHGCAQGQFAFLRLASKLRKMEESASLAGI

SEQ ID NO: 14128 - protein, 85 aa, Homo sapiens
ASSEMIHIMVSTALLKDEPSEWKYLQEYQTNTLPHSIKSTVVKIYMANNDITNTGQGYGRKSTSPSKGQPLRKLEENDKKGTMCE

SEQ ID NO: 14129 - protein, 84 aa, Homo sapiens
SMQPVAEEQHTVGGSRDAYQPNKNSQFIRSFPAYRLFCSTDSKSIKAGNSAVDCDKEPAHLIHREEVVKIPVLCPPPETAGQVM

SEQ ID NO: 14130 - protein, 84 aa, Homo sapiens
VLNDAFTLSGPLQRADKLASRSQEKFVQQSGPKGSSPGMETYNPAPTRANETGKDAQSWTDNQQPMVQHTGVTSLFLSYHLSDD

SEQ ID NO: 14131 - protein, 85 aa, Homo sapiens
RKIDALAAARSIRKDPGPTHGGKNYDKNKVGSHPERENRATSMQDRSEVKGWRATAGRMYFPIKISNQKDNTTVPIKRVVRRQFK

SEQ ID NO: 14132 - protein, 18 aa, Homo sapiens
MLCSREKRQCSQPAGHRG

SEQ ID NO: 14133 - protein, 85 aa, Homo sapiens
PHVRFAVDLHDHELLEEVPSTRSKNKSADSQTKWFERPQVSRVYYLAKAQEEQKTAYARLASLVSLRSPDFSGTQKEMTKISTVK

SEQ ID NO: 14134 - protein, 85 aa, Homo sapiens
AKIGLLRTRQKMRLDGHCSLVESEKSLIPAQESKNVNPANTICQGKPKTEDKNPLWAFPKARLQSVCRPRGNKENQERALMPLRL

SEQ ID NO: 14135 - protein, 85 aa, Homo sapiens
GINFEKCLEVPGVQEPRRLNDRKDLIRQIGHNGWRTETPLPLNRGNWISTKMDPKQPRRTHKLSNKSGTISSTGIQWGLYQYSTY

SEQ ID NO: 14136 - protein, 85 aa, Homo sapiens
RINALVKRYAQYSGDSDESLIIESLSGSNPHYLMLEETSYPQSMELELMPGDSLLVAAGYPQGEGAALHAKEASFFYLLTMQCPT

SEQ ID NO: 14137 - protein, 85 aa, Homo sapiens
TFTADTGQNQGWDTEFLHSTCFKWKIKRLVRKTIATINDESEKLLHGVSQKELEIDPSVHSSGEQCEKCKQRRAQKPYSCWSGCH

SEQ ID NO: 14138 - protein, 85 aa, Homo sapiens
YKQNFARYLRGFPPQWKLRPNKNLTYTVAGTNDCKPADCRTSLFEELRIQPVLLHQEGRFLRRRGNSKSLTSALGTEMPSRKWAN

SEQ ID NO: 14139 - protein, 85 aa, Homo sapiens
SLPINGRALCFQERKFGSRSVAYKKETEAYQEVIFHSWNAPSKPAPCKKESQARSRTNCDNGILGLTDQKRDHALIETRELPGKR

SEQ ID NO: 14140 - protein, 84 aa, Homo sapiens
DQTIDPKQEATVQDQNESLSDPPMRLASREDSEQFVLIADEANGEWQQKNYSPDVWSKSKRRPAETSPVEKPEPKPRTTRKCKL

SEQ ID NO: 14141 - protein, 85 aa, Homo sapiens
RVHPAVKIDSAPWEMAACQAFGSKPTQGPPNVGYKAPQNILAHTMDIKIDCSPTLSAGLPDDSNVEVTAIWGLGTPMKCLKKMHW

SEQ ID NO: 14142 - protein, 57 aa, Homo sapiens
KPNNHNDMVGSSLGLDRHCESPHKLVEEDAEDARLLGIETEEQETNLTFTYQQGGLS

SEQ ID NO: 14143 - protein, 85 aa, Homo sapiens
TRFPLLDKGGEPPMHLSATTSLNLYGCMQRVGEVEMTLLPSRPVLAPEKRTKRCKAFMEPRASPTAHQTDRGTTDLKLFEIGYQS

SEQ ID NO: 14144 - protein, 85 aa, Homo sapiens
KNESMSQQEENREKDQSFLVSHAPIGGFPGFASGHLHNFNGHIMNLEHNIKDILRALVSLDIPEPTSQTIVEPDEGGSNDDRWEF

SEQ ID NO: 14145 - protein, 85 aa, Homo sapiens
SEYYLQGMLLYNNAPEVNPKGIYSASPGKELTVQAAGGLFGGNQTVDDIREVPKTFQCLYSSPHAKGELVIKAAYPKFAVPEKPG

SEQ ID NO: 14146 - protein, 85 aa, Homo sapiens
NYIDNSCACIVQISKGKDPQQKADFLVSQVLGQTCIVTQFNSGMVFFLWITSNGLTTTENKFPSPSEAVACILSQGRFTSNHYFV

SEQ ID NO: 14147 - protein, 85 aa, Homo sapiens
EPEHWGLRELFVVVLWKQGAQSIDQVDAQSQPLLLDVEAFAMFTKQVMEYSPVEKLPNPFKLDLQKLQPLFAVEGDQHTGPRVGH

SEQ ID NO: 14148 - protein, 18 aa, Homo sapiens
MSENEDIGLLRLGHQEVD

SEQ ID NO: 14149 - protein, 47 aa, Homo sapiens
PKIEQELGAMDSTATDVRKISDEEPQDGWPSGVQYVKQDIILPWPLL

SEQ ID NO: 14150 - protein, 85 aa, Homo sapiens
GKEASLVENFPKKRLALTKLTQAFAKKRAGIALGEYCAADDLGECMSILKTAGLTDSTCKRAALGSIKAEFRHRSFTDQTHLHIS

SEQ ID NO: 14151 - protein, 85 aa, Homo sapiens
ADKKTRLAAIQALGAQEEGKVRLYQIALLNLFNGGDLRHSYQLKPSNFEVPAIQYWPVARTYELAKKQDIVTALKLGTPHRIKHN

SEQ ID NO: 14152 - protein, 85 aa, Homo sapiens
KELTYPACWMQQAGTGHVIENGDETTVSTMEQYTIVLKVSYFRKRQFKTPDKNAEDGARSMPGTLKSVVNAPANESLRSSKPMRV

SEQ ID NO: 14153 - protein, 85 aa, Homo sapiens
IGEGPLPIIDAIEKRGGNKGETYKHPARHKCRADEGQLGDILFVRPLSAAVPQHGDKVPPTQAHGRDGQSNRLQLPTGGHEQCSL

SEQ ID NO: 14154 - protein, 84 aa, Homo sapiens
DGKMVLNQPEEKNVRDGTSESDSPEAQSTVGVGVHESPDGTGFEGLTTCSVAQSQDWRVGKREITGFCTLTAQQTGVQSGLLFE

SEQ ID NO: 14155 - protein, 85 aa, Homo sapiens
FADPVKANHLQEVMYVPCRGSTVSAGPLSSVLPVAPDHVEKRKGVPTTVGDQDKRGIGAGKQKSREGGTSVPEGDTWPEWLEPLP

SEQ ID NO: 14156 - protein, 85 aa, Homo sapiens
AGKGVPKSEWALTRQLQAVVKETLLAAQKLHLVLRKRKPVLALAEHNSSLDTAAMPLTDKRWLAVRYTQLATGARSSEAPVAAQM

SEQ ID NO: 14157 - protein, 85 aa, Homo sapiens
KCPPDAIPLMQEITDTVTERALNVPTLDQFLSLLSPFSERVITDPGKQLEKKLESSYERTPRVDSKFIQATRTKQFISGVFPDST

SEQ ID NO: 14158 - protein, 85 aa, Homo sapiens
KPAADTKHGQSKAPQLQIPEFRACPVFTQHEYVPDENAQVPYPPYAGDPTSWGPFLTNVVPIDLCGRLQEDGASVGKNDLSAHMA

SEQ ID NO: 14159 - protein, 85 aa, Homo sapiens
FRKFGIQSKFEGVNQENRILKKTTGTPGDSASCVEGSPLLCKEKLITQQELKLAFLATLGEEESLCFIKDGAGRSERVQEHMIQP

SEQ ID NO: 14160 - protein, 85 aa, Homo sapiens
KLAKQPEKPIPAPMSQGKLERGKKKGGSCDRCWCIEEQLVCQSVCMPQPSRQDTSIQAWFLPRFGTATCLKNLRMKGYPQLDLFP

SEQ ID NO: 14161 - protein, 22 aa, Homo sapiens
GSLMQSHHPLLSRKPAMTQRIR

SEQ ID NO: 14162 - protein, 85 aa, Homo sapiens
ESFSYESLAVDILSIQGKLVKIWMWKKVLDTNGFMGHIVYSQHETCPINWLKTDSLFPALKKLQEFATDKQLTILLRQRWCTYVR

SEQ ID NO: 14163 - protein, 85 aa, Homo sapiens
PAIQFWAIDDVGSQLARATTLLTTQSTKKKFLSEFGLHAMLSCSNQNKSHTPAGPPQEMKKELGGCLPTAHKASLTVLSMQLDPP

SEQ ID NO: 14164 - protein, 85 aa, Homo sapiens
REDLKARYSSLSDKDDFENKDQSGETQAGSRTHLTQLTEFSSTSGQQQSARYSNYLGGHILVMFALDASRLQHLTERDTFQPLMP

SEQ ID NO: 14165 - protein, 85 aa, Homo sapiens
NNERHKSMEKECKRMRYYLFRIQCIVGTREDEVLPFKHPLKQSNPSAPPNDREKDALEATFTEAIGIAGAASGGGLKDVVHDGRA

SEQ ID NO: 14166 - protein, 85 aa, Homo sapiens
SPESDNADREKQPRFKHYAEKEFRLLFRCEFVDHLREMQRAGLNLIRGIPDVAPQDLFGEDTVAPYAGTCNAAHGAEKEVSVDRR

SEQ ID NO: 14167 - protein, 85 aa, Homo sapiens
GDRTAVCKDKQKPLFYLTYSNWFAGMYKRVNHLLIMPALAKVLGSHMKALAGKERTNRSKASPTVVVLHGARTRKDESRCKPFGH

SEQ ID NO: 14168 - protein, 85 aa, Homo sapiens
SDSKLGKPRSPKQSLADGQMQRTPPNVIMSGEAASRKMQERHRAVKKNDSEACELKDRGVDDHQKNTLLEESGTTRGKLKLSVKR

SEQ ID NO: 14169 - protein, 85 aa, Homo sapiens
KRSAHMDRRDSRSDIGVDAPDLKIESSESRRRNYGERKPPVAWEFATDQQVDEHSFEKDVEELDTVAEPLLSDCGSAFLAEPTRS

SEQ ID NO: 14170 - protein, 85 aa, Homo sapiens
GKVPKRKHPLAGINSRILRPEKSKSNGIMTPLQGFQHTAQLAMNIGRHVVNSDPDSLSGNAERDAQLEKSRHTCEPTIWTFDGLH

SEQ ID NO: 14171 - protein, 84 aa, Homo sapiens
WYLKCRELHSKWLDRADFQNLLVVHVFRSAISEEKIRFWWQKDEPDTNGFASLLICVEANMKEHGQVAPGPATELLVWEEFFQD

SEQ ID NO: 14172 - protein, 85 aa, Homo sapiens
SDSGHFRYIEQTVVFHSNEICIYMLAPALTEASVWSGTVGLELEELNKDVSIKDQPNGLARLSLRGECTKTLYIKVSQAQRALPR

SEQ ID NO: 14173 - protein, 85 aa, Homo sapiens
ENPKELTAEDAILSLVLRLACPYVPENMDKPSAICLHAEEAYIKFCYCLRRSTRSDEFREKLFGQRMMDELSVINQMDMCELGFE

SEQ ID NO: 14174 - protein, 85 aa, Homo sapiens
IKATLKKIKPGCRCPLRCSMPAALQISMDTHFGARAHSPRKVSQVEPHFHCLLRVSEFTRHHPRSSTLQLKRAQISEMQIGVTLH

SEQ ID NO: 14175 - protein, 85 aa, Homo sapiens
PATEIDRDFPSMSNPPLQHSAQLSYSGFLFTHSFISLLLLNELVPGVNMVLPLEYLLPGSGFRKQPLSTNLEALASWKGMCSDLN

SEQ ID NO: 14176 - protein, 55 aa, Homo sapiens
GPSSQLTQKSSIHQTLQRAGLLETSNQTYDCRGHEQQRTLYAEDLTVAQSLPELS

SEQ ID NO: 14177 - protein, 85 aa, Homo sapiens
LEVEVECFLVSRGNVKSGTHDQGFSTFHWLVSYHPSSESCGSDRNKSGPAGRTEIKASEPQQALENILSIPDNTEQTAEQVLKSF

SEQ ID NO: 14178 - protein, 85 aa, Homo sapiens
SCTSLLYPEVYRFKDFSVLRIGQEKDELELKQIAPWQLKKSAQIGCLGDIWSEKLSPGGVTMGCLGDKEGEMVVLKFYATDIDAR

SEQ ID NO: 14179 - protein, 85 aa, Homo sapiens
ASTGEFQQLVSAKSKSLAELKKSGRVQALDAPVERMATNYGIELGVSIGRFVHPLEKWIDHVEKSVTGGQGDFTSKMENVQDDVS

SEQ ID NO: 14180 - protein, 85 aa, Homo sapiens
TATATLQELATPTHRERSSTSEIPVPPYSLVSMPNADPPWSCSKKKSGHKGGSVVTSLFVTAEVANAGHFDYDEKRLKSFEYIST

SEQ ID NO: 14181 - protein, 85 aa, Homo sapiens
QLGMQCYITGSDTLLQTEAIRPVEGSLGVKNQLMKKGCAKPAYPELSKPKKTDWLLGPAKKNCSIGIVRLDQLSDESLKLSRTKG

SEQ ID NO: 14182 - protein, 85 aa, Homo sapiens
NWCLNRRGISHWRSFNTSTPSEDEKEVRLNQFQLPPDSRYVTEMMSIRYAVPRHPSLPFICLKHIPCTELGEDIEFTLLQKYANP

SEQ ID NO: 14183 - protein, 85 aa, Homo sapiens
GLLCPKKSQVFELFTDIWIFLIEQMCTNGYDPRAEKWKDKISLKGILLEQFKVLRQACGAVVAKPEAHYHEEDLGLNDHFISPEQ

SEQ ID NO: 14184 - protein, 85 aa, Homo sapiens
GHQPDNTNDELLITVCYKPSAIAQRIRAFCFPFVELYQPHPKKRFDGLSLGWHTRYGPDQLSRAFLTGRTRSETEQALSTPTGSL

SEQ ID NO: 14185 - protein, 85 aa, Homo sapiens
MLSMRREAHVGVSPAENADEKSSQIESEPCTVGPFSTPKLARDASRAAAHRSKDDNVFKAILENCRRTRDLPLCYAGPHFKQSVA

SEQ ID NO: 14186 - protein, 14 aa, Homo sapiens
PNSERKKGASLRGP

SEQ ID NO: 14187 - protein, 85 aa, Homo sapiens
FELQFRAWLLVLDTGDARSRDAADDRESGTILSGVPIRLDMPQQFMPVATSEGDIKLYEFHAQYFRGWTWTTFGKPKAELSVYSK

SEQ ID NO: 14188 - protein, 85 aa, Homo sapiens
MTEPLSVFNPECRYYKETKDKLRDENSTRFNKIRAVQSVCWRPYDKDMMVTLQLNALNADKPGWGDSDAQRQLHNTLRQPSSQDP

SEQ ID NO: 14189 - protein, 85 aa, Homo sapiens
KIAKENMSEANIPSVLKAHRDPRGVRKLLSQDIARFAVGLKEFHVLPKYNTAVSSTPELKGAHSIAHDRIETGTASNIETKDTGN

SEQ ID NO: 14190 - protein, 85 aa, Homo sapiens
MTAFSLKWEKGKKMPEPAETLLKTKKSQLAGARLLKEDAINMLLGQESQWPPRDHMKDVIFGGTGLPEDEALLEEMGGAAPAFKE

SEQ ID NO: 14191 - protein, 85 aa, Homo sapiens
QLMSQGSMSNPGFQPWYNAESLPGRAVRSVTRVVKQVSLIDMTDNELYKDVPIKMMKGLVGGKRARAMLRLVGKCLSAPTTSHSS

SEQ ID NO: 14192 - protein, 85 aa, Homo sapiens
APGDKLKLEPAALQRWETSTQILDNDISFSVGPIKCFPDLGTGEVKRAFIELLRAGHAHIEETIKLADEPPPTTSKTGVPALGTA

SEQ ID NO: 14193 - protein, 85 aa, Homo sapiens
EHSRKWVGSGEDAIQFTGSELSKERNLQIFLDCTHKDRLKKFGFWNLNSPKHTSTFRNDILQHAGTPSGSKEKVLERHICSPLDK

SEQ ID NO: 14194 - protein, 8 aa, Homo sapiens
GLNLEDSE

SEQ ID NO: 14195 - protein, 60 aa, Homo sapiens
QFKPDFITDRENGIFLTCDALESMLLLNNSLIRRVKCYKAPYTLRFHGVQSSRSPEDPAP

SEQ ID NO: 14196 - protein, 32 aa, Homo sapiens
TETKRGASGPVCTSKAKKYLRRVALNTNSIHL

SEQ ID NO: 14197 - protein, 85 aa, Homo sapiens
MIFTQICPLERANYLFKEGRLKLAFIGKTGGYSHRVKLFLQPRFSKPIKQVNSPKRGHQISPDKKFLSSTCRNFAQGPRYENVSV

SEQ ID NO: 14198 - protein, 85 aa, Homo sapiens
LGGVPGRVIGSESIEDFDRTPKATGNGPAGTEKRLQDPVQKVQVIELQFAFLCHDYTGKRGSVRLYAWILTQVIDQERATKTSKD

SEQ ID NO: 14199 - protein, 85 aa, Homo sapiens
TPGPLLRVQFEAKAVQVFKLIIKIEAIVDSKPLWNVTSIQLVELKEFQPTSSLNLAIKDGEAVTLLINSDRRVTCKPPPDQSQLL

SEQ ID NO: 14200 - protein, 85 aa, Homo sapiens
TTPSHHAQEQQNIKKKAGRPPPSQRSTVNNYALSRSPPDHHPVSGPQRAARDKIERPQLDVDLRIIRVRRTVGGWGRICVLRMKM

SEQ ID NO: 14201 - protein, 85 aa, Homo sapiens
ERFGSDYPLQMTLPEHLSAVPSRNVSRAPTPDSVPQPCRQRREWGFSVSAAARLNAHLGNLLSLSSELGLAEWSSTGGVILAEEC

SEQ ID NO: 14202 - protein, 84 aa, Homo sapiens
CGILAEARQATELLQVGEDNKYLEDAVWLFLTQLEELDTAEDTLSQCRVETDRLTATEKFDLPYGNWRLLGQLRKSVALSKAAR

SEQ ID NO: 14203 - protein, 85 aa, Homo sapiens
AQKQVKLWAIAATPGSLLEHLEAKALPSTAEPQLRNRVMPGYDVGTNQATSTVATESKALEEKRHALKGDPCKSYDRLKALQDKK

SEQ ID NO: 14204 - protein, 85 aa, Homo sapiens
DITLCEVELALTTLKRQKTESVSGCMAFFQDPTQHMELRPDQLQDIHAGVLSEQGFIKETHSDNEDTWKDGTLLNGIQELPLSYA

SEQ ID NO: 14205 - protein, 84 aa, Homo sapiens
FSSKTNLHIEADGLKGFELDGGEPCLSRELAAIRCVGGMGQCQLKTHGTNSAVGTMKQPTDLLNWNKPIKFRAIKSAVVCKVSF

SEQ ID NO: 14206 - protein, 26 aa, Homo sapiens
AEVSQLSSGELEYEESELDLVVIVEK

SEQ ID NO: 14207 - protein, 80 aa, Homo sapiens
YLLAEEKGEEDSSDGLIVPPLKTDLPQTPKDLVAVSSDCEKPHPNTRAGDSMLKESARQEQLTRRPQKEHSKMVGNSSEG

SEQ ID NO: 14208 - protein, 85 aa, Homo sapiens
EPDKEGRFGKFVTARDSEPAEAFKLGSEEGYMQNQKHVDCIKPSLPKKHPCVPFKTGNSKSVPRTGEESLMRHMDVPKDRKRLPN

SEQ ID NO: 14209 - protein, 85 aa, Homo sapiens
EQILGDVTIFGEYEFATQKPLEKCPASARLKASPAKLAPSEHVVLAKQLSQFWAHSREMVALVDFAKKTDVWELGQEPSTELHKV

SEQ ID NO: 14210 - protein, 48 aa, Homo sapiens
MPDKCLEMPKFIHLTQQCVVIEKQESKFRRTVDINHNASEQVLVNCYI

SEQ ID NO: 14211 - protein, 85 aa, Homo sapiens
GVDIDSASVQDLPLEQSKYSLAKNQGWTQNDCINSRIWCVQGRRDESVSLIHLKQATDADRSLLTMVCMMNFRQTGVGPNLKSDN

SEQ ID NO: 14212 - protein, 85 aa, Homo sapiens
EHNLLIPIYAYLAGSNPRERNKEEKETKIPLGLEGGPGFHGQSRPAIVLEPESECVGKPPSHLETETAETKVRRPYGVPGMNFPE

SEQ ID NO: 14213 - protein, 85 aa, Homo sapiens
IVPKASKRKLQFAVAGSTNGLQPCKCGSHGSEPETAVRPKTSRDGLAISVSTLKRYCRINVETQDTFGGKRRLLEKLSATSRSPK

SEQ ID NO: 14214 - protein, 85 aa, Homo sapiens
RDELRALKLRQPKSLDAVKNLKGKGSNRCTVTKLLPQWAYNGHDMYEELRPPDREVPAYNYSDTSRPSSQTLGGKSHYSLASQNL

SEQ ID NO: 14215 - protein, 85 aa, Homo sapiens
DRWSRGQALAMLPPKKDYQNLLSRPLLQSQPADDQEYEGTKDQCALDDYLQTWPCKSGRLMILFTSAFNSLNGHAPCQVKAPGLP

SEQ ID NO: 14216 - protein, 85 aa, Homo sapiens
DSSAQLVKPEALNEQCRWQALFLRLQKGTEGMLKIGHFIKDASRLLGKEWPNQTPACQHSEFELEGRTYRNNFRSFAAYCKLPKF

SEQ ID NO: 14217 - protein, 85 aa, Homo sapiens
ELFYEIGLPASCGWAVTDVNHLTRICAHPDLGDPNLVDQENYNPNMKTYPNLNECEKNGIRTMFCSFFSENEGSEFLLYHDRIPK

SEQ ID NO: 14218 - protein, 85 aa, Homo sapiens
ADNLKAQYNQREGVSVITLKVTDREFKRLIIQDGLCKTRMTLSEEPSNFKLTGVSHAFQRVPNSVSGAESDVTSASGSPRLISRL

SEQ ID NO: 14219 - protein, 85 aa, Homo sapiens
LKEVTSLGANTCNQIYGERLFPEFLWFRPRRGTRPRGSHQSDGHSQDQNLTAKKRLEKFGKVLISAGPAPEINLWFNARCDVARK

SEQ ID NO: 14220 - protein, 85 aa, Homo sapiens
MTSDPNTPDPVKPTGPVLKAGATQTLVSHSDSEKRFPGEVSADHHPLRKDGGAPKINVQPEGTHEEVGSHLGPGNLQGAKCETEY

SEQ ID NO: 14221 - protein, 32 aa, Homo sapiens
MVYWKSDAEAAAETKEATGCGNGYIPREHEFT

SEQ ID NO: 14222 - protein, 85 aa, Homo sapiens
SSRLPLDWERSKPELSASEDEFSDWKLPSGQVQGLSTSLSVGWLNKPAEASRRASARNEEEVDKKEEVKFQESRMGFGMILFEAG

SEQ ID NO: 14223 - protein, 85 aa, Homo sapiens
SASLDQPAEFAKLHPLIVRASGRSCNDAGKTFGCRAKCLSDEPHSQRQTPEPERGVLHDCQAAEYKATEPPGKIEKSPFFEFVHN

SEQ ID NO: 14224 - protein, 8 aa, Homo sapiens
TFVSEWWY

SEQ ID NO: 14225 - protein, 85 aa, Homo sapiens
AWQFLRIPLTISYALVDLVKLSLRPQMQRQGDSSSHSIKSNSRQENASNNKLGRLWQGSEMSVPGATQKAKSRMKMSRTPTAIVQ

SEQ ID NO: 14226 - protein, 83 aa, Homo sapiens
HHGLEGVKENQPALLGDRIEGFECERVVRPTNCTGSLKLFRKETQGVPLINRDAMDRVLRMPGSSRTSECAKTAETKMAVSVE

SEQ ID NO: 14227 - protein, 85 aa, Homo sapiens
LELASDEKNDPRKDGCLDLLCHVQTAYKNVVPDLYASRRSDNVASILFRLMGSSEFNLCMLMKPEDQDKAERAQILELSDQLQEI

SEQ ID NO: 14228 - protein, 85 aa, Homo sapiens
WSNPAPLLIYRASAKQKLDWCTKVSNPISNSSMESLKKDSKKYSLSGELVGELYLMELSPPQSCDDNCRGSELVELKVTYFVGLS

SEQ ID NO: 14229 - protein, 85 aa, Homo sapiens
SNVKDMSQISAEASLSNKIADKSHEPWKQYQSPGLSDWEAGNDMSQKNTKLTPIEIKVQNPQDIAGLATSKGLLPGNTYIMVHAN

SEQ ID NO: 14230 - protein, 20 aa, Homo sapiens
MCSITNKESIVCRNLHGECY

SEQ ID NO: 14231 - protein, 85 aa, Homo sapiens
NKLVVRTFLMGLDGEQTYVSFERRIATETFLKLEWCVERSGRDEMSVNSPYQIVLDEPHKEAHKSEIIKNTLSGLGSISVQYPDD

SEQ ID NO: 14232 - protein, 85 aa, Homo sapiens
FTFLSSGEKKPDVDRNENRLQDMPMIRFKSDRSCPSEAKEELTAVQAQKGEKWYVYPQEQTLEVFGKAPEVNVKLATLRRLVEST

SEQ ID NO: 14233 - protein, 85 aa, Homo sapiens
ETGAKVPLSLIPCHCLTETVCLFTTVIQAGNNAASQLLTAGCCAEGNYDSLVTSKLYDGKVSAPQAKSDLNFIYIVCCVLATKLM

SEQ ID NO: 14234 - protein, 85 aa, Homo sapiens
CVPISQDAAVTKDVGTCTSTDKTVVQDSEPGDLIKPYRCCIKETSMWGSAEAVSTEHSGQAGYPHQLLVSEYADHTVWQCKGYEP

SEQ ID NO: 14235 - protein, 85 aa, Homo sapiens
KSNSFISDVNPWDGVKWQYLENATFLGRTNWHIDPKMRREHMTAQFGPSRQPDVNNMGSPIRIKSTKPSKLQPKKVEQKELVLTN

SEQ ID NO: 14236 - protein, 61 aa, Homo sapiens
TTGSKPKISFQFNPGQSDSDEKGRTADSPPEWYPLKDRRNFSPLWPPEASQKMHNTVHEND

SEQ ID NO: 14237 - protein, 85 aa, Homo sapiens
AIESLSKTELVLYVRRGLAQVNLGNSVGATTEEQYIKEFNRATPLLVQLLSHAEVPDAQPETKAFSPPHRPKQSVSKARFKHKRG

SEQ ID NO: 14238 - protein, 85 aa, Homo sapiens
PPFNKRKQCGDCAGSQSVSKLKCGEACLGENHEVSGRDQAHYPISKLYGRCLLSFAINLDFAWGAHDSRIPDEKTPMRLLYSVQC

SEQ ID NO: 14239 - protein, 85 aa, Homo sapiens
MDFFGMKEILIAGTWECRPIKKEQDDRANPLEYHTLQDTHNCSISVDELSRPIADNDQSSTLLCVLKVENGAELSNLVSERLGLL

SEQ ID NO: 14240 - protein, 7 aa, Homo sapiens
LDKLFAM

SEQ ID NO: 14241 - protein, 85 aa, Homo sapiens
IRIEAYKGQTHSDLYTDPEKKTVPQVLTKGQTHQTNYELNPLELSEEKFNLRISFEQLTQADKAVESKPTPHEITAPMLCIMQPD

SEQ ID NO: 14242 - protein, 85 aa, Homo sapiens
MELCQGLRSLRRRELPLTLNWIEFCGLGEKQEDFAPTSSQLTERDPHQQTQGTPSGEAERPVFFKVRSNETHHQLDLRLPIEGCR

SEQ ID NO: 14243 - protein, 85 aa, Homo sapiens
FKSLQLPSSEPTNGSEPAYDSPPRAMFRLLKEELGQYARSLAQFQSLWHTAERREGSHSSAVAERRGGGGQLSAFKAKSVEILSN

SEQ ID NO: 14244 - protein, 85 aa, Homo sapiens
LTTRFMEPGWRSALELQESVMVYKMKEAFPLVPRREMRQLHEEQPLEDDADVGAEESCESPLLKESMVLFLYVNQRRFSRDNLIS

SEQ ID NO: 14245 - protein, 85 aa, Homo sapiens
HGTFHLHVWGEESTGYPMQVEPYNLGPGKVRGIESRECSIQDLTIVEQKRPGRHHPRLTQTKYYRGGGSALWNGEVYPIKVAGLR

SEQ ID NO: 14246 - protein, 85 aa, Homo sapiens
LRATDFYGPLEAKLNSAGNISKPAEQPEMATKSIARMSLSRRLLSKIPQSQSESADNPDASGRSASKLEAGAKALETIPDLFKIN

SEQ ID NO: 14247 - protein, 85 aa, Homo sapiens
MYTKSLTVGIPVNETSGHYPFSLLGGIWNQGANEKQQLFGKIELRGRLSPHELSPNCKSEKAVRFGSEERFGLAPLTLKAVAREH

SEQ ID NO: 14248 - protein, 85 aa, Homo sapiens
ELATRFKAAERASPFALDCSTHTPSVKEMSSLPNVQKIGFKKPHNAQDSFSFFAMDRLELLDEKGLDVVIYKMVAAHRALKAHQE

SEQ ID NO: 14249 - protein, 85 aa, Homo sapiens
MKEVVNPVSQSGNYSKVQECDHVIAQLSGSGCFFHRASTRKQAERQVQAELFSAHIEKVTEMSAHRAKPAPYWSNDSLLRGPLHV

SEQ ID NO: 14250 - protein, 82 aa, Homo sapiens
QYVLWKMENSDMTEHGSTVEPIQDHVGTRCSPKSLCPLLAVAGDGHLATATGGHNRESNESEMLESLDGGQNLGFDNDQKRN

SEQ ID NO: 14251 - protein, 85 aa, Homo sapiens
PRHDQQRPFVCHSLRDPSMLRSNTLRTYQSQLHQSNRKGPPRAQEVLVRQQELLQWTVETEILPLNHTVNKERARPVLRSRFLEC

SEQ ID NO: 14252 - protein, 85 aa, Homo sapiens
SVRTTVQFESGTPSKVKQNPETHAVVHEVRSTAPNELKCSQALSIKDVQAKRYWGLDLFLSRVNSPSAEGNTFSPMSAFSHMALQ

SEQ ID NO: 14253 - protein, 85 aa, Homo sapiens
QPQGPQVTDIAAAKILNLFVQPSTGISQLIRTMAIPALLFDLTACGLATFTKESKPRDVERGCDPPRLAECIKRSKSAGWKVNKF

SEQ ID NO: 14254 - protein, 85 aa, Homo sapiens
DVRAQGASLSFRLTSGVKPILVEYNNPLAATYAELTRTSATIAQSAYSAYVTAQEADERKSITVQLWLELHRRLNGCKRLLSLLP

SEQ ID NO: 14255 - protein, 85 aa, Homo sapiens
EMIDSCQFSLHEQQCCCQSQNVSRKAFNFPYLPSPLSAAVKSCSVKSKLICDTPFQHFIRRADGGATCHPTANKIPKHVHIPHDA

SEQ ID NO: 14256 - protein, 85 aa, Homo sapiens
LALSYDCNFFRRWKSGKVMKVHESYSCQLRQGDTLMYHELTTACSTGGDLIENISAIREKGNVAYDYTVKFFFAIHTGSPPPYRD

SEQ ID NO: 14257 - protein, 85 aa, Homo sapiens
RINPTRHNKELKGEVPLNGHASFPDETGVISQSYADLKISVSPAPSYLEVLSLYPVILNVQDKLLSDPTLDKGKKLEHSMKTVID

SEQ ID NO: 14258 - protein, 85 aa, Homo sapiens
FCPLSGPSKQPIILDSMASEVTCQQVWSWESDEIIVPTISLMGNESFEQCKYHQSAGKTMGTCLQGEALRQWSDDAQLPVFPGPK

SEQ ID NO: 14259 - protein, 85 aa, Homo sapiens
FACDPDHWSYSKGSHEILNFVRMGFTGGKQQKGKDGQATPHSPDNTALHLETRRASGSYTFDVLEHGIPLGGVGPTGEPLSPQGT

SEQ ID NO: 14260 - protein, 85 aa, Homo sapiens
YRYSDPTPQQIQIRYANLLLVHWEDRTGLIDSSETMTTKKLLTGIQPYLRDSLPDTEKIKFRKFRRKTQIAKIREENNSEDYLSQ

SEQ ID NO: 14261 - protein, 64 aa, Homo sapiens
DIPSAAPSNDGAVFHQSKYDGQAATILKDYREVKVSPKADTYIIHGRCIHKRYEYREPSGHFTL

SEQ ID NO: 14262 - protein, 85 aa, Homo sapiens
IRDCSGMPRHMMTGEPREHRCMGLFPQPFQGSKLGSSSAHSLVCNSLPPRYTLSAKGSSVCSETQLHGADPAYILWGKCSVASGF

SEQ ID NO: 14263 - protein, 85 aa, Homo sapiens
SGPSDARARPNSLDIVNESVNGLICMCVPVPERRLTLPLGPSIGQAPIALIKPQRNKREEAKSSEGCLQDEPTSLWEGKNEPAKD

SEQ ID NO: 14264 - protein, 85 aa, Homo sapiens
ATNKNTQKVPLFVKTGKVQEEQCSTLCLGSGSVKGPIKVQTKFWHGVLVEGSRQLKQCGTENGPWKYNMPWGAYNSETRTPPTVE

SEQ ID NO: 14265 - protein, 85 aa, Homo sapiens
KGVASDSPTRLDLCPYSSSSTREDRHCRHTAPCPQAQIRNAYVPSPLCEGAFRRTSEMLNKGSSIHANPPFWQSTIIKALEAASQ

SEQ ID NO: 14266 - protein, 85 aa, Homo sapiens
FKTKCEGMCVSLMRLELNKVVLETEHPGGPEMNREDSESAVLPREGFKTLTGNPTEDGDMGTPIAQAYVELCRVTQGVVKELDSQ

SEQ ID NO: 14267 - protein, 85 aa, Homo sapiens
PHDKSKVLFAKIGMDVQEDYRVELSQILGALTSHHPFNVWLNPCDPHKAQGSGLTIENSSKELTDNCRPKEDSQDLRDTPKDQDQ

SEQ ID NO: 14268 - protein, 85 aa, Homo sapiens
KDHRQLEGGVHLQMANVYAEGLRPLWTRGEGVSSGDRPTVWELSGAHVVSAAPEFPAMSGAHVENEDMRERLDLSIKLGRGSETS

SEQ ID NO: 14269 - protein, 84 aa, Homo sapiens
QPGPERYPACITIAGHLIVTINSPDFAIQLFERQLQLASHGETKIAYSTSEEQVSGSLIGRNIMDKRLTESNDVKARPQPKDEH

SEQ ID NO: 14270 - protein, 85 aa, Homo sapiens
VLNTARAKSKGDLEEQRFQPTHFQIGATVAVGGGSPRQILKPVGINDRTRDPFKELGNEPASIGYKLGLIRIPGRTEEPNLFMRP

SEQ ID NO: 14271 - protein, 85 aa, Homo sapiens
RLGSKEDEKVPKSLGDQCLAEDKRQMTGRFMMDRRCLLPKHCEPKAGLSRHKASDIEAAPWLWTEEIPTMLRKNLCKKPRAAVTK

SEQ ID NO: 14272 - protein, 85 aa, Homo sapiens
QANQPTLQGSLLSSDVCYDQGGVQKVQRPVESQPRTAATLRLRIRRAAAIEVRPHDHNLYTVFVTFKWRIAQHASMRPSRGHKTC

SEQ ID NO: 14273 - protein, 84 aa, Homo sapiens
APYMPFVKYGDDDNGAVNHEIQQGKGTYPKNSFSHLKSLIPKELLHPLLKEAPSVDGKTMSPGSNYLDRLKVCRYLSNIISSEK

SEQ ID NO: 14274 - protein, 85 aa, Homo sapiens
WSKLAGNNQIERPKKKPVPLEERARRVKLHGKMLRPEMSKGDGHWMRYGFFLKDNRKFSGEILTWNSDGEGKYRVLEIITGVATH

SEQ ID NO: 14275 - protein, 85 aa, Homo sapiens
RESAMEFRTWTFSKGSVVGSCRSPFDGQGFMVWDVTKEPRTHELQILLSATAEKWNKPYVRLVNVGHGDELLREEVGYVIFLLKR

SEQ ID NO: 14276 - protein, 85 aa, Homo sapiens
PGDGSGGCLAEAHDRRNLMHQQTPESINITRKRSFSKSCTPGMEFATCGYAGQTIVVGTPTTGAPGRLPAQIKRVDAASPVKSEI

SEQ ID NO: 14277 - protein, 85 aa, Homo sapiens
NSLRRPIQPKHLPKKLPEEGYHVVRYEPYFTSLLVLDEEETTRDKKPMKKVASKGLGMLPMKGWLCLRGPQNIYPKMRQPCPRDS

SEQ ID NO: 14278 - protein, 85 aa, Homo sapiens
RSASYMSKLLHMKHSVLNVERGLGQYLINELSITVDWRPRPKFNDVPASRKHVTVISSSNDKQLQSLRELDDIDPVPPLKSINSV

SEQ ID NO: 14279 - protein, 85 aa, Homo sapiens
AQAQVHDVFQESTAGDTGRMPKSLPTFVMHSTEPDEQQQFVEAQDRQYAQSTTMPMKEAGPYFRRFKHKSGYTDGCVNQPKNDRR

SEQ ID NO: 14280 - protein, 85 aa, Homo sapiens
GSQHLSALGRCDKLCLDGRPDAQTSEAHSDDQVDHLCLQVASKARSQLEILVLMVFKSEMYYTYSRIQFSKNSAELYRETGKLRQ

SEQ ID NO: 14281 - protein, 85 aa, Homo sapiens
MILRPGLAPVTVYAGPQGHEADKYEPDSQDTHPSLSGETQPSNLSIRDARVLQSVYLNLMYMLDEDEPKTSDSNGESNMGLALAQ

SEQ ID NO: 14282 - protein, 85 aa, Homo sapiens
SIGVDGYDKLKQPHEAPTLPPLGSGPTEPMVDPHETPARIIVSLLQFAMPIGFYKIETLQSGVNSTMGQTAEHNLAPTTSEEEAF

SEQ ID NO: 14283 - protein, 85 aa, Homo sapiens
DSGDTNARYTELRDSSVKTLRDHFTASQCFSPSCAPSEFVNLSVTFDAGKHLGLITSLSFVRDHKRDRPMIVVGRTALPAKLRSA

SEQ ID NO: 14284 - protein, 85 aa, Homo sapiens
QQAPQDYKKKDMGCMAPTMKKDDIGERGTHGVAADPSVGYKGTSERALEVKHEVIGHSNQPTGTIEDVRLCSSHPASECSWRPHP

SEQ ID NO: 14285 - protein, 85 aa, Homo sapiens
SMVFGDFRGTAFITSDDFAQHVEEHSQDLSGPIFDIERGCLTGCKPLLTVTLRNPARLTVQEEWKERIGLSQERRLDHEGVRQSQ

SEQ ID NO: 14286 - protein, 85 aa, Homo sapiens
MSCAENAQAANDLAVARRTSKAGWYQVVHCDSKNYEGDKFAQEEGVTPWRRNCPPAGARLLALKALFQGSRSRSSRLREDLGDVS

SEQ ID NO: 14287 - protein, 84 aa, Homo sapiens
LVWLNIRKKPMSEDASLHPAIQIEIYQPCPEWKQSDPEDILQIFPAGPKDTEEDRPSGFCFLKQHRATWVKEKTTLREGQGEVC

SEQ ID NO: 14288 - protein, 55 aa, Homo sapiens
SQHADESSSVEPLSSRRESWGSARATTGDTKLQPPDCELQLAPAHSTLLYRAREE

SEQ ID NO: 14289 - protein, 85 aa, Homo sapiens
RPEKDKNNVSREVKASIKPNCEKIKEDERDMEFDLEQEAPTIAFRKVEKAPIVSQQAETLPKWVEYTQETVIHQYFYKNAEGRQF

SEQ ID NO: 14290 - protein, 85 aa, Homo sapiens
SKFHQHKLNVCSYTEKSSRGCAMTSRAAILQTAMDIPLLNVEYVSPLEDNCPERESSQNKNYLLLHAQESALGDLMTEFEAMKLT

SEQ ID NO: 14291 - protein, 85 aa, Homo sapiens
IEGSGGIIASFAEGHFTRSSRVSGDKSSEKCLYTQIKLEALSEPVEMGHGYSQELHSVSFQPPAKNLGSKGEVDGALHFRLQHYK

SEQ ID NO: 14292 - protein, 85 aa, Homo sapiens
KKLCPSLEEEGTAPTGIQEEYYHVKKKGKPEVLPHAKAQSGTPMSVLGHREVKHSKIGGEEIEGSNVGLIQLKRPSLRFKLFAFE

SEQ ID NO: 14293 - protein, 79 aa, Homo sapiens
DNCKLSSKEEDQMPLCLLSSSRDRQDYKQDNIGSCIVTEENNAFSRKTELETVADLDGGTMIMFRLSAVKLGHATIEEK

SEQ ID NO: 14294 - protein, 20 aa, Homo sapiens
APSRVPGRLERDRGMLTWQT

SEQ ID NO: 14295 - protein, 85 aa, Homo sapiens
DEILPVPGLGEVSDINSLLTFPGSSTTEHGHGRDELKGSASLRQLTLTRCLRIKLGRQKIERESMPCGGFETAEETANKIIAKEE

SEQ ID NO: 14296 - protein, 85 aa, Homo sapiens
ITPATSERYPLRGRAFQYFLCSDWKSSTAGGENPEHTMGETHDLAPGLGEAQLRTKVGDQSDAKALQKAWAWWPLKKWDLASQLA

SEQ ID NO: 14297 - protein, 85 aa, Homo sapiens
EAVSGAVWGEEHKCLPLPIKAESLYHQHERQGCCENLPHGEQMTSSQPLSGRYHKLLRGLTDKHDESEQMSLRKPCLRLFKKRHM

SEQ ID NO: 14298 - protein, 85 aa, Homo sapiens
KSLDFGSPLEGQFIQTPDTFQSEESMKTLDILPPQTERTIILADADSLDEMAPEKTQANPFHKGVVVISARRKVSIISLSTQPIG

SEQ ID NO: 14299 - protein, 85 aa, Homo sapiens
MFEEKPFPVCLSGRHFSEPMGSCLTGQKRSELPVEYGEPFRKMSRTLLDNKLDEASVLCTPVSGASCVCGATRNVKEHFVGCEGH

SEQ ID NO: 14300 - protein, 85 aa, Homo sapiens
QTTPDPERSTDCQMKEFGLLQVKYESAFKGLGRKKYTKGAQSAEKHDKTRSTNEGPKSCNVFVDGDSLQPGALGAAVSHSRQAKL

SEQ ID NO: 14301 - protein, 85 aa, Homo sapiens
DLANSCGKGSSLDETGTGLTQIELEPMWAKSRDGLLEAFGAELYGVYGPESDMESSAYGSARDALQLFEGMVLGKQGLLTHPHLQ

SEQ ID NO: 14302 - protein, 85 aa, Homo sapiens
IMACRVKLGRQASSLLSDEMRGPLCDRESFNVIHFGQAINQSTLDAQSPFLQIEPTWLQGALSLVVDLAGKIQRREAGSVELCRS

SEQ ID NO: 14303 - protein, 85 aa, Homo sapiens
FPGVSMPIQTRALTITMWDSFALVHWSIMKSLKSQGFVESRPKLADESKTAALFPRKLLLPGPERKSAAACRQTYALPPYSEIPF

SEQ ID NO: 14304 - protein, 85 aa, Homo sapiens
ITTSRLPPLHTEGTKLFVSENSHYYPACSESRQVHYTGDDYARKQGPLELSYDACLNRGLFATLDYQCRAEFQVLYRQAVFLAVD

SEQ ID NO: 14305 - protein, 85 aa, Homo sapiens
QYSKPSANSPRWPVVRLGSLLGHLPSICSDRLITEKQLRQVIRSPATLGENLTQTKKGVSGTVDPRWNVLMPDQYSQAPYQHDPA

SEQ ID NO: 14306 - protein, 84 aa, Homo sapiens
SEPGNFQCLASDISGETKGVSTSRDERESAFEPRPPASQIVECLNRHYARDKSAITDKIYNPTYLLYAIADDIGHNDVLHRHSK

SEQ ID NO: 14307 - protein, 85 aa, Homo sapiens
TWMDNKWPSPGNLAMLLPEAAPGQEYRGELEQGRPGLRLIYLYNCRPSRGELENLFSGKKQAADNQLEGPGVQQDQDLEATRLLS

SEQ ID NO: 14308 - protein, 5 aa, Homo sapiens
EANLI

SEQ ID NO: 14309 - protein, 85 aa, Homo sapiens
NQQFSQYSGAHATAFVPQVRTGMGCTWSSRKVWVQMKIMYCFTSSQDSPGTSQGSDIKLSLLQSGNIKPGLLACASPLRWPREYN

SEQ ID NO: 14310 - protein, 85 aa, Homo sapiens
VPEFPVLVSTHRHSMYQDLPFEKMYRSSPNAMKAPDPRNVDGPMIIAEQDSLPRPTPSESPDRPVLTLGCVNNEIGPPVKQKLSH

SEQ ID NO: 14311 - protein, 85 aa, Homo sapiens
DGVNIILLPGDWVWIAFQGNLTFDTLPGPVFKASEKSWLAKVSEVQLRPKFLDLEKHDLAKYILSTPVFASGDFPPSSKADESVK

SEQ ID NO: 14312 - protein, 85 aa, Homo sapiens
AAFTLRTASRVTICLELVGSDQEPNQLQLGSYYQHTTPSAWRPLNSSHRLLRLAEESEKQNSGSSEQCFQGDVATETKQVSSKKE

SEQ ID NO: 14313 - protein, 85 aa, Homo sapiens
PRAGSLSRASNEGWDSALGKHTINKKQYSRPSILNYLKELPPQQLPEEVASLNKCSVTTTRRHRLQVKCLSFQHLSSEACNNPHY

SEQ ID NO: 14314 - protein, 85 aa, Homo sapiens
CDRVTAFTEAAATLSVSGELTSGSSSHSPLCPGLYSVRKERLNLHKSQVTVGNLQDIPSSFNKSTTQKVKRIIIKTTASVTISTR

SEQ ID NO: 14315 - protein, 85 aa, Homo sapiens
HPAKVPLREDAWTTLPTRCKCGLSGRSLAANHKKSAGRCKFVVPTNLAAGVQYLHKIKLRRNPVKNTAQKFGRQSKRASRTKDLD

SEQ ID NO: 14316 - protein, 85 aa, Homo sapiens
ESELFGTWIFRDLNPGTAVKRTYNESTRILTKGYLVHCLTEESSAPSSFKTRGVHMEHWDASKTKGKWYAVLPAELRITTRCMFM

SEQ ID NO: 14317 - protein, 85 aa, Homo sapiens
AVIGSETELKIGTKCCSTKANQAGLGEQTRSLSLNYNSNFPHKLRDCCQAIKLNMDEWECQFGGHLDGSPPVTASASLVVEDQRA

SEQ ID NO: 14318 - protein, 85 aa, Homo sapiens
ELTNRSLEEHSVHGLVRQADPENDSQAATPELTAPAKPDVHNDPVGGLESKLKLQPRTYNHEPILKEQATSEECSEHMETPFGVC

SEQ ID NO: 14319 - protein, 85 aa, Homo sapiens
SLEPDFDMIFIQHPPFEPAQQELEKRMLREWAGNEEIRWPSFGPMWSIQAYPSQLKKKLSRYQSDVMFLGRGLLSFTVVVRYTLD

SEQ ID NO: 14320 - protein, 20 aa, Homo sapiens
ERSAPCMPPDLEEVYRVGDS

SEQ ID NO: 14321 - protein, 84 aa, Homo sapiens
ALPKSVEPIYIHSAVVMTYSKGLLHEKWNAGGVSDKFLPLPSQTNVAPTKLRFNMSSRGSPEKGCPGSRLVYESGTSTCLLGTK

SEQ ID NO: 14322 - protein, 75 aa, Homo sapiens
NVAKVGTGQRVAYSGTAFMCDALRACSEPHYNRGEAVFLSLNLMASQIPYFETNDEPQMKNGLSSSSPLKLVKGY

SEQ ID NO: 14323 - protein, 85 aa, Homo sapiens
KLRTQPASQSSMSRYLSLDEKQSDPDIAKYANLPSRLDKQELMRAERAVNSFRVDPPGPEDSLRPLDLLRDREALLDQQRQDEQP

SEQ ID NO: 14324 - protein, 85 aa, Homo sapiens
DSESECKAGSQLSEPQTCYKPDNHLMRSAEVSSYSHSGSEAAGPLQCVAEVECVFFSKSAEQPLLKIATFEIAYQDIGALVDIEP

SEQ ID NO: 14325 - protein, 85 aa, Homo sapiens
HELGVLFVQSSLTLPYLGCAVESEVMWKELQSMNHTYFKMGLKKTSRVLLSLLGFGGLGPLSQIEELNCFILDRSAGYEWCSGGK

SEQ ID NO: 14326 - protein, 85 aa, Homo sapiens
DKSQSLTAMLERLTPSISPSRALSGNKQRTSLSNFSAKKCLQIFLSFTLQGEDSLKQQGIIHNYTLAARIAPTSSKEDSVSSDVQ

SEQ ID NO: 14327 - protein, 85 aa, Homo sapiens
DGLAFSYTTNHFETCFNIIKSAKADRQPKHVESESMKDNEFVGSGEHFSVRTSELQQSTTFPPNLGQQQNAAEILEGRFGRRNCL

SEQ ID NO: 14328 - protein, 85 aa, Homo sapiens
MNERDDSPYQEGKHSSKMRLKDLFFDETTEGLALLPSAQPVLKPQRESRLRYPRADSHETSFAHYGWFEFDVDDEAHDAVPKDSV

SEQ ID NO: 14329 - protein, 85 aa, Homo sapiens
PDKTMRRRRDLFLYHDKNTRMASKNLERPCQEFWGAAPLLLLEPMPLEKMEAIFNVTRRADSIKVAAGEEKVSLNPPGISQAPFQ

SEQ ID NO: 14330 - protein, 85 aa, Homo sapiens
MALYDLNLANEDGLGKQGPNRDKKNGVVNGSLNLSEVSTPVGRVSCLSDPGSQTRALLFDDELMLGIDSSSASPSGIEVDESLNS

SEQ ID NO: 14331 - protein, 85 aa, Homo sapiens
WGGQVDVLIFEAKPPYTPNAVWLATPVPADINRGVLMSSPRSLHDITLRLILSHKVGPYCSKLLASAPLPFKIKFQPRVTLREAW

SEQ ID NO: 14332 - protein, 84 aa, Homo sapiens
APQDSRHLRHFTFEFALVVRLKGVTSWSTEISARLLMLHGQLSRVQSGTPRPRRKSTPSVDEGGDTREATEELMDSGSVKVIDF

SEQ ID NO: 14333 - protein, 85 aa, Homo sapiens
VRTSTLIMTSKNFVLANQLSLENESLAPFQIGERFPRSKVGGTDRRIKLEEQFGSTISIEKKQVKSLPYYPGEYSPIKSLKRERW

SEQ ID NO: 14334 - protein, 85 aa, Homo sapiens
LVLFHDAIPVKVKVLHSTQCSSILPKYSSSSADFVASQPKRLAQLPLFELKVEGLELGNMIIGSPSYSQKKTMQLKKILKTAGLG

SEQ ID NO: 14335 - protein, 85 aa, Homo sapiens
QHRSGLRKKTATWEDTSVFHLSRFSLLLPGLELGAHPEPQLTPGQQFQMHGPILSGNKNQHHLIRERASDKACHLAMATRNEHTH

SEQ ID NO: 14336 - protein, 85 aa, Homo sapiens
HYSNVMVFIFLRQADCSAMLETRGVNVRAMEHSSYLSFLEASTVLMDSDSPESKSLGNAFSTPAAQRASCSEHQYLQNVRRLVKP

SEQ ID NO: 14337 - protein, 6 aa, Homo sapiens
GTIQLS

SEQ ID NO: 14338 - protein, 85 aa, Homo sapiens
MSSKETKTSEFRAFNKPWALLDATDSSTLEHQGSGISRSPPLICWPLIFQKMTELVRLNSLSEQHKGKVGAVNQPGGGLRSGDEN

SEQ ID NO: 14339 - protein, 85 aa, Homo sapiens
NLETCSSIEESKSFHHQDVYSEFRSDDQMRAGRYRVALCCEWTGLLAHSELVGDLANLLYLDCGDPKIIQGTLVGKVSCSSYQGQ

SEQ ID NO: 14340 - protein, 85 aa, Homo sapiens
PHRFQEDISHDGTNETIQAPEDWNSTDLSVLEIKRVYESGNLKITVVNKMWTGNSQREYSWYKLGEALSHDKNEPEPNDQFSLMK

SEQ ID NO: 14341 - protein, 85 aa, Homo sapiens
RSISNNQGRSSQSRPGNLRFAQIGPGLSLTSIGDEGELKKETTERCMGEAVAVARIYDFLEKTVGSFVSAVEEVATLYRKRLQDR

SEQ ID NO: 14342 - protein, 85 aa, Homo sapiens
QMSYTKSPLFKNLEEQSSGIDSGTLRPSPATTKWAPDTKDFGGRIKYILLDIEAPPCSSCKANLTVKSSHLTEKSNPHQPYLAQQ

SEQ ID NO: 14343 - protein, 85 aa, Homo sapiens
QLLPTKTTAGELANFLNSIGTSSYATSVESPRIVNCPGESMTMAAPLRCCDMHLEEKIHDTGPEGQFLSGTGVLVESSYSDSKNV

SEQ ID NO: 14344 - protein, 84 aa, Homo sapiens
THTDGPEALKTKVFEWPNPGGFPWAECLMLSTAKLIEGGLGNMEWYAIRVCTGSKCALPRFLPSMRAEQRVSVGYARIHPPTKS

SEQ ID NO: 14345 - protein, 85 aa, Homo sapiens
EANSDLGPKPAKASLALLSAGGENLKTSRARSGGGSKTECGTKALQKASCQERWKCPRSLTLIRSFGAVQSRQSPLLPGVACDFI

SEQ ID NO: 14346 - protein, 85 aa, Homo sapiens
FAMGPPEWPKIDRESENALGCSIANEGRTSLHIASSPPPSSRLESSIPCRPNTSSGKVEHYWSCKLECKHALDYDEVVKPMSQLP

SEQ ID NO: 14347 - protein, 85 aa, Homo sapiens
MLEISIDERTTPSNPSVKHLGQPGKLIKKWFVEGWAPRSLDMKEAARKKGISKDHTTKTFLQLGSVPLTKEYCELKRLKRRGQEG

SEQ ID NO: 14348 - protein, 85 aa, Homo sapiens
TMCLELEKLLSDEERLIDLADKTKPMVPLPGEKIKLIPTCSERSTKNYLLRQVDEFHLLERSEVVRTNEIQKEGACYLKHLLRQL

SEQ ID NO: 14349 - protein, 85 aa, Homo sapiens
TAMPRGMEYAESPIFLCIAQEQENQTRKSHPPKYTFGANTLLRLEDEYTNLAGAAKGVPDQSKRCAPYLHKRQIKKNALKAGPAI

SEQ ID NO: 14350 - protein, 6 aa, Homo sapiens
FGKHDS

SEQ ID NO: 14351 - protein, 85 aa, Homo sapiens
MNQNELIALRPEFESLERQVVHEYSGTTEDMLMRLETLKEFHGALSSSMRKRPKRNNPGEDHVIRVTAELTPDSHPTPSKVPDWT

SEQ ID NO: 14352 - protein, 85 aa, Homo sapiens
TRPRASHSLASVYDHNNRSEPRLNESAQQTVFDELTKTENASHCILNLSDIESPVTGGGLKWWVLNPGEAGQEPPSSQTKQNSAL

SEQ ID NO: 14353 - protein, 84 aa, Homo sapiens
KVYYTEGDTSKGVQNPNDLASPECCRALKLDKPKCDNGFFIMSMWCTPTYKRKATDARADGIDDSIECRRGKYTPDESLASTGA

SEQ ID NO: 14354 - protein, 51 aa, Homo sapiens
TAWYSGANVIYPCPISPMTMISLEHKCKPESYDQHESIKEDTAAATITAPH

SEQ ID NO: 14355 - protein, 85 aa, Homo sapiens
PLNDLAQDAILLLSYQHGTTNEVHKSYRDRTLDGPCAMQHLNPDQVGKIDQSRCDARGRLMYKLPGFQTLHTVAQATSSCFVEQA

SEQ ID NO: 14356 - protein, 65 aa, Homo sapiens
MMQLYLPEPRALLTRESPRNHEELNACRGSELLADEKIHPPRNGRAETTKLYSKDLLSKELSFKV

SEQ ID NO: 14357 - protein, 85 aa, Homo sapiens
DEQDALECKTQAFAVWARSFVPAKHTYDYQQTRCGLKNKALRLPDSRKVKREAEFTAVRLVDKLPWAARLRGGVKPNCNKRKALR

SEQ ID NO: 14358 - protein, 85 aa, Homo sapiens
ETDDEPSESTPLVKHPKGPAIETTLKMIILTSCSPTMEEGLSARSTRPANGGLVSALVNHGKMSWKMEFLKATTSIAGIYFNGSV

SEQ ID NO: 14359 - protein, 85 aa, Homo sapiens
QKSSKIEGAIFELDLPLISALQAQSGFGVQEDPWASQVEDQRSRYPKDLAADRNNQSGKGVMCVSLENADKCPSAKPQGQSQKRS

SEQ ID NO: 14360 - protein, 49 aa, Homo sapiens
KPNLYEAEGMHDLDWVQPSNDMRVVCDTLSKEQALRPLVNGIFATSSKV

SEQ ID NO: 14361 - protein, 85 aa, Homo sapiens
FHKERPQNKTGPKAHQLKNQSLGQLKTTEELAQPPQPNSLSPKYCLASTKIYPSNDCINWKIKAPNEGSLKCTSCVSRSFEPLAS

SEQ ID NO: 14362 - protein, 85 aa, Homo sapiens
PKCSEPLMFIILNEPGSTKDKPDQIKFTVSEGLSFSEWISYPFYTKMETKLDVDRGIPHSLVTPSSGLRPRCERDSKRPSQTDRT

SEQ ID NO: 14363 - protein, 85 aa, Homo sapiens
ALPPYLSKVDSYILAKGNEWYETTNDPFCENGKMANHTSKGAVPIEAVEGASTPAFDTSSVAYNSNLWSGDGWRPKLGFDPSKKS

SEQ ID NO: 14364 - protein, 85 aa, Homo sapiens
QYKKFPGLQRGPGQSAPERRENEDPPEKGLRVHMNKEYLASVFHIEAPSQIITEPSTCGEFSCLVLLWDLLAFGGSGFPAGTTKL

SEQ ID NO: 14365 - protein, 35 aa, Homo sapiens
ACDHAVREIDTASMLVGDFTLEEKAASTRSFLTLW

SEQ ID NO: 14366 - protein, 69 aa, Homo sapiens
GRRETVCLAIGTKEKCHGSRLAGKKAYQDYEYLYDMNRAAVLLASSSSRDQCVKKLLEVVSVNQLSLAL

SEQ ID NO: 14367 - protein, 85 aa, Homo sapiens
CTNPPHRVDVKDSTAESSPSLAVNKEESTAHPNNKSGGTCEGDSLTSVVKIESHYLEDRHEAAVPKKVNALLPIPVIHPESLKHL

SEQ ID NO: 14368 - protein, 85 aa, Homo sapiens
KYEKALEAFVERTRTKGGKKTTARVSDTPITLNAKSEVSKSSRTALFLIPYVGSYKVSGGKDAPLTPVPPYANDSKHIHQYRGRN

SEQ ID NO: 14369 - protein, 85 aa, Homo sapiens
MRELYSNHITAKSHLVEIFEGSTEDDLVFLLAVSMSTKTKQYFEYKHKRASKMGRITDILFKLLSASQPPHTLILIDKGLSTLSG

SEQ ID NO: 14370 - protein, 85 aa, Homo sapiens
NDMCTRLMANHARLMPGSCFEGQQQDRFSMLQQQPPGRPGASSLQFYKGFAASHLDKNDFMENVPLLLSMDAVQQGQAKHWPTRT

SEQ ID NO: 14371 - protein, 85 aa, Homo sapiens
VGFKKTSSSHEGPFVGNHLEDRGIPHRSHESSPNIGAPKASRSIISAPKKKTFLITSEQEYILFHLISHYATKQSGARGSSDLPG

SEQ ID NO: 14372 - protein, 10 aa, Homo sapiens
MPLSKWDVVS

SEQ ID NO: 14373 - protein, 85 aa, Homo sapiens
GMSAACIFRLFHSVPLTSGGCVELSSGIEQDKSIAPSRRMVRKSEPPAEKLSWSRPAHVLPHHFSKSDKQITLERILKLSDAIIQ

SEQ ID NO: 14374 - protein, 85 aa, Homo sapiens
SAVCGAPTTDSMLFQAEWSKIAAQEHKITTAEYYRVDIGPPLIDSKLQAKEKHPPTEKGELCNLLESKTGKCMEGTNTCGALLEW

SEQ ID NO: 14375 - protein, 85 aa, Homo sapiens
DRARDMTGMQTVIEKWKYRPDQKGKWRSNLSTLNSHSGNKRHGDGERSHFGYKIDGAAWQSLLLKRPLTSVRTKQSISACPSACF

SEQ ID NO: 14376 - protein, 85 aa, Homo sapiens
QQWKASQQVERGPMREDQSLETVRCAVQTASAFEGSRTEANDNEDSVRIEPQNDSPIRLGQLFSMERELDYAAISTEPPSCQVSA

SEQ ID NO: 14377 - protein, 84 aa, Homo sapiens
ILASEDKKLISRHTGYAGSTIASSTKPIKEVERPSNYSAVEMLKPHETQLAKKSELVCIGTEITEPGESKLSICRPSCMCPKSD

SEQ ID NO: 14378 - protein, 85 aa, Homo sapiens
VAYYTDMNEISRTGKSRCKSTMFAKNEVHSEELPPLENNKFDLVDHPEKHQKESKQRVLSNLDRIDSELRDHGLLLKQGGQLLME

SEQ ID NO: 14379 - protein, 71 aa, Homo sapiens
GLNTEKGELDLDKLTNHSKELFRNQGWRNVGESTSANTAFPSLEKDELKFGEVEVVSPLELPGGETIREAD

SEQ ID NO: 14380 - protein, 85 aa, Homo sapiens
PAAETNSSQEEKEAALPRLLIAENYTVFSFSWNVSILINSFGPDHWLCKPELCKARPSAALLIWRGDVTVSFENTEAPNIERDLP

SEQ ID NO: 14381 - protein, 85 aa, Homo sapiens
FWALTLTPFYSQDVMKATKVRVRNGETQYTLERRDVRLPASRQVSINLAEFVLAEMIISWARAPLVMFDIVSESVILLTTSECAP

SEQ ID NO: 14382 - protein, 75 aa, Homo sapiens
MAGSWGFAAVEARTGVRCAVSPNRSGHIDPSMNTDGDGGVNARPHESQEYTHPQGHSDSEWLFKEEKQALATETE

SEQ ID NO: 14383 - protein, 85 aa, Homo sapiens
FESFIRPRHPMHPLSLSIGERVIVDAMTYNLGEPGLFRPLPDLEANKTRYTEDPLVLSPPRSCLHPLSGQPEKSAEECRIRGLIR

SEQ ID NO: 14384 - protein, 85 aa, Homo sapiens
AQRAYTRITDYRSFRNVVAGAQFALVQYEQTFQPTREAEYKNVPGGADPMACSTVSFIDDIALLSVPATFFPPDTACSQWPRIAQ

SEQ ID NO: 14385 - protein, 85 aa, Homo sapiens
ESSHEVMHQPLPDNTEKVGADGATLTWMKSPSAAEQQLDKKALQESRPFEKLLLAIFLSDQIKGYSSLKVDMAVCQSSQTCTHSV

SEQ ID NO: 14386 - protein, 22 aa, Homo sapiens
QDILNNEFPEIPEREIRPSSRE

SEQ ID NO: 14387 - protein, 85 aa, Homo sapiens
EMEHGYPAKPRKPVKCKNLLGPEQHDALRIPVAQKSLLEPGPMNLFGTDMNKQGVEARWPMKLTQVLDISEHMVFICFTCEPNQQ

SEQ ID NO: 14388 - protein, 85 aa, Homo sapiens
PGKTFEQAGDTSRLFCAFQHLKFVELNPSPCVVFGTNRSLSYCSSSDEPHSGQLKGAFAKSKKVLPNDAMGKCEAFTGPGDGRKE

SEQ ID NO: 14389 - protein, 85 aa, Homo sapiens
SSEYTAAYTRAKIQPLETEKPSRLMTKYSQDTGGLRPIGFNPGHDPISSTFKGSCPRQQHQSANFSTPEHLRITLGLQKSSTKST

SEQ ID NO: 14390 - protein, 85 aa, Homo sapiens
ELFEVVFGLKSTMCGIETGLGEKSFTFSSPPASVAYTKLNRLLERHVVGMRDLSGKAATQQPHFLSTKTVYRETRQLGNIKIESS

SEQ ID NO: 14391 - protein, 85 aa, Homo sapiens
AAGALEMYRTNGEDQNSFSVPGFSAGEPSSQKCLYSGHMGFENCLSSTSNTEGEYLESKNAAEQGQRKNSSEESRDPKPTWCEFV

SEQ ID NO: 14392 - protein, 85 aa, Homo sapiens
ASNSSNYVLLGSEIYEIPCLQNPALIKEPPAPSQDKSPWITIHVQEWILGMCESIYCEGEVEAVHMKEPMDSFLLLNVAVVEANM

SEQ ID NO: 14393 - protein, 85 aa, Homo sapiens
YKGQADSLDVMEAGIKVGFLAEGMTVRTSDFSGVVRKDKVHRQRARHYCETLQKAFLEPSLSNWEAGFFITSMLTHQRHTPTRYT

SEQ ID NO: 14394 - protein, 85 aa, Homo sapiens
RPAFRMSPILAYDGAVTKASPYEHEPSRLRANEKCNPAMRESASYESLSFYGSCADTFFKNMDHRSMTTQRGMLTPHMLERRFPP

SEQ ID NO: 14395 - protein, 85 aa, Homo sapiens
HAASMQVPLDKILGATPGCRLSHCLWPVELVEAASEGLVLGPFKMSMPVCASQCGLRSDGLEQGKLLPSEMETQKEEIVSSRLAE

SEQ ID NO: 14396 - protein, 85 aa, Homo sapiens
HKPGPGWLIHNPLSEGFQKNDVKPRKMTNPGEQSLTENHSIQGKAGDSYPPRIRNLEPCVVVTAYRAVSDLLEWSKGELGSSLVI

SEQ ID NO: 14397 - protein, 85 aa, Homo sapiens
MRQTKSVDSYSKSLEKTEKGKSWFDTRFPTMLKPSGKFRDELREQESRDSVQLSRLCLAPKIKCKTSDIWLQFVLSYVLCPTILF

SEQ ID NO: 14398 - protein, 85 aa, Homo sapiens
PNTPEVNEFLQEHANYPRFSKNSAVLVDRRNLVLVLSGKKFLTWYDSGEAETSEQKAAELARSHSPWLLVTSTSVTKAGQETYRR

SEQ ID NO: 14399 - protein, 85 aa, Homo sapiens
YGQSSPDNPAESDACKTVAVPSPCELSVQRPLSILDMKCHQDVAQDAPLYPAASIGGEPSQLEVLPVEFVGSSKVHFNHQKLGGH

SEQ ID NO: 14400 - protein, 73 aa, Homo sapiens
LTKPHDLGSDGGLLGLGANIMIEFALHNTVATPCMHQHKERPQAECDDLEFNEKLLLMSKAESKTMPTTCEDE

SEQ ID NO: 14401 - protein, 85 aa, Homo sapiens
ASQTALKLLLKCEDHELKIVPNSMAETRIPSHAESSYNRGSSYLKLVVASNVPTRIGAVATLCGDRSGVKLSNKALQPIHEGLSL

SEQ ID NO: 14402 - protein, 85 aa, Homo sapiens
VTKFCSTDGLKRSAQTERKLDIGEQSTRLLQMEPWLGKPTDYDASEAKNRVKLETQRSDLYFGNGKLFHRTLCRKVFSSGSQVSA

SEQ ID NO: 14403 - protein, 85 aa, Homo sapiens
SPYGKLAHYLAPKANPEAPYKAAQGNTANGHADHVIAFGSGGKGRSYARQLVEANDWQMHTSNLSLLISFQKAHLKCLGSSQSLR

SEQ ID NO: 14404 - protein, 85 aa, Homo sapiens
PMVWCGTPSDPDDSECSSTAAKLETVKEKITIVRVTTLVERDQISSKLLDAGAVLLFTEIAERNEEVAGHQYLSIPKINNFSYKS

SEQ ID NO: 14405 - protein, 84 aa, Homo sapiens
ISRMLRERTSQAPNNPIIQKSIDAYLLFKAEMQERDPAKQSRKGFGYILPCDVFPWQVSAVLKQFSTDLTKLEDESDTESEETK

SEQ ID NO: 14406 - protein, 29 aa, Homo sapiens
DDLYHNSKDEESIEAGKDAPVKVHHAVVG

SEQ ID NO: 14407 - protein, 85 aa, Homo sapiens
DTEASRNVTRPSPRILSRRVNSDRGSDPEKEKPIMKCAASQLISDQATESDTHLRKEGGVAKECIKHRWKMHYRFPQTNQVKTHS

SEQ ID NO: 14408 - protein, 85 aa, Homo sapiens
PLVPKIHQDEEGKPFVCGSKPAQGTCGESSACDVNLRDLEAKVVPNKHMEELKEKFDSILPAQICNPASKISGKKPLSAHPKQHG

SEQ ID NO: 14409 - protein, 85 aa, Homo sapiens
EHKEKLYYQGVNVLMGCPTPYERRLELLVKGTSIQGSLIETLKTSKEDEIQEEIVSSLLLVKDGQVMHTLMAVSVTLFNILALSF

SEQ ID NO: 14410 - protein, 84 aa, Homo sapiens
KLLPKFVCKVTFNYTLAGQYTALVESLESDPRKSKSFLAEIEDLIRDEWDIASPCSALIDDRVVASDVHIQRTEENPPLQIFMV

SEQ ID NO: 14411 - protein, 85 aa, Homo sapiens
FLLDDKKTACCMNKSTPVWIVTGSQAHKVDQEQETMERASQTTLGEDDETLAPLILRPVLWTAPGVKSEVDGRKKISIWGIDTPQ

SEQ ID NO: 14412 - protein, 12 aa, Homo sapiens
GESVVVDATDAS

SEQ ID NO: 14413 - protein, 85 aa, Homo sapiens
STLQDDEEVCKSRILSKKEPLNISQSDQQVNCESVLRRHQRQGDCRLVETFLPLASMSGVANSLISKLFMAEEKVSLILPERRGS

SEQ ID NO: 14414 - protein, 84 aa, Homo sapiens
DAGPWAKVVEWENKVGEFKLVGCEESMSLGNVKLMRLLYGESHPDDAIGEPLCLFRWMLLDHDKMGRSSGSEITSNLIHRPKLT

SEQ ID NO: 14415 - protein, 85 aa, Homo sapiens
SARPRQTFLLSDEWTIETTKSSHASSVHPQTGWKHHRRRHEGSDISGNSRSSHVHEMDPQDSEETPCSRSQKMHESLSVLKNPSK

SEQ ID NO: 14416 - protein, 85 aa, Homo sapiens
MVEGKEADKKGVEGSAMGQKIMANNCPMAKPLVSNSRPTAPPEHMLLTFSTALPRLAESVLFVDRPKAGGRGQTLQPPKLRCWLR

SEQ ID NO: 14417 - protein, 85 aa, Homo sapiens
QASTSTCPREAELDEQLWSQEDIRSTSGSPPGSSQPSFHVYGIGSPATELFAELVTWQVLGSVNSPEPNGGRSQDATTLYLETAL

SEQ ID NO: 14418 - protein, 85 aa, Homo sapiens
EACLSHRCERGIYDMATKQPECFARSGPYKPGGRRQRIVGRVESEAEPILLDRIQNRHESSYFERQWAAVAMQELYEEKLSPEVP

SEQ ID NO: 14419 - protein, 85 aa, Homo sapiens
NSISLEDKLTGKTRKWNRTKLERPPRYSNFVLKPELIPLALHKAPSGSLLLPYQTLSEYRVLESVSILSPFPLPEKLEMDVRMIR

SEQ ID NO: 14420 - protein, 85 aa, Homo sapiens
IPGYVREYSNSGLCPRKPMKDPDAEVELMCSDLQQIGNSSDWGVGRSGPQLLYSPELQRSELFWSLVDPQAHRPDCWNAQIKLTT

SEQ ID NO: 14421 - protein, 84 aa, Homo sapiens
LRLVRKVKGLECLQFVCLSVIDGPDYLPEHMLLEGTLSLVTGIDESADLSKELEPGSLAADQYKRNVGLLLALWEPRLERDSLL

SEQ ID NO: 14422 - protein, 85 aa, Homo sapiens
SEKFVGVSYPSSECQCTSTDCVKAPFAMVHKRGSFEMVKICPQSCMDNLGIFRNQKLFELQETAHMPNGVSELVGGSLLGQHQKL

SEQ ID NO: 14423 - protein, 85 aa, Homo sapiens
RDGAQISKGLQFRPFEPLSQSENYQDSEETNHMKWARVLSEHAVIYVEIMLKKGYLKWQSANLGTPPFCKLHSNSVACDRVGMAR

SEQ ID NO: 14424 - protein, 85 aa, Homo sapiens
KLQSETDRQSFVQWSTDTDEGSHGTAPGHMINRKLAQQKLQAKFRRKVELSKPCIKTLSNLVFVHTGAMLMAKNIVHKSKLSLFG

SEQ ID NO: 14425 - protein, 85 aa, Homo sapiens
PEGPELAEKKFRAIESCDLEGPSRLHELSDKQLKAQGIGAMYDLKKAMWVWESHTCLCLLESCKDSSGKSLSESTGICDTEKGLW

SEQ ID NO: 14426 - protein, 85 aa, Homo sapiens
DIPMEINFFEGKTHRPTGELPVEPEETLMGPDKGEQEDTTMCLASYSQQPTFGEKITGGAHSQQELTRLLMDIIPNARGGGVSSW

SEQ ID NO: 14427 - protein, 85 aa, Homo sapiens
VRELRPLSSTEPAFTSKTVTNVSPEAQTDDCELLWQEEGDMCFEKHPLTTARARRSFHWGHRPLLVALVKGEPLPSGKLVAALVG

SEQ ID NO: 14428 - protein, 85 aa, Homo sapiens
VFNDKAQKICVLIFLIHSELLLSSSSCKANDSLLLNVATVKLVQFTYLSKYMPQEKPVCDKSLRDNLAKRITHNPCPLFMDVPLG

SEQ ID NO: 14429 - protein, 85 aa, Homo sapiens
MLNLYRVECTEKDQAKTRPKHAHTKEHGAIPERTPAFTKDQTRQSLLGRHADCHFWASLDVACPGHEDVKFRDSVEMDGCESNDK

SEQ ID NO: 14430 - protein, 84 aa, Homo sapiens
NRELVAGDNRTHQTRGDTCAVMEVRNRAVMLGQLRISRKGPEKLAPAVRCPQAAKDTPEVSSRSKLVDHTGPACRYNANLVQTM

SEQ ID NO: 14431 - protein, 85 aa, Homo sapiens
EDAALDTALVAWFIATTHSLDRETELEKPKANSTISQKPEELDTELNEHCLMRKNLKIPAKPKVANSIAVSRTKNRQGHKQDEHV

SEQ ID NO: 14432 - protein, 84 aa, Homo sapiens
KDKASLANKHPEAKLEAAINKMALWDGAGKVRAWLPECQHDYEERKTYDPITVNTEPEAFSAKAMGTMCSSQTGCYACGTAREG

SEQ ID NO: 14433 - protein, 85 aa, Homo sapiens
TPSGNRKVYGLSARIFLRNRFMRKSLPESQQNRCTMKYQQEISRNVSDDSAPQRPKLVHFTSGELSESDIEATFQDKTLSGRHNP

SEQ ID NO: 14434 - protein, 85 aa, Homo sapiens
LQYNQSSVKSGPFYLDSPPIVVRVHRPTLSLTFSEPAGNSDPPGRRDSEITWMEDVNQHLKKTPETFATLEQHTLTHELPSLQCK

SEQ ID NO: 14435 - protein, 85 aa, Homo sapiens
NMSDDKYSQPVDPADLILQERGGVFTWFLCYTFENPDTNVASPPEPWGCALEPPSLKLSEAWHEIGGVRISGSSEAANRNLSVNQ

SEQ ID NO: 14436 - protein, 84 aa, Homo sapiens
FEKMVEVKNQPRSGTTKPFKPCLVDSFAAYIAPQDWKEFTDQALVYKTVSTRTIYRHKPSAQAAFSVTELHSDPQQQVCFPVSR

SEQ ID NO: 14437 - protein, 85 aa, Homo sapiens
HRLVVDYLKQFRGVPLMDEVSIVPSHVSADKPECVFISNNLLKNEYNETLKSVHASQRMCPEDFTATWEDTWLAAHCQAASELGL

SEQ ID NO: 14438 - protein, 85 aa, Homo sapiens
LLIAGEPQPKAPGRRKEDASSESAAADSNRQHYGSVMEAPKHPFHQEEKEPAKKFSSQQLMFTQGHETQQTHLTYTAPETALKIL

SEQ ID NO: 14439 - protein, 15 aa, Homo sapiens
MERSHFRKLRTSATK

SEQ ID NO: 14440 - protein, 85 aa, Homo sapiens
SKFCQDVENALYSAFERPGDKVSFASYDSNSIGKCPDNSTPIEGSPASDLPSSVQGRDATEVPLASVSHQWLRNRLYLESKQLSK

SEQ ID NO: 14441 - protein, 85 aa, Homo sapiens
GSGTPEPIHPIESAPPKERSSQIIKSHPGALTELPPGIRRKSTRDRIMAAICDITQTENREWMVAASETKDEVNWIADPTRESCR

SEQ ID NO: 14442 - protein, 85 aa, Homo sapiens
RAGRSGLKAGEIETEITIHHDLSLRHGDEEGKHPLLDYSLKTEAPHGDHVNDGLTAYVLLQNLPTTFAPKRTSLKTKLLASLHKK

SEQ ID NO: 14443 - protein, 85 aa, Homo sapiens
PIPAVEFSLRVMPLWCILGQEEQLSSLSFDVRTHRALERPLVGVRPRFPDGIKVMAYSQTTPLCRSKRNQAMAITKNTVEAGMRG

SEQ ID NO: 14444 - protein, 85 aa, Homo sapiens
NKIFDKFLGAPSHLLAVSTVTVAGQLLEEALESSRSRRFDTDHSAQLVSISNLYQEVESICMKQERTRLWPPAAEQKRSKECTIL

SEQ ID NO: 14445 - protein, 85 aa, Homo sapiens
MDPQEQLLATDLTPLIIRTTAPREIIVSRIRATQELIKQKLMKTPRNTLSPAGTERPVQRVYKRFALAALDQHIGGDLEPRDSLL

SEQ ID NO: 14446 - protein, 44 aa, Homo sapiens
AAPRMGLAPSERKWEGSEDIESEVFSNELQLYSGKVLNKLTVGP

SEQ ID NO: 14447 - protein, 85 aa, Homo sapiens
SQTSGKRAECILNDKGSMLQGQKETDFKVKAQVLEVANQSQSMKWTFSLGTEGGQRLGCIKQALFPPKFLDCSSRPKEAPLNAVL

SEQ ID NO: 14448 - protein, 85 aa, Homo sapiens
DSQLHSKFAYKRHRLKFSDPTKQEQHKSNLCVPLQWNQSLRESSKVIDSSIARALIKVGSSVTNPEARERIWTLAFHSSATFLES

SEQ ID NO: 14449 - protein, 48 aa, Homo sapiens
GQAQPCVPTQNWEGRPTPPLSVSVELRIHVLNREYYSVAVRGLCSPAV

SEQ ID NO: 14450 - protein, 85 aa, Homo sapiens
KPHKVSPLITGLNNWTKRTYSSSNANGGPQSPTGILLTVTAVLHPQFYLTIPSNTPKYLDLQETSEAFNTLAAGTSLYEQSDEFE

SEQ ID NO: 14451 - protein, 85 aa, Homo sapiens
QAEPVIIGRVSTCLQDEIFDSAGRSCLGVGNGARKAKREQAYAPNHKLTPEPLAAEKSATISLLPRRPSAQGFAPGMPLPQQWGK

SEQ ID NO: 14452 - protein, 35 aa, Homo sapiens
KTSKPVFKVLNQMFRLPSKMIPDINADKNKKLAQL

SEQ ID NO: 14453 - protein, 84 aa, Homo sapiens
QKPEPHSSVATVISKRPDIQFDETTPAGTYKTFDHPYTLEIGERRLEIAESEPSFIEDFQCSRAKGYCGKSSQAQRFAAIQNCE

SEQ ID NO: 14454 - protein, 85 aa, Homo sapiens
ESQQHPGERERLEYVILRVIDPNFVIKSGKPKVGKLWFDNEVKTQTLFMRHETPLIRVMQIEVLSRADQHRVKCAHQERPSLAQD

SEQ ID NO: 14455 - protein, 32 aa, Homo sapiens
CKANRDTELPDAKLGKVECVLHNTLDKYAEPI

SEQ ID NO: 14456 - protein, 85 aa, Homo sapiens
HEEVLKADDAKYATGDAGAQKASKDQFERINRKLWKHEECTEGLGKAMHIIHSLRSKFAAGSGRANDDSAGGGRHGLRWDACLAE

SEQ ID NO: 14457 - protein, 85 aa, Homo sapiens
ADASEFWQGQVRLPPIGSTEADSSARENQSVANLDTTYDSLTWKQRSGSTLYDEVDKNVDHQGYGPAIRLTDPRTSKNIANQFFK

SEQ ID NO: 14458 - protein, 85 aa, Homo sapiens
DAARRGEPQYKKQGSRALSGLKSQVPSGLPQQGVFINWASPCCTGIKQLSYTLNKFMINQGGRPRAASLASPGLSHMKLWIGRPE

SEQ ID NO: 14459 - protein, 84 aa, Homo sapiens
SIAPSEATVYRAAVHVFLLFLAEIWLEDWNTFFQALHSGNELGKMDKGICDTMTTTYSAYPLLGQERSHISSSSEQLNKEPEKE

SEQ ID NO: 14460 - protein, 84 aa, Homo sapiens
FHGEPPSLQDPQQKPFMPVRQPSISSFEYQSPKKVTGVSEGENFTLLKSGGQRKFHGPIPVQPPEVRTKVRQSSTTIENGNELF

SEQ ID NO: 14461 - protein, 85 aa, Homo sapiens
QLSLFLGNCSTWESPVMGVWPEDMSILAGGSEPDSVTTKREAHKSSEHPYWQEPLKNCILETMAKAPTVTIHSLSTLTKPRSMVT

SEQ ID NO: 14462 - protein, 84 aa, Homo sapiens
PSSAKGCNVQNQMSECRITIDIFIPVLKLVESAETLEGPTKSHFPPKPEVMGLNRFNRFNLKADLQTDTYDELPRTSSLSGYDN

SEQ ID NO: 14463 - protein, 84 aa, Homo sapiens
EKTKQKKYNLLNKPGVSCKIKGLIVPNMTSYGPGKLCENDALFGVLYQVHRESGVYVPSTNVAYEKQVDLENHGKDRVRISSQT

SEQ ID NO: 14464 - protein, 85 aa, Homo sapiens
TTIRRPAPFSRCKCDFAGDEWQPTSLKRSHGPTNLWLILAAADISPQNGLYDLTSVKPYNLLGMGSKSRNECSKPLKNLKRRSHT

SEQ ID NO: 14465 - protein, 85 aa, Homo sapiens
PPVEVSEQDDKHPDVSECAYLCSSLLPESFKVSQAAGEYEEAKTRLKMTSGTHDCCAGKDKEPPRFGLPILQLLLPQLPEPNYLS

SEQ ID NO: 14466 - protein, 85 aa, Homo sapiens
ITDDPHSCQKFQYQRSEPIKSSVRHIGKSLQELAGTAYQRGVNPHRQFNSKRKGINKVTVGQHSRNQDLEEETVPRNASAQKLIY

SEQ ID NO: 14467 - protein, 85 aa, Homo sapiens
SPLFIASGAAEQPYHKESGLYLQWHLKQREQAYLPEILKNEREQLGVKPARPCALGNKRKQKERAPTVDPDSKAKRALQQMQERN

SEQ ID NO: 14468 - protein, 85 aa, Homo sapiens
LRREIVRLYETIVTNSLDVYCQNLGLSFVWQSIQERMDATKFEGRPQGPEELLEDEFPKDRAPDEFGEFSQGRPCSRSARFMLPL

SEQ ID NO: 14469 - protein, 85 aa, Homo sapiens
ILPKLTPLGVQKLGNVELLHSISESLQNDRGAPRDLNFLEIERWQNNDKEIALMCEGQAVCQLSGSKGVATYLEWAATSCNRHVR

SEQ ID NO: 14470 - protein, 85 aa, Homo sapiens
EHRFEIMTGSQIKFPAEESDNQLKGSIERFGTTSLQNVKGERVSRETEQKPKDELVRRLNNTRAVQPKAPNRPKEKEKKRDLHKP

SEQ ID NO: 14471 - protein, 85 aa, Homo sapiens
MLSRHSFMILAHGNSLSDERQDSQSGKVGFGTSSEVITSTCEKFYVQRSLLHNAYQLGLLFARKEDTNSIFMRKFMKEEQRIQNS

SEQ ID NO: 14472 - protein, 85 aa, Homo sapiens
TREDGSSCYPMPGSFQVNKGVKSIIHSAKPLPKYGQSCKSTALFYKNMEISQIHRIMNSQQGNLAADRELLYPRGPRQTRYRHGR

SEQ ID NO: 14473 - protein, 85 aa, Homo sapiens
NSYKLLSATNLPEKQPGLYIKNQSHCAPTRGHCKYPAIRNTQAHGTPLMTHVPRISCGFVEQLPRSQAHETRKVEGHKLGETMDN

SEQ ID NO: 14474 - protein, 85 aa, Homo sapiens
STNRALHDTAQVEGDLDGVGSPFSDYKSRFVLRLCVGPDEIEVEYDENVLATRSKSSSQGTNLAAGDEPSLQAAIPVVSESPRAE

SEQ ID NO: 14475 - protein, 30 aa, Homo sapiens
ERTERFPQDGRGVNASSDSGLCMSDSLEPL

SEQ ID NO: 14476 - protein, 84 aa, Homo sapiens
WRTRNTEPLIFKDFRQSASEAGHKEGHAFASQRSDKYVRLQTKSHPDSHTDALRSSMPWRIRIYKDLNQFPLVRHGKYKYLLPP

SEQ ID NO: 14477 - protein, 19 aa, Homo sapiens
MQRVASELCLASLDAAMTA

SEQ ID NO: 14478 - protein, 85 aa, Homo sapiens
FLLHQGSQCLTLQSQRYQCQSNQGFLENLGTTSNRAYTWCLATSSKFRISSAFDQERSFGTKDKENARAPRLMSNIDSETSVGNN

SEQ ID NO: 14479 - protein, 38 aa, Homo sapiens
ELQLGNKFATINEVLYETAAPGQPQAGCDSAKCPVQPR

SEQ ID NO: 14480 - protein, 85 aa, Homo sapiens
ELAMLKTEQGLSRPERNLSEWSLVQLLGQPLGEKRPRDAEPDGNLQVWFYLAESPLESSRIKTKSVYGMKREVKDLIFSMRMTMP

SEQ ID NO: 14481 - protein, 85 aa, Homo sapiens
LSNAADCILRFHIVRRARPLRELFHLTGFKEGGRPHEAQSCRSSQKVNESSTQFTGKETKLRPRLRQEILLQPPHISDEWFLIMT

SEQ ID NO: 14482 - protein, 84 aa, Homo sapiens
QQPREDDVAQGGKESLSYSFLIQNFLKVHKKEVLEMECESGQGADAYLLKMTLQYYSLEGKRDIAWCRATVDGNFSDRNDLILR

SEQ ID NO: 14483 - protein, 85 aa, Homo sapiens
EIHSPQQQFLPAYWFQSGETQASGVHSRKSKDIKGLFFPTGVFWANAGTNPCLGPVELEAGDKCRVGSRGLTKGFIAMQRKLHQY

SEQ ID NO: 14484 - protein, 85 aa, Homo sapiens
STCDRLKQYAIPFGTFTLVLVHPGMLETEIIQDMFGIRSVLKENEKPYRNLWSKRVAVSQPLTIESEDDQGDGLMLRSLDAVLAQ

SEQ ID NO: 14485 - protein, 85 aa, Homo sapiens
NKLWKGGLSTPPTSLPLESRLKSINANDKVYSVKQQQKAMHVEGKKPDSNQMSSSKLLAGKPTVCKKPQSYYEVSQDQLGINPKH

SEQ ID NO: 14486 - protein, 6 aa, Homo sapiens
PTYVPE

SEQ ID NO: 14487 - protein, 85 aa, Homo sapiens
MYFAPVRTRLDAPASVQSRHPDCRQSVMYQPNSKHVIKLDCIGMVASASDIRESRGKAQWESQGLHRLTTMQAFGLQKGRLKDSL

SEQ ID NO: 14488 - protein, 85 aa, Homo sapiens
TSRSSAESVEEWGARHDGTLFIRRRSKAVFTKYQSKRGLHWGERPTNTNFASTDLYKPKPQPDPLVIIEQTAKLTAGGHGCADSG

SEQ ID NO: 14489 - protein, 38 aa, Homo sapiens
SFSAAQFQQQSRLTKDVLRVKKYKLSGERASLLYGGLI

SEQ ID NO: 14490 - protein, 85 aa, Homo sapiens
NEFTYVNVVPPCIHESHEAVNLLALLLDDRERQPEQGGSEGQQVAHPCQKAQQKKLARGRKVSLHMKNISVWSLKCARRFIQENK

SEQ ID NO: 14491 - protein, 85 aa, Homo sapiens
RSAKNKVQHLGIRLDDTEHSNTDMLLYRSSKVCCVNEHRNKHWSPFFGNQLTKRIMKACAMKKDPTKTVLEGGWEPGKVDSCGDD

SEQ ID NO: 14492 - protein, 85 aa, Homo sapiens
SNSWEHPRLEHAKSLDEKSDKTGSPMSFAHGEKMLPEHERQEIQRPTWEQSEASFLRFTIRHKHHNTKVIKARGEEGTHGDLPLA

SEQ ID NO: 14493 - protein, 85 aa, Homo sapiens
HRMIWAGVAFEGAENFKDPPKQSFRLKQASYANKGSPSEIKLEEREQGQCDRAMLIEPDAQSFHKAASSMEEGKGRTDFVNQKVG

SEQ ID NO: 14494 - protein, 85 aa, Homo sapiens
RINKNQPPNDYCLAAQTEEGERERLQYQLGYGPPKDPQHAHKPWFGACSEEYSKSNTNQLNSSSHVGDSAITCNQFPAASEAQHQ

SEQ ID NO: 14495 - protein, 84 aa, Homo sapiens
EICREKIGARVPPYCPESLQNAFRPPSNPMLKSPREDEDSPSQPKNSLATVNWSNYDSPVEKSAEMIALSPPKLAGNPITLSQV

SEQ ID NO: 14496 - protein, 85 aa, Homo sapiens
KWGVVKKGFRRKCVERNGLGTGYEERIPSKLLSEPMTETFKVSRNELLMPTRPLHGSHSCSSSTCKTDLTIAMQSAGYMILGSNQ

SEQ ID NO: 14497 - protein, 85 aa, Homo sapiens
ERSACSRKRDIHPKLHSDMRWQKSFESKTKEKSLPVSRERPQGDMPRQATGMLQKLVYSDPKIEAITVYSQGESPAQSNVYKHQV

SEQ ID NO: 14498 - protein, 85 aa, Homo sapiens
SEAKVKTAKYYAKYVRRQPGIGGGHSSCKSVYLYQSIPVKLNTAMLIGGVPPSESGSCLFQQATEKCLGGVGQYDPDFVVFKKHL

SEQ ID NO: 14499 - protein, 85 aa, Homo sapiens
ELHEPSRLVSLCPNITVEYLALNQFTKKTTEKGQFCASNQLIFKLSVAGKCVVQVFDVGALSEKDFIGHASELITIFPVAAHASK

SEQ ID NO: 14500 - protein, 50 aa, Homo sapiens
NKGRTTTRRQKYDDSLVDIEHMSLSQLDELGLVVGRVLLSLQSEGPTHLF

SEQ ID NO: 14501 - protein, 85 aa, Homo sapiens
KGNYVGTLGVVENLGPVYYHRHQLDISEKFQDILVSMLQDFGWVILAPRSRYEISSKLARSCILLGQHWELNSQTKPSGKSSQSV

SEQ ID NO: 14502 - protein, 85 aa, Homo sapiens
GLTYEAPANMKLTFQVPELFEVRNHLMPQSSSTANAPVDSSRYPDDFPVNGAQLPVPFRSFYGRVEHEVHAAAKLYPSSEGHIAQ

SEQ ID NO: 14503 - protein, 85 aa, Homo sapiens
NYEQSDCEELVEAHSMPLWETTCQTVPMFTVFDERLCIYHNGREKTFGAQQANWTWLSFPVETTAEQQNEVDGCMQKSICSAQKE

SEQ ID NO: 14504 - protein, 83 aa, Homo sapiens
ATEEVFIAGEDQKLFRTPFIEESCKFSAAWKGRAGECMLVQGPGDPQDKAKSVDQSKAPLDKVRAVQLREKRATNETPKPWSV

SEQ ID NO: 14505 - protein, 85 aa, Homo sapiens
DDPFVTYTRVAIVPPMSQSSKPLSKEKLIKSSDSIVWGVFTEKYLAGAPMSIDAKFKKGGRTERRQSVQTNAELEESETDRGYLS

SEQ ID NO: 14506 - protein, 85 aa, Homo sapiens
PSLYAKKRRCQIETELGQPHTQSTSGCLIPDDVPETMSNLCIDPGGGSDSPFPHPPKESELGRGKNTQRPDKINRSKDNQWCVSI

SEQ ID NO: 14507 - protein, 85 aa, Homo sapiens
GRNRQSAKKLCLQEPVSYALAPLPELAGAFDSTNTKGRYWEIFTGADFWRVRRDAIEMSECSENEMDLAKKKPHKKLVKREHFRR

SEQ ID NO: 14508 - protein, 85 aa, Homo sapiens
EGISSCEGNRHEKATQKFAAWTRRLLKNWAQVTLPELRLEYKDSITTPEALKTMSERLSPKDVSDTTEIGPCAVWSLELDPLTDR

SEQ ID NO: 14509 - protein, 85 aa, Homo sapiens
ISRLAQPLSPVACNIGLLRLSASDPLVELWALGSAEIIWGENGTISKLTHKDNAKLPKFLGSVVSTRKLAGFDRQLAAFEKRVYW

SEQ ID NO: 14510 - protein, 85 aa, Homo sapiens
GLGTASGERPPGQAEVQTPPEVAVMGIASLPENFLVKNFAGSRAIWEWTINAEPGAVTNLGKDGKFVVTAVQGECHFKRLIDMGL

SEQ ID NO: 14511 - protein, 85 aa, Homo sapiens
TFEASYPGGIIKLLGAIVGMALAIEEKPLSTKARVASQNYVLLSHSCPGDRHSKAPIDESRDLQLLSDVNTEMETMNKMLAEHNK

SEQ ID NO: 14512 - protein, 85 aa, Homo sapiens
TIRVNEWMEGLVHILRVALTEVVGSRVEFNALMLAVETNGQTRGAAIEVLLHPDLIQVPIHVKERGDTLNVGPCCQEKLSSDLSL

SEQ ID NO: 14513 - protein, 85 aa, Homo sapiens
QHATLTLRQFVVSSKDRHTRSAPIVRQITQIDQASGIELMHPLQVSPPYKTLSRVLIESGPLRNRLKWTPGLLFQDQYLLSPKCL

SEQ ID NO: 14514 - protein, 85 aa, Homo sapiens
KSLRSRSPKARLFESSLQAKWKRDLMGSGDKLTPDLFNKDTSDLWKPVCRPLGLSVVAAFNVDVGFFGQTTRRPLMLLFDPFPSS

SEQ ID NO: 14515 - protein, 85 aa, Homo sapiens
ISLDGVSDLPSIFFSQKLAPDRRFEDTGIDITLEMEQPVPECLQPWEQPAICEARAWEEKHISSLGVSMLPVTLVEKLPLSSLAV

SEQ ID NO: 14516 - protein, 85 aa, Homo sapiens
SWLTAARDALFGASMMQVISIVTSKSQDGMSRKYLKDIPDSNHGKFLYSTEKCVECEQRQEMEFTTLARPEYPEAHIGLHLIGQA

SEQ ID NO: 14517 - protein, 18 aa, Homo sapiens
VCNGQQNHILDGSPSDLP

SEQ ID NO: 14518 - protein, 85 aa, Homo sapiens
EFSRDASELGSAERPSAKRLFMDLSISMCDHERLLGGAVGQLRYTGLVMTRLLGQLQKKLGSSEYSKPCTGFDKRPGPPSHIFEK

SEQ ID NO: 14519 - protein, 27 aa, Homo sapiens
ASEKTKALNKVNPHIMNPYLESTGKCD

SEQ ID NO: 14520 - protein, 75 aa, Homo sapiens
NCDCGRELDFACRKEANPQSVAESYRKIVPCPDRIKLGTNMSLRYPGSVPNQKSSDVASVRLLKLMNSITLQPMH

SEQ ID NO: 14521 - protein, 85 aa, Homo sapiens
GQAPASKVSCSPMIQAVKKERPNDSSAEKDKKTRLAASGDTEKLTVNCLNAGSRAAPKQEDFPQTSEKQMKPLSFPKAQSCNTAV

SEQ ID NO: 14522 - protein, 85 aa, Homo sapiens
RHNEHCQIYVRNLGNSSLQPTECTGYLSTIQHSQESHTSLNLGEAVLSCTACLFASLGSLKPARELYILQKYMEQCENNRFVSEL

SEQ ID NO: 14523 - protein, 46 aa, Homo sapiens
FDGTASANLKLFSAKAQSQGKDQVPFAKMSQERAANKATGYSFSFL

SEQ ID NO: 14524 - protein, 28 aa, Homo sapiens
EDVVESIGKQNSILAYTSTSFPGTCIVL

SEQ ID NO: 14525 - protein, 85 aa, Homo sapiens
SQQFVSEVLHLEWESPCKWIVAYNDGSKRTDLGLAFLNGFAPENRMTTGLYVKRPLLRKSFELMTTLQTRVLRVNRPVYGMKSEQ

SEQ ID NO: 14526 - protein, 85 aa, Homo sapiens
GKPAQGNCSEKRHNIPYSQGWQDILPSNFNQKTVPVYGLGQNSLTLEPPNLKDNFRQLLNFQDFKDNRGMSDTPGMGRRGHLPHT

SEQ ID NO: 14527 - protein, 85 aa, Homo sapiens
KGGPKVRPEEVPKSVKAKLSDFPPISIARLSITQETGAMVESFRKDTIANPQPVLTIESMEQSEVNNIGPEAPLIHASECTHVES

SEQ ID NO: 14528 - protein, 85 aa, Homo sapiens
VEDLLEMSKETFGGLVKISDRQKELERVRTIGVMEARTSQPVKFKALTTPKAFIVGNPKDYMTDYTRGYYFLSEPQIFRNRSNTN

SEQ ID NO: 14529 - protein, 85 aa, Homo sapiens
PRLRPNADEIKTKPRTAPEVKHYLRSMALGEELTKADSPIPLFRLLNWMLVIPLVICIPELRTLVQSKTPPDEPINITLVQFALR

SEQ ID NO: 14530 - protein, 85 aa, Homo sapiens
YLFCYNRPGLPVLLSLSWSGSGSGDTHDNHGACYGDTMTTEGGRRGKLPFHECSRKKPAVGMLVSPEKPQGSEESAAQAQDGVRA

SEQ ID NO: 14531 - protein, 85 aa, Homo sapiens
YERCERDSVMERKSHFPFEKDKFSLCPSLTVREEKRMKAQDQEQVLGTDVGPLLHQIFGDTSSPSYDMRKCFIECIHKDRMFLAA

SEQ ID NO: 14532 - protein, 85 aa, Homo sapiens
NPARRFFHEQGKVMQKKKFDGDGESAIDHGQVSDMRQIESLENRKNTERTQTLHPIVGVPLRDLEIEAHVSGECEEPCLRECRRH

SEQ ID NO: 14533 - protein, 85 aa, Homo sapiens
MVSKPCSYADGKNANWTSENGSLASTANGQERGHRAEKGKAINGIEDDMKQNASVGGAGVCSSEKDLSEIKEEIDEMKVHDCLPY

SEQ ID NO: 14534 - protein, 85 aa, Homo sapiens
IVGNTNAAVTEAREAHRPIMAMERGRKISIYSPSLPLDDLEKVGKFVYDTQGREEFQISACFLNDLKHSEQLETDSSDLRPSDSD

SEQ ID NO: 14535 - protein, 85 aa, Homo sapiens
ELEPRLLVVLQKLPPYAHPCLTSEQVKDNSSLSSIQGQEIAEEKPDNYRTFAFTHYEPKEMLEYSLLLQKIAKKPTPWFLRATAT

SEQ ID NO: 14536 - protein, 85 aa, Homo sapiens
SDCDDSLCPLRYLNKRGGELASILNLAVPKAACLAFPLAQKAIDKDTVHQSVREPTKGHGFSVIIESKRLHLVCAAKLQKNGATK

SEQ ID NO: 14537 - protein, 85 aa, Homo sapiens
GEPKWKINPCQVDLYRPFSLEQPQAHIRLQLPYLNQDETQMLRQKAPRTERASVVAQPTPLPYLCFQSTILDSIGNKHLCPELPA

SEQ ID NO: 14538 - protein, 17 aa, Homo sapiens
SEIRENRTSPIPPPDPG

SEQ ID NO: 14539 - protein, 85 aa, Homo sapiens
NIVSIWRLVWWPNSTPSELFKPEQCEGVKQAKLTSLRPASRSFGVDLDLQPTLQMPCELSGRREGADTAFDYHDTMKMLGVIAVG

SEQ ID NO: 14540 - protein, 85 aa, Homo sapiens
MMKNVKALHSAQSTSYSMEKAVLWLTQQKESENPVEGRERKCRECEVLFRAYRKFGMDPTLMCSTCFDELPKGELYCGHHYIAEK

SEQ ID NO: 14541 - protein, 85 aa, Homo sapiens
CLRQEQAGMQLRLGGLDVDRMSNPDHLHPMLGSIYKGIGIPKDTDEHLLLRLTGLEKGADCINGNVKANPVGGSKIRSSHPCELV

SEQ ID NO: 14542 - protein, 85 aa, Homo sapiens
EEVARASVPNECPEPLVTSSEPRMQRATIHRETNRPEPLPSGLGSCCKEQEMEGSLVTIGSKASGEVAEKQAESFMGVEDEAETK

SEQ ID NO: 14543 - protein, 85 aa, Homo sapiens
VGKGWDDCLTHSKFKEWPKEEHGRRLSETMTIMEMTLDAMDISRRRNAHVPEIRLWPQIAVSTELMPFPLCCKRRQTDAPAAFCS

SEQ ID NO: 14544 - protein, 85 aa, Homo sapiens
ECRTSELDSIEFFKAGIIPPTEITSDLFSFPSCIGDFSNLECRYAGSQSKLYISHDQLEAVESKRIDTVLVIYARTVNQSVDNTE

SEQ ID NO: 14545 - protein, 85 aa, Homo sapiens
HDLDCRESSDVREEDNLVNAKLVHLQCMQSVSQRKGHLRVRWSPNQKQKGIPTDGSLETNAYSPYDVKSPLGQEFAHKTQHGVEK

SEQ ID NO: 14546 - protein, 85 aa, Homo sapiens
NSGSGIDVKEGYHVCGVGYHWMYMFKREAYCVELVGLSDQTAQGPNPGEKAETPSSDAGITSEDVELVHHSETPGYTTLNARNFP

SEQ ID NO: 14547 - protein, 85 aa, Homo sapiens
SKIALRNIYLEANPYSITVVRFAYKPGCSRKMMENIQDSKHYGRFHEARALKILITFPEYVNSDHSDLSNVKCYENAKGRTEHWP

SEQ ID NO: 14548 - protein, 85 aa, Homo sapiens
SRATVACELKQDSLSRHPTLAGNQTISDKFGSKDPRLRERKKFSHMSNAEQAKCRPMPGAQFVSIFLSKFTRTRGGQAVKRTKQA

SEQ ID NO: 14549 - protein, 85 aa, Homo sapiens
ANNELFISSRDMSHSHPCKRPDEQSEYIAALPNERAAGTHRVRVHNVLDEEIIIRKLKLCRKPQFSKSLEISKPATALRTEARVA

SEQ ID NO: 14550 - protein, 85 aa, Homo sapiens
IGRICQFTGRPRTASSEGRRQNWEHNMEGLEPTTIRYPKGALTTVGEVGDSVGYGAGPFGSLAETKVNPGYTRWNVECGKIEYLL

SEQ ID NO: 14551 - protein, 85 aa, Homo sapiens
GGVLAVVSLAFNWQFQNTAIAEVLLINSDRGSAPRKGKGEFAMLIPMSAGGGLPEPESGLTYNVEKKPSTEDKTLGRVKDKQEIG

SEQ ID NO: 14552 - protein, 85 aa, Homo sapiens
ISKVQASAQKGAGPLPSSRHILPLKLAYTEVAHSTTGFSASIEHITNVSSRTNSVPPELLSVSPSVALMGEMKIHLARLEECSKR

SEQ ID NO: 14553 - protein, 36 aa, Homo sapiens
PLVTDPMQDETVPMKINAFHDEYMSSSEICGQLEKA

SEQ ID NO: 14554 - protein, 85 aa, Homo sapiens
ARTKLLDDMRRPISLLGSRPAPFPGLVHATNVLVIHKCTTTEFIPAKLGGASHDQDFESIIRLHLRSCRILCPTIEERSFVSTGM

SEQ ID NO: 14555 - protein, 84 aa, Homo sapiens
IHVPEKTQGKTYQKSKYLKYEATFWLEFAAEETYLIVMGQAMAPPLQRELNHSCCEEVRSRYRQDYGFSLCSNTHSQAAQAPRL

SEQ ID NO: 14556 - protein, 85 aa, Homo sapiens
TPGQPGASSWPFVAMGGTADNMSVELITGERRPRGHIKSKAWSCGRQVDGYYTPTCVMNSRSVLDESAPRVVSEPPLPQLPEVSP

SEQ ID NO: 14557 - protein, 85 aa, Homo sapiens
PDAIQGFFGVSPHPESALYCVSEATFKLPSEAILECLSSRGAPSPGIHPTTEIEPEGMEKSQSALTEKALFSEAHGRLDLDTDLN

SEQ ID NO: 14558 - protein, 85 aa, Homo sapiens
LETKSLADSVRVRVCQQEDGRKLHVMGWIEFEFDQLALIIGARKIEIWVTSLFQEIQSLATILLECQKNDIEGLHTICELYCEME

SEQ ID NO: 14559 - protein, 85 aa, Homo sapiens
RSNRLSYSNIYKTETSSSSDLIFQAESANEKFGMLPVQAAQLLQTFIPALPFLKEIEGASFEEICSSSPGDAEPHNLEKKLAADC

SEQ ID NO: 14560 - protein, 85 aa, Homo sapiens
NDANRYDDQASKNNEGSPEVAGTQKEKCSKHPGELNLNYSHGDESDAVIEGESNESGEGQKVELLNLTSLAIMTESAPNTGARSS

SEQ ID NO: 14561 - protein, 85 aa, Homo sapiens
FSAFIFTEAPLSRNEHEQDLKCKSMREGTDKDFAFEADSLYAFATVIPSPALIEFDRWQLSSPLFNVVAMMSLLKTEGRWTAQEQ

SEQ ID NO: 14562 - protein, 85 aa, Homo sapiens
VVMQREVLEVQLQKLCKASRFVIVDDVPEFGLGHHSPSVLFQHPSPLPALEGIEPVGLGLLDKPQTLTKAHVLAAKQASQDSRDH

SEQ ID NO: 14563 - protein, 85 aa, Homo sapiens
PSLDALANSLTVTQGPRLQWHPSLSYNENGGGSTGLTLHAFSFKGELASEVHELCELTLRELVGKVRKPMFQLKSAIAPKSQHNT

SEQ ID NO: 14564 - protein, 85 aa, Homo sapiens
ELVAVTMSAGMSPETPCEFVTPRTVNVPEHEPALAVYQEEMTKSHLGKYTSAPKLLKDRKISFLDSEEDELEAAEDAAKSSSVPV

SEQ ID NO: 14565 - protein, 84 aa, Homo sapiens
QQTARVRALSSRFPILYAVIRKIKQTNMHFIAYMPHSREGASCGSELKHRGVLVRPLSKNHGARHRPGVRVLPAFIYPDMAASG

SEQ ID NO: 14566 - protein, 85 aa, Homo sapiens
HGQVDFVGLALERKPLGGQSIKAGDLSVSRHCLETLTEDATVAWSAHLNRLHLAKLSYYIWGFAPTVNLTLYVIRWTSVAKARFN

SEQ ID NO: 14567 - protein, 85 aa, Homo sapiens
KEVAKFMRSDEQDQHRTEELSKVYFEVAWTTKGRILGAAILPRHEKSLKFTRLAILAPKAEQIWSKFPIKTELSYSCIKTVIRVL

SEQ ID NO: 14568 - protein, 85 aa, Homo sapiens
FLQKWSIWRLPLGPNWNQKINEKPDKKVGLAIPSAAIPESHVLADGTLKLIEPNLVSGTPENQHFEEVVIPDADGRPFGLFLSSL

SEQ ID NO: 14569 - protein, 85 aa, Homo sapiens
RANTADSVLEVQLAQGKKSTTTPTGYDQNSVVMLNHKYSGAELHRLYEWLDQICKRGRTEVFESSSHIWMCLEFIDTAGGEMDVK

SEQ ID NO: 14570 - protein, 85 aa, Homo sapiens
FPKREETSPKQQLILLSELADPESLSRVLFPKLLQSDPNGGVYYLEGHSMPILIKNETWDFTFFATNSELYVGKNNETDAEEPTQ

SEQ ID NO: 14571 - protein, 85 aa, Homo sapiens
MGQLAIDKVLHEQKPNSPEVTMLLLREANDQSEVLAIAEEKTEMLKGDGETPPSQHNFKSCESEPEMWSVLHRPEFCELKNPNRQ

SEQ ID NO: 14572 - protein, 85 aa, Homo sapiens
GSTVLDDLLCFSRHSTPNFQLVLHRRENVMARPKCLENKCDINPFQVQGTREVVYLSSTGSVLKPTTDGKSYSFLPCVKPARGKV

SEQ ID NO: 14573 - protein, 85 aa, Homo sapiens
SEETSHFQSGDDGNEKGPHTSHAEQPRSPQFSPPDVESVQWAIDVYSQNKGLQNRTQLSRIRDGKTGGVAENVAPPQSEASRLEG

SEQ ID NO: 14574 - protein, 85 aa, Homo sapiens
QVTIFCYVQGTHKFLSAVACDQMNLITRMNRLETRLAKLLALKMIVLLPPHPVTTVTAHTFDPHIHMLKLGRGEQMETFQNYILT

SEQ ID NO: 14575 - protein, 85 aa, Homo sapiens
YSYAKSWHTGRQPKEEVHIPMKHETQLQQPVAFAPQQVQRLPVSPLHLCFVKDNEEAGFVNSLLTARSTVPEKRSKVTIDGNSSH

SEQ ID NO: 14576 - protein, 85 aa, Homo sapiens
RLVPVSTDTRSSVVGALVDQPPLNSSVSQVSKTQTSESEFETHAGHRYLQAWAFPLLNWQHQAFRRKPNGSSRKFDEETTSTTKK

SEQ ID NO: 14577 - protein, 85 aa, Homo sapiens
ENKRDMEDYEMKQRCKVPFSMKADGYDDTVREFNLPNEDEKEVLTNPSANPRPDSHKRESKSSYSAYSELQPYLGIYGLQPTTKD

SEQ ID NO: 14578 - protein, 85 aa, Homo sapiens
PVVPYPYMAGSILVQEYELFEDKTQKIEQPELALTAINVIGSLVNDPRNERPNDSHNFTAISEPWDIWKKDALSSHEINLYQAQC

SEQ ID NO: 14579 - protein, 85 aa, Homo sapiens
QYKWMHRQPLQSNVANGEYSYCIYRAVDESIATHRTHIEELLSGLLHTEMVKQITGKILNLDFEQQSTHSRLKWHADVATAQGQN

SEQ ID NO: 14580 - protein, 85 aa, Homo sapiens
PVPLQQDEAKGEPHHPCITRSLWFKLDASHMPDNPSCFYPTKKLAAATKDGLCCYDQEEGKRSLFRNDGLNGSFDPGSLPAEFSY

SEQ ID NO: 14581 - protein, 85 aa, Homo sapiens
ASGPTNSDRPVRLFCDMIKIICLTCWVANPLQTEEGDGERERQCAVQSEGREQWLHTNRLVKTDIILDGHLNSFSIDVRLPPLEC

SEQ ID NO: 14582 - protein, 85 aa, Homo sapiens
YSTHSGNHSEQHSKRFAEYLDGENSTPEIKCLHLQGTQKFLELPMRFECPHHLQSFVKALEYRAAVNLFKMGGVQLDGAVMIFSC

SEQ ID NO: 14583 - protein, 85 aa, Homo sapiens
ESAAYPVLIEASQPGRLSGMSLTEAVCKQSSQIGHAQESQHLLMYGNEHYSQGTALAFFAEPLSPFGSLPLLPKISISTQSLHNT

SEQ ID NO: 14584 - protein, 85 aa, Homo sapiens
AARSMILNLQLYMNCVQCSTDSEYQQQVQVDHPGTLQPSWQGERDKEKLFEGSQDAETKALLAEPGTMKAQYSWHAAPPGEEAEE

SEQ ID NO: 14585 - protein, 85 aa, Homo sapiens
QTDRLREQEGHLQMLKGCAMDYDETSTSRAVQLLNMNLSELYHRACKNSLLKLPGQDSRIYIARETSCKFKSAPLEKQKTRFIEL

SEQ ID NO: 14586 - protein, 85 aa, Homo sapiens
GPAECFKFALKVGKLSRVGYPHECRSKGPSSTQEKGSSDKLMSRCHVFILDVVQGVVIAVTMHGPLEELLSQVRVVVENATSVRR

SEQ ID NO: 14587 - protein, 85 aa, Homo sapiens
RQVVVSFPLDTTGTAYKINGEKAAGIAYEPGNHNSSRGERQRPSSLLTLGMSGMANCLDCSRDHRPHLEEGRYMLMRDLLNNVVP

SEQ ID NO: 14588 - protein, 85 aa, Homo sapiens
VCKLCGRFAPFEFLECPEALRYRAIKFPGCKCTPLVGNTFVVLDASSLSTPKKLRGKVSECLPDDGKYATPINCVLVMTTLFVTG

SEQ ID NO: 14589 - protein, 85 aa, Homo sapiens
MAAGSFNADIKITESFADERQLHERDGMCQEEFASTLVRQTTPEKQKEGRSLGAATLERGTFKVPWTRLKDNVDELGAKQLKVFS

SEQ ID NO: 14590 - protein, 85 aa, Homo sapiens
NQKLSGPYILQSKPSIDKPPGLLKARPEYLKEREEQKETRAGQAAHRAASKRGDPSLKGIQPERGKDILKNSQALGAGEAAKKSG

SEQ ID NO: 14591 - protein, 85 aa, Homo sapiens
DNSVEGFHLGAIVAFKPCSTIGRDSVAKKNKILPDQMTCVLVEESIRATREELGGVTGLGHLFGYLQTFRELRPENDGVLTSWKG

SEQ ID NO: 14592 - protein, 24 aa, Homo sapiens
GLYFGQAETAQNGQCRSLPGGPVS

SEQ ID NO: 14593 - protein, 85 aa, Homo sapiens
RNDAGPEKESLQTWYELTMLQPKEAQVSRSKLNTFAMTEAVVKPNMADTALLFKCRSSVASGPPVNLFTDRKDEIAAAGELCCQD

SEQ ID NO: 14594 - protein, 85 aa, Homo sapiens
FKEIQLLPAREEPMEGIYTRKLDPYLMKSGATYPSSSLPTKPVVNFGPYYSYKMTCGRQFEIDKAQDQLISSLLPVSSVKWMFQV

SEQ ID NO: 14595 - protein, 85 aa, Homo sapiens
QERRAGHTKVGKHRCTKSAQLRRECNTSTYSRGEGKSEQVLRNGHFLRALSALLWFVHSQLMEHRSWPDIYDEATSDGLVPPAMV

SEQ ID NO: 14596 - protein, 85 aa, Homo sapiens
SREKEKRVYSAPRSLGASQSTNTKDNLRFVQPAGAGTILVSYQSRAISLAATKENKSWKVSFLLRIALEIESCSNDVDPKVLLPQ

SEQ ID NO: 14597 - protein, 85 aa, Homo sapiens
KLKICCGPSLNFLKKRGKEDCSLEKTAWLRCDFPSNNKWEHNEKSWVTLEQNGLVSKLGECRFQYINGSSSILLLRKRSAEGLED

SEQ ID NO: 14598 - protein, 85 aa, Homo sapiens
DSPFTDKGRVLEPPISEYPRHPCPQSVEQPGRYCASRFIEDIRESDLLESQNTLDTGSGAKDEPARVFLQQLHVILSNSTLCQPH

SEQ ID NO: 14599 - protein, 85 aa, Homo sapiens
ISMSARQFSAISNCGDGVKMCNFTMERCPEVVKVKEGKALPQTGSCRGEIRAVKPYTTRRMRRDKQLIGLSDFTPPFPVGESEVA

SEQ ID NO: 14600 - protein, 85 aa, Homo sapiens
QQSAQDEGETWRGGQPGLLERRTGQPFPEEPLPKTPQDGIDPIPSPSLSDVEESHLDLVLLSSAKPAQAPHIESSSRLVMGTRTC

SEQ ID NO: 14601 - protein, 85 aa, Homo sapiens
DDPSRLMRTCSRLARPGSELIINFKAWELFGKPTASWGGETSTKPTVIDLDRLHKKTKLVALLTLAGSPLARGELQTQEKEGVRW

SEQ ID NO: 14602 - protein, 85 aa, Homo sapiens
DLTLQKSSQEPSPQERALQTSKSVAEEALEGGLSHLKVLYGKHARERLFKISLIMKGVCLGSQPHGILRRTQHSEETSFEVSTLP

SEQ ID NO: 14603 - protein, 85 aa, Homo sapiens
YKQIGRLDEGPTFGNSPDAIGASPYKDLQKESAVLLSKGRKGPIALQLWKDRNTSDSSSNKYAKLSSERPTVRKHGSMKFDPSCI

SEQ ID NO: 14604 - protein, 84 aa, Homo sapiens
NLFARRGEQQLQIAPYALSEYEALHLEVSKMTSSAIKEEMCLSTSPSQNAQGFISGHTEDRPVGSTENIKQLEVADPLRMKSSS

SEQ ID NO: 14605 - protein, 85 aa, Homo sapiens
SSALFGSHLRNFGHRVSSRDQDRPLLQGGEDEWLFLECPKDGTYIKQKVLCQQCVNYTVGSPIARLLRQVAKFAKMSFVTIPKPH

SEQ ID NO: 14606 - protein, 85 aa, Homo sapiens
ANSASPEQNQNHCSAINNSIPLMQGNLPTLTLSGKIRVTVTFFLFLLSATFNASFLLKLQKWTQKKEKGKKLSRMKLLLKHLTLA

SEQ ID NO: 14607 - protein, 85 aa, Homo sapiens
NLLETLIVMPLDGMWNITVQWYAGELLCKVLSYLKLFSMYAPAFMMVVISLDRSLAITRPLALKSNSKVGQSMVGLAWILSSVFA

SEQ ID NO: 14608 - protein, 85 aa, Homo sapiens
GPQLYIFRMIHLADSSGQTKVFSQCVTHCSFSQWWHQAFYNFFTFSCLFIIPLFIMLICNAKIIFTLTRVLHQDPHELQLNQSKN

SEQ ID NO: 14609 - protein, 84 aa, Homo sapiens
DPHELQLNQSKNNIPRARLKTLKMTVAFATSFTVCWTPYYVLGIWYWFDPEMLNRLSDPVNHFFFLFAFLNPCFDPLIYGYFSL

SEQ ID NO: 14610 - protein, 85 aa, Homo sapiens
FLFLLSATFNASFLLKLQKWTQKKEKGKKLSRMKLLLKHLTLANLLETLIVMPLDGMWNITVQWYAGELLCKVLSYLKLFSMYAP

SEQ ID NO: 14611 - protein, 85 aa, Homo sapiens
AFMMVVISLDRSLAITRPLALKSNSKVGQSMVGLAWILSSVFAGPQLYIFRMIHLADSSGQTKVFSQCVTHCSFSQWWHQAFYNF

SEQ ID NO: 14612 - protein, 85 aa, Homo sapiens
FTFSCLFIIPLFIMLICNAKIIFTLTRVLHQDPHELQLNQSKNNIPRARLKTLKMTVAFATSFTVCWTPYYVLGIWYWFDPEMLN

SEQ ID NO: 14613 - protein, 85 aa, Homo sapiens
NIRNAQPDDLMNMQHCNLLCLPENYQMKYYLYHGLSWPQLSYIAEDEDGKIVGYVLAKMEEEPDDVPHGHITSLAVKRSHRRLGL

SEQ ID NO: 14614 - protein, 85 aa, Homo sapiens
AQKLMDQASRAMIENFNAKYVSLHVRKSNRPALHLYSNTLNFQISEVEPKYYADGEDAYAMKRDLSQMADELRRQMDLKKGGYVV

SEQ ID NO: 14615 - protein, 84 aa, Homo sapiens
AMKRDLSQMADELRRQMDLKKGGYVVLGSRENQETQGSTLSDSEEACQQKNPATEESGSDSKEPKESVESTNVQDSSESSDSTS

SEQ ID NO: 14616 - protein, 85 aa, Homo sapiens
IAEDEDGKIVGYVLAKMEEEPDDVPHGHITSLAVKRSHRRLGLAQKLMDQASRAMIENFNAKYVSLHVRKSNRPALHLYSNTLNF

SEQ ID NO: 14617 - protein, 85 aa, Homo sapiens
QISEVEPKYYADGEDAYAMKRDLSQMADELRRQMDLKKGGYVVLGSRENQETQGSTLSDSEEACQQKNPATEESGSDSKEPKESV

SEQ ID NO: 14618 - protein, 85 aa, Homo sapiens
GPTLAVPTPYGCIGCKLPQPEYPPALIIFMFCAMVITIVVDLIGNSMVILAVTKNKKLRNSGNIFVVSLSVADMLVAIYPYPLML

SEQ ID NO: 14619 - protein, 85 aa, Homo sapiens
HAMSIGGWDLSQLQCQMVGFITGLSVVGSIFNIVAIAINRYCYICHSLQYERIFSVRNTCIYLVITWIMTVLAVLPNMYIGTIEY

SEQ ID NO: 14620 - protein, 85 aa, Homo sapiens
DPRTYTCIFNYLNNPVFTVTIVCIHFVLPLLIVGFCYVRIWTKVLAARDPAGQNPDNQLAEVRNFLTMFVIFLLFAVCWCPINVL

SEQ ID NO: 14621 - protein, 85 aa, Homo sapiens
TVLVAVSPKEMAGKIPNWLYLAAYFIAYFNSCLNAVIYGLLNENFRREYWTIFHAMRHPIIFFSGLISDIREMQEARTLARARAH

SEQ ID NO: 14622 - protein, 85 aa, Homo sapiens
ARDQAREQDRAHACPAVEETPMNVRNVPLPGDAAAGHPDRASGHPKPHSRSSSAYRKSASTHHKSVFSHSKAASGHLKPVSGHSK

SEQ ID NO: 14623 - protein, 85 aa, Homo sapiens
PASGHPKSATVYPKPASVHFKADSVHFKGDSVHFKPDSVHFKPASSNPKPITGHHVSAGSHSKSAFSAATSHPKPTTGHIKPATS

SEQ ID NO: 14624 - protein, 85 aa, Homo sapiens
HAEPTTADYPKPATTSHPKPTAADNPELSASHCPEIPAIAHPVSDDSDLPESASSPAAGPTKPAASQLESDTIADLPDPTVVTTS

SEQ ID NO: 14625 - protein, 84 aa, Homo sapiens
ADNPELSASHCPEIPAIAHPVSDDSDLPESASSPAAGPTKPAASQLESDTIADLPDPTVVTTSTNDYHDVVVIDVEDDPDEMAV

SEQ ID NO: 14626 - protein, 85 aa, Homo sapiens
IGNSMVILAVTKNKKLRNSGNIFVVSLSVADMLVAIYPYPLMLHAMSIGGWDLSQLQCQMVGFITGLSVVGSIFNIVAIAINRYC

SEQ ID NO: 14627 - protein, 85 aa, Homo sapiens
YICHSLQYERIFSVRNTCIYLVITWIMTVLAVLPNMYIGTIEYDPRTYTCIFNYLNNPVFTVTIVCIHFVLPLLIVGFCYVRIWT

SEQ ID NO: 14628 - protein, 85 aa, Homo sapiens
KVLAARDPAGQNPDNQLAEVRNFLTMFVIFLLFAVCWCPINVLTVLVAVSPKEMAGKIPNWLYLAAYFIAYFNSCLNAVIYGLLN

SEQ ID NO: 14629 - protein, 85 aa, Homo sapiens
ENFRREYWTIFHAMRHPIIFFSGLISDIREMQEARTLARARAHARDQAREQDRAHACPAVEETPMNVRNVPLPGDAAAGHPDRAS

SEQ ID NO: 14630 - protein, 85 aa, Homo sapiens
GHPKPHSRSSSAYRKSASTHHKSVFSHSKAASGHLKPVSGHSKPASGHPKSATVYPKPASVHFKADSVHFKGDSVHFKPDSVHFK

SEQ ID NO: 14631 - protein, 85 aa, Homo sapiens
PASSNPKPITGHHVSAGSHSKSAFSAATSHPKPTTGHIKPATSHAEPTTADYPKPATTSHPKPTAADNPELSASHCPEIPAIAHP

SEQ ID NO: 14632 - protein, 85 aa, Homo sapiens
KSPRRTTLCLMFIVIYSSKAALNWNYESTIHPLSLHEHEPAGEEALRQKRAVATKSPTAEEYTVNIEISFENASFLDPIKAYLNS

SEQ ID NO: 14633 - protein, 85 aa, Homo sapiens
LSFPIHGNNTDQITDILSINVTTVCRPAGNEIWCSCETGYGWPRERCLHNLICQERDVFLPGHHCSCLKELPPNGPFCLLQEDVT

SEQ ID NO: 14634 - protein, 85 aa, Homo sapiens
MNMRVRLNVGFQEDLMNTSSALYRSYKTDLETAFRKGYGILPGFKGVTVTGFKSGSVVVTYEVKTTPPSLELIHKANEQVVQSLN

SEQ ID NO: 14635 - protein, 85 aa, Homo sapiens
QTYKMDYNSFQAVTINESNFFVTPEIIFEGDTVSLVCEKEVLSSNVSWRYEEQQLEIQNSSRFSIYTALFNNMTSVSKLTIHNIT

SEQ ID NO: 14636 - protein, 85 aa, Homo sapiens
PGDAGEYVCKLILDIFEYECKKKIDVMPIQILANEEMKVMCDNNPVSLNCCSQGNVNWSKVEWKQEGKINIPGTPETDIDSSCSR

SEQ ID NO: 14637 - protein, 85 aa, Homo sapiens
YTLKADGTQCPSGSSGTTVIYTCEFISAYGARGSANIKVTFISVANLTITPDPISVSEGQNFSIKCISDVSNYDEVYWNTSAGIK

SEQ ID NO: 14638 - protein, 85 aa, Homo sapiens
IYQRFYTTRRYLDGAESVLTVKTSTREWNGTYHCIFRYKNSYSIATKDVIVHPLPLKLNIMVDPLEATVSCSGSHHIKCCIEEDG

SEQ ID NO: 14639 - protein, 85 aa, Homo sapiens
DYKVTFHTGSSSLPAAKEVNKKQVCYKHNFNASSVSWCSKTVDVCCHFTNAANNSVWSPSMKLNLVPGENITCQDPVIGVGEPGK

SEQ ID NO: 14640 - protein, 85 aa, Homo sapiens
VIQKLCRFSNVPSSPESPIGGTITYKCVGSQWEEKRNDCISAPINSLLQMAKALIKSPSQDEMLPTYLKDLSISIDKAEHEISSS

SEQ ID NO: 14641 - protein, 85 aa, Homo sapiens
PGSLGAIINILDLLSTVPTQVNSEMMTHVLSTVNVILGKPVLNTWKVLQQQWTNQSSQLLHSVERFSQALQSGDSPPLSFSQTNV

SEQ ID NO: 14642 - protein, 85 aa, Homo sapiens
QMSSMVIKSSHPETYQQRFVFPYFDLWGNVVIDKSYLENLQSDSSIVTMAFPTLQAILAQDIQENNFAESLVMTTTVSHNTTMPF

SEQ ID NO: 14643 - protein, 85 aa, Homo sapiens
RISMTFKNNSPSGGETKCVFWNFRLANNTGGWDSSGCYVEEGDGDNVTCICDHLTSFSILMSPDSPDPSSLLGILLDIISYVGVG

SEQ ID NO: 14644 - protein, 85 aa, Homo sapiens
FSILSLAACLVVEAVVWKSVTKNRTSYMRHTCIVNIAASLLVANTWFIVVAAIQDNRYILCKTACVAATFFIHFFYLSVFFWMLT

SEQ ID NO: 14645 - protein, 85 aa, Homo sapiens
MGLMLFYRLVFILHETSRSTQKAIAFCLGYGCPLAISVITLGATQPREVYTRKNVCWLNWEDTKALLAFAIPALIIVVVNITITI

SEQ ID NO: 14646 - protein, 85 aa, Homo sapiens
VVITKILRPSIGDKPCKQEKSSLFQISKSIGVLTPLLGLTWGFGLTTVFPGTNLVFHIIFAILNVFQGLFILLFGCLWDLKVQEA

SEQ ID NO: 14647 - protein, 84 aa, Homo sapiens
LLFGCLWDLKVQEALLNKFSLSRWSSQHSKSTSLGSSTPVFSMSSPISRRFNNLFGKTGTYNVSTPEATSSSLENSSSASSLLN

SEQ ID NO: 14648 - protein, 85 aa, Homo sapiens
EEALRQKRAVATKSPTAEEYTVNIEISFENASFLDPIKAYLNSLSFPIHGNNTDQITDILSINVTTVCRPAGNEIWCSCETGYGW

SEQ ID NO: 14649 - protein, 85 aa, Homo sapiens
PRERCLHNLICQERDVFLPGHHCSCLKELPPNGPFCLLQEDVTLNMRVRLNVGFQEDLMNTSSALYRSYKTDLETAFRKGYGILP

SEQ ID NO: 14650 - protein, 85 aa, Homo sapiens
GFKGVTVTGFKSGSVVVTYEVKTTPPSLELIHKANEQVVQSLNQTYKMDYNSFQAVTINESNFFVTPEIIFEGDTVSLVCEKEVL

SEQ ID NO: 14651 - protein, 85 aa, Homo sapiens
SSNVSWRYEEQQLEIQNSSRFSIYTALFNNMTSVSKLTIHNITPGDAGEYVCKLILDIFEYECKKKIDVMPIQILANEEMKVMCD

SEQ ID NO: 14652 - protein, 85 aa, Homo sapiens
NNPVSLNCCSQGNVNWSKVEWKQEGKINIPGTPETDIDSSCSRYTLKADGTQCPSGSSGTTVIYTCEFISAYGARGSANIKVTFI

SEQ ID NO: 14653 - protein, 85 aa, Homo sapiens
SVANLTITPDPISVSEGQNFSIKCISDVSNYDEVYWNTSAGIKIYQRFYTTRRYLDGAESVLTVKTSTREWNGTYHCIFRYKNSY

SEQ ID NO: 14654 - protein, 85 aa, Homo sapiens
SIATKDVIVHPLPLKLNIMVDPLEATVSCSGSHHIKCCIEEDGDYKVTFHTGSSSLPAAKEVNKKQVCYKHNFNASSVSWCSKTV

SEQ ID NO: 14655 - protein, 85 aa, Homo sapiens
DVCCHFTNAANNSVWSPSMKLNLVPGENITCQDPVIGVGEPGKVIQKLCRFSNVPSSPESPIGGTITYKCVGSQWEEKRNDCISA

SEQ ID NO: 14656 - protein, 85 aa, Homo sapiens
PINSLLQMAKALIKSPSQDEMLPTYLKDLSISIDKAEHEISSSPGSLGAIINILDLLSTVPTQVNSEMMTHVLSTVNVILGKPVL

SEQ ID NO: 14657 - protein, 85 aa, Homo sapiens
NTWKVLQQQWTNQSSQLLHSVERFSQALQSGDSPPLSFSQTNVQMSSMVIKSSHPETYQQRFVFPYFDLWGNVVIDKSYLENLQS

SEQ ID NO: 14658 - protein, 85 aa, Homo sapiens
DSSIVTMAFPTLQAILAQDIQENNFAESLVMTTTVSHNTTMPFRISMTFKNNSPSGGETKCVFWNFRLANNTGGWDSSGCYVEEG

SEQ ID NO: 14659 - protein, 85 aa, Homo sapiens
DGDNVTCICDHLTSFSILMSPDSPDPSSLLGILLDIISYVGVGFSILSLAACLVVEAVVWKSVTKNRTSYMRHTCIVNIAASLLV

SEQ ID NO: 14660 - protein, 85 aa, Homo sapiens
ANTWFIVVAAIQDNRYILCKTACVAATFFIHFFYLSVFFWMLTLGLMLFYRLVFILHETSRSTQKAIAFCLGYGCPLAISVITLG

SEQ ID NO: 14661 - protein, 85 aa, Homo sapiens
ATQPREVYTRKNVCWLNWEDTKALLAFAIPALIIVVVNITITIVVITKILRPSIGDKPCKQEKSSLFQISKSIGVLTPLLGLTWG

SEQ ID NO: 14662 - protein, 85 aa, Homo sapiens
FGLTTVFPGTNLVFHIIFAILNVFQGLFILLFGCLWDLKVQEALLNKFSLSRWSSQHSKSTSLGSSTPVFSMSSPISRRFNNLFG

SEQ ID NO: 14663 - protein, 85 aa, Homo sapiens
GGHPQLRLVKALLLLGLNPVSASLQDQHCESLSLASNISGLQCNASVDLIGTCWPRSPAGQLVVRPCPAFFYGVRYNTTNNGYRE

SEQ ID NO: 14664 - protein, 85 aa, Homo sapiens
CLANGSWAARVNYSECQEILNEEKKSKVHYHVAVIINYLGHCISLVALLVAFVLFLRLRSIRCLRNIIHWNLISAFILRNATWFV

SEQ ID NO: 14665 - protein, 85 aa, Homo sapiens
VQLTMSPEVHQSNVGWCRLVTAAYNYFHVTNFFWMFGEGCYLHTAIVLTYSTDRLRKWMFICIGWGVPFPIIVAWAIGKLYYDNE

SEQ ID NO: 14666 - protein, 85 aa, Homo sapiens
KCWFGKRPGVYTDYIYQGPMILVLLINFIFLFNIVRILMTKLRASTTSETIQYRKAVKATLVLLPLLGITYMLFFVNPGEDEVSR

SEQ ID NO: 14667 - protein, 84 aa, Homo sapiens
VNPGEDEVSRVVFIYFNSFLESFQGFFVSVFYCFLNSEVRSAIRKRWHRWQDKHSIRARVARAMSIPTSPTRVSFHSIKQSTAV

SEQ ID NO: 14668 - protein, 85 aa, Homo sapiens
CNASVDLIGTCWPRSPAGQLVVRPCPAFFYGVRYNTTNNGYRECLANGSWAARVNYSECQEILNEEKKSKVHYHVAVIINYLGHC

SEQ ID NO: 14669 - protein, 85 aa, Homo sapiens
ISLVALLVAFVLFLRLRSIRCLRNIIHWNLISAFILRNATWFVVQLTMSPEVHQSNVGWCRLVTAAYNYFHVTNFFWMFGEGCYL

SEQ ID NO: 14670 - protein, 85 aa, Homo sapiens
HTAIVLTYSTDRLRKWMFICIGWGVPFPIIVAWAIGKLYYDNEKCWFGKRPGVYTDYIYQGPMILVLLINFIFLFNIVRILMTKL

SEQ ID NO: 14671 - protein, 85 aa, Homo sapiens
RASTTSETIQYRKAVKATLVLLPLLGITYMLFFVNPGEDEVSRVVFIYFNSFLESFQGFFVSVFYCFLNSEVRSAIRKRWHRWQD

SEQ ID NO: 14672 - protein, 85 aa, Homo sapiens
ARGGAGAEEASLRSNALSWLACGLLALLANAWIILSISAKQQKHKPLELLLCFLAGTHILMAAVPLTTFAVVQLRRQASSDYDWN

SEQ ID NO: 14673 - protein, 85 aa, Homo sapiens
ESICKVFVSTYYTLALATCFTVASLSYHRMWMVRWPVNYRLSNAKKQALHAVMGIWMVSFILSTLPSIGWHNNGERYYARGCQFI

SEQ ID NO: 14674 - protein, 85 aa, Homo sapiens
VSKIGLGFGVCFSLLLLGGIVMGLVCVAITFYQTLWARPRRARQARRVGGGGGTKAGGPGALGTRPAFEVPAIVVEDARGKRRSS

SEQ ID NO: 14675 - protein, 85 aa, Homo sapiens
MDGSESAKTSLQVTNLVSAIVFLYDSLTGVPILVVSFFSLKSDSAPPWMVLAVLWCSMAQTLLLPSFIWSCERYRADVRTVWEQC

SEQ ID NO: 14676 - protein, 85 aa, Homo sapiens
VAIMSEEDGDDDGGCDDYAEGRVCKVRFDANGATGPGSRDPAQVKLLPGRHMLFPPLERVHYLQVPLSRRLSHDETNIFSTPREP

SEQ ID NO: 14677 - protein, 85 aa, Homo sapiens
GSFLHKWSSSDDIRVLPAQSRALGGPPEYLGQRHRLEDEEDEEEAEGGGLASLRQFLESGVLGSGGGPPRGPGFFREEITTFIDE

SEQ ID NO: 14678 - protein, 84 aa, Homo sapiens
ITTFIDETPLPSPTASPGHSPRRPRPLGLSPRRLSLGSPESRAVGLPLGLSAGRRCSLTGGEESARAWGGSWGPGNPIFPQLTL

SEQ ID NO: 14679 - protein, 85 aa, Homo sapiens
KHKPLELLLCFLAGTHILMAAVPLTTFAVVQLRRQASSDYDWNESICKVFVSTYYTLALATCFTVASLSYHRMWMVRWPVNYRLS

SEQ ID NO: 14680 - protein, 85 aa, Homo sapiens
NAKKQALHAVMGIWMVSFILSTLPSIGWHNNGERYYARGCQFIVSKIGLGFGVCFSLLLLGGIVMGLVCVAITFYQTLWARPRRA

SEQ ID NO: 14681 - protein, 85 aa, Homo sapiens
RQARRVGGGGGTKAGGPGALGTRPAFEVPAIVVEDARGKRRSSLDGSESAKTSLQVTNLVSAIVFLYDSLTGVPILVVSFFSLKS

SEQ ID NO: 14682 - protein, 85 aa, Homo sapiens
DSAPPWMVLAVLWCSMAQTLLLPSFIWSCERYRADVRTVWEQCVAIMSEEDGDDDGGCDDYAEGRVCKVRFDANGATGPGSRDPA

SEQ ID NO: 14683 - protein, 85 aa, Homo sapiens
QVKLLPGRHMLFPPLERVHYLQVPLSRRLSHDETNIFSTPREPGSFLHKWSSSDDIRVLPAQSRALGGPPEYLGQRHRLEDEEDE

SEQ ID NO: 14684 - protein, 85 aa, Homo sapiens
EEAEGGGLASLRQFLESGVLGSGGGPPRGPGFFREEITTFIDETPLPSPTASPGHSPRRPRPLGLSPRRLSLGSPESRAVGLPLG

SEQ ID NO: 14685 - protein, 85 aa, Homo sapiens
AGRGSLVSWRAFHGCDSAEELPRVSPRFLRAWHPPPVSARMPTRRWAPGTQCITKCEHTRPKPGELAFRKGDVVTILEACENKSW

SEQ ID NO: 14686 - protein, 85 aa, Homo sapiens
YRVKHHTSGQEGLLAAGALREREALSADPKLSLMPWFHGKISGQEAVQQLQPPEDGLFLVRESARHPGDYVLCVSFGRDVIHYRV

SEQ ID NO: 14687 - protein, 85 aa, Homo sapiens
MHRDGHLTIDEAVFFCNLMDMVEHYSKDKGAICTKLVRPKRKHGTKSAEEELARAGWLLNLQHLTLGAQIGEGEFGAVLQGEYLG

SEQ ID NO: 14688 - protein, 85 aa, Homo sapiens
QKVAVKNIKCDVTAQAFLDETAVMTKMQHENLVRLLGVILHQGLYIVMEHVSKGNLVNFLRTRGRALVNTAQLLQFSLHVAEGME

SEQ ID NO: 14689 - protein, 85 aa, Homo sapiens
YLESKKLVHRDLAARNILVSEDLVAKVSDFGLAKAERKGLDSSRLPVKWTAPEALKHGKFTSKSDVWSFGVLLWEVFSYGRAPYP

SEQ ID NO: 14690 - protein, 84 aa, Homo sapiens
PYPKMSLKEVSEAVEKGYRMEPPEGCPGPVHVLMSSCWEAEPARRPPFRKLAEKLARELRSAGAPASVSGQDADGSTSPRSQEP

SEQ ID NO: 14691 - protein, 85 aa, Homo sapiens
TRRWAPGTQCITKCEHTRPKPGELAFRKGDVVTILEACENKSWYRVKHHTSGQEGLLAAGALREREALSADPKLSLMPWFHGKIS

SEQ ID NO: 14692 - protein, 85 aa, Homo sapiens
GQEAVQQLQPPEDGLFLVRESARHPGDYVLCVSFGRDVIHYRVLHRDGHLTIDEAVFFCNLMDMVEHYSKDKGAICTKLVRPKRK

SEQ ID NO: 14693 - protein, 85 aa, Homo sapiens
HGTKSAEEELARAGWLLNLQHLTLGAQIGEGEFGAVLQGEYLGQKVAVKNIKCDVTAQAFLDETAVMTKMQHENLVRLLGVILHQ

SEQ ID NO: 14694 - protein, 85 aa, Homo sapiens
GLYIVMEHVSKGNLVNFLRTRGRALVNTAQLLQFSLHVAEGMEYLESKKLVHRDLAARNILVSEDLVAKVSDFGLAKAERKGLDS

SEQ ID NO: 14695 - protein, 85 aa, Homo sapiens
SRLPVKWTAPEALKHGKFTSKSDVWSFGVLLWEVFSYGRAPYPKMSLKEVSEAVEKGYRMEPPEGCPGPVHVLMSSCWEAEPARR

SEQ ID NO: 14696 - protein, 85 aa, Homo sapiens
ANYSHAADNILQNLSPLTAFLKLTSLGFIIGVSVVGNLLISILLVKDKTLHRAPYYFLLDLCCSDILRSAICFPFVFNSVKNGST

SEQ ID NO: 14697 - protein, 85 aa, Homo sapiens
WTYGTLTCKVIAFLGVLSCFHTAFMLFCISVTRYLAIAHHRFYTKRLTFWTCLAVICMVWTLSVAMAFPPVLDVGTYSFIREEDQ

SEQ ID NO: 14698 - protein, 85 aa, Homo sapiens
CTFQHRSFRANDSLGFMLLLALILLATQLVYLKLIFFVHDRRKMKPVQFVAAVSQNWTFHGPGASGQAAANWLAGFGRGPTPPTL

SEQ ID NO: 14699 - protein, 85 aa, Homo sapiens
MGIRQNANTTGRRRLLVLDEFKMEKRISRMFYIMTFLFLTLWGPYLVACYWRVFARGPVVPGGFLTAAVWMSFAQAGINPFVCIF

SEQ ID NO: 14700 - protein, 84 aa, Homo sapiens
FYIMTFLFLTLWGPYLVACYWRVFARGPVVPGGFLTAAVWMSFAQAGINPFVCIFSNRELRRCFSTTLLYCRKSRLPREPYCVI

SEQ ID NO: 14701 - protein, 85 aa, Homo sapiens
MLVKDKTLHRAPYYFLLDLCCSDILRSAICFPFVFNSVKNGSTWTYGTLTCKVIAFLGVLSCFHTAFMLFCISVTRYLAIAHHRF

SEQ ID NO: 14702 - protein, 85 aa, Homo sapiens
YTKRLTFWTCLAVICMVWTLSVAMAFPPVLDVGTYSFIREEDQCTFQHRSFRANDSLGFMLLLALILLATQLVYLKLIFFVHDRR

SEQ ID NO: 14703 - protein, 85 aa, Homo sapiens
KMKPVQFVAAVSQNWTFHGPGASGQAAANWLAGFGRGPTPPTLLGIRQNANTTGRRRLLVLDEFKMEKRISRMFYIMTFLFLTLW

SEQ ID NO: 14704 - protein, 85 aa, Homo sapiens
AATEISVLSEQFTKIKELELMPEKGLKEEEKDGVCREKDHRSPSELEAERTSGAFQDSVLEEEVELVLAPSEESEKYILTLQTVH

SEQ ID NO: 14705 - protein, 85 aa, Homo sapiens
FTSEAVELQDMSLLSIQQQEGVQVVVQQPGPGLLWLEEGPRQSLQQCVAISIQQELYSPQEMEVLQFHALEENVMVASEDSKLAV

SEQ ID NO: 14706 - protein, 85 aa, Homo sapiens
SLAETTGLIKLEEEQEKNQLLAERTKEQLFFVETMSGDERSDEIVLTVSNSNVEEQEDQPTAGQADAEKAKSTKNQRKTKGAKGT

SEQ ID NO: 14707 - protein, 85 aa, Homo sapiens
FHCDVCMFTSSRMSSFNRHMKTHTSEKPHLCHLCLKTFRTVTLLRNHVNTHTGTRPYKCNDCNMAFVTSGELVRHRRYKHTHEKP

SEQ ID NO: 14708 - protein, 85 aa, Homo sapiens
FKCSMCKYASVEASKLKRHVRSHTGERPFQCCQCSYASRDTYKLKRHMRTHSGEKPYECHICHTRFTQSGTMKIHILQKHGENVP

SEQ ID NO: 14709 - protein, 85 aa, Homo sapiens
KYQCPHCATIIARKSDLRVHMRNLHAYSAAELKCRYCSAVFHERYALIQHQKTHKNEKRFKCKHCSYACKQERHMTAHIRTHTGE

SEQ ID NO: 14710 - protein, 85 aa, Homo sapiens
KPFTCLSCNKCFRQKQLLNAHFRKYHDANFIPTVYKCSKCGKGFSRWINLHRHSEKCGSGEAKSAASGKGRRTRKRKQTILKEAT

SEQ ID NO: 14711 - protein, 84 aa, Homo sapiens
KGRRTRKRKQTILKEATKGQKEAAKGWKEAANGDEAAAEEASTTKGEQFPGEMFPVACRETTARVKEEVDEGVTCEMLLNTMDK

SEQ ID NO: 14712 - protein, 85 aa, Homo sapiens
PSELEAERTSGAFQDSVLEEEVELVLAPSEESEKYILTLQTVHFTSEAVELQDMSLLSIQQQEGVQVVVQQPGPGLLWLEEGPRQ

SEQ ID NO: 14713 - protein, 85 aa, Homo sapiens
SLQQCVAISIQQELYSPQEMEVLQFHALEENVMVASEDSKLAVSLAETTGLIKLEEEQEKNQLLAERTKEQLFFVETMSGDERSD

SEQ ID NO: 14714 - protein, 85 aa, Homo sapiens
EIVLTVSNSNVEEQEDQPTAGQADAEKAKSTKNQRKTKGAKGTFHCDVCMFTSSRMSSFNRHMKTHTSEKPHLCHLCLKTFRTVT

SEQ ID NO: 14715 - protein, 85 aa, Homo sapiens
MLRNHVNTHTGTRPYKCNDCNMAFVTSGELVRHRRYKHTHEKPFKCSMCKYASVEASKLKRHVRSHTGERPFQCCQCSYASRDTY

SEQ ID NO: 14716 - protein, 85 aa, Homo sapiens
KLKRHMRTHSGEKPYECHICHTRFTQSGTMKIHILQKHGENVPKYQCPHCATIIARKSDLRVHMRNLHAYSAAELKCRYCSAVFH

SEQ ID NO: 14717 - protein, 85 aa, Homo sapiens
ERYALIQHQKTHKNEKRFKCKHCSYACKQERHMTAHIRTHTGEKPFTCLSCNKCFRQKQLLNAHFRKYHDANFIPTVYKCSKCGK

SEQ ID NO: 14718 - protein, 85 aa, Homo sapiens
GFSRWINLHRHSEKCGSGEAKSAASGKGRRTRKRKQTILKEATKGQKEAAKGWKEAANGDEAAAEEASTTKGEQFPGEMFPVACR

SEQ ID NO: 14719 - protein, 85 aa, Homo sapiens
VCSAAPLLLLATTLPLLGSPVAQASQPVSETGVRPREGLQRRQWGPLIGRDKAWNERIDRPFPACPIPLSSSFGRWPKGQTMWAQ

SEQ ID NO: 14720 - protein, 85 aa, Homo sapiens
TSTLTLTEEELGQSQAGGESGSGQLLDQENGAGESALVSVYVHLDFPDKTWPPELSRTLTLPAASASSSPRPLLTGLRLTTECNV

SEQ ID NO: 14721 - protein, 85 aa, Homo sapiens
NHKGNFYCACLSGYQWNTSICLHYPPCQSLHNHQPCGCLVFSHPEPGYCQLLPPGSPVTCLPAVPGILNLNSQLQMPGDTLSLTL

SEQ ID NO: 14722 - protein, 85 aa, Homo sapiens
HLSQEATNLSWFLRHPGSPSPILLQPGTQVSVTSSHGQAALSVSNMSHHWAGEYMSCFEAQGFKWNLYEVVRVPLKATDVARLPY

SEQ ID NO: 14723 - protein, 85 aa, Homo sapiens
QLSISCATSPGFQLSCCIPSTNLAYTAAWSPGEGSKASSFNESGSQCFVLAVQRCPMADTTYACDLQSLGLAPLRVPISITIIQD

SEQ ID NO: 14724 - protein, 85 aa, Homo sapiens
GDITCPEDASVLTWNVTKAGHVAQAPCPESKRGIVRRLCGADGVWGPVHSSCTDARLLALFTRTKLLQAGQGSPAEEVPQILAQL

SEQ ID NO: 14725 - protein, 85 aa, Homo sapiens
PGQAAEASSPSDLLTLLSTMKYVAKVVAEARIQLDRRALKNLLIATDKVLDMDTRSLWTLAQARKPWAGSTLLLAVETLACSLCP

SEQ ID NO: 14726 - protein, 85 aa, Homo sapiens
QDHPFAFSLPNVLLQSQLFGPTFPADYSISFPTRPPLQAQIPRHSLAPLVRNGTEISITSLVLRKLDHLLPSNYGQGLGDSLYAT

SEQ ID NO: 14727 - protein, 85 aa, Homo sapiens
PGLVLVISIMAGDRAFSQGEVIMDFGNTDGSPHCVFWDHSLFQGRGGWSKEGCQAQVASASPTAQCLCQHLTAFSVLMSPHTVPE

SEQ ID NO: 14728 - protein, 85 aa, Homo sapiens
EPALALLTQVGLGASILALLVCLGVYWLVWRVVVRNKISYFRHAALLNMVFCLLAADTCFLGAPFLSPGPRSPLCLAAAFLCHFL

SEQ ID NO: 14729 - protein, 85 aa, Homo sapiens
YLATFFWMLAQALVLAHQLLFVFHQLAKHRVLPLMVLLGYLCPLGLAGVTLGLYLPQGQYLREGECWLDGKGGALYTFVGPVLAI

SEQ ID NO: 14730 - protein, 85 aa, Homo sapiens
IGVNGLVLAMAMLKLLRPSLSEGPPAEKRQALLGVIKALLILTPIFGLTWGLGLATLLEEVSTVPHYIFTILNTLQGVFILLFGC

SEQ ID NO: 14731 - protein, 84 aa, Homo sapiens
EVSTVPHYIFTILNTLQGVFILLFGCLMDRKIQEALRKRFCRAQAPSSTISLVSCCLQILSCASKSMSEGIPWPSSEDMGTARS

SEQ ID NO: 14732 - protein, 85 aa, Homo sapiens
QWGPLIGRDKAWNERIDRPFPACPIPLSSSFGRWPKGQTMWAQTSTLTLTEEELGQSQAGGESGSGQLLDQENGAGESALVSVYV

SEQ ID NO: 14733 - protein, 85 aa, Homo sapiens
HLDFPDKTWPPELSRTLTLPAASASSSPRPLLTGLRLTTECNVNHKGNFYCACLSGYQWNTSICLHYPPCQSLHNHQPCGCLVFS

SEQ ID NO: 14734 - protein, 85 aa, Homo sapiens
HPEPGYCQLLPPGSPVTCLPAVPGILNLNSQLQMPGDTLSLTLHLSQEATNLSWFLRHPGSPSPILLQPGTQVSVTSSHGQAALS

SEQ ID NO: 14735 - protein, 85 aa, Homo sapiens
VSNMSHHWAGEYMSCFEAQGFKWNLYEVVRVPLKATDVARLPYQLSISCATSPGFQLSCCIPSTNLAYTAAWSPGEGSKASSFNE

SEQ ID NO: 14736 - protein, 85 aa, Homo sapiens
SGSQCFVLAVQRCPMADTTYACDLQSLGLAPLRVPISITIIQDGDITCPEDASVLTWNVTKAGHVAQAPCPESKRGIVRRLCGAD

SEQ ID NO: 14737 - protein, 85 aa, Homo sapiens
GVWGPVHSSCTDARLLALFTRTKLLQAGQGSPAEEVPQILAQLPGQAAEASSPSDLLTLLSTMKYVAKVVAEARIQLDRRALKNL

SEQ ID NO: 14738 - protein, 85 aa, Homo sapiens
MIATDKVLDMDTRSLWTLAQARKPWAGSTLLLAVETLACSLCPQDHPFAFSLPNVLLQSQLFGPTFPADYSISFPTRPPLQAQIP

SEQ ID NO: 14739 - protein, 85 aa, Homo sapiens
RHSLAPLVRNGTEISITSLVLRKLDHLLPSNYGQGLGDSLYATPGLVLVISIMAGDRAFSQGEVIMDFGNTDGSPHCVFWDHSLF

SEQ ID NO: 14740 - protein, 85 aa, Homo sapiens
QGRGGWSKEGCQAQVASASPTAQCLCQHLTAFSVLMSPHTVPEEPALALLTQVGLGASILALLVCLGVYWLVWRVVVRNKISYFR

SEQ ID NO: 14741 - protein, 85 aa, Homo sapiens
HAALLNMVFCLLAADTCFLGAPFLSPGPRSPLCLAAAFLCHFLYLATFFWMLAQALVLAHQLLFVFHQLAKHRVLPLMVLLGYLC

SEQ ID NO: 14742 - protein, 85 aa, Homo sapiens
PLGLAGVTLGLYLPQGQYLREGECWLDGKGGALYTFVGPVLAIIGVNGLVLAMAMLKLLRPSLSEGPPAEKRQALLGVIKALLIL

SEQ ID NO: 14743 - protein, 85 aa, Homo sapiens
TPIFGLTWGLGLATLLEEVSTVPHYIFTILNTLQGVFILLFGCLMDRKIQEALRKRFCRAQAPSSTISLVSCCLQILSCASKSMS

SEQ ID NO: 14744 - protein, 85 aa, Homo sapiens
CLANGSWAARVNYSECQEILNEEKKSKVHYHVAVIINYLGHCISLVALLVAFVLFLRLRPGCTHWGDQADGALEVGAPWSGAPFQ

SEQ ID NO: 14745 - protein, 85 aa, Homo sapiens
VRRSIRCLRNIIHWNLISAFILRNATWFVVQLTMSPEVHQSNVGWCRLVTAAYNYFHVTNFFWMFGEGCYLHTAIVLTYSTDRLR

SEQ ID NO: 14746 - protein, 85 aa, Homo sapiens
KWMFICIGWGVPFPIIVAWAIGKLYYDNEKCWFGKRPGVYTDYIYQGPMILVLLINFIFLFNIVRILMTKLRASTTSETIQYRKA

SEQ ID NO: 14747 - protein, 85 aa, Homo sapiens
VKATLVLLPLLGITYMLFFVNPGEDEVSRVVFIYFNSFLESFQVRSAIRKRWHRWQDKHSIRARVARAMSIPTSPTRVSFHSIKQ

SEQ ID NO: 14748 - protein, 84 aa, Homo sapiens
VLLPLLGITYMLFFVNPGEDEVSRVVFIYFNSFLESFQVRSAIRKRWHRWQDKHSIRARVARAMSIPTSPTRVSFHSIKQSTAV

SEQ ID NO: 14749 - protein, 85 aa, Homo sapiens
ISLVALLVAFVLFLRLRPGCTHWGDQADGALEVGAPWSGAPFQVRRSIRCLRNIIHWNLISAFILRNATWFVVQLTMSPEVHQSN

SEQ ID NO: 14750 - protein, 85 aa, Homo sapiens
VGWCRLVTAAYNYFHVTNFFWMFGEGCYLHTAIVLTYSTDRLRKWMFICIGWGVPFPIIVAWAIGKLYYDNEKCWFGKRPGVYTD

SEQ ID NO: 14751 - protein, 85 aa, Homo sapiens
YIYQGPMILVLLINFIFLFNIVRILMTKLRASTTSETIQYRKAVKATLVLLPLLGITYMLFFVNPGEDEVSRVVFIYFNSFLESF

SEQ ID NO: 14752 - protein, 85 aa, Homo sapiens
ATTVPDGCRNGLKSKYYRLCDKAEAWGIVLETVATAGVVTSVAFMLTLPILVCKVQDSNRRKMLPTQFLFLLGVLGIFGLTFAFI

SEQ ID NO: 14753 - protein, 85 aa, Homo sapiens
IGLDGSTGPTRFFLFGILFSICFSCLLAHAVSLTKLVRGRKPLSLLVILGLAVGFSLVQDVIAIEYIVLTMNRTNVNVFSELSAP

SEQ ID NO: 14754 - protein, 85 aa, Homo sapiens
RRNEDFVLLLTYVLFLMALTFLMSSFTFCGSFTGWKRHGAHIYLTMLLSIAIWVAWITLLMLPDFDRRWDDTILSSALAANGWVF

SEQ ID NO: 14755 - protein, 85 aa, Homo sapiens
MLAYVSPEFWLLTKQRNPMDYPVEDAFCKPQLVKKSYGVENRAYSQEEITQGFEETGDTLYAPYSTHFQLQNQPPQKEFSIPRAH

SEQ ID NO: 14756 - protein, 84 aa, Homo sapiens
PMDYPVEDAFCKPQLVKKSYGVENRAYSQEEITQGFEETGDTLYAPYSTHFQLQNQPPQKEFSIPRAHAWPSPYKDYEVKKEGS

SEQ ID NO: 14757 - protein, 85 aa, Homo sapiens
AFMLTLPILVCKVQDSNRRKMLPTQFLFLLGVLGIFGLTFAFIIGLDGSTGPTRFFLFGILFSICFSCLLAHAVSLTKLVRGRKP

SEQ ID NO: 14758 - protein, 85 aa, Homo sapiens
LSLLVILGLAVGFSLVQDVIAIEYIVLTMNRTNVNVFSELSAPRRNEDFVLLLTYVLFLMALTFLMSSFTFCGSFTGWKRHGAHI

SEQ ID NO: 14759 - protein, 85 aa, Homo sapiens
YLTMLLSIAIWVAWITLLMLPDFDRRWDDTILSSALAANGWVFLLAYVSPEFWLLTKQRNPMDYPVEDAFCKPQLVKKSYGVENR

SEQ ID NO: 14760 - protein, 85 aa, Homo sapiens
ARPDPSAPPSLLLLLLAQLVGRAAAASKAPVCQEITVPMCRGIGYNLTHMPNQFNHDTQDEAGLEVHQFWPLVEIQCSPDLRFFL

SEQ ID NO: 14761 - protein, 85 aa, Homo sapiens
CSMYTPICLPDYHKPLPPCRSVCERAKAGCSPLMRQYGFAWPERMSCDRLPVLGRDAEVLCMDYNRSEATTAPPRPFPAKPTLPG

SEQ ID NO: 14762 - protein, 85 aa, Homo sapiens
PPGAPASGGECPAGGPFVCKCREPFVPILKESHPLYNKVRTGQVPNCAVPCYQPSFSADERTFATFWIGLWSVLCFISTSTTVAT

SEQ ID NO: 14763 - protein, 85 aa, Homo sapiens
FLIDMERFRYPERPIIFLSACYLCVSLGFLVRLVVGHASVACSREHNHIHYETTGPALCTIVFLLVYFFGMASSIWWVILSLTWF

SEQ ID NO: 14764 - protein, 85 aa, Homo sapiens
MAAGMKWGNEAIAGYAQYFHLAAWLIPSVKSITALALSSVDGDPVAGICYVGNQNLNSLRGFVLGPLVLYLLVGTLFLLAGFVSL

SEQ ID NO: 14765 - protein, 85 aa, Homo sapiens
FRIRSVIKQGGTKTDKLEKLMIRIGIFTLLYTVPASIVVACYLYEQHYRESWEAALTCACPGHDTGQPRAKPEYWVLMLKYFMCL

SEQ ID NO: 14766 - protein, 84 aa, Homo sapiens
VLMLKYFMCLVVGITSGVWIWSGKTVESWRRFTSRCCCRPRRGHKSGGAMAAGDYPEASAALTGRTGPPGPAATYHKQVSLSHV

SEQ ID NO: 14767 - protein, 85 aa, Homo sapiens
IGYNLTHMPNQFNHDTQDEAGLEVHQFWPLVEIQCSPDLRFFLCSMYTPICLPDYHKPLPPCRSVCERAKAGCSPLMRQYGFAWP

SEQ ID NO: 14768 - protein, 85 aa, Homo sapiens
ERMSCDRLPVLGRDAEVLCMDYNRSEATTAPPRPFPAKPTLPGPPGAPASGGECPAGGPFVCKCREPFVPILKESHPLYNKVRTG

SEQ ID NO: 14769 - protein, 85 aa, Homo sapiens
QVPNCAVPCYQPSFSADERTFATFWIGLWSVLCFISTSTTVATFLIDMERFRYPERPIIFLSACYLCVSLGFLVRLVVGHASVAC

SEQ ID NO: 14770 - protein, 85 aa, Homo sapiens
SREHNHIHYETTGPALCTIVFLLVYFFGMASSIWWVILSLTWFLAAGMKWGNEAIAGYAQYFHLAAWLIPSVKSITALALSSVDG

SEQ ID NO: 14771 - protein, 85 aa, Homo sapiens
DPVAGICYVGNQNLNSLRGFVLGPLVLYLLVGTLFLLAGFVSLFRIRSVIKQGGTKTDKLEKLMIRIGIFTLLYTVPASIVVACY

SEQ ID NO: 14772 - protein, 85 aa, Homo sapiens
MYEQHYRESWEAALTCACPGHDTGQPRAKPEYWVLMLKYFMCLVVGITSGVWIWSGKTVESWRRFTSRCCCRPRRGHKSGGAMAA

SEQ ID NO: 14773 - protein, 85 aa, Homo sapiens
VFSAVLTAFHTGTSNTTFVVYENTYMNITLPPPFQHPDLSPLLRYSFETMAPTGLSSLTVNSTAVPTTPAAFKSLNLPLQITLSA

SEQ ID NO: 14774 - protein, 85 aa, Homo sapiens
IMIFILFVSFLGNLVVCLMVYQKAAMRSAINILLASLAFADMLLAVLNMPFALVTILTTRWIFGKFFCRVSAMFFWLFVIEGVAI

SEQ ID NO: 14775 - protein, 85 aa, Homo sapiens
MLIISIDRFLIIVQRQDKLNPYRAKVLIAVSWATSFCVAFPLAVGNPDLQIPSRAPQCVFGYTTNPGYQAYVILISLISFFIPFL

SEQ ID NO: 14776 - protein, 85 aa, Homo sapiens
VILYSFMGILNTLRHNALRIHSYPEGICLSQASKLGLMSLQRPFQMSIDMGFKTRAFTTILILFAVFIVCWAPFTTYSLVATFSK

SEQ ID NO: 14777 - protein, 84 aa, Homo sapiens
VATFSKHFYYQHNFFEISTWLLWLCYLKSALNPLIYYWRIKKFHDACLDMMPKSFKFLPQLPGHTKRRIRPSAVYVCGEHRTVV

SEQ ID NO: 14778 - protein, 85 aa, Homo sapiens
LRYSFETMAPTGLSSLTVNSTAVPTTPAAFKSLNLPLQITLSAIMIFILFVSFLGNLVVCLMVYQKAAMRSAINILLASLAFADM

SEQ ID NO: 14779 - protein, 85 aa, Homo sapiens
MLAVLNMPFALVTILTTRWIFGKFFCRVSAMFFWLFVIEGVAILLIISIDRFLIIVQRQDKLNPYRAKVLIAVSWATSFCVAFPL

SEQ ID NO: 14780 - protein, 85 aa, Homo sapiens
AVGNPDLQIPSRAPQCVFGYTTNPGYQAYVILISLISFFIPFLVILYSFMGILNTLRHNALRIHSYPEGICLSQASKLGLMSLQR

SEQ ID NO: 14781 - protein, 85 aa, Homo sapiens
PFQMSIDMGFKTRAFTTILILFAVFIVCWAPFTTYSLVATFSKHFYYQHNFFEISTWLLWLCYLKSALNPLIYYWRIKKFHDACL

SEQ ID NO: 14782 - protein, 85 aa, Homo sapiens
DSSEEHAGCPARGTCPVFLAMSAGTVRYAPSGLCPVLEGNLREEPWGTDSPPQPDQGLPPPLAAVPVPWKSTDPCQGHRESPGAL

SEQ ID NO: 14783 - protein, 85 aa, Homo sapiens
VETSAGEEAQGQEGPAAAQLDVLRLRSSSMEIREKGSEFLKEELHRAQKELKLKDEECERLSKVREQLEQELEELTASLFEEAHK

SEQ ID NO: 14784 - protein, 85 aa, Homo sapiens
MVREANMKQAASEKQLKEARGKVDTILFAEFQAWRESPTLDKTCPFLERVYREDVGPCLDFTMQELSVLVRAAVEDNTLTIEPVA

SEQ ID NO: 14785 - protein, 85 aa, Homo sapiens
SQTLPTVKVAEVDCSSTNTCALSGLTRTCRHRIRLGDSKSHYYISPSSRARITAVCNFFTYIRYIQQGLVRQDAEPMFWEIMRLR

SEQ ID NO: 14786 - protein, 84 aa, Homo sapiens
TNTCALSGLTRTCRHRIRLGDSKSHYYISPSSRARITAVCNFFTYIRYIQQGLVRQDAEPMFWEIMRLRKEMSLAKLGFFPQEA

SEQ ID NO: 14787 - protein, 85 aa, Homo sapiens
EEPWGTDSPPQPDQGLPPPLAAVPVPWKSTDPCQGHRESPGALVETSAGEEAQGQEGPAAAQLDVLRLRSSSMEIREKGSEFLKE

SEQ ID NO: 14788 - protein, 85 aa, Homo sapiens
ELHRAQKELKLKDEECERLSKVREQLEQELEELTASLFEEAHKMVREANMKQAASEKQLKEARGKVDTILFAEFQAWRESPTLDK

SEQ ID NO: 14789 - protein, 85 aa, Homo sapiens
TCPFLERVYREDVGPCLDFTMQELSVLVRAAVEDNTLTIEPVASQTLPTVKVAEVDCSSTNTCALSGLTRTCRHRIRLGDSKSHY

SEQ ID NO: 14790 - protein, 85 aa, Homo sapiens
NNNTTCIQPSMISSMALPIIYILLCIVGVFGNTLSQWIFLTKIGKKTSTHIYLSHLVTANLLVCSAMPFMSIYFLKGFQWEYQSA

SEQ ID NO: 14791 - protein, 85 aa, Homo sapiens
QCRVVNFLGTLSMHASMFVSLLILSWIAISRYATLMQKDSSQETTSCYEKIFYGHLLKKFRQPNFARKLCIYIWGVVLGIIIPVT

SEQ ID NO: 14792 - protein, 85 aa, Homo sapiens
VYYSVIEATEGEESLCYNRQMELGAMISQIAGLIGTTFIGFSFLVVLTSYYSFVSHLRKIRTCTSIMEKDLTYSSVKRHLLVIQI

SEQ ID NO: 14793 - protein, 84 aa, Homo sapiens
VIQILLIVCFLPYSIFKPIFYVLHQRDNCQQLNYLIETKNILTCLASARSSTDPIIFLLLDKTFKKTLYNLFTKSNSAHMQSYG

SEQ ID NO: 14794 - protein, 85 aa, Homo sapiens
IGKKTSTHIYLSHLVTANLLVCSAMPFMSIYFLKGFQWEYQSAQCRVVNFLGTLSMHASMFVSLLILSWIAISRYATLMQKDSSQ

SEQ ID NO: 14795 - protein, 85 aa, Homo sapiens
ETTSCYEKIFYGHLLKKFRQPNFARKLCIYIWGVVLGIIIPVTVYYSVIEATEGEESLCYNRQMELGAMISQIAGLIGTTFIGFS

SEQ ID NO: 14796 - protein, 85 aa, Homo sapiens
FLVVLTSYYSFVSHLRKIRTCTSIMEKDLTYSSVKRHLLVIQILLIVCFLPYSIFKPIFYVLHQRDNCQQLNYLIETKNILTCLA

SEQ ID NO: 14797 - protein, 85 aa, Homo sapiens
GRPRLTLVCQVSIIISARDLSMNNLTELQPGLFHHLRFLEELRLSGNHLSHIPGQAFSGLYSLKILMLQNNQLGGIPAEALWELP

SEQ ID NO: 14798 - protein, 85 aa, Homo sapiens
SLQSLRLDANLISLVPERSFEGLSSLRHLWLDDNALTEIPVRALNNLPALQAMTLALNRISHIPDYAFQNLTSLVVLHLHNNRIQ

SEQ ID NO: 14799 - protein, 85 aa, Homo sapiens
HLGTHSFEGLHNLETLDLNYNKLQEFPVAIRTLGRLQELGFHNNNIKAIPEKAFMGNPLLQTIHFYDNPIQFVGRSAFQYLPKLH

SEQ ID NO: 14800 - protein, 85 aa, Homo sapiens
TLSLNGAMDIQEFPDLKGTTSLEILTLTRAGIRLLPSGMCQQLPRLRVLELSHNQIEELPSLHRCQKLEEIGLQHNRIWEIGADT

SEQ ID NO: 14801 - protein, 85 aa, Homo sapiens
FSQLSSLQALDLSWNAIRSIHPEAFSTLHSLVKLDLTDNQLTTLPLAGLGGLMHLKLKGNLALSQAFSKDSFPKLRILEVPYAYQ

SEQ ID NO: 14802 - protein, 85 aa, Homo sapiens
CCPYGMCASFFKASGQWEAEDLHLDDEESSKRPLGLLARQAENHYDQDLDELQLEMEDSKPHPSVQCSPTPGPFKPCEYLFESWG

SEQ ID NO: 14803 - protein, 85 aa, Homo sapiens
IRLAVWAIVLLSVLCNGLVLLTVFAGGPVPLPPVKFVVGAIAGANTLTGISCGLLASVDALTFGQFSEYGARWETGLGCRATGFL

SEQ ID NO: 14804 - protein, 85 aa, Homo sapiens
AVLGSEASVLLLTLAAVQCSVSVSCVRAYGKSPSLGSVRAGVLGCLALAGLAAALPLASVGEYGASPLCLPYAPPEGQPAALGFT

SEQ ID NO: 14805 - protein, 85 aa, Homo sapiens
VALVMMNSFCFLVVAGAYIKLYCDLPRGDFEAVWDCAMVRHVAWLIFADGLLYCPVAFLSFASMLGLFPVTPEAVKSVLLVVLPL

SEQ ID NO: 14806 - protein, 85 aa, Homo sapiens
PACLNPLLYLLFNPHFRDDLRRLRPRAGDSGPLAYAAAGELEKSSCDSTQALVAFSDVDLILEASEAGRPPGLETYGFPSVTLIS

SEQ ID NO: 14807 - protein, 84 aa, Homo sapiens
EAGRPPGLETYGFPSVTLISCQQPGAPRLEGSHCVEPEGNHFGNPQPSMDGELLLRAEGSTPAGGGLSGGGGFQPSGLAFASHV

SEQ ID NO: 14808 - protein, 85 aa, Homo sapiens
RLSGNHLSHIPGQAFSGLYSLKILMLQNNQLGGIPAEALWELPSLQSLRLDANLISLVPERSFEGLSSLRHLWLDDNALTEIPVR

SEQ ID NO: 14809 - protein, 85 aa, Homo sapiens
ALNNLPALQAMTLALNRISHIPDYAFQNLTSLVVLHLHNNRIQHLGTHSFEGLHNLETLDLNYNKLQEFPVAIRTLGRLQELGFH

SEQ ID NO: 14810 - protein, 85 aa, Homo sapiens
NNNIKAIPEKAFMGNPLLQTIHFYDNPIQFVGRSAFQYLPKLHTLSLNGAMDIQEFPDLKGTTSLEILTLTRAGIRLLPSGMCQQ

SEQ ID NO: 14811 - protein, 85 aa, Homo sapiens
MPRLRVLELSHNQIEELPSLHRCQKLEEIGLQHNRIWEIGADTFSQLSSLQALDLSWNAIRSIHPEAFSTLHSLVKLDLTDNQLT

SEQ ID NO: 14812 - protein, 85 aa, Homo sapiens
TLPLAGLGGLMHLKLKGNLALSQAFSKDSFPKLRILEVPYAYQCCPYGMCASFFKASGQWEAEDLHLDDEESSKRPLGLLARQAE

SEQ ID NO: 14813 - protein, 85 aa, Homo sapiens
NHYDQDLDELQLEMEDSKPHPSVQCSPTPGPFKPCEYLFESWGIRLAVWAIVLLSVLCNGLVLLTVFAGGPVPLPPVKFVVGAIA

SEQ ID NO: 14814 - protein, 85 aa, Homo sapiens
GANTLTGISCGLLASVDALTFGQFSEYGARWETGLGCRATGFLAVLGSEASVLLLTLAAVQCSVSVSCVRAYGKSPSLGSVRAGV

SEQ ID NO: 14815 - protein, 85 aa, Homo sapiens
LGCLALAGLAAALPLASVGEYGASPLCLPYAPPEGQPAALGFTVALVMMNSFCFLVVAGAYIKLYCDLPRGDFEAVWDCAMVRHV

SEQ ID NO: 14816 - protein, 85 aa, Homo sapiens
AWLIFADGLLYCPVAFLSFASMLGLFPVTPEAVKSVLLVVLPLPACLNPLLYLLFNPHFRDDLRRLRPRAGDSGPLAYAAAGELE

SEQ ID NO: 14817 - protein, 85 aa, Homo sapiens
KSSCDSTQALVAFSDVDLILEASEAGRPPGLETYGFPSVTLISCQQPGAPRLEGSHCVEPEGNHFGNPQPSMDGELLLRAEGSTP

SEQ ID NO: 14818 - protein, 85 aa, Homo sapiens
DGSNVTSFVVEEPTNISTGRNASVGNAHRQIPIVHWVIMSISPVGFVENGILLWFLCFRMRRNPFTVYITHLSIADISLLFCIFI

SEQ ID NO: 14819 - protein, 85 aa, Homo sapiens
MSIDYALDYELSSGHYYTIVTLSVTFLFGYNTGLYLLTAISVERCLSVLYPIWYRCHRPKYQSALVCALLWALSCLVTTMEYVMC

SEQ ID NO: 14820 - protein, 85 aa, Homo sapiens
IDREEESHSRNDCRAVIIFIAILSFLVFTPLMLVSSTILVVKIRKNTWASHSSKLYIVIMVTIIIFLIFAMPMRLLYLLYYEYWS

SEQ ID NO: 14821 - protein, 84 aa, Homo sapiens [sequence omitted]

SEQ ID NO: 14822 - protein, 85 aa, Homo sapiens
PVGFVENGILLWFLCFRMRRNPFTVYITHLSIADISLLFCIFILSIDYALDYELSSGHYYTIVTLSVTFLFGYNTGLYLLTAISV

SEQ ID NO: 14823 - protein, 85 aa, Homo sapiens
ERCLSVLYPIWYRCHRPKYQSALVCALLWALSCLVTTMEYVMCIDREEESHSRNDCRAVIIFIAILSFLVFTPLMLVSSTILVVK

SEQ ID NO: 14824 - protein, 85 aa, Homo sapiens
IRKNTWASHSSKLYIVIMVTIIIFLIFAMPMRLLYLLYYEYWSTFGNLHHISLLFSTINSSANPFIYFFVGSSKKKRFKESLKVV

SEQ ID NO: 14825 - protein, 85 aa, Homo sapiens
EPPGRRRGRAQPPLLLPLSLLALLALLGGGGGGGAAALPAGCKHDGRPRGAGRAAGAAEGKVVCSSLELAQVLPPDTLPNRTVTL

SEQ ID NO: 14826 - protein, 85 aa, Homo sapiens
ILSNNKISELKNGSFSGLSLLERLDLRNNLISSIDPGAFWGLSSLKRLDLTNNRIGCLNADIFRGLTNLVRLNLSGNLFSSLSQG

SEQ ID NO: 14827 - protein, 85 aa, Homo sapiens
TFDYLASLRSLEFQTEYLLCDCNILWMHRWVKEKNITVRDTRCVYPKSLQAQPVTGVKQELLTCDPPLELPSFYMTPSHRQVVFE

SEQ ID NO: 14828 - protein, 85 aa, Homo sapiens
GDSLPFQCMASYIDQDMQVLWYQDGRIVETDESQGIFVEKNMIHNCSLIASALTISNIQAGSTGNWGCHVQTKRGNNTRTVDIVV

SEQ ID NO: 14829 - protein, 85 aa, Homo sapiens
LESSAQYCPPERVVNNKGDFRWPRTLAGITAYLQCTRNTHGSGIYPGNPQDERKAWRRCDRGGFWADDDYSRCQYANDVTRVLYM

SEQ ID NO: 14830 - protein, 85 aa, Homo sapiens
FNQMPLNLTNAVATARQLLAYTVEAANFSDKMDVIFVAEMIEKFGRFTKEEKSKELGDVMVDIASNIMLADERVLWLAQREAKAC

SEQ ID NO: 14831 - protein, 85 aa, Homo sapiens
SRIVQCLQRIATYRLAGGAHVYSTYSPNIALEAYVIKSTGFTGMTCTVFQKVAASDRTGLSDYGRRDPEGNLDKQLSFKCNVSNT

SEQ ID NO: 14832 - protein, 85 aa, Homo sapiens
FSSLALKNTIVEASIQLPPSLFSPKQKRELRPTDDSLYKLQLIAFRNGKLFPATGNSTNLADDGKRRTVVTPVILTKIDGVNVDT

SEQ ID NO: 14833 - protein, 85 aa, Homo sapiens
HHIPVNVTLRRIAHGADAVAARWDFDLLNGQGGWKSDGCHILYSDENITTIQCYSLSNYAVLMDLTGSELYTQAASLLHPVVYTT

SEQ ID NO: 14834 - protein, 85 aa, Homo sapiens
AIILLLCLLAVIVSYIYHHSLIRISLKSWHMLVNLCFHIFLTCVVFVGGITQTRNASICQAVGIILHYSTLATVLWVGVTARNIY

SEQ ID NO: 14835 - protein, 85 aa, Homo sapiens
KQVTKKAKRCQDPDEPPPPPRPMLRFYLIGGGIPIIVCGITAAANIKNYGSRPNAPYCWMAWEPSLGAFYGPASFITFVNCMYFL

SEQ ID NO: 14836 - protein, 85 aa, Homo sapiens
SIFIQLKRHPERKYELKEPTEEQQRLAANENGEINHQDSMSLSLISTSALENEHTFHSQLLGASLTLLLYVALWMFGALAVSLYY

SEQ ID NO: 14837 - protein, 85 aa, Homo sapiens
PLDLVFSFVFGATSLSFSAFFVVHHCVNREDVRLAWIMTCCPGRSSYSVQVNVQPPNSNGTNGEAPKCPNSSAESSCTNKSASSF

SEQ ID NO: 14838 - protein, 85 aa, Homo sapiens
KNSSQGCKLTNLQAAAAQCHANSLPLNSTPQLDNSLTEHSMDNDIKMHVAPLEVQFRTNVHSSRHHKNRSKGHRASRLTVLREYA

SEQ ID NO: 14839 - protein, 85 aa, Homo sapiens
YDVPTSVEGSVQNGLPKSRLGNNEGHSRSRRAYLAYRERQYNPPQQDSSDACSTLPKSSRNFEKPVSTTSKKDALRKPAVVELEN

SEQ ID NO: 14840 - protein, 84 aa, Homo sapiens
DSSDACSTLPKSSRNFEKPVSTTSKKDALRKPAVVELENQQKSYGLNLAIQNGPIKSNGQEGPLLGTDSTGNVRTGLWKHETTV

SEQ ID NO: 14841 - protein, 85 aa, Homo sapiens
KHDGRPRGAGRAAGAAEGKVVCSSLELAQVLPPDTLPNRTVTLILSNNKISELKNGSFSGLSLLERLDLRNNLISSIDPGAFWGL

SEQ ID NO: 14842 - protein, 85 aa, Homo sapiens
SSLKRLDLTNNRIGCLNADIFRGLTNLVRLNLSGNLFSSLSQGTFDYLASLRSLEFQTEYLLCDCNILWMHRWVKEKNITVRDTR

SEQ ID NO: 14843 - protein, 85 aa, Homo sapiens
CVYPKSLQAQPVTGVKQELLTCDPPLELPSFYMTPSHRQVVFEGDSLPFQCMASYIDQDMQVLWYQDGRIVETDESQGIFVEKNM

SEQ ID NO: 14844 - protein, 85 aa, Homo sapiens
IHNCSLIASALTISNIQAGSTGNWGCHVQTKRGNNTRTVDIVVLESSAQYCPPERVVNNKGDFRWPRTLAGITAYLQCTRNTHGS

SEQ ID NO: 14845 - protein, 85 aa, Homo sapiens
GIYPGNPQDERKAWRRCDRGGFWADDDYSRCQYANDVTRVLYMFNQMPLNLTNAVATARQLLAYTVEAANFSDKMDVIFVAEMIE

SEQ ID NO: 14846 - protein, 85 aa, Homo sapiens
KFGRFTKEEKSKELGDVMVDIASNIMLADERVLWLAQREAKACSRIVQCLQRIATYRLAGGAHVYSTYSPNIALEAYVIKSTGFT

SEQ ID NO: 14847 - protein, 85 aa, Homo sapiens
GMTCTVFQKVAASDRTGLSDYGRRDPEGNLDKQLSFKCNVSNTFSSLALKNTIVEASIQLPPSLFSPKQKRELRPTDDSLYKLQL

SEQ ID NO: 14848 - protein, 85 aa, Homo sapiens
IAFRNGKLFPATGNSTNLADDGKRRTVVTPVILTKIDGVNVDTHHIPVNVTLRRIAHGADAVAARWDFDLLNGQGGWKSDGCHIL

SEQ ID NO: 14849 - protein, 85 aa, Homo sapiens
YSDENITTIQCYSLSNYAVLMDLTGSELYTQAASLLHPVVYTTAIILLLCLLAVIVSYIYHHSLIRISLKSWHMLVNLCFHIFLT

SEQ ID NO: 14850 - protein, 85 aa, Homo sapiens
CVVFVGGITQTRNASICQAVGIILHYSTLATVLWVGVTARNIYKQVTKKAKRCQDPDEPPPPPRPMLRFYLIGGGIPIIVCGITA

SEQ ID NO: 14851 - protein, 85 aa, Homo sapiens
AANIKNYGSRPNAPYCWMAWEPSLGAFYGPASFITFVNCMYFLSIFIQLKRHPERKYELKEPTEEQQRLAANENGEINHQDSMSL

SEQ ID NO: 14852 - protein, 85 aa, Homo sapiens
SLISTSALENEHTFHSQLLGASLTLLLYVALWMFGALAVSLYYPLDLVFSFVFGATSLSFSAFFVVHHCVNREDVRLAWIMTCCP

SEQ ID NO: 14853 - protein, 85 aa, Homo sapiens
GRSSYSVQVNVQPPNSNGTNGEAPKCPNSSAESSCTNKSASSFKNSSQGCKLTNLQAAAAQCHANSLPLNSTPQLDNSLTEHSMD

SEQ ID NO: 14854 - protein, 85 aa, Homo sapiens
NDIKMHVAPLEVQFRTNVHSSRHHKNRSKGHRASRLTVLREYAYDVPTSVEGSVQNGLPKSRLGNNEGHSRSRRAYLAYRERQYN

SEQ ID NO: 14855 - protein, 85 aa, Homo sapiens
PPQQDSSDACSTLPKSSRNFEKPVSTTSKKDALRKPAVVELENQQKSYGLNLAIQNGPIKSNGQEGPLLGTDSTGNVRTGLWKHE

SEQ ID NO: 14856 - protein, 85 aa, Homo sapiens
GGHPQLRLVKALLLLGLNPVSASLQDQHCESLSLASNISDNGYRECLANGSWAARVNYSECQEILNEEKKSKVHYHVAVIINYLG

SEQ ID NO: 14857 - protein, 85 aa, Homo sapiens
HCISLVALLVAFVLFLRLRSIRCLRNIIHWNLISAFILRNATWFVVQLTMSPEVHQSNVGWCRLVTAAYNYFHVTNFFWMFGEGC

SEQ ID NO: 14858 - protein, 85 aa, Homo sapiens
YLHTAIVLTYSTDRLRKWMFICIGWGVPFPIIVAWAIGKLYYDNEKCWFGKRPGVYTDYIYQGPMILVLLINFIFLFNIVRILMT

SEQ ID NO: 14859 - protein, 85 aa, Homo sapiens
KLRASTTSETIQYRKAVKATLVLLPLLGITYMLFFVNPGEDEVSRVVFIYFNSFLESFQGFFVSVFYCFLNSEVRSAIRKRWHRW

SEQ ID NO: 14860 - protein, 85 aa, Homo sapiens
YRECLANGSWAARVNYSECQEILNEEKKSKVHYHVAVIINYLGHCISLVALLVAFVLFLRLRSIRCLRNIIHWNLISAFILRNAT

SEQ ID NO: 14861 - protein, 85 aa, Homo sapiens
WFVVQLTMSPEVHQSNVGWCRLVTAAYNYFHVTNFFWMFGEGCYLHTAIVLTYSTDRLRKWMFICIGWGVPFPIIVAWAIGKLYY

SEQ ID NO: 14862 - protein, 85 aa, Homo sapiens
DNEKCWFGKRPGVYTDYIYQGPMILVLLINFIFLFNIVRILMTKLRASTTSETIQYRKAVKATLVLLPLLGITYMLFFVNPGEDE

SEQ ID NO: 14863 - protein, 85 aa, Homo sapiens
EPLFPAPFWEVIYGSHLQGNLSLLSPNHSLLPPHLLLNASHGAFLPLGLKVTIVGLYLAVCVGGLLGNCLVMYVILRHTKMKTAT

SEQ ID NO: 14864 - protein, 85 aa, Homo sapiens
NIYIFNLALADTLVLLTLPFQGTDILLGFWPFGNALCKTVIAIDYYNMFTSTFTLTAMSVDRYVAICHPIRALDVRTSSKAQAVN

SEQ ID NO: 14865 - protein, 85 aa, Homo sapiens
VAIWALASVVGVPVAIMGSAQVEDEEIECLVEIPTPQDYWGPVFAICIFLFSFIVPVLVISVCYSLMIRRLRGVRLLSGSREKDR

SEQ ID NO: 14866 - protein, 85 aa, Homo sapiens
NLRRITRLVLVVVAVFVGCWTPVQVFVLAQGLGVQPSSETAVAILRFCTALGYVNSCLNPILYAFLDENFKACFRKFCCASALRR

SEQ ID NO: 14867 - protein, 84 aa, Homo sapiens
GLGVQPSSETAVAILRFCTALGYVNSCLNPILYAFLDENFKACFRKFCCASALRRDVQVSDRVRSIAKDVALACKTSETVPRPA

SEQ ID NO: 14868 - protein, 85 aa, Homo sapiens
AFLPLGLKVTIVGLYLAVCVGGLLGNCLVMYVILRHTKMKTATNIYIFNLALADTLVLLTLPFQGTDILLGFWPFGNALCKTVIA

SEQ ID NO: 14869 - protein, 85 aa, Homo sapiens
IDYYNMFTSTFTLTAMSVDRYVAICHPIRALDVRTSSKAQAVNVAIWALASVVGVPVAIMGSAQVEDEEIECLVEIPTPQDYWGP

SEQ ID NO: 14870 - protein, 85 aa, Homo sapiens
VFAICIFLFSFIVPVLVISVCYSLMIRRLRGVRLLSGSREKDRNLRRITRLVLVVVAVFVGCWTPVQVFVLAQGLGVQPSSETAV

SEQ ID NO: 14871 - protein, 85 aa, Homo sapiens
DSGPLWDANPTPRGTLSAPNATTPWLGRDEELAKVEIGVLATVLVLATGGNLAVLLTLGQLGRKRSRMHLFVLHLALTDLAVALF

SEQ ID NO: 14872 - protein, 85 aa, Homo sapiens
QVLPQLLWDITYRFQGPDLLCRAVKYLQVLSMFASTYMLLAMTLDRYLAVCHPLRSLQQPGQSTYLLIAAPWLLAAIFSLPQVFI

SEQ ID NO: 14873 - protein, 85 aa, Homo sapiens
FSLREVIQGSGVLDCWADFGFPWGPRAYLTWTTLAIFVLPVTMLTACYSLICHEICKNLKVKTQAWRVGGGGWRTWDRPSPSTLA

SEQ ID NO: 14874 - protein, 85 aa, Homo sapiens
ATTRGLPSRVSSINTISRAKIRTVKMTFVIVLAYIACWAPFFSVQMWSVWDKNAPDEDSTNVAFTISMLLGNLNSCCNPWIYMGF

SEQ ID NO: 14875 - protein, 84 aa, Homo sapiens
FNSHLLPRPLRHLACCGGPQPRMRRRLSDGSLSSRHTTLLTRSSCPATLSLSLSLTLSGRPRPEESPRDLELADGEGTAETIIF

SEQ ID NO: 14876 - protein, 85 aa, Homo sapiens
VLVLATGGNLAVLLTLGQLGRKRSRMHLFVLHLALTDLAVALFQVLPQLLWDITYRFQGPDLLCRAVKYLQVLSMFASTYMLLAM

SEQ ID NO: 14877 - protein, 85 aa, Homo sapiens
TLDRYLAVCHPLRSLQQPGQSTYLLIAAPWLLAAIFSLPQVFIFSLREVIQGSGVLDCWADFGFPWGPRAYLTWTTLAIFVLPVT

SEQ ID NO: 14878 - protein, 85 aa, Homo sapiens
MLTACYSLICHEICKNLKVKTQAWRVGGGGWRTWDRPSPSTLAATTRGLPSRVSSINTISRAKIRTVKMTFVIVLAYIACWAPFF

SEQ ID NO: 14879 - protein, 85 aa, Homo sapiens
SVQMWSVWDKNAPDEDSTNVAFTISMLLGNLNSCCNPWIYMGFNSHLLPRPLRHLACCGGPQPRMRRRLSDGSLSSRHTTLLTRS

SEQ ID NO: 14880 - protein, 85 aa, Homo sapiens
ARLAAVLWNLCVTAVLVTSATQGLSRAGLPFGLMRRELACEGYPIELRCPGSDVIMVENANYGRTDDKICDADPFQMENVQCYLP

SEQ ID NO: 14881 - protein, 85 aa, Homo sapiens
DAFKIMSQRCNNRTQCVVVAGSDAFPDPCPGTYKYLEVQYDCVPYKVEQKVFVCPGTLQKVLEPTSTHESEHQSGAWCKDPLQAG

SEQ ID NO: 14882 - protein, 85 aa, Homo sapiens
DRIYVMPWIPYRTDTLTEYASWEDYVAARHTTTYRLPNRVDGTGFVVYDGAVFYNKERTRNIVKYDLRTRIKSGETVINTANYHD

SEQ ID NO: 14883 - protein, 85 aa, Homo sapiens
TSPYRWGGKTDIDLAVDENGLWVIYATEGNNGRLVVSQLNPYTLRFEGTWETGYDKRSASNAFMVCGVLYVLRSVYVDDDSEAAG

SEQ ID NO: 14884 - protein, 85 aa, Homo sapiens
NRVDYAFNTNANREEPVSLTFPNPYQFISSVDYNPRDNQLYVWNNYFVVRYSLEFGPPDPSAGPATSPPLSTTTTARPTPLTSTA

SEQ ID NO: 14885 - protein, 85 aa, Homo sapiens
SPAATTPLRRAPLTTHPVGAINQLGPDLPPATAPVPSTRRPPAPNLHVSPELFCEPREVRRVQWPATQQGMLVERPCPKGTRGIA

SEQ ID NO: 14886 - protein, 85 aa, Homo sapiens
SFQCLPALGLWNPRGPDLSNCTSPWVNQVAQKIKSGENAANIASELARHTRGSIYAGDVSSSVKLMEQLLDILDAQLQALRPIER

SEQ ID NO: 14887 - protein, 85 aa, Homo sapiens
ESAGKNYNKMHKRERTCKDYIKAVVETVDNLLRPEALESWKDMNATEQVHTATMLLDVLEEGAFLLADNVREPARFLAAKENVVL

SEQ ID NO: 14888 - protein, 85 aa, Homo sapiens
EVTVLNTEGQVQELVFPQEEYPRKNSIQLSAKTIKQNSRNGVVKVVFILYNNLGLFLSTENATVKLAGEAGPGGPGGASLVVNSQ

SEQ ID NO: 14889 - protein, 85 aa, Homo sapiens
VIAASINKESSRVFLMDPVIFTVAHLEDKNHFNANCSFWNYSERSMLGYWSTQGCRLVESNKTHTTCACSHLTNFAVLMAHREIY

SEQ ID NO: 14890 - protein, 85 aa, Homo sapiens
QGRINELLLSVITWVGIVISLVCLAICISTFCFLRGLQTDRNTIHKNLCINLFLAELLFLVGIDKTQYEIACPIFAGLLHYFFLA

SEQ ID NO: 14891 - protein, 85 aa, Homo sapiens
AFSWLCLEGVHLYLLLVEVFESEYSRTKYYYLGGYCFPALVVGIAAAIDYRSYGTEKACWLRVDNYFIWSFIGPVSFVIVVNLVF

SEQ ID NO: 14892 - protein, 85 aa, Homo sapiens
LMVTLHKMIRSSSVLKPDSSRLDNIKSWALGAIALLFLLGLTWAFGLLFINKESVVMAYLFTTFNAFQGVFIFVFHCALQKKVHK

SEQ ID NO: 14893 - protein, 85 aa, Homo sapiens
EYSKCLRHSYCCIRSPPGGTHGSLKTSAMRSNTRYYTGTQSRIRRMWNDTVRKQTESSFMAGDINSTPTLNRGTMGNHLLTNPVL

SEQ ID NO: 14894 - protein, 85 aa, Homo sapiens
QPRGGTSPYNTLIAESVGFNPSSPPVFNSPGSYREPKHPLGGREACGMDTLPLNGNFNNSYSLRSGDFPPGDGGPEPPRGRNLAD

SEQ ID NO: 14895 - protein, 85 aa, Homo sapiens
AAAFEKMIISELVHNNLRGSSSAAKGPPPPEPPVPPVPGGGGEEEAGGPGGADRAEIELLYKALEEPLLLPRAQSVLYQSDLDES

SEQ ID NO: 14896 - protein, 85 aa, Homo sapiens
ESCTAEDGATSRPLSSPPGRDSLYASGANLRDSPSYPDSSPEGPSEALPPPPPAPPGPPEIYYTSRPPALVARNPLQGYYQVRRP

SEQ ID NO: 14897 - protein, 84 aa, Homo sapiens
MRDSPSYPDSSPEGPSEALPPPPPAPPGPPEIYYTSRPPALVARNPLQGYYQVRRPSHEGYLAAPGLEGPGPDGDGQMQLVTSL

SEQ ID NO: 14898 - protein, 85 aa, Homo sapiens
YPIELRCPGSDVIMVENANYGRTDDKICDADPFQMENVQCYLPDAFKIMSQRCNNRTQCVVVAGSDAFPDPCPGTYKYLEVQYDC

SEQ ID NO: 14899 - protein, 85 aa, Homo sapiens
VPYKVEQKVFVCPGTLQKVLEPTSTHESEHQSGAWCKDPLQAGDRIYVMPWIPYRTDTLTEYASWEDYVAARHTTTYRLPNRVDG

SEQ ID NO: 14900 - protein, 85 aa, Homo sapiens
TGFVVYDGAVFYNKERTRNIVKYDLRTRIKSGETVINTANYHDTSPYRWGGKTDIDLAVDENGLWVIYATEGNNGRLVVSQLNPY

SEQ ID NO: 14901 - protein, 85 aa, Homo sapiens
TLRFEGTWETGYDKRSASNAFMVCGVLYVLRSVYVDDDSEAAGNRVDYAFNTNANREEPVSLTFPNPYQFISSVDYNPRDNQLYV

SEQ ID NO: 14902 - protein, 85 aa, Homo sapiens
WNNYFVVRYSLEFGPPDPSAGPATSPPLSTTTTARPTPLTSTASPAATTPLRRAPLTTHPVGAINQLGPDLPPATAPVPSTRRPP

SEQ ID NO: 14903 - protein, 85 aa, Homo sapiens
APNLHVSPELFCEPREVRRVQWPATQQGMLVERPCPKGTRGIASFQCLPALGLWNPRGPDLSNCTSPWVNQVAQKIKSGENAANI

SEQ ID NO: 14904 - protein, 85 aa, Homo sapiens
ASELARHTRGSIYAGDVSSSVKLMEQLLDILDAQLQALRPIERESAGKNYNKMHKRERTCKDYIKAVVETVDNLLRPEALESWKD

SEQ ID NO: 14905 - protein, 85 aa, Homo sapiens
MNATEQVHTATMLLDVLEEGAFLLADNVREPARFLAAKENVVLEVTVLNTEGQVQELVFPQEEYPRKNSIQLSAKTIKQNSRNGV

SEQ ID NO: 14906 - protein, 85 aa, Homo sapiens
VKVVFILYNNLGLFLSTENATVKLAGEAGPGGPGGASLVVNSQVIAASINKESSRVFLMDPVIFTVAHLEDKNHFNANCSFWNYS

SEQ ID NO: 14907 - protein, 85 aa, Homo sapiens
ERSMLGYWSTQGCRLVESNKTHTTCACSHLTNFAVLMAHREIYQGRINELLLSVITWVGIVISLVCLAICISTFCFLRGLQTDRN

SEQ ID NO: 14908 - protein, 85 aa, Homo sapiens
TIHKNLCINLFLAELLFLVGIDKTQYEIACPIFAGLLHYFFLAAFSWLCLEGVHLYLLLVEVFESEYSRTKYYYLGGYCFPALVV

SEQ ID NO: 14909 - protein, 85 aa, Homo sapiens
GIAAAIDYRSYGTEKACWLRVDNYFIWSFIGPVSFVIVVNLVFLMVTLHKMIRSSSVLKPDSSRLDNIKSWALGAIALLFLLGLT

SEQ ID NO: 14910 - protein, 85 aa, Homo sapiens
WAFGLLFINKESVVMAYLFTTFNAFQGVFIFVFHCALQKKVHKEYSKCLRHSYCCIRSPPGGTHGSLKTSAMRSNTRYYTGTQSR

SEQ ID NO: 14911 - protein, 85 aa, Homo sapiens
IRRMWNDTVRKQTESSFMAGDINSTPTLNRGTMGNHLLTNPVLQPRGGTSPYNTLIAESVGFNPSSPPVFNSPGSYREPKHPLGG

SEQ ID NO: 14912 - protein, 85 aa, Homo sapiens
REACGMDTLPLNGNFNNSYSLRSGDFPPGDGGPEPPRGRNLADAAAFEKMIISELVHNNLRGSSSAAKGPPPPEPPVPPVPGGGG

SEQ ID NO: 14913 - protein, 85 aa, Homo sapiens
EEEAGGPGGADRAEIELLYKALEEPLLLPRAQSVLYQSDLDESESCTAEDGATSRPLSSPPGRDSLYASGANLRDSPSYPDSSPE

SEQ ID NO: 14914 - protein, 85 aa, Homo sapiens
SIQENISSLQLRSWVSKSQRDLAKSILIGAPGGPAGYLRRASVAQLTQELGTAFFQQQQLPAAMADTFLEHLCLLDIDSEPVAAR

SEQ ID NO: 14915 - protein, 85 aa, Homo sapiens
STSIIATIGPASRSVERLKEMIKAGMNIARLNFSHGSHEYHAESIANVREAVESFAGSPLSYRPVAIALDTKGPEIRTGILQGGP

SEQ ID NO: 14916 - protein, 85 aa, Homo sapiens
ESEVELVKGSQVLVTVDPAFRTRGNANTVWVDYPNIVRVVPVGGRIYIDDGLISLVVQKIGPEGLVTQVENGGVLGSRKGVNLPG

SEQ ID NO: 14917 - protein, 85 aa, Homo sapiens
AQVDLPGLSEQDVRDLRFGVEHGVDIVFASFVRKASDVAAVRAALGPEGHGIKIISKIENHEGVKRFDEILEVSDGIMVARGDLG

SEQ ID NO: 14918 - protein, 85 aa, Homo sapiens
IEIPAEKVFLAQKMMIGRCNLAGKPVVCATQMLESMITKPRPTRAETSDVANAVLDGADCIMLSGETAKGNFPVEAVKMQHAIAR

SEQ ID NO: 14919 - protein, 85 aa, Homo sapiens
EAEAAVYHRQLFEELRRAAPLSRDPTEVTAIGAVEAAFKCCAAAIIVLTTTGRSAQLLSRYRPRAAVIAVTRSAQAARQVHLCRG

SEQ ID NO: 14920 - protein, 84 aa, Homo sapiens
AAVIAVTRSAQAARQVHLCRGVFPLLYREPPEAIWADDVDRRVQFGIESGKLRGFLRVGDLVIVVTGWRPGSGYTNIMRVLSIS

SEQ ID NO: 14921 - protein, 85 aa, Homo sapiens
VAQLTQELGTAFFQQQQLPAAMADTFLEHLCLLDIDSEPVAARSTSIIATIGPASRSVERLKEMIKAGMNIARLNFSHGSHEYHA

SEQ ID NO: 14922 - protein, 85 aa, Homo sapiens
ESIANVREAVESFAGSPLSYRPVAIALDTKGPEIRTGILQGGPESEVELVKGSQVLVTVDPAFRTRGNANTVWVDYPNIVRVVPV

SEQ ID NO: 14923 - protein, 85 aa, Homo sapiens
GGRIYIDDGLISLVVQKIGPEGLVTQVENGGVLGSRKGVNLPGAQVDLPGLSEQDVRDLRFGVEHGVDIVFASFVRKASDVAAVR

SEQ ID NO: 14924 - protein, 85 aa, Homo sapiens
AALGPEGHGIKIISKIENHEGVKRFDEILEVSDGIMVARGDLGIEIPAEKVFLAQKMMIGRCNLAGKPVVCATQMLESMITKPRP

SEQ ID NO: 14925 - protein, 85 aa, Homo sapiens
TRAETSDVANAVLDGADCIMLSGETAKGNFPVEAVKMQHAIAREAEAAVYHRQLFEELRRAAPLSRDPTEVTAIGAVEAAFKCCA

SEQ ID NO: 14926 - protein, 85 aa, Homo sapiens
AAIIVLTTTGRSAQLLSRYRPRAAVIAVTRSAQAARQVHLCRGVFPLLYREPPEAIWADDVDRRVQFGIESGKLRGFLRVGDLVI

SEQ ID NO: 14927 - protein, 85 aa, Homo sapiens
GAGGRRMRGAPARLLLPLLPWLLLLLAPEARGAPGCPLSIRSCKCSGERPKGLSGGVPGPARRRVVCSGGDLPEPPEPGLLPNGT

SEQ ID NO: 14928 - protein, 85 aa, Homo sapiens
VTLLLSNNKITGLRNGSFLGLSLLEKLDLRNNIISTVQPGAFLGLGELKRLDLSNNRIGCLTSETFQGLPRLLRLNISGNIFSSL

SEQ ID NO: 14929 - protein, 85 aa, Homo sapiens
QPGVFDELPALKVVDLGTEFLTCDCHLRWLLPWAQNRSLQLSEHTLCAYPSALHAQALGSLQEAQLCCEGALELHTHHLIPSLRQ

SEQ ID NO: 14930 - protein, 85 aa, Homo sapiens
VVFQGDRLPFQCSASYLGNDTRIRWYHNRAPVEGDEQAGILLAESLIHDCTFITSELTLSHIGVWASGEWECTVSMAQGNASKKV

SEQ ID NO: 14931 - protein, 85 aa, Homo sapiens
EIVVLETSASYCPAERVANNRGDFRWPRTLAGITAYQSCLQYPFTSVPLGGGAPGTRASRRCDRAGRWEPGDYSHCLYTNDITRV

SEQ ID NO: 14932 - protein, 85 aa, Homo sapiens
MYTFVLMPINASNALTLAHQLRVYTAEAASFSDMMDVVYVAQMIQKFLGYVDQIKELVEVMVDMASNLMLVDEHLLWLAQREDKA

SEQ ID NO: 14933 - protein, 85 aa, Homo sapiens
CSRIVGALERIGGAALSPHAQHISVELSAFPREVGGAGAGLHPVVYPCTALLLLCLFATIITYILNHSSIRVSRKGWHMLLNLCF

SEQ ID NO: 14934 - protein, 85 aa, Homo sapiens
HIAMTSAVFAGGITLTNYQMVCQAVGITLHYSSLSTLLWMGVKARVLHKELTWRAPPPQEGDPALPTPSPMLRFYLIAGGIPLII

SEQ ID NO: 14935 - protein, 85 aa, Homo sapiens
CGITAAVNIHNYRDHSPYCWLVWRPSLGAFYIPVALILLITWIYFLCAGLRLRGPLAQNPKAGNSRASLEAGEELRGSTRLRGSG

SEQ ID NO: 14936 - protein, 85 aa, Homo sapiens
PLLSDSGSLLATGSARVGTPGPPEDGDSLYSPGVQLGALVTTHFLYLAMWACGALAVSQRWLPRVVCSCLYGVAASALGLFVFTH

SEQ ID NO: 14937 - protein, 85 aa, Homo sapiens
HCARRRDVRASWRACCPPASPAAPHAPPRALPAAAEDGSPVFGEGPPSLKSSPSGSSGHPLALGPCKLTNLQLAQSQVCEAGAAA

SEQ ID NO: 14938 - protein, 85 aa, Homo sapiens
GGEGEPEPAGTRGNLAHRHPNNVHHGRRAHKSRAKGHRAGEACGKNRLKALRGGAAGALELLSSESGSLHNSPTDSYLGSSRNSP

SEQ ID NO: 14939 - protein, 85 aa, Homo sapiens
GAGLQLEGEPMLTPSEGSDTSAAPLSEAGRAGQRRSASRDSLKGGGALEKESHRRSYPLNAASLNGAPKGGKYDDVTLMGAEVAS

SEQ ID NO: 14940 - protein, 84 aa, Homo sapiens
GSDTSAAPLSEAGRAGQRRSASRDSLKGGGALEKESHRRSYPLNAASLNGAPKGGKYDDVTLMGAEVASGGCMKTGLWKSETTV

SEQ ID NO: 14941 - protein, 85 aa, Homo sapiens
CKCSGERPKGLSGGVPGPARRRVVCSGGDLPEPPEPGLLPNGTVTLLLSNNKITGLRNGSFLGLSLLEKLDLRNNIISTVQPGAF

SEQ ID NO: 14942 - protein, 85 aa, Homo sapiens
MGLGELKRLDLSNNRIGCLTSETFQGLPRLLRLNISGNIFSSLQPGVFDELPALKVVDLGTEFLTCDCHLRWLLPWAQNRSLQLS

SEQ ID NO: 14943 - protein, 85 aa, Homo sapiens
EHTLCAYPSALHAQALGSLQEAQLCCEGALELHTHHLIPSLRQVVFQGDRLPFQCSASYLGNDTRIRWYHNRAPVEGDEQAGILL

SEQ ID NO: 14944 - protein, 85 aa, Homo sapiens
AESLIHDCTFITSELTLSHIGVWASGEWECTVSMAQGNASKKVEIVVLETSASYCPAERVANNRGDFRWPRTLAGITAYQSCLQY

SEQ ID NO: 14945 - protein, 85 aa, Homo sapiens
PFTSVPLGGGAPGTRASRRCDRAGRWEPGDYSHCLYTNDITRVLYTFVLMPINASNALTLAHQLRVYTAEAASFSDMMDVVYVAQ

SEQ ID NO: 14946 - protein, 85 aa, Homo sapiens
MIQKFLGYVDQIKELVEVMVDMASNLMLVDEHLLWLAQREDKACSRIVGALERIGGAALSPHAQHISVELSAFPREVGGAGAGLH

SEQ ID NO: 14947 - protein, 85 aa, Homo sapiens
PVVYPCTALLLLCLFATIITYILNHSSIRVSRKGWHMLLNLCFHIAMTSAVFAGGITLTNYQMVCQAVGITLHYSSLSTLLWMGV

SEQ ID NO: 14948 - protein, 85 aa, Homo sapiens
KARVLHKELTWRAPPPQEGDPALPTPSPMLRFYLIAGGIPLIICGITAAVNIHNYRDHSPYCWLVWRPSLGAFYIPVALILLITW

SEQ ID NO: 14949 - protein, 85 aa, Homo sapiens
IYFLCAGLRLRGPLAQNPKAGNSRASLEAGEELRGSTRLRGSGPLLSDSGSLLATGSARVGTPGPPEDGDSLYSPGVQLGALVTT

SEQ ID NO: 14950 - protein, 85 aa, Homo sapiens
HFLYLAMWACGALAVSQRWLPRVVCSCLYGVAASALGLFVFTHHCARRRDVRASWRACCPPASPAAPHAPPRALPAAAEDGSPVF

SEQ ID NO: 14951 - protein, 85 aa, Homo sapiens
GEGPPSLKSSPSGSSGHPLALGPCKLTNLQLAQSQVCEAGAAAGGEGEPEPAGTRGNLAHRHPNNVHHGRRAHKSRAKGHRAGEA

SEQ ID NO: 14952 - protein, 85 aa, Homo sapiens
CGKNRLKALRGGAAGALELLSSESGSLHNSPTDSYLGSSRNSPGAGLQLEGEPMLTPSEGSDTSAAPLSEAGRAGQRRSASRDSL

SEQ ID NO: 14953 - protein, 85 aa, Homo sapiens
KRKNFTEVSEFIFLGFSSFGKHQITLFVVFLTVYILTLVANIIIVTIICIDHHLHTPMYFFLSMLASSETVYTLVIVPRMLLSLI

SEQ ID NO: 14954 - protein, 85 aa, Homo sapiens
FHNQPISLAGCATQMFFFVILATNNCFLLTAMGYDRYVAICRPLRYTVIMSKGLCAQLVCGSFGIGLTMAVLHVTAMFNLPFCGT

SEQ ID NO: 14955 - protein, 85 aa, Homo sapiens
VVDHFFCDIYPVMKLSCIDTTINEIINYGVSSFVIFVPIGLIFISYVLVISSILQIASAEGRKKTFATCVSHLTVVIVHCGCASI

SEQ ID NO: 14956 - protein, 84 aa, Homo sapiens
QIASAEGRKKTFATCVSHLTVVIVHCGCASIAYLKPKSESSIEKDLVLSVTYTIITPLLNPVVYSLRNKEVKDALCRVVGRNIS

SEQ ID NO: 14957 - protein, 85 aa, Homo sapiens
IIVTIICIDHHLHTPMYFFLSMLASSETVYTLVIVPRMLLSLIFHNQPISLAGCATQMFFFVILATNNCFLLTAMGYDRYVAICR

SEQ ID NO: 14958 - protein, 85 aa, Homo sapiens
PLRYTVIMSKGLCAQLVCGSFGIGLTMAVLHVTAMFNLPFCGTVVDHFFCDIYPVMKLSCIDTTINEIINYGVSSFVIFVPIGLI

SEQ ID NO: 14959 - protein, 85 aa, Homo sapiens
FISYVLVISSILQIASAEGRKKTFATCVSHLTVVIVHCGCASIAYLKPKSESSIEKDLVLSVTYTIITPLLNPVVYSLRNKEVKD

SEQ ID NO: 14960 - protein, 85 aa, Homo sapiens
DAFKIMSQRCNNRTQCVVVAGSDAFPDPCPGTYKYLEVQYDCVPYIFVCPGTLQKVLEPTSTHESEHQSGAWCKDPLQAGDRIYV

SEQ ID NO: 14961 - protein, 85 aa, Homo sapiens
MPWIPYRTDTLTEYASWEDYVAARHTTTYRLPNRVDGTGFVVYDGAVFYNKERTRNIVKYDLRTRIKSGETVINTANYHDTSPYR

SEQ ID NO: 14962 - protein, 85 aa, Homo sapiens
WGGKTDIDLAVDENGLWVIYATEGNNGRLVVSQLNPYTLRFEGTWETGYDKRSASNAFMVCGVLYVLRSVYVDDDSEAAGNRVDY

SEQ ID NO: 14963 - protein, 85 aa, Homo sapiens
AFNTNANREEPVSLTFPNPYQFISSVDYNPRDNQLYVWNNYFVVRYSLEFGPPDPSAGPATSPPLSTTTTARPTPLTSTASPAAT

SEQ ID NO: 14964 - protein, 85 aa, Homo sapiens
TPLRRAPLTTHPVGAINQLGPDLPPATAPVPSTRRPPAPNLHVSPELFCEPREVRRVQWPATQQGMLVERPCPKGTRGIASFQCL

SEQ ID NO: 14965 - protein, 85 aa, Homo sapiens
PALGLWNPRGPDLSNCTSPWVNQVAQKIKSGENAANIASELARHTRGSIYAGDVSSSVKLMEQLLDILDAQLQALRPIERESAGK

SEQ ID NO: 14966 - protein, 85 aa, Homo sapiens
NYNKMHKRERTCKDYIKAVVETVDNLLRPEALESWKDMNATEQVHTATMLLDVLEEGAFLLADNVREPARFLAAKENVVLEVTVL

SEQ ID NO: 14967 - protein, 85 aa, Homo sapiens
NTEGQVQELVFPQEEYPRKNSIQLSAKTIKQNSRNGVVKVVFILYNNLGLFLSTENATVKLAGEAGPGGPGGASLVVNSQVIAAS

SEQ ID NO: 14968 - protein, 85 aa, Homo sapiens
INKESSRVFLMDPVIFTVAHLEDKNHFNANCSFWNYSERSMLGYWSTQGCRLVESNKTHTTCACSHLTNFAVLMAHREIYQGRIN

SEQ ID NO: 14969 - protein, 85 aa, Homo sapiens
ELLLSVITWVGIVISLVCLAICISTFCFLRGLQTDRNTIHKNLCINLFLAELLFLVGIDKTQYEIACPIFAGLLHYFFLAAFSWL

SEQ ID NO: 14970 - protein, 85 aa, Homo sapiens
CLEGVHLYLLLVEVFESEYSRTKYYYLGGYCFPALVVGIAAAIDYRSYGTEKACWLRVDNYFIWSFIGPVSFVIVVNLVFLMVTL

SEQ ID NO: 14971 - protein, 85 aa, Homo sapiens
HKMIRSSSVLKPDSSRLDNIKSWALGAIALLFLLGLTWAFGLLFINKESVVMAYLFTTFNAFQGVFIFVFHCALQKKVHKEYSKC

SEQ ID NO: 14972 - protein, 85 aa, Homo sapiens
MRHSYCCIRSPPGGTHGSLKTSAMRSNTRYYTGTQSRIRRMWNDTVRKQTESSFMAGDINSTPTLNRGTMGNHLLTNPVLQPRGG

SEQ ID NO: 14973 - protein, 85 aa, Homo sapiens
TSPYNTLIAESVGFNPSSPPVFNSPGSYREPKHPLGGREACGMDTLPLNGNFNNSYSLRSGDFPPGDGGPEPPRGRNLADAAAFE

SEQ ID NO: 14974 - protein, 85 aa, Homo sapiens
KMIISELVHNNLRGSSSAAKGPPPPEPPVPPVPGGGGEEEAGGPGGADRAEIELLYKALEEPLLLPRAQSVLYQSDLDESESCTA

SEQ ID NO: 14975 - protein, 85 aa, Homo sapiens
EDGATSRPLSSPPGRDSLYASGANLRDSPSYPDSSPEGPSEALPPPPPAPPGPPEIYYTSRPPALVARNPLQGYYQVRRPSHEGY

SEQ ID NO: 14976 - protein, 85 aa, Homo sapiens
VPYIFVCPGTLQKVLEPTSTHESEHQSGAWCKDPLQAGDRIYVMPWIPYRTDTLTEYASWEDYVAARHTTTYRLPNRVDGTGFVV

SEQ ID NO: 14977 - protein, 85 aa, Homo sapiens
YDGAVFYNKERTRNIVKYDLRTRIKSGETVINTANYHDTSPYRWGGKTDIDLAVDENGLWVIYATEGNNGRLVVSQLNPYTLRFE

SEQ ID NO: 14978 - protein, 85 aa, Homo sapiens
GTWETGYDKRSASNAFMVCGVLYVLRSVYVDDDSEAAGNRVDYAFNTNANREEPVSLTFPNPYQFISSVDYNPRDNQLYVWNNYF

SEQ ID NO: 14979 - protein, 85 aa, Homo sapiens
VVRYSLEFGPPDPSAGPATSPPLSTTTTARPTPLTSTASPAATTPLRRAPLTTHPVGAINQLGPDLPPATAPVPSTRRPPAPNLH

SEQ ID NO: 14980 - protein, 85 aa, Homo sapiens
VSPELFCEPREVRRVQWPATQQGMLVERPCPKGTRGIASFQCLPALGLWNPRGPDLSNCTSPWVNQVAQKIKSGENAANIASELA

SEQ ID NO: 14981 - protein, 85 aa, Homo sapiens
RHTRGSIYAGDVSSSVKLMEQLLDILDAQLQALRPIERESAGKNYNKMHKRERTCKDYIKAVVETVDNLLRPEALESWKDMNATE

SEQ ID NO: 14982 - protein, 85 aa, Homo sapiens
QVHTATMLLDVLEEGAFLLADNVREPARFLAAKENVVLEVTVLNTEGQVQELVFPQEEYPRKNSIQLSAKTIKQNSRNGVVKVVF

SEQ ID NO: 14983 - protein, 85 aa, Homo sapiens
ILYNNLGLFLSTENATVKLAGEAGPGGPGGASLVVNSQVIAASINKESSRVFLMDPVIFTVAHLEDKNHFNANCSFWNYSERSML

SEQ ID NO: 14984 - protein, 85 aa, Homo sapiens
GYWSTQGCRLVESNKTHTTCACSHLTNFAVLMAHREIYQGRINELLLSVITWVGIVISLVCLAICISTFCFLRGLQTDRNTIHKN

SEQ ID NO: 14985 - protein, 85 aa, Homo sapiens
MCINLFLAELLFLVGIDKTQYEIACPIFAGLLHYFFLAAFSWLCLEGVHLYLLLVEVFESEYSRTKYYYLGGYCFPALVVGIAAA

SEQ ID NO: 14986 - protein, 85 aa, Homo sapiens
IDYRSYGTEKACWLRVDNYFIWSFIGPVSFVIVVNLVFLMVTLHKMIRSSSVLKPDSSRLDNIKSWALGAIALLFLLGLTWAFGL

SEQ ID NO: 14987 - protein, 85 aa, Homo sapiens
LFINKESVVMAYLFTTFNAFQGVFIFVFHCALQKKVHKEYSKCLRHSYCCIRSPPGGTHGSLKTSAMRSNTRYYTGTQSRIRRMW

SEQ ID NO: 14988 - protein, 85 aa, Homo sapiens
NDTVRKQTESSFMAGDINSTPTLNRGTMGNHLLTNPVLQPRGGTSPYNTLIAESVGFNPSSPPVFNSPGSYREPKHPLGGREACG

SEQ ID NO: 14989 - protein, 85 aa, Homo sapiens
MDTLPLNGNFNNSYSLRSGDFPPGDGGPEPPRGRNLADAAAFEKMIISELVHNNLRGSSSAAKGPPPPEPPVPPVPGGGGEEEAG

SEQ ID NO: 14990 - protein, 85 aa, Homo sapiens
GPGGADRAEIELLYKALEEPLLLPRAQSVLYQSDLDESESCTAEDGATSRPLSSPPGRDSLYASGANLRDSPSYPDSSPEGPSEA

SEQ ID NO: 14991 - protein, 85 aa, Homo sapiens
VSATIPQKKSKVHYHVAVIINYLGHCISLVALLVAFVLFLRLRSIRCLRNIIHWNLISAFILRNATWFVVQLTMSPEVHQSNVGW

SEQ ID NO: 14992 - protein, 85 aa, Homo sapiens
CRLVTAAYNYFHVTNFFWMFGEGCYLHTAIVLTYSTDRLRKWMFICIGWGVPFPIIVAWAIGKLYYDNEKCWFGKRPGVYTDYIY

SEQ ID NO: 14993 - protein, 85 aa, Homo sapiens
QGPMILVLLINFIFLFNIVRILMTKLRASTTSETIQYRKAVKATLVLLPLLGITYMLFFVNPGEDEVSRVVFIYFNSFLESFQGF

SEQ ID NO: 14994 - protein, 85 aa, Homo sapiens
RSIRCLRNIIHWNLISAFILRNATWFVVQLTMSPEVHQSNVGWCRLVTAAYNYFHVTNFFWMFGEGCYLHTAIVLTYSTDRLRKW

SEQ ID NO: 14995 - protein, 85 aa, Homo sapiens
MFICIGWGVPFPIIVAWAIGKLYYDNEKCWFGKRPGVYTDYIYQGPMILVLLINFIFLFNIVRILMTKLRASTTSETIQYRKAVK

SEQ ID NO: 14996 - protein, 85 aa, Homo sapiens
ATLVLLPLLGITYMLFFVNPGEDEVSRVVFIYFNSFLESFQGFFVSVFYCFLNSEVRSAIRKRWHRWQDKHSIRARVARAMSIPT

SEQ ID NO: 14997 - protein, 84 aa, Homo sapiens
QLVVRPCPAFFYGVRYNTTNNGYRECLANGSWAARVNYSECQEILNEEKKSKVHYHVAVIINYLGHCISLVALLVAFVLFLRLS

SEQ ID NO: 14998 - protein, 85 aa, Homo sapiens
PRSPGTRLKPAKYIPVATAAALLVGSSTLFFVFTCPWLTRAVSPAVPVYNGIIFLFVLANFSMATFMDPGVFPRADEDEDKEDDF

SEQ ID NO: 14999 - protein, 85 aa, Homo sapiens
RAPLYKNVDVRGIQVRMKWCATCHFYRPPRCSHCSVCDNCVEVTGKFRGGVNPFTRGCCGNVEHVLCSPLAPRYVVEPPRLPLAV

SEQ ID NO: 15000 - protein, 85 aa, Homo sapiens
SLKPPFLRPELLDRAAPLKVKLSDNGLKAGLGRSKSKGSLDRLDEKPLDLGPPLPPKIEAGTFSSDLQTPRPGSAESALSVQRTS

SEQ ID NO: 15001 - protein, 85 aa, Homo sapiens
PPTPAMYKFRPAFPTGPKVPFCGPGEQVPGPDSLTLGDDSIRSLDFVSEPSLDLPDYGPGGLHAAYPPSPPLSASDAFSGALRSL

SEQ ID NO: 15002 - protein, 85 aa, Homo sapiens
SLKASSRRGGDHVALQPLRSEGGPPTPHRSIFAPHALPNRNGSLSYDSLLNPGSPGGHACPAHPAVGVAGYHSPYLHPGATGDPP

SEQ ID NO: 15003 - protein, 85 aa, Homo sapiens
RPLPRSFSPVLGPRPREPSPVRYDNLSRTIMASIQERKDREERERLLRSQADSLFGDSGVYDAPSSYSLQQASVLSEGPRGPALR

SEQ ID NO: 15004 - protein, 85 aa, Homo sapiens
YGSRDDLVAGPGFGGARNPALQTSLSSLSSSVSRAPRTSSSSLQADQASSNAPGPRPSSGSHRSPARQGLPSPPGTPHSPSYAGP

SEQ ID NO: 15005 - protein, 84 aa, Homo sapiens
SPSYAGPKAVAFIHTDLPEPPPSLTVQRDHPQLKTPPSKLNGQSPGLARLGPATGPPGPSASPTRHTLVKKVSGVGGTTYEISV

SEQ ID NO: 15006 - protein, 85 aa, Homo sapiens
SPAVPVYNGIIFLFVLANFSMATFMDPGVFPRADEDEDKEDDFRAPLYKNVDVRGIQVRMKWCATCHFYRPPRCSHCSVCDNCVE

SEQ ID NO: 15007 - protein, 85 aa, Homo sapiens
VTGKFRGGVNPFTRGCCGNVEHVLCSPLAPRYVVEPPRLPLAVSLKPPFLRPELLDRAAPLKVKLSDNGLKAGLGRSKSKGSLDR

SEQ ID NO: 15008 - protein, 85 aa, Homo sapiens
MDEKPLDLGPPLPPKIEAGTFSSDLQTPRPGSAESALSVQRTSPPTPAMYKFRPAFPTGPKVPFCGPGEQVPGPDSLTLGDDSIR

SEQ ID NO: 15009 - protein, 85 aa, Homo sapiens
SLDFVSEPSLDLPDYGPGGLHAAYPPSPPLSASDAFSGALRSLSLKASSRRGGDHVALQPLRSEGGPPTPHRSIFAPHALPNRNG

SEQ ID NO: 15010 - protein, 85 aa, Homo sapiens
SLSYDSLLNPGSPGGHACPAHPAVGVAGYHSPYLHPGATGDPPRPLPRSFSPVLGPRPREPSPVRYDNLSRTIMASIQERKDREE

SEQ ID NO: 15011 - protein, 85 aa, Homo sapiens
RERLLRSQADSLFGDSGVYDAPSSYSLQQASVLSEGPRGPALRYGSRDDLVAGPGFGGARNPALQTSLSSLSSSVSRAPRTSSSS

SEQ ID NO: 15012 - protein, 85 aa, Homo sapiens
MQADQASSNAPGPRPSSGSHRSPARQGLPSPPGTPHSPSYAGPKAVAFIHTDLPEPPPSLTVQRDHPQLKTPPSKLNGQSPGLAR

SEQ ID NO: 15013 - protein, 85 aa, Homo sapiens
TTRKLSAHSAATPGYKAVTHKHHTGWARMAKTGLPEKGQSQAGGESGSGQLLDQENGAGESALVSVYVHLDFPDKTWPPELSRTL

SEQ ID NO: 15014 - protein, 85 aa, Homo sapiens
TLPAASASSSPRPLLTGLRLTTGEYMSCFEAQGFKWNLYEVVRVPLKATDVARLPYQLSISCATSPGFQLSCCIPSTNLAYTAAW

SEQ ID NO: 15015 - protein, 85 aa, Homo sapiens
SPGEGSKASSFNESGSQCFVLAVQRCPMADTTYACDLQSLGLAPLRVPISITIIQDGDITCPEDASVLTWNVTKAGHVAQAPCPE

SEQ ID NO: 15016 - protein, 85 aa, Homo sapiens
SKRGIVRRLCGADGVWGPVHSSCTDARLLALFTRTKLLQAGQGSPAEEVPQILAQLPGQAAEASSPSDLLTLLSTMKYVAKVVAE

SEQ ID NO: 15017 - protein, 85 aa, Homo sapiens
ARIQLDRRALKNLLIATDKVLDMDTRSLWTLAQARKPWAGSTLLLAVETLACSLCPQDHPFAFSLPNVLLQSQLFGPTFPADYSI

SEQ ID NO: 15018 - protein, 85 aa, Homo sapiens
SFPTRPPLQAQIPRHSLAPLVRNGTEISITSLVLRKLDHLLPSNYGQGLGDSLYATPGLVLVISIMAGDRAFSQGEVIMDFGNTD

SEQ ID NO: 15019 - protein, 85 aa, Homo sapiens
GSPHCVFWDHSLFQGRGGWSKEGCQAQVASASPTAQCLCQHLTAFSVLMSPHTVPEEPALALLTQVGLGASILALLVCLGVYWLV

SEQ ID NO: 15020 - protein, 85 aa, Homo sapiens
WRVVVRNKISYFRHAALLNMVFCLLAADTCFLGAPFLSPGPRSPLCLAAAFLCHFLYLATFFWMLAQALVLAHQLLFVFHQLAKH

SEQ ID NO: 15021 - protein, 85 aa, Homo sapiens
RVLPLMVLLGYLCPLGLAGVTLGLYLPQGQYLREGECWLDGKGGALYTFVGPVLAIIGVNGLVLAMAMLKLLRPSLSEGPPAEKR

SEQ ID NO: 15022 - protein, 85 aa, Homo sapiens
QALLGVIKALLILTPIFGLTWGLGLATLLEEVSTVPHYIFTILNTLQGVFILLFGCLMDRKIQEALRKRFCRAQAPSSTISLATN

SEQ ID NO: 15023 - protein, 84 aa, Homo sapiens
GLATLLEEVSTVPHYIFTILNTLQGVFILLFGCLMDRKIQEALRKRFCRAQAPSSTISLATNEGCILEHSKGGSDTARKTDASE

SEQ ID NO: 15024 - protein, 85 aa, Homo sapiens
GGESGSGQLLDQENGAGESALVSVYVHLDFPDKTWPPELSRTLTLPAASASSSPRPLLTGLRLTTGEYMSCFEAQGFKWNLYEVV

SEQ ID NO: 15025 - protein, 85 aa, Homo sapiens
RVPLKATDVARLPYQLSISCATSPGFQLSCCIPSTNLAYTAAWSPGEGSKASSFNESGSQCFVLAVQRCPMADTTYACDLQSLGL

SEQ ID NO: 15026 - protein, 85 aa, Homo sapiens
APLRVPISITIIQDGDITCPEDASVLTWNVTKAGHVAQAPCPESKRGIVRRLCGADGVWGPVHSSCTDARLLALFTRTKLLQAGQ

SEQ ID NO: 15027 - protein, 85 aa, Homo sapiens
GSPAEEVPQILAQLPGQAAEASSPSDLLTLLSTMKYVAKVVAEARIQLDRRALKNLLIATDKVLDMDTRSLWTLAQARKPWAGST

SEQ ID NO: 15028 - protein, 85 aa, Homo sapiens
LLLAVETLACSLCPQDHPFAFSLPNVLLQSQLFGPTFPADYSISFPTRPPLQAQIPRHSLAPLVRNGTEISITSLVLRKLDHLLP

SEQ ID NO: 15029 - protein, 85 aa, Homo sapiens
SNYGQGLGDSLYATPGLVLVISIMAGDRAFSQGEVIMDFGNTDGSPHCVFWDHSLFQGRGGWSKEGCQAQVASASPTAQCLCQHL

SEQ ID NO: 15030 - protein, 85 aa, Homo sapiens
TAFSVLMSPHTVPEEPALALLTQVGLGASILALLVCLGVYWLVWRVVVRNKISYFRHAALLNMVFCLLAADTCFLGAPFLSPGPR

SEQ ID NO: 15031 - protein, 85 aa, Homo sapiens
SPLCLAAAFLCHFLYLATFFWMLAQALVLAHQLLFVFHQLAKHRVLPLMVLLGYLCPLGLAGVTLGLYLPQGQYLREGECWLDGK

SEQ ID NO: 15032 - protein, 85 aa, Homo sapiens
GGALYTFVGPVLAIIGVNGLVLAMAMLKLLRPSLSEGPPAEKRQALLGVIKALLILTPIFGLTWGLGLATLLEEVSTVPHYIFTI

SEQ ID NO: 15033 - protein, 85 aa, Homo sapiens
PSPPGLRALWLCAALCASRRAGGAPQPGPGPTACPAPCHCQEDGIMLSADCSELGLSAVPGDLDPLTAYLDLSMNNLTELQPGLF

SEQ ID NO: 15034 - protein, 85 aa, Homo sapiens
HHLRFLEELRLSGNHLSHIPGQAFSGLYSLKILMLQNNQLGGIPAEALWELPSLQSLRLDANLISLVPERSFEGLSSLRHLWLDD

SEQ ID NO: 15035 - protein, 85 aa, Homo sapiens
NALTEIPVRALNNLPALQAMTLALNRISHIPDYAFQNLTSLVVLHLHNNRIQHLGTHSFEGLHNLETLDLNYNKLQEFPVAIRTL

SEQ ID NO: 15036 - protein, 85 aa, Homo sapiens
GRLQELGFHNNNIKAIPEKAFMGNPLLQTIHFYDNPIQFVGRSAFQYLPKLHTLSLNGAMDIQEFPDLKGTTSLEILTLTRAGIR

SEQ ID NO: 15037 - protein, 85 aa, Homo sapiens
MLPSGMCQQLPRLRVLELSHNQIEELPSLHRCQKLEEIGLQHNRIWEIGADTFSQLSSLQALDLSWNAIRSIHPEAFSTLHSLVK

SEQ ID NO: 15038 - protein, 85 aa, Homo sapiens
MDLTDNQLTTLPLAGLGGLMHLKLKGNLALSQAFSKDSFPKLRILEVPYAYQCCPYGMCASFFKASGQWEAEDLHLDDEESSKRP

SEQ ID NO: 15039 - protein, 85 aa, Homo sapiens
MGLLARQAENHYDQDLDELQLEMEDSKPHPSVQCSPTPGPFKPCEYLFESWGIRLAVWAIVLLSVLCNGLVLLTVFAGGPVPLPP

SEQ ID NO: 15040 - protein, 85 aa, Homo sapiens
VKFVVGAIAGANTLTGISCGLLASVDALTFGQFSEYGARWETGLGCRATGFLAVLGSEASVLLLTLAAVQCSVSVSCVRAYGKSP

SEQ ID NO: 15041 - protein, 85 aa, Homo sapiens
SLGSVRAGVLGCLALAGLAAALPLASVGEYGASPLCLPYAPPEGQPAALGFTVALVMMNSFCFLVVAGAYIKLYCDLPRGDFEAV

SEQ ID NO: 15042 - protein, 85 aa, Homo sapiens
WDCAMVRHVAWLIFADGLLYCPVAFLSFASMLGLFPVTPEAVKSVLLVVLPLPACLNPLLYLLFNPHFRDDLRRLRPRAGDSGPL

SEQ ID NO: 15043 - protein, 85 aa, Homo sapiens
AYAAAGELEKSSCDSTQALVAFSDVDLILEASEAGRPPGLETYGFPSVTLISCQQPGAPRLEGSHCVEPEGNHFGNPQPSMDGEL

SEQ ID NO: 15044 - protein, 85 aa, Homo sapiens
DGIMLSADCSELGLSAVPGDLDPLTAYLDLSMNNLTELQPGLFHHLRFLEELRLSGNHLSHIPGQAFSGLYSLKILMLQNNQLGG

SEQ ID NO: 15045 - protein, 85 aa, Homo sapiens
IPAEALWELPSLQSLRLDANLISLVPERSFEGLSSLRHLWLDDNALTEIPVRALNNLPALQAMTLALNRISHIPDYAFQNLTSLV

SEQ ID NO: 15046 - protein, 85 aa, Homo sapiens
VLHLHNNRIQHLGTHSFEGLHNLETLDLNYNKLQEFPVAIRTLGRLQELGFHNNNIKAIPEKAFMGNPLLQTIHFYDNPIQFVGR

SEQ ID NO: 15047 - protein, 85 aa, Homo sapiens
SAFQYLPKLHTLSLNGAMDIQEFPDLKGTTSLEILTLTRAGIRLLPSGMCQQLPRLRVLELSHNQIEELPSLHRCQKLEEIGLQH

SEQ ID NO: 15048 - protein, 85 aa, Homo sapiens
NRIWEIGADTFSQLSSLQALDLSWNAIRSIHPEAFSTLHSLVKLDLTDNQLTTLPLAGLGGLMHLKLKGNLALSQAFSKDSFPKL

SEQ ID NO: 15049 - protein, 85 aa, Homo sapiens
RILEVPYAYQCCPYGMCASFFKASGQWEAEDLHLDDEESSKRPLGLLARQAENHYDQDLDELQLEMEDSKPHPSVQCSPTPGPFK

SEQ ID NO: 15050 - protein, 85 aa, Homo sapiens
PCEYLFESWGIRLAVWAIVLLSVLCNGLVLLTVFAGGPVPLPPVKFVVGAIAGANTLTGISCGLLASVDALTFGQFSEYGARWET

SEQ ID NO: 15051 - protein, 85 aa, Homo sapiens
GLGCRATGFLAVLGSEASVLLLTLAAVQCSVSVSCVRAYGKSPSLGSVRAGVLGCLALAGLAAALPLASVGEYGASPLCLPYAPP

SEQ ID NO: 15052 - protein, 85 aa, Homo sapiens
EGQPAALGFTVALVMMNSFCFLVVAGAYIKLYCDLPRGDFEAVWDCAMVRHVAWLIFADGLLYCPVAFLSFASMLGLFPVTPEAV

SEQ ID NO: 15053 - protein, 85 aa, Homo sapiens
KSVLLVVLPLPACLNPLLYLLFNPHFRDDLRRLRPRAGDSGPLAYAAAGELEKSSCDSTQALVAFSDVDLILEASEAGRPPGLET

SEQ ID NO: 15054 - protein, 85 aa, Homo sapiens
RAPLYKNVDVRGIQVRMKWCATCHFYRPPRCSHCSVCDNCVEDFDHHCPWVNNCIGRRNYRYFFLFLLSLSAHMVGVVAFGLVYV

SEQ ID NO: 15055 - protein, 85 aa, Homo sapiens
MNHAEGLGAAHTTITMAVMCVAGLFFIPVIGLTGFHVVLVTRGRTTNEQVTGKFRGGVNPFTRGCCGNVEHVLCSPLAPRYVVEP

SEQ ID NO: 15056 - protein, 85 aa, Homo sapiens
PRLPLAVSLKPPFLRPELLDRAAPLKVKLSDNGLKAGLGRSKSKGSLDRLDEKPLDLGPPLPPKIEAGTFSSDLQTPRPGSAESA

SEQ ID NO: 15057 - protein, 85 aa, Homo sapiens
MSVQRTSPPTPAMYKFRPAFPTGPKVPFCGPGEQVPGPDSLTLGDDSIRSLDFVSEPSLDLPDYGPGGLHAAYPPSPPLSASDAF

SEQ ID NO: 15058 - protein, 85 aa, Homo sapiens
SGALRSLSLKASSRRGGDHVALQPLRSEGGPPTPHRSIFAPHALPNRNGSLSYDSLLNPGSPGGHACPAHPAVGVAGYHSPYLHP

SEQ ID NO: 15059 - protein, 85 aa, Homo sapiens
GATGDPPRPLPRSFSPVLGPRPREPSPVRYDNLSRTIMASIQERKDREERERLLRSQADSLFGDSGVYDAPSSYSLQQASVLSEG

SEQ ID NO: 15060 - protein, 85 aa, Homo sapiens
PRGPALRYGSRDDLVAGPGFGGARNPALQTSLSSLSSSVSRAPRTSSSSLQADQASSNAPGPRPSSGSHRSPARQGLPSPPGTPH

SEQ ID NO: 15061 - protein, 85 aa, Homo sapiens
DFDHHCPWVNNCIGRRNYRYFFLFLLSLSAHMVGVVAFGLVYVLNHAEGLGAAHTTITMAVMCVAGLFFIPVIGLTGFHVVLVTR

SEQ ID NO: 15062 - protein, 85 aa, Homo sapiens
GRTTNEQVTGKFRGGVNPFTRGCCGNVEHVLCSPLAPRYVVEPPRLPLAVSLKPPFLRPELLDRAAPLKVKLSDNGLKAGLGRSK

SEQ ID NO: 15063 - protein, 85 aa, Homo sapiens
SKGSLDRLDEKPLDLGPPLPPKIEAGTFSSDLQTPRPGSAESALSVQRTSPPTPAMYKFRPAFPTGPKVPFCGPGEQVPGPDSLT

SEQ ID NO: 15064 - protein, 85 aa, Homo sapiens
MGDDSIRSLDFVSEPSLDLPDYGPGGLHAAYPPSPPLSASDAFSGALRSLSLKASSRRGGDHVALQPLRSEGGPPTPHRSIFAPH

SEQ ID NO: 15065 - protein, 85 aa, Homo sapiens
ALPNRNGSLSYDSLLNPGSPGGHACPAHPAVGVAGYHSPYLHPGATGDPPRPLPRSFSPVLGPRPREPSPVRYDNLSRTIMASIQ

SEQ ID NO: 15066 - protein, 85 aa, Homo sapiens
ERKDREERERLLRSQADSLFGDSGVYDAPSSYSLQQASVLSEGPRGPALRYGSRDDLVAGPGFGGARNPALQTSLSSLSSSVSRA

SEQ ID NO: 15067 - protein, 85 aa, Homo sapiens
PRTSSSSLQADQASSNAPGPRPSSGSHRSPARQGLPSPPGTPHSPSYAGPKAVAFIHTDLPEPPPSLTVQRDHPQLKTPPSKLNG

SEQ ID NO: 15068 - protein, 85 aa, Homo sapiens
EEPGAQCAPPPPAGSETWVPQANLSSAPSQNCSAKDYIYQDSISLPWKVLLVMLLALITLATTLSNAFVIATVYRTRKLHTPANY

SEQ ID NO: 15069 - protein, 85 aa, Homo sapiens
MIASLAVTDLLVSILVMPISTMYTVTGRWTLGQVVCDFWLSSDITCCTASILHLCVIALDRYWAITDAVEYSAKRTPKRAAVMIA

SEQ ID NO: 15070 - protein, 85 aa, Homo sapiens
MVWVFSISISLPPFFWRQAKAEEEVSECVVNTDHILYTVYSTVGAFYFPTLLLIALYGRIYVEARSRILKQTPNRTGKRLTRAQL

SEQ ID NO: 15071 - protein, 85 aa, Homo sapiens
ITDSPGSTSSVTSINSRVPDVPSESGSPVYVNQVKVRVSDALLEKKKLMAARERKATKTLGIILGAFIVCWLPFFIISLVMPICK

SEQ ID NO: 15072 - protein, 84 aa, Homo sapiens
ARERKATKTLGIILGAFIVCWLPFFIISLVMPICKDACWFHLAIFDFFTWLGYLNSLINPIIYTMSNEDFKQAFHKLIRFKCTS

SEQ ID NO: 15073 - protein, 85 aa, Homo sapiens
ISLPWKVLLVMLLALITLATTLSNAFVIATVYRTRKLHTPANYLIASLAVTDLLVSILVMPISTMYTVTGRWTLGQVVCDFWLSS

SEQ ID NO: 15074 - protein, 85 aa, Homo sapiens
DITCCTASILHLCVIALDRYWAITDAVEYSAKRTPKRAAVMIALVWVFSISISLPPFFWRQAKAEEEVSECVVNTDHILYTVYST

SEQ ID NO: 15075 - protein, 85 aa, Homo sapiens
VGAFYFPTLLLIALYGRIYVEARSRILKQTPNRTGKRLTRAQLITDSPGSTSSVTSINSRVPDVPSESGSPVYVNQVKVRVSDAL

SEQ ID NO: 15076 - protein, 85 aa, Homo sapiens
MEKKKLMAARERKATKTLGIILGAFIVCWLPFFIISLVMPICKDACWFHLAIFDFFTWLGYLNSLINPIIYTMSNEDFKQAFHKL

SEQ ID NO: 15077 - protein, 85 aa, Homo sapiens
TTRKLSAHSAATPGYKAVTHKHHTGWARMAKTGLPEKLPPSTSQALSALCWLFSAARWLTPRTLVTCRAWAWLHSGSPSPSPSSR

SEQ ID NO: 15078 - protein, 84 aa, Homo sapiens
EKLPPSTSQALSALCWLFSAARWLTPRTLVTCRAWAWLHSGSPSPSPSSRMETSPALRTPRCSPGMSPRLATWHRPHVLRARGA

SEQ ID NO: 15079 - protein, 85 aa, Homo sapiens
KGQKEAAKGWKEAANGDEAAAEEASTTKGEQFPGEMFPVACRETTARVKEEVDEGVTCEMLLNTMDNSAGCTGRMMLVSAWLLGR

SEQ ID NO: 15080 - protein, 84 aa, Homo sapiens
AEEASTTKGEQFPGEMFPVACRETTARVKEEVDEGVTCEMLLNTMDNSAGCTGRMMLVSAWLLGRPQETYNQGRRRRGSRRVTW

SEQ ID NO: 15081 - protein, 85 aa, Homo sapiens
SGDERSDEIVLTVSNSNVEEQEDQPTAGQADAEKAKSTKNQRKTKGAKGTFHCDVCMFTSSRMSSFNRHMKTHTSEKPHLCHLCL

SEQ ID NO: 15082 - protein, 85 aa, Homo sapiens
KTFRTVTLLRNHVNTHTGTRPYKCNDCNMAFVTSGELVRHRRYKHTHEKPFKCSMCKYASVEASKLKRHVRSHTGERPFQCCQCS

SEQ ID NO: 15083 - protein, 85 aa, Homo sapiens
YASRDTYKLKRHMRTHSGEKPYECHICHTRFTQSGTMKIHILQKHGENVPKYQCPHCATIIARKSDLRVHMRNLHAYSAAELKCR

SEQ ID NO: 15084 - protein, 85 aa, Homo sapiens
YCSAVFHERYALIQHQKTHKNEKRFKCKHCSYACKQERHMTAHIRTHTGEKPFTCLSCNKCFRQKQLLNAHFRKYHDANFIPTVY

SEQ ID NO: 15085 - protein, 85 aa, Homo sapiens
KCSKCGKGFSRWINLHRHSEKCGSGEAKSAASGKGRRTRKRKQTILKEATKGQKEAAKGWKEAANGDGVISAHRNLCLLGSSDSH

SEQ ID NO: 15086 - protein, 84 aa, Homo sapiens
RRTRKRKQTILKEATKGQKEAAKGWKEAANGDGVISAHRNLCLLGSSDSHASVSGAGITDARHHAWLIVLLFLVEMGFYHVSHS

SEQ ID NO: 15087 - protein, 85 aa, Homo sapiens
KTKGAKGTFHCDVCMFTSSRMSSFNRHMKTHTSEKPHLCHLCLKTFRTVTLLRNHVNTHTGTRPYKCNDCNMAFVTSGELVRHRR

SEQ ID NO: 15088 - protein, 85 aa, Homo sapiens
YKHTHEKPFKCSMCKYASVEASKLKRHVRSHTGERPFQCCQCSYASRDTYKLKRHMRTHSGEKPYECHICHTRFTQSGTMKIHIL

SEQ ID NO: 15089 - protein, 85 aa, Homo sapiens
QKHGENVPKYQCPHCATIIARKSDLRVHMRNLHAYSAAELKCRYCSAVFHERYALIQHQKTHKNEKRFKCKHCSYACKQERHMTA

SEQ ID NO: 15090 - protein, 85 aa, Homo sapiens
HIRTHTGEKPFTCLSCNKCFRQKQLLNAHFRKYHDANFIPTVYKCSKCGKGFSRWINLHRHSEKCGSGEAKSAASGKGRRTRKRK

SEQ ID NO: 15091 - protein, 85 aa, Homo sapiens
SPECARAAGDAPLRSLEQANRTRFPFFSDVKGDHRLVLAAVETTVLVLIFAVSLLGNVCALVLVARRRRRGATACLVLNLFCADL

SEQ ID NO: 15092 - protein, 85 aa, Homo sapiens
LFISAIPLVLAVRWTEAWLLGPVACHLLFYVMTLSGSVTILTLAAVSLERMVCIVHLQRGVRGPGRRARAVLLALIWGYSAVAAL

SEQ ID NO: 15093 - protein, 85 aa, Homo sapiens
PLCVFFRVVPQRLPGADQEISICTLIWPTIPGEISWDVSFVTLNFLVPGLVIVISYSKILQITKASRKRLTVSLAYSESHQIRVS

SEQ ID NO: 15094 - protein, 85 aa, Homo sapiens
QQDFRLFRTLFLLMVSFFIMWSPIIITILLILIQNFKQDLVIWPSLFFWVVAFTFANSALNPILYNMTLCRNEWKKIFCCFWFPE

SEQ ID NO: 15095 - protein, 84 aa, Homo sapiens
SPIIITILLILIQNFKQDLVIWPSLFFWVVAFTFANSALNPILYNMTLCRNEWKKIFCCFWFPEKGAILTDTSVKRNDLSIISG

SEQ ID NO: 15096 - protein, 85 aa, Homo sapiens
TTVLVLIFAVSLLGNVCALVLVARRRRRGATACLVLNLFCADLLFISAIPLVLAVRWTEAWLLGPVACHLLFYVMTLSGSVTILT

SEQ ID NO: 15097 - protein, 85 aa, Homo sapiens
MAAVSLERMVCIVHLQRGVRGPGRRARAVLLALIWGYSAVAALPLCVFFRVVPQRLPGADQEISICTLIWPTIPGEISWDVSFVT

SEQ ID NO: 15098 - protein, 85 aa, Homo sapiens
MNFLVPGLVIVISYSKILQITKASRKRLTVSLAYSESHQIRVSQQDFRLFRTLFLLMVSFFIMWSPIIITILLILIQNFKQDLVI

SEQ ID NO: 15099 - protein, 85 aa, Homo sapiens
PTRRWAPGTQCITKCEHTRPKPGELAFRKGDVVTILEACENKSWYRVKHHTSGQEGLLAAGALREREALSADPKLSLMPWFHGKI

SEQ ID NO: 15100 - protein, 85 aa, Homo sapiens
SGQEAVQQLQPPEDGLFLVRESARHPGDYVLCVSFGRDVIHYRVLHRDGHLTIDEAVFFCNLMDMVEHYSKDKGAICTKLVRPKR

SEQ ID NO: 15101 - protein, 85 aa, Homo sapiens
KHGTKSAEEELARAGWLLNLQHLTLGAQIGEGEFGAVLQGEYLGQKVAVKNIKCDVTAQAFLDETAVMTKMQHENLVRLLGVILH

SEQ ID NO: 15102 - protein, 85 aa, Homo sapiens
QGLYIVMEHVSKGNLVNFLRTRGRALVNTAQLLQFSLHVAEGMEYLESKKLVHRDLAARNILVSEDLVAKVSDFGLAKAERKGLD

SEQ ID NO: 15103 - protein, 85 aa, Homo sapiens
SSRLPVKWTAPEALKHGKFTSKSDVWSFGVLLWEVFSYGRAPYPKMSLKEVSEAVEKGYRMEPPEGCPGPVHVLMSSCWEAEPAR

SEQ ID NO: 15104 - protein, 85 aa, Homo sapiens
SWYRVKHHTSGQEGLLAAGALREREALSADPKLSLMPWFHGKISGQEAVQQLQPPEDGLFLVRESARHPGDYVLCVSFGRDVIHY

SEQ ID NO: 15105 - protein, 85 aa, Homo sapiens
RVLHRDGHLTIDEAVFFCNLMDMVEHYSKDKGAICTKLVRPKRKHGTKSAEEELARAGWLLNLQHLTLGAQIGEGEFGAVLQGEY

SEQ ID NO: 15106 - protein, 85 aa, Homo sapiens
MGQKVAVKNIKCDVTAQAFLDETAVMTKMQHENLVRLLGVILHQGLYIVMEHVSKGNLVNFLRTRGRALVNTAQLLQFSLHVAEG

SEQ ID NO: 15107 - protein, 85 aa, Homo sapiens
MEYLESKKLVHRDLAARNILVSEDLVAKVSDFGLAKAERKGLDSSRLPVKWTAPEALKHGKFTSKSDVWSFGVLLWEVFSYGRAP

SEQ ID NO: 15108 - protein, 85 aa, Homo sapiens
FKCSMCKYASVEASKLKRHVRSHTGERPFQCCQCSYASRDTYKLKRHMRTHSGVHMRNLHAYSAAELKCRYCSAVFHERYALIQH

SEQ ID NO: 15109 - protein, 85 aa, Homo sapiens
QKTHKNEKRFKCKHCSYACKQERHMTAHIRTHTGEKPFTCLSCNKCFRQKQLLNAHFRKYHDANFIPTVYKCSKCGKGFSRWINL

SEQ ID NO: 15110 - protein, 85 aa, Homo sapiens
HRHSEKCGSGEAKSAASGKGRRTRKRKQTILKEATKGQKEAAKGWKEAANGDEAAAEEASTTKGEQFPGEMFPVACRETTARVKE

SEQ ID NO: 15111 - protein, 85 aa, Homo sapiens
KLKRHMRTHSGVHMRNLHAYSAAELKCRYCSAVFHERYALIQHQKTHKNEKRFKCKHCSYACKQERHMTAHIRTHTGEKPFTCLS

SEQ ID NO: 15112 - protein, 85 aa, Homo sapiens
CNKCFRQKQLLNAHFRKYHDANFIPTVYKCSKCGKGFSRWINLHRHSEKCGSGEAKSAASGKGRRTRKRKQTILKEATKGQKEAA

SEQ ID NO: 15113 - protein, 85 aa, Homo sapiens
EGPAGYLRRASVAQLTQELGTAFFQQQQLPAAMADTFLEHLCLLDIDSEPVAARSTSIIATIGPASRSVERLKEMIKAGMNIARL

SEQ ID NO: 15114 - protein, 85 aa, Homo sapiens
NFSHGSHEYHAESIANVREAVESFAGSPLSYRPVAIALDTKGPEIRTGILQGGPESEVELVKGSQVLVTVDPAFRTRGNANTVWV

SEQ ID NO: 15115 - protein, 85 aa, Homo sapiens
DYPNIVRVVPVGGRIYIDDGLISLVVQKIGPEGLVTQVENGGVLGSRKGVNLPGAQVDLPGLSEQDVRDLRFGVEHGVDIVFASF

SEQ ID NO: 15116 - protein, 85 aa, Homo sapiens
VRKASDVAAVRAALGPEGHGIKIISKIENHEGVKRFDEILEVSDGIMVARGDLGIEIPAEKVFLAQKMMIGRCNLAGKPVVCATQ

SEQ ID NO: 15117 - protein, 85 aa, Homo sapiens
MLESMITKPRPTRAETSDVANAVLDGADCIMLSGETAKGNFPVEAVKMQHAIAREAEAAVYHRQLFEELRRAAPLSRDPTEVTAI

SEQ ID NO: 15118 - protein, 85 aa, Homo sapiens
GAVEAAFKCCAAAIIVLTTTGRSAQLLSRYRPRAAVIAVTRSAQAARQVHLCRGVFPLLYREPPEAIWADDVDRRVQFGIESGKL

SEQ ID NO: 15119 - protein, 85 aa, Homo sapiens
LLDIDSEPVAARSTSIIATIGPASRSVERLKEMIKAGMNIARLNFSHGSHEYHAESIANVREAVESFAGSPLSYRPVAIALDTKG

SEQ ID NO: 15120 - protein, 85 aa, Homo sapiens
PEIRTGILQGGPESEVELVKGSQVLVTVDPAFRTRGNANTVWVDYPNIVRVVPVGGRIYIDDGLISLVVQKIGPEGLVTQVENGG

SEQ ID NO: 15121 - protein, 85 aa, Homo sapiens
VLGSRKGVNLPGAQVDLPGLSEQDVRDLRFGVEHGVDIVFASFVRKASDVAAVRAALGPEGHGIKIISKIENHEGVKRFDEILEV

SEQ ID NO: 15122 - protein, 85 aa, Homo sapiens
SDGIMVARGDLGIEIPAEKVFLAQKMMIGRCNLAGKPVVCATQMLESMITKPRPTRAETSDVANAVLDGADCIMLSGETAKGNFP

SEQ ID NO: 15123 - protein, 85 aa, Homo sapiens
VEAVKMQHAIAREAEAAVYHRQLFEELRRAAPLSRDPTEVTAIGAVEAAFKCCAAAIIVLTTTGRSAQLLSRYRPRAAVIAVTRS

SEQ ID NO: 15124 - protein, 85 aa, Homo sapiens
ADTFLEHLCLLDIDSEPVAARSTSIIATIGPASRSVERLKEMIKAGMNIARLNFSHGSHEYHAESIANVREAVESFAGSPLSYRP

SEQ ID NO: 15125 - protein, 85 aa, Homo sapiens
FAGSPLSYRPVAIALDTKGPEIRTGILQGGPESEVELVKGSQVLVTVDPAFRTRGNANTVWVDYPNIVRVVPVGGRIYIDDGLIS

SEQ ID NO: 15126 - protein, 85 aa, Homo sapiens
IKAGMNIARLNFSHGSHEYHAESIANVREAVESFAGSPLSYRPVAIALDTKGPEIRTGILQGGPESEVELVKGSQVLVTVDPAFR

SEQ ID NO: 15127 - protein, 85 aa, Homo sapiens
SPSYAGPKAVAFIHTDLPEPPPSLTVQRGRIGTCTRGWGRRGQPWVPPGLHLCHLGRPEDRPPLRAPWSQAAGAPPRGAMCRLHL

SEQ ID NO: 15128 - protein, 84 aa, Homo sapiens
HTDLPEPPPSLTVQRGRIGTCTRGWGRRGQPWVPPGLHLCHLGRPEDRPPLRAPWSQAAGAPPRGAMCRLHLAASSLFPSLSGP

SEQ ID NO: 15129 - protein, 85 aa, Homo sapiens
PRTSSSSLQADQASSNAPGPRPSSGSHRSPARQGLPSPPGTPHSPSYAGPKAVAFIHTDLPEPPPSLTVQRGRIGTCTRGWGRRG

SEQ ID NO: 15130 - protein, 84 aa, Homo sapiens
AFVTSGELVRHRRYKHTHEKPFKCSMCKYASVEVKPFLDLKLHGILVEAAVQVTPSVTNSRICYKQAFYYSYKIYAGNNMHSLL

SEQ ID NO: 15131 - protein, 85 aa, Homo sapiens
MLRNHVNTHTGTRPYKCNDCNMAFVTSGELVRHRRYKHTHEKPFKCSMCKYASVEVKPFLDLKLHGILVEAAVQVTPSVTNSRIC

SEQ ID NO: 15132 - protein, 85 aa, Homo sapiens
VCSAAPLLLLATTLPLLGSPVAQASQPGQSQAGGESGSGQLLDQENGAGESALVSVYVHLDFPDKTWPPELSRTLTLPAASASSS

SEQ ID NO: 15133 - protein, 85 aa, Homo sapiens
PRPLLTGLRLTTECNVNHKGNFYCACLSGYQWNTSICLHYPPCQSLHNHQPCGCLVFSHPEPGYCQLLPPGSPVTCLPAVPGILN

SEQ ID NO: 15134 - protein, 85 aa, Homo sapiens
MNSQLQMPGDTLSLTLHLSQEATNLSWFLRHPGSPSPILLQPGTQVSVTSSHGQAALSVSNMSHHWAGEYMSCFEAQGFKWNLYE

SEQ ID NO: 15135 - protein, 85 aa, Homo sapiens
VVRVPLKATDVARLPYQLSISCATSPGFQLSCCIPSTNLAYTAAWSPGEGSKASSFNESGSQCFVLAVQRCPMADTTYACDLQSL

SEQ ID NO: 15136 - protein, 85 aa, Homo sapiens
GLAPLRVPISITIIQDGDITCPEDASVLTWNVTKAGHVAQAPCPESKRGIVRRLCGADGVWGPVHSSCTDARLLALFTRTKLLQA

SEQ ID NO: 15137 - protein, 85 aa, Homo sapiens
GQGSPAEEVPQILAQLPGQAAEASSPSDLLTLLSTMKYVAKVVAEARIQLDRRALKNLLIATDKVLDMDTRSLWTLAQARKPWAG

SEQ ID NO: 15138 - protein, 85 aa, Homo sapiens
STLLLAVETLACSLCPQDHPFAFSLPNVLLQSQLFGPTFPADYSISFPTRPPLQAQIPRHSLAPLVRNGTEISITSLVLRKLDHL

SEQ ID NO: 15139 - protein, 85 aa, Homo sapiens
MPSNYGQGLGDSLYATPGLVLVISIMAGDRAFSQGEVIMDFGNTDGSPHCVFWDHSLFQGRGGWSKEGCQAQVASASPTAQCLCQ

SEQ ID NO: 15140 - protein, 85 aa, Homo sapiens
HLTAFSVLMSPHTVPEEPALALLTQVGLGASILALLVCLGVYWLVWRVVVRNKISYFRHAALLNMVFCLLAADTCFLGAPFLSPG

SEQ ID NO: 15141 - protein, 85 aa, Homo sapiens
PRSPLCLAAAFLCHFLYLATFFWMLAQALVLAHQLLFVFHQLAKHRVLPLMVLLGYLCPLGLAGVTLGLYLPQGQYLREGECWLD

SEQ ID NO: 15142 - protein, 85 aa, Homo sapiens
GKGGALYTFVGPVLAIIGVNGLVLAMAMLKLLRPSLSEGPPAEKRQALLGVIKALLILTPIFGLTWGLGLATLLEEVSTVPHYIF

SEQ ID NO: 15143 - protein, 84 aa, Homo sapiens
GLTWGLGLATLLEEVSTVPHYIFTILNTLQGVFILLFGCLMDRKIQEALRKRFCRAQAPSSTISLATNEGCILEHSKGGSDTAR

SEQ ID NO: 15144 - protein, 85 aa, Homo sapiens
DQENGAGESALVSVYVHLDFPDKTWPPELSRTLTLPAASASSSPRPLLTGLRLTTECNVNHKGNFYCACLSGYQWNTSICLHYPP

SEQ ID NO: 15145 - protein, 85 aa, Homo sapiens
CQSLHNHQPCGCLVFSHPEPGYCQLLPPGSPVTCLPAVPGILNLNSQLQMPGDTLSLTLHLSQEATNLSWFLRHPGSPSPILLQP

SEQ ID NO: 15146 - protein, 85 aa, Homo sapiens
GTQVSVTSSHGQAALSVSNMSHHWAGEYMSCFEAQGFKWNLYEVVRVPLKATDVARLPYQLSISCATSPGFQLSCCIPSTNLAYT

SEQ ID NO: 15147 - protein, 85 aa, Homo sapiens
AAWSPGEGSKASSFNESGSQCFVLAVQRCPMADTTYACDLQSLGLAPLRVPISITIIQDGDITCPEDASVLTWNVTKAGHVAQAP

SEQ ID NO: 15148 - protein, 85 aa, Homo sapiens
CPESKRGIVRRLCGADGVWGPVHSSCTDARLLALFTRTKLLQAGQGSPAEEVPQILAQLPGQAAEASSPSDLLTLLSTMKYVAKV

SEQ ID NO: 15149 - protein, 85 aa, Homo sapiens
VAEARIQLDRRALKNLLIATDKVLDMDTRSLWTLAQARKPWAGSTLLLAVETLACSLCPQDHPFAFSLPNVLLQSQLFGPTFPAD

SEQ ID NO: 15150 - protein, 85 aa, Homo sapiens
YSISFPTRPPLQAQIPRHSLAPLVRNGTEISITSLVLRKLDHLLPSNYGQGLGDSLYATPGLVLVISIMAGDRAFSQGEVIMDFG

SEQ ID NO: 15151 - protein, 85 aa, Homo sapiens
NTDGSPHCVFWDHSLFQGRGGWSKEGCQAQVASASPTAQCLCQHLTAFSVLMSPHTVPEEPALALLTQVGLGASILALLVCLGVY

SEQ ID NO: 15152 - protein, 85 aa, Homo sapiens
WLVWRVVVRNKISYFRHAALLNMVFCLLAADTCFLGAPFLSPGPRSPLCLAAAFLCHFLYLATFFWMLAQALVLAHQLLFVFHQL

SEQ ID NO: 15153 - protein, 85 aa, Homo sapiens
AKHRVLPLMVLLGYLCPLGLAGVTLGLYLPQGQYLREGECWLDGKGGALYTFVGPVLAIIGVNGLVLAMAMLKLLRPSLSEGPPA

SEQ ID NO: 15154 - protein, 85 aa, Homo sapiens
EKRQALLGVIKALLILTPIFGLTWGLGLATLLEEVSTVPHYIFTILNTLQGVFILLFGCLMDRKIQEALRKRFCRAQAPSSTISL

SEQ ID NO: 15155 - protein, 85 aa, Homo sapiens
VKATLVLLPLLGITYMLFFVNPGEDEVSRVVFIYFNSFLESFQGFFVSVFYCFLNSEVRSAIRKRWHRWQDKHSIRARVARAMSI

SEQ ID NO: 15156 - protein, 85 aa, Homo sapiens
TSATEFENVGNQPPYSRINARWDAPDDELDNDNSSARLFERSRIKALADEREVVQKKTFTKWVNSHLARVSCRITDLYKDLRDGR

SEQ ID NO: 15157 - protein, 85 aa, Homo sapiens
MLIKLLEVLSGEMLPKPTKGKMRIHCLENVDKALQFLKEQRVHLENMGSHDIVDGNHRLVLGLIWTIILRFQIQDIVVQTQEGRE

SEQ ID NO: 15158 - protein, 85 aa, Homo sapiens
TRSAKDALLLWCQMKTAGYPHVNVTNFTSSWKDGLAFNALIHKHRPDLIDFDKLKDSNARHNLEHAFNVAERQLGIIPLLDPEDV

SEQ ID NO: 15159 - protein, 85 aa, Homo sapiens
FTENPDEKSIITYVVAFYHYFSKMKVLAVEGKRVGKVIDHAIETEKMIEKYSGLASDLLTWIEQTITVLNSRKFANSLTGVQQQL

SEQ ID NO: 15160 - protein, 85 aa, Homo sapiens
QAFSTYRTVEKPPKFQEKGNLEVLLFTIQSRMRANNQKVYTPHDGKLVSDINRAWESLEEAEYRRELALRNELIRQEKLEQLARR

SEQ ID NO: 15161 - protein, 85 aa, Homo sapiens
FDRKAAMRETWLSENQRLVAQDNFGYDLAAVEAAKKKHEAIETDTAAYEERVRALEDLAQELEKENYHDQKRITARKDNILRLWS

SEQ ID NO: 15162 - protein, 85 aa, Homo sapiens
YLQELLQSRRQRLETTLALQKLFQDMLHSIDWMDEIKAHLLSAEFGKHLLEVEDLLQKHKLMEADIAIQGDKVKAITAATLKFTE

SEQ ID NO: 15163 - protein, 85 aa, Homo sapiens
GKGYQPCDPQVIQDRISHLEQCFEELSNMAAGRKAQLEQSKRLWKFFWEMDEAESWIKEKEQIYSSLDYGKDLTSVLILQRKHKA

SEQ ID NO: 15164 - protein, 85 aa, Homo sapiens
FEDELRGLDAHLEQIFQEAHGMVARKQFGHPQIEARIKEVSAQWDQLKDLAAFCKKNLQDAENFFQFQGDADDLKAWLQDAHRLL

SEQ ID NO: 15165 - protein, 85 aa, Homo sapiens
SGEDVGQDEGATRALGKKHKDFLEELEESRGVMEHLEQQAQGFPEEFRDSPDVTHRLQALRELYQQVVAQADLRQQRLQEALDLY

SEQ ID NO: 15166 - protein, 85 aa, Homo sapiens
TVFGETDACELWMGEKEKWLAEMEMPDTLEDLEVVQHRFDILDQEMKTLMTQIDGVNLAANSLVESGHPRSREVKQYQDHLNTRW

SEQ ID NO: 15167 - protein, 85 aa, Homo sapiens
QAFQTLVSERREAVDSALRVHNYCVDCEETSKWITDKTKVVESTKDLGRDLAGIIAIQRKLSGLERDVAAIQARVDALERESQQL

SEQ ID NO: 15168 - protein, 85 aa, Homo sapiens
MDSHPEQKEDIGQRQKHLEELWQGLQQSLQGQEDLLGEVSQLQAFLQDLDDFQAWLSITQKAVASEDMPESLPEAEQLLQQHAGI

SEQ ID NO: 15169 - protein, 85 aa, Homo sapiens
KDEIDGHQDSYQRVKESGEKVIQGQTDPEYLLLGQRLEGLDTGWNALGRMWESRSHTLAQCLGFQEFQKDAKQAEAILSNQEYTL

SEQ ID NO: 15170 - protein, 85 aa, Homo sapiens
AHLEPPDSLEAAEAGIRKFEDFLGSMENNRDKVLSPVDSGNKLVAEGNLYSDKIKEKVQLIEDRHRKNNEKAQEASVLLRDNLEL

SEQ ID NO: 15171 - protein, 85 aa, Homo sapiens
QNFLQNCQELTLWINDKLLTSQDVSYDEARNLHNKWLKHQAFVAELASHEGWLENIDAEGKQLMDEKPQFTALVSQKLEALHRLW

SEQ ID NO: 15172 - protein, 85 aa, Homo sapiens
DELQATTKEKTQHLSAARSSDLRLQTHADLNKWISAMEDQLRSDDPGKDLTSVNRMLAKLKRVEDQVNVRKEELGELFAQVPSMG

SEQ ID NO: 15173 - protein, 85 aa, Homo sapiens
EEGGDADLSIEKRFLDLLEPLGRRKKQLESSRAKLQISRDLEDETLWVEERLPLAQSADYGTNLQTVQLFMKKNQTLQNEILGHT

SEQ ID NO: 15174 - protein, 85 aa, Homo sapiens
PRVEDVLQRGQQLVEAAEIDCQDLEERLGHLQSSWDRLREAAAGRLQRLRDANEAQQYYLDADEAEAWIGEQELYVISDEIPKDE

SEQ ID NO: 15175 - protein, 85 aa, Homo sapiens
EGAIVMLKRHLRQQRAVEDYGRNIKQLASRAQGLLSAGHPEGEQIIRLQGQVDKHYAGLKDVAEERKRKLENMYHLFQLKRETDD

SEQ ID NO: 15176 - protein, 85 aa, Homo sapiens
MEQWISEKELVASSPEMGQDFDHVTLLRDKFRDFARETGAIGQERVDNVNAFIERLIDAGHSEAATIAEWKDGLNEMWADLLELI

SEQ ID NO: 15177 - protein, 85 aa, Homo sapiens
DTRMQLLAASYDLHRYFYTGAEILGLIDEKHRELPEDVGLDASTAESFHRVHTAFERELHLLGVQVQQFQDVATRLQTAYAGEKA

SEQ ID NO: 15178 - protein, 85 aa, Homo sapiens
EAIQNKEQEVSAAWQALLDACAGRRTQLVDTADKFRFFSMARDLLSWMESIIRQIETQERPRDVSSVELLMKYHQGINAEIETRS

SEQ ID NO: 15179 - protein, 85 aa, Homo sapiens
KNFSACLELGESLLQRQHQASEEIREKLQQVMSRRKEMNEKWEARWERLRMLLEVCQFSRDASVAEAWLIAQEPYLASGDFGHTV

SEQ ID NO: 15180 - protein, 85 aa, Homo sapiens
DSVEKLIKRHEAFEKSTASWAERFAALEKPTTLELKERQIAERPAEETGPQEEEGETAGEAPVSHHAATERTSPGEEEGTWPQNL

SEQ ID NO: 15181 - protein, 85 aa, Homo sapiens
QQPPPPGQHKDGQKSTGDERPTTEPLFKVLDTPLSEGDEPATLPAPRDHGQSVQMEGYLGRKHDLEGPNKKASNRSWNNLYCVLR

SEQ ID NO: 15182 - protein, 85 aa, Homo sapiens
NSELTFYKDAKNLALGMPYHGEEPLALRHAICEIAANYKKKKHVFKLRLSNGSEWLFHGKDEEEMLSWLQGVSTAINESQSIRVK

SEQ ID NO: 15183 - protein, 84 aa, Homo sapiens
IAANYKKKKHVFKLRLSNGSEWLFHGKDEEEMLSWLQGVSTAINESQSIRVKAQSLPLPSLSGPDASLGKKDKEKRFSFFPKKK

SEQ ID NO: 15184 - protein, 85 aa, Homo sapiens
RIKALADEREVVQKKTFTKWVNSHLARVSCRITDLYKDLRDGRMLIKLLEVLSGEMLPKPTKGKMRIHCLENVDKALQFLKEQRV

SEQ ID NO: 15185 - protein, 85 aa, Homo sapiens
HLENMGSHDIVDGNHRLVLGLIWTIILRFQIQDIVVQTQEGRETRSAKDALLLWCQMKTAGYPHVNVTNFTSSWKDGLAFNALIH

SEQ ID NO: 15186 - protein, 85 aa, Homo sapiens
KHRPDLIDFDKLKDSNARHNLEHAFNVAERQLGIIPLLDPEDVFTENPDEKSIITYVVAFYHYFSKMKVLAVEGKRVGKVIDHAI

SEQ ID NO: 15187 - protein, 85 aa, Homo sapiens
ETEKMIEKYSGLASDLLTWIEQTITVLNSRKFANSLTGVQQQLQAFSTYRTVEKPPKFQEKGNLEVLLFTIQSRMRANNQKVYTP

SEQ ID NO: 15188 - protein, 85 aa, Homo sapiens
HDGKLVSDINRAWESLEEAEYRRELALRNELIRQEKLEQLARRFDRKAAMRETWLSENQRLVAQDNFGYDLAAVEAAKKKHEAIE

SEQ ID NO: 15189 - protein, 85 aa, Homo sapiens
TDTAAYEERVRALEDLAQELEKENYHDQKRITARKDNILRLWSYLQELLQSRRQRLETTLALQKLFQDMLHSIDWMDEIKAHLLS

SEQ ID NO: 15190 - protein, 85 aa, Homo sapiens
AEFGKHLLEVEDLLQKHKLMEADIAIQGDKVKAITAATLKFTEGKGYQPCDPQVIQDRISHLEQCFEELSNMAAGRKAQLEQSKR

SEQ ID NO: 15191 - protein, 85 aa, Homo sapiens
LWKFFWEMDEAESWIKEKEQIYSSLDYGKDLTSVLILQRKHKAFEDELRGLDAHLEQIFQEAHGMVARKQFGHPQIEARIKEVSA

SEQ ID NO: 15192 - protein, 85 aa, Homo sapiens
QWDQLKDLAAFCKKNLQDAENFFQFQGDADDLKAWLQDAHRLLSGEDVGQDEGATRALGKKHKDFLEELEESRGVMEHLEQQAQG

SEQ ID NO: 15193 - protein, 85 aa, Homo sapiens
FPEEFRDSPDVTHRLQALRELYQQVVAQADLRQQRLQEALDLYTVFGETDACELWMGEKEKWLAEMEMPDTLEDLEVVQHRFDIL

SEQ ID NO: 15194 - protein, 85 aa, Homo sapiens
DQEMKTLMTQIDGVNLAANSLVESGHPRSREVKQYQDHLNTRWQAFQTLVSERREAVDSALRVHNYCVDCEETSKWITDKTKVVE

SEQ ID NO: 15195 - protein, 85 aa, Homo sapiens
STKDLGRDLAGIIAIQRKLSGLERDVAAIQARVDALERESQQLMDSHPEQKEDIGQRQKHLEELWQGLQQSLQGQEDLLGEVSQL

SEQ ID NO: 15196 - protein, 85 aa, Homo sapiens
QAFLQDLDDFQAWLSITQKAVASEDMPESLPEAEQLLQQHAGIKDEIDGHQDSYQRVKESGEKVIQGQTDPEYLLLGQRLEGLDT

SEQ ID NO: 15197 - protein, 85 aa, Homo sapiens
GWNALGRMWESRSHTLAQCLGFQEFQKDAKQAEAILSNQEYTLAHLEPPDSLEAAEAGIRKFEDFLGSMENNRDKVLSPVDSGNK

SEQ ID NO: 15198 - protein, 85 aa, Homo sapiens
MVAEGNLYSDKIKEKVQLIEDRHRKNNEKAQEASVLLRDNLELQNFLQNCQELTLWINDKLLTSQDVSYDEARNLHNKWLKHQAF

SEQ ID NO: 15199 - protein, 85 aa, Homo sapiens
VAELASHEGWLENIDAEGKQLMDEKPQFTALVSQKLEALHRLWDELQATTKEKTQHLSAARSSDLRLQTHADLNKWISAMEDQLR

SEQ ID NO: 15200 - protein, 85 aa, Homo sapiens
SDDPGKDLTSVNRMLAKLKRVEDQVNVRKEELGELFAQVPSMGEEGGDADLSIEKRFLDLLEPLGRRKKQLESSRAKLQISRDLE

SEQ ID NO: 15201 - protein, 85 aa, Homo sapiens
DETLWVEERLPLAQSADYGTNLQTVQLFMKKNQTLQNEILGHTPRVEDVLQRGQQLVEAAEIDCQDLEERLGHLQSSWDRLREAA

SEQ ID NO: 15202 - protein, 85 aa, Homo sapiens
AGRLQRLRDANEAQQYYLDADEAEAWIGEQELYVISDEIPKDEEGAIVMLKRHLRQQRAVEDYGRNIKQLASRAQGLLSAGHPEG

SEQ ID NO: 15203 - protein, 85 aa, Homo sapiens
EQIIRLQGQVDKHYAGLKDVAEERKRKLENMYHLFQLKRETDDLEQWISEKELVASSPEMGQDFDHVTLLRDKFRDFARETGAIG

SEQ ID NO: 15204 - protein, 85 aa, Homo sapiens
QERVDNVNAFIERLIDAGHSEAATIAEWKDGLNEMWADLLELIDTRMQLLAASYDLHRYFYTGAEILGLIDEKHRELPEDVGLDA

SEQ ID NO: 15205 - protein, 85 aa, Homo sapiens
STAESFHRVHTAFERELHLLGVQVQQFQDVATRLQTAYAGEKAEAIQNKEQEVSAAWQALLDACAGRRTQLVDTADKFRFFSMAR

SEQ ID NO: 15206 - protein, 85 aa, Homo sapiens
DLLSWMESIIRQIETQERPRDVSSVELLMKYHQGINAEIETRSKNFSACLELGESLLQRQHQASEEIREKLQQVMSRRKEMNEKW

SEQ ID NO: 15207 - protein, 85 aa, Homo sapiens
EARWERLRMLLEVCQFSRDASVAEAWLIAQEPYLASGDFGHTVDSVEKLIKRHEAFEKSTASWAERFAALEKPTTLELKERQIAE

SEQ ID NO: 15208 - protein, 85 aa, Homo sapiens
RPAEETGPQEEEGETAGEAPVSHHAATERTSPGEEEGTWPQNLQQPPPPGQHKDGQKSTGDERPTTEPLFKVLDTPLSEGDEPAT

SEQ ID NO: 15209 - protein, 85 aa, Homo sapiens
MPAPRDHGQSVQMEGYLGRKHDLEGPNKKASNRSWNNLYCVLRNSELTFYKDAKNLALGMPYHGEEPLALRHAICEIAANYKKKK

SEQ ID NO: 15210 - protein, 85 aa, Homo sapiens
RLEGEGRSARAGQNLSRAGSARRGAPRDLSMNNLTELQPGLFHHLRFLEELRLSGNHLSHIPGQAFSGLYSLKILMLQNNQLGGI

SEQ ID NO: 15211 - protein, 85 aa, Homo sapiens
PAEALWELPSLQSLDLNYNKLQEFPVAIRTLGRLQELGFHNNNIKAIPEKAFMGNPLLQTIHFYDNPIQFVGRSAFQYLPKLHTL

SEQ ID NO: 15212 - protein, 85 aa, Homo sapiens
SLNGAMDIQEFPDLKGTTSLEILTLTRAGIRLLPSGMCQQLPRLRVLELSHNQIEELPSLHRCQKLEEIGLQHNRIWEIGADTFS

SEQ ID NO: 15213 - protein, 85 aa, Homo sapiens
QLSSLQALDLSWNAIRSIHPEAFSTLHSLVKLDLTDNQLTTLPLAGLGGLMHLKLKGNLALSQAFSKDSFPKLRILEVPYAYQCC

SEQ ID NO: 15214 - protein, 85 aa, Homo sapiens
PYGMCASFFKASGQWEAEDLHLDDEESSKRPLGLLARQAENHYDQDLDELQLEMEDSKPHPSVQCSPTPGPFKPCEYLFESWGIR

SEQ ID NO: 15215 - protein, 85 aa, Homo sapiens
MAVWAIVLLSVLCNGLVLLTVFAGGPVPLPPVKFVVGAIAGANTLTGISCGLLASVDALTFGQFSEYGARWETGLGCRATGFLAV

SEQ ID NO: 15216 - protein, 85 aa, Homo sapiens
LGSEASVLLLTLAAVQCSVSVSCVRAYGKSPSLGSVRAGVLGCLALAGLAAALPLASVGEYGASPLCLPYAPPEGQPAALGFTVA

SEQ ID NO: 15217 - protein, 85 aa, Homo sapiens
MVMMNSFCFLVVAGAYIKLYCDLPRGDFEAVWDCAMVRHVAWLIFADGLLYCPVAFLSFASMLGLFPVTPEAVKSVLLVVLPLPA

SEQ ID NO: 15218 - protein, 85 aa, Homo sapiens
CLNPLLYLLFNPHFRDDLRRLRPRAGDSGPLAYAAAGELEKSSCDSTQALVAFSDVDLILEASEAGRPPGLETYGFPSVTLISCQ

SEQ ID NO: 15219 - protein, 85 aa, Homo sapiens
HHLRFLEELRLSGNHLSHIPGQAFSGLYSLKILMLQNNQLGGIPAEALWELPSLQSLDLNYNKLQEFPVAIRTLGRLQELGFHNN

SEQ ID NO: 15220 - protein, 85 aa, Homo sapiens
NIKAIPEKAFMGNPLLQTIHFYDNPIQFVGRSAFQYLPKLHTLSLNGAMDIQEFPDLKGTTSLEILTLTRAGIRLLPSGMCQQLP

SEQ ID NO: 15221 - protein, 85 aa, Homo sapiens
RLRVLELSHNQIEELPSLHRCQKLEEIGLQHNRIWEIGADTFSQLSSLQALDLSWNAIRSIHPEAFSTLHSLVKLDLTDNQLTTL

SEQ ID NO: 15222 - protein, 85 aa, Homo sapiens
PLAGLGGLMHLKLKGNLALSQAFSKDSFPKLRILEVPYAYQCCPYGMCASFFKASGQWEAEDLHLDDEESSKRPLGLLARQAENH

SEQ ID NO: 15223 - protein, 85 aa, Homo sapiens
YDQDLDELQLEMEDSKPHPSVQCSPTPGPFKPCEYLFESWGIRLAVWAIVLLSVLCNGLVLLTVFAGGPVPLPPVKFVVGAIAGA

SEQ ID NO: 15224 - protein, 85 aa, Homo sapiens
NTLTGISCGLLASVDALTFGQFSEYGARWETGLGCRATGFLAVLGSEASVLLLTLAAVQCSVSVSCVRAYGKSPSLGSVRAGVLG

SEQ ID NO: 15225 - protein, 85 aa, Homo sapiens
CLALAGLAAALPLASVGEYGASPLCLPYAPPEGQPAALGFTVALVMMNSFCFLVVAGAYIKLYCDLPRGDFEAVWDCAMVRHVAW

SEQ ID NO: 15226 - protein, 85 aa, Homo sapiens
LIFADGLLYCPVAFLSFASMLGLFPVTPEAVKSVLLVVLPLPACLNPLLYLLFNPHFRDDLRRLRPRAGDSGPLAYAAAGELEKS

SEQ ID NO: 15227 - protein, 85 aa, Homo sapiens
SCDSTQALVAFSDVDLILEASEAGRPPGLETYGFPSVTLISCQQPGAPRLEGSHCVEPEGNHFGNPQPSMDGELLLRAEGSTPAG

SEQ ID NO: 15228 - protein, 84 aa, Homo sapiens
RPFQCCQCSYASRDTYKLKRHMRTHSGEKPYECHICHTRFTQSGTMKIHILQKHGENVPKYQCPHCATIIARKSDLRFLGLPFP

SEQ ID NO: 15229 - protein, 85 aa, Homo sapiens
VLAVLWCSMAQTLLLPSFIWSCERYRADVRTVWEQCVAIMSEEDGDDDGGCDDYAEGRVCKVRFDANGATGPGSRDPAQVKLLPG

SEQ ID NO: 15230 - protein, 85 aa, Homo sapiens
RHMLFPPLERVHYLQVPLSRRLSHDETNIFSTPREPGSFLHKWSSSDDIRVLPAQSRALGGPPEYLGQRHRLEDEEDEEEAEGGG

SEQ ID NO: 15231 - protein, 85 aa, Homo sapiens
MASLRQFLESGVLGSGGGPPRGPGFFREEITTFIDETPLPSPTASPGHSPRRPRPLGLSPRRLSLGSPESRAVGLPLGLSAGRRC

SEQ ID NO: 15232 - protein, 85 aa, Homo sapiens
EDGDDDGGCDDYAEGRVCKVRFDANGATGPGSRDPAQVKLLPGRHMLFPPLERVHYLQVPLSRRLSHDETNIFSTPREPGSFLHK

SEQ ID NO: 15233 - protein, 85 aa, Homo sapiens
WSSSDDIRVLPAQSRALGGPPEYLGQRHRLEDEEDEEEAEGGGLASLRQFLESGVLGSGGGPPRGPGFFREEITTFIDETPLPSP

SEQ ID NO: 15234 - protein, 85 aa, Homo sapiens
PLCVFFRVVPQRLPGADQEISICTLIWPTIPGEISWDVSFVTLNFLVPGLVIVISYSKILQTSEHLLDARAVVTHSEITKASRKR

SEQ ID NO: 15235 - protein, 85 aa, Homo sapiens
LTVSLAYSESHQIRVSQQDFRLFRTLFLLMVSFFIMWSPIIITILLILIQNFKQDLVIWPSLFFWVVAFTFANSALNPILYNMTL

SEQ ID NO: 15236 - protein, 85 aa, Homo sapiens
MNFLVPGLVIVISYSKILQTSEHLLDARAVVTHSEITKASRKRLTVSLAYSESHQIRVSQQDFRLFRTLFLLMVSFFIMWSPIII

SEQ ID NO: 15237 - protein, 85 aa, Homo sapiens
PRGQKSKLRAREKRRKARDETRGLNVPQVTEAEEEEAPCCSSSVSGGAASSSPAAGIPQEPQRAPTTAAAAAAGVSSTKSKKGAK

SEQ ID NO: 15238 - protein, 85 aa, Homo sapiens
SHQGEKNASSSQASTSTKSPSEDPLTRKSGSLVQFLLYKYKIKKSVTKGEMLKIVGKRFREHFPEILKKASEGLSVVFGLELNKV

SEQ ID NO: 15239 - protein, 85 aa, Homo sapiens
NPNGHTYTFIDKVDLTDEESLLSSWDFPRRKLLMPLLGVIFLNGNSATEEEIWEFLNMLGVYDGEEHSVFGEPWKLITKDLVQEK

SEQ ID NO: 15240 - protein, 84 aa, Homo sapiens
EEHSVFGEPWKLITKDLVQEKYLEYKQVPSSDPPRFQFLWGPRAYAETSKMKVLEFLAKVNGTTPCAFPTHYEEALKDEEKAGV

SEQ ID NO: 15241 - protein, 85 aa, Homo sapiens
SVSGGAASSSPAAGIPQEPQRAPTTAAAAAAGVSSTKSKKGAKSHQGEKNASSSQASTSTKSPSEDPLTRKSGSLVQFLLYKYKI

SEQ ID NO: 15242 - protein, 85 aa, Homo sapiens
KKSVTKGEMLKIVGKRFREHFPEILKKASEGLSVVFGLELNKVNPNGHTYTFIDKVDLTDEESLLSSWDFPRRKLLMPLLGVIFL

SEQ ID NO: 15243 - protein, 85 aa, Homo sapiens
NGNSATEEEIWEFLNMLGVYDGEEHSVFGEPWKLITKDLVQEKYLEYKQVPSSDPPRFQFLWGPRAYAETSKMKVLEFLAKVNGT

SEQ ID NO: 15244 - protein, 85 aa, Homo sapiens
KLWMESHLIVPETRPSPRMMSNQTLVTEFILQGFSEHPEYRVFLFSCFLFLYSGALTGNVLITLAITFNPGLHAPMYFFLLNLAT

SEQ ID NO: 15245 - protein, 85 aa, Homo sapiens
MDIICTSSIMPKALASLVSEESSISYGGCMAQLYFLTWAASSELLLLTVMAYDRYAAICHPLHYSSMMSKVFCSGLATAVWLLCA

SEQ ID NO: 15246 - protein, 85 aa, Homo sapiens
VNTAIHTGLMLRLDFCGPNVIIHFFCEVPPLLLLSCSSTYVNGVMIVLADAFYGIVNFLMTIASYGFIVSSILKVKTAWGRQKAF

SEQ ID NO: 15247 - protein, 84 aa, Homo sapiens
KVKTAWGRQKAFSTCSSHLTVVCMYYTAVFYAYISPVSGYSAGKSKLAGLLYTVLSPTLNPLIYTLRNKEVKAALRKLFPFFRN

SEQ ID NO: 15248 - protein, 85 aa, Homo sapiens
FLFSCFLFLYSGALTGNVLITLAITFNPGLHAPMYFFLLNLATMDIICTSSIMPKALASLVSEESSISYGGCMAQLYFLTWAASS

SEQ ID NO: 15249 - protein, 85 aa, Homo sapiens
ELLLLTVMAYDRYAAICHPLHYSSMMSKVFCSGLATAVWLLCAVNTAIHTGLMLRLDFCGPNVIIHFFCEVPPLLLLSCSSTYVN

SEQ ID NO: 15250 - protein, 85 aa, Homo sapiens
GVMIVLADAFYGIVNFLMTIASYGFIVSSILKVKTAWGRQKAFSTCSSHLTVVCMYYTAVFYAYISPVSGYSAGKSKLAGLLYTV

SEQ ID NO: 15251 - protein, 85 aa, Homo sapiens
MSTGVVSFFSLKSDSAPPWMVLAVLWCSMAQTLLLPSFIWSCERYRADVRTVWEQCVAIMSEEDGDDDGGCDDYAEGRVCKVRFD

SEQ ID NO: 15252 - protein, 85 aa, Homo sapiens
ANGATGPGSRDPAQVKLLPGRHMLFPPLERVHYLQVPLSRRLSHDETNIFSTPREPGSFLHKWSSSDDIRVLPAQSRALGGPPEY

SEQ ID NO: 15253 - protein, 85 aa, Homo sapiens
MGQRHRLEDEEDEEEAEGGGLASLRQFLESGVLGSGGGPPRGPGFFREEITTFIDETPLPSPTASPGHSPRRPRPLGLSPRRLSL

SEQ ID NO: 15254 - protein, 85 aa, Homo sapiens
ERYRADVRTVWEQCVAIMSEEDGDDDGGCDDYAEGRVCKVRFDANGATGPGSRDPAQVKLLPGRHMLFPPLERVHYLQVPLSRRL

SEQ ID NO: 15255 - protein, 85 aa, Homo sapiens
SHDETNIFSTPREPGSFLHKWSSSDDIRVLPAQSRALGGPPEYLGQRHRLEDEEDEEEAEGGGLASLRQFLESGVLGSGGGPPRG

SEQ ID NO: 15256 - protein, 85 aa, Homo sapiens
PGFFREEITTFIDETPLPSPTASPGHSPRRPRPLGLSPRRLSLGSPESRAVGLPLGLSAGRRCSLTGGEESARAWGGSWGPGNPI

SEQ ID NO: 15257 - protein, 85 aa, Homo sapiens
WSGPPQPDQGLPPPLAAVPVPWKSTDPCQGHRESPGALVETSAGEEAQGQEGPAAAQLDVLRLRSSSMEIREKGSEFLKEELHRA

SEQ ID NO: 15258 - protein, 85 aa, Homo sapiens
QKELKLKDEECERLSKVREQLEQELEELTASLFEEAHKMVREANMKQAASEKQLKEARGKIDMLQAEVTALKTLVITSTPASPNR

SEQ ID NO: 15259 - protein, 85 aa, Homo sapiens
ELHPQLLSPTKAGPRKGHSRHKSTSSTLCPAVCPAAGHTLTPDREGKEVDTILFAEFQAWRESPTLDKTCPFLERVYREDVGPCL

SEQ ID NO: 15260 - protein, 85 aa, Homo sapiens
DFTMQELSVLVRAAVEDNTLTIEPVASQTLPTVKVAEVDCSSTNTCALSGLTRTCRHRIRLGDSKSHYYISPSSRARITAVCNFF

SEQ ID NO: 15261 - protein, 85 aa, Homo sapiens
AGEEAQGQEGPAAAQLDVLRLRSSSMEIREKGSEFLKEELHRAQKELKLKDEECERLSKVREQLEQELEELTASLFEEAHKMVRE

SEQ ID NO: 15262 - protein, 85 aa, Homo sapiens
ANMKQAASEKQLKEARGKIDMLQAEVTALKTLVITSTPASPNRELHPQLLSPTKAGPRKGHSRHKSTSSTLCPAVCPAAGHTLTP

SEQ ID NO: 15263 - protein, 85 aa, Homo sapiens
DREGKEVDTILFAEFQAWRESPTLDKTCPFLERVYREDVGPCLDFTMQELSVLVRAAVEDNTLTIEPVASQTLPTVKVAEVDCSS

SEQ ID NO: 15264 - protein, 85 aa, Homo sapiens
FKCSMCKYASVEASKLKRHVRSHTGERPFQCCQCSYASRDTYKLKRHMRTHSEATSKRSLQEIPRCKFHPDCLQMLQVWQRLFPL

SEQ ID NO: 15265 - protein, 84 aa, Homo sapiens
CSMCKYASVEASKLKRHVRSHTGERPFQCCQCSYASRDTYKLKRHMRTHSEATSKRSLQEIPRCKFHPDCLQMLQVWQRLFPLD

SEQ ID NO: 15266 - protein, 85 aa, Homo sapiens
QGHFPAERREGRPRRGTRGQQQLLVSPRFLRAWHPPPVSARMPTRRWAPGTQCITKCEHTRPKPGELAFRKGDVVTILEACENKS

SEQ ID NO: 15267 - protein, 85 aa, Homo sapiens
WYRVKHHTSGQEGLLAAGALREREALSADPKLSLMPWFHGKISGQEAVQQLQPPEDGLFLVRESARHPGDYVLCVSFGRDVIHYR

SEQ ID NO: 15268 - protein, 85 aa, Homo sapiens
VLHRDGHLTIDEAVFFCNLMDMVEHYSKDKGAICTKLVRPKRKHGTKSAEEELARAGWLLNLQHLTLGAQIGEGEFGAVLQGEYL

SEQ ID NO: 15269 - protein, 85 aa, Homo sapiens
GQKVAVKNIKCDVTAQAFLDETAVMTKMQHENLVRLLGVILHQGLYIVMEHVSKGNLVNFLRTRGRALVNTAQLLQFSLHVAEGM

SEQ ID NO: 15270 - protein, 85 aa, Homo sapiens
EYLESKKLVHRDLAARNILVSEDLVAKVSDFGLAKAERKGLDSSRLPVKWTAPEALKHGKFTSKSDVWSFGVLLWEVFSYGRAPY

SEQ ID NO: 15271 - protein, 85 aa, Homo sapiens
FKCSMCKYASVEERHMTAHIRTHTGEKPFTCLSCNKCFRQKQLLNAHFRKYHDANFIPTVYKCSKCGKGFSRWILWVGNSEVAEL

SEQ ID NO: 15272 - protein, 84 aa, Homo sapiens
TVYKCSKCGKGFSRWILWVGNSEVAELGGPGSGPLLRLQSGCPPGLHHPKAGLGPEDPLPGQLRHTTAGTGLSSLLQGPLCRAA

SEQ ID NO: 15273 - protein, 85 aa, Homo sapiens
MLRNHVNTHTGTRPYKCNDCNMAFVTSGELVRHRRYKHTHEKPFKCSMCKYASVEERHMTAHIRTHTGEKPFTCLSCNKCFRQKQ

SEQ ID NO: 15274 - protein, 85 aa, Homo sapiens
LLNAHFRKYHDANFIPTVYKCSKCGKGFSRWILWVGNSEVAELGGPGSGPLLRLQSGCPPGLHHPKAGLGPEDPLPGQLRHTTAG

SEQ ID NO: 15275 - protein, 85 aa, Homo sapiens
DSVEKLIKRHEAFEKSTASWAERFAALEKPTTLELKERQIAERPAEETGPQEEEGETAGEAPVSHHAATERTSPVSLWSRLSSSW

SEQ ID NO: 15276 - protein, 84 aa, Homo sapiens
FEKSTASWAERFAALEKPTTLELKERQIAERPAEETGPQEEEGETAGEAPVSHHAATERTSPVSLWSRLSSSWESLQPEPSHPY

SEQ ID NO: 15277 - protein, 84 aa, Homo sapiens
HCSYACKQERHMTAHIRTHTGEKPFTCLSCNKCFRQKQLLNAHFRKYHDANFIPTVYKCSKCGKGFSRWITSKWSGLKPQTFIT

SEQ ID NO: 15278 - protein, 85 aa, Homo sapiens
CSRIVGALERIGGAALSPHAQHISVNARNVALEAYLIKPHSYVGLTCTAFQRREGGVPGTRPGSPGQNPPPEPEPPADQQLRFRC

SEQ ID NO: 15279 - protein, 85 aa, Homo sapiens
TTGRPNVSLSSFHIKNSVALASIQLPPSLFSSLPAALAPPVPPDCTLQLLVFRNGRLFHSHSNTSRPGAAGPGKRRGVATPVIFA

SEQ ID NO: 15280 - protein, 85 aa, Homo sapiens
GTSGCGVGNLTEPVAVSLRHWAEGAEPVAAWWSQEGPGEAGGWTSEGCQLRSSQPNVSALHCQHLGNVAVLMELSAFPREVGGAG

SEQ ID NO: 15281 - protein, 85 aa, Homo sapiens
AGLHPVVYPCTALLLLCLFATIITYILNHSSIRVSRKGWHMLLNLCFHIAMTSAVFAGGITLTNYQMVCQAVGITLHYSSLSTLL

SEQ ID NO: 15282 - protein, 85 aa, Homo sapiens
WMGVKARVLHKELTWRAPPPQEGDPALPTPSPMLRFYLIAGGIPLIICGITAAVNIHNYRDHSPYCWLVWRPSLGAFYIPVALIL

SEQ ID NO: 15283 - protein, 85 aa, Homo sapiens
LITWIYFLCAGLRLRGPLAQNPKAGNSRASLEAGEELRGSTRLRGSGPLLSDSGSLLATGSARVGTPGPPEDGDSLYSPGVQLGA

SEQ ID NO: 15284 - protein, 85 aa, Homo sapiens
MVTTHFLYLAMWACGALAVSQRWLPRVVCSCLYGVAASALGLFVFTHHCARRRDVRASWRACCPPASPAAPHAPPRALPAAAEDG

SEQ ID NO: 15285 - protein, 85 aa, Homo sapiens
SPVFGEGPPSLKSSPSGSSGHPLALGPCKLTNLQLAQSQVCEAGAAAGGEGEPEPAGTRGNLAHRHPNNVHHGRRAHKSRAKGHR

SEQ ID NO: 15286 - protein, 85 aa, Homo sapiens
AGEACGKNRLKALRGGAAGALELLSSESGSLHNSPTDSYLGSSRNSPGAGLQLEGEPMLTPSEGSDTSAAPLSEAGRAGQRRSAS

SEQ ID NO: 15287 - protein, 85 aa, Homo sapiens
MIQKFLGYVDQIKELVEVMVDMASNLMLVDEHLLWLAQREDKACSRIVGALERIGGAALSPHAQHISVNARNVALEAYLIKPHSY

SEQ ID NO: 15288 - protein, 85 aa, Homo sapiens
VGLTCTAFQRREGGVPGTRPGSPGQNPPPEPEPPADQQLRFRCTTGRPNVSLSSFHIKNSVALASIQLPPSLFSSLPAALAPPVP

SEQ ID NO: 15289 - protein, 85 aa, Homo sapiens
PDCTLQLLVFRNGRLFHSHSNTSRPGAAGPGKRRGVATPVIFAGTSGCGVGNLTEPVAVSLRHWAEGAEPVAAWWSQEGPGEAGG

SEQ ID NO: 15290 - protein, 85 aa, Homo sapiens
WTSEGCQLRSSQPNVSALHCQHLGNVAVLMELSAFPREVGGAGAGLHPVVYPCTALLLLCLFATIITYILNHSSIRVSRKGWHML

SEQ ID NO: 15291 - protein, 85 aa, Homo sapiens
MNLCFHIAMTSAVFAGGITLTNYQMVCQAVGITLHYSSLSTLLWMGVKARVLHKELTWRAPPPQEGDPALPTPSPMLRFYLIAGG

SEQ ID NO: 15292 - protein, 85 aa, Homo sapiens
IPLIICGITAAVNIHNYRDHSPYCWLVWRPSLGAFYIPVALILLITWIYFLCAGLRLRGPLAQNPKAGNSRASLEAGEELRGSTR

SEQ ID NO: 15293 - protein, 85 aa, Homo sapiens
LRGSGPLLSDSGSLLATGSARVGTPGPPEDGDSLYSPGVQLGALVTTHFLYLAMWACGALAVSQRWLPRVVCSCLYGVAASALGL

SEQ ID NO: 15294 - protein, 85 aa, Homo sapiens
FVFTHHCARRRDVRASWRACCPPASPAAPHAPPRALPAAAEDGSPVFGEGPPSLKSSPSGSSGHPLALGPCKLTNLQLAQSQVCE

SEQ ID NO: 15295 - protein, 85 aa, Homo sapiens
AGAAAGGEGEPEPAGTRGNLAHRHPNNVHHGRRAHKSRAKGHRAGEACGKNRLKALRGGAAGALELLSSESGSLHNSPTDSYLGS

SEQ ID NO: 15296 - protein, 85 aa, Homo sapiens
SRNSPGAGLQLEGEPMLTPSEGSDTSAAPLSEAGRAGQRRSASRDSLKGGGALEKESHRRSYPLNAASLNGAPKGGKYDDVTLMG

SEQ ID NO: 15297 - protein, 84 aa, Homo sapiens
LSSVFAGPQLPLHHPSFHHADLQCKNHLHPDTGPSSGPPRTTTESVQEQYTKSTAEDSKNDGCICHFIYCLLDSLLCPRNLVLV

SEQ ID NO: 15298 - protein, 85 aa, Homo sapiens
AFMMVVISLDRSLAITRPLALKSNSKVGQSMVGLAWILSSVFAGPQLPLHHPSFHHADLQCKNHLHPDTGPSSGPPRTTTESVQE

SEQ ID NO: 15299 - protein, 85 aa, Homo sapiens
FTSSRMSSFNRHMKTHTSEKPHLCHLCLKTFRTVTLLRNHVNTHTGTRPYKCNDCNMAFVTSGELVRHRRYKHTHEKPFKCSMCK

SEQ ID NO: 15300 - protein, 85 aa, Homo sapiens
YASVEASKLKRHVRSHTGERPFQCCQCSYASRDTYKLKRHMRTHSGEKPYECHICHTRFTQSGTMKIHILQKHGENVPKYQCPHC

SEQ ID NO: 15301 - protein, 85 aa, Homo sapiens
ATIIARKSDLRVHMRNLHAYSAAELKCRYCSAVFHERYALIQHQKTHKNEKRFKCKHCSYACKQERHMTAHIRTHTGEKPFTCLS

SEQ ID NO: 15302 - protein, 84 aa, Homo sapiens
KTHKNEKRFKCKHCSYACKQERHMTAHIRTHTGEKPFTCLSCNKCFRQKQLLNAHFRKYHDANFIPTVYKCSKCGKGFSRWVLY

SEQ ID NO: 15303 - protein, 85 aa, Homo sapiens
THTGTRPYKCNDCNMAFVTSGELVRHRRYKHTHEKPFKCSMCKYASVEASKLKRHVRSHTGERPFQCCQCSYASRDTYKLKRHMR

SEQ ID NO: 15304 - protein, 85 aa, Homo sapiens
THSGEKPYECHICHTRFTQSGTMKIHILQKHGENVPKYQCPHCATIIARKSDLRVHMRNLHAYSAAELKCRYCSAVFHERYALIQ

SEQ ID NO: 15305 - protein, 85 aa, Homo sapiens
HQKTHKNEKRFKCKHCSYACKQERHMTAHIRTHTGEKPFTCLSCNKCFRQKQLLNAHFRKYHDANFIPTVYKCSKCGKGFSRWVL

SEQ ID NO: 15306 - protein, 85 aa, Homo sapiens
YLESKKLVHRDLAARNILVSEDLVAKVSDFGLAKAERKGLDSSRLPVKWTAPEALKHGFTSKSDVWSFGVLLWEVFSYGRAPYPK

SEQ ID NO: 15307 - protein, 85 aa, Homo sapiens
SRLPVKWTAPEALKHGFTSKSDVWSFGVLLWEVFSYGRAPYPKMSLKEVSEAVEKGYRMEPPEGCPGPVHVLMSSCWEAEPARRP

SEQ ID NO: 15308 - protein, 85 aa, Homo sapiens
FSPWKISMFLSVREDSVPTTASFSADMLNVTLQGPTLNGTFAQSKCPQVEWLGWLNTIQPPFLWVLFVLATLENIFVLSVFCLHK

SEQ ID NO: 15309 - protein, 85 aa, Homo sapiens
SSCTVAEIYLGNLAAADLILACGLPFWAITISNNFDWLFGETLCRVVNAIISMNLYSSICFLMLVSIDRYLALVKTMSMGRMRGV

SEQ ID NO: 15310 - protein, 85 aa, Homo sapiens
RWAKLYSLVIWGCTLLLSSPMLVFRTMKEYSDEGHNVTACVISYPSLIWEVFTNMLLNVVGFLLPLSVITFCTMQIMQVLRNNEM

SEQ ID NO: 15311 - protein, 85 aa, Homo sapiens
QKFKEIQTERRATVLVLVVLLLFIICWLPFQISTFLDTLHRLGILSSCQDERIIDVITQIASFMAYSNSCLNPLVYVIVGKRFRK

SEQ ID NO: 15312 - protein, 84 aa, Homo sapiens
RIIDVITQIASFMAYSNSCLNPLVYVIVGKRFRKKSWEVYQGVCQKGGCRSEPIQMENSMGTLRTSISVERQIHKLQDWAGSRQ

SEQ ID NO: 15313 - protein, 85 aa, Homo sapiens
QSKCPQVEWLGWLNTIQPPFLWVLFVLATLENIFVLSVFCLHKSSCTVAEIYLGNLAAADLILACGLPFWAITISNNFDWLFGET

SEQ ID NO: 15314 - protein, 85 aa, Homo sapiens
LCRVVNAIISMNLYSSICFLMLVSIDRYLALVKTMSMGRMRGVRWAKLYSLVIWGCTLLLSSPMLVFRTMKEYSDEGHNVTACVI

SEQ ID NO: 15315 - protein, 85 aa, Homo sapiens
SYPSLIWEVFTNMLLNVVGFLLPLSVITFCTMQIMQVLRNNEMQKFKEIQTERRATVLVLVVLLLFIICWLPFQISTFLDTLHRL

SEQ ID NO: 15316 - protein, 85 aa, Homo sapiens
GILSSCQDERIIDVITQIASFMAYSNSCLNPLVYVIVGKRFRKKSWEVYQGVCQKGGCRSEPIQMENSMGTLRTSISVERQIHKL

SEQ ID NO: 15317 - protein, 85 aa, Homo sapiens
ASYIDQDMQVLWYQDGRIVETDESQGIFVEKNMIHNCSLIASALTISNIQAGSTGNWGCHVQTKRGNNTRTVDIVVLESSAQYCP

SEQ ID NO: 15318 - protein, 85 aa, Homo sapiens
WYQDGRIVETDESQGIFVEKNMIHNCSLIASALTISNIQAGSTGNWGCHVQTKRGNNTRTVDIVVLESSAQYCPPERVVNNKGDF

SEQ ID NO: 15319 - protein, 85 aa, Homo sapiens
AVQGSQRRLLGSLNSTPTAIPQLGLAANQTGARCLEVSISDGLFLSLGLVSLVENALVVATIAKNRNLHSPMYCFICCLALSDLL

SEQ ID NO: 15320 - protein, 85 aa, Homo sapiens
VSGSNVLETAVILLLEAGALVARAAVLQQLDNVIDVITCSSMLSSLCFLGAIAVDRYISIFYALRYHSIVTLPRARRAVAAIWVA

SEQ ID NO: 15321 - protein, 85 aa, Homo sapiens
SVVFSTLFIAYYDHVAVLLCLVVFFLAMLVLMAVLYVHMLARACQHAQGIARLHKRQRPVHQGFGLKGAVTLTILLGIFFLCWGP

SEQ ID NO: 15322 - protein, 84 aa, Homo sapiens
GFGLKGAVTLTILLGIFFLCWGPFFLHLTLIVLCPEHPTCGCIFKNFNLFLALIICNAIIDPLIYAFHSQELRRTLKEVLTCSW

SEQ ID NO: 15323 - protein, 85 aa, Homo sapiens
LFLSLGLVSLVENALVVATIAKNRNLHSPMYCFICCLALSDLLVSGSNVLETAVILLLEAGALVARAAVLQQLDNVIDVITCSSM

SEQ ID NO: 15324 - protein, 85 aa, Homo sapiens
MSSLCFLGAIAVDRYISIFYALRYHSIVTLPRARRAVAAIWVASVVFSTLFIAYYDHVAVLLCLVVFFLAMLVLMAVLYVHMLAR

SEQ ID NO: 15325 - protein, 85 aa, Homo sapiens
ACQHAQGIARLHKRQRPVHQGFGLKGAVTLTILLGIFFLCWGPFFLHLTLIVLCPEHPTCGCIFKNFNLFLALIICNAIIDPLIY

SEQ ID NO: 15326 - protein, 85 aa, Homo sapiens
NVSEPNSSFAFVNEFILQGFSCEWTIQIFLFSLFTTTYALTITGNGAIAFVLWCDRRLHTPMYMFLGNFSFLEIWYVSSTVPKML

SEQ ID NO: 15327 - protein, 85 aa, Homo sapiens
VNFLSEKKNISFAGCFLQFYFFFSLGTSECLLLTVMAFDQYLAICRPLLYPNIMTGHLYAKLVILCWVCGFLWFLIPIVLISQMP

SEQ ID NO: 15328 - protein, 85 aa, Homo sapiens
FCGPNIIDHVVCDPGPRFALDCVSAPRIQLFCYTLSSLVIFGNFLFIIGSYTLVLKAMLGMPSSTGRHKAFSTCGSHLAVVSLCY

SEQ ID NO: 15329 - protein, 84 aa, Homo sapiens
MPSSTGRHKAFSTCGSHLAVVSLCYSSLMVMYVSPGLGHSTGMQKIETLFYAMVTPLFNPLIYSLQNKEIKAALRKVLGSSNII

SEQ ID NO: 15330 - protein, 85 aa, Homo sapiens
TGNGAIAFVLWCDRRLHTPMYMFLGNFSFLEIWYVSSTVPKMLVNFLSEKKNISFAGCFLQFYFFFSLGTSECLLLTVMAFDQYL

SEQ ID NO: 15331 - protein, 85 aa, Homo sapiens
AICRPLLYPNIMTGHLYAKLVILCWVCGFLWFLIPIVLISQMPFCGPNIIDHVVCDPGPRFALDCVSAPRIQLFCYTLSSLVIFG

SEQ ID NO: 15332 - protein, 85 aa, Homo sapiens
NFLFIIGSYTLVLKAMLGMPSSTGRHKAFSTCGSHLAVVSLCYSSLMVMYVSPGLGHSTGMQKIETLFYAMVTPLFNPLIYSLQN

SEQ ID NO: 15333 - protein, 84 aa, Homo sapiens
FLLAYVSPEFWLLTKQRNPMDYPVEDAFCKPQLVKKSYGVENRAYSQEEITQGFEETGDTLYAPYSTHFQLQVSDFFLPLHQRH

SEQ ID NO: 15334 - protein, 55 aa, Homo sapiens
PILYAFLDENFKACFRKFCCASALRRDVQVSDRVRSIAKDVALACKTSETVPRPA

SEQ ID NO: 15335 - protein, 72 aa, Homo sapiens
AILRFCTALGYVNSCLNPILYAFLDENFKACFRKFCCASALRRDVQVSDRVRSIAKDVALACKTSETVPRPA

SEQ ID NO: 15336 - protein, 85 aa, Homo sapiens
EQGKGLAVLILAIILLQGTLAQSIKGNHLVKVYDYQEDGSVLLTCDAEAKNITWFKDGKMIGFLTEDKKKWNLGSNAKDPRGMYQ

SEQ ID NO: 15337 - protein, 85 aa, Homo sapiens
CKGSQNKSKPLQVYYRMCQNCIELNAATISGFLFAEIVSIFVLAVGVYFIAGQDGVRQSRASDKQTLLPNDQLYQPLKDREDDQY

SEQ ID NO: 15338 - protein, 84 aa, Homo sapiens
VYYRMCQNCIELNAATISGFLFAEIVSIFVLAVGVYFIAGQDGVRQSRASDKQTLLPNDQLYQPLKDREDDQYSHLQGNQLRRN

SEQ ID NO: 15339 - protein, 85 aa, Homo sapiens
MTCDAEAKNITWFKDGKMIGFLTEDKKKWNLGSNAKDPRGMYQCKGSQNKSKPLQVYYRMCQNCIELNAATISGFLFAEIVSIFV

SEQ ID NO: 15340 - protein, 85 aa, Homo sapiens
LNVTLQGPTLNGTFAQSKCPQVEWLGWLNTIQPPFLWVLFVLATLENIFVLSVFCLHKSSCTVAEIYLGNLAAADLILACGLPFW

SEQ ID NO: 15341 - protein, 85 aa, Homo sapiens
AITISNNFDWLFGETLCRVVNAIISMNLYSSICFLMLVSIDRYLALVKTMSMGRMRGVRWAKLYSLVIWGCTLLLSSPMLVFRTM

SEQ ID NO: 15342 - protein, 85 aa, Homo sapiens
KEYSDEGHNVTACVISYPSLIWEVFTNMLLNVVGFLLPLSVITFCTMQIMQVLRNNEMQKFKEIQTERRATVLVLVVLLLFIICW

SEQ ID NO: 15343 - protein, 85 aa, Homo sapiens
MPFQISTFLDTLHRLGILSSCQDERIIDVITQIASFMAYSNSCLNPLVYVIVGKRFRKKSWEVYQGVCQKGGCRSEPIQMENSMG

SEQ ID NO: 15344 - protein, 85 aa, Homo sapiens
ATLENIFVLSVFCLHKSSCTVAEIYLGNLAAADLILACGLPFWAITISNNFDWLFGETLCRVVNAIISMNLYSSICFLMLVSIDR

SEQ ID NO: 15345 - protein, 85 aa, Homo sapiens
YLALVKTMSMGRMRGVRWAKLYSLVIWGCTLLLSSPMLVFRTMKEYSDEGHNVTACVISYPSLIWEVFTNMLLNVVGFLLPLSVI

SEQ ID NO: 15346 - protein, 85 aa, Homo sapiens
TFCTMQIMQVLRNNEMQKFKEIQTERRATVLVLVVLLLFIICWLPFQISTFLDTLHRLGILSSCQDERIIDVITQIASFMAYSNS

SEQ ID NO: 15347 - protein, 85 aa, Homo sapiens
MVREANMKQAASEKQLKEARGKIDMLQAEVTALKTLVITSTPASPNRELHPQLLSPTKAGPRKGHSRHKSTSSTLCPAVCPAAGH

SEQ ID NO: 15348 - protein, 85 aa, Homo sapiens
TLTPDREGKEPGLAPLLSLLLCVVPSKAVHLTYEPAWPLPPGEPPAPASTPSPSFSRQVDTILFAEFQAWRESPTLDKTCPFLER

SEQ ID NO: 15349 - protein, 85 aa, Homo sapiens
VYREDVGPCLDFTMQELSVLVRAAVEDNTLTIEPVASQTLPTVKVAEVDCSSTNTCALSGLTRTCRHRIRLGDSKSHYYISPSSR

SEQ ID NO: 15350 - protein, 85 aa, Homo sapiens
ELHRAQKELKLKDEECERLSKVREQLEQELEELTASLFEEAHKMVREANMKQAASEKQLKEARGKIDMLQAEVTALKTLVITSTP

SEQ ID NO: 15351 - protein, 85 aa, Homo sapiens
ASPNRELHPQLLSPTKAGPRKGHSRHKSTSSTLCPAVCPAAGHTLTPDREGKEPGLAPLLSLLLCVVPSKAVHLTYEPAWPLPPG

SEQ ID NO: 15352 - protein, 85 aa, Homo sapiens
EPPAPASTPSPSFSRQVDTILFAEFQAWRESPTLDKTCPFLERVYREDVGPCLDFTMQELSVLVRAAVEDNTLTIEPVASQTLPT

SEQ ID NO: 15353 - protein, 85 aa, Homo sapiens
VKVAEVDCSSTNTCALSGLTRTCRHRIRLGDSKSHYYISPSSRARITAVCNFFTYIRYIQQGLVRQDAEPMFWEIMRLRKEMSLA

SEQ ID NO: 15354 - protein, 84 aa, Homo sapiens
YSTYSPNIALEAYVIKSTGFTGMTCTVFQKVAASDRTGLSDYGRRDPEGNLDKQLSFKCNVSNTFSSLALKVCYILQSFKTIYS

SEQ ID NO: 15355 - protein, 85 aa, Homo sapiens
PWFHGKISGQEAVQQLQPPEDGLFLVRESARHPGDYVLCVSFGRDVIHYRVLHRDGHLTIDEAVFFCNLMDMVERPPGNGTGCWG

SEQ ID NO: 15356 - protein, 85 aa, Homo sapiens
SPPWGWAHGCPTILQHYSKDKGAICTKLVRPKRKHGTKSAEEELARAGWLLNLQHLTLGAQIGEGEFGAVLQGEYLGQKVAVKNI

SEQ ID NO: 15357 - protein, 85 aa, Homo sapiens
KCDVTAQAFLDETAVMTKMQHENLVRLLGVILHQGLYIVMEHVSKGNLVNFLRTRGRALVNTAQLLQFSLHVAEGMEYLESKKLV

SEQ ID NO: 15358 - protein, 85 aa, Homo sapiens
VTAQAFLDETAVMTKMQHENLVRLLGVILHQGLYIVMEHVSKGNLVNFLRTRGRALVNTAQLLQFSLHVAEGMEYLESKKLVHRD

SEQ ID NO: 15359 - protein, 85 aa, Homo sapiens
GRDVIHYRVLHRDGHLTIDEAVFFCNLMDMVERPPGNGTGCWGSPPWGWAHGCPTILQHYSKDKGAICTKLVRPKRKHGTKSAEE

SEQ ID NO: 15360 - protein, 85 aa, Homo sapiens
ELARAGWLLNLQHLTLGAQIGEGEFGAVLQGEYLGQKVAVKNIKCDVTAQAFLDETAVMTKMQHENLVRLLGVILHQGLYIVMEH

SEQ ID NO: 15361 - protein, 85 aa, Homo sapiens
FKCSMCKYASVEASKLKRHVRSHTGERPFQCCQCSYASRDTYKLKRHMRTHSGKGSGAEGLIPTVLTLKASFKKLLFIGTIKVQR

SEQ ID NO: 15362 - protein, 84 aa, Homo sapiens
KCSMCKYASVEASKLKRHVRSHTGERPFQCCQCSYASRDTYKLKRHMRTHSGKGSGAEGLIPTVLTLKASFKKLLFIGTIKVQR

SEQ ID NO: 15363 - protein, 85 aa, Homo sapiens
PLKRNNSKYPPLELPSFYMTPSHRQVVFEGDSLPFQCMASYIDQDMQVLWYQDGRIVETDESQGIFVEKNMIHNCSLIASALTIS

SEQ ID NO: 15364 - protein, 85 aa, Homo sapiens
NIQAGSTGNWGCHVQTKRGNNTRTVDIVVLESSAQYCPPERVVNNKGDFRWPRTLAGITAYLQCTRNTHGSGIYPGNPQDERKAW

SEQ ID NO: 15365 - protein, 85 aa, Homo sapiens
RRCDRGGFWADDDYSRCQYANDVTRVLYMFNQMPLNLTNAVATARQLLAYTVEAANFSDKMDVIFVAEMIEKFGRFTKEEKSKEL

SEQ ID NO: 15366 - protein, 85 aa, Homo sapiens
GDVMVDIASNIMLADERVLWLAQREAKACSRIVQCLQRIATYRLAGGAHVYSTYSPNIALEAYVIKSTGFTGMTCTVFQKVAASD

SEQ ID NO: 15367 - protein, 84 aa, Homo sapiens
YRLAGGAHVYSTYSPNIALEAYVIKSTGFTGMTCTVFQKVAASDRTGLSDYGRRDPEGNLDKQLSFKCNVSNTFSSLALKGKFR

SEQ ID NO: 15368 - protein, 85 aa, Homo sapiens
DQDMQVLWYQDGRIVETDESQGIFVEKNMIHNCSLIASALTISNIQAGSTGNWGCHVQTKRGNNTRTVDIVVLESSAQYCPPERV

SEQ ID NO: 15369 - protein, 85 aa, Homo sapiens
VNNKGDFRWPRTLAGITAYLQCTRNTHGSGIYPGNPQDERKAWRRCDRGGFWADDDYSRCQYANDVTRVLYMFNQMPLNLTNAVA

SEQ ID NO: 15370 - protein, 85 aa, Homo sapiens
TARQLLAYTVEAANFSDKMDVIFVAEMIEKFGRFTKEEKSKELGDVMVDIASNIMLADERVLWLAQREAKACSRIVQCLQRIATY

SEQ ID NO: 15371 - protein, 25 aa, Homo sapiens
PEGSGGPRWMARSLPRHPCRSPTWW

SEQ ID NO: 15372 - protein, 34 aa, Homo sapiens
MTMGAVTTMQRAEFAKFALMLTEPQDQGAGTPPR

SEQ ID NO: 15373 - protein, 85 aa, Homo sapiens
YAEGRVCKVRFDANGATGPGSRDPAQVKLLPGRHMLFPPLERVHYLQLKKLDLAAAAAHTFFVANPMHLQMREDMAKYRRMSGVR

SEQ ID NO: 15374 - protein, 77 aa, Homo sapiens
MCCGAPWHRRCCCPPSSGPASATAPTCAQCGSNAWPSCLRRMEMTMGAVTTMQRAEFAKFALMLTEPQDQGAGTPPR

SEQ ID NO: 15375 - protein, 85 aa, Homo sapiens
GFSRWINLHRHSEKCGSGEAKSAASGKGRRTRKRKQTILKEATKGQKEAAKGWKEAANGDGVISAHRNLCLLGSSDSHASVSGAG

SEQ ID NO: 15376 - protein, 85 aa, Homo sapiens
DEKPQFTALVSQKLEALHRLWDELQATTKEKTQHLSAARSSDLRLQTHADLNKWISAMEDQLRSDDPGKDLTSVNRMLAKLKRVE

SEQ ID NO: 15377 - protein, 85 aa, Homo sapiens
DQVNVRKEELGELFAQVPSMGEEGGDADLSIEKRFLDLLEPLGRRKKQLESSRAKLQISRDLEDETLWVEERLPLAQSADYGTNL

SEQ ID NO: 15378 - protein, 85 aa, Homo sapiens
QTVQLFMKKNQTLQNEILGHTPRVEDVLQRGQQLVEAAEIDCQDLEERLGHLQSSWDRLREAAAGRLQRLRDANEAQQYYLDADE

SEQ ID NO: 15379 - protein, 85 aa, Homo sapiens
AEAWIGEQELYVISDEIPKDEEGAIVMLKRHLRQQRAVEDYGRNIKQLASRAQGLLSAGHPEGEQIIRLQGQVDKHYAGLKDVAE

SEQ ID NO: 15380 - protein, 85 aa, Homo sapiens
ERKRKLENMYHLFQLKRETDDLEQWISEKELVASSPEMGQDFDHVTLLRDKFRDFARETGAIGQERVDNVNAFIERLIDAGHSEA

SEQ ID NO: 15381 - protein, 85 aa, Homo sapiens
ATIAEWKDGLNEMWADLLELIDTRMQLLAASYDLHRYFYTGAEILGLIDEKHRELPEDVGLDASTAESFHRVHTAFERELHLLGV

SEQ ID NO: 15382 - protein, 85 aa, Homo sapiens
QVQQFQDVATRLQTAYAGEKAEAIQNKEQEVSAAWQALLDACAGRRTQLVDTADKFRFFSMARDLLSWMESIIRQIETQERPRDV

SEQ ID NO: 15383 - protein, 85 aa, Homo sapiens
SSVELLMKYHQGINAEIETRSKNFSACLELGESLLQRQHQASEEIREKLQQVMSRRKEMNEKWEARWERLRMLLEVCQFSRDASV

SEQ ID NO: 15384 - protein, 85 aa, Homo sapiens
AEAWLIAQEPYLASGDFGHTVDSVEKLIKRHEAFEKSTASWAERFAALEKPTTLELKERQIAERPAEETGPQEEEGETAGEAPVS

SEQ ID NO: 15385 - protein, 85 aa, Homo sapiens
HHAATERTSPGEEEGTWPQNLQQPPPPGQHKDGQKSTGDERPTTEPLFKVLDTPLSEGDEPATLPAPRDHGQSVQMEGYLGRKHD

SEQ ID NO: 15386 - protein, 85 aa, Homo sapiens
MEGPNKKASNSKGEEGEERRETEEEDEEEEETESVAVEMQQHASHVSWNNLYCVLRNSELTFYKDAKNLALGMPYHGEEPLALRH

SEQ ID NO: 15387 - protein, 85 aa, Homo sapiens
AICEIAANYKKKKHVFKLRLSNGSEWLFHGKDEEEMLSWLQGVSTAINESQSIRVKAQSLPLPSLSGPDASLGKKDKEKRFSFFP

SEQ ID NO: 15388 - protein, 85 aa, Homo sapiens
MRLQTHADLNKWISAMEDQLRSDDPGKDLTSVNRMLAKLKRVEDQVNVRKEELGELFAQVPSMGEEGGDADLSIEKRFLDLLEPL

SEQ ID NO: 15389 - protein, 85 aa, Homo sapiens
GRRKKQLESSRAKLQISRDLEDETLWVEERLPLAQSADYGTNLQTVQLFMKKNQTLQNEILGHTPRVEDVLQRGQQLVEAAEIDC

SEQ ID NO: 15390 - protein, 85 aa, Homo sapiens
QDLEERLGHLQSSWDRLREAAAGRLQRLRDANEAQQYYLDADEAEAWIGEQELYVISDEIPKDEEGAIVMLKRHLRQQRAVEDYG

SEQ ID NO: 15391 - protein, 85 aa, Homo sapiens
RNIKQLASRAQGLLSAGHPEGEQIIRLQGQVDKHYAGLKDVAEERKRKLENMYHLFQLKRETDDLEQWISEKELVASSPEMGQDF

SEQ ID NO: 15392 - protein, 85 aa, Homo sapiens
DHVTLLRDKFRDFARETGAIGQERVDNVNAFIERLIDAGHSEAATIAEWKDGLNEMWADLLELIDTRMQLLAASYDLHRYFYTGA

SEQ ID NO: 15393 - protein, 85 aa, Homo sapiens
EILGLIDEKHRELPEDVGLDASTAESFHRVHTAFERELHLLGVQVQQFQDVATRLQTAYAGEKAEAIQNKEQEVSAAWQALLDAC

SEQ ID NO: 15394 - protein, 85 aa, Homo sapiens
AGRRTQLVDTADKFRFFSMARDLLSWMESIIRQIETQERPRDVSSVELLMKYHQGINAEIETRSKNFSACLELGESLLQRQHQAS

SEQ ID NO: 15395 - protein, 85 aa, Homo sapiens
EEIREKLQQVMSRRKEMNEKWEARWERLRMLLEVCQFSRDASVAEAWLIAQEPYLASGDFGHTVDSVEKLIKRHEAFEKSTASWA

SEQ ID NO: 15396 - protein, 85 aa, Homo sapiens
ERFAALEKPTTLELKERQIAERPAEETGPQEEEGETAGEAPVSHHAATERTSPGEEEGTWPQNLQQPPPPGQHKDGQKSTGDERP

SEQ ID NO: 15397 - protein, 85 aa, Homo sapiens
TTEPLFKVLDTPLSEGDEPATLPAPRDHGQSVQMEGYLGRKHDLEGPNKKASNSKGEEGEERRETEEEDEEEEETESVAVEMQQH

SEQ ID NO: 15398 - protein, 85 aa, Homo sapiens
ASHVSWNNLYCVLRNSELTFYKDAKNLALGMPYHGEEPLALRHAICEIAANYKKKKHVFKLRLSNGSEWLFHGKDEEEMLSWLQG

SEQ ID NO: 15399 - protein, 85 aa, Homo sapiens
KPFTCLSCNKCFRQKQLLNAHFRKYHDANFIPTVYKCSKCGKGFSRWILWVGNSEVAELGGPGSGPLLRLQSGCPPGLHHPKAGL

SEQ ID NO: 15400 - protein, 8 aa, Homo sapiens
QMGKMLML

SEQ ID NO: 15401 - protein, 85 aa, Homo sapiens
GGHPQLRLVKALLLLGLNPVSASLQDQHCESLSLASNISEKKQGALPCRSHHQLPGPLYLPGGPPGGLCPLSAAQEHPVPAKHHP

SEQ ID NO: 15402 - protein, 84 aa, Homo sapiens
PLSAAQEHPVPAKHHPLEPHLRLHPAQRHLVRGPANHEPRGPPEQRGLVQVGDSRLQLLPCDQLLLDVRRGLLPAHSHRAHLLH

SEQ ID NO: 15403 - protein, 85 aa, Homo sapiens
QGALPCRSHHQLPGPLYLPGGPPGGLCPLSAAQEHPVPAKHHPLEPHLRLHPAQRHLVRGPANHEPRGPPEQRGLVQVGDSRLQL

SEQ ID NO: 15404 - protein, 84 aa, Homo sapiens
RARAVLLALIWGYSAVAALPLCVFFRVVPQRLPGADQEISICTLIWPTIPGEISWDVSFVTLNFLVPGLVIVISYSKILQGPHW

SEQ ID NO: 15405 - protein, 85 aa, Homo sapiens
RASTTSETIQYRKAVKATLVLLPLLGITYMLFFVNPGEDEVSRVVFIYFNSFLESFQVRSAIRKRWHRWQDKHSIRARVARAMSI

SEQ ID NO: 15406 - protein, 85 aa, Homo sapiens
HIRTHTGEKPFTCLSCNKCFRQKQLLNAHFRKYHDANFIPTVYKCSKCGKGFSRWILWVGNSEVAELGGPGSGPLLRLQSGCPPG

SEQ ID NO: 15407 - protein, 85 aa, Homo sapiens
FFLHLTLIVLCPEHPTCGCIFKNFNLFLALIICNAIIDPLIYAFHSQELRRTLKEVLTCSCSQDRALVSWDVKSLGGSVCQELLP

SEQ ID NO: 15408 - protein, 84 aa, Homo sapiens
AFHSQELRRTLKEVLTCSCSQDRALVSWDVKSLGGSVCQELLPQQPQEKGLCDQKASSTALQRLLQKEVKSLPQAKGPGLQEPP

SEQ ID NO: 15409 - protein, 85 aa, Homo sapiens
TLSLNGAMDIQEFPDLKGTTSLEILTLTRAGIRLLPSGMCQQLPRLRVLELSHNQIEELPSLHRCQKLEEMRSGGLYFLPPSARG

SEQ ID NO: 15410 - protein, 84 aa, Homo sapiens
DIQEFPDLKGTTSLEILTLTRAGIRLLPSGMCQQLPRLRVLELSHNQIEELPSLHRCQKLEEMRSGGLYFLPPSARGAWSGARV

SEQ ID NO: 15411 - protein, 85 aa, Homo sapiens
TLPAASASSSPRPLLTGLRLTTECNVNHKGNFYCACLSGYQWNTSICLHYPPCQSLHNHQPCGCLVFSHPEPGYCQLLPPVPGIL

SEQ ID NO: 15412 - protein, 85 aa, Homo sapiens
NLNSQLQMPGDTLSLTLHLSQEATNLSWFLRHPGSPSPILLQPGTQVSVTSSHGQAALSVSNMSHHWAGEYMSCFEAQGFKWNLY

SEQ ID NO: 15413 - protein, 85 aa, Homo sapiens
EVVRVPLKATDVARLPYQLSISCATSPGFQLSCCIPSTNLAYTAAWSPGEGSKASSFNESGSQCFVLAVQRCPMADTTYACDLQS

SEQ ID NO: 15414 - protein, 85 aa, Homo sapiens
MGLAPLRVPISITIIQDGDITCPEDASVLTWNVTKAGHVAQAPCPESKRGIVRRLCGADGVWGPVHSSCTDARLLALFTRTKLLQ

SEQ ID NO: 15415 - protein, 85 aa, Homo sapiens
AGQGSPAEEVPQILAQLPGQAAEASSPSDLLTLLSTMKYVAKVVAEARIQLDRRALKNLLIATDKVLDMDTRSLWTLAQARKPWA

SEQ ID NO: 15416 - protein, 85 aa, Homo sapiens
GSTLLLAVETLACSLCPQDHPFAFSLPNVLLQSQLFGPTFPADYSISFPTRPPLQAQIPRHSLAPLVRNGTEISITSLVLRKLDH

SEQ ID NO: 15417 - protein, 85 aa, Homo sapiens
LLPSNYGQGLGDSLYATPGLVLVISIMAGDRAFSQGEVIMDFGNTDGSPHCVFWDHSLFQGRGGWSKEGCQAQVASASPTAQCLC

SEQ ID NO: 15418 - protein, 85 aa, Homo sapiens
QHLTAFSVLMSPHTVPEEPALALLTQVGLGASILALLVCLGVYWLVWRVVVRNKISYFRHAALLNMVFCLLAADTCFLGAPFLSP

SEQ ID NO: 15419 - protein, 85 aa, Homo sapiens
GPRSPLCLAAAFLCHFLYLATFFWMLAQALVLAHQLLFVFHQLAKHRVLPLMVLLGYLCPLGLAGVTLGLYLPQGQYLREGECWL

SEQ ID NO: 15420 - protein, 85 aa, Homo sapiens
DGKGGALYTFVGPVLAIIGVNGLVLAMAMLKLLRPSLSEGPPAEKRQALLGVIKALLILTPIFGLTWGLGLATLLEEVSTVPHYI

SEQ ID NO: 15421 - protein, 85 aa, Homo sapiens
GGESGSGQLLDQENGAGESALVSVYVHLDFPDKTWPPELSRTLTLPAASASSSPRPLLTGLRLTTECNVNHKGNFYCACLSGYQW

SEQ ID NO: 15422 - protein, 85 aa, Homo sapiens
NTSICLHYPPCQSLHNHQPCGCLVFSHPEPGYCQLLPPVPGILNLNSQLQMPGDTLSLTLHLSQEATNLSWFLRHPGSPSPILLQ

SEQ ID NO: 15423 - protein, 85 aa, Homo sapiens
PGTQVSVTSSHGQAALSVSNMSHHWAGEYMSCFEAQGFKWNLYEVVRVPLKATDVARLPYQLSISCATSPGFQLSCCIPSTNLAY

SEQ ID NO: 15424 - protein, 85 aa, Homo sapiens
TAAWSPGEGSKASSFNESGSQCFVLAVQRCPMADTTYACDLQSLGLAPLRVPISITIIQDGDITCPEDASVLTWNVTKAGHVAQA

SEQ ID NO: 15425 - protein, 85 aa, Homo sapiens
PCPESKRGIVRRLCGADGVWGPVHSSCTDARLLALFTRTKLLQAGQGSPAEEVPQILAQLPGQAAEASSPSDLLTLLSTMKYVAK

SEQ ID NO: 15426 - protein, 85 aa, Homo sapiens
VVAEARIQLDRRALKNLLIATDKVLDMDTRSLWTLAQARKPWAGSTLLLAVETLACSLCPQDHPFAFSLPNVLLQSQLFGPTFPA

SEQ ID NO: 15427 - protein, 85 aa, Homo sapiens
DYSISFPTRPPLQAQIPRHSLAPLVRNGTEISITSLVLRKLDHLLPSNYGQGLGDSLYATPGLVLVISIMAGDRAFSQGEVIMDF

SEQ ID NO: 15428 - protein, 85 aa, Homo sapiens
GNTDGSPHCVFWDHSLFQGRGGWSKEGCQAQVASASPTAQCLCQHLTAFSVLMSPHTVPEEPALALLTQVGLGASILALLVCLGV

SEQ ID NO: 15429 - protein, 85 aa, Homo sapiens
YWLVWRVVVRNKISYFRHAALLNMVFCLLAADTCFLGAPFLSPGPRSPLCLAAAFLCHFLYLATFFWMLAQALVLAHQLLFVFHQ

SEQ ID NO: 15430 - protein, 85 aa, Homo sapiens
MAKHRVLPLMVLLGYLCPLGLAGVTLGLYLPQGQYLREGECWLDGKGGALYTFVGPVLAIIGVNGLVLAMAMLKLLRPSLSEGPP

SEQ ID NO: 15431 - protein, 85 aa, Homo sapiens
AEKRQALLGVIKALLILTPIFGLTWGLGLATLLEEVSTVPHYIFTILNTLQGVFILLFGCLMDRKIQEALRKRFCRAQAPSSTIS

SEQ ID NO: 15432 - protein, 52 aa, Homo sapiens
RPCSSATSWTWWRGHPGTEQDAGVPLPGAGLMAVPPSCSITARTRALSAPSW

SEQ ID NO: 15433 - protein, 29 aa, Homo sapiens
ARNLAPNLHPPHPPAFPPWPGSQDLRAGY

SEQ ID NO: 15434 - protein, 85 aa, Homo sapiens
FGAVLQGEYLGQKVAVKNIKCDVTAQAFLDETAVMTKMQHENLVRLLGVILHQGLYIVMEHVSKGNLVNFLRTRGRALVNTAQLL

SEQ ID NO: 15435 - protein, 10 aa, Homo sapiens
RTRALSAPSW

SEQ ID NO: 15436 - protein, 18 aa, Homo sapiens
RESLELSCRVSTWGKRWP

SEQ ID NO: 15437 - protein, 85 aa, Homo sapiens
HQKTHKNEKRFKCKHCSYACKQERHMTAHIRTHTGEKPFTCLSCNKCFRQKQLLNAHFRKYHDANFIPTVYKCSKCGKGFSRWIN

SEQ ID NO: 15438 - protein, 85 aa, Homo sapiens
MHRHSEKCGSGEAKSAASGKGRRTRKRKQTILKEATKGQKEAAKGWKEAANGDGVISAHRNLCLLGSSDSHASVSGAGITDARHH

SEQ ID NO: 15439 - protein, 23 aa, Homo sapiens
VSATIPQTMATGSAWPMAAGPPA

SEQ ID NO: 15440 - protein, 84 aa, Homo sapiens
FLRLRSIRCLRNIIHWNLISAFILRNATWFVVQLTMSPEVHQSNVVCPSPSLWPGPLGSCTTTMRSAGLAKGLGCTPTTSTRAP

SEQ ID NO: 15441 - protein, 58 aa, Homo sapiens
TMSQSSSTTWATVSPWWPSWWPLSSFCGSGASGACETSSTGTSSPPSSCATPPGSWSS

SEQ ID NO: 15442 - protein, 81 aa, Homo sapiens
MVERPCPKGTRDQEWGERGQHRQRAGPTHPGLHLRGGRLLLCEADGAAAGHPGCPAAGPAAHRARVSRQELQQDAQARENL

SEQ ID NO: 15443 - protein, 85 aa, Homo sapiens
RERTCKDYIKAVVETVDNLLRPEALESWKDMNATEQVHTATMLLDVLEEGAFLLADNVREPARFLAAKENVVLEVTVLNTEGQVQ

SEQ ID NO: 15444 - protein, 39 aa, Homo sapiens
EADGAAAGHPGCPAAGPAAHRARVSRQELQQDAQARENL

SEQ ID NO: 15445 - protein, 85 aa, Homo sapiens
PAMPSSGPGDTSSSAAEREEDRKDGEEQEEPRGKEERQEPSTTARKVGRPGRKRKHPPVESGDTPKDPAVISKSPSMAQDSGASE

SEQ ID NO: 15446 - protein, 85 aa, Homo sapiens
LLPNGDLEKRSEPQPEEGSPAGGQKGGAPAEGEGAAETLPEASRAVENGCCTPKEGRGAPAEAGKEQKETNIESMKMEGSRGRLR

SEQ ID NO: 15447 - protein, 85 aa, Homo sapiens
GGLGWESSLRQRPMPRLTFQAGDPYYISKRKRDEWLARWKREAEKKAKVIAGMNAVEENQGPGESQKVEEASPPAVQQPTDPASP

SEQ ID NO: 15448 - protein, 85 aa, Homo sapiens
TVATTPEPVGSDAGDKNATKAGDDEPEYEDGRGFGIGELVWGKLRGFSWWPGRIVSWWMTGRSRAAEGTRWVMWFGDGKFSVVCV

SEQ ID NO: 15449 - protein, 85 aa, Homo sapiens
EKLMPLSSFCSAFHQATYNKQPMYRKAIYEVLQVASSRAGKLFPVCHDSDESDTAKAVEVQNKPMIEWALGGFQPSGPKGLEPPE

SEQ ID NO: 15450 - protein, 85 aa, Homo sapiens
EEKNPYKEVYTDMWVEPEAAAYAPPPPAKKPRKSTAEKPKVKEIIDERTRERLVYEVRQKCRNIEDICISCGSLNVTLEHPLFVG

SEQ ID NO: 15451 - protein, 85 aa, Homo sapiens
GMCQNCKNCFLECAYQYDDDGYQSYCTICCGGREVLMCGNNNCCRCFCVECVDLLVGPGAAQAAIKEDPWNCYMCGHKGTYGLLR

SEQ ID NO: 15452 - protein, 85 aa, Homo sapiens
RREDWPSRLQMFFANNHDQEFDPPKVYPPVPAEKRKPIRVLSLFDGIATGLLVLKDLGIQVDRYIASEVCEDSITVGMVRHQGKI

SEQ ID NO: 15453 - protein, 85 aa, Homo sapiens
MYVGDVRSVTQKHIQEWGPFDLVIGGSPCNDLSIVNPARKGLYEGTGRLFFEFYRLLHDARPKEGDDRPFFWLFENVVAMGVSDK

SEQ ID NO: 15454 - protein, 85 aa, Homo sapiens
RDISRFLESNPVMIDAKEVSAAHRARYFWGNLPGMNRPLASTVNDKLELQECLEHGRIAKFSKVRTITTRSNSIKQGKDQHFPVF

SEQ ID NO: 15455 - protein, 84 aa, Homo sapiens
KVRTITTRSNSIKQGKDQHFPVFMNEKEDILWCTEMERVFGFPVHYTDVSNMSRLARQRLLGRSWSVPVIRHLFAPLKEYFACV

SEQ ID NO: 15456 - protein, 85 aa, Homo sapiens
TARKVGRPGRKRKHPPVESGDTPKDPAVISKSPSMAQDSGASELLPNGDLEKRSEPQPEEGSPAGGQKGGAPAEGEGAAETLPEA

SEQ ID NO: 15457 - protein, 85 aa, Homo sapiens
SRAVENGCCTPKEGRGAPAEAGKEQKETNIESMKMEGSRGRLRGGLGWESSLRQRPMPRLTFQAGDPYYISKRKRDEWLARWKRE

SEQ ID NO: 15458 - protein, 85 aa, Homo sapiens
AEKKAKVIAGMNAVEENQGPGESQKVEEASPPAVQQPTDPASPTVATTPEPVGSDAGDKNATKAGDDEPEYEDGRGFGIGELVWG

SEQ ID NO: 15459 - protein, 85 aa, Homo sapiens
KLRGFSWWPGRIVSWWMTGRSRAAEGTRWVMWFGDGKFSVVCVEKLMPLSSFCSAFHQATYNKQPMYRKAIYEVLQVASSRAGKL

SEQ ID NO: 15460 - protein, 85 aa, Homo sapiens
FPVCHDSDESDTAKAVEVQNKPMIEWALGGFQPSGPKGLEPPEEEKNPYKEVYTDMWVEPEAAAYAPPPPAKKPRKSTAEKPKVK

SEQ ID NO: 15461 - protein, 85 aa, Homo sapiens
EIIDERTRERLVYEVRQKCRNIEDICISCGSLNVTLEHPLFVGGMCQNCKNCFLECAYQYDDDGYQSYCTICCGGREVLMCGNNN

SEQ ID NO: 15462 - protein, 85 aa, Homo sapiens
CCRCFCVECVDLLVGPGAAQAAIKEDPWNCYMCGHKGTYGLLRRREDWPSRLQMFFANNHDQEFDPPKVYPPVPAEKRKPIRVLS

SEQ ID NO: 15463 - protein, 85 aa, Homo sapiens
LFDGIATGLLVLKDLGIQVDRYIASEVCEDSITVGMVRHQGKIMYVGDVRSVTQKHIQEWGPFDLVIGGSPCNDLSIVNPARKGL

SEQ ID NO: 15464 - protein, 85 aa, Homo sapiens
YEGTGRLFFEFYRLLHDARPKEGDDRPFFWLFENVVAMGVSDKRDISRFLESNPVMIDAKEVSAAHRARYFWGNLPGMNRPLAST

SEQ ID NO: 15465 - protein, 85 aa, Homo sapiens
VNDKLELQECLEHGRIAKFSKVRTITTRSNSIKQGKDQHFPVFMNEKEDILWCTEMERVFGFPVHYTDVSNMSRLARQRLLGRSW

SEQ ID NO: 15466 - protein, 85 aa, Homo sapiens
AKTVAYFYDPDVGNFHYGAGHPMKPHRLALTHSLVLHYGLYKKMIVFKPYQASQHDMCRFHSEDYIDFLQRVSPTNMQGFTKSLN

SEQ ID NO: 15467 - protein, 85 aa, Homo sapiens
AFNVGDDCPVFPGLFEFCSRYTGASLQGATQLNNKICDIAINWAGGLHHAKKFEASGFCYVNDIVIGILELLKYHPRVLYIDIDI

SEQ ID NO: 15468 - protein, 85 aa, Homo sapiens
HHGDGVQEAFYLTDRVMTVSFHKYGNYFFPGTGDMYEVGAESGRYYCLNVPLRDGIDDQSYKHLFQPVINQVVDFYQPTCIVLQC

SEQ ID NO: 15469 - protein, 85 aa, Homo sapiens
GADSLGCDRLGCFNLSIRGHGECVEYVKSFNIPLLVLGGGGYTVRNVARCWTYETSLLVEEAISEELPYSEYFEYFAPDFTLHPD

SEQ ID NO: 15470 - protein, 85 aa, Homo sapiens
VSTRIENQNSRQYLDQIRQTIFENLKMLNHAPSVQIHDVPADLLTYDRTDEADAEERGPEENYSRPEAPNEFYDGDHDNDKESDV

SEQ ID NO: 15471 - protein, 84 aa, Homo sapiens
RIENQNSRQYLDQIRQTIFENLKMLNHAPSVQIHDVPADLLTYDRTDEADAEERGPEENYSRPEAPNEFYDGDHDNDKESDVEI

SEQ ID NO: 15472 - protein, 85 aa, Homo sapiens
KMIVFKPYQASQHDMCRFHSEDYIDFLQRVSPTNMQGFTKSLNAFNVGDDCPVFPGLFEFCSRYTGASLQGATQLNNKICDIAIN

SEQ ID NO: 15473 - protein, 85 aa, Homo sapiens
WAGGLHHAKKFEASGFCYVNDIVIGILELLKYHPRVLYIDIDIHHGDGVQEAFYLTDRVMTVSFHKYGNYFFPGTGDMYEVGAES

SEQ ID NO: 15474 - protein, 85 aa, Homo sapiens
GRYYCLNVPLRDGIDDQSYKHLFQPVINQVVDFYQPTCIVLQCGADSLGCDRLGCFNLSIRGHGECVEYVKSFNIPLLVLGGGGY

SEQ ID NO: 15475 - protein, 85 aa, Homo sapiens
TVRNVARCWTYETSLLVEEAISEELPYSEYFEYFAPDFTLHPDVSTRIENQNSRQYLDQIRQTIFENLKMLNHAPSVQIHDVPAD

SEQ ID NO: 15476 - protein, 85 aa, Homo sapiens
EPSPEPPSLESMKGDTRHLNGEEDAGGREDSILVNGACSDQSSDSPPILEAIRTPEIRGRRSSSRLSKREVSSLLSYTQDLTGDG

SEQ ID NO: 15477 - protein, 85 aa, Homo sapiens
DGEDGDGSDTPVMPKLFRETRTRSESPAVRTRNNNSVSSRERHRPSPRSTRGRQGRNHVDESPVEFPATRSLRRRATASAGTPWP

SEQ ID NO: 15478 - protein, 85 aa, Homo sapiens
SPPSSYLTIDLTDDTEDTHGTPQSSSTPYARLAQDSQQGGMESPQVEADSGDGDSSEYQDGKEFGIGDLVWGKIKGFSWWPAMVV

SEQ ID NO: 15479 - protein, 85 aa, Homo sapiens
SWKATSKRQAMSGMRWVQWFGDGKFSEVSADKLVALGLFSQHFNLATFNKLVSYRKAMYHALEKARVRAGKTFPSSPGDSLEDQL

SEQ ID NO: 15480 - protein, 85 aa, Homo sapiens
KPMLEWAHGGFKPTGIEGLKPNNTQPENKTRRRTADDSATSDYCPAPKRLKTNCYNNGKDRGDEDQSREQMASDVANNKSSLEDG

SEQ ID NO: 15481 - protein, 85 aa, Homo sapiens
CLSCGRKNPVSFHPLFEGGLCQTCRDRFLELFYMYDDDGYQSYCTVCCEGRELLLCSNTSCCRCFCVECLEVLVGTGTAAEAKLQ

SEQ ID NO: 15482 - protein, 85 aa, Homo sapiens
EPWSCYMCLPQRCHGVLRRRKDWNVRLQAFFTSDTGLEYEAPKLYPAIPAARRRPIRVLSLFDGIATGYLVLKELGIKVGKYVAS

SEQ ID NO: 15483 - protein, 85 aa, Homo sapiens
EVCEESIAVGTVKHEGNIKYVNDVRNITKKNIEEWGPFDLVIGGSPCNDLSNVNPARKGLYEGTGRLFFEFYHLLNYSRPKEGDD

SEQ ID NO: 15484 - protein, 85 aa, Homo sapiens
RPFFWMFENVVAMKVGDKRDISRFLECNPVMIDAIKVSAAHRARYFWGNLPGMNRPVIASKNDKLELQDCLEYNRIAKLKKVQTI

SEQ ID NO: 15485 - protein, 84 aa, Homo sapiens
KVQTITTKSNSIKQGKNQLFPVVMNGKEDVLWCTELERIFGFPVHYTDVSNMGRGARQKLLGRSWSVPVIRHLFAPLKDYFACE

SEQ ID NO: 15486 - protein, 85 aa, Homo sapiens
SDSPPILEAIRTPEIRGRRSSSRLSKREVSSLLSYTQDLTGDGDGEDGDGSDTPVMPKLFRETRTRSESPAVRTRNNNSVSSRER

SEQ ID NO: 15487 - protein, 85 aa, Homo sapiens
HRPSPRSTRGRQGRNHVDESPVEFPATRSLRRRATASAGTPWPSPPSSYLTIDLTDDTEDTHGTPQSSSTPYARLAQDSQQGGME

SEQ ID NO: 15488 - protein, 85 aa, Homo sapiens
SPQVEADSGDGDSSEYQDGKEFGIGDLVWGKIKGFSWWPAMVVSWKATSKRQAMSGMRWVQWFGDGKFSEVSADKLVALGLFSQH

SEQ ID NO: 15489 - protein, 85 aa, Homo sapiens
FNLATFNKLVSYRKAMYHALEKARVRAGKTFPSSPGDSLEDQLKPMLEWAHGGFKPTGIEGLKPNNTQPENKTRRRTADDSATSD

SEQ ID NO: 15490 - protein, 85 aa, Homo sapiens
YCPAPKRLKTNCYNNGKDRGDEDQSREQMASDVANNKSSLEDGCLSCGRKNPVSFHPLFEGGLCQTCRDRFLELFYMYDDDGYQS

SEQ ID NO: 15491 - protein, 85 aa, Homo sapiens
YCTVCCEGRELLLCSNTSCCRCFCVECLEVLVGTGTAAEAKLQEPWSCYMCLPQRCHGVLRRRKDWNVRLQAFFTSDTGLEYEAP

SEQ ID NO: 15492 - protein, 85 aa, Homo sapiens
KLYPAIPAARRRPIRVLSLFDGIATGYLVLKELGIKVGKYVASEVCEESIAVGTVKHEGNIKYVNDVRNITKKNIEEWGPFDLVI

SEQ ID NO: 15493 - protein, 85 aa, Homo sapiens
GGSPCNDLSNVNPARKGLYEGTGRLFFEFYHLLNYSRPKEGDDRPFFWMFENVVAMKVGDKRDISRFLECNPVMIDAIKVSAAHR

SEQ ID NO: 15494 - protein, 85 aa, Homo sapiens
ARYFWGNLPGMNRPVIASKNDKLELQDCLEYNRIAKLKKVQTITTKSNSIKQGKNQLFPVVMNGKEDVLWCTELERIFGFPVHYT

SEQ ID NO: 15495 - protein, 85 aa, Homo sapiens
GQTGKKSEKGPVCWRKRVKSEYMRLRQLKRFRRADEVKSMFSSNRQKILERTEILNQEWKQRRIQPVHILTSVSSLRGTRECSVT

SEQ ID NO: 15496 - protein, 85 aa, Homo sapiens
SDLDFPTQVIPLKTLNAVASVPIMYSWSPLQQNFMVEDETVLHNIPYMGDEVLDQDGTFIEELIKNYDGKVHGDRECGFINDEIF

SEQ ID NO: 15497 - protein, 85 aa, Homo sapiens
VELVNALGQYNDDDDDDDGDDPEEREEKQKDLEDHRDDKESRPPRKFPSDKIFEAISSMFPDKGTAEELKEKYKELTEQQLPGAL

SEQ ID NO: 15498 - protein, 85 aa, Homo sapiens
PPECTPNIDGPNAKSVQREQSLHSFHTLFCRRCFKYDCFLHRKCNYSFHATPNTYKRKNTETALDNKPCGPQCYQHLEGAKEFAA

SEQ ID NO: 15499 - protein, 85 aa, Homo sapiens
ALTAERIKTPPKRPGGRRRGRLPNNSSRPSTPTINVLESKDTDSDREAGTETGGENNDKEEEEKKDETSSSSEANSRCQTPIKMK

SEQ ID NO: 15500 - protein, 85 aa, Homo sapiens
PNIEPPENVEWSGAEASMFRVLIGTYYDNFCAIARLIGTKTCRQVYEFRVKESSIIAPAPAEDVDTPPRKKKRKHRLWAAHCRKI

SEQ ID NO: 15501 - protein, 85 aa, Homo sapiens
QLKKDGSSNHVYNYQPCDHPRQPCDSSCPCVIAQNFCEKFCQCSSECQNRFPGCRCKAQCNTKQCPCYLAVRECDPDLCLTCGAA

SEQ ID NO: 15502 - protein, 85 aa, Homo sapiens
DHWDSKNVSCKNCSIQRGSKKHLLLAPSDVAGWGIFIKDPVQKNEFISEYCGEIISQDEADRRGKVYDKYMCSFLFNLNNDFVVD

SEQ ID NO: 15503 - protein, 84 aa, Homo sapiens
CSFLFNLNNDFVVDATRKGNKIRFANHSVNPNCYAKVMMVNGDHRIGIFAKRAIQTGEELFFDYRYSQADALKYVGIEREMEIP

SEQ ID NO: 15504 - protein, 85 aa, Homo sapiens
SNRQKILERTEILNQEWKQRRIQPVHILTSVSSLRGTRECSVTSDLDFPTQVIPLKTLNAVASVPIMYSWSPLQQNFMVEDETVL

SEQ ID NO: 15505 - protein, 85 aa, Homo sapiens
HNIPYMGDEVLDQDGTFIEELIKNYDGKVHGDRECGFINDEIFVELVNALGQYNDDDDDDDGDDPEEREEKQKDLEDHRDDKESR

SEQ ID NO: 15506 - protein, 85 aa, Homo sapiens
PPRKFPSDKIFEAISSMFPDKGTAEELKEKYKELTEQQLPGALPPECTPNIDGPNAKSVQREQSLHSFHTLFCRRCFKYDCFLHR

SEQ ID NO: 15507 - protein, 85 aa, Homo sapiens
KCNYSFHATPNTYKRKNTETALDNKPCGPQCYQHLEGAKEFAAALTAERIKTPPKRPGGRRRGRLPNNSSRPSTPTINVLESKDT

SEQ ID NO: 15508 - protein, 85 aa, Homo sapiens
DSDREAGTETGGENNDKEEEEKKDETSSSSEANSRCQTPIKMKPNIEPPENVEWSGAEASMFRVLIGTYYDNFCAIARLIGTKTC

SEQ ID NO: 15509 - protein, 85 aa, Homo sapiens
RQVYEFRVKESSIIAPAPAEDVDTPPRKKKRKHRLWAAHCRKIQLKKDGSSNHVYNYQPCDHPRQPCDSSCPCVIAQNFCEKFCQ

SEQ ID NO: 15510 - protein, 85 aa, Homo sapiens
CSSECQNRFPGCRCKAQCNTKQCPCYLAVRECDPDLCLTCGAADHWDSKNVSCKNCSIQRGSKKHLLLAPSDVAGWGIFIKDPVQ

SEQ ID NO: 15511 - protein, 85 aa, Homo sapiens
KNEFISEYCGEIISQDEADRRGKVYDKYMCSFLFNLNNDFVVDATRKGNKIRFANHSVNPNCYAKVMMVNGDHRIGIFAKRAIQT

SEQ ID NO: 15512 - protein, 85 aa, Homo sapiens
HQRRPAEVEIKAGEGAGPWGQGAAVKTGSELSPVDGPVPGQMDSGPVYHGDSRQLSASGVPVNGAREPAGPSLLGTGGPWRVDQK

SEQ ID NO: 15513 - protein, 85 aa, Homo sapiens
PDWEAAPGPAHTARLEDAHDLVAFSAVAEAVSSYGALSTRLYETFNREMSREAGNNSRGPRPGPEGCSAGSEDLDTLQTALALAR

SEQ ID NO: 15514 - protein, 85 aa, Homo sapiens
HGMKPPNCNCDGPECPDYLEWLEGKIKSVVMEGGEERPRLPGPLPPGEAGLPAPSTRPLLSSEVPQISPQEGLPLSQSALSIAKE

SEQ ID NO: 15515 - protein, 85 aa, Homo sapiens
KNISLQTAIAIEALTQLSSALPQPSHSTPQASCPLPEALSPPAPFRSPQSYLRAPSWPVVPPEEHSSFAPDSSAFPPATPRTEFP

SEQ ID NO: 15516 - protein, 85 aa, Homo sapiens
EAWGTDTPPATPRSSWPMPRPSPDPMAELEQLLGSASDYIQSVFKRPEALPTKPKVKVEAPSSSPAPAPSPVLQREAPTPSSEPD

SEQ ID NO: 15517 - protein, 85 aa, Homo sapiens
THQKAQTALQQHLHHKRSLFLEQVHDTSFPAPSEPSAPGWWPPPSSPVPRLPDRPPKEKKKKLPTPAGGPVGTEKAAPGIKPSVR

SEQ ID NO: 15518 - protein, 85 aa, Homo sapiens
KPIQIKKSRPREAQPLFPPVRQIVLEGLRSPASQEVQAHPPAPLPASQGSAVPLPPEPSLALFAPSPSRDSLLPPTQEMRSPSPM

SEQ ID NO: 15519 - protein, 85 aa, Homo sapiens
TALQPGSTGPLPPADDKLEELIRQFEAEFGDSFGLPGPPSVPIQDPENQQTCLPAPESPFATRSPKQIKIESSGAVTVLSTTCFH

SEQ ID NO: 15520 - protein, 85 aa, Homo sapiens
SEEGGQEATPTKAENPLTPTLSGFLESPLKYLDTPTKSLLDTPAKRAQAEFPTCDCVEQIVEKDEGPYYTHLGSGPTVASIRELM

SEQ ID NO: 15521 - protein, 85 aa, Homo sapiens
EERYGEKGKAIRIEKVIYTGKEGKSSRGCPIAKWVIRRHTLEEKLLCLVRHRAGHHCQNAVIVILILAWEGIPRSLGDTLYQELT

SEQ ID NO: 15522 - protein, 85 aa, Homo sapiens
DTLRKYGNPTSRRCGLNDDRTCACQGKDPNTCGASFSFGCSWSMYFNGCKYARSKTPRKFRLAGDNPKEEEVLRKSFQDLATEVA

SEQ ID NO: 15523 - protein, 85 aa, Homo sapiens
PLYKRLAPQAYQNQVTNEEIAIDCRLGLKEGRPFAGVTACMDFCAHAHKDQHNLYNGCTVVCTLTKEDNRCVGKIPEDEQLHVLP

SEQ ID NO: 15524 - protein, 85 aa, Homo sapiens
MYKMANTDEFGSEENQNAKVGSGAIQVLTAFPREVRRLPEPAKSCRQRQLEARKAAAEKKKIQKEKLSTPEKIKQEALELAGITS

SEQ ID NO: 15525 - protein, 85 aa, Homo sapiens
DPGLSLKGGLSQQGLKPSLKVEPQNHFSSFKYSGNAVVESYSVLGNCRPSDPYSMNSVYSYHSYYAQPSLTSVNGFHSKYALPSF

SEQ ID NO: 15526 - protein, 85 aa, Homo sapiens
SYYGFPSSNPVFPSQFLGPGAWGHSGSSGSFEKKPDLHALHNSLSPAYGGAEFAELPSQAVPTDAHHPTPHHQQPAYPGPKEYLL

SEQ ID NO: 15527 - protein, 85 aa, Homo sapiens
PKAPLLHSVSRDPSPFAQSSNCYNRSIKQEPVDPLTQAEPVPRDAGKMGKTPLSEVSQNGGPSHLWGQYSGGPSMSPKRTNGVGG

SEQ ID NO: 15528 - protein, 85 aa, Homo sapiens
SWGVFSSGESPAIVPDKLSSFGASCLAPSHFTDGQWGLFPGEGQQAASHSGGRLRGKPWSPCKFGNSTSALAGPSLTEKPWALGA

SEQ ID NO: 15529 - protein, 85 aa, Homo sapiens
GDFNSALKGSPGFQDKLWNPMKGEEGRIPAAGASQLDRAWQSFGLPLGSSEKLFGALKSEEKLWDPFSLEEGPAEEPPSKGAVKE

SEQ ID NO: 15530 - protein, 85 aa, Homo sapiens
EKGGGGAEEEEEELWSDSEHNFLDENIGGVAVAPAHGSILIECARRELHATTPLKKPNRCHPTRISLVFYQHKNLNQPNHGLALW

SEQ ID NO: 15531 - protein, 85 aa, Homo sapiens
EAKMKQLAERARARQEEAARLGLGQQEAKLYGKKRKWGGTVVAEPQQKEKKGVVPTRQALAVPTDSAVTVSSYAYTKVTGPYSRW

SEQ ID NO: 15532 - protein, 84 aa, Homo sapiens
KMKQLAERARARQEEAARLGLGQQEAKLYGKKRKWGGTVVAEPQQKEKKGVVPTRQALAVPTDSAVTVSSYAYTKVTGPYSRWI

SEQ ID NO: 15533 - protein, 85 aa, Homo sapiens
DSGPVYHGDSRQLSASGVPVNGAREPAGPSLLGTGGPWRVDQKPDWEAAPGPAHTARLEDAHDLVAFSAVAEAVSSYGALSTRLY

SEQ ID NO: 15534 - protein, 85 aa, Homo sapiens
ETFNREMSREAGNNSRGPRPGPEGCSAGSEDLDTLQTALALARHGMKPPNCNCDGPECPDYLEWLEGKIKSVVMEGGEERPRLPG

SEQ ID NO: 15535 - protein, 85 aa, Homo sapiens
PLPPGEAGLPAPSTRPLLSSEVPQISPQEGLPLSQSALSIAKEKNISLQTAIAIEALTQLSSALPQPSHSTPQASCPLPEALSPP

SEQ ID NO: 15536 - protein, 85 aa, Homo sapiens
APFRSPQSYLRAPSWPVVPPEEHSSFAPDSSAFPPATPRTEFPEAWGTDTPPATPRSSWPMPRPSPDPMAELEQLLGSASDYIQS

SEQ ID NO: 15537 - protein, 85 aa, Homo sapiens
VFKRPEALPTKPKVKVEAPSSSPAPAPSPVLQREAPTPSSEPDTHQKAQTALQQHLHHKRSLFLEQVHDTSFPAPSEPSAPGWWP

SEQ ID NO: 15538 - protein, 85 aa, Homo sapiens
PPSSPVPRLPDRPPKEKKKKLPTPAGGPVGTEKAAPGIKPSVRKPIQIKKSRPREAQPLFPPVRQIVLEGLRSPASQEVQAHPPA

SEQ ID NO: 15539 - protein, 85 aa, Homo sapiens
PLPASQGSAVPLPPEPSLALFAPSPSRDSLLPPTQEMRSPSPMTALQPGSTGPLPPADDKLEELIRQFEAEFGDSFGLPGPPSVP

SEQ ID NO: 15540 - protein, 85 aa, Homo sapiens
IQDPENQQTCLPAPESPFATRSPKQIKIESSGAVTVLSTTCFHSEEGGQEATPTKAENPLTPTLSGFLESPLKYLDTPTKSLLDT

SEQ ID NO: 15541 - protein, 85 aa, Homo sapiens
PAKRAQAEFPTCDCVEQIVEKDEGPYYTHLGSGPTVASIRELMEERYGEKGKAIRIEKVIYTGKEGKSSRGCPIAKWVIRRHTLE

SEQ ID NO: 15542 - protein, 85 aa, Homo sapiens
EKLLCLVRHRAGHHCQNAVIVILILAWEGIPRSLGDTLYQELTDTLRKYGNPTSRRCGLNDDRTCACQGKDPNTCGASFSFGCSW

SEQ ID NO: 15543 - protein, 85 aa, Homo sapiens
SMYFNGCKYARSKTPRKFRLAGDNPKEEEVLRKSFQDLATEVAPLYKRLAPQAYQNQVTNEEIAIDCRLGLKEGRPFAGVTACMD

SEQ ID NO: 15544 - protein, 85 aa, Homo sapiens
FCAHAHKDQHNLYNGCTVVCTLTKEDNRCVGKIPEDEQLHVLPLYKMANTDEFGSEENQNAKVGSGAIQVLTAFPREVRRLPEPA

SEQ ID NO: 15545 - protein, 85 aa, Homo sapiens
KSCRQRQLEARKAAAEKKKIQKEKLSTPEKIKQEALELAGITSDPGLSLKGGLSQQGLKPSLKVEPQNHFSSFKYSGNAVVESYS

SEQ ID NO: 15546 - protein, 85 aa, Homo sapiens
VLGNCRPSDPYSMNSVYSYHSYYAQPSLTSVNGFHSKYALPSFSYYGFPSSNPVFPSQFLGPGAWGHSGSSGSFEKKPDLHALHN

SEQ ID NO: 15547 - protein, 85 aa, Homo sapiens
SLSPAYGGAEFAELPSQAVPTDAHHPTPHHQQPAYPGPKEYLLPKAPLLHSVSRDPSPFAQSSNCYNRSIKQEPVDPLTQAEPVP

SEQ ID NO: 15548 - protein, 85 aa, Homo sapiens
RDAGKMGKTPLSEVSQNGGPSHLWGQYSGGPSMSPKRTNGVGGSWGVFSSGESPAIVPDKLSSFGASCLAPSHFTDGQWGLFPGE

SEQ ID NO: 15549 - protein, 85 aa, Homo sapiens
GQQAASHSGGRLRGKPWSPCKFGNSTSALAGPSLTEKPWALGAGDFNSALKGSPGFQDKLWNPMKGEEGRIPAAGASQLDRAWQS

SEQ ID NO: 15550 - protein, 85 aa, Homo sapiens
FGLPLGSSEKLFGALKSEEKLWDPFSLEEGPAEEPPSKGAVKEEKGGGGAEEEEEELWSDSEHNFLDENIGGVAVAPAHGSILIE

SEQ ID NO: 15551 - protein, 85 aa, Homo sapiens
CARRELHATTPLKKPNRCHPTRISLVFYQHKNLNQPNHGLALWEAKMKQLAERARARQEEAARLGLGQQEAKLYGKKRKWGGTVV

SEQ ID NO: 15552 - protein, 85 aa, Homo sapiens
EQDRTNHVEGNRLSPFLIPSPPICQTEPLATKLQNGSPLPERAHPEVNGDTKWHSFKSYYGIPCMKGSQNSRVSPDFTQESRGYS

SEQ ID NO: 15553 - protein, 85 aa, Homo sapiens
KCLQNGGIKRTVSEPSLSGLLQIKKLKQDQKANGERRNFGVSQERNPGESSQPNVSDLSDKKESVSSVAQENAVKDFTSFSTHNC

SEQ ID NO: 15554 - protein, 85 aa, Homo sapiens
SGPENPELQILNEQEGKSANYHDKNIVLLKNKAVLMPNGATVSASSVEHTHGELLEKTLSQYYPDCVSIAVQKTTSHINAINSQA

SEQ ID NO: 15555 - protein, 85 aa, Homo sapiens
TNELSCEITHPSHTSGQINSAQTSNSELPPKPAAVVSEACDADDADNASKLAAMLNTCSFQKPEQLQQQKSVFEICPSPAENNIQ

SEQ ID NO: 15556 - protein, 85 aa, Homo sapiens
GTTKLASGEEFCSGSSSNLQAPGGSSERYLKQNEMNGAYFKQSSVFTKDSFSATTTPPPPSQLLLSPPPPLPQVPQLPSEGKSTL

SEQ ID NO: 15557 - protein, 85 aa, Homo sapiens
NGGVLEEHHHYPNQSNTTLLREVKIEGKPEAPPSQSPNPSTHVCSPSPMLSERPQNNCVNRNDIQTAGTMTVPLCSEKTRPMSEH

SEQ ID NO: 15558 - protein, 85 aa, Homo sapiens
LKHNPPIFGSSGELQDNCQQLMRNKEQEILKGRDKEQTRDLVPPTQHYLKPGWIELKAPRFHQAESHLKRNEASLPSILQYQPNL

SEQ ID NO: 15559 - protein, 85 aa, Homo sapiens
SNQMTSKQYTGNSNMPGGLPRQAYTQKTTQLEHKSQMYQVEMNQGQSQGTVDQHLQFQKPSHQVHFSKTDHLPKAHVQSLCGTRF

SEQ ID NO: 15560 - protein, 85 aa, Homo sapiens
HFQQRADSQTEKLMSPVLKQHLNQQASETEPFSNSHLLQHKPHKQAAQTQPSQSSHLPQNQQQQQKLQIKNKEEILQTFPHPQSN

SEQ ID NO: 15561 - protein, 85 aa, Homo sapiens
NDQQREGSFFGQTKVEECFHGENQYSKSSEFETHNVQMGLEEVQNINRRNSPYSQTMKSSACKIQVSCSNNTHLVSENKEQTTHP

SEQ ID NO: 15562 - protein, 85 aa, Homo sapiens
ELFAGNKTQNLHHMQYFPNNVIPKQDLLHRCFQEQEQKSQQASVLQGYKNRNQDMSGQQAAQLAQQRYLIHNHANVFPVPDQGGS

SEQ ID NO: 15563 - protein, 85 aa, Homo sapiens
HTQTPPQKDTQKHAALRWHLLQKQEQQQTQQPQTESCHSQMHRPIKVEPGCKPHACMHTAPPENKTWKKVTKQENPPASCDNVQQ

SEQ ID NO: 15564 - protein, 85 aa, Homo sapiens
KSIIETMEQHLKQFHAKSLFDHKALTLKSQKQVKVEMSGPVTVLTRQTTAAELDSHTPALEQQTTSSEKTPTKRTAASVLNNFIE

SEQ ID NO: 15565 - protein, 84 aa, Homo sapiens
EQQTTSSEKTPTKRTAASVLNNFIESPSKLLDTPIKNLLDTPVKTQYDFPSCRCVGKCQKCTETHGVYPELANLSSDMGFSFFF

SEQ ID NO: 15566 - protein, 85 aa, Homo sapiens
AHPEVNGDTKWHSFKSYYGIPCMKGSQNSRVSPDFTQESRGYSKCLQNGGIKRTVSEPSLSGLLQIKKLKQDQKANGERRNFGVS

SEQ ID NO: 15567 - protein, 85 aa, Homo sapiens
QERNPGESSQPNVSDLSDKKESVSSVAQENAVKDFTSFSTHNCSGPENPELQILNEQEGKSANYHDKNIVLLKNKAVLMPNGATV

SEQ ID NO: 15568 - protein, 85 aa, Homo sapiens
SASSVEHTHGELLEKTLSQYYPDCVSIAVQKTTSHINAINSQATNELSCEITHPSHTSGQINSAQTSNSELPPKPAAVVSEACDA

SEQ ID NO: 15569 - protein, 85 aa, Homo sapiens
DDADNASKLAAMLNTCSFQKPEQLQQQKSVFEICPSPAENNIQGTTKLASGEEFCSGSSSNLQAPGGSSERYLKQNEMNGAYFKQ

SEQ ID NO: 15570 - protein, 85 aa, Homo sapiens
SSVFTKDSFSATTTPPPPSQLLLSPPPPLPQVPQLPSEGKSTLNGGVLEEHHHYPNQSNTTLLREVKIEGKPEAPPSQSPNPSTH

SEQ ID NO: 15571 - protein, 85 aa, Homo sapiens
VCSPSPMLSERPQNNCVNRNDIQTAGTMTVPLCSEKTRPMSEHLKHNPPIFGSSGELQDNCQQLMRNKEQEILKGRDKEQTRDLV

SEQ ID NO: 15572 - protein, 85 aa, Homo sapiens
PPTQHYLKPGWIELKAPRFHQAESHLKRNEASLPSILQYQPNLSNQMTSKQYTGNSNMPGGLPRQAYTQKTTQLEHKSQMYQVEM

SEQ ID NO: 15573 - protein, 85 aa, Homo sapiens
NQGQSQGTVDQHLQFQKPSHQVHFSKTDHLPKAHVQSLCGTRFHFQQRADSQTEKLMSPVLKQHLNQQASETEPFSNSHLLQHKP

SEQ ID NO: 15574 - protein, 85 aa, Homo sapiens
HKQAAQTQPSQSSHLPQNQQQQQKLQIKNKEEILQTFPHPQSNNDQQREGSFFGQTKVEECFHGENQYSKSSEFETHNVQMGLEE

SEQ ID NO: 15575 - protein, 85 aa, Homo sapiens
VQNINRRNSPYSQTMKSSACKIQVSCSNNTHLVSENKEQTTHPELFAGNKTQNLHHMQYFPNNVIPKQDLLHRCFQEQEQKSQQA

SEQ ID NO: 15576 - protein, 85 aa, Homo sapiens
SVLQGYKNRNQDMSGQQAAQLAQQRYLIHNHANVFPVPDQGGSHTQTPPQKDTQKHAALRWHLLQKQEQQQTQQPQTESCHSQMH

SEQ ID NO: 15577 - protein, 85 aa, Homo sapiens
RPIKVEPGCKPHACMHTAPPENKTWKKVTKQENPPASCDNVQQKSIIETMEQHLKQFHAKSLFDHKALTLKSQKQVKVEMSGPVT

SEQ ID NO: 15578 - protein, 85 aa, Homo sapiens
VLTRQTTAAELDSHTPALEQQTTSSEKTPTKRTAASVLNNFIESPSKLLDTPIKNLLDTPVKTQYDFPSCRCVGKCQKCTETHGV

SEQ ID NO: 15579 - protein, 85 aa, Homo sapiens
VAGMLGLREEKSEDQDLQGLKDKPLKFKKVKKDKKEEKEGKHEPVQPSAHHSAEPAEAGKAETSEGSGSAPAVPEASASPKQRRS

SEQ ID NO: 15580 - protein, 85 aa, Homo sapiens
IIRDRGPMYDDPTLPEGWTRKLKQRKSGRSAGKYDVYLINPQGKAFRSKVELIAYFEKVGDTSLDPNDFDFTVTGRGSPSRREQK

SEQ ID NO: 15581 - protein, 85 aa, Homo sapiens
PPKKPKSPKAPGTGRGRGRPKGSGTTRPKAATSEGVQVKRVLEKSPGKLLVKMPFQTSPGGKAEGGGATTSTQVMVIKRPGRKRK

SEQ ID NO: 15582 - protein, 85 aa, Homo sapiens
AEADPQAIPKKRGRKPGSVVAAAAAEAKKKAVKESSIRSVQETVLPIKKRKTRETVSIEVKEVVKPLLVSTLGEKSGKGLKTCKS

SEQ ID NO: 15583 - protein, 85 aa, Homo sapiens
PGRKSKESSPKGRSSSASSPPKKEHHHHHHHSESPKAPVPLLPPLPPPPPEPESSEDPTSPPEPQDLSSSVCKEEKMPRGGSLES

SEQ ID NO: 15584 - protein, 84 aa, Homo sapiens
PEPQDLSSSVCKEEKMPRGGSLESDGCPKEPAKTQPAVATAATAAEKYKHRGEGERKDIVSSSMPRPNREEPVDSRTPVTERVS

SEQ ID NO: 15585 - protein, 85 aa, Homo sapiens
EPVQPSAHHSAEPAEAGKAETSEGSGSAPAVPEASASPKQRRSIIRDRGPMYDDPTLPEGWTRKLKQRKSGRSAGKYDVYLINPQ

SEQ ID NO: 15586 - protein, 85 aa, Homo sapiens
GKAFRSKVELIAYFEKVGDTSLDPNDFDFTVTGRGSPSRREQKPPKKPKSPKAPGTGRGRGRPKGSGTTRPKAATSEGVQVKRVL

SEQ ID NO: 15587 - protein, 85 aa, Homo sapiens
EKSPGKLLVKMPFQTSPGGKAEGGGATTSTQVMVIKRPGRKRKAEADPQAIPKKRGRKPGSVVAAAAAEAKKKAVKESSIRSVQE

SEQ ID NO: 15588 - protein, 85 aa, Homo sapiens
TVLPIKKRKTRETVSIEVKEVVKPLLVSTLGEKSGKGLKTCKSPGRKSKESSPKGRSSSASSPPKKEHHHHHHHSESPKAPVPLL

SEQ ID NO: 15589 - protein, 85 aa, Homo sapiens
PPLPPPPPEPESSEDPTSPPEPQDLSSSVCKEEKMPRGGSLESDGCPKEPAKTQPAVATAATAAEKYKHRGEGERKDIVSSSMPR

SEQ ID NO: 15590 - protein, 85 aa, Homo sapiens
AENVVEPGPPSAKRPKLSSPALSASASDGTDFGSLFDLEHDLPDELINSTELGLTNGGDINQLQTSLGMVQDAASKHKQLSELLR

SEQ ID NO: 15591 - protein, 85 aa, Homo sapiens
SGSSPNLNMGVGGPGQVMASQAQQSSPGLGLINSMVKSPMTQAGLTSPNMGMGTSGPNQGPTQSTGMMNSPVNQPAMGMNTGMNA

SEQ ID NO: 15592 - protein, 85 aa, Homo sapiens
GMNPGMLAAGNGQGIMPNQVMNGSIGAGRGRQNMQYPNPGMGSAGNLLTEPLQQGSPQMGGQTGLRGPQPLKMGMMNNPNPYGSP

SEQ ID NO: 15593 - protein, 85 aa, Homo sapiens
YTQNPGQQIGASGLGLQIQTKTVLSNNLSPFAMDKKAVPGGGMPNMGQQPAPQVQQPGLVTPVAQGMGSGAHTADPEKRKLIQQQ

SEQ ID NO: 15594 - protein, 85 aa, Homo sapiens
LVLLLHAHKCQRREQANGEVRQCNLPHCRTMKNVLNHMTHCQSGKSCQVAHCASSRQIISHWKNCTRHDCPVCLPLKNAGDKRNQ

SEQ ID NO: 15595 - protein, 85 aa, Homo sapiens
QPILTGAPVGLGNPSSLGVGQQSAPNLSTVSQIDPSSIERAYAALGLPYQVNQMPTQPQVQAKNQQNQQPGQSPQGMRPMSNMSA

SEQ ID NO: 15596 - protein, 85 aa, Homo sapiens
SPMGVNGGVGVQTPSLLSDSMLHSAINSQNPMMSENASVPSLGPMPTAAQPSTTGIRKQWHEDITQDLRNHLVHKLVQAIFPTPD

SEQ ID NO: 15597 - protein, 85 aa, Homo sapiens
PAALKDRRMENLVAYARKVEGDMYESANNRAEYYHLLAEKIYKIQKELEEKRRTRLQKQNMLPNAAGMVPVSMNPGPNMGQPQPG

SEQ ID NO: 15598 - protein, 85 aa, Homo sapiens
MTSNGPLPDPSMIRGSVPNQMMPRITPQSGLNQFGQMSMAQPPIVPRQTPPLQHHGQLAQPGALNPPMGYGPRMQQPSNQGQFLP

SEQ ID NO: 15599 - protein, 85 aa, Homo sapiens
QTQFPSQGMNVTNIPLAPSSGQAPVSQAQMSSSSCPVNSPIMPPGSQGSHIHCPQLPQPALHQNSPSPVPSRTPTPHHTPPSIGA

SEQ ID NO: 15600 - protein, 85 aa, Homo sapiens
QQPPATTIPAPVPTPPAMPPGPQSQALHPPPRQTPTPPTTQLPQQVQPSLPAAPSADQPQQQPRSQQSTAASVPTPTAPLLPPQP

SEQ ID NO: 15601 - protein, 85 aa, Homo sapiens
ATPLSQPAVSIEGQVSNPPSTSSTEVNSQAIAEKQPSQEVKMEAKMEVDQPEPADTQPEDISESKVEDCKMESTETEERSTELKT

SEQ ID NO: 15602 - protein, 85 aa, Homo sapiens
EIKEEEDQPSTSATQSSPAPGQSKKKIFKPEELRQALMPTLEALYRQDPESLPFRQPVDPQLLGIPDYFDIVKSPMDLSTIKRKL

SEQ ID NO: 15603 - protein, 85 aa, Homo sapiens
DTGQYQEPWQYVDDIWLMFNNAWLYNRKTSRVYKYCSKLSEVFEQEIDPVMQSLGYCCGRKLEFSPQTLCCYGKQLCTIPRDATY

SEQ ID NO: 15604 - protein, 85 aa, Homo sapiens
YSYQNRYHFCEKCFNEIQGESVSLGDDPSQPQTTINKEQFSKRKNDTLDPELFVECTECGRKMHQICVLHHEIIWPAGFVCDGCL

SEQ ID NO: 15605 - protein, 85 aa, Homo sapiens
KKSARTRKENKFSAKRLPSTRLGTFLENRVNDFLRRQNHPESGEVTVRVVHASDKTVEVKPGMKARFVDSGEMAESFPYRTKALF

SEQ ID NO: 15606 - protein, 85 aa, Homo sapiens
AFEEIDGVDLCFFGMHVQEYGSDCPPPNQRRVYISYLDSVHFFRPKCLRTAVYHEILIGYLEYVKKLGYTTGHIWACPPSEGDDY

SEQ ID NO: 15607 - protein, 85 aa, Homo sapiens
IFHCHPPDQKIPKPKRLQEWYKKMLDKAVSERIVHDYKDIFKQATEDRLTSAKELPYFEGDFWPNVLEESIKELEQEEEERKREE

SEQ ID NO: 15608 - protein, 85 aa, Homo sapiens
NTSNESTDVTKGDSKNAKKKNNKKTSKNKSSLSRGNKKKPGMPNVSNDLSQKLYATMEKHKEVFFVIRLIAGPAANSLPPIVDPD

SEQ ID NO: 15609 - protein, 85 aa, Homo sapiens
PLIPCDLMDGRDAFLTLARDKHLEFSSLRRAQWSTMCMLVELHTQSQDRFVYTCNECKHHVETRWHCTVCEDYDLCITCYNTKNH

SEQ ID NO: 15610 - protein, 85 aa, Homo sapiens
DHKMEKLGLGLDDESNNQQAAATQSPGDSRRLSIQRCIQSLVHACQCRNANCSLPSCQKMKRVVQHTKGCKRKTNGGCPICKQLI

SEQ ID NO: 15611 - protein, 85 aa, Homo sapiens
ALCCYHAKHCQENKCPVPFCLNIKQKLRQQQLQHRLQQAQMLRRRMASMQRTGVVGQQQGLPSPTPATPTTPTGQQPTTPQTPQP

SEQ ID NO: 15612 - protein, 85 aa, Homo sapiens
TSQPQPTPPNSMPPYLPRTQAAGPVSQGKAAGQVTPPTPPQTAQPPLPGPPPAAVEMAMQIQRAAETQRQMAHVQIFQRPIQHQM

SEQ ID NO: 15613 - protein, 85 aa, Homo sapiens
PPMTPMAPMGMNPPPMTRGPSGHLEPGMGPTGMQQQPPWSQGGLPQPQQLQSGMPRPAMMSVAQHGQPLNMAPQPGLGQVGISPL

SEQ ID NO: 15614 - protein, 85 aa, Homo sapiens
KPGTVSQQALQNLLRTLRSPSSPLQQQQVLSILHANPQLLAAFIKQRAAKYANSNPQPIPGQPGMPQGQPGLQPPTMPGQQGVHS

SEQ ID NO: 15615 - protein, 85 aa, Homo sapiens
NPAMQNMNPMQAGVQRAGLPQQQPQQQLQPPMGGMSPQAQQMNMNHNTMPSQFRDILRRQQMMQQQQQQGAGPGIGPGMANHNQF

SEQ ID NO: 15616 - protein, 85 aa, Homo sapiens
QQPQGVGYPPQQQQRMQHHMQQMQQGNMGQIGQLPQALGAEAGASLQAYQQRLLQQQMGSPVQPNPMSPQQHMLPNQAQSPHLQG

SEQ ID NO: 15617 - protein, 85 aa, Homo sapiens
QQIPNSLSNQVRSPQPVPSPRPQSQPPHSSPSPRMQPQPSPHHVSPQTSSPHPGLVAAQANPMEQGHFASPDQNSMLSQLASNPG

SEQ ID NO: 15618 - protein, 84 aa, Homo sapiens
MQPQPSPHHVSPQTSSPHPGLVAAQANPMEQGHFASPDQNSMLSQLASNPGMANLHGASATDLGLSTDNSDLNSNLSQSTLDIH

SEQ ID NO: 15619 - protein, 85 aa, Homo sapiens
PDELINSTELGLTNGGDINQLQTSLGMVQDAASKHKQLSELLRSGSSPNLNMGVGGPGQVMASQAQQSSPGLGLINSMVKSPMTQ

SEQ ID NO: 15620 - protein, 85 aa, Homo sapiens
AGLTSPNMGMGTSGPNQGPTQSTGMMNSPVNQPAMGMNTGMNAGMNPGMLAAGNGQGIMPNQVMNGSIGAGRGRQNMQYPNPGMG

SEQ ID NO: 15621 - protein, 85 aa, Homo sapiens
SAGNLLTEPLQQGSPQMGGQTGLRGPQPLKMGMMNNPNPYGSPYTQNPGQQIGASGLGLQIQTKTVLSNNLSPFAMDKKAVPGGG

SEQ ID NO: 15622 - protein, 85 aa, Homo sapiens
MPNMGQQPAPQVQQPGLVTPVAQGMGSGAHTADPEKRKLIQQQLVLLLHAHKCQRREQANGEVRQCNLPHCRTMKNVLNHMTHCQ

SEQ ID NO: 15623 - protein, 85 aa, Homo sapiens
SGKSCQVAHCASSRQIISHWKNCTRHDCPVCLPLKNAGDKRNQQPILTGAPVGLGNPSSLGVGQQSAPNLSTVSQIDPSSIERAY

SEQ ID NO: 15624 - protein, 85 aa, Homo sapiens
AALGLPYQVNQMPTQPQVQAKNQQNQQPGQSPQGMRPMSNMSASPMGVNGGVGVQTPSLLSDSMLHSAINSQNPMMSENASVPSL

SEQ ID NO: 15625 - protein, 85 aa, Homo sapiens
GPMPTAAQPSTTGIRKQWHEDITQDLRNHLVHKLVQAIFPTPDPAALKDRRMENLVAYARKVEGDMYESANNRAEYYHLLAEKIY

SEQ ID NO: 15626 - protein, 85 aa, Homo sapiens
KIQKELEEKRRTRLQKQNMLPNAAGMVPVSMNPGPNMGQPQPGMTSNGPLPDPSMIRGSVPNQMMPRITPQSGLNQFGQMSMAQP

SEQ ID NO: 15627 - protein, 85 aa, Homo sapiens
PIVPRQTPPLQHHGQLAQPGALNPPMGYGPRMQQPSNQGQFLPQTQFPSQGMNVTNIPLAPSSGQAPVSQAQMSSSSCPVNSPIM

SEQ ID NO: 15628 - protein, 85 aa, Homo sapiens
PPGSQGSHIHCPQLPQPALHQNSPSPVPSRTPTPHHTPPSIGAQQPPATTIPAPVPTPPAMPPGPQSQALHPPPRQTPTPPTTQL

SEQ ID NO: 15629 - protein, 85 aa, Homo sapiens
PQQVQPSLPAAPSADQPQQQPRSQQSTAASVPTPTAPLLPPQPATPLSQPAVSIEGQVSNPPSTSSTEVNSQAIAEKQPSQEVKM

SEQ ID NO: 15630 - protein, 85 aa, Homo sapiens
EAKMEVDQPEPADTQPEDISESKVEDCKMESTETEERSTELKTEIKEEEDQPSTSATQSSPAPGQSKKKIFKPEELRQALMPTLE

SEQ ID NO: 15631 - protein, 85 aa, Homo sapiens
ALYRQDPESLPFRQPVDPQLLGIPDYFDIVKSPMDLSTIKRKLDTGQYQEPWQYVDDIWLMFNNAWLYNRKTSRVYKYCSKLSEV

SEQ ID NO: 15632 - protein, 85 aa, Homo sapiens
FEQEIDPVMQSLGYCCGRKLEFSPQTLCCYGKQLCTIPRDATYYSYQNRYHFCEKCFNEIQGESVSLGDDPSQPQTTINKEQFSK

SEQ ID NO: 15633 - protein, 85 aa, Homo sapiens
RKNDTLDPELFVECTECGRKMHQICVLHHEIIWPAGFVCDGCLKKSARTRKENKFSAKRLPSTRLGTFLENRVNDFLRRQNHPES

SEQ ID NO: 15634 - protein, 85 aa, Homo sapiens
GEVTVRVVHASDKTVEVKPGMKARFVDSGEMAESFPYRTKALFAFEEIDGVDLCFFGMHVQEYGSDCPPPNQRRVYISYLDSVHF

SEQ ID NO: 15635 - protein, 85 aa, Homo sapiens
FRPKCLRTAVYHEILIGYLEYVKKLGYTTGHIWACPPSEGDDYIFHCHPPDQKIPKPKRLQEWYKKMLDKAVSERIVHDYKDIFK

SEQ ID NO: 15636 - protein, 85 aa, Homo sapiens
QATEDRLTSAKELPYFEGDFWPNVLEESIKELEQEEEERKREENTSNESTDVTKGDSKNAKKKNNKKTSKNKSSLSRGNKKKPGM

SEQ ID NO: 15637 - protein, 85 aa, Homo sapiens
PNVSNDLSQKLYATMEKHKEVFFVIRLIAGPAANSLPPIVDPDPLIPCDLMDGRDAFLTLARDKHLEFSSLRRAQWSTMCMLVEL

SEQ ID NO: 15638 - protein, 85 aa, Homo sapiens
HTQSQDRFVYTCNECKHHVETRWHCTVCEDYDLCITCYNTKNHDHKMEKLGLGLDDESNNQQAAATQSPGDSRRLSIQRCIQSLV

SEQ ID NO: 15639 - protein, 85 aa, Homo sapiens
HACQCRNANCSLPSCQKMKRVVQHTKGCKRKTNGGCPICKQLIALCCYHAKHCQENKCPVPFCLNIKQKLRQQQLQHRLQQAQML

SEQ ID NO: 15640 - protein, 85 aa, Homo sapiens
RRRMASMQRTGVVGQQQGLPSPTPATPTTPTGQQPTTPQTPQPTSQPQPTPPNSMPPYLPRTQAAGPVSQGKAAGQVTPPTPPQT

SEQ ID NO: 15641 - protein, 85 aa, Homo sapiens
AQPPLPGPPPAAVEMAMQIQRAAETQRQMAHVQIFQRPIQHQMPPMTPMAPMGMNPPPMTRGPSGHLEPGMGPTGMQQQPPWSQG

SEQ ID NO: 15642 - protein, 85 aa, Homo sapiens
GLPQPQQLQSGMPRPAMMSVAQHGQPLNMAPQPGLGQVGISPLKPGTVSQQALQNLLRTLRSPSSPLQQQQVLSILHANPQLLAA

SEQ ID NO: 15643 - protein, 85 aa, Homo sapiens
FIKQRAAKYANSNPQPIPGQPGMPQGQPGLQPPTMPGQQGVHSNPAMQNMNPMQAGVQRAGLPQQQPQQQLQPPMGGMSPQAQQM

SEQ ID NO: 15644 - protein, 85 aa, Homo sapiens
NMNHNTMPSQFRDILRRQQMMQQQQQQGAGPGIGPGMANHNQFQQPQGVGYPPQQQQRMQHHMQQMQQGNMGQIGQLPQALGAEA

SEQ ID NO: 15645 - protein, 85 aa, Homo sapiens
GASLQAYQQRLLQQQMGSPVQPNPMSPQQHMLPNQAQSPHLQGQQIPNSLSNQVRSPQPVPSPRPQSQPPHSSPSPRMQPQPSPH

SEQ ID NO: 15646 - protein, 85 aa, Homo sapiens
NNSQGRVTFEDVTVNFTQGEWQRLNPEQRNLYRDVMLENYSNLVSVGQGETTKPDVILRLEQGKEPWLEEEEVLGSGRAEKNGDI

SEQ ID NO: 15647 - protein, 85 aa, Homo sapiens
GGQIWKPKDVKESLAREVPSINKETLTTQKGVECDGSKKILPLGIDDVSSLQHYVQNNSHDDNGYRKLVGNNPSKFVGQQLKCNA

SEQ ID NO: 15648 - protein, 85 aa, Homo sapiens
CRKLFSSKSRLQSHLRRHACQKPFECHSCGRAFGEKWKLDKHQKTHAEERPYKCENCGNAYKQKSNLFQHQKMHTKEKPYQCKTC

SEQ ID NO: 15649 - protein, 85 aa, Homo sapiens
GKAFSWKSSCINHEKIHNAKKSYQCNECEKSFRQNSTLIQHKKVHTGQKPFQCTDCGKAFIYKSDLVKHQRIHTGEKPYKCSICE

SEQ ID NO: 15650 - protein, 85 aa, Homo sapiens
KAFSQKSNVIDHEKIHTGKRAYECDLCGNTFIQKKNLIQHKKIHTGEKPYECNRCGKAFFQKSNLHSHQKTHSGERTYRCSECGK

SEQ ID NO: 15651 - protein, 84 aa, Homo sapiens
KPYECNRCGKAFFQKSNLHSHQKTHSGERTYRCSECGKTFIRKLNLSLHKKTHTGQKPYGCSECGKAFADRSYLVRHQKRIHSR

SEQ ID NO: 15652 - protein, 85 aa, Homo sapiens
LVSVGQGETTKPDVILRLEQGKEPWLEEEEVLGSGRAEKNGDIGGQIWKPKDVKESLAREVPSINKETLTTQKGVECDGSKKILP

SEQ ID NO: 15653 - protein, 85 aa, Homo sapiens
MGIDDVSSLQHYVQNNSHDDNGYRKLVGNNPSKFVGQQLKCNACRKLFSSKSRLQSHLRRHACQKPFECHSCGRAFGEKWKLDKH

SEQ ID NO: 15654 - protein, 85 aa, Homo sapiens
QKTHAEERPYKCENCGNAYKQKSNLFQHQKMHTKEKPYQCKTCGKAFSWKSSCINHEKIHNAKKSYQCNECEKSFRQNSTLIQHK

SEQ ID NO: 15655 - protein, 85 aa, Homo sapiens
KVHTGQKPFQCTDCGKAFIYKSDLVKHQRIHTGEKPYKCSICEKAFSQKSNVIDHEKIHTGKRAYECDLCGNTFIQKKNLIQHKK

SEQ ID NO: 15656 - protein, 85 aa, Homo sapiens
IHTGEKPYECNRCGKAFFQKSNLHSHQKTHSGERTYRCSECGKTFIRKLNLSLHKKTHTGQKPYGCSECGKAFADRSYLVRHQKR

SEQ ID NO: 15657 - protein, 85 aa, Homo sapiens
AAIPALDPEAEPSMDVILVGSSELSSSVSPGTGRDLIAYEVKANQRNIEDICICCGSLQVHTQHPLFEGGICAPCKDKFLDALFL

SEQ ID NO: 15658 - protein, 85 aa, Homo sapiens
YDDDGYQSYCSICCSGETLLICGNPDCTRCYCFECVDSLVGPGTSGKVHAMSNWVCYLCLPSSRSGLLQRRRKWRSQLKAFYDRE

SEQ ID NO: 15659 - protein, 85 aa, Homo sapiens
SENPLEMFETVPVWRRQPVRVLSLFEDIKKELTSLGFLESGSDPGQLKHVVDVTDTVRKDVEEWGPFDLVYGATPPLGHTCDRPP

SEQ ID NO: 15660 - protein, 85 aa, Homo sapiens
SWYLFQFHRLLQYARPKPGSPRPFFWMFVDNLVLNKEDLDVASRFLEMEPVTIPDVHGGSLQNAVRVWSNIPAIRSSRHWALVSE

SEQ ID NO: 15661 - protein, 84 aa, Homo sapiens
MEPVTIPDVHGGSLQNAVRVWSNIPAIRSSRHWALVSEEELSLLAQNKQSSKLAAKWPTKLVKNCFLPLREYFKYFSTELTSSL

SEQ ID NO: 15662 - protein, 85 aa, Homo sapiens
ANQRNIEDICICCGSLQVHTQHPLFEGGICAPCKDKFLDALFLYDDDGYQSYCSICCSGETLLICGNPDCTRCYCFECVDSLVGP

SEQ ID NO: 15663 - protein, 85 aa, Homo sapiens
GTSGKVHAMSNWVCYLCLPSSRSGLLQRRRKWRSQLKAFYDRESENPLEMFETVPVWRRQPVRVLSLFEDIKKELTSLGFLESGS

SEQ ID NO: 15664 - protein, 85 aa, Homo sapiens
DPGQLKHVVDVTDTVRKDVEEWGPFDLVYGATPPLGHTCDRPPSWYLFQFHRLLQYARPKPGSPRPFFWMFVDNLVLNKEDLDVA

SEQ ID NO: 15665 - protein, 85 aa, Homo sapiens
SRFLEMEPVTIPDVHGGSLQNAVRVWSNIPAIRSSRHWALVSEEELSLLAQNKQSSKLAAKWPTKLVKNCFLPLREYFKYFSTEL

SEQ ID NO: 15666 - protein, 85 aa, Homo sapiens
SPSKLLDTPIKNLLDTPVKTQYDFPSCRCVGLDRRVKLLGLKESSILVKKAKVLRDVLLLSGWFAEAAVKRSYCVWCGSELATPV

SEQ ID NO: 15667 - protein, 84 aa, Homo sapiens
LLDTPIKNLLDTPVKTQYDFPSCRCVGLDRRVKLLGLKESSILVKKAKVLRDVLLLSGWFAEAAVKRSYCVWCGSELATPVRLQ

SEQ ID NO: 15668 - protein, 85 aa, Homo sapiens
VLTRQTTAAELDSHTPALEQQTTSSEKTPTKRTAASVLNNFIESPSKLLDTPIKNLLDTPVKTQYDFPSCRCVGLDRRVKLLGLK

SEQ ID NO: 15669 - protein, 85 aa, Homo sapiens
GQTGKKSEKGPVCWRKRVKSEYMRLRQLKRFRRADEVKSMFSSNRQKILERTEILNQEWKQRRIQPVHILTSVSSLRGTREVEDE

SEQ ID NO: 15670 - protein, 85 aa, Homo sapiens
TVLHNIPYMGDEVLDQDGTFIEELIKNYDGKVHGDRECGFINDEIFVELVNALGQYNDDDDDDDGDDPEEREEKQKDLEDHRDDK

SEQ ID NO: 15671 - protein, 85 aa, Homo sapiens
ESRPPRKFPSDKIFEAISSMFPDKGTAEELKEKYKELTEQQLPGALPPECTPNIDGPNAKSVQREQSLHSFHTLFCRRCFKYDCF

SEQ ID NO: 15672 - protein, 85 aa, Homo sapiens
LHPFHATPNTYKRKNTETALDNKPCGPQCYQHLEGAKEFAAALTAERIKTPPKRPGGRRRGRLPNNSSRPSTPTINVLESKDTDS

SEQ ID NO: 15673 - protein, 85 aa, Homo sapiens
DREAGTETGGENNDKEEEEKKDETSSSSEANSRCQTPIKMKPNIEPPENVEWSGAEASMFRVLIGTYYDNFCAIARLIGTKTCRQ

SEQ ID NO: 15674 - protein, 85 aa, Homo sapiens
VYEFRVKESSIIAPAPAEDVDTPPRKKKRKHRLWAAHCRKIQLKKDGSSNHVYNYQPCDHPRQPCDSSCPCVIAQNFCEKFCQCS

SEQ ID NO: 15675 - protein, 85 aa, Homo sapiens
SECQNRFPGCRCKAQCNTKQCPCYLAVRECDPDLCLTCGAADHWDSKNVSCKNCSIQRGSKKHLLLAPSDVAGWGIFIKDPVQKN

SEQ ID NO: 15676 - protein, 85 aa, Homo sapiens
EFISEYCGEIISQDEADRRGKVYDKYMCSFLFNLNNDFVVDATRKGNKIRFANHSVNPNCYAKVMMVNGDHRIGIFAKRAIQTGE

SEQ ID NO: 15677 - protein, 85 aa, Homo sapiens
SNRQKILERTEILNQEWKQRRIQPVHILTSVSSLRGTREVEDETVLHNIPYMGDEVLDQDGTFIEELIKNYDGKVHGDRECGFIN

SEQ ID NO: 15678 - protein, 85 aa, Homo sapiens
DEIFVELVNALGQYNDDDDDDDGDDPEEREEKQKDLEDHRDDKESRPPRKFPSDKIFEAISSMFPDKGTAEELKEKYKELTEQQL

SEQ ID NO: 15679 - protein, 85 aa, Homo sapiens
PGALPPECTPNIDGPNAKSVQREQSLHSFHTLFCRRCFKYDCFLHPFHATPNTYKRKNTETALDNKPCGPQCYQHLEGAKEFAAA

SEQ ID NO: 15680 - protein, 85 aa, Homo sapiens
LTAERIKTPPKRPGGRRRGRLPNNSSRPSTPTINVLESKDTDSDREAGTETGGENNDKEEEEKKDETSSSSEANSRCQTPIKMKP

SEQ ID NO: 15681 - protein, 85 aa, Homo sapiens
NIEPPENVEWSGAEASMFRVLIGTYYDNFCAIARLIGTKTCRQVYEFRVKESSIIAPAPAEDVDTPPRKKKRKHRLWAAHCRKIQ

SEQ ID NO: 15682 - protein, 85 aa, Homo sapiens
MKKDGSSNHVYNYQPCDHPRQPCDSSCPCVIAQNFCEKFCQCSSECQNRFPGCRCKAQCNTKQCPCYLAVRECDPDLCLTCGAAD

SEQ ID NO: 15683 - protein, 85 aa, Homo sapiens
HWDSKNVSCKNCSIQRGSKKHLLLAPSDVAGWGIFIKDPVQKNEFISEYCGEIISQDEADRRGKVYDKYMCSFLFNLNNDFVVDA

SEQ ID NO: 15684 - protein, 85 aa, Homo sapiens
AAAAGAAAAAAAEGEAPAEMGALLLEKETRGATERVHGSLGDTPRSEETLPKATPDSLEPAGPSSPASVTVTVGDEGADTPVGAT

SEQ ID NO: 15685 - protein, 85 aa, Homo sapiens
PLIGDESENLEGDGDLRGGRILLGHATKSFPSSPSKGGSCPSRAKMSMTGAGKSPPSVQSLAMRLLSMPGAQGAAAAGSEPPPAT

SEQ ID NO: 15686 - protein, 85 aa, Homo sapiens
TSPEGQPKVHRARKTMSKPGNGQPPVPEKRPPEIQHFRMSDDVHSLGKVTSDLAKRRKLNSGGGLSEELGSARRSGEVTLTKGDP

SEQ ID NO: 15687 - protein, 85 aa, Homo sapiens
GSLEEWETVVGDDFSLYYDSYSVDERVDSDSKSEVEALTEQLSEEEEEEEEEEEEEEEEEEEEEEEEDEESGNQSDRSGSSGRRK

SEQ ID NO: 15688 - protein, 85 aa, Homo sapiens
AKKKWRKDSPWVKPSRKRRKREPPRAKEPRGVNGVGSSGPSEYMEVPLGSLELPSEGTLSPNHAGVSNDTSSLETERGFEELPLC

SEQ ID NO: 15689 - protein, 85 aa, Homo sapiens
SCRMEAPKIDRISERAGHKCMATESVDGELSGCNAAILKRETMRPSSRVALMVLCETHRARMVKHHCCPGCGYFCTAGTFLECHP

SEQ ID NO: 15690 - protein, 85 aa, Homo sapiens
DFRVAHRFHKACVSQLNGMVFCPHCGEDASEAQEVTIPRGDGVTPPAGTAAPAPPPLSQDVPGRADTSQPSARMRGHGEPRRPPC

SEQ ID NO: 15691 - protein, 85 aa, Homo sapiens
DPLADTIDSSGPSLTLPNGGCLSAVGLPLGPGREALEKALVIQESERRKKLRFHPRQLYLSVKQGELQKVILMLLDNLDPNFQSD

SEQ ID NO: 15692 - protein, 85 aa, Homo sapiens
QQSKRTPLHAAAQKGSVEICHVLLQAGANINAVDKQQRTPLMEAVVNNHLEVARYMVQRGGCVYSKEEDGSTCLHHAAKIGNLEM

SEQ ID NO: 15693 - protein, 85 aa, Homo sapiens
VSLLLSTGQVDVNAQDSGGWTPIIWAAEHKHIEVIRMLLTRGADVTLTDNEENICLHWASFTGSAAIAEVLLNARCDLHAVNYHG

SEQ ID NO: 15694 - protein, 85 aa, Homo sapiens
DTPLHIAARESYHDCVLLFLSRGANPELRNKEGDTAWDLTPERSDVWFALQLNRKLRLGVGNRAIRTEKIICRDVARGYENVPIP

SEQ ID NO: 15695 - protein, 85 aa, Homo sapiens
CVNGVDGEPCPEDYKYISENCETSTMNIDRNITHLQHCTCVDDCSSSNCLCGQLSIRCWYDKDGRLLQEFNKIEPPLIFECNQAC

SEQ ID NO: 15696 - protein, 85 aa, Homo sapiens
SCWRNCKNRVVQSGIKVRLQLYRTAKMGWGVRALQTIPQGTFICEYVGELISDAEADVREDDSYLFDLDNKDGEVYCIDARYYGN

SEQ ID NO: 15697 - protein, 85 aa, Homo sapiens
ISRFINHLCDPNIIPVRVFMLHQDLRFPRIAFFSSRDIRTGEELGFDYGDRFWDIKSKYFTCQCGSEKCKHSAEAIALEQSRLAR

SEQ ID NO: 15698 - protein, 84 aa, Homo sapiens
MHQDLRFPRIAFFSSRDIRTGEELGFDYGDRFWDIKSKYFTCQCGSEKCKHSAEAIALEQSRLARLDPHPELLPELGSLPPVNT

SEQ ID NO: 15699 - protein, 85 aa, Homo sapiens
TPRSEETLPKATPDSLEPAGPSSPASVTVTVGDEGADTPVGATPLIGDESENLEGDGDLRGGRILLGHATKSFPSSPSKGGSCPS

SEQ ID NO: 15700 - protein, 85 aa, Homo sapiens
RAKMSMTGAGKSPPSVQSLAMRLLSMPGAQGAAAAGSEPPPATTSPEGQPKVHRARKTMSKPGNGQPPVPEKRPPEIQHFRMSDD

SEQ ID NO: 15701 - protein, 85 aa, Homo sapiens
VHSLGKVTSDLAKRRKLNSGGGLSEELGSARRSGEVTLTKGDPGSLEEWETVVGDDFSLYYDSYSVDERVDSDSKSEVEALTEQL

SEQ ID NO: 15702 - protein, 85 aa, Homo sapiens
SEEEEEEEEEEEEEEEEEEEEEEEEDEESGNQSDRSGSSGRRKAKKKWRKDSPWVKPSRKRRKREPPRAKEPRGVNGVGSSGPSE

SEQ ID NO: 15703 - protein, 85 aa, Homo sapiens
YMEVPLGSLELPSEGTLSPNHAGVSNDTSSLETERGFEELPLCSCRMEAPKIDRISERAGHKCMATESVDGELSGCNAAILKRET

SEQ ID NO: 15704 - protein, 85 aa, Homo sapiens
MRPSSRVALMVLCETHRARMVKHHCCPGCGYFCTAGTFLECHPDFRVAHRFHKACVSQLNGMVFCPHCGEDASEAQEVTIPRGDG

SEQ ID NO: 15705 - protein, 85 aa, Homo sapiens
VTPPAGTAAPAPPPLSQDVPGRADTSQPSARMRGHGEPRRPPCDPLADTIDSSGPSLTLPNGGCLSAVGLPLGPGREALEKALVI

SEQ ID NO: 15706 - protein, 85 aa, Homo sapiens
QESERRKKLRFHPRQLYLSVKQGELQKVILMLLDNLDPNFQSDQQSKRTPLHAAAQKGSVEICHVLLQAGANINAVDKQQRTPLM

SEQ ID NO: 15707 - protein, 85 aa, Homo sapiens
EAVVNNHLEVARYMVQRGGCVYSKEEDGSTCLHHAAKIGNLEMVSLLLSTGQVDVNAQDSGGWTPIIWAAEHKHIEVIRMLLTRG

SEQ ID NO: 15708 - protein, 85 aa, Homo sapiens
ADVTLTDNEENICLHWASFTGSAAIAEVLLNARCDLHAVNYHGDTPLHIAARESYHDCVLLFLSRGANPELRNKEGDTAWDLTPE

SEQ ID NO: 15709 - protein, 85 aa, Homo sapiens
RSDVWFALQLNRKLRLGVGNRAIRTEKIICRDVARGYENVPIPCVNGVDGEPCPEDYKYISENCETSTMNIDRNITHLQHCTCVD

SEQ ID NO: 15710 - protein, 85 aa, Homo sapiens
DCSSSNCLCGQLSIRCWYDKDGRLLQEFNKIEPPLIFECNQACSCWRNCKNRVVQSGIKVRLQLYRTAKMGWGVRALQTIPQGTF

SEQ ID NO: 15711 - protein, 85 aa, Homo sapiens
ICEYVGELISDAEADVREDDSYLFDLDNKDGEVYCIDARYYGNISRFINHLCDPNIIPVRVFMLHQDLRFPRIAFFSSRDIRTGE

SEQ ID NO: 15712 - protein, 85 aa, Homo sapiens
KGDTRHLNGEEDAGGREDSILVNGACSDQSSDSPPILEAIRTPEIRGRRSSSRLSKREVSSLLSYTQDLTGDGDGEDGDGSDTPV

SEQ ID NO: 15713 - protein, 85 aa, Homo sapiens
MPKLFRETRTRSESPAVRTRNNNSVSSRERHRPSPRSTRGRQGRNHVDESPVEFPATRSLRRRATASAGTPWPSPPSSYLTIDLT

SEQ ID NO: 15714 - protein, 85 aa, Homo sapiens
DDTEDTHGTPQSSSTPYARLAQDSQQGGMESPQVEADSGDGDSSEYQDGKEFGIGDLVWGKIKGFSWWPAMVVSWKATSKRQAMS

SEQ ID NO: 15715 - protein, 85 aa, Homo sapiens
GMRWVQWFGDGKFSEVSADKLVALGLFSQHFNLATFNKLVSYRKAMYHALEKARVRAGKTFPSSPGDSLEDQLKPMLEWAHGGFK

SEQ ID NO: 15716 - protein, 85 aa, Homo sapiens
PTGIEGLKPNNTQPENKTRRRTADDSATSDYCPAPKRLKTNCYNNGKDRGDEDQSREQMASDVANNKSSLEDGCLSCGRKNPVSF

SEQ ID NO: 15717 - protein, 85 aa, Homo sapiens
HPLFEGGLCQTCRDRFLELFYMYDDDGYQSYCTVCCEGRELLLCSNTSCCRCFCVECLEVLVGTGTAAEAKLQEPWSCYMCLPQR

SEQ ID NO: 15718 - protein, 85 aa, Homo sapiens
CHGVLRRRKDWNVRLQAFFTSDTGLEYEAPKLYPAIPAARRRPIRVLSLFDGIATGYLVLKELGIKVGKYVASEVCEESIAVGTV

SEQ ID NO: 15719 - protein, 85 aa, Homo sapiens
KHEGNIKYVNDVRNITKKNIEEWGPFDLVIGGSPCNDLSNVNPARKGLYEGTGRLFFEFYHLLNYSRPKEGDDRPFFWMFENVVA

SEQ ID NO: 15720 - protein, 85 aa, Homo sapiens
MKVGDKRDISRFLECNPVMIDAIKVSAAHRARYFWGNLPGMNRPVIASKNDKLELQDCLEYNRIAKLKKVQTITTKSNSIKQGKN

SEQ ID NO: 15721 - protein, 85 aa, Homo sapiens
PEIRGRRSSSRLSKREVSSLLSYTQDLTGDGDGEDGDGSDTPVMPKLFRETRTRSESPAVRTRNNNSVSSRERHRPSPRSTRGRQ

SEQ ID NO: 15722 - protein, 85 aa, Homo sapiens
GRNHVDESPVEFPATRSLRRRATASAGTPWPSPPSSYLTIDLTDDTEDTHGTPQSSSTPYARLAQDSQQGGMESPQVEADSGDGD

SEQ ID NO: 15723 - protein, 85 aa, Homo sapiens
SSEYQDGKEFGIGDLVWGKIKGFSWWPAMVVSWKATSKRQAMSGMRWVQWFGDGKFSEVSADKLVALGLFSQHFNLATFNKLVSY

SEQ ID NO: 15724 - protein, 85 aa, Homo sapiens
RKAMYHALEKARVRAGKTFPSSPGDSLEDQLKPMLEWAHGGFKPTGIEGLKPNNTQPENKTRRRTADDSATSDYCPAPKRLKTNC

SEQ ID NO: 15725 - protein, 85 aa, Homo sapiens
YNNGKDRGDEDQSREQMASDVANNKSSLEDGCLSCGRKNPVSFHPLFEGGLCQTCRDRFLELFYMYDDDGYQSYCTVCCEGRELL

SEQ ID NO: 15726 - protein, 85 aa, Homo sapiens
LCSNTSCCRCFCVECLEVLVGTGTAAEAKLQEPWSCYMCLPQRCHGVLRRRKDWNVRLQAFFTSDTGLEYEAPKLYPAIPAARRR

SEQ ID NO: 15727 - protein, 85 aa, Homo sapiens
PIRVLSLFDGIATGYLVLKELGIKVGKYVASEVCEESIAVGTVKHEGNIKYVNDVRNITKKNIEEWGPFDLVIGGSPCNDLSNVN

SEQ ID NO: 15728 - protein, 85 aa, Homo sapiens
PARKGLYEGTGRLFFEFYHLLNYSRPKEGDDRPFFWMFENVVAMKVGDKRDISRFLECNPVMIDAIKVSAAHRARYFWGNLPGMN

SEQ ID NO: 15729 - protein, 85 aa, Homo sapiens
RPVIASKNDKLELQDCLEYNRIAKLKKVQTITTKSNSIKQGKNQLFPVVMNGKEDVLWCTELERIFGFPVHYTDVSNMGRGARQK

SEQ ID NO: 15730 - protein, 85 aa, Homo sapiens
AKKKWRKDSPWVKPSRKRRKREPPRAKEPRGVSNDTSSLETERGFEELPLCSCRMEAPKIDRISERAGHKCMATESVDGELSGCN

SEQ ID NO: 15731 - protein, 85 aa, Homo sapiens
AAILKRETMRPSSRVALMVLCETHRARMVKHHCCPGCGYFCTAGTFLECHPDFRVAHRFHKACVSQLNGMVFCPHCGEDASEAQE

SEQ ID NO: 15732 - protein, 85 aa, Homo sapiens
VTIPRGDGVTPPAGTAAPAPPPLSQDVPGRADTSQPSARMRGHGEPRRPPCDPLADTIDSSGPSLTLPNGGCLSAVGLPLGPGRE

SEQ ID NO: 15733 - protein, 85 aa, Homo sapiens
ALEKALVIQESERRKKLRFHPRQLYLSVKQGELQKVILMLLDNLDPNFQSDQQSKRTPLHAAAQKGSVEICHVLLQAGANINAVD

SEQ ID NO: 15734 - protein, 85 aa, Homo sapiens
KQQRTPLMEAVVNNHLEVARYMVQRGGCVYSKEEDGSTCLHHAAKIGNLEMVSLLLSTGQVDVNAQDSGGWTPIIWAAEHKHIEV

SEQ ID NO: 15735 - protein, 85 aa, Homo sapiens
IRMLLTRGADVTLTDNEENICLHWASFTGSAAIAEVLLNARCDLHAVNYHGDTPLHIAARESYHDCVLLFLSRGANPELRNKEGD

SEQ ID NO: 15736 - protein, 85 aa, Homo sapiens
TAWDLTPERSDVWFALQLNRKLRLGVGNRAIRTEKIICRDVARGYENVPIPCVNGVDGEPCPEDYKYISENCETSTMNIDRNITH

SEQ ID NO: 15737 - protein, 85 aa, Homo sapiens
MQHCTCVDDCSSSNCLCGQLSIRCWYDKDGRLLQEFNKIEPPLIFECNQACSCWRNCKNRVVQSGIKVRLQLYRTAKMGWGVRAL

SEQ ID NO: 15738 - protein, 85 aa, Homo sapiens
QTIPQGTFICEYVGELISDAEADVREDDSYLFDLDNKDGEVYCIDARYYGNISRFINHLCDPNIIPVRVFMLHQDLRFPRIAFFS

SEQ ID NO: 15739 - protein, 85 aa, Homo sapiens
SEEEEEEEEEEEEEEEEEEEEEEEEDEESGNQSDRSGSSGRRKAKKKWRKDSPWVKPSRKRRKREPPRAKEPRGVSNDTSSLETE

SEQ ID NO: 15740 - protein, 85 aa, Homo sapiens
RGFEELPLCSCRMEAPKIDRISERAGHKCMATESVDGELSGCNAAILKRETMRPSSRVALMVLCETHRARMVKHHCCPGCGYFCT

SEQ ID NO: 15741 - protein, 85 aa, Homo sapiens
AGTFLECHPDFRVAHRFHKACVSQLNGMVFCPHCGEDASEAQEVTIPRGDGVTPPAGTAAPAPPPLSQDVPGRADTSQPSARMRG

SEQ ID NO: 15742 - protein, 85 aa, Homo sapiens
HGEPRRPPCDPLADTIDSSGPSLTLPNGGCLSAVGLPLGPGREALEKALVIQESERRKKLRFHPRQLYLSVKQGELQKVILMLLD

SEQ ID NO: 15743 - protein, 85 aa, Homo sapiens
NLDPNFQSDQQSKRTPLHAAAQKGSVEICHVLLQAGANINAVDKQQRTPLMEAVVNNHLEVARYMVQRGGCVYSKEEDGSTCLHH

SEQ ID NO: 15744 - protein, 85 aa, Homo sapiens
AAKIGNLEMVSLLLSTGQVDVNAQDSGGWTPIIWAAEHKHIEVIRMLLTRGADVTLTDNEENICLHWASFTGSAAIAEVLLNARC

SEQ ID NO: 15745 - protein, 85 aa, Homo sapiens
DLHAVNYHGDTPLHIAARESYHDCVLLFLSRGANPELRNKEGDTAWDLTPERSDVWFALQLNRKLRLGVGNRAIRTEKIICRDVA

SEQ ID NO: 15746 - protein, 85 aa, Homo sapiens
RGYENVPIPCVNGVDGEPCPEDYKYISENCETSTMNIDRNITHLQHCTCVDDCSSSNCLCGQLSIRCWYDKDGRLLQEFNKIEPP

SEQ ID NO: 15747 - protein, 85 aa, Homo sapiens
MIFECNQACSCWRNCKNRVVQSGIKVRLQLYRTAKMGWGVRALQTIPQGTFICEYVGELISDAEADVREDDSYLFDLDNKDGEVY

SEQ ID NO: 15748 - protein, 85 aa, Homo sapiens
CIDARYYGNISRFINHLCDPNIIPVRVFMLHQDLRFPRIAFFSSRDIRTGEELGFDYGDRFWDIKSKYFTCQCGSEKCKHSAEAI

SEQ ID NO: 15749 - protein, 85 aa, Homo sapiens
AENLKGCSVCCKSSWNQLQDLCRLAKLSCPALGISKRNLYDFEVEYLCDYKKIREQEYYLVKWRGYPDSESTWEPRQNLKCVRIL

SEQ ID NO: 15750 - protein, 85 aa, Homo sapiens
KQFHKDLERELLRRHHRSKTPRHLDPSLANYLVQKAKQRRALRRWEQELNAKRSHLGRITVENEVDLDGPPRAFVYINEYRVGEG

SEQ ID NO: 15751 - protein, 85 aa, Homo sapiens
ITLNQVAVGCECQDCLWAPTGGCCPGASLHKFAYNDQGQVRLRAGLPIYECNSRCRCGYDCPNRVVQKGIRYDLCIFRTDDGRGW

SEQ ID NO: 15752 - protein, 85 aa, Homo sapiens
GVRTLEKIRKNSFVMEYVGEIITSEEAERRGQIYDRQGATYLFDLDYVEDVYTVDAAYYGNISHFVNHSCDPNLQVYNVFIDNLD

SEQ ID NO: 15753 - protein, 84 aa, Homo sapiens
NLQVYNVFIDNLDERLPRIAFFATRTIRAGEELTFDYNMQVDPVDMESTRMDSNFGLAGLPGSPKKRVRIECKCGTESCRKYLF

SEQ ID NO: 15754 - protein, 85 aa, Homo sapiens
EVEYLCDYKKIREQEYYLVKWRGYPDSESTWEPRQNLKCVRILKQFHKDLERELLRRHHRSKTPRHLDPSLANYLVQKAKQRRAL

SEQ ID NO: 15755 - protein, 85 aa, Homo sapiens
RRWEQELNAKRSHLGRITVENEVDLDGPPRAFVYINEYRVGEGITLNQVAVGCECQDCLWAPTGGCCPGASLHKFAYNDQGQVRL

SEQ ID NO: 15756 - protein, 85 aa, Homo sapiens
RAGLPIYECNSRCRCGYDCPNRVVQKGIRYDLCIFRTDDGRGWGVRTLEKIRKNSFVMEYVGEIITSEEAERRGQIYDRQGATYL

SEQ ID NO: 15757 - protein, 85 aa, Homo sapiens
FDLDYVEDVYTVDAAYYGNISHFVNHSCDPNLQVYNVFIDNLDERLPRIAFFATRTIRAGEELTFDYNMQVDPVDMESTRMDSNF

SEQ ID NO: 15758 - protein, 85 aa, Homo sapiens
LSGKKAAAAAAAAAAAATGTEAGPGTAGGSENGSEVAAQPAGLSGPAEVGPGAVGERTPRKKEPPRASPPGGLAEPPGSAGPQAG

SEQ ID NO: 15759 - protein, 85 aa, Homo sapiens
PTVVPGSATPMETGIAETPEGRRTSRRKRAKVEYREMDESLANLSEDEYYSEEERNAKAEKEKKLPPPPPQAPPEEENESEPEEP

SEQ ID NO: 15760 - protein, 85 aa, Homo sapiens
SGVEGAAFQSRLPHDRMTSQEAACFPDIISGPQQTQKVFLFIRNRTLQLWLDNPKIQLTFEATLQQLEAPYNSDTVLVHRVHSYL

SEQ ID NO: 15761 - protein, 85 aa, Homo sapiens
ERHGLINFGIYKRIKPLPTKKTGKVIIIGSGVSGLAAARQLQSFGMDVTLLEARDRVGGRVATFRKGNYVADLGAMVVTGLGGNP

SEQ ID NO: 15762 - protein, 85 aa, Homo sapiens
MAVVSKQVNMELAKIKQKCPLYEANGQAVPKEKDEMVEQEFNRLLEATSYLSHQLDFNVLNNKPVSLGQALEVVIQLQEKHVKDE

SEQ ID NO: 15763 - protein, 85 aa, Homo sapiens
QIEHWKKIVKTQEELKELLNKMVNLKEKIKELHQQYKEASEVKPPRDITAEFLVKSKHRDLTALCKEYDELAETQGKLEEKLQEL

SEQ ID NO: 15764 - protein, 85 aa, Homo sapiens
EANPPSDVYLSSRDRQILDWHFANLEFANATPLSTLSLKHWDQDDDFEFTGSHLTVRNGYSCVPVALAEGLDIKLNTAVRQVRYT

SEQ ID NO: 15765 - protein, 85 aa, Homo sapiens
ASGCEVIAVNTRSTSQTFIYKCDAVLCTLPLGVLKQQPPAVQFVPPLPEWKTSAVQRMGFGNLNKVVLCFDRVFWDPSVNLFGHV

SEQ ID NO: 15766 - protein, 85 aa, Homo sapiens
GSTTASRGELFLFWNLYKAPILLALVAGEAAGIMENISDDVIVGRCLAILKGIFGSSAVPQPKETVVSRWRADPWARGSYSYVAA

SEQ ID NO: 15767 - protein, 85 aa, Homo sapiens
GSSGNDYDLMAQPITPGPSIPGAPQPIPRLFFAGEHTIRNYPATVHGALLSGLREAGRIADQFLGAMYTLPRQATPGVPAQQSPS

SEQ ID NO: 15768 - protein, 84 aa, Homo sapiens
SGNDYDLMAQPITPGPSIPGAPQPIPRLFFAGEHTIRNYPATVHGALLSGLREAGRIADQFLGAMYTLPRQATPGVPAQQSPSM

SEQ ID NO: 15769 - protein, 85 aa, Homo sapiens
MSGPAEVGPGAVGERTPRKKEPPRASPPGGLAEPPGSAGPQAGPTVVPGSATPMETGIAETPEGRRTSRRKRAKVEYREMDESLA

SEQ ID NO: 15770 - protein, 85 aa, Homo sapiens
NLSEDEYYSEEERNAKAEKEKKLPPPPPQAPPEEENESEPEEPSGVEGAAFQSRLPHDRMTSQEAACFPDIISGPQQTQKVFLFI

SEQ ID NO: 15771 - protein, 85 aa, Homo sapiens
RNRTLQLWLDNPKIQLTFEATLQQLEAPYNSDTVLVHRVHSYLERHGLINFGIYKRIKPLPTKKTGKVIIIGSGVSGLAAARQLQ

SEQ ID NO: 15772 - protein, 85 aa, Homo sapiens
SFGMDVTLLEARDRVGGRVATFRKGNYVADLGAMVVTGLGGNPMAVVSKQVNMELAKIKQKCPLYEANGQAVPKEKDEMVEQEFN

SEQ ID NO: 15773 - protein, 85 aa, Homo sapiens
RLLEATSYLSHQLDFNVLNNKPVSLGQALEVVIQLQEKHVKDEQIEHWKKIVKTQEELKELLNKMVNLKEKIKELHQQYKEASEV

SEQ ID NO: 15774 - protein, 85 aa, Homo sapiens
KPPRDITAEFLVKSKHRDLTALCKEYDELAETQGKLEEKLQELEANPPSDVYLSSRDRQILDWHFANLEFANATPLSTLSLKHWD

SEQ ID NO: 15775 - protein, 85 aa, Homo sapiens
QDDDFEFTGSHLTVRNGYSCVPVALAEGLDIKLNTAVRQVRYTASGCEVIAVNTRSTSQTFIYKCDAVLCTLPLGVLKQQPPAVQ

SEQ ID NO: 15776 - protein, 85 aa, Homo sapiens
FVPPLPEWKTSAVQRMGFGNLNKVVLCFDRVFWDPSVNLFGHVGSTTASRGELFLFWNLYKAPILLALVAGEAAGIMENISDDVI

SEQ ID NO: 15777 - protein, 85 aa, Homo sapiens
VGRCLAILKGIFGSSAVPQPKETVVSRWRADPWARGSYSYVAAGSSGNDYDLMAQPITPGPSIPGAPQPIPRLFFAGEHTIRNYP

SEQ ID NO: 15778 - protein, 85 aa, Homo sapiens
MKVGDKRDISRFLECNPVMIDAIKVSAAHRARYFWGNLPGMNRIFGFPVHYTDVSNMGRGARQKLLGRSWSVPVIRHLFAPLKDY

SEQ ID NO: 15779 - protein, 84 aa, Homo sapiens
KRDISRFLECNPVMIDAIKVSAAHRARYFWGNLPGMNRIFGFPVHYTDVSNMGRGARQKLLGRSWSVPVIRHLFAPLKDYFACE

SEQ ID NO: 15780 - protein, 85 aa, Homo sapiens
PTGIEGLKPNNTQPVVNKSKVRRAGSRKLESRKYENKTRRRTADDSATSDYCPAPKRLKTNCYNNGKDRGDEDQSREQMASDVAN

SEQ ID NO: 15781 - protein, 85 aa, Homo sapiens
NKSSLEDGCLSCGRKNPVSFHPLFEGGLCQTCRDRFLELFYMYDDDGYQSYCTVCCEGRELLLCSNTSCCRCFCVECLEVLVGTG

SEQ ID NO: 15782 - protein, 85 aa, Homo sapiens
TAAEAKLQEPWSCYMCLPQRCHGVLRRRKDWNVRLQAFFTSDTGLEYEAPKLYPAIPAARRRPIRVLSLFDGIATGYLVLKELGI

SEQ ID NO: 15783 - protein, 85 aa, Homo sapiens
KVGKYVASEVCEESIAVGTVKHEGNIKYVNDVRNITKKNIEEWGPFDLVIGGSPCNDLSNVNPARKGLYEGTGRLFFEFYHLLNY

SEQ ID NO: 15784 - protein, 85 aa, Homo sapiens
SRPKEGDDRPFFWMFENVVAMKVGDKRDISRFLECNPVMIDAIKVSAAHRARYFWGNLPGMNRPVIASKNDKLELQDCLEYNRIA

SEQ ID NO: 15785 - protein, 85 aa, Homo sapiens
KLKKVQTITTKSNSIKQGKNQLFPVVMNGKEDVLWCTELERIFGFPVHYTDVSNMGRGARQKLLGRSWSVPVIRHLFAPLKDYFA

SEQ ID NO: 15786 - protein, 85 aa, Homo sapiens
RKAMYHALEKARVRAGKTFPSSPGDSLEDQLKPMLEWAHGGFKPTGIEGLKPNNTQPVVNKSKVRRAGSRKLESRKYENKTRRRT

SEQ ID NO: 15787 - protein, 85 aa, Homo sapiens
ADDSATSDYCPAPKRLKTNCYNNGKDRGDEDQSREQMASDVANNKSSLEDGCLSCGRKNPVSFHPLFEGGLCQTCRDRFLELFYM

SEQ ID NO: 15788 - protein, 85 aa, Homo sapiens
YDDDGYQSYCTVCCEGRELLLCSNTSCCRCFCVECLEVLVGTGTAAEAKLQEPWSCYMCLPQRCHGVLRRRKDWNVRLQAFFTSD

SEQ ID NO: 15789 - protein, 85 aa, Homo sapiens
TGLEYEAPKLYPAIPAARRRPIRVLSLFDGIATGYLVLKELGIKVGKYVASEVCEESIAVGTVKHEGNIKYVNDVRNITKKNIEE

SEQ ID NO: 15790 - protein, 85 aa, Homo sapiens
WGPFDLVIGGSPCNDLSNVNPARKGLYEGTGRLFFEFYHLLNYSRPKEGDDRPFFWMFENVVAMKVGDKRDISRFLECNPVMIDA

SEQ ID NO: 15791 - protein, 85 aa, Homo sapiens
IKVSAAHRARYFWGNLPGMNRPVIASKNDKLELQDCLEYNRIAKLKKVQTITTKSNSIKQGKNQLFPVVMNGKEDVLWCTELERI

SEQ ID NO: 15792 - protein, 85 aa, Homo sapiens
VGMSRLRNDRLADPLTGCSVCCKSSWNQLQDLCRLAKLSCPALGISKRNLYDFEVEYLCDYKKIREQEYYLVKWRGYPDSESTWE

SEQ ID NO: 15793 - protein, 85 aa, Homo sapiens
PRQNLKCVRILKQFHKDLERELLRRHHRSKTPRHLDPSLANYLVQKAKQRRALRRWEQELNAKRSHLGRITVENEVDLDGPPRAF

SEQ ID NO: 15794 - protein, 85 aa, Homo sapiens
VYINEYRVGEGITLNQVAVGCECQDCLWAPTGGCCPGASLHKFAYNDQGQVRLRAGLPIYECNSRCRCGYDCPNRVVQKGIRYDL

SEQ ID NO: 15795 - protein, 85 aa, Homo sapiens
CIFRTDDGRGWGVRTLEKIRKNSFVMEYVGEIITSEEAERRGQIYDRQGATYLFDLDYVEDVYTVDAAYYGNISHFVNHSCDPNL

SEQ ID NO: 15796 - protein, 85 aa, Homo sapiens
LGISKRNLYDFEVEYLCDYKKIREQEYYLVKWRGYPDSESTWEPRQNLKCVRILKQFHKDLERELLRRHHRSKTPRHLDPSLANY

SEQ ID NO: 15797 - protein, 85 aa, Homo sapiens
MVQKAKQRRALRRWEQELNAKRSHLGRITVENEVDLDGPPRAFVYINEYRVGEGITLNQVAVGCECQDCLWAPTGGCCPGASLHK

SEQ ID NO: 15798 - protein, 85 aa, Homo sapiens
FAYNDQGQVRLRAGLPIYECNSRCRCGYDCPNRVVQKGIRYDLCIFRTDDGRGWGVRTLEKIRKNSFVMEYVGEIITSEEAERRG

SEQ ID NO: 15799 - protein, 85 aa, Homo sapiens
QIYDRQGATYLFDLDYVEDVYTVDAAYYGNISHFVNHSCDPNLQVYNVFIDNLDERLPRIAFFATRTIRAGEELTFDYNMQVDPV

SEQ ID NO: 15800 - protein, 85 aa, Homo sapiens
RGLPRGRGLMRARGRGRAAPPGSRGRGRGGPHRGRGRPRSLLSLPRAQASWTPQLSTGLTSPPVPCLPSQGEAPAEMGALLLEKE

SEQ ID NO: 15801 - protein, 85 aa, Homo sapiens
TRGATERVHGSLGDTPRSEETLPKATPDSLEPAGPSSPASVTVTVGDEGADTPVGATPLIGDESENLEGDGDLRGGRILLGHATK

SEQ ID NO: 15802 - protein, 85 aa, Homo sapiens
SFPSSPSKGGSCPSRAKMSMTGAGKSPPSVQSLAMRLLSMPGAQGAAAAGSEPPPATTSPEGQPKVHRARKTMSKPGNGQPPVPE

SEQ ID NO: 15803 - protein, 85 aa, Homo sapiens
KRPPEIQHFRMSDDVHSLGKVTSDLAKRRKLNSGGGLSEELGSARRSGEVTLTKGDPGSLEEWETVVGDDFSLYYDSYSVDERVD

SEQ ID NO: 15804 - protein, 85 aa, Homo sapiens
SDSKSEVEALTEQLSEEEEEEEEEEEEEEEEEEEEEEEEDEESGNQSDRSGSSGRRKAKKKWRKDSPWVKPSRKRRKREPPRAKE

SEQ ID NO: 15805 - protein, 85 aa, Homo sapiens
PRGVSNDTSSLETERGFEELPLCSCRMEAPKIDRISERAGHKCMATESVDGELSGCNAAILKRETMRPSSRVALMVLCETHRARM

SEQ ID NO: 15806 - protein, 85 aa, Homo sapiens
VKHHCCPGCGYFCTAGTFLECHPDFRVAHRFHKACVSQLNGMVFCPHCGEDASEAQEVTIPRGDGVTPPAGTAAPAPPPLSQDVP

SEQ ID NO: 15807 - protein, 85 aa, Homo sapiens
GRADTSQPSARMRGHGEPRRPPCDPLADTIDSSGPSLTLPNGGCLSAVGLPLGPGREALEKALVIQESERRKKLRFHPRQLYLSV

SEQ ID NO: 15808 - protein, 85 aa, Homo sapiens
KQGELQKVILMLLDNLDPNFQSDQQSKRTPLHAAAQKGSVEICHVLLQAGANINAVDKQQRTPLMEAVVNNHLEVARYMVQRGGC

SEQ ID NO: 15809 - protein, 85 aa, Homo sapiens
VYSKEEDGSTCLHHAAKIGNLEMVSLLLSTGQVDVNAQDSGGWTPIIWAAEHKHIEVIRMLLTRGADVTLTDNEENICLHWASFT

SEQ ID NO: 15810 - protein, 85 aa, Homo sapiens
GSAAIAEVLLNARCDLHAVNYHGDTPLHIAARESYHDCVLLFLSRGANPELRNKEGDTAWDLTPERSDVWFALQLNRKLRLGVGN

SEQ ID NO: 15811 - protein, 85 aa, Homo sapiens
RAIRTEKIICRDVARGYENVPIPCVNGVDGEPCPEDYKYISENCETSTMNIDRNITHLQHCTCVDDCSSSNCLCGQLSIRCWYDK

SEQ ID NO: 15812 - protein, 85 aa, Homo sapiens
DGRLLQEFNKIEPPLIFECNQACSCWRNCKNRVVQSGIKVRLQLYRTAKMGWGVRALQTIPQGTFICEYVGELISDAEADVREDD

SEQ ID NO: 15813 - protein, 85 aa, Homo sapiens
SYLFDLDNKDGEVYCIDARYYGNISRFINHLCDPNIIPVRVFMLHQDLRFPRIAFFSSRDIRTGEELGFDYGDRFWDIKSKYFTC

SEQ ID NO: 15814 - protein, 85 aa, Homo sapiens
SLPRAQASWTPQLSTGLTSPPVPCLPSQGEAPAEMGALLLEKETRGATERVHGSLGDTPRSEETLPKATPDSLEPAGPSSPASVT

SEQ ID NO: 15815 - protein, 85 aa, Homo sapiens
VTVGDEGADTPVGATPLIGDESENLEGDGDLRGGRILLGHATKSFPSSPSKGGSCPSRAKMSMTGAGKSPPSVQSLAMRLLSMPG

SEQ ID NO: 15816 - protein, 85 aa, Homo sapiens
AQGAAAAGSEPPPATTSPEGQPKVHRARKTMSKPGNGQPPVPEKRPPEIQHFRMSDDVHSLGKVTSDLAKRRKLNSGGGLSEELG

SEQ ID NO: 15817 - protein, 85 aa, Homo sapiens
SARRSGEVTLTKGDPGSLEEWETVVGDDFSLYYDSYSVDERVDSDSKSEVEALTEQLSEEEEEEEEEEEEEEEEEEEEEEEEDEE

SEQ ID NO: 15818 - protein, 85 aa, Homo sapiens
SGNQSDRSGSSGRRKAKKKWRKDSPWVKPSRKRRKREPPRAKEPRGVSNDTSSLETERGFEELPLCSCRMEAPKIDRISERAGHK

SEQ ID NO: 15819 - protein, 85 aa, Homo sapiens
CMATESVDGELSGCNAAILKRETMRPSSRVALMVLCETHRARMVKHHCCPGCGYFCTAGTFLECHPDFRVAHRFHKACVSQLNGM

SEQ ID NO: 15820 - protein, 85 aa, Homo sapiens
VFCPHCGEDASEAQEVTIPRGDGVTPPAGTAAPAPPPLSQDVPGRADTSQPSARMRGHGEPRRPPCDPLADTIDSSGPSLTLPNG

SEQ ID NO: 15821 - protein, 85 aa, Homo sapiens
GCLSAVGLPLGPGREALEKALVIQESERRKKLRFHPRQLYLSVKQGELQKVILMLLDNLDPNFQSDQQSKRTPLHAAAQKGSVEI

SEQ ID NO: 15822 - protein, 85 aa, Homo sapiens
CHVLLQAGANINAVDKQQRTPLMEAVVNNHLEVARYMVQRGGCVYSKEEDGSTCLHHAAKIGNLEMVSLLLSTGQVDVNAQDSGG

SEQ ID NO: 15823 - protein, 85 aa, Homo sapiens
WTPIIWAAEHKHIEVIRMLLTRGADVTLTDNEENICLHWASFTGSAAIAEVLLNARCDLHAVNYHGDTPLHIAARESYHDCVLLF

SEQ ID NO: 15824 - protein, 85 aa, Homo sapiens
MSRGANPELRNKEGDTAWDLTPERSDVWFALQLNRKLRLGVGNRAIRTEKIICRDVARGYENVPIPCVNGVDGEPCPEDYKYISE

SEQ ID NO: 15825 - protein, 85 aa, Homo sapiens
NCETSTMNIDRNITHLQHCTCVDDCSSSNCLCGQLSIRCWYDKDGRLLQEFNKIEPPLIFECNQACSCWRNCKNRVVQSGIKVRL

SEQ ID NO: 15826 - protein, 85 aa, Homo sapiens
QLYRTAKMGWGVRALQTIPQGTFICEYVGELISDAEADVREDDSYLFDLDNKDGEVYCIDARYYGNISRFINHLCDPNIIPVRVF

SEQ ID NO: 15827 - protein, 85 aa, Homo sapiens
MLHQDLRFPRIAFFSSRDIRTGEELGFDYGDRFWDIKSKYFTCQCGSEKCKHSAEAIALEQSRLARLDPHPELLPELGSLPPVNT

SEQ ID NO: 15828 - protein, 84 aa, Homo sapiens
QTTSSEKTPTKRTAASVLNNFIESPSKLLDTPIKNLLDTPVKTQYDFPSCRCVEQIIEKDEGPFYTHLGAGPNVAAIREIMEER

SEQ ID NO: 15829 - protein, 85 aa, Homo sapiens
VLTRQTTAAELDSHTPALEQQTTSSEKTPTKRTAASVLNNFIESPSKLLDTPIKNLLDTPVKTQYDFPSCRCVEQIIEKDEGPFY

SEQ ID NO: 15830 - protein, 85 aa, Homo sapiens
PRGVNGVGSSGPSEYMEVPLGSLELPSEGTLSPNHAGVSNDTSSLETERGFEELPLCSCRMEAPKIDRISERAGHKCMATESVDG

SEQ ID NO: 15831 - protein, 85 aa, Homo sapiens
ELSGCNAAILKRETMRPSSRVALMVLCETHRARMVKHHCCPGCGYFCTAGTFLECHPDFRVAHRFHKACVSQLNGMVFCPHCGED

SEQ ID NO: 15832 - protein, 85 aa, Homo sapiens
ASEAQEVTIPRGDGVTPPAGTAAPAPPPLSQDVPGRADTSQPSARMRGHGEPRRPPCDPLADTIDSSGPSLTLPNGGCLSAVGLP

SEQ ID NO: 15833 - protein, 85 aa, Homo sapiens
MGPGREALEKALVIQESERRKKLRFHPRQLYLSVKQGELQKVILMLLDNLDPNFQSDQQSKRTPLHAAAQKGSVEICHVLLQAGA

SEQ ID NO: 15834 - protein, 85 aa, Homo sapiens
NINAVDKQQRTPLMEAVVNNHLEVARYMVQRGGCVYSKEEDGSTCLHHAAKIGNLEMVSLLLSTGQVDVNAQDSGGWTPIIWAAE

SEQ ID NO: 15835 - protein, 85 aa, Homo sapiens
HKHIEVIRMLLTRGADVTLTDNEENICLHWASFTGSAAIAEVLLNARCDLHAVNYHGDTPLHIAARESYHDCVLLFLSRGANPEL

SEQ ID NO: 15836 - protein, 85 aa, Homo sapiens
RNKEGDTAWDLTPERSDVWFALQLNRKLRLGVGNRAIRTEKIICRDVARGYENVPIPCVNGVDGEPCPEDYKYISENCETSTMNI

SEQ ID NO: 15837 - protein, 85 aa, Homo sapiens
DRNITHLQHCTCVDDCSSSNCLCGQLSIRCWYDKDGRLLQEFNKIEPPLIFECNQACSCWRNCKNRVVQSGIKVRLQLYRTAKMG

SEQ ID NO: 15838 - protein, 85 aa, Homo sapiens
WGVRALQTIPQGTFICEYVGELISDAEADVREDDSYLFDLDNKDGEVYCIDARYYGNISRFINHLCDPNIIPVRVFMLHQDLRFP

SEQ ID NO: 15839 - protein, 85 aa, Homo sapiens
SGNQSDRSGSSGRRKAKKKWRKDSPWVKPSRKRRKREPPRAKEPRGVNGVGSSGPSEYMEVPLGSLELPSEGTLSPNHAGVSNDT

SEQ ID NO: 15840 - protein, 85 aa, Homo sapiens
SSLETERGFEELPLCSCRMEAPKIDRISERAGHKCMATESVDGELSGCNAAILKRETMRPSSRVALMVLCETHRARMVKHHCCPG

SEQ ID NO: 15841 - protein, 85 aa, Homo sapiens
CGYFCTAGTFLECHPDFRVAHRFHKACVSQLNGMVFCPHCGEDASEAQEVTIPRGDGVTPPAGTAAPAPPPLSQDVPGRADTSQP

SEQ ID NO: 15842 - protein, 85 aa, Homo sapiens
SARMRGHGEPRRPPCDPLADTIDSSGPSLTLPNGGCLSAVGLPLGPGREALEKALVIQESERRKKLRFHPRQLYLSVKQGELQKV

SEQ ID NO: 15843 - protein, 85 aa, Homo sapiens
ILMLLDNLDPNFQSDQQSKRTPLHAAAQKGSVEICHVLLQAGANINAVDKQQRTPLMEAVVNNHLEVARYMVQRGGCVYSKEEDG

SEQ ID NO: 15844 - protein, 85 aa, Homo sapiens
STCLHHAAKIGNLEMVSLLLSTGQVDVNAQDSGGWTPIIWAAEHKHIEVIRMLLTRGADVTLTDNEENICLHWASFTGSAAIAEV

SEQ ID NO: 15845 - protein, 85 aa, Homo sapiens
LLNARCDLHAVNYHGDTPLHIAARESYHDCVLLFLSRGANPELRNKEGDTAWDLTPERSDVWFALQLNRKLRLGVGNRAIRTEKI

SEQ ID NO: 15846 - protein, 85 aa, Homo sapiens
ICRDVARGYENVPIPCVNGVDGEPCPEDYKYISENCETSTMNIDRNITHLQHCTCVDDCSSSNCLCGQLSIRCWYDKDGRLLQEF

SEQ ID NO: 15847 - protein, 85 aa, Homo sapiens
NKIEPPLIFECNQACSCWRNCKNRVVQSGIKVRLQLYRTAKMGWGVRALQTIPQGTFICEYVGELISDAEADVREDDSYLFDLDN

SEQ ID NO: 15848 - protein, 85 aa, Homo sapiens
KDGEVYCIDARYYGNISRFINHLCDPNIIPVRVFMLHQDLRFPRIAFFSSRDIRTGEELGFDYGDRFWDIKSKYFTCQCGSEKCK

SEQ ID NO: 15849 - protein, 85 aa, Homo sapiens
AAIPALDPEAEPSMDVILVGSSELSSSVSPGTGRDICICCGSLQVHTQHPLFEGGICAPCKDKFLDALFLYDDDGYQSYCSICCS

SEQ ID NO: 15850 - protein, 85 aa, Homo sapiens
GETLLICGNPDCTRCYCFECVDSLVGPGTSGKVHAMSNWVCYLCLPSSRSGLLQRRRKWRSQLKAFYDRESENPLEMFETVPVWR

SEQ ID NO: 15851 - protein, 85 aa, Homo sapiens
RQPVRVLSLFEDIKKELTSLGFLESGSDPGQLKHVVDVTDTVRKDVEEWGPFDLVYGATPPLGHTCDRPPSWYLFQFHRLLQYAR

SEQ ID NO: 15852 - protein, 85 aa, Homo sapiens
KHVVDVTDTVRKDVEEWGPFDLVYGATPPLGHTCDRPPSWYLFQFHRLLQYARPKPGSPRPFFWMFVDNLVLNKEDLDVASRFLE

SEQ ID NO: 15853 - protein, 85 aa, Homo sapiens
LQVHTQHPLFEGGICAPCKDKFLDALFLYDDDGYQSYCSICCSGETLLICGNPDCTRCYCFECVDSLVGPGTSGKVHAMSNWVCY

SEQ ID NO: 15854 - protein, 85 aa, Homo sapiens
MCLPSSRSGLLQRRRKWRSQLKAFYDRESENPLEMFETVPVWRRQPVRVLSLFEDIKKELTSLGFLESGSDPGQLKHVVDVTDTV

SEQ ID NO: 15855 - protein, 85 aa, Homo sapiens
NAVEENQGPGESQKVEEASPPAVQQPTDPASPTVATTPEPVGSDAGDKNATKAGDDEPEYEDGRGFGIGELVWGKLRGFSWWPGR

SEQ ID NO: 15856 - protein, 85 aa, Homo sapiens
IVSWWMTGRSRAAEGTRWVMWFGDGKFSVVCVEKLMPLSSFCSAFHQATYNKQPMYRKAIYEVLQVASSRAGKLFPVCHDSDESD

SEQ ID NO: 15857 - protein, 85 aa, Homo sapiens
TAKAVEVQNKPMIEWALGGFQPSGPKGLEPPEEEKNPYKEVYTDMWVEPEAAAYAPPPPAKKPRKSTAEKPKVKEIIDERTRERL

SEQ ID NO: 15858 - protein, 85 aa, Homo sapiens
VYEVRQKCRNIEDICISCGSLNVTLEHPLFVGGMCQNCKNCFLECAYQYDDDGYQSYCTICCGGREVLMCGNNNCCRCFCVECVD

SEQ ID NO: 15859 - protein, 85 aa, Homo sapiens
LLVGPGAAQAAIKEDPWNCYMCGHKGTYGLLRRREDWPSRLQMFFANNHDQEFDPPKVYPPVPAEKRKPIRVLSLFDGIATGLLV

SEQ ID NO: 15860 - protein, 85 aa, Homo sapiens
MKDLGIQVDRYIASEVCEDSITVGMVRHQGKIMYVGDVRSVTQKHIQEWGPFDLVIGGSPCNDLSIVNPARKGLYEGTGRLFFEF

SEQ ID NO: 15861 - protein, 85 aa, Homo sapiens
YRLLHDARPKEGDDRPFFWLFENVVAMGVSDKRDISRFLESNPVMIDAKEVSAAHRARYFWGNLPGMNRPLASTVNDKLELQECL

SEQ ID NO: 15862 - protein, 85 aa, Homo sapiens
EHGRIAKFSKVRTITTRSNSIKQGKDQHFPVFMNEKEDILWCTEMERVFGFPVHYTDVSNMSRLARQRLLGRSWSVPVIRHLFAP

SEQ ID NO: 15863 - protein, 85 aa, Homo sapiens
SDAGDKNATKAGDDEPEYEDGRGFGIGELVWGKLRGFSWWPGRIVSWWMTGRSRAAEGTRWVMWFGDGKFSVVCVEKLMPLSSFC

SEQ ID NO: 15864 - protein, 85 aa, Homo sapiens
SAFHQATYNKQPMYRKAIYEVLQVASSRAGKLFPVCHDSDESDTAKAVEVQNKPMIEWALGGFQPSGPKGLEPPEEEKNPYKEVY

SEQ ID NO: 15865 - protein, 85 aa, Homo sapiens
TDMWVEPEAAAYAPPPPAKKPRKSTAEKPKVKEIIDERTRERLVYEVRQKCRNIEDICISCGSLNVTLEHPLFVGGMCQNCKNCF

SEQ ID NO: 15866 - protein, 85 aa, Homo sapiens
MECAYQYDDDGYQSYCTICCGGREVLMCGNNNCCRCFCVECVDLLVGPGAAQAAIKEDPWNCYMCGHKGTYGLLRRREDWPSRLQ

SEQ ID NO: 15867 - protein, 85 aa, Homo sapiens
MFFANNHDQEFDPPKVYPPVPAEKRKPIRVLSLFDGIATGLLVLKDLGIQVDRYIASEVCEDSITVGMVRHQGKIMYVGDVRSVT

SEQ ID NO: 15868 - protein, 85 aa, Homo sapiens
QKHIQEWGPFDLVIGGSPCNDLSIVNPARKGLYEGTGRLFFEFYRLLHDARPKEGDDRPFFWLFENVVAMGVSDKRDISRFLESN

SEQ ID NO: 15869 - protein, 85 aa, Homo sapiens
PVMIDAKEVSAAHRARYFWGNLPGMNRPLASTVNDKLELQECLEHGRIAKFSKVRTITTRSNSIKQGKDQHFPVFMNEKEDILWC

SEQ ID NO: 15870 - protein, 85 aa, Homo sapiens
KGDTRHLNGEEDAGGREDSILVNGACSDQSSDSPPILEAIRTPEIRGRRSSSRLSKREVSSLLSYTQSLRRRATASAGTPWPSPP

SEQ ID NO: 15871 - protein, 85 aa, Homo sapiens
SSYLTIDLTDDTEDTHGTPQSSSTPYARLAQDSQQGGMESPQVEADSGDGDSSEYQDGKEFGIGDLVWGKIKGFSWWPAMVVSWK

SEQ ID NO: 15872 - protein, 85 aa, Homo sapiens
ATSKRQAMSGMRWVQWFGDGKFSEVSADKLVALGLFSQHFNLATFNKLVSYRKAMYHALEKARVRAGKTFPSSPGDSLEDQLKPM

SEQ ID NO: 15873 - protein, 85 aa, Homo sapiens
MEWAHGGFKPTGIEGLKPNNTQPENKTRRRTADDSATSDYCPAPKRLKTNCYNNGKDRGDEDQSREQMASDVANNKSSLEDGCLS

SEQ ID NO: 15874 - protein, 85 aa, Homo sapiens
CGRKNPVSFHPLFEGGLCQTCRDRFLELFYMYDDDGYQSYCTVCCEGRELLLCSNTSCCRCFCVECLEVLVGTGTAAEAKLQEPW

SEQ ID NO: 15875 - protein, 85 aa, Homo sapiens
SCYMCLPQRCHGVLRRRKDWNVRLQAFFTSDTGLEYEAPKLYPAIPAARRRPIRVLSLFDGIATGYLVLKELGIKVGKYVASEVC

SEQ ID NO: 15876 - protein, 85 aa, Homo sapiens
EESIAVGTVKHEGNIKYVNDVRNITKKNIEEWGPFDLVIGGSPCNDLSNVNPARKGLYEGTGRLFFEFYHLLNYSRPKEGDDRPF

SEQ ID NO: 15877 - protein, 85 aa, Homo sapiens
FWMFENVVAMKVGDKRDISRFLECNPVMIDAIKVSAAHRARYFWGNLPGMNRIFGFPVHYTDVSNMGRGARQKLLGRSWSVPVIR

SEQ ID NO: 15878 - protein, 85 aa, Homo sapiens
PEIRGRRSSSRLSKREVSSLLSYTQSLRRRATASAGTPWPSPPSSYLTIDLTDDTEDTHGTPQSSSTPYARLAQDSQQGGMESPQ

SEQ ID NO: 15879 - protein, 85 aa, Homo sapiens
VEADSGDGDSSEYQDGKEFGIGDLVWGKIKGFSWWPAMVVSWKATSKRQAMSGMRWVQWFGDGKFSEVSADKLVALGLFSQHFNL

SEQ ID NO: 15880 - protein, 85 aa, Homo sapiens
ATFNKLVSYRKAMYHALEKARVRAGKTFPSSPGDSLEDQLKPMLEWAHGGFKPTGIEGLKPNNTQPENKTRRRTADDSATSDYCP

SEQ ID NO: 15881 - protein, 85 aa, Homo sapiens
APKRLKTNCYNNGKDRGDEDQSREQMASDVANNKSSLEDGCLSCGRKNPVSFHPLFEGGLCQTCRDRFLELFYMYDDDGYQSYCT

SEQ ID NO: 15882 - protein, 85 aa, Homo sapiens
VCCEGRELLLCSNTSCCRCFCVECLEVLVGTGTAAEAKLQEPWSCYMCLPQRCHGVLRRRKDWNVRLQAFFTSDTGLEYEAPKLY

SEQ ID NO: 15883 - protein, 85 aa, Homo sapiens
PAIPAARRRPIRVLSLFDGIATGYLVLKELGIKVGKYVASEVCEESIAVGTVKHEGNIKYVNDVRNITKKNIEEWGPFDLVIGGS

SEQ ID NO: 15884 - protein, 85 aa, Homo sapiens
PCNDLSNVNPARKGLYEGTGRLFFEFYHLLNYSRPKEGDDRPFFWMFENVVAMKVGDKRDISRFLECNPVMIDAIKVSAAHRARY

SEQ ID NO: 15885 - protein, 85 aa, Homo sapiens
SPSKLLDTPIKNLLDTPVKTQYDFPSCRCVEQIIEKDEGPFYTHLGAGPNVAAIREIMEERFGQKGKAIRIERVIYTGKEGKSSQ

SEQ ID NO: 15886 - protein, 85 aa, Homo sapiens
GCPIAKWVVRRSSSEEKLLCLVRERAGHTCEAAVIVILILVWEGIPLSLADKLYSELTETLRKYGTLTNRRCALNEERTCACQGL

SEQ ID NO: 15887 - protein, 85 aa, Homo sapiens
DPETCGASFSFGCSWSMYYNGCKFARSKIPRKFKLLGDDPKEEEKLESHLQNLSTLMAPTYKKLAPDAYNNQIEYEHRAPECRLG

SEQ ID NO: 15888 - protein, 85 aa, Homo sapiens
MKEGRPFSGVTACLDFCAHAHRDLHNMQNGSTLVCTLTREDNREFGGKPEDEQLHVLPLYKVSDVDEFGSVEAQEEKKRSGAIQV

SEQ ID NO: 15889 - protein, 85 aa, Homo sapiens
MSSFRRKVRMLAEPVKTCRQRKLEAKKAAAEKLSSLENSSNKNEKEKSAPSRTKQTENASQAKQLAELLRLSGPVMQQSQQPQPL

SEQ ID NO: 15890 - protein, 85 aa, Homo sapiens
QKQPPQPQQQQRPQQQQPHHPQTESVNSYSASGSTNPYMRRPNPVSPYPNSSHTSDIYGSTSPMNFYSTSSQAAGSYLNSSNPMN

SEQ ID NO: 15891 - protein, 85 aa, Homo sapiens
PYPGLLNQNTQYPSYQCNGNLSVDNCSPYLGSYSPQSQPMDLYRYPSQDPLSKLSLPPIHTLYQPRFGNSQSFTSKYLGYGNQNM

SEQ ID NO: 15892 - protein, 85 aa, Homo sapiens
QGDGFSSCTIRPNVHHVGKLPPYPTHEMDGHFMGATSRLPPNLSNPNMDYKNGEHHSPSHIIHNYSAAPGMFNSSLHALHLQNKE

SEQ ID NO: 15893 - protein, 85 aa, Homo sapiens
NDMLSHTANGLSKMLPALNHDRTACVQGGLHKLSDANGQEKQPLALVQGVASGAEDNDEVWSDSEQSFLDPDIGGVAVAPTHGSI

SEQ ID NO: 15894 - protein, 85 aa, Homo sapiens
LIECAKRELHATTPLKNPNRNHPTRISLVFYQHKSMNEPKHGLALWEAKMAEKAREKEEECEKYGPDYVPQKSHGKKVKREPAEP

SEQ ID NO: 15895 - protein, 84 aa, Homo sapiens
AKMAEKAREKEEECEKYGPDYVPQKSHGKKVKREPAEPHETSEPTYLRFIKSLAERTMSVTTDSTVTTSPYAFTRVTGPYNRYI

SEQ ID NO: 15896 - protein, 85 aa, Homo sapiens
THLGAGPNVAAIREIMEERFGQKGKAIRIERVIYTGKEGKSSQGCPIAKWVVRRSSSEEKLLCLVRERAGHTCEAAVIVILILVW

SEQ ID NO: 15897 - protein, 85 aa, Homo sapiens
EGIPLSLADKLYSELTETLRKYGTLTNRRCALNEERTCACQGLDPETCGASFSFGCSWSMYYNGCKFARSKIPRKFKLLGDDPKE

SEQ ID NO: 15898 - protein, 85 aa, Homo sapiens
EEKLESHLQNLSTLMAPTYKKLAPDAYNNQIEYEHRAPECRLGLKEGRPFSGVTACLDFCAHAHRDLHNMQNGSTLVCTLTREDN

SEQ ID NO: 15899 - protein, 85 aa, Homo sapiens
REFGGKPEDEQLHVLPLYKVSDVDEFGSVEAQEEKKRSGAIQVLSSFRRKVRMLAEPVKTCRQRKLEAKKAAAEKLSSLENSSNK

SEQ ID NO: 15900 - protein, 85 aa, Homo sapiens
NEKEKSAPSRTKQTENASQAKQLAELLRLSGPVMQQSQQPQPLQKQPPQPQQQQRPQQQQPHHPQTESVNSYSASGSTNPYMRRP

SEQ ID NO: 15901 - protein, 85 aa, Homo sapiens
NPVSPYPNSSHTSDIYGSTSPMNFYSTSSQAAGSYLNSSNPMNPYPGLLNQNTQYPSYQCNGNLSVDNCSPYLGSYSPQSQPMDL

SEQ ID NO: 15902 - protein, 85 aa, Homo sapiens
YRYPSQDPLSKLSLPPIHTLYQPRFGNSQSFTSKYLGYGNQNMQGDGFSSCTIRPNVHHVGKLPPYPTHEMDGHFMGATSRLPPN

SEQ ID NO: 15903 - protein, 85 aa, Homo sapiens
MSNPNMDYKNGEHHSPSHIIHNYSAAPGMFNSSLHALHLQNKENDMLSHTANGLSKMLPALNHDRTACVQGGLHKLSDANGQEKQ

SEQ ID NO: 15904 - protein, 85 aa, Homo sapiens
PLALVQGVASGAEDNDEVWSDSEQSFLDPDIGGVAVAPTHGSILIECAKRELHATTPLKNPNRNHPTRISLVFYQHKSMNEPKHG

SEQ ID NO: 15905 - protein, 85 aa, Homo sapiens
MALWEAKMAEKAREKEEECEKYGPDYVPQKSHGKKVKREPAEPHETSEPTYLRFIKSLAERTMSVTTDSTVTTSPYAFTRVTGPY

SEQ ID NO: 15906 - protein, 85 aa, Homo sapiens
GQTGKKSEKGPVCWRKRVKSEYMRLRQLKRFRRADEVKSMFSSNRQKILERTEILNQEWKQRRIQPVHILTSCSVTSDLDFPTQV

SEQ ID NO: 15907 - protein, 85 aa, Homo sapiens
IPLKTLNAVASVPIMYSWSPLQQNFMVEDETVLHNIPYMGDEVLDQDGTFIEELIKNYDGKVHGDRECGFINDEIFVELVNALGQ

SEQ ID NO: 15908 - protein, 85 aa, Homo sapiens
YNDDDDDDDGDDPEEREEKQKDLEDHRDDKESRPPRKFPSDKIFEAISSMFPDKGTAEELKEKYKELTEQQLPGALPPECTPNID

SEQ ID NO: 15909 - protein, 85 aa, Homo sapiens
GPNAKSVQREQSLHSFHTLFCRRCFKYDCFLHPFHATPNTYKRKNTETALDNKPCGPQCYQHLEGAKEFAAALTAERIKTPPKRP

SEQ ID NO: 15910 - protein, 85 aa, Homo sapiens
GGRRRGRLPNNSSRPSTPTINVLESKDTDSDREAGTETGGENNDKEEEEKKDETSSSSEANSRCQTPIKMKPNIEPPENVEWSGA

SEQ ID NO: 15911 - protein, 85 aa, Homo sapiens
EASMFRVLIGTYYDNFCAIARLIGTKTCRQVYEFRVKESSIIAPAPAEDVDTPPRKKKRKHRLWAAHCRKIQLKKGQNRFPGCRC

SEQ ID NO: 15912 - protein, 85 aa, Homo sapiens
KAQCNTKQCPCYLAVRECDPDLCLTCGAADHWDSKNVSCKNCSIQRGSKKHLLLAPSDVAGWGIFIKDPVQKNEFISEYCGEIIS

SEQ ID NO: 15913 - protein, 85 aa, Homo sapiens
QDEADRRGKVYDKYMCSFLFNLNNDFVVDATRKGNKIRFANHSVNPNCYAKVMMVNGDHRIGIFAKRAIQTGEELFFDYRYSQAD

SEQ ID NO: 15914 - protein, 85 aa, Homo sapiens
SNRQKILERTEILNQEWKQRRIQPVHILTSCSVTSDLDFPTQVIPLKTLNAVASVPIMYSWSPLQQNFMVEDETVLHNIPYMGDE

SEQ ID NO: 15915 - protein, 85 aa, Homo sapiens
VLDQDGTFIEELIKNYDGKVHGDRECGFINDEIFVELVNALGQYNDDDDDDDGDDPEEREEKQKDLEDHRDDKESRPPRKFPSDK

SEQ ID NO: 15916 - protein, 85 aa, Homo sapiens
IFEAISSMFPDKGTAEELKEKYKELTEQQLPGALPPECTPNIDGPNAKSVQREQSLHSFHTLFCRRCFKYDCFLHPFHATPNTYK

SEQ ID NO: 15917 - protein, 85 aa, Homo sapiens
RKNTETALDNKPCGPQCYQHLEGAKEFAAALTAERIKTPPKRPGGRRRGRLPNNSSRPSTPTINVLESKDTDSDREAGTETGGEN

SEQ ID NO: 15918 - protein, 85 aa, Homo sapiens
NDKEEEEKKDETSSSSEANSRCQTPIKMKPNIEPPENVEWSGAEASMFRVLIGTYYDNFCAIARLIGTKTCRQVYEFRVKESSII

SEQ ID NO: 15919 - protein, 85 aa, Homo sapiens
APAPAEDVDTPPRKKKRKHRLWAAHCRKIQLKKGQNRFPGCRCKAQCNTKQCPCYLAVRECDPDLCLTCGAADHWDSKNVSCKNC

SEQ ID NO: 15920 - protein, 85 aa, Homo sapiens
SIQRGSKKHLLLAPSDVAGWGIFIKDPVQKNEFISEYCGEIISQDEADRRGKVYDKYMCSFLFNLNNDFVVDATRKGNKIRFANH

SEQ ID NO: 15921 - protein, 84 aa, Homo sapiens
WGPFDLVIGGSPCNDLSIVNPARKGLYEGTGRLFFEFYRLLHDARPKEGDDRPFFWLFENVVAMGVSDKRDISRFLEVQNSHLY

SEQ ID NO: 15922 - protein, 85 aa, Homo sapiens
MPKLFRETRTRSESPASLRRRATASAGTPWPSPPSSYLTIDLTDDTEDTHGTPQSSSTPYARLAQDSQQGGMESPQVEADSGDGD

SEQ ID NO: 15923 - protein, 85 aa, Homo sapiens
PEIRGRRSSSRLSKREVSSLLSYTQDLTGDGDGEDGDGSDTPVMPKLFRETRTRSESPASLRRRATASAGTPWPSPPSSYLTIDL

SEQ ID NO: 15924 - protein, 85 aa, Homo sapiens
TDDTEDTHGTPQSSSTPYARLAQDSQQGGMESPQVEADSGDGDSSEYQDGKEFGIGDLVWGKIKGFSWWPAMVVSWKATSKRQAM

SEQ ID NO: 15925 - protein, 85 aa, Homo sapiens
SGMRWVQWFGDGKFSEVSADKLVALGLFSQHFNLATFNKLVSYRKAMYHALEKARVRAGKTFPSSPGDSLEDQLKPMLEWAHGGF

SEQ ID NO: 15926 - protein, 85 aa, Homo sapiens
KPTGIEGLKPNNTQPENKTRRRTADDSATSDYCPAPKRLKTNCYNNGKDRGDEDQSREQMASDVANNKSSLEDGCLSCGRKNPVS

SEQ ID NO: 15927 - protein, 85 aa, Homo sapiens
FHPLFEGGLCQTCRDRFLELFYMYDDDGYQSYCTVCCEGRELLLCSNTSCCRCFCVECLEVLVGTGTAAEAKLQEPWSCYMCLPQ

SEQ ID NO: 15928 - protein, 85 aa, Homo sapiens
RCHGVLRRRKDWNVRLQAFFTSDTGLEYEAPKLYPAIPAARRRPIRVLSLFDGIATGYLVLKELGIKVGKYVASEVCEESIAVGT

SEQ ID NO: 15929 - protein, 85 aa, Homo sapiens
VKHEGNIKYVNDVRNITKKNIEEWGPFDLVIGGSPCNDLSNVNPARKGLYEGTGRLFFEFYHLLNYSRPKEGDDRPFFWMFENVV

SEQ ID NO: 15930 - protein, 85 aa, Homo sapiens
AMKVGDKRDISRFLECNPVMIDAIKVSAAHRARYFWGNLPGMNRIFGFPVHYTDVSNMGRGARQKLLGRSWSVPVIRHLFAPLKD

SEQ ID NO: 15931 - protein, 85 aa, Homo sapiens
PPECTPNIDGPNAKSVQREQSLHSFHTLFCRRCFKYDCFLHPFHATPNTYKRKNTETALDNKPCGPQCYQHLEGAKEFAAALTAE

SEQ ID NO: 15932 - protein, 85 aa, Homo sapiens
RIKTPPKRPGGRRRGRLPNNSSRPSTPTINVLESKDTDSDREAGTETGGENNDKEEEEKKDETSSSSEANSRCQTPIKMKPNIEP

SEQ ID NO: 15933 - protein, 85 aa, Homo sapiens
PENVEWSGAEASMFRVLIGTYYDNFCAIARLIGTKTCRQVYEFRVKESSIIAPAPAEDVDTPPRKKKRKHRLWAAHCRKIQLKKD

SEQ ID NO: 15934 - protein, 85 aa, Homo sapiens
GSSNHVYNYQPCDHPRQPCDSSCPCVIAQNFCEKFCQCSSECQNRFPGCRCKAQCNTKQCPCYLAVRECDPDLCLTCGAADHWDS

SEQ ID NO: 15935 - protein, 85 aa, Homo sapiens
KNVSCKNCSIQRGSKKHLLLAPSDVAGWGIFIKDPVQKNEFISEYCGEIISQDEADRRGKVYDKYMCSFLFNLNNDFVVDATRKG

SEQ ID NO: 15936 - protein, 85 aa, Homo sapiens
PPRKFPSDKIFEAISSMFPDKGTAEELKEKYKELTEQQLPGALPPECTPNIDGPNAKSVQREQSLHSFHTLFCRRCFKYDCFLHP

SEQ ID NO: 15937 - protein, 85 aa, Homo sapiens
FHATPNTYKRKNTETALDNKPCGPQCYQHLEGAKEFAAALTAERIKTPPKRPGGRRRGRLPNNSSRPSTPTINVLESKDTDSDRE

SEQ ID NO: 15938 - protein, 85 aa, Homo sapiens
AGTETGGENNDKEEEEKKDETSSSSEANSRCQTPIKMKPNIEPPENVEWSGAEASMFRVLIGTYYDNFCAIARLIGTKTCRQVYE

SEQ ID NO: 15939 - protein, 85 aa, Homo sapiens
FRVKESSIIAPAPAEDVDTPPRKKKRKHRLWAAHCRKIQLKKDGSSNHVYNYQPCDHPRQPCDSSCPCVIAQNFCEKFCQCSSEC

SEQ ID NO: 15940 - protein, 85 aa, Homo sapiens
QNRFPGCRCKAQCNTKQCPCYLAVRECDPDLCLTCGAADHWDSKNVSCKNCSIQRGSKKHLLLAPSDVAGWGIFIKDPVQKNEFI

SEQ ID NO: 15941 - protein, 85 aa, Homo sapiens
SEYCGEIISQDEADRRGKVYDKYMCSFLFNLNNDFVVDATRKGNKIRFANHSVNPNCYAKVMMVNGDHRIGIFAKRAIQTGEELF

SEQ ID NO: 15942 - protein, 85 aa, Homo sapiens
AAAAAAAPSGGGGGGEEERLEEKSEDQDLQGLKDKPLKFKKVKKDKKEEKEGKHEPVQPSAHHSAEPAEAGKAETSEGSGSAPAV

SEQ ID NO: 15943 - protein, 85 aa, Homo sapiens
PEASASPKQRRSIIRDRGPMYDDPTLPEGWTRKLKQRKSGRSAGKYDVYLINPQGKAFRSKVELIAYFEKLQELAEAGDAPKGAA

SEQ ID NO: 15944 - protein, 84 aa, Homo sapiens
RDRGPMYDDPTLPEGWTRKLKQRKSGRSAGKYDVYLINPQGKAFRSKVELIAYFEKLQELAEAGDAPKGAAPRDPRRPRQRVCR

SEQ ID NO: 15945 - protein, 85 aa, Homo sapiens
KKDKKEEKEGKHEPVQPSAHHSAEPAEAGKAETSEGSGSAPAVPEASASPKQRRSIIRDRGPMYDDPTLPEGWTRKLKQRKSGRS

SEQ ID NO: 15946 - protein, 85 aa, Homo sapiens
GILERVVRRNGRVDRSLKDECDTAEKKAKVIAGMNAVEENQGPGESQKVEEASPPAVQQPTDPASPTVATTPEPVGSDAGDKNAT

SEQ ID NO: 15947 - protein, 85 aa, Homo sapiens
KAGDDEPEYEDGRGFGIGELVWGKLRGFSWWPGRIVSWWMTGRSRAAEGTRWVMWFGDGKFSVVCVEKLMPLSSFCSAFHQATYN

SEQ ID NO: 15948 - protein, 85 aa, Homo sapiens
KQPMYRKAIYEVLQVASSRAGKLFPVCHDSDESDTAKAVEVQNKPMIEWALGGFQPSGPKGLEPPEEEKNPYKEVYTDMWVEPEA

SEQ ID NO: 15949 - protein, 85 aa, Homo sapiens
AAYAPPPPAKKPRKSTAEKPKVKEIIDERTRERLVYEVRQKCRNIEDICISCGSLNVTLEHPLFVGGMCQNCKNCFLECAYQYDD

SEQ ID NO: 15950 - protein, 85 aa, Homo sapiens
DGYQSYCTICCGGREVLMCGNNNCCRCFCVECVDLLVGPGAAQAAIKEDPWNCYMCGHKGTYGLLRRREDWPSRLQMFFANNHDQ

SEQ ID NO: 15951 - protein, 85 aa, Homo sapiens
EFDPPKVYPPVPAEKRKPIRVLSLFDGIATGLLVLKDLGIQVDRYIASEVCEDSITVGMVRHQGKIMYVGDVRSVTQKHIQEWGP

SEQ ID NO: 15952 - protein, 85 aa, Homo sapiens
FDLVIGGSPCNDLSIVNPARKGLYEGTGRLFFEFYRLLHDARPKEGDDRPFFWLFENVVAMGVSDKRDISRFLESNPVMIDAKEV

SEQ ID NO: 15953 - protein, 85 aa, Homo sapiens
SAAHRARYFWGNLPGMNRPLASTVNDKLELQECLEHGRIAKFSKVRTITTRSNSIKQGKDQHFPVFMNEKEDILWCTEMERVFGF

SEQ ID NO: 15954 - protein, 85 aa, Homo sapiens
PGESQKVEEASPPAVQQPTDPASPTVATTPEPVGSDAGDKNATKAGDDEPEYEDGRGFGIGELVWGKLRGFSWWPGRIVSWWMTG

SEQ ID NO: 15955 - protein, 85 aa, Homo sapiens
RSRAAEGTRWVMWFGDGKFSVVCVEKLMPLSSFCSAFHQATYNKQPMYRKAIYEVLQVASSRAGKLFPVCHDSDESDTAKAVEVQ

SEQ ID NO: 15956 - protein, 85 aa, Homo sapiens
NKPMIEWALGGFQPSGPKGLEPPEEEKNPYKEVYTDMWVEPEAAAYAPPPPAKKPRKSTAEKPKVKEIIDERTRERLVYEVRQKC

SEQ ID NO: 15957 - protein, 85 aa, Homo sapiens
RNIEDICISCGSLNVTLEHPLFVGGMCQNCKNCFLECAYQYDDDGYQSYCTICCGGREVLMCGNNNCCRCFCVECVDLLVGPGAA

SEQ ID NO: 15958 - protein, 85 aa, Homo sapiens
QAAIKEDPWNCYMCGHKGTYGLLRRREDWPSRLQMFFANNHDQEFDPPKVYPPVPAEKRKPIRVLSLFDGIATGLLVLKDLGIQV

SEQ ID NO: 15959 - protein, 85 aa, Homo sapiens
DRYIASEVCEDSITVGMVRHQGKIMYVGDVRSVTQKHIQEWGPFDLVIGGSPCNDLSIVNPARKGLYEGTGRLFFEFYRLLHDAR

SEQ ID NO: 15960 - protein, 85 aa, Homo sapiens
PKEGDDRPFFWLFENVVAMGVSDKRDISRFLESNPVMIDAKEVSAAHRARYFWGNLPGMNRPLASTVNDKLELQECLEHGRIAKF

SEQ ID NO: 15961 - protein, 85 aa, Homo sapiens
SKVRTITTRSNSIKQGKDQHFPVFMNEKEDILWCTEMERVFGFPVHYTDVSNMSRLARQRLLGRSWSVPVIRHLFAPLKEYFACV

SEQ ID NO: 15962 - protein, 85 aa, Homo sapiens
EANPPSPLFFCSDVYLSSRDRQILDWHFANLEFANATPLSTLSLKHWDQDDDFEFTGSHLTVRNGYSCVPVALAEGLDIKLNTAV

SEQ ID NO: 15963 - protein, 85 aa, Homo sapiens
RQVRYTASGCEVIAVNTRSTSQTFIYKCDAVLCTLPLGVLKQQPPAVQFVPPLPEWKTSAVQRMGFGNLNKVVLCFDRVFWDPSV

SEQ ID NO: 15964 - protein, 85 aa, Homo sapiens
NLFGHVGSTTASRGELFLFWNLYKAPILLALVAGEAAGIMENISDDVIVGRCLAILKGIFGSSAVPQPKETVVSRWRADPWARGS

SEQ ID NO: 15965 - protein, 85 aa, Homo sapiens
YSYVAAGSSGNDYDLMAQPITPGPSIPGAPQPIPRLFFAGEHTIRNYPATVHGALLSGLREAGRIADQFLGAMYTLPRQATPGVP

SEQ ID NO: 15966 - protein, 85 aa, Homo sapiens
KPPRDITAEFLVKSKHRDLTALCKEYDELAETQGKLEEKLQELEANPPSPLFFCSDVYLSSRDRQILDWHFANLEFANATPLSTL

SEQ ID NO: 15967 - protein, 85 aa, Homo sapiens
SLKHWDQDDDFEFTGSHLTVRNGYSCVPVALAEGLDIKLNTAVRQVRYTASGCEVIAVNTRSTSQTFIYKCDAVLCTLPLGVLKQ

SEQ ID NO: 15968 - protein, 85 aa, Homo sapiens
QPPAVQFVPPLPEWKTSAVQRMGFGNLNKVVLCFDRVFWDPSVNLFGHVGSTTASRGELFLFWNLYKAPILLALVAGEAAGIMEN

SEQ ID NO: 15969 - protein, 85 aa, Homo sapiens
ISDDVIVGRCLAILKGIFGSSAVPQPKETVVSRWRADPWARGSYSYVAAGSSGNDYDLMAQPITPGPSIPGAPQPIPRLFFAGEH

SEQ ID NO: 15970 - protein, 85 aa, Homo sapiens
SQFQVPLAVQPDLPGLYDFPQRQVMVGSFPGSGLSMAGSESQLRGGGDGRKKRKRCGTCEPCRRLENCGACTSCTNRRTHQICKL

SEQ ID NO: 15971 - protein, 85 aa, Homo sapiens
RKCEVLKKKVGLLKEVEIKAGEGAGPWGQGAAVKTGSELSPVDGPVPGQMDSGPVYHGDSRQLSASGVPVNGAREPAGPSLLGTG

SEQ ID NO: 15972 - protein, 85 aa, Homo sapiens
GPWRVDQKPDWEAAPGPAHTARLEDAHDLVAFSAVAEAVSSYGALSTRLYETFNREMSREAGNNSRGPRPGPEGCSAGSEDLDTL

SEQ ID NO: 15973 - protein, 85 aa, Homo sapiens
QTALALARHGMKPPNCNCDGPECPDYLEWLEGKIKSVVMEGGEERPRLPGPLPPGEAGLPAPSTRPLLSSEVPQISPQEGLPLSQ

SEQ ID NO: 15974 - protein, 85 aa, Homo sapiens
SALSIAKEKNISLQTAIAIEALTQLSSALPQPSHSTPQASCPLPEALSPPAPFRSPQSYLRAPSWPVVPPEEHSSFAPDSSAFPP

SEQ ID NO: 15975 - protein, 85 aa, Homo sapiens
ATPRTEFPEAWGTDTPPATPRSSWPMPRPSPDPMAELEQLLGSASDYIQSVFKRPEALPTKPKVKVEAPSSSPAPAPSPVLQREA

SEQ ID NO: 15976 - protein, 85 aa, Homo sapiens
PTPSSEPDTHQKAQTALQQHLHHKRSLFLEQVHDTSFPAPSEPSAPGWWPPPSSPVPRLPDRPPKEKKKKLPTPAGGPVGTEKAA

SEQ ID NO: 15977 - protein, 85 aa, Homo sapiens
PGIKPSVRKPIQIKKSRPREAQPLFPPVRQIVLEGLRSPASQEVQAHPPAPLPASQGSAVPLPPEPSLALFAPSPSRDSLLPPTQ

SEQ ID NO: 15978 - protein, 85 aa, Homo sapiens
EMRSPSPMTALQPGSTGPLPPADDKLEELIRQFEAEFGDSFGLPGPPSVPIQDPENQQTCLPAPESPFATRSPKQIKIESSGAVT

SEQ ID NO: 15979 - protein, 85 aa, Homo sapiens
VLSTTCFHSEEGGQEATPTKAENPLTPTLSGFLESPLKYLDTPTKSLLDTPAKRAQAEFPTCDCVEQIVEKDEGPYYTHLGSGPT

SEQ ID NO: 15980 - protein, 85 aa, Homo sapiens
VASIRELMEERYGEKGKAIRIEKVIYTGKEGKSSRGCPIAKWVIRRHTLEEKLLCLVRHRAGHHCQNAVIVILILAWEGIPRSLG

SEQ ID NO: 15981 - protein, 85 aa, Homo sapiens
DTLYQELTDTLRKYGNPTSRRCGLNDDRTCACQGKDPNTCGASFSFGCSWSMYFNGCKYARSKTPRKFRLAGDNPKEEEVLRKSF

SEQ ID NO: 15982 - protein, 85 aa, Homo sapiens
QDLATEVAPLYKRLAPQAYQNQVTNEEIAIDCRLGLKEGRPFAGVTACMDFCAHAHKDQHNLYNGCTVVCTLTKEDNRCVGKIPE

SEQ ID NO: 15983 - protein, 85 aa, Homo sapiens
DEQLHVLPLYKMANTDEFGSEENQNAKVGSGAIQVLTAFPREVRRLPEPAKSCRQRQLEARKAAAEKKKIQKEKLSTPEKIKQEA

SEQ ID NO: 15984 - protein, 85 aa, Homo sapiens
MELAGITSDPGLSLKGGLSQQGLKPSLKVEPQNHFSSFKYSGNAVVESYSVLGNCRPSDPYSMNSVYSYHSYYAQPSLTSVNGFH

SEQ ID NO: 15985 - protein, 85 aa, Homo sapiens
SKYALPSFSYYGFPSSNPVFPSQFLGPGAWGHSGSSGSFEKKPDLHALHNSLSPAYGGAEFAELPSQAVPTDAHHPTPHHQQPAY

SEQ ID NO: 15986 - protein, 85 aa, Homo sapiens
PGPKEYLLPKAPLLHSVSRDPSPFAQSSNCYNRSIKQEPVDPLTQAEPVPRDAGKMGKTPLSEVSQNGGPSHLWGQYSGGPSMSP

SEQ ID NO: 15987 - protein, 85 aa, Homo sapiens
KRTNGVGGSWGVFSSGESPAIVPDKLSSFGASCLAPSHFTDGQWGLFPGEGQQAASHSGGRLRGKPWSPCKFGNSTSALAGPSLT

SEQ ID NO: 15988 - protein, 85 aa, Homo sapiens
EKPWALGAGDFNSALKGSPGFQDKLWNPMKGEEGRIPAAGASQLDRAWQSFGLPLGSSEKLFGALKSEEKLWDPFSLEEGPAEEP

SEQ ID NO: 15989 - protein, 85 aa, Homo sapiens
PSKGAVKEEKGGGGAEEEEEELWSDSEHNFLDENIGGVAVAPAHGSILIECARRELHATTPLKKPNRCHPTRISLVFYQHKNLNQ

SEQ ID NO: 15990 - protein, 85 aa, Homo sapiens
PNHGLALWEAKMKQLAERARARQEEAARLGLGQQEAKLYGKKRKWGGTVVAEPQQKEKKGVVPTRQALAVPTDSAVTVSSYAYTK

SEQ ID NO: 15991 - protein, 85 aa, Homo sapiens
LRGGGDGRKKRKRCGTCEPCRRLENCGACTSCTNRRTHQICKLRKCEVLKKKVGLLKEVEIKAGEGAGPWGQGAAVKTGSELSPV

SEQ ID NO: 15992 - protein, 85 aa, Homo sapiens
DGPVPGQMDSGPVYHGDSRQLSASGVPVNGAREPAGPSLLGTGGPWRVDQKPDWEAAPGPAHTARLEDAHDLVAFSAVAEAVSSY

SEQ ID NO: 15993 - protein, 85 aa, Homo sapiens
GALSTRLYETFNREMSREAGNNSRGPRPGPEGCSAGSEDLDTLQTALALARHGMKPPNCNCDGPECPDYLEWLEGKIKSVVMEGG

SEQ ID NO: 15994 - protein, 85 aa, Homo sapiens
EERPRLPGPLPPGEAGLPAPSTRPLLSSEVPQISPQEGLPLSQSALSIAKEKNISLQTAIAIEALTQLSSALPQPSHSTPQASCP

SEQ ID NO: 15995 - protein, 85 aa, Homo sapiens
LPEALSPPAPFRSPQSYLRAPSWPVVPPEEHSSFAPDSSAFPPATPRTEFPEAWGTDTPPATPRSSWPMPRPSPDPMAELEQLLG

SEQ ID NO: 15996 - protein, 85 aa, Homo sapiens
SASDYIQSVFKRPEALPTKPKVKVEAPSSSPAPAPSPVLQREAPTPSSEPDTHQKAQTALQQHLHHKRSLFLEQVHDTSFPAPSE

SEQ ID NO: 15997 - protein, 85 aa, Homo sapiens
PSAPGWWPPPSSPVPRLPDRPPKEKKKKLPTPAGGPVGTEKAAPGIKPSVRKPIQIKKSRPREAQPLFPPVRQIVLEGLRSPASQ

SEQ ID NO: 15998 - protein, 85 aa, Homo sapiens
EVQAHPPAPLPASQGSAVPLPPEPSLALFAPSPSRDSLLPPTQEMRSPSPMTALQPGSTGPLPPADDKLEELIRQFEAEFGDSFG

SEQ ID NO: 15999 - protein, 85 aa, Homo sapiens
LPGPPSVPIQDPENQQTCLPAPESPFATRSPKQIKIESSGAVTVLSTTCFHSEEGGQEATPTKAENPLTPTLSGFLESPLKYLDT

SEQ ID NO: 16000 - protein, 85 aa, Homo sapiens
PTKSLLDTPAKRAQAEFPTCDCVEQIVEKDEGPYYTHLGSGPTVASIRELMEERYGEKGKAIRIEKVIYTGKEGKSSRGCPIAKW

SEQ ID NO: 16001 - protein, 85 aa, Homo sapiens
VIRRHTLEEKLLCLVRHRAGHHCQNAVIVILILAWEGIPRSLGDTLYQELTDTLRKYGNPTSRRCGLNDDRTCACQGKDPNTCGA

SEQ ID NO: 16002 - protein, 85 aa, Homo sapiens
SFSFGCSWSMYFNGCKYARSKTPRKFRLAGDNPKEEEVLRKSFQDLATEVAPLYKRLAPQAYQNQVTNEEIAIDCRLGLKEGRPF

SEQ ID NO: 16003 - protein, 85 aa, Homo sapiens
AGVTACMDFCAHAHKDQHNLYNGCTVVCTLTKEDNRCVGKIPEDEQLHVLPLYKMANTDEFGSEENQNAKVGSGAIQVLTAFPRE

SEQ ID NO: 16004 - protein, 85 aa, Homo sapiens
VRRLPEPAKSCRQRQLEARKAAAEKKKIQKEKLSTPEKIKQEALELAGITSDPGLSLKGGLSQQGLKPSLKVEPQNHFSSFKYSG

SEQ ID NO: 16005 - protein, 85 aa, Homo sapiens
NAVVESYSVLGNCRPSDPYSMNSVYSYHSYYAQPSLTSVNGFHSKYALPSFSYYGFPSSNPVFPSQFLGPGAWGHSGSSGSFEKK

SEQ ID NO: 16006 - protein, 85 aa, Homo sapiens
PDLHALHNSLSPAYGGAEFAELPSQAVPTDAHHPTPHHQQPAYPGPKEYLLPKAPLLHSVSRDPSPFAQSSNCYNRSIKQEPVDP

SEQ ID NO: 16007 - protein, 85 aa, Homo sapiens
MTQAEPVPRDAGKMGKTPLSEVSQNGGPSHLWGQYSGGPSMSPKRTNGVGGSWGVFSSGESPAIVPDKLSSFGASCLAPSHFTDG

SEQ ID NO: 16008 - protein, 85 aa, Homo sapiens
QWGLFPGEGQQAASHSGGRLRGKPWSPCKFGNSTSALAGPSLTEKPWALGAGDFNSALKGSPGFQDKLWNPMKGEEGRIPAAGAS

SEQ ID NO: 16009 - protein, 85 aa, Homo sapiens
QLDRAWQSFGLPLGSSEKLFGALKSEEKLWDPFSLEEGPAEEPPSKGAVKEEKGGGGAEEEEEELWSDSEHNFLDENIGGVAVAP

SEQ ID NO: 16010 - protein, 85 aa, Homo sapiens
AHGSILIECARRELHATTPLKKPNRCHPTRISLVFYQHKNLNQPNHGLALWEAKMKQLAERARARQEEAARLGLGQQEAKLYGKK

SEQ ID NO: 16011 - protein, 84 aa, Homo sapiens
GASELLPNGDLEKRSEPQPEEGSPAGGQKGGAPAEGEGAAETLPEASRAVENGCCTPKEGRGAPAEAGESSAPGAASSGPTSIP

SEQ ID NO: 16012 - protein, 85 aa, Homo sapiens
DLPVGPGAAGPSNVPAFLTKLWTLVSDPDTDALICWSPSGNSFHVFDQGQFAKEVLPKYFKHNNMASFVRQLNMYGFRKVVHIEQ

SEQ ID NO: 16013 - protein, 85 aa, Homo sapiens
GGLVKPERDDTEFQHPCFLRGQEQLLENIKRKVTSVSTLKSEDIKIRQDSVTKLLTDVQLMKGKQECMDSKLLAMKHENEALWRE

SEQ ID NO: 16014 - protein, 85 aa, Homo sapiens
VASLRQKHAQQQKVVNKLIQFLISLVQSNRILGVKRKIPLMLNDSGSAHSMPKYSRQFSLEHVHGSGPYSAPSPAYSSSSLYAPD

SEQ ID NO: 16015 - protein, 85 aa, Homo sapiens
AVASSGPIISDITELAPASPMASPGGSIDERPLSSSPLVRVKEEPPSPPQSPRVEEASPGRPSSVDTLLSPTALIDSILRESEPA

SEQ ID NO: 16016 - protein, 85 aa, Homo sapiens
PASVTALTDARGHTDTEGRPPSPPPTSTPEKCLSVACLDNLARTPQMSRVARLFPCPSSSPHGQVQPGNELSDHLDAMDSNLDNL

SEQ ID NO: 16017 - protein, 84 aa, Homo sapiens
LSDHLDAMDSNLDNLQTMLSSHGFSVDTSALLDIQELLSPQEPPRPPEAENSSPDSAGALHSAAAVPAGPRLRGHREQRPAGAV

SEQ ID NO: 16018 - protein, 85 aa, Homo sapiens
FHVFDQGQFAKEVLPKYFKHNNMASFVRQLNMYGFRKVVHIEQGGLVKPERDDTEFQHPCFLRGQEQLLENIKRKVTSVSTLKSE

SEQ ID NO: 16019 - protein, 85 aa, Homo sapiens
DIKIRQDSVTKLLTDVQLMKGKQECMDSKLLAMKHENEALWREVASLRQKHAQQQKVVNKLIQFLISLVQSNRILGVKRKIPLML

SEQ ID NO: 16020 - protein, 85 aa, Homo sapiens
NDSGSAHSMPKYSRQFSLEHVHGSGPYSAPSPAYSSSSLYAPDAVASSGPIISDITELAPASPMASPGGSIDERPLSSSPLVRVK

SEQ ID NO: 16021 - protein, 85 aa, Homo sapiens
EEPPSPPQSPRVEEASPGRPSSVDTLLSPTALIDSILRESEPAPASVTALTDARGHTDTEGRPPSPPPTSTPEKCLSVACLDNLA

SEQ ID NO: 16022 - protein, 85 aa, Homo sapiens
RTPQMSRVARLFPCPSSSPHGQVQPGNELSDHLDAMDSNLDNLQTMLSSHGFSVDTSALLDIQELLSPQEPPRPPEAENSSPDSA

SEQ ID NO: 16023 - protein, 85 aa, Homo sapiens
SGQAGGLQDDSSGGYGDGQASGVEGAAFQSRLPHDRMTSQEAACFPDIISGPQQTQKVFLFIRNRTLQLWLDNPKIQLTFEATLQ

SEQ ID NO: 16024 - protein, 85 aa, Homo sapiens
QLEAPYNSDTVLVHRVHSYLERHGLINFGIYKRIKPLPTKKTGKVIIIGSGVSGLAAARQLQSFGMDVTLLEARDRVGGRVATFR

SEQ ID NO: 16025 - protein, 85 aa, Homo sapiens
KGNYVADLGAMVVTGLGGNPMAVVSKQVNMELAKIKQKCPLYEANGQADTVKVPKEKDEMVEQEFNRLLEATSYLSHQLDFNVLN

SEQ ID NO: 16026 - protein, 85 aa, Homo sapiens
NKPVSLGQALEVVIQLQEKHVKDEQIEHWKKIVKTQEELKELLNKMVNLKEKIKELHQQYKEASEVKPPRDITAEFLVKSKHRDL

SEQ ID NO: 16027 - protein, 85 aa, Homo sapiens
TALCKEYDELAETQGKLEEKLQELEANPPSDVYLSSRDRQILDWHFANLEFANATPLSTLSLKHWDQDDDFEFTGSHLTVRNGYS

SEQ ID NO: 16028 - protein, 85 aa, Homo sapiens
CVPVALAEGLDIKLNTAVRQVRYTASGCEVIAVNTRSTSQTFIYKCDAVLCTLPLGVLKQQPPAVQFVPPLPEWKTSAVQRMGFG

SEQ ID NO: 16029 - protein, 85 aa, Homo sapiens
NLNKVVLCFDRVFWDPSVNLFGHVGSTTASRGELFLFWNLYKAPILLALVAGEAAGIMENISDDVIVGRCLAILKGIFGSSAVPQ

SEQ ID NO: 16030 - protein, 85 aa, Homo sapiens
PKETVVSRWRADPWARGSYSYVAAGSSGNDYDLMAQPITPGPSIPGAPQPIPRLFFAGEHTIRNYPATVHGALLSGLREAGRIAD

SEQ ID NO: 16031 - protein, 85 aa, Homo sapiens
NLSEDEYYSEEERNAKAEKEKKLPPPPPQAPPEEENESEPEEPSGQAGGLQDDSSGGYGDGQASGVEGAAFQSRLPHDRMTSQEA

SEQ ID NO: 16032 - protein, 85 aa, Homo sapiens
ACFPDIISGPQQTQKVFLFIRNRTLQLWLDNPKIQLTFEATLQQLEAPYNSDTVLVHRVHSYLERHGLINFGIYKRIKPLPTKKT

SEQ ID NO: 16033 - protein, 85 aa, Homo sapiens
GKVIIIGSGVSGLAAARQLQSFGMDVTLLEARDRVGGRVATFRKGNYVADLGAMVVTGLGGNPMAVVSKQVNMELAKIKQKCPLY

SEQ ID NO: 16034 - protein, 85 aa, Homo sapiens
EANGQADTVKVPKEKDEMVEQEFNRLLEATSYLSHQLDFNVLNNKPVSLGQALEVVIQLQEKHVKDEQIEHWKKIVKTQEELKEL

SEQ ID NO: 16035 - protein, 85 aa, Homo sapiens
LNKMVNLKEKIKELHQQYKEASEVKPPRDITAEFLVKSKHRDLTALCKEYDELAETQGKLEEKLQELEANPPSDVYLSSRDRQIL

SEQ ID NO: 16036 - protein, 85 aa, Homo sapiens
DWHFANLEFANATPLSTLSLKHWDQDDDFEFTGSHLTVRNGYSCVPVALAEGLDIKLNTAVRQVRYTASGCEVIAVNTRSTSQTF

SEQ ID NO: 16037 - protein, 85 aa, Homo sapiens
IYKCDAVLCTLPLGVLKQQPPAVQFVPPLPEWKTSAVQRMGFGNLNKVVLCFDRVFWDPSVNLFGHVGSTTASRGELFLFWNLYK

SEQ ID NO: 16038 - protein, 85 aa, Homo sapiens
APILLALVAGEAAGIMENISDDVIVGRCLAILKGIFGSSAVPQPKETVVSRWRADPWARGSYSYVAAGSSGNDYDLMAQPITPGP

SEQ ID NO: 16039 - protein, 85 aa, Homo sapiens
PEASASPKQRRSIIRDRGPMYDDPTLPEGWTRKLKQRKSGRSAGKYDVYLINPQGKAFRSKVELIAYFEKVGDTSLDPNDFDFTV

SEQ ID NO: 16040 - protein, 85 aa, Homo sapiens
TGRGSPSRREQKPPKKPKSPKAPGTGRGRGRPKGSGTTRPKAATSEGVQVKRVLEKSPGKLLVKMPFQTSPGGKAEGGGATTSTQ

SEQ ID NO: 16041 - protein, 85 aa, Homo sapiens
VMVIKRPGRKRKAEADPQAIPKKRGRKPGSVVAAAAAEAKKKAVKESSIRSVQETVLPIKKRKTRETVSIEVKEVVKPLLVSTLG

SEQ ID NO: 16042 - protein, 85 aa, Homo sapiens
EKSGKGLKTCKSPGRKSKESSPKGRSSSASSPPKKEHHHHHHHSESPKAPVPLLPPLPPPPPEPESSEDPTSPPEPQDLSSSVCK

SEQ ID NO: 16043 - protein, 85 aa, Homo sapiens
AGKYDVYLINPQGKAFRSKVELIAYFEKVGDTSLDPNDFDFTVTGRGSPSRREQKPPKKPKSPKAPGTGRGRGRPKGSGTTRPKA

SEQ ID NO: 16044 - protein, 85 aa, Homo sapiens
ATSEGVQVKRVLEKSPGKLLVKMPFQTSPGGKAEGGGATTSTQVMVIKRPGRKRKAEADPQAIPKKRGRKPGSVVAAAAAEAKKK

SEQ ID NO: 16045 - protein, 85 aa, Homo sapiens
AVKESSIRSVQETVLPIKKRKTRETVSIEVKEVVKPLLVSTLGEKSGKGLKTCKSPGRKSKESSPKGRSSSASSPPKKEHHHHHH

SEQ ID NO: 16046 - protein, 85 aa, Homo sapiens
HSESPKAPVPLLPPLPPPPPEPESSEDPTSPPEPQDLSSSVCKEEKMPRGGSLESDGCPKEPAKTQPAVATAATAAEKYKHRGEG

SEQ ID NO: 16047 - protein, 85 aa, Homo sapiens
IIRDRGPMYDDPTLPEGWTRKLKQRKSGRSAGKYDVYLINPQGKAFRSKVELIAYFEKLQELAEAGDAPKGAAPRDPRRPRQRVC

SEQ ID NO: 16048 - protein, 85 aa, Homo sapiens
MTSSLNQFGQMSMAQPPIVPRQTPPLQHHGQLAQPGALNPPMGYGPRMQQPSNQGQFLPQTQFPSQGMNVTNIPLAPSSGQAPVS

SEQ ID NO: 16049 - protein, 85 aa, Homo sapiens
QAQMSSSSCPVNSPIMPPGSQGSHIHCPQLPQPALHQNSPSPVPSRTPTPHHTPPSIGAQQPPATTIPAPVPTPPAMPPGPQSQA

SEQ ID NO: 16050 - protein, 85 aa, Homo sapiens
LHPPPRQTPTPPTTQLPQQVQPSLPAAPSADQPQQQPRSQQSTAASVPTPTAPLLPPQPATPLSQPAVSIEGQVSNPPSTSSTEV

SEQ ID NO: 16051 - protein, 85 aa, Homo sapiens
NSQAIAEKQPSQEVKMEAKMEVDQPEPADTQPEDISESKVEDCKMESTETEERSTELKTEIKEEEDQPSTSATQSSPAPGQSKKK

SEQ ID NO: 16052 - protein, 85 aa, Homo sapiens
IFKPEELRQALMPTLEALYRQDPESLPFRQPVDPQLLGIPDYFDIVKSPMDLSTIKRKLDTGQYQEPWQYVDDIWLMFNNAWLYN

SEQ ID NO: 16053 - protein, 85 aa, Homo sapiens
RKTSRVYKYCSKLSEVFEQEIDPVMQSLGYCCGRKLEFSPQTLCCYGKQLCTIPRDATYYSYQNRYHFCEKCFNEIQGESVSLGD

SEQ ID NO: 16054 - protein, 85 aa, Homo sapiens
DPSQPQTTINKEQFSKRKNDTLDPELFVECTECGRKMHQICVLHHEIIWPAGFVCDGCLKKSARTRKENKFSAKRLPSTRLGTFL

SEQ ID NO: 16055 - protein, 85 aa, Homo sapiens
ENRVNDFLRRQNHPESGEVTVRVVHASDKTVEVKPGMKARFVDSGEMAESFPYRTKALFAFEEIDGVDLCFFGMHVQEYGSDCPP

SEQ ID NO: 16056 - protein, 85 aa, Homo sapiens
PNQRRVYISYLDSVHFFRPKCLRTAVYHEILIGYLEYVKKLGYTTGHIWACPPSEGDDYIFHCHPPDQKIPKPKRLQEWYKKMLD

SEQ ID NO: 16057 - protein, 85 aa, Homo sapiens
KAVSERIVHDYKDIFKQATEDRLTSAKELPYFEGDFWPNVLEESIKELEQEEEERKREENTSNESTDVTKGDSKNAKKKNNKKTS

SEQ ID NO: 16058 - protein, 85 aa, Homo sapiens
KNKSSLSRGNKKKPGMPNVSNDLSQKLYATMEKHKEVFFVIRLIAGPAANSLPPIVDPDPLIPCDLMDGRDAFLTLARDKHLEFS

SEQ ID NO: 16059 - protein, 85 aa, Homo sapiens
SLRRAQWSTMCMLVELHTQSQDRFVYTCNECKHHVETRWHCTVCEDYDLCITCYNTKNHDHKMEKLGLGLDDESNNQQAAATQSP

SEQ ID NO: 16060 - protein, 85 aa, Homo sapiens
GDSRRLSIQRCIQSLVHACQCRNANCSLPSCQKMKRVVQHTKGCKRKTNGGCPICKQLIALCCYHAKHCQENKCPVPFCLNIKQK

SEQ ID NO: 16061 - protein, 85 aa, Homo sapiens
LRQQQLQHRLQQAQMLRRRMASMQRTGVVGQQQGLPSPTPATPTTPTGQQPTTPQTPQPTSQPQPTPPNSMPPYLPRTQAAGPVS

SEQ ID NO: 16062 - protein, 85 aa, Homo sapiens
QGKAAGQVTPPTPPQTAQPPLPGPPPAAVEMAMQIQRAAETQRQMAHVQIFQRPIQHQMPPMTPMAPMGMNPPPMTRGPSGHLEP

SEQ ID NO: 16063 - protein, 85 aa, Homo sapiens
GMGPTGMQQQPPWSQGGLPQPQQLQSGMPRPAMMSVAQHGQPLNMAPQPGLGQVGISPLKPGTVSQQALQNLLRTLRSPSSPLQQ

SEQ ID NO: 16064 - protein, 85 aa, Homo sapiens
QQVLSILHANPQLLAAFIKQRAAKYANSNPQPIPGQPGMPQGQPGLQPPTMPGQQGVHSNPAMQNMNPMQAGVQRAGLPQQQPQQ

SEQ ID NO: 16065 - protein, 85 aa, Homo sapiens
QLQPPMGGMSPQAQQMNMNHNTMPSQFRDILRRQQMMQQQQQQGAGPGIGPGMANHNQFQQPQGVGYPPQQQQRMQHHMQQMQQG

SEQ ID NO: 16066 - protein, 85 aa, Homo sapiens
NMGQIGQLPQALGAEAGASLQAYQQRLLQQQMGSPVQPNPMSPQQHMLPNQAQSPHLQGQQIPNSLSNQVRSPQPVPSPRPQSQP

SEQ ID NO: 16067 - protein, 85 aa, Homo sapiens
PHSSPSPRMQPQPSPHHVSPQTSSPHPGLVAAQANPMEQGHFASPDQNSMLSQLASNPGMANLHGASATDLGLSTDNSDLNSNLS

SEQ ID NO: 16068 - protein, 85 aa, Homo sapiens
KIQKELEEKRRTRLQKQNMLPNAAGMVPVSMNPGPNMGQPQPGMTSSLNQFGQMSMAQPPIVPRQTPPLQHHGQLAQPGALNPPM

SEQ ID NO: 16069 - protein, 85 aa, Homo sapiens
GYGPRMQQPSNQGQFLPQTQFPSQGMNVTNIPLAPSSGQAPVSQAQMSSSSCPVNSPIMPPGSQGSHIHCPQLPQPALHQNSPSP

SEQ ID NO: 16070 - protein, 85 aa, Homo sapiens
VPSRTPTPHHTPPSIGAQQPPATTIPAPVPTPPAMPPGPQSQALHPPPRQTPTPPTTQLPQQVQPSLPAAPSADQPQQQPRSQQS

SEQ ID NO: 16071 - protein, 85 aa, Homo sapiens
TAASVPTPTAPLLPPQPATPLSQPAVSIEGQVSNPPSTSSTEVNSQAIAEKQPSQEVKMEAKMEVDQPEPADTQPEDISESKVED

SEQ ID NO: 16072 - protein, 85 aa, Homo sapiens
CKMESTETEERSTELKTEIKEEEDQPSTSATQSSPAPGQSKKKIFKPEELRQALMPTLEALYRQDPESLPFRQPVDPQLLGIPDY

SEQ ID NO: 16073 - protein, 85 aa, Homo sapiens
FDIVKSPMDLSTIKRKLDTGQYQEPWQYVDDIWLMFNNAWLYNRKTSRVYKYCSKLSEVFEQEIDPVMQSLGYCCGRKLEFSPQT

SEQ ID NO: 16074 - protein, 85 aa, Homo sapiens
MCCYGKQLCTIPRDATYYSYQNRYHFCEKCFNEIQGESVSLGDDPSQPQTTINKEQFSKRKNDTLDPELFVECTECGRKMHQICV

SEQ ID NO: 16075 - protein, 85 aa, Homo sapiens
LHHEIIWPAGFVCDGCLKKSARTRKENKFSAKRLPSTRLGTFLENRVNDFLRRQNHPESGEVTVRVVHASDKTVEVKPGMKARFV

SEQ ID NO: 16076 - protein, 85 aa, Homo sapiens
DSGEMAESFPYRTKALFAFEEIDGVDLCFFGMHVQEYGSDCPPPNQRRVYISYLDSVHFFRPKCLRTAVYHEILIGYLEYVKKLG

SEQ ID NO: 16077 - protein, 85 aa, Homo sapiens
YTTGHIWACPPSEGDDYIFHCHPPDQKIPKPKRLQEWYKKMLDKAVSERIVHDYKDIFKQATEDRLTSAKELPYFEGDFWPNVLE

SEQ ID NO: 16078 - protein, 85 aa, Homo sapiens
ESIKELEQEEEERKREENTSNESTDVTKGDSKNAKKKNNKKTSKNKSSLSRGNKKKPGMPNVSNDLSQKLYATMEKHKEVFFVIR

SEQ ID NO: 16079 - protein, 85 aa, Homo sapiens
LIAGPAANSLPPIVDPDPLIPCDLMDGRDAFLTLARDKHLEFSSLRRAQWSTMCMLVELHTQSQDRFVYTCNECKHHVETRWHCT

SEQ ID NO: 16080 - protein, 85 aa, Homo sapiens
VCEDYDLCITCYNTKNHDHKMEKLGLGLDDESNNQQAAATQSPGDSRRLSIQRCIQSLVHACQCRNANCSLPSCQKMKRVVQHTK

SEQ ID NO: 16081 - protein, 85 aa, Homo sapiens
GCKRKTNGGCPICKQLIALCCYHAKHCQENKCPVPFCLNIKQKLRQQQLQHRLQQAQMLRRRMASMQRTGVVGQQQGLPSPTPAT

SEQ ID NO: 16082 - protein, 85 aa, Homo sapiens
PTTPTGQQPTTPQTPQPTSQPQPTPPNSMPPYLPRTQAAGPVSQGKAAGQVTPPTPPQTAQPPLPGPPPAAVEMAMQIQRAAETQ

SEQ ID NO: 16083 - protein, 85 aa, Homo sapiens
RQMAHVQIFQRPIQHQMPPMTPMAPMGMNPPPMTRGPSGHLEPGMGPTGMQQQPPWSQGGLPQPQQLQSGMPRPAMMSVAQHGQP

SEQ ID NO: 16084 - protein, 85 aa, Homo sapiens
MNMAPQPGLGQVGISPLKPGTVSQQALQNLLRTLRSPSSPLQQQQVLSILHANPQLLAAFIKQRAAKYANSNPQPIPGQPGMPQG

SEQ ID NO: 16085 - protein, 85 aa, Homo sapiens
QPGLQPPTMPGQQGVHSNPAMQNMNPMQAGVQRAGLPQQQPQQQLQPPMGGMSPQAQQMNMNHNTMPSQFRDILRRQQMMQQQQQ

SEQ ID NO: 16086 - protein, 85 aa, Homo sapiens
QGAGPGIGPGMANHNQFQQPQGVGYPPQQQQRMQHHMQQMQQGNMGQIGQLPQALGAEAGASLQAYQQRLLQQQMGSPVQPNPMS

SEQ ID NO: 16087 - protein, 85 aa, Homo sapiens
PQQHMLPNQAQSPHLQGQQIPNSLSNQVRSPQPVPSPRPQSQPPHSSPSPRMQPQPSPHHVSPQTSSPHPGLVAAQANPMEQGHF

SEQ ID NO: 16088 - protein, 85 aa, Homo sapiens
GQTGKKSEKGPVCWRKRVKSEYMRLRQLKRFRRADEVKSMFSSNRQKILERTEILNQEWKQRRIQPVHILTSVSSLRGTREAIHL

SEQ ID NO: 16089 - protein, 84 aa, Homo sapiens
KQRRIQPVHILTSVSSLRGTREAIHLLFPLRFSITQFLLGTSLLPRVSVWLCTPTTTIFGLTSLSSSQWSSHTVAYCTSWLIVR

SEQ ID NO: 16090 - protein, 85 aa, Homo sapiens
SNRQKILERTEILNQEWKQRRIQPVHILTSVSSLRGTREAIHLLFPLRFSITQFLLGTSLLPRVSVWLCTPTTTIFGLTSLSSSQ

SEQ ID NO: 16091 - protein, 85 aa, Homo sapiens
SWYLFQFHRLLQYARPKPGSPRPFFWMFVDNLVLNKEDLDVASRFLEMEPVTIPDVHGGSLQNAVRVWSNIPAIRSRHWALVSEE

SEQ ID NO: 16092 - protein, 84 aa, Homo sapiens
EMEPVTIPDVHGGSLQNAVRVWSNIPAIRSRHWALVSEEELSLLAQNKQSSKLAAKWPTKLVKNCFLPLREYFKYFSTELTSSL

SEQ ID NO: 16093 - protein, 85 aa, Homo sapiens
SRFLEMEPVTIPDVHGGSLQNAVRVWSNIPAIRSRHWALVSEEELSLLAQNKQSSKLAAKWPTKLVKNCFLPLREYFKYFSTELT

SEQ ID NO: 16094 - protein, 85 aa, Homo sapiens
PTQPQVQAKNQQNQQPGQSPQGMRPMSNMSASPMGVNGGVGVQTPSLLSDSMLHSAINSQNVQAIFPTPDPAALKDRRMENLVAY

SEQ ID NO: 16095 - protein, 85 aa, Homo sapiens
ARKVEGDMYESANNRAEYYHLLAEKIYKIQKELEEKRRTRLQKQNMLPNAAGMVPVSMNPGPNMGQPQPGMTSNGPLPDPSMIRG

SEQ ID NO: 16096 - protein, 85 aa, Homo sapiens
NNRAEYYHLLAEKIYKIQKELEEKRRTRLQKQNMLPNAAGMVPVSMNPGPNMGQPQPGMTSNGPLPDPSMIRGSVPNQMMPRITP

SEQ ID NO: 16097 - protein, 85 aa, Homo sapiens
QTPSLLSDSMLHSAINSQNVQAIFPTPDPAALKDRRMENLVAYARKVEGDMYESANNRAEYYHLLAEKIYKIQKELEEKRRTRLQ

SEQ ID NO: 16098 - protein, 85 aa, Homo sapiens
QTEPLATKLQNGSPLPERAHPEVNGDTKWHSFKSYYGIPCMKGSQNSRVSPDFTQESRGYSKCLQNGGIKRTVSEPSLSGLLQIK

SEQ ID NO: 16099 - protein, 85 aa, Homo sapiens
IQEEQIQLEGSLVDGPEASLMEQDRTNHVEGNRLSPFLIPSPPICQTEPLATKLQNGSPLPERAHPEVNGDTKWHSFKSYYGIPC

SEQ ID NO: 16100 - protein, 85 aa, Homo sapiens
MKGSQNSRVSPDFTQESRGYSKCLQNGGIKRTVSEPSLSGLLQIKKLKQDQKANGERRNFGVSQERNPGESSQPNVSDLSDKKES

SEQ ID NO: 16101 - protein, 85 aa, Homo sapiens
VSSVAQENAVKDFTSFSTHNCSGPENPELQILNEQEGKSANYHDKNIVLLKNKAVLMPNGATVSASSVEHTHGELLEKTLSQYYP

SEQ ID NO: 16102 - protein, 85 aa, Homo sapiens
DCVSIAVQKTTSHINAINSQATNELSCEITHPSHTSGQINSAQTSNSELPPKPAAVVSEACDADDADNASKLAAMLNTCSFQKPE

SEQ ID NO: 16103 - protein, 85 aa, Homo sapiens
QLQQQKSVFEICPSPAENNIQGTTKLASGEEFCSGSSSNLQAPGGSSERYLKQNEMNGAYFKQSSVFTKDSFSATTTPPPPSQLL

SEQ ID NO: 16104 - protein, 85 aa, Homo sapiens
LSPPPPLPQVPQLPSEGKSTLNGGVLEEHHHYPNQSNTTLLREVKIEGKPEAPPSQSPNPSTHVCSPSPMLSERPQNNCVNRNDI

SEQ ID NO: 16105 - protein, 85 aa, Homo sapiens
QTAGTMTVPLCSEKTRPMSEHLKHNPPIFGSSGELQDNCQQLMRNKEQEILKGRDKEQTRDLVPPTQHYLKPGWIELKAPRFHQA

SEQ ID NO: 16106 - protein, 85 aa, Homo sapiens
ESHLKRNEASLPSILQYQPNLSNQMTSKQYTGNSNMPGGLPRQAYTQKTTQLEHKSQMYQVEMNQGQSQGTVDQHLQFQKPSHQV

SEQ ID NO: 16107 - protein, 85 aa, Homo sapiens
HFSKTDHLPKAHVQSLCGTRFHFQQRADSQTEKLMSPVLKQHLNQQASETEPFSNSHLLQHKPHKQAAQTQPSQSSHLPQNQQQQ

SEQ ID NO: 16108 - protein, 85 aa, Homo sapiens
QKLQIKNKEEILQTFPHPQSNNDQQREGSFFGQTKVEECFHGENQYSKSSEFETHNVQMGLEEVQNINRRNSPYSQTMKSSACKI

(The sequence listing continues in the following parts.)
